United States Patent Application Publication US 2016/0078168 A1 - sequence listing, part 2

SEQ ID NO: 22464 - RNA, 79 nt, Homo sapiens
ccgcggcaacgcgcagcggagggacacggaccgaagggaaaacacacacaacaggcaaccaagaaaacacccaaaccag

SEQ ID NO: 22465 - RNA, 71 nt, Homo sapiens
cggccaagaaggacgacgcagccacagcgaggagcgaggaaaaagaccaaagaacagaaaacaccaacaca

SEQ ID NO: 22466 - RNA, 80 nt, Homo sapiens
gcaacaggcccacccccacagaacaagaaaccagcaccaacggccaaaagagccgaggaaggcaccaggagaggaggagg

SEQ ID NO: 22467 - RNA, 75 nt, Homo sapiens
cagccgagcccgcccgcgcgccggaggccaagcccgccaggccggccggcccagcgcccccacggagcagcaccc

SEQ ID NO: 22468 - RNA, 101 nt, Homo sapiens
gaaggagcagcagagagccgggccagagccaggggccgggagggcgccagacgagaaagaacagacggcagaggaagaggagagagaaggaagaacgagag

SEQ ID NO: 22469 - RNA, 56 nt, Homo sapiens
acgcccggaaagagcagccagcaagggaagaagaccggagacccgaaagaggaaga

SEQ ID NO: 22470 - RNA, 88 nt, Homo sapiens
cgccggcgcgcgaccgcgcaaaacgagacaccaggcgccgagaaggccagcagagaaacaggcaggagaggcccacaggcgcggacgg

SEQ ID NO: 22471 - RNA, 51 nt, Homo sapiens
cccaggaaacagcgcaagccacgaaaacgaagcaaggaaggaagcaaccag

SEQ ID NO: 22472 - RNA, 68 nt, Homo sapiens
ccacccagaggagcaacagacagaagacgaaaggcaagacaaccaaacacaacagcaagaaggccgag

SEQ ID NO: 22473 - RNA, 87 nt, Homo sapiens
ggggccgaggagcgggcacagggcaaggcggcggacggcgcgcgcccgaggcgaggaggagcgcggcgaaagcaccgggaggaaaga

SEQ ID NO: 22474 - RNA, 80 nt, Homo sapiens
cacacccggcgcggaggaggggggcgggccgagcacccgcaggccccgcagaggcgcccacagcggacggcaggccaggc

SEQ ID NO: 22475 - RNA, 80 nt, Homo sapiens
gacgacaccccggggaggcgaggagagagaaaccccacaagacgaagcagacgggcagaaaaccaggcgaagcaggccca

SEQ ID NO: 22476 - RNA, 72 nt, Homo sapiens
gcccagaaaggcgcgagagcacgcaccgaagcaaaaccaacgcaaccaccccaggaaagaccacagcaagac

SEQ ID NO: 22477 - RNA, 88 nt, Homo sapiens
ccacgccagggcccggcgcgcacgggcccagcgggacccgcgcccccggacggccacgagaccggacacaaccacgcaaggaagagcc

SEQ ID NO: 22478 - RNA, 64 nt, Homo sapiens
gagaggcggggagcagcgccgggagaaggaccacgcagggcgcgcacagacggccacagaagcc

SEQ ID NO: 22479 - RNA, 86 nt, Homo sapiens
agcggccggaggacagcgggagagagaagagccagagggacacgcgggcacggccggagggcaggccggaaggaccaggcagggag

SEQ ID NO: 22480 - RNA, 88 nt, Homo sapiens
gggaaacagagaaaggacgaagacgcccgggaccgcaggccaggcagagcagcagcgcaggggaagcggaaagaacacccggaaagaa

SEQ ID NO: 22481 - RNA, 85 nt, Homo sapiens
caaaggagcagggaaaggcagacgccgggccaacgcgcaggagcgcgcaggcgccgaccccgacagaacgggccccgcacccgcg

SEQ ID NO: 22482 - RNA, 79 nt, Homo sapiens
aggccaacacggaggaaaaaggaggggaccgaggaacacccaacccggagccggggacggcacacgggcgggggcaacg

SEQ ID NO: 22483 - RNA, 73 nt, Homo sapiens
agaagggaacccacagaaaggagacgcaacaccaggcaccagcccgaagaagccgggcagaccaggcagcagc

SEQ ID NO: 22484 - RNA, 76 nt, Homo sapiens
gcgcccaaacaccaacacaaaagagaccggccagagcaagacaaaaagaccaacaaggaacgagaagacaggcaaa

SEQ ID NO: 22485 - RNA, 72 nt, Homo sapiens
ccagagacggcccgcggccggcgcgcagggaaccaagaccaggacaaagaagacccggagagacaagccgga

SEQ ID NO: 22486 - RNA, 72 nt, Homo sapiens
gcagaagccgaacacgacagaaagaaaggccaaagcagcagggaaagacaaggagccgggccgagaaaccga

SEQ ID NO: 22487 - RNA, 73 nt, Homo sapiens
aaagaggcgggagagggaggagcccagaccgggcgacccgccgcggacgaaagaaagaaggagcaccaacgca

SEQ ID NO: 22488 - RNA, 68 nt, Homo sapiens
agcaggaagcacggcgggcgaaacagacacagccaggaacgacaaccgcgccgagcgcaggcacccgc

SEQ ID NO: 22489 - RNA, 77 nt, Homo sapiens
gcacaaccacgcagggaagcccaggggcaggagcggcccaaagcaaggaccgaggcaagaagggaagaaaacagaaa

SEQ ID NO: 22490 - RNA, 83 nt, Homo sapiens
gcaaaaacaagacggggcgccccacagaggggcgacggacggaggggggaggagcaggcccccaccgcgacccacaacccgaa

SEQ ID NO: 22491 - RNA, 111 nt, Homo sapiens
aaaaacggaaacacgacagaagcagggcgaaccagagaaaacggcaaggaagcggcaggacccgaggcgccagcagcagcaagaccgggggaccaggcgaacgaggcaggc

SEQ ID NO: 22492 - RNA, 79 nt, Homo sapiens
cccggcccacgcgcgcacggcagccagcgcaagaggcgggcagcacgcgggagcgaggcggccagggccccagaagcaa

SEQ ID NO: 22493 - RNA, 87 nt, Homo sapiens
agagcgggccgcgcgggagccgcagggcgcccagcccgcagaaacgaggcggaggaagaaggagaagaaacgaggccggaagaaacc

SEQ ID NO: 22494 - RNA, 77 nt, Homo sapiens
gccgcgccaacgcgagcggcgacggcggcaccccgccaggaagaggcggcggcggaggagccccgcagcagagcgcc

SEQ ID NO: 22495 - RNA, 73 nt, Homo sapiens
aaaccccgcaacccgcagacacagcacgcccgggaagaacaggagaggagacgcggccacaaacaaacccgcc

SEQ ID NO: 22496 - RNA, 97 nt, Homo sapiens
aaaaagacaaaacaaggaaaaaaaagacaaggaaacgcccgcgggacacggaaacccaccagagaaggcgcggccacccaggacccgggggaggcag

SEQ ID NO: 22497 - RNA, 78 nt, Homo sapiens
cccccacaaacggccgggaggccgcagcggagacgagggcggcgggagacccccgaccggcagcagcgccccggagcg

SEQ ID NO: 22498 - RNA, 78 nt, Homo sapiens
ggaggaggcccgcagaaagaggacaggggaccagaagaccagaacgagccaaggggaaccaggcggccagggcgaggg

SEQ ID NO: 22499 - RNA, 81 nt, Homo sapiens
gcgagcgcccggccgaacccgcgaggaaaagcccagcggcccgccaggcccggagagcgcgcgccgcgcgcccgcacaaac

SEQ ID NO: 22500 - RNA, 51 nt, Homo sapiens
ccggccgacacaaacagggaaccaggagggaagcagaggaaccagaggaaa

SEQ ID NO: 22501 - RNA, 68 nt, Homo sapiens
aacaaagcccgaacagcagcagcgcgagcgacaacgggacgggaaaccggaagccgcagaaggaccgg

SEQ ID NO: 22502 - RNA, 69 nt, Homo sapiens
ccagggcaacccccgcgggcccgggcagcccccacagagcgcaacccaaagccccagcacagccacagc

SEQ ID NO: 22503 - RNA, 74 nt, Homo sapiens
cgcgccgggagaccgcggaggccgacaggacgggcgccgccccgcgcggcaggggcagaacgggaaggggcagg

SEQ ID NO: 22504 - RNA, 74 nt, Homo sapiens
gcccggcgggccggggccggagcccagggccggggaaccccgcgcccgcacagggaacaccagaggcgggacca

SEQ ID NO: 22505 - RNA, 59 nt, Homo sapiens
gcgaaggaaaagagcaaacacggaaaggaacaaacggcggaaaacccgaagcagaagcc

SEQ ID NO: 22506 - RNA, 74 nt, Homo sapiens
agggaagaagacggcgaagcaccaacgccaagggggcacccgaggaggaagagggcagggcccacggaaagaag

SEQ ID NO: 22507 - RNA, 85 nt, Homo sapiens
agagggggaaaccaagaccccaggacaacaaggaggcagaagagacaacacagaaaccagggcggaggcaggaacagcagcaaaa

SEQ ID NO: 22508 - RNA, 86 nt, Homo sapiens
gcagaccccgggcagcaggccacgacgagacaagccccaggagcaccaccaacccgcccgaccggccgcagcacagagcccgcacc

SEQ ID NO: 22509 - RNA, 76 nt, Homo sapiens
agggccacgcgcccccagaggagaagacccgacggaccccagcgccgggcagcgaaagagcaccgccagaacacag

SEQ ID NO: 22510 - RNA, 68 nt, Homo sapiens
ggaaacagccacagcaggagcaaaagaagagcagagcacaggaagacccaggaagaagcacagaggaa

SEQ ID NO: 22511 - RNA, 39 nt, Homo sapiens
aggaagcaaaagccccagaacggacgcggaaagcaaaac

SEQ ID NO: 22512 - RNA, 71 nt, Homo sapiens
gcggagcggcggcgcaccaaccgcgcgcaccgccgacccggaagaccgccgccgccgaccgagaagcccgg

SEQ ID NO: 22513 - RNA, 68 nt, Homo sapiens
aagccaaaggaagccaggccacgaaaaagagaaaaagccaacagaagagccgaaaacagacacgacca

SEQ ID NO: 22514 - RNA, 69 nt, Homo sapiens
cagagcaaccagagcacacgagagggccgggacaaggaagcgccagaggacccggcgccgacgcaagga

SEQ ID NO: 22515 - RNA, 77 nt, Homo sapiens
caagaggcgcaaacaagccaacccaggaggaaaaacgaggaagccccaggaccagcgggagcgggcacacacccacc

SEQ ID NO: 22516 - RNA, 65 nt, Homo sapiens
cgcgccccgccgcgagccgcgcggagccgcgcagccccggagcacgggcccaccggccccgggcc

SEQ ID NO: 22517 - RNA, 78 nt, Homo sapiens
ccgccccggccagggccgccccgggagcccgcgaggggccaccggaaaacccggacccaacccaacagggcgcggagg

SEQ ID NO: 22518 - RNA, 76 nt, Homo sapiens
aggagacgcccagggggccagaggggccgggggcgaggcagggcccgggcgagacaggcccgaaccccgcacccac

SEQ ID NO: 22519 - RNA, 39 nt, Homo sapiens
cgcagagggcggagcggcagggcagcaccccagaacacg

SEQ ID NO: 22520 - RNA, 77 nt, Homo sapiens
ggaaaggacgcgcggccgccagcggcagaacaccgcgagggagagaaccacccaggcaaagaagcagaacccaagaa

SEQ ID NO: 22521 - RNA, 69 nt, Homo sapiens
ccgaggaaaccacgacgggggagcccccacacgaggagacgagaaagccagaagagagcagaaaaacca

SEQ ID NO: 22522 - RNA, 85 nt, Homo sapiens
caaggcaagaccgaacagaaggaacgacgcggaccagaagccagagcgaggacgccggcagagaaacgcccaggccaaagaagag

SEQ ID NO: 22523 - RNA, 38 nt, Homo sapiens
ccgccaaagccgccgggcaagagcagcaaggcgaaccg

SEQ ID NO: 22524 - RNA, 79 nt, Homo sapiens
cgccggagcgcccccacgcagacgcgccgccccagccgcccccgacggaggagcagaaacccacagagcacaaaagaag

SEQ ID NO: 22525 - RNA, 58 nt, Homo sapiens
gccaaagaggaagcccaccacaaaaacgaaggcggcgggaccaagcagcaaacgcaga

SEQ ID NO: 22526 - RNA, 84 nt, Homo sapiens
gaacgaggagacgagacgaggccggcaacccacaggaggagaaagcaaggacccagagccacacgaacgccccgaccacagggc

SEQ ID NO: 22527 - RNA, 67 nt, Homo sapiens
agcggggcgacagacgacaagaggcgacgcgaaccggaagaaaggaaggggcaccacaagacacaaa

SEQ ID NO: 22528 - RNA, 120 nt, Homo sapiens
aacgcgccaggccagcaccaacggaaacacggaagccagagaaccggcgagcaccaagagccggagggacagggggcagcacggaaccacacagggccgccaccaacagagaagacagag

SEQ ID NO: 22529 - RNA, 70 nt, Homo sapiens
ccaccgcgccccaagaagaaaagccaaaaccaccccggacccaagccccagggaacccgagaaggccaac

SEQ ID NO: 22530 - RNA, 41 nt, Homo sapiens
ggcgggacgcggaagggcaaggcccgaaaagaaagcgaaca

SEQ ID NO: 22531 - RNA, 72 nt, Homo sapiens
cggacagccagcgagagggacacacgaacaagaacagacaggccgacaagaacagcaggaagcagaaggaaa

SEQ ID NO: 22532 - RNA, 80 nt, Homo sapiens
gcagacccgaaagaagacggaagccagcagaccgcagaacggccccgggacccacccaccaaaaccaacaggaagcaaaa

SEQ ID NO: 22533 - RNA, 73 nt, Homo sapiens
agcgggcaagaagcagcggacgggaagcacagggccaagacgacaggaccgcccaccagccggcacccagcca

SEQ ID NO: 22534 - RNA, 85 nt, Homo sapiens
ggcgggcaccagaacagcagcagcgccaacacaccacgccagcgcaagcggcggaagccgggcagaaaacggccaggccgccacg

SEQ ID NO: 22535 - RNA, 75 nt, Homo sapiens
cgcgagcagcggacgccggccgccgcaggaggagggagccacaccaaagccggacccccccagccggaccggacc

SEQ ID NO: 22536 - RNA, 74 nt, Homo sapiens
gagcccagccccgagggaggcagacaacaggcacaaagagagaaggaacacccacagggcagacagagaaagaa

SEQ ID NO: 22537 - RNA, 64 nt, Homo sapiens
gagcagcggaaggggcccagcagacgcaaagacgcaagaggccaggcgagcaacaggagacgcc

SEQ ID NO: 22538 - RNA, 48 nt, Homo sapiens
caggagccaccaacaccaaaaaggaaaaaggaccaggcacagagcgca

SEQ ID NO: 22539 - RNA, 85 nt, Homo sapiens
gaggaggaggccacacagaaggacggcccgacggaaggagagaaggaaccggacgacgaacacaggcccgccgccgggccccaaa

SEQ ID NO: 22540 - RNA, 70 nt, Homo sapiens
caggaggaagacccgcagcgggacaagcgggcaagacaaaggggaggcaagcaggggggcaaaggaaaga

SEQ ID NO: 22541 - RNA, 75 nt, Homo sapiens
aagcgacccccaccacccagccccgagagcggaaccacaagcaccagcacgccggcaaaaggacagggcgaaccc

SEQ ID NO: 22542 - RNA, 68 nt, Homo sapiens
ccggaaaccagaacgggcagccagcaagcccaaacccaaaggggagagggggacaggggagcacgaca

SEQ ID NO: 22543 - RNA, 79 nt, Homo sapiens
aacaaaaacgccaaaaaacggagcaaagggcagcggcggagccgccaaggcggcgcagcggcagccagcacgagccccc

SEQ ID NO: 22544 - RNA, 76 nt, Homo sapiens
gaaaagagggaagacaacaagcagaagcaacaagagagacaagcccggggaggccacgcacgggacggccaaccaa

SEQ ID NO: 22545 - RNA, 86 nt, Homo sapiens
caggagaaaagacagcaaggaccgagccaaaagaaacccccaaaaccggaagaaagagaaggaacagaggacacgcacaccacaga

SEQ ID NO: 22546 - RNA, 70 nt, Homo sapiens
ggagcgggccaggccgggagggagagaagaccggggaaaggagacgcgccgagaaccacgcacggcgacc

SEQ ID NO: 22547 - RNA, 78 nt, Homo sapiens
aaaagcaaacaaaacaccaccgcagggggccccaggacccggacagacccaaaagggaaaaaggaaaaccagaagcca

SEQ ID NO: 22548 - RNA, 57 nt, Homo sapiens
agcggccgcgacgcaggcgcacggagacccgccggcaccaagcaggcaccaagcagc

SEQ ID NO: 22549 - RNA, 72 nt, Homo sapiens
gggaacgaccgaaacaccaggaagagaaaggcaggaacacacggacagagcgcaccgcccccgggaacaccc

SEQ ID NO: 22550 - RNA, 80 nt, Homo sapiens
gagacccggcgggaaggcaggcaaagccggcgacccgcacagccgcaccccaacccccagagcaccgcaacaccagccag

SEQ ID NO: 22551 - RNA, 71 nt, Homo sapiens
gcagaaacgcaccaggccaaagaaagagaaggcagagccagaaggagagccaagcgccagagaacaggagg

SEQ ID NO: 22552 - RNA, 81 nt, Homo sapiens
cggcccgcgcgcgcaccccgcggacgccacagcgcgagggccccaaggaccgagagccccagagcagagccaggcaagagg

SEQ ID NO: 22553 - RNA, 75 nt, Homo sapiens
gggaggggcgcacagcgccccaccccagaggcgcggagcgccccagggacccagccaagaagacacccagcggac

SEQ ID NO: 22554 - RNA, 71 nt, Homo sapiens
gcaaaaacaggagaccgcggccgaccagagaacagagggcaccaggcgcgaaggccacagcgaaccaaagc

SEQ ID NO: 22555 - RNA, 68 nt, Homo sapiens
gacggccaggagggagcaaaaagcgggagcagaccacccggaccaggaccccagcccacacgaaggga

SEQ ID NO: 22556 - RNA, 54 nt, Homo sapiens
acccacgaacgcccaccccccgaacccagccgcaccggagccagcgaaacggag

SEQ ID NO: 22557 - RNA, 75 nt, Homo sapiens
cacccaggaaaaccggccacaaaaccagagcggagacacccaggaggcagaagccacgaaccaaaagaaggaccg

SEQ ID NO: 22558 - RNA, 41 nt, Homo sapiens
ggaccacaaaccgcgccagaaaagccaaagagccccaggac

SEQ ID NO: 22559 - RNA, 76 nt, Homo sapiens
ggaaaccggagcgaggaaggaagcgccccacagacacgggaacacagaacgggaggcaacagaaggggagaagcac

SEQ ID NO: 22560 - RNA, 64 nt, Homo sapiens
cgcgccagcccaggaaaggcgccgaagaggagcaccaggccaagaaccccaaaaacagcagcag

SEQ ID NO: 22561 - RNA, 82 nt, Homo sapiens
ccccagcgcgcagggccgccaggggcgccggcagcggaagaggacgcccccaaggggccccgacacagccccaggggaaacc

SEQ ID NO: 22562 - RNA, 83 nt, Homo sapiens
ccgggccccggggagcagcaggcgagccggaggcgggccacagggacgcccgacaggcaaaaacaaccaggcagagagacaag

SEQ ID NO: 22563 - RNA, 56 nt, Homo sapiens
cgacgccacgcgaaggccacgcgccacagaacaccagcccgagaaaggaggagaaa

SEQ ID NO: 22564 - RNA, 76 nt, Homo sapiens
aaagggcgccaacacgaaaagaaaaccagacgagagacagaagacgaaagggcaagaaagagagcacggacaagag

SEQ ID NO: 22565 - RNA, 72 nt, Homo sapiens
gcccggaccaacagagagaaagccagaaaggagcagcagggggcagcacgccgaaggagagaccagacaaca

SEQ ID NO: 22566 - RNA, 77 nt, Homo sapiens
aagcgagggcggccgcgccggcccagggaaacaacacgaggaggacggcacaaaaagcaccagcggggaggaacaac

SEQ ID NO: 22567 - RNA, 68 nt, Homo sapiens
agaagggccagcagcgcagagaagcacagagaagccaccaacaaacagacccccaagaccacacaaca

SEQ ID NO: 22568 - RNA, 85 nt, Homo sapiens
ggacagcggggacggagcccggcccgggcgagcggggcgcgccgcagagcggcaccgaaggacaggaggaaacccaccagagaag

SEQ ID NO: 22569 - RNA, 77 nt, Homo sapiens
cgccgagaccagcgcccgacaaccaaagggagcgaagcaacgggagagcaagaggaaggaagcaagaacccgaaaaa

SEQ ID NO: 22570 - RNA, 70 nt, Homo sapiens
cgacaggagagaacacaacagggaccacgacaagggagggccaagaacccggaggagggcaagccggaca

SEQ ID NO: 22571 - RNA, 71 nt, Homo sapiens
ccaggccccgggcaccagagacggaggcgcacgcagagcggcaccacagacgacgcaccaaacccccacgg

SEQ ID NO: 22572 - RNA, 54 nt, Homo sapiens
agagagacacgggacgggaggacgaagaaaacgaaggaaggaggacccgaggag

SEQ ID NO: 22573 - RNA, 66 nt, Homo sapiens
accaaacaccacgaaccagggggaaaagcagccaagaaacagcagccaaaaacagaggaccagaga

SEQ ID NO: 22574 - RNA, 55 nt, Homo sapiens
ccaccacccccaggcacaccgcgaccccgcgcaagggagagacaggacaggccag

SEQ ID NO: 22575 - RNA, 70 nt, Homo sapiens
cacgcccagggccgcgccccccaggcccacaaccagcccagcagcagcaagcagggccacgcacccaggc

SEQ ID NO: 22576 - RNA, 74 nt, Homo sapiens
gacgagccacacaaaccaaccagcgcccaggaaagcgagaaggaaccgcacgagcggaggaccagccgcgggac

SEQ ID NO: 22577 - RNA, 90 nt, Homo sapiens
caacagccggcgccgccacggagcggccaagaggaccccggcaagcacccagaccaccccgcggccagaggcccgcaggccagaagaccg

SEQ ID NO: 22578 - RNA, 78 nt, Homo sapiens
gagaaaggccagacacacacaagacaccaccgcagagggggcaggagaaacggcaaaacagagagccgcagagcaagg

SEQ ID NO: 22579 - RNA, 79 nt, Homo sapiens
ccagagcacaagaaagacaccccgagagcggccgagggaagaaaccagcgcaaggcgaagccgacgagcccgaacagac

SEQ ID NO: 22580 - RNA, 40 nt, Homo sapiens
acgagcacccgccccaacgagggacagagcgaagaacccc

SEQ ID NO: 22581 - RNA, 61 nt, Homo sapiens
ggacacgaccccgccccacgcccaggagcagggaaacaacacgaggaggacggcacaaaaa

SEQ ID NO: 22582 - RNA, 83 nt, Homo sapiens
gaccgggggagcggccagccacgacccaggccaaccccggggcacgcgcccacaggcgcggggagacaaccccccccaagaag

SEQ ID NO: 22583 - RNA, 77 nt, Homo sapiens
ggcagaagcgaggaggggagaaagaaaaaggggccaagaaccgcaagcccgggcgcgccaggcacagccaagagcgg

SEQ ID NO: 22584 - RNA, 64 nt, Homo sapiens
gcggagcgacggggaggcgcggccaacggggccacaaggacgacccagccaacggcaagcagca

SEQ ID NO: 22585 - RNA, 74 nt, Homo sapiens
ccgagcaggcgccgccccagcccgcgaacgaaggacaaaagccaagaaaggaggggaaaacccccccaccaggg

SEQ ID NO: 22586 - RNA, 76 nt, Homo sapiens
cacacgggagagaaggaggggggaagacagggcccagcaccacaggacgggccgggaagccgccagcagggacagc

SEQ ID NO: 22587 - RNA, 81 nt, Homo sapiens
cacgcgcgccaggaccagcagggaagacggcaggaggacgggcggcagcccggcagcgcacagccccagaggacaggggag

SEQ ID NO: 22588 - RNA, 76 nt, Homo sapiens
aagacagagggcgagggagagcgggacggccccaaggccacagaaaaggagaccagccccacgcaggagcaccacg

SEQ ID NO: 22589 - RNA, 70 nt, Homo sapiens
cacagcaaggagcccacaagcagcggaggcacgaaccaagaggacacaaagagagaggaaagaccgaaag

SEQ ID NO: 22590 - RNA, 90 nt, Homo sapiens
agaaagaggaggaggcgagaaaccccaccgacccacagagaccccagcagcgaccgccacggccccgccaccggccacaagggccggaag

SEQ ID NO: 22591 - RNA, 84 nt, Homo sapiens
acggcgccagggcagcagggccgggccgcggcggccgcgccggccggcagacagaacaagaaagggacaccaaggcccccaagg

SEQ ID NO: 22592 - RNA, 74 nt, Homo sapiens
acccagcccgggcccaggaggacccgggccccacacaacaagggccggaagaagaagaacccccgaggagaacg

SEQ ID NO: 22593 - RNA, 69 nt, Homo sapiens
gagacaaagcaaaagccggacagcaggacacaaaccaaaacgagaaccccgaacaggcccaagggccgg

SEQ ID NO: 22594 - RNA, 71 nt, Homo sapiens
acgcgggacccgcgcggcgcgggcccgggcccgcagggacagcaacgcccgccagcccccagaagagggga

SEQ ID NO: 22595 - RNA, 71 nt, Homo sapiens
cggggacgcgggcggcgcggccgcgccagacagacgggccggcccgacccaaccgccccacacccaggccc

SEQ ID NO: 22596 - RNA, 72 nt, Homo sapiens
gagagggcacggaaacaaagacggggagcaggaagaggaaacagccccagggcgaagacccccccccagggc

SEQ ID NO: 22597 - RNA, 76 nt, Homo sapiens
cgcggccaccccccggaggaaaacgagcggaagaacagcaaacacagcagagcaaacaaggaggaggcgggagaga

SEQ ID NO: 22598 - RNA, 69 nt, Homo sapiens
ggaaaggcaccaggacaagcaaaggggaaaaccagaaccgaaaacccagaccaaccaggaaaagagaaa

SEQ ID NO: 22599 - RNA, 86 nt, Homo sapiens
agacccggacagggcaggaaacagaggagaaggacccaggaccgggcaacagcaccaaagccggagccagccacgcccagcacggg

SEQ ID NO: 22600 - RNA, 78 nt, Homo sapiens
agaccgcgagggaaaggagcgggacccggaccccaggaggcgagcagcgcgcaaagagagaaggcgggaccaagaaga

SEQ ID NO: 22601 - RNA, 115 nt, Homo sapiens
ccggcccggccccggcggcacggcgccgaccagcaccaggggaagcgggacaacggggaaggaaagaggcagaaggccagaagggcgaagaagaaggaaaaaaggccacgccaca

SEQ ID NO: 22602 - RNA, 75 nt, Homo sapiens
cgccccaaccagcgcacgcaggagcgcagaccacagggcagagaaagagcgagagggaaaggaagagaaccaaca

SEQ ID NO: 22603 - RNA, 75 nt, Homo sapiens
aacacaaaaaacaggaaaaacagaagaggcagggcaaaacgagggaggagagaaagaacccacgcaggacgacag

SEQ ID NO: 22604 - RNA, 78 nt, Homo sapiens
gagagcagcccggcagacgcagaaccaggcaagaaggaacagacaaaaacggccggaaggaaacacaggacaccaggg

SEQ ID NO: 22605 - RNA, 84 nt, Homo sapiens
agagcaccgcgccccggcgcggggcccgcggagcccaggccccccccggacccgccgcagagccagagcccaggagcagacacc

SEQ ID NO: 22606 - RNA, 53 nt, Homo sapiens
gcccccagaggcaccagcaaaaaaaccaaaacagaaagcagcagagcaagccc

SEQ ID NO: 22607 - RNA, 74 nt, Homo sapiens
aagcaggaaggagaggggcaagaagaagagggaaagaagcgcgcagcgaacgggacggggccccgcagaagcag

SEQ ID NO: 22608 - RNA, 78 nt, Homo sapiens
gcaggagaaggcagagcgacccaggcacacccaggagaaagcacggaaaaaaaacccaaagagaagccccaacgggaa

SEQ ID NO: 22609 - RNA, 60 nt, Homo sapiens
gagcaggcgccagaacaacaagcagcgggagggaagccgggcgccaagagccagcccagc

SEQ ID NO: 22610 - RNA, 87 nt, Homo sapiens
agcaagacaccacaaagagaacacagagccggaaggccacaaaagacaagacacgagaagggccaagaacaagaagaaagccccaca

SEQ ID NO: 22611 - RNA, 78 nt, Homo sapiens
aagagcagagagaaggcagggcaaaccagaaagacggaaaaagcagcaaagggagaaaagaaggccaaacagaagcag

SEQ ID NO: 22612 - RNA, 92 nt, Homo sapiens
gcgcacaggcggcggagccggagggcccgccgacccgggcgccgcgccgcacgagcaccagccagagccaggggcgcggccagaacaaacaa

SEQ ID NO: 22613 - RNA, 73 nt, Homo sapiens
acgcgagcggcgcggaccaaaaccgcgaccaagacagcccggggaggccaccacggcaccggggccggaggcc

SEQ ID NO: 22614 - RNA, 31 nt, Homo sapiens
gcggaccgccccccacgcaccacaaaaacac

SEQ ID NO: 22615 - RNA, 71 nt, Homo sapiens
acgcgaagcagccccgcgaggaccacccgagcccaaaaggcagagcgaggagagaagaaggagggaaagcc

SEQ ID NO: 22616 - RNA, 58 nt, Homo sapiens
ggcgcgcgacgcccagagccgcggccggggcgcgggagggggcgaggaagagacaggc

SEQ ID NO: 22617 - RNA, 68 nt, Homo sapiens
agaccaaacggcaagagcgcaggagaggccccgcggcgcgcgcgccccaccaccgaggccggaccgcg

SEQ ID NO: 22618 - RNA, 52 nt, Homo sapiens
gagagcccggcagggggacccagcgccccccgggcagggaacacacacaaaa

SEQ ID NO: 22619 - RNA, 75 nt, Homo sapiens
gaaccgaaggcgcgcaggaggagagcaagcgagcccggccgaggaggaaaagacagagcagaccaccgagaaaca

SEQ ID NO: 22620 - RNA, 72 nt, Homo sapiens
aaaaaaggacggaagaggcagcaaagcgagaccgccaaggaagggccccacaccaaaccgccacgcaacaga

SEQ ID NO: 22621 - RNA, 85 nt, Homo sapiens
cggggggcggccgcgcggccgggggcgcgggcggcggcgccggcaggaagaaaggggcggaaaaaccagccgggacccccagaag

SEQ ID NO: 22622 - RNA, 74 nt, Homo sapiens
gggagccagaagcacaggcccgggcgaaggggccacgcgaggcccaacgcgcaggccacgggccggcggggaaa

SEQ ID NO: 22623 - RNA, 64 nt, Homo sapiens
caaaaaaaccagaaccggacgaacacaaggacccagaggccaacagagcacaggcaaggcaccg

SEQ ID NO: 22624 - RNA, 78 nt, Homo sapiens
cgcacaaagaaggcggcccacaagcggccgaggaagacggaaggagcggaggcgcgcaaccaaaaaacccagcgaggc

SEQ ID NO: 22625 - RNA, 74 nt, Homo sapiens
ccgcaagaggcggagccgaccaggccgacgagagcacggggccaaaaaggcacgagggaacgggaaagaacaga

SEQ ID NO: 22626 - RNA, 56 nt, Homo sapiens
cgccccggccgccccccagaccgggacagaaggcaagcaacccccagccacaacgc

SEQ ID NO: 22627 - RNA, 67 nt, Homo sapiens
gagcaggccagaggaccacccccaaccccacgccaccgaagagccaagcccaggagaacacccacga

SEQ ID NO: 22628 - RNA, 70 nt, Homo sapiens
ccgcagccggggacgcagacgaaggggcaggggaagaaccggagcggaaaaagccccaccagcccagagc

SEQ ID NO: 22629 - RNA, 83 nt, Homo sapiens
gagggcccaacccaaaagaccgaagagaaacaacgacacgaagggccgaccaggcaggaggccgccgccgagccagcaagagc

SEQ ID NO: 22630 - RNA, 76 nt, Homo sapiens
gaggcccacagggagaacagggcagaacgaggggaggaaagcaggagaggaggccgagacggcgcgcacggcaacc

SEQ ID NO: 22631 - RNA, 72 nt, Homo sapiens
ccccgccaaagggcgggcgacaccgaggcaaaacggaaggccaggagcaagcagcagaaggcacgcaaagca

SEQ ID NO: 22632 - RNA, 100 nt, Homo sapiens
ggagccgaagccggagggccacccgacgcagagggcaggccccagccagagaacacaggaagaggaacaaaggcagccccaagagaaggagggaggccgg

SEQ ID NO: 22633 - RNA, 75 nt, Homo sapiens
aagccgggaagggagcaccgagaggcagacaagacacccgcagagcagggcagaacgggagcacggggaccagag

SEQ ID NO: 22634 - RNA, 68 nt, Homo sapiens
gagcgggacacagagcccacccacggccaaggcgaggacacgccaacaccacggcacgcccgaaggaa

SEQ ID NO: 22635 - RNA, 88 nt, Homo sapiens
ccaaccgcaaccagacgccagcgggacgaggaccgagaccgcggccgggaccgaggagccgacaaaaggacaaggggcgaagcccggg

SEQ ID NO: 22636 - RNA, 83 nt, Homo sapiens
cgcccaccacgccagccaccacgcggcgcacaacgcaggaacaccgcacgcgcggaggaggaccacaaaacaaaccacccaac

SEQ ID NO: 22637 - RNA, 79 nt, Homo sapiens
ggaacggcacaggaggccacacaggaagccgaggagagccgaggaggacaccaggaggaagaggacaccagcccgggag

SEQ ID NO: 22638 - RNA, 60 nt, Homo sapiens
ggcggggcggccgggcggcagggaccgcggcgcccgaggggaaggagggcgaaacaaagg

SEQ ID NO: 22639 - RNA, 61 nt, Homo sapiens
agggaacgcagcgaaagcggaacggaggaaggggagaagaaaaagcagcaaaagagaagca

SEQ ID NO: 22640 - RNA, 71 nt, Homo sapiens
aagaggaaagcgaggaggagcgagcgcgagaggagcacacaacaaaccggagggaggaccagccgcaagcc

SEQ ID NO: 22641 - RNA, 78 nt, Homo sapiens
gaaagacaagacggagaccggaaacacaaaggaacacgaacccaagccccagaggaagaagaaggagccaaagcggcg

SEQ ID NO: 22642 - RNA, 68 nt, Homo sapiens
caacggaaaacaacacaggaggagagaaagaacccacgcaggacgacagaagaggccggacaagagaa

SEQ ID NO: 22643 - RNA, 77 nt, Homo sapiens
ccacccggaacgaagacgaaaagccacgaagaaaaggggaaggaggcgaacaggaagcagcaagagccgcgagggga

SEQ ID NO: 22644 - RNA, 73 nt, Homo sapiens
aaggcagaagaaagaagaggagaaggagcagccggccaaagagacccgccccgcgcacgagccggaacgcccc

SEQ ID NO: 22645 - RNA, 78 nt, Homo sapiens
gggcgcgcccaccgcgccgcaccagcgaccacgaggacaagagaggcccaccaagaagccccagaggaccgccgcaca

SEQ ID NO: 22646 - RNA, 82 nt, Homo sapiens
cgggggcgcggccagaggccgggcggagcgcccagacgcggggagccgccggagcgagaagggcggagaacggaaaagcacc

SEQ ID NO: 22647 - RNA, 70 nt, Homo sapiens
cggccagcccagggagccaaaacaggcaacaggaagaagaacccacaggggccaacagaggaaggaacaa

SEQ ID NO: 22648 - RNA, 74 nt, Homo sapiens
agaaaaggcaaccaccaaacgcaacgcgacaaagaggaacaggaaccgagaaagccggcaacaggaggagcaga

SEQ ID NO: 22649 - RNA, 84 nt, Homo sapiens
gaggcggacggcccggagagacgaaccgaagcgggcgggcccccccacccagaggaccacaccaaggagaagaagacccgggca

SEQ ID NO: 22650 - RNA, 75 nt, Homo sapiens
cacacgggcgggagagcggccgccgcccgcagcaagacgcgggcgcgcgaggacggcaagcgacaaacaacaagc

SEQ ID NO: 22651 - RNA, 74 nt, Homo sapiens
gaggagagaacccaacacagggaaaggaaccgcggacaggccagcaacagaagaaagcaagcaccggggaaagc

SEQ ID NO: 22652 - RNA, 81 nt, Homo sapiens
agccagcagcgccgccggcggccaagcagccaaccagccaaccgggccccccagcagacgcgacgcaaacagcagacggaa

SEQ ID NO: 22653 - RNA, 34 nt, Homo sapiens
ccccccgagccccccgagggggccgagaggcaga

SEQ ID NO: 22654 - RNA, 80 nt, Homo sapiens
cgagagagcaacagacagccggcggacacggaccgcggaccggagcacacggcggcggcgaagccaagacacgggcccgc

SEQ ID NO: 22655 - RNA, 74 nt, Homo sapiens
cagggcgaccaagaacggaagagaggaggagaacaccggacacagggccaaggaagcacgggaagaacagaaaa

SEQ ID NO: 22656 - RNA, 72 nt, Homo sapiens
agagcggagaaaagccccaaggacaggcagggccgggaacagcccgaacaggaaccagggggaaggcgcaag

SEQ ID NO: 22657 - RNA, 68 nt, Homo sapiens
aaagggagaaagaagaagaaaaccccaaggaacccccaagggccaccagaggaccaagccagacgacg

SEQ ID NO: 22658 - RNA, 57 nt, Homo sapiens
ccccgccagaaggcagacgagagccaagcaacggggccgagacggacgaaaaacagg

SEQ ID NO: 22659 - RNA, 81 nt, Homo sapiens
cccgcccaggaacacgagcccaaagagggcccgccccaccgggggccaccccagggaggagaagagggacccagaaggcga

SEQ ID NO: 22660 - RNA, 64 nt, Homo sapiens
cgaccagcccgcgaccacggggagcacgccacaggcgacaggagaccagccgccccgggcgggg

SEQ ID NO: 22661 - RNA, 39 nt, Homo sapiens
gaacccccgcccccgaagcccaggcagaaggggagagga

SEQ ID NO: 22662 - RNA, 77 nt, Homo sapiens
acccacgcagagggcggagcggcaggacaccagaggaccagaacccacgagaaacagacgagccaaccagaccccag

SEQ ID NO: 22663 - RNA, 53 nt, Homo sapiens
aaaagaaggagccaagagggcaggaaccgcaacaggaggccagagacagagaa

SEQ ID NO: 22664 - RNA, 91 nt, Homo sapiens
gcgcagaagcccgaagaaaacagcgggaagagacagccaaggggagccgccaccaaaagcagacggaaaacccacggggaagaccacaccc

SEQ ID NO: 22665 - RNA, 84 nt, Homo sapiens
ggcaccggacaagcggaggcaggaagaccaccgcaaccccgcccccggggaccacgggagaggaggaagagacccacagaagaa

SEQ ID NO: 22666 - RNA, 80 nt, Homo sapiens
ggacccgccccacacagcggccccagggcagggaggaaaggaagcacgcagcggccaccccagaacacagcccaaaccag

SEQ ID NO: 22667 - RNA, 70 nt, Homo sapiens
aggagaaacaagaacaaggggacgcgcagcaggagaaaacagagcgcaaaaacagcgcagagccagaagg

SEQ ID NO: 22668 - RNA, 74 nt, Homo sapiens
gacggaccaagcggcccagaacggcgaaggggagccgccaccaaaagcagacggaaaacccacggggaagacca

SEQ ID NO: 22669 - RNA, 56 nt, Homo sapiens
gcggccccgccggcccgggcgggggggaagagcggcaggcgaagagaaaagcaggc

SEQ ID NO: 22670 - RNA, 61 nt, Homo sapiens
cgagccagcccgccagcagccccagccaaaggaagagcgccgaagggaaggccaggaccac

SEQ ID NO: 22671 - RNA, 81 nt, Homo sapiens
gaaaggcaacgcgcacgccccccaccggacggccacagacgggacgggccgagagccaggacaaaaccaggcagaaccaac

SEQ ID NO: 22672 - RNA, 37 nt, Homo sapiens
aggaccccccccaacgagggagcaccgcggacgcccc

SEQ ID NO: 22673 - RNA, 69 nt, Homo sapiens
gccgggggcacgccccccacccgaaggaggccagaaggagacccccacgggcaggcgagaggaccccag

SEQ ID NO: 22674 - RNA, 70 nt, Homo sapiens
acacagcacaccggagagacgaggggggcgaaggaacacgagccgggccagcagaaaccggcaaaaagcc

SEQ ID NO: 22675 - RNA, 72 nt, Homo sapiens
ggcgacccgcgacgccgagcacccaggcgacgcccaccaaggcagcgcaccgcaaaggccccagggagcccc

SEQ ID NO: 22676 - RNA, 38 nt, Homo sapiens
accccccacaaacggccggccccgggaccaaggacacg

SEQ ID NO: 22677 - RNA, 70 nt, Homo sapiens
cccggcgccccaaccccggcagccccagaaaggaagcacgcgcgcggacaagaccagaaagaaaagaacc

SEQ ID NO: 22678 - RNA, 56 nt, Homo sapiens
ccagcccgacagacagaggaggaagggaccacagaccagcacgccggcgccacgaa

SEQ ID NO: 22679 - RNA, 76 nt, Homo sapiens
gcgccgggaacaaagacagcgaggacaccccagcaagcccgagccaggacaaaaccaggcagaaccaacacgaacc

SEQ ID NO: 22680 - RNA, 75 nt, Homo sapiens
cgggcacgggcacacgcggagaagagcaacgacagagcaacgaggccgggccggaaaagagagaaaccacacacc

SEQ ID NO: 22681 - RNA, 70 nt, Homo sapiens
gaggaaaacaaacaaacgcaaacgggaacgggcgacgcgccaaggcgacacaacggagacggacaggaag

SEQ ID NO: 22682 - RNA, 58 nt, Homo sapiens
cgacaaagcgaaagcacaccaagccaccaccgcccagcgcgcccccccaggaggcccc

SEQ ID NO: 22683 - RNA, 84 nt, Homo sapiens
cagccccgccggcagcccaagggcaaggacccaaggccagccagccccaggcaccagcggacaggacagggaggacgaaggccc

SEQ ID NO: 22684 - RNA, 80 nt, Homo sapiens
acgcggggcggccacccgacccgcccggcccagccagcgcccgcgagggacacggaggaccgaggaagaaggcacgaccg

SEQ ID NO: 22685 - RNA, 66 nt, Homo sapiens
gcacagccccgcgacaaccagacaggaagggaaggggcggagacgggcggaacgcaggaggccaga

SEQ ID NO: 22686 - RNA, 84 nt, Homo sapiens
ccggggcgccggggcgacgcggcgcgggcggcgcgcgaggccagagccagggcagcggccaggagaagaggaaaacggccacag

SEQ ID NO: 22687 - RNA, 74 nt, Homo sapiens
agagccggaagaaaggaaagaggacacacgccaaagcacagcaaaccagggccaagggaagaagaacagaagaa

SEQ ID NO: 22688 - RNA, 86 nt, Homo sapiens
caacgagccccgggaacccgcggcccccagccagagccagcagcagaacaaagcccacaggggcaacacagcccaacgccaaacac

SEQ ID NO: 22689 - RNA, 81 nt, Homo sapiens
gcgccgcccagcaaagcgaaggacaccaggggggaaaaaccacacaggcaaagaacgcgcaaaacaggacgaaaacaaagg

SEQ ID NO: 22690 - RNA, 79 nt, Homo sapiens
aggacacaagcccagcgggaccagacaccgcggaagcggaaaccagagaaacccaggccagcaaagacacacccacaag

SEQ ID NO: 22691 - RNA, 70 nt, Homo sapiens
gcaacacagagacaaaaacaggagaaggaacacaacaagagaggagaaaagcaccacacaaccagacaca

SEQ ID NO: 22692 - RNA, 46 nt, Homo sapiens
gcagccgcaccggccaaggggaagcaggaagagaacgacgggggag

SEQ ID NO: 22693 - RNA, 75 nt, Homo sapiens
caaagcccaaaccccaggccaagcaaccaccagcagcccccagagcggaacacagggcggccacagggccaggcc

SEQ ID NO: 22694 - RNA, 74 nt, Homo sapiens
gacgacgcaccgcaggcagacaaaagggccaaagaagggagagagggccagaagcccccaggaggagaacgagc

SEQ ID NO: 22695 - RNA, 74 nt, Homo sapiens
agccaacgaaagaccagcaggagccgcccgaaaagaccaggccaaagccaccccaccagccagggcgaagacac

SEQ ID NO: 22696 - RNA, 70 nt, Homo sapiens
ccaccgaagacgcagcccccaggcgcccccacgacgacaccagagcagaaccgcaagaaaggcgaaggag

SEQ ID NO: 22697 - RNA, 72 nt, Homo sapiens
aaagagagcagacccgaggagcccgcaggccgcagccaagccggaacaggagcggcgagcccaaacgcaagg

SEQ ID NO: 22698 - RNA, 67 nt, Homo sapiens
gggcagcaaccagcggagagagcgaagcaccgcgcagaccgaaaggcacacggagcgaaacccaaga

SEQ ID NO: 22699 - RNA, 54 nt, Homo sapiens
gaccaagaaccagccaggaaccagaacgggacacgccgcagggcgaggcccacg

SEQ ID NO: 22700 - RNA, 59 nt, Homo sapiens
gaaaggcgggccagaaaccggaggagcagacaaaggagcgcaggaagcccggggcggcg

SEQ ID NO: 22701 - RNA, 69 nt, Homo sapiens
gaaggaccaagaaccagcggaacgcagggcgcaccaccagagacccaacacacagaagacacaaacccg

SEQ ID NO: 22702 - RNA, 55 nt, Homo sapiens
agcaacagccaggggccccaggcaccagcgggggagcagcccccgagaccggagg

SEQ ID NO: 22703 - RNA, 85 nt, Homo sapiens
ccgaaccccaggagcaagggaaggagcccggaggggagggaagagacaggaagagggcccagcgggcgaggacaagagaaccaca

SEQ ID NO: 22704 - RNA, 75 nt, Homo sapiens
accggaaccacacacaccacaggaagccagcacgagaagagaagcccagagcaaaacaccccaaaccagaccacc

SEQ ID NO: 22705 - RNA, 64 nt, Homo sapiens
cgccaccagcaggacgccgccgcggccgggccagcagaacagagaagaccccggaaagaagaac

SEQ ID NO: 22706 - RNA, 56 nt, Homo sapiens
gacacagcggccgggcccaggaaaccagggcacagggacaccaagcagagggcccc

SEQ ID NO: 22707 - RNA, 76 nt, Homo sapiens
gaaaagggaacaggccagcgggagaacagagacccaccaagaaaccagaacccggacaagggaagggcccgaggag

SEQ ID NO: 22708 - RNA, 93 nt, Homo sapiens
cagggaggcagaagcggcaccaccgcgaggccagaccccaaagacagacggacgccgccggcaaaaaggcaaaaagagcgcgaagagacggag

SEQ ID NO: 22709 - RNA, 67 nt, Homo sapiens
gaacagagggcaagaggacgccacaaacacccaccacagcagagacaagagcgagcaagccgccgca

SEQ ID NO: 22710 - RNA, 86 nt, Homo sapiens
agacagagcaagaaaagcccgggagcagaagggaggcccaagacccacaacaaaagcagcagcggcagggcaaagacagccggccc

SEQ ID NO: 22711 - RNA, 71 nt, Homo sapiens
agcgacacagcacaggaccgggcccaggcgacacgcaagagggcccaaggaacccaaaaaggccacacccg

SEQ ID NO: 22712 - RNA, 107 nt, Homo sapiens
cagcgggccggaaggaaaaggggacggagcacaaacggaggaaacgacaaaacggaaacgaaggaggcccaaccacaaaaggagccgacggaacccagacggagaac

SEQ ID NO: 22713 - RNA, 86 nt, Homo sapiens
ccgcgaggcgggcagccggggcgccagagccaggacaaaaccaggcagaaccaacacgaacccaagcacaaacaagaaaacgagca

SEQ ID NO: 22714 - RNA, 76 nt, Homo sapiens
gagaacagggcagaacgaggggaggaaagcaggaccagaacgacaagcaaccaaaaaagaacgggggacgaccccc

SEQ ID NO: 22715 - RNA, 61 nt, Homo sapiens
ggcgcaccaaggaggaaagaggcgcagaaagcggcacagcccaacaagggaagcgacaacg

SEQ ID NO: 22716 - RNA, 58 nt, Homo sapiens
ccccgagagcgggaaacaggacaagccgagaagggaaacgaggggagccggaagggac

SEQ ID NO: 22717 - RNA, 92 nt, Homo sapiens
ggacagaaggacgaaagcaaggaggggaaaaaccgcgaagcaggggccgcgggaagggagaagaaccaacaacggaaaaccagcgggacaag

SEQ ID NO: 22718 - RNA, 79 nt, Homo sapiens
cccacgggagaacgaagaagagaacaggagacacaacagagcagcggggccccggggcggaaccccagagcgacggcgc

SEQ ID NO: 22719 - RNA, 82 nt, Homo sapiens
aggcccggcccggcccacggccggccgcgcgcgaacccggccgcagggacccgcagggcgcggaaagacagacaacaaggca

SEQ ID NO: 22720 - RNA, 54 nt, Homo sapiens
gacgggccgagaagcagcgcgagagggcccccaaggaagacagcacgagggaac

SEQ ID NO: 22721 - RNA, 78 nt, Homo sapiens
cacgcaacggcggcaaccggcgggggcaccggcccgagcgcgaggagacggaaggcaaccaccccggaccaccaaacc

SEQ ID NO: 22722 - RNA, 58 nt, Homo sapiens
ggaagaccaacagacaaccaccaaaggggaaacagaaacaaggcaaaccgacaccagc

SEQ ID NO: 22723 - RNA, 69 nt, Homo sapiens
ccgaggagaggcagggcgcgagggcgggggcagcggcagagagacagcaaagccccacccagacggcag

SEQ ID NO: 22724 - RNA, 82 nt, Homo sapiens
acgaccgggaaacagaagagagaaaagaaaaaacgcagacagcccagaagcccaccagaggcgaggggaggaggaagcgagc

SEQ ID NO: 22725 - RNA, 72 nt, Homo sapiens
cgcgcgccacgccgcgccacccgccaggcacgagccaccgaggccacccgagcaacgcacgcgcagccccga

SEQ ID NO: 22726 - RNA, 76 nt, Homo sapiens
aaaggcgagccaccaccagaacggaggcgaaggaacgaaaggcaaaacacagcgaagcagccgaggacgcccaggc

SEQ ID NO: 22727 - RNA, 85 nt, Homo sapiens
gagacaggaggcagagccaaacacccagaaacccgagaggagcaggagcaaccgacaggcgggccggacagcgcgcccagcacag

SEQ ID NO: 22728 - RNA, 80 nt, Homo sapiens
cccagccgcgccagcgcccggcgccgcgcgccacccccgagaacacgaggacccaaagaacaaacccggagagaagaaaa

SEQ ID NO: 22729 - RNA, 72 nt, Homo sapiens
acacgaagggcccaccgcgcccagacccaacggacgcgggcggccccgagccccggccccaaagacccaaaa

SEQ ID NO: 22730 - RNA, 81 nt, Homo sapiens
aaagcgggccggcgcccagaaagcccacgcacaggggaacgaggagaaacaggaagaagaggggcgacaaagagaaagcac

SEQ ID NO: 22731 - RNA, 72 nt, Homo sapiens
gcaagggacaagggccacacccccaggcaagaacggaagcacgggcggaggaaagcacaagcagagcccccg

SEQ ID NO: 22732 - RNA, 51 nt, Homo sapiens
acaagccaaagagacagagcagacggacagaaaagaagcaggacaggacag

SEQ ID NO: 22733 - RNA, 38 nt, Homo sapiens
gcaaacaacacgacggaaaacaagaagagcgaaggaac

SEQ ID NO: 22734 - RNA, 58 nt, Homo sapiens
gccgaagcagcaggacaccgaccagaaagcacagaaacagagagaaggaaaccaacca

SEQ ID NO: 22735 - RNA, 74 nt, Homo sapiens
gggaagcgcagaaagcaggcgaacccgcggcgcaaaacgacaccacgccacccaagagagagcaaaaaccgaga

SEQ ID NO: 22736 - RNA, 77 nt, Homo sapiens
cggggggacacacgccagaggcacggccgcgcgcgagcaggcccgccgccggcccgcagcccccggaagccaaagac

SEQ ID NO: 22737 - RNA, 64 nt, Homo sapiens
gcagacccagagagagcagggaggcgacaaagaacgagaaggaaacccagccaagggaaccaca

SEQ ID NO: 22738 - RNA, 78 nt, Homo sapiens
ccgcgggggagccccgggagccgcacgggaagggaagagaagaagaccagggaaggggagagaaaaggcaccagagcc

SEQ ID NO: 22739 - RNA, 72 nt, Homo sapiens
gccaaaccccaaaacccgcagccggccggcggccgggcgccggccgagcccgggaaaacgacagcagcagca

SEQ ID NO: 22740 - RNA, 78 nt, Homo sapiens
ccaagccaaagcgggcaagaaaaagggaagccggagcacagcaagcgggagcaggcagaccaaaggaacagaagccag

SEQ ID NO: 22741 - RNA, 54 nt, Homo sapiens
gccacccgcgaccagcaagaagcaccaggagacccagcccgaaaccccagcaaa

SEQ ID NO: 22742 - RNA, 83 nt, Homo sapiens
gcggcccgcgaaagggcgcaaagggagcccacccagaggcagggggcgacccgaacccaaaggaggaaacagcggcaagccac

SEQ ID NO: 22743 - RNA, 83 nt, Homo sapiens
ggagagccaagccacgaccggcggggcgcgccaaggacacggcacaccgaccgacgggagggggaaggccagggccagacgca

SEQ ID NO: 22744 - RNA, 92 nt, Homo sapiens
agccaccaggagcccgagagagaagggggaggacgcgagcggaagagaagcaaaaagacaaggaggaaagcgacaccacgaccggagcgggg

SEQ ID NO: 22745 - RNA, 87 nt, Homo sapiens
ccgcgaccccagcgggcccggggaggcaccgacgaggaggcgagcagagggcgggggcaggcggaaggccccggcccagaggagacc

SEQ ID NO: 22746 - RNA, 89 nt, Homo sapiens
cgacgaccaagaggcgaagagaccggaccacgccacaagcgaaggcacccgaggccccacgagaaagcgacaagaaggcggaccagaag

SEQ ID NO: 22747 - RNA, 76 nt, Homo sapiens
ccggcgccccacccgcccccgcgggcgccgggccaggacggccaccaccgcccagcgcgcccccccaggaggcccc

SEQ ID NO: 22748 - RNA, 56 nt, Homo sapiens
gccgagggcaaggcgccagaccaaggccggacccagcagggcccccggaacaaacc

SEQ ID NO: 22749 - RNA, 70 nt, Homo sapiens
gcccaagaggcagcggacggaaagggcgagccgaaaagcacacccaggcagaagaaaggaaacccggcag

SEQ ID NO: 22750 - RNA, 70 nt, Homo sapiens
ggaacaagaggggacagaaaggcacagacaaaggacgcccccgagaagagaaaaaaggacagaacacgac

SEQ ID NO: 22751 - RNA, 74 nt, Homo sapiens
ggggacggggaccagcagcgcgccgccgcccagcgaagagggagaacagcagagccagacagggcggaaacgcc

SEQ ID NO: 22752 - RNA, 74 nt, Homo sapiens
gaacccaagccaaagcccaggaagaccgcaggaaagcaggaaggcaagaaagccaaggacgaaacccacacgga

SEQ ID NO: 22753 - RNA, 69 nt, Homo sapiens
aagcagcacgcaagaagggggggaggagggacaacacacaacgcaggcgcacagccgccccaacaacac

SEQ ID NO: 22754 - RNA, 81 nt, Homo sapiens
agagaaaaaggacaaaagccaagaggaggacagcgcacacagcaagcacgagaacaccggcagagagagagacacaccaga

SEQ ID NO: 22755 - RNA, 77 nt, Homo sapiens
agcaacgcgggacgcggcggcgccggccccggggagaaacggccacaaagaaggaccaaaggcaaaacacaccgagg

SEQ ID NO: 22756 - RNA, 79 nt, Homo sapiens
ggcgagcaggcccgcgcggcgccgggcgcgacgagaccggggagaaaagcgcaagacccaagaggacacacccgggcac

SEQ ID NO: 22757 - RNA, 66 nt, Homo sapiens
ggaaggggcgcacaggccccccagcccaacggaccgcagggggaaccagaacaagcaccaggcacg

SEQ ID NO: 22758 - RNA, 48 nt, Homo sapiens
gcacgggcaaaagacagaccagaagaagaaacccgcgccagagagcca

SEQ ID NO: 22759 - RNA, 83 nt, Homo sapiens
acgggggcccgcgaggcgggcagccggggcgccaggcgccggcggcagagcggggagacgagacaaccgccccgccgccggga

SEQ ID NO: 22760 - RNA, 116 nt, Homo sapiens
ccagccgaagcagccaccgcagggacccgaaggcagagggggccggcagaaacaaagaccgccacacaaaaagaaccacaaacacacagagaaacaaccgcaccacccggggcaga

SEQ ID NO: 22761 - RNA, 80 nt, Homo sapiens
ccgggcaacgggccccaccaagagggagcgcaccacgacaaagaagagaaaacgcggcagagcaacaaacacagccagaa

SEQ ID NO: 22762 - RNA, 45 nt, Homo sapiens
gaggagcgccgcgcccgcccggcacccgaggacagccccccggag

SEQ ID NO: 22763 - RNA, 72 nt, Homo sapiens
gcgagcacacaaaaaaaccaaagaggagccagaccagaccaccagggacgaaacgcccaccccgggaagcag

SEQ ID NO: 22764 - RNA, 63 nt, Homo sapiens
gcaaacccacacggcaccaaaggcaccggagcagagaggggccccccgaggaccgcgacgccg

SEQ ID NO: 22765 - RNA, 79 nt, Homo sapiens
agcgcgcgccaagggccgacacaacaccgagacaacacacgaaggacgaaaagagcaggccggaggacaggacaccaaa

SEQ ID NO: 22766 - RNA, 82 nt, Homo sapiens
agccaaggcaccgggacgcgcacccccgcgccgcacggggacgagccccgagaaccaagaacggaagaccagcccggaccca

SEQ ID NO: 22767 - RNA, 86 nt, Homo sapiens
cggaccgaccagggcagacccaggaaaccgaggaaggcagggaccggaaagaacaaaggcccaccggaagagcggcgaaaaagacg

SEQ ID NO: 22768 - RNA, 80 nt, Homo sapiens
acggaacagaggagaaaagaaggagagacaccggagccagagagaagacagacaaccccaagaaggcccccggaggaaac

SEQ ID NO: 22769 - RNA, 76 nt, Homo sapiens
cgggggacccgaggcccacagccgcagggcccaggagacaccagcgggggcgccgcgcagggaaagggaccgccac

SEQ ID NO: 22770 - RNA, 65 nt, Homo sapiens
cggagacagagccgaaggccggcagaaggaccgccgcgccgaccggagacaacagacgcaccagc

SEQ ID NO: 22771 - RNA, 69 nt, Homo sapiens
gccacaaagaaccccaccgcgacacacgagcacaggaggagccaagcagccacccggaggacccgcaga

SEQ ID NO: 22772 - RNA, 71 nt, Homo sapiens
gacagcacagcacccacaaagcaacggcaggaaaagaagcaggagcgcacccacggaaagacgaccacgca

SEQ ID NO: 22773 - RNA, 77 nt, Homo sapiens
gaggaggccacaccaagccagacgagaaaacagcgagcccggacagaagcgaaaaacagaagcggacgagcaaggga

SEQ ID NO: 22774 - RNA, 76 nt, Homo sapiens
agagcacagacccgcgccaaacccagacaccacgcaggaacggagaaagcaccgggaggaaagagagccacacgaa

SEQ ID NO: 22775 - RNA, 46 nt, Homo sapiens
cgcggccaacggggccacaagaaccgccgcgcccgggaaaggagga

SEQ ID NO: 22776 - RNA, 59 nt, Homo sapiens
caaacacaagcagaaggagcgaagaagaggaagaagacggcacgggacccccagcacag

SEQ ID NO: 22777 - RNA, 75 nt, Homo sapiens
ggggcggggccggggaacacacagggccaggccgccacgaaaacaagaaagaaccccacagccagcagaaacagc

SEQ ID NO: 22778 - RNA, 55 nt, Homo sapiens
cccgggacccccaagagcacaggcagaaggcacaagggaaaagggggccaggaag

SEQ ID NO: 22779 - RNA, 120 nt, Homo sapiens
agcggcgcccccccccccccggcgcggaccccgcggcgccgccgcccgcagccccgagaccgcaggccgggcggccgcccacagcaaagggaccggagaacaccaccacaacggcgccac

SEQ ID NO: 22780 - RNA, 71 nt, Homo sapiens
cccagaacacagagagcagagggggacaaaggggaggacccgagaagaaccgcacaacacaacgacggagc

SEQ ID NO: 22781 - RNA, 83 nt, Homo sapiens
gagccacgggccgcgccgggcacagccggaaagcaggaccgcgacggcagcagagcaacacacaacaacaggaggcaaaccca

SEQ ID NO: 22782 - RNA, 77 nt, Homo sapiens
ccacacagcgcccaggccagagaaggggaaggaggggcagcgggcagagggccagacccccaacaaagccaaaggag

SEQ ID NO: 22783 - RNA, 85 nt, Homo sapiens
gcccagcccgggcggcgcggccaggggggaaccgcgagcagaacaccccccccagcgggaaaccgggacacgcaggagcccagga

SEQ ID NO: 22784 - RNA, 76 nt, Homo sapiens
caaccacggagccgagaaccaggacccacaccagaccagaaagaggggacgaagccccaaggcacccccagcggag

SEQ ID NO: 22785 - RNA, 50 nt, Homo sapiens
cccggcgccccccccggcggagagaggccccagcgaagcccaaaacgagc

SEQ ID NO: 22786 - RNA, 76 nt, Homo sapiens
aagagacccacgaggcacacagccggagcaggacacgagacacaggccgcacgcacgcgggggaccccaagggaaa

SEQ ID NO: 22787 - RNA, 56 nt, Homo sapiens
aaggcgcgcggaaacacaagagagaggcaccacaaggccggacaagcggaaagaca

SEQ ID NO: 22788 - RNA, 75 nt, Homo sapiens
ggaaaacagagaaccaagcggcaaagcaccgaacgagagagacacagccgaaagcggacgcaagagcaagaccag

SEQ ID NO: 22789 - RNA, 77 nt, Homo sapiens
aagcgagggcgaagcacgacacagaaggggaggggagggaaaggcccaggaaaaaggaggagaggagagacccagag

SEQ ID NO: 22790 - RNA, 63 nt, Homo sapiens
ggccaaggcccggcgcaacggcccgacgagggcaacggaagaagaaagaggacagagacgagg

SEQ ID NO: 22791 - RNA, 76 nt, Homo sapiens
ggcccccgccccagcccgccggcggcggcggaagccagaggacaacagagcaaccagccgggcaccaggaacccca

SEQ ID NO: 22792 - RNA, 79 nt, Homo sapiens
gaggcaacgccggggcgcccgaggcggaaggcgcagggcagagagaacacgacaagcacagcaaaaccaaagcagaaag

SEQ ID NO: 22793 - RNA, 73 nt, Homo sapiens
cgcacgcggggcaccggacggcggaaaggacaagacgagacaccggcgacaggaagacgggggcgggcggagg

SEQ ID NO: 22794 - RNA, 57 nt, Homo sapiens
ggccgcagaaggagggacgagaccagggcacacccaacagacacacacgccgagcca

SEQ ID NO: 22795 - RNA, 58 nt, Homo sapiens
gccggggagaagcgccccaaggaccagagaaggcagaagcgcacaagccccagacaaa

SEQ ID NO: 22796 - RNA, 70 nt, Homo sapiens
caacacgccgccgagcagccgccagccccacggacggacgccagccccacaacaggagcgggagccaaaa

SEQ ID NO: 22797 - RNA, 86 nt, Homo sapiens
gacccggggacccccgacgccaggcagcgcccccaaacggcgcaaaacaaacaaaggcgggagaagcagaaaagcccacggaaacg

SEQ ID NO: 22798 - RNA, 85 nt, Homo sapiens
gcggacggcccaccaccccagcccgccaacagcagccgcgccggcgcccccccccagggggggccccagcccggccgaacgggcg

SEQ ID NO: 22799 - RNA, 70 nt, Homo sapiens
gggacccagagaggaacggaacggacccaccagcccaaaggcaggcccggcaccgaggccgaaacccaag

SEQ ID NO: 22800 - RNA, 68 nt, Homo sapiens
ggcggcgcggggcccgcgcccggagcggcgccaggagacaccaggggagaagcgacgggccggcggcc

SEQ ID NO: 22801 - RNA, 61 nt, Homo sapiens
gccggaaaccggagcgcgcagcagacccaggccaggagcagcgcaggaggcccgaaggacg

SEQ ID NO: 22802 - RNA, 77 nt, Homo sapiens
agcgcagaaaggcgcacggaaccgagcaaaaagcacaacaacgaccagaccacggccaccccaaacaggagcccagc

SEQ ID NO: 22803 - RNA, 77 nt, Homo sapiens
ggacacaggccaagaggagcaacagcggggagacgaagagcgccacaccgacaggacgaggagggacaaacaagaga

SEQ ID NO: 22804 - RNA, 57 nt, Homo sapiens
cccgcccagcacggacagccgagagggccagaccaggacggcaaacaccccagcagg

SEQ ID NO: 22805 - RNA, 69 nt, Homo sapiens
agaggaggggcagaaagggagcgcgacgacaggaagcgggaggagcgacccagcaccgcagcggaagca

SEQ ID NO: 22806 - RNA, 71 nt, Homo sapiens
aaaaaaaacaggagaagccccaacagaaacacaaggaaagggagaagaggacagaaaaagaccagacgcgg

SEQ ID NO: 22807 - RNA, 115 nt, Homo sapiens
acggcagacgccggggacagccgagacacagccccagcgagaggccaaccaggccccgggacgaacagcggggacgccccagcagaccgcccaggagaggaaagcaggaggaaag

SEQ ID NO: 22808 - RNA, 75 nt, Homo sapiens
accagcccgaaacaccaccaaggacagcccaaggcggaaaagcgaaggaagccacaagcacagcccacacaaacc

SEQ ID NO: 22809 - RNA, 79 nt, Homo sapiens
caaggcggcggaggaggaagggaaccagaccgggacagagcccgcacgcggacacgcagccagcaaccggaccgaagcc

SEQ ID NO: 22810 - RNA, 71 nt, Homo sapiens
acaaaacccgaggcccgggaggagccaacaagcgcacggagccccaaggacgcgcaagacgggagacgaga

SEQ ID NO: 22811 - RNA, 84 nt, Homo sapiens
gacggcacgcgggacgaacaccgcacaggcaggaggcaggccaaggaccgggaccagggaggacggcgggaggcagggaggagc

SEQ ID NO: 22812 - RNA, 54 nt, Homo sapiens
gaggacacaggcaccagacgggacagaaaaccagaggccgaagacccggccagg

SEQ ID NO: 22813 - RNA, 79 nt, Homo sapiens
ggagcccgggcgcgggggcggcggcagggggcggagcgacaagcagaccggaagaccgacggaagaccacaccccgagg

SEQ ID NO: 22814 - RNA, 56 nt, Homo sapiens
ggcggccacaagcaaagggacagagcgaagaaccccccaagaagacgaaacccccg

SEQ ID NO: 22815 - RNA, 81 nt, Homo sapiens
cacggagaaaaacggccaagaggcagaccaggaaaggcaacccacagagagagaggaaacgaagggagcgacacacaccca

SEQ ID NO: 22816 - RNA, 77 nt, Homo sapiens
caggcgacgagccgaccccagaggacaggcgggccagcgggggaacaggaggggcagaacagagagcggaacggaag

SEQ ID NO: 22817 - RNA, 70 nt, Homo sapiens
gcagcccaggcccagacaggagcgggagaaaagaaccgacccacaccaagggaaagcaacggcgcaagcg

SEQ ID NO: 22818 - RNA, 82 nt, Homo sapiens
cccccgcaccagccacacaccagccacaccggagaggcggggacccaggacacggaccgcgggacagcccgcccagcccggc

SEQ ID NO: 22819 - RNA, 71 nt, Homo sapiens
gacgagacccaaacacagaagaaagccacgggaggggcccgggcagagggaaagcagaggacggaacaacc

SEQ ID NO: 22820 - RNA, 72 nt, Homo sapiens
aaggcaaggaaaaacacaacccaagaaggacccagcaggacgaccagccaaagagcccaacgccaagcaacc

SEQ ID NO: 22821 - RNA, 80 nt, Homo sapiens
gcgagggggcggcggcgacagccaggcccggaagcgagggcggccgcgccggcccaggaacagagacagacccgggggcc

SEQ ID NO: 22822 - RNA, 78 nt, Homo sapiens
aacaacaggggccaagagagcagccaacggggaaagggaagaaacccaaaaggccgccacaccaccacggcagcaggg

SEQ ID NO: 22823 - RNA, 75 nt, Homo sapiens
accgaaggaacaagccccaggcagcggaaccaaggagagggagcgccaggaaggaaagaagcaaaaaaaacggga

SEQ ID NO: 22824 - RNA, 77 nt, Homo sapiens
cgacgaggagggcgccccgggacggaagcccgcgcagccgccagcgagggccacgcagccccaggccaccgcaccgc

SEQ ID NO: 22825 - RNA, 73 nt, Homo sapiens
gcaggaccacccaccagccaccaggagcgagaaggaaaggaaacgaaaagaaaacaggagcccaacgcagacc

SEQ ID NO: 22826 - RNA, 76 nt, Homo sapiens
cagagaacagccccggaggagacccacacgaccagcgccggagggggaggcaccacgagggcagggcaggcagaag

SEQ ID NO: 22827 - RNA, 84 nt, Homo sapiens
gggggaccaggaagagagaacgccagcggcccggaggcggagacaccaaaacccccaggcaacagaaggaaaccgggagagggg

SEQ ID NO: 22828 - RNA, 72 nt, Homo sapiens
caccacgggcacccgcgccgggcaccgaggaccagccaagacaggccacacggaaggaacccagcgagggac

SEQ ID NO: 22829 - RNA, 68 nt, Homo sapiens
gaaaaagaccaacgcgaaagaaggggacaaaacccacgaagcaaagcgcaacaagcacccaccaagcg

SEQ ID NO: 22830 - RNA, 68 nt, Homo sapiens
acagaggacaaggcagcaaagaagaggacgaacagacgaaacggaagaacgaaaagggagaggaggag

SEQ ID NO: 22831 - RNA, 72 nt, Homo sapiens
gcccccccccaacagaccaaggagccagggcacacccaacccaaaagaggcaaaggccgggccaaaacacac

SEQ ID NO: 22832 - RNA, 76 nt, Homo sapiens
ggaccggacggccgagggcacacaggcccgagcacaaacacaagaaacgcacgcccgccagcgagaagagagagaa

SEQ ID NO: 22833 - RNA, 76 nt, Homo sapiens
caaggggggccagaggggagcacagagcgagaccaggaaagaagggggcagaagagggcggagggaaggaagcaag

SEQ ID NO: 22834 - RNA, 79 nt, Homo sapiens
ccagaacacaaagcggaaccggaagaaaagcaacggaaacacaagcgccaagcccaaccaaaacgccaagaaaggcgga

SEQ ID NO: 22835 - RNA, 65 nt, Homo sapiens
aacgccggagcacgggcagcgaggggccgcaagagacaccacaaaaggacacccgagcgcggaaa

SEQ ID NO: 22836 - RNA, 76 nt, Homo sapiens
gccgccaccaccgaaggacgagccccggggaaagaccgccagcgaggcagacacacggcagcacaccgcgcccaca

SEQ ID NO: 22837 - RNA, 63 nt, Homo sapiens
agaaggaccaagaaccagccccaaggacaacacagcaaagagagcaggggagaacaaaccaca

SEQ ID NO: 22838 - RNA, 36 nt, Homo sapiens
gcagagccagaaagaggagcaggccgaggaaggcgg

SEQ ID NO: 22839 - RNA, 68 nt, Homo sapiens
caagccagggggaaaccaggggagagggacccaccacaaaggcccacaacggggcgaggaagagacag

SEQ ID NO: 22840 - RNA, 60 nt, Homo sapiens
gcggcggggggcgcgcaggccgcgacgagggcgcgaggaccacacgggccacagcagggc

SEQ ID NO: 22841 - RNA, 46 nt, Homo sapiens
gcacaccaaagcaggagcaaacaaaggcacaccaacggcaacggag

SEQ ID NO: 22842 - RNA, 73 nt, Homo sapiens
caccgacgagcgaagagcaaggagacggcgaagaacagaggaacaacgccaacgacaagacgaggaccaacgc

SEQ ID NO: 22843 - RNA, 83 nt, Homo sapiens
ggggcggcgggcgcgcgggaggccaagaccgcggggaggagccgcagcgccagcaccaggcccccccagcgccgccgcccagc

SEQ ID NO: 22844 - RNA, 61 nt, Homo sapiens
caaccggccacgaggagggaccgcaccgacccgacccagcagaagcaaacagcaagcacaa

SEQ ID NO: 22845 - RNA, 85 nt, Homo sapiens
gaccccaggccgagcagagcaccggccagaacaagccaaggagccaagacgagagggacacacggacaaacaacagacagaagac

SEQ ID NO: 22846 - RNA, 83 nt, Homo sapiens
cgcggacggagcagaaccccaggacgcgcccccgggagcgggcgcccagaggcagggaagcaaagagcacccgagcccagcag

SEQ ID NO: 22847 - RNA, 75 nt, Homo sapiens
aaggccccacagcaacgagagccagagaagaagggccgcgaggaaaagcccagaaaaaccgacacaaggcggccc

SEQ ID NO: 22848 - RNA, 78 nt, Homo sapiens
ggccgggcaaaggacagaaggaccgaaacacgcaagaaaacgaagccagagcgacagcaaccggaaagggccaaccgg

SEQ ID NO: 22849 - RNA, 36 nt, Homo sapiens
gggaccgcacacccaagcacccagccgccgaaacca

SEQ ID NO: 22850 - RNA, 74 nt, Homo sapiens
accagagaagaagaggagcaccccacacagaccaaaaagaccaggggcaacgaggaacaggccaagaaacaaca

SEQ ID NO: 22851 - RNA, 69 nt, Homo sapiens
ggaagacggagcggcggcccgaagccggaaccaaaaagaagccccagagccggggccaggagccccaag

SEQ ID NO: 22852 - RNA, 51 nt, Homo sapiens
gccggagcagcagcccgaggagaagcaccgacaaccggagaaagcagacgc

SEQ ID NO: 22853 - RNA, 75 nt, Homo sapiens
cgggccccccgaggcgggcccaccgccgcccccggggaccaaggaggaggagcaaaacaaggggccccaagggga

SEQ ID NO: 22854 - RNA, 77 nt, Homo sapiens
gaaggaagggcaggcaagacccaccccgggaagaaagcaaacaggaagcggacagcaagacaggccccggaacagca

SEQ ID NO: 22855 - RNA, 71 nt, Homo sapiens
gccggccaaagcacaacagaggcaaagaggaacagggcaaagagaggagaaaaggacgacggaaccaccac

SEQ ID NO: 22856 - RNA, 58 nt, Homo sapiens
ccgagcggggggacgcgccaggcacagcagcaggccgcccggcagcccgcagacggac

SEQ ID NO: 22857 - RNA, 92 nt, Homo sapiens
agagagacggagcaaagaaccccgggcagaggaaacagcagcaggccaagcggcgagccaaaggggggaaaacacagaggagaaccgccggc

SEQ ID NO: 22858 - RNA, 78 nt, Homo sapiens
gggaagaggcgccgggacagggcagagagacgaagagagaagcagggcagaaagagcggaaacgagaagagcaaacac

SEQ ID NO: 22859 - RNA, 79 nt, Homo sapiens
accccgccaggcagcaaaaacaagcagcgacccacagggcagaaagacccgcccgcagaggaaaccgacccggacagac

SEQ ID NO: 22860 - RNA, 72 nt, Homo sapiens
cggaaaccgaaacggggaaaaaaaccgcagggcggagagaccagggggcccacgagaagagcaggcgacggg

SEQ ID NO: 22861 - RNA, 70 nt, Homo sapiens
gcggccgaagcaggaaccagcaacacacaacaggccaagggacaccaccccggcacgagaccggcggacc

SEQ ID NO: 22862 - RNA, 96 nt, Homo sapiens
cccaagggacacccacaggacacgcacagcaaggcagaccagcaagaacagagaagaacgcggcagaacggaggcaggcagcacgagacacaccac

SEQ ID NO: 22863 - RNA, 66 nt, Homo sapiens
agaggggggggacaagggccggagacaccagaaaccgggggcgcccccaagacacccaccacggcc

SEQ ID NO: 22864 - RNA, 83 nt, Homo sapiens
aaagaagaccacacacgggaaacacaaaacgcccaaaaaaggaccaagccccagaagcgccgggacgcaaaaaggaacacgac

SEQ ID NO: 22865 - RNA, 102 nt, Homo sapiens
ggcgagccgcaggaggccaacgccggcgacaccggccggcgcaggagccaagccgccaggccaccacagcccggggagcccacagcgccacgccggaacaag

SEQ ID NO: 22866 - RNA, 78 nt, Homo sapiens
aggcaaagcccaaaaggcaaggcacaagggcggaacagaacgacaggagaacagaccagagcgaagaacaggaccacc

SEQ ID NO: 22867 - RNA, 79 nt, Homo sapiens
aaccgcgaaggaaggcaccaaggagaaacaggacccaccccgcccgggcaaacgggaaaaaggagcaccacgaagaaac

SEQ ID NO: 22868 - RNA, 53 nt, Homo sapiens
ccaggacgcaggcaaagagagccaccaagaagccacgaagaagccacaacggg

SEQ ID NO: 22869 - RNA, 79 nt, Homo sapiens
acagaagcgcacagcgcgcgcaagagaaaacgacgaacagaacgaacagaaagagaagcgggagagccggggagacagg

SEQ ID NO: 22870 - RNA, 78 nt, Homo sapiens
cacccaaaggggaggggccagagccccgccacggaaaacagggaacaacagacaagccgcgcccccaccaggggcacc

SEQ ID NO: 22871 - RNA, 82 nt, Homo sapiens
ggacccagccccagaacggcggggaacacagaggaaggacggcgggggcagggaaagcccgagaagagggaacacgagcggg

SEQ ID NO: 22872 - RNA, 75 nt, Homo sapiens
agacagaccaaaagcggggagaagagggaccgaggggagagaagagaagagccccgaggcgccaagaaaacacag

SEQ ID NO: 22873 - RNA, 79 nt, Homo sapiens
caaccccccgacccgggaacagaccaaccgccaaaaaagccaccagcaaaccccccacagcagaccccaaaggaaacga

SEQ ID NO: 22874 - RNA, 74 nt, Homo sapiens
ggggcccggcaccaggaccaccgcggcagcacgcggcgggcaaggccagagaaggcgggagaaagacacgaacc

SEQ ID NO: 22875 - RNA, 84 nt, Homo sapiens
gagaacgaccggcccgccaagaccagagaaggaggagggaccacgcgcgagccgaagacgagagaggaagaagagaagaagccc

SEQ ID NO: 22876 - RNA, 80 nt, Homo sapiens
ccaagagggacccacccggcgggagaagcagaagcccgcacagagcagggaccccaaccgccgggggaggacaccaggcc

SEQ ID NO: 22877 - RNA, 77 nt, Homo sapiens
gggccgcgcagcgccgaacgacgggccacagaggagaacacagcaacagaagagaccaacccaagcgacccgccggg

SEQ ID NO: 22878 - RNA, 58 nt, Homo sapiens
agaccaggaaacccgaacccgccaggaggggaggagggagggccacggcaagggaagc

SEQ ID NO: 22879 - RNA, 83 nt, Homo sapiens
cgcccgggcccgaggaggcagccaagccaggccgccacgcggcccggcacagccacaccgagaagaccggcccaagaacccca

SEQ ID NO: 22880 - RNA, 76 nt, Homo sapiens
gccgcaggagacgagaggacgggaccaggcgaagcggccgagcaggcgagcgaacgacggaagagacccagacgaa

SEQ ID NO: 22881 - RNA, 57 nt, Homo sapiens
aagcagcgccaacccccacaaagccacagcagcgcaggcacaaagggcggcaagagc

SEQ ID NO: 22882 - RNA, 73 nt, Homo sapiens
ggcaagcaaccagcagcccccagagggaggaaagggggacggcggggggagacccagggcggagaaaaaagag

SEQ ID NO: 22883 - RNA, 76 nt, Homo sapiens
cacacacagcggaggcaaggaagcagacaagcacccaacaaaccaagagaaagggacagagcacagcagcacgacc

SEQ ID NO: 22884 - RNA, 75 nt, Homo sapiens
gcagagaaagacgggagcggggcgcgcagacccaaggcaccacagaaaagcaaggcgaaggaggacaggagacga

SEQ ID NO: 22885 - RNA, 81 nt, Homo sapiens
ccgacagagggaaaagggacgaggaagaagggcaggaccgggcggaggccgccaagacgacaggcgggaaccaaccacccg

SEQ ID NO: 22886 - RNA, 85 nt, Homo sapiens
gcagccgcgcccggccccaggacgcccggcggccggggagccggcccaagcgggaccgaagggcgcaaacaggcacgggcaacga

SEQ ID NO: 22887 - RNA, 94 nt, Homo sapiens
ggcaacaccagacaccaaggacagcccgcaaggaaacacagaggccaacagcaagagcaaccagggaccaccccacaacagggaaccaccccag

SEQ ID NO: 22888 - RNA, 67 nt, Homo sapiens
gaagagcaaaaggaaccgaggaaaaggaggggagcagcacccacgcagcacaaaaaaagaggaaaag

SEQ ID NO: 22889 - RNA, 58 nt, Homo sapiens
caaagccaccaggcgcacaccaacccaacagaggaagccgcaagaaacgggacgacag

SEQ ID NO: 22890 - RNA, 74 nt, Homo sapiens
cagaggaccggcaacaacccgaggacgaaccaccccgcgccagcagcacagcacggccaggaccccacaccaag

SEQ ID NO: 22891 - RNA, 61 nt, Homo sapiens
cggggggagccggcggacgcgcgggcaaaaagcagcaaacaaaaggaggcaaaggacgcgg

SEQ ID NO: 22892 - RNA, 73 nt, Homo sapiens
aaggaccaagaaccagacccgggccagccgccggaacccgaacgggcgggcggccgcggccgggccaggggca

SEQ ID NO: 22893 - RNA, 113 nt, Homo sapiens
cgcacaaggcggcagcgccgagcgaacagagaacagcgccggaaaaccaccaccccaggccccaggaagagaaccccccgcagaagcgggagcgccccagagagcgggagaga

SEQ ID NO: 22894 - RNA, 71 nt, Homo sapiens
ccaacgagcaagcgagaacacacccaaccaggacaccgacggagagcagaggacagcgggggagccggaag

SEQ ID NO: 22895 - RNA, 80 nt, Homo sapiens
ccagagaggaggcagaagacggccagggagagaggaacccaagacaccaccagacggaaagcacccgaggagaaagggaa

SEQ ID NO: 22896 - RNA, 62 nt, Homo sapiens
ggagcaggggaacaggcggaaacccaaccaagaaggcccagacacccgcagccgcacagccg

SEQ ID NO: 22897 - RNA, 68 nt, Homo sapiens
cggcagggcaagcggcgacacacgacggagagcgacaagaaaagcaaagagagagccaagagagcgaa

SEQ ID NO: 22898 - RNA, 70 nt, Homo sapiens
aggcgccccggcccaacgcaagcagcaaccaagcaagccagccgggagccagccgaacccagaagaaaca

SEQ ID NO: 22899 - RNA, 67 nt, Homo sapiens
gaagcagggccccgaaggaaaaccagcagagcgcccaccacaggaccgcggaggcaaccccgcgcac

SEQ ID NO: 22900 - RNA, 80 nt, Homo sapiens
gcggccgcgagagcccagccgccgggcaggggacggaacaggagacccaagaaggaaggaaaagaaaagccaaccaagac

SEQ ID NO: 22901 - RNA, 92 nt, Homo sapiens
gagccacccgggagaggaagagcgaggaggaacgcgcaaggcaaagcaccgggcagcaggagcggagggcccccgcccaggggaaggacgag

SEQ ID NO: 22902 - RNA, 60 nt, Homo sapiens
ggcagacagggcgggcggccgggagagagcaggccggaccccagaaccccccggacccaa

SEQ ID NO: 22903 - RNA, 81 nt, Homo sapiens
agacacagcccgccaaggcagcagggcacggcaaggaaggccgccaggcgccaggaacagcgacagcaacccaaagaagca

SEQ ID NO: 22904 - RNA, 53 nt, Homo sapiens
gacgcccggaagaggcgaaacgggacgccccacagacagaagacaaaaagaga

SEQ ID NO: 22905 - RNA, 58 nt, Homo sapiens
caggcccgccacggaggcgcgcgcaaagcccgcagacaagaacaaccagaaaaggagg

SEQ ID NO: 22906 - RNA, 70 nt, Homo sapiens
ggagccccggcgcggcggggacggcgccgcccaggccgcgagggcagcccccgccgccagagacacacaa

SEQ ID NO: 22907 - RNA, 88 nt, Homo sapiens
aaccgcaccaagaagcacgaccgcgagggcacacagggaccaagaagccccggggacacgcgagaaaagacgccgaagggaagaccag

SEQ ID NO: 22908 - RNA, 75 nt, Homo sapiens
ggggaggagacgggaacagacggccaccgcagcgcccgcaaggaagagcgcacgaggagacccaaaagccgccaa

SEQ ID NO: 22909 - RNA, 78 nt, Homo sapiens
gaagagaaagagacccaggagccgagaagcgccgccagcgacacaagaggagggggcggcgcccggccaccagaagcg

SEQ ID NO: 22910 - RNA, 83 nt, Homo sapiens
ccacgggcggcgcagggggaggcccgcaggaaggcccggacaagcccccggaggagcaagccgcccaccgcgggacgcaccgg

SEQ ID NO: 22911 - RNA, 75 nt, Homo sapiens
ccccgccggacgagagcccgacagaaccgggcgccgaccggaccacccagccaacaacccaacgagacaggagag

SEQ ID NO: 22912 - RNA, 69 nt, Homo sapiens
gacccaaggaacggaagacgggcacagccacgcgggccacaccgagccaacccgagggagcgaccgagg

SEQ ID NO: 22913 - RNA, 81 nt, Homo sapiens
gaggaaaacaagcggaacgccgccacggaaggggcccccggggaggccgacccaccagaccccaagaagaagcggaagagg

SEQ ID NO: 22914 - RNA, 39 nt, Homo sapiens
agggccaacgccagcagcacaggcggaggcaaggcggac

SEQ ID NO: 22915 - RNA, 86 nt, Homo sapiens
cggagcccccagcgcagcggccgcggcccggagcagcaggcagccacaaaccggagaaccagcgcacagcgcacagaagaaccccg

SEQ ID NO: 22916 - RNA, 71 nt, Homo sapiens
gaaaccgagagaagcaacaaaggagacaggcgcagccagccccaggccgcgagccggacaacacaccacaa

SEQ ID NO: 22917 - RNA, 71 nt, Homo sapiens
cgaaagaaccaccccaccgcccccccagccgagaacggcaaccaccgaaacgagaagaacgaaagagaaac

SEQ ID NO: 22918 - RNA, 73 nt, Homo sapiens
cccgagcaaagcacgaggccggcaccaaggcagaaaaagcaagaagaaccgaaggcagaagcagcaacaaaag

SEQ ID NO: 22919 - RNA, 74 nt, Homo sapiens
agggaacggagcgcccccacgcggggggacgcccacccgggccacgcagcagagcagcaccagggcgggaggcg

SEQ ID NO: 22920 - RNA, 75 nt, Homo sapiens
gacacacagagaggccaaagccagagacagagcacaaaggagaagccccggggaaagaggaggaaaacaaaggca

SEQ ID NO: 22921 - RNA, 77 nt, Homo sapiens
ccgcgccaggcggcccccggcagcgcccggcgaccccgcgcgcacgcggcgcgccggggcccgggcagagggaaagc

SEQ ID NO: 22922 - RNA, 68 nt, Homo sapiens
agccaggcccaccagcagaaagccggaagcgggcagcccacccagaggagcgcaccccaagaccacga

SEQ ID NO: 22923 - RNA, 76 nt, Homo sapiens
acgaacggaagaggcagacgaacgggggcaggaggacggcaagcaaaagcagaccggaaaacccaccggcaagacc

SEQ ID NO: 22924 - RNA, 50 nt, Homo sapiens
gacacggggaccagaaggcagaaagagagccgcgcaagaccgcagagaag

SEQ ID NO: 22925 - RNA, 104 nt, Homo sapiens
acgccgagacgagaagcagcgcggcgggacaagcgcgacgcccggcgcgagccaagcgcgcgccgcccaccgggggacggcacggcaggcggacgcccggggcc

SEQ ID NO: 22926 - RNA, 51 nt, Homo sapiens
gcgcgcgaggacggaggccgcaggaggagagaaagaacccacgcaggacga

SEQ ID NO: 22927 - RNA, 88 nt, Homo sapiens
cggaaaaaacaagaaagagccagccaggcggagagggagagcaaggcgcaggcaccgccagcacaacaccgcgggggcaccgcgaccg

SEQ ID NO: 22928 - RNA, 57 nt, Homo sapiens
cccaaaagccgacaaccccagaaacaggccggagcccaacagaaagcccagcccccc

SEQ ID NO: 22929 - RNA, 68 nt, Homo sapiens
ggcgcggaggacgccccaccgccgacgcccccagccaccaggccaagcaaggcagccacgagaccgcc

SEQ ID NO: 22930 - RNA, 87 nt, Homo sapiens
ggaagacaggcggcgcggggaggggaacgccgaaggccgcgcccccccaggcggccaggagcgcgccggggcaaagaaaaaggagag

SEQ ID NO: 22931 - RNA, 70 nt, Homo sapiens
gaaaaagggaggaaggaaagagaagaggacagggcccaggacaggcacacagggaggcacgagcagaaga

SEQ ID NO: 22932 - RNA, 77 nt, Homo sapiens
cagaggcaggaagaagaacaggaagagccagaagcagcagccgcccaaaacacaaaccaaagaagaaacccgaagga

SEQ ID NO: 22933 - RNA, 76 nt, Homo sapiens
aaaaacggaacagagggccaaaagcgagacaagacgaaaggacgccacaaggagcaaagaagaaaagaaaggaaga

SEQ ID NO: 22934 - RNA, 75 nt, Homo sapiens
ggaagaagcgggacccgcagggcaaaggggggaagaacaagagggaaagggccccaagagccgggcggaaaacga

SEQ ID NO: 22935 - RNA, 67 nt, Homo sapiens
aggaggggagaggaggcaggcccgcggaaaggcccgagccaaaagacccagagaaaggagcacgaag

SEQ ID NO: 22936 - RNA, 73 nt, Homo sapiens
cacgggcaccaggcggggcgaggcagccagcaaggggggaggcagcacccggcggcacgcgccccgcaaagac

SEQ ID NO: 22937 - RNA, 76 nt, Homo sapiens
gacagaaaacgggcagggcagccacaaagaggagcacgaggcgaagacggaaagacaccagaacgaacacgcaagg

SEQ ID NO: 22938 - RNA, 104 nt, Homo sapiens
acccagggcggaaaggaagaggagacagagggccgagaaggacaggacagggaaacaccacaaagcgagcaaacccaccaaagagggccggaacagcccaaacc

SEQ ID NO: 22939 - RNA, 71 nt, Homo sapiens
acgagcaaagagcggacccagcaggccccacgccaaggacaccaacagacaacagcggcccagaggccacg

SEQ ID NO: 22940 - RNA, 77 nt, Homo sapiens
gcacccgacgggggccgggacacaccacacagaaggcggcacccccacaagcgggaggaacagacacgccagaccga

SEQ ID NO: 22941 - RNA, 53 nt, Homo sapiens
gaaccaccaggagagcaaggggcacagagggcacgggaaaacggccaagagag

SEQ ID NO: 22942 - RNA, 105 nt, Homo sapiens
cccccccaccccgacgaccggaccgaggaggcagcgcggggcagcgcgagccgggaaggagcagcaccgaggccccccccaccccccgcccgcggcgccaccccg

SEQ ID NO: 22943 - RNA, 81 nt, Homo sapiens
ggcagcccccggagccccccgggacccacagcaccccgaggcccgacccagcgcccccacgagaaggggacccagacccac

SEQ ID NO: 22944 - RNA, 79 nt, Homo sapiens
agagcagccccccccgccaccccagccccagccacagacacaggaccggccagccgcagcgagaccaggagccgcccga

SEQ ID NO: 22945 - RNA, 76 nt, Homo sapiens
agaggagcagggaggccacaggggccgaaacacagagcaaggaaccccaaagaggcccggaggaaacaggaacacc

SEQ ID NO: 22946 - RNA, 78 nt, Homo sapiens
acgccggagggaagagcgagggagagggggggcaccaggcaggggccagcagaccaagccaccacaacacgaaaagaa

SEQ ID NO: 22947 - RNA, 68 nt, Homo sapiens
caagaaaacgagagaagcgagaggagaggaaaccaaaagaagacggaaaaaggccaaggaacacaaaa

SEQ ID NO: 22948 - RNA, 85 nt, Homo sapiens
cgcggaggccgcgagaccgcagaaggagcggagcggcagcagaaggagggaaaagcacagggccaggaagcagagggacagccag

SEQ ID NO: 22949 - RNA, 64 nt, Homo sapiens
cccgccagcagccgccggagccagccaacgagcggcacggagcgcggacgcccaggagcgggcg

SEQ ID NO: 22950 - RNA, 81 nt, Homo sapiens
ggcgggagcgcggaaacggaaccgggaggcgacgcacacgagcggaggcgaagggcaggccacgcgggggccggcgcgggc

SEQ ID NO: 22951 - RNA, 75 nt, Homo sapiens
aaaccgaaccccccgagcggccgaggggcacgcaggggaaaccgagcaggacagaggaaaagaacaggcaaacaa

SEQ ID NO: 22952 - RNA, 82 nt, Homo sapiens
gagaggagcaccgcaaaggcaccggccgagccacggagcaaggggccaggacaaccaccaccagcgagcaaaagaacaaaga

SEQ ID NO: 22953 - RNA, 76 nt, Homo sapiens
aaaaaccggagagaaagaaagaaaagagcagaagaaaaacgcgccagacaagaaagcaggacagaggaaagaaaca

SEQ ID NO: 22954 - RNA, 65 nt, Homo sapiens
ggagacccggggacccccgacgccaggcagcgcccccaaacgacgaagaccggagaacaaaaaca

SEQ ID NO: 22955 - RNA, 55 nt, Homo sapiens
aaagggccaaagaagggagagagaagcaacccaggcacccccaacaggcacccac

SEQ ID NO: 22956 - RNA, 82 nt, Homo sapiens
gccggagacgaaggaaagaaaaagcggaaaggaacagcacagacagaaggggagcacagacagacggccagcagcacagaca

SEQ ID NO: 22957 - RNA, 64 nt, Homo sapiens
caacccagacgcccacaggacaaggaccaagaaaggcccagggaccaaagcccggacaaggccc

SEQ ID NO: 22958 - RNA, 75 nt, Homo sapiens
gcgcccaccgggcacccacgaccacaccagcccaggggcaccagccacgccaccaagaaaccgcagcaccagaac

SEQ ID NO: 22959 - RNA, 68 nt, Homo sapiens
cacaacacagacccagaagagacgaaaaagacggggcaccacccagggcagagaaaacagaagagaaa

SEQ ID NO: 22960 - RNA, 61 nt, Homo sapiens
gggcggcaaaggagcagccagagggccgggcccagcaccgaccgcacacagagaaaaaaag

SEQ ID NO: 22961 - RNA, 80 nt, Homo sapiens
cgcaggcggagggcggacggacgaggacgaggacgaccggagggcagcaagagaccggcaaacccgaacacaaaccagca

SEQ ID NO: 22962 - RNA, 75 nt, Homo sapiens
cgacagccacacaacggacagacgcggcgaggaagagggcagacgcccacgcaaagggagggacagagaacaggc

SEQ ID NO: 22963 - RNA, 77 nt, Homo sapiens
ccccaaaacaggcacagacggcgacggccacacggcccgggacgagcggcccagcgacgagcgaagaggcacaaaac

SEQ ID NO: 22964 - RNA, 61 nt, Homo sapiens
cacaaaagagcagaggaggaacaccaggcacaaggggagaaaacccaggaggaagagaagg

SEQ ID NO: 22965 - RNA, 85 nt, Homo sapiens
ggggcgacgcagagccgagcgaagcgggaggggcgaccccggggcccggccagcacgaccgaggaggggcggacagcggaggaga

SEQ ID NO: 22966 - RNA, 82 nt, Homo sapiens
gaaagggaggcgcgaaaaagcagcccaggggcacgggcacagcccagaagaccagcgagaggcgccaacaagagaagggcca

SEQ ID NO: 22967 - RNA, 82 nt, Homo sapiens
cacgcacgggaccagagacacaggcacgacagaagcagcagaagcagcagcagaaaaagccaccggagcgaagcgaaggaag

SEQ ID NO: 22968 - RNA, 63 nt, Homo sapiens
acaagaccaagcccgcggacgccaggggccagacccacggcgggcggcacccagagaccaccc

SEQ ID NO: 22969 - RNA, 78 nt, Homo sapiens
caggagcaaccggggccgcggacgggacgcgcggcgggcagcaaaccaccggaccagcaaaacagagagaacccacca

SEQ ID NO: 22970 - RNA, 78 nt, Homo sapiens
aacgggcgaagaggggccagggcgaaccgaccaagaacaacacccagagggccaggagaaggcgaagagagcagcgac

SEQ ID NO: 22971 - RNA, 105 nt, Homo sapiens
caggcccgagcgcccggcgcccgcgggccgcagcggggggggcgcccgcaacgaggaccacccccgggaccgggccgccgcccacagaccagcccggggcgccga

SEQ ID NO: 22972 - RNA, 82 nt, Homo sapiens
aacggaaggcacaacaggcccgcggcaggcggggccaggcccgagccagaaggaggcccacagagccccccacacagcaacg

SEQ ID NO: 22973 - RNA, 88 nt, Homo sapiens
agcgccgccaccagccgggcaccggggagccggccggacacggggacagaccagagcaggaccaaaggcgcacagagccgaaccccac

SEQ ID NO: 22974 - RNA, 67 nt, Homo sapiens
aaacaagggaaagcaacggcgaggacacgccccacaccccagaaccacgggaagccacacaagaaga

SEQ ID NO: 22975 - RNA, 77 nt, Homo sapiens
cagccccggagagcgggaacagggagacacacgcccgcccccacgcccagacgcgcgggcgagcagggcccccgaga

SEQ ID NO: 22976 - RNA, 43 nt, Homo sapiens
aggagcggaacaacgcggcgagcgggccacgccacccgaccca

SEQ ID NO: 22977 - RNA, 67 nt, Homo sapiens
ggacagaagcgcaaaaaacgcccacgagaggacacaaaccaccgagcccccggaagcacagccccac

SEQ ID NO: 22978 - RNA, 81 nt, Homo sapiens
gccaggaagccgggagccgagacccgggggccaagcgcagggaaggaaccgcaccaagaaggaagacaccagaccgccccc

SEQ ID NO: 22979 - RNA, 69 nt, Homo sapiens
gcagagcagagacgcaggacacccagaacacgaaagacccagcaggacgaccagccaaagagcccaacg

SEQ ID NO: 22980 - RNA, 61 nt, Homo sapiens
ggacaccaggcagaggcaagcgcggaccggaaacaacgggacgaagccccaaacacccaac

SEQ ID NO: 22981 - RNA, 66 nt, Homo sapiens
agccaaaacaaagaaacagcagcagggccaggggccagggcaaaggcggacagaggaaaggcaagg

SEQ ID NO: 22982 - RNA, 60 nt, Homo sapiens
gcagaggcacccaaagggagccccggggaggaaccggcagaagcgaaaggccagaggagg

SEQ ID NO: 22983 - RNA, 71 nt, Homo sapiens
gcacagagcgagaccaggaaagaagggggcagaagagggagggaacaggcacgccccacccgccagccgag

SEQ ID NO: 22984 - RNA, 77 nt, Homo sapiens
cacggcgggccgaccaaggaccccaaggcgggaggggcgaacggggaagacaggccgaggagcggggagaccaacca

SEQ ID NO: 22985 - RNA, 74 nt, Homo sapiens
cagcgcacagggccaccccgcccaggggcggcagggggaccagccagcaacccgcccccggaccaagcaacccc

SEQ ID NO: 22986 - RNA, 82 nt, Homo sapiens
gaaagaggaggggaggaggaggaggacagggaaaggagcggggagccccgcgccacagacgcagaaaacagacacacagcgg

SEQ ID NO: 22987 - RNA, 71 nt, Homo sapiens
cgaaaagcgcagcgagcggagccgccggaggggccgccacaggcgcccgcaaaggccccgccagagagaac

SEQ ID NO: 22988 - RNA, 80 nt, Homo sapiens
gaacagcacccagacccgcgaccgaagaacacaggaagagcacgaacccaggagccgggcagccgcgacacagcagcagg

SEQ ID NO: 22989 - RNA, 70 nt, Homo sapiens
acacaccggagagcacgagaagggaacggcaccgggagaggaggccaagcggaggaccgagccccccaga

SEQ ID NO: 22990 - RNA, 72 nt, Homo sapiens
gacaaacacagggaccacaggggcagcgccggagggagaagggaccggcccagcccaccgaagcccggggaa

SEQ ID NO: 22991 - RNA, 71 nt, Homo sapiens
cacccccagggcagaaaagcgaccaggcgagaccggagagaacagaaaaaaagcggcccgggaccaggaaa

SEQ ID NO: 22992 - RNA, 68 nt, Homo sapiens
ggggaagacaagccagggacagcaagcgcgaagccagcgcggggagcaagggaacacccgaagaccgg

SEQ ID NO: 22993 - RNA, 61 nt, Homo sapiens
gccggggccgggccaggagcagaggaacggcagagcgaaacaaacaagagggcgaaccagc

SEQ ID NO: 22994 - RNA, 84 nt, Homo sapiens
agggccgaagcaaaagccaggaggaagagcagaccggacgagacacaccacgggggggccgcccgcccaaggcaggaagagggg

SEQ ID NO: 22995 - RNA, 75 nt, Homo sapiens
cggcgcgcagggaccggggcccaagggaggccagagagaagcgaacaaaaaagaagaacggaggaacaacaaaag

SEQ ID NO: 22996 - RNA, 74 nt, Homo sapiens
agcagaggggcgaaaagggacaagcagagcacgacagccggcgaagaagaagcaggaccaagccgagcgacagg

SEQ ID NO: 22997 - RNA, 74 nt, Homo sapiens
ggacagcagcgcaggcaaaaaacaggagcacagcacagcaacagacccggaacagcccagggaaacagcgaccc

SEQ ID NO: 22998 - RNA, 74 nt, Homo sapiens
cacaacccaggagaggacacaggcaggaagcagaaaccaaggcacagcggccccaggccccgcaccgcgagccc

SEQ ID NO: 22999 - RNA, 55 nt, Homo sapiens
agcggaaaccagggccacagcacgcagccccaggcagcaaccgaacgagagccca

SEQ ID NO: 23000 - RNA, 75 nt, Homo sapiens
acccaagaaccaggggagaagaaggcaagaacgccccggcaaggacggaggcaggcaccaccaacagcggggaaa

SEQ ID NO: 23001 - RNA, 78 nt, Homo sapiens
cgcgcgcagaagccagggacgaccgcaaccaaacccagccgccaggagaagcccaccaggacaggagagacaacggag

SEQ ID NO: 23002 - RNA, 78 nt, Homo sapiens
aacgaaaagagaacaggccgaccgcgggccgcgcacccaccgccaaggacaaaaggagcccagcgcacagcgcacccg

SEQ ID NO: 23003 - RNA, 36 nt, Homo sapiens
gcaacccccagcacaggacaggacaacgcacaacag

SEQ ID NO: 23004 - RNA, 57 nt, Homo sapiens
ccacaggcacgccgaaaccgcaaaccccaaagcccagaaccgggacaacccagcaaa

SEQ ID NO: 23005 - RNA, 79 nt, Homo sapiens
gcgggcgcaccaccggagagaacgcaagccagcgccgcccgcacagggccagacggacacgcacggcgccaacagcaac

SEQ ID NO: 23006 - RNA, 76 nt, Homo sapiens
gaaacggacacagggcgcaacgagacacggagcagcccagcaagcccagagggccacacaaagaaagaggaggcaa

SEQ ID NO: 23007 - RNA, 74 nt, Homo sapiens
acaagcagagacgaaccaggcaaagacgcggacagaagaaaagcccccccggacagaaacaccaaacacgaggg

SEQ ID NO: 23008 - RNA, 79 nt, Homo sapiens
gcgccgccgccgccgccccgccggccccaccgccgcacgccgccggggcgcggccgcccgagcaccacgcgcgcccgag

SEQ ID NO: 23009 - RNA, 83 nt, Homo sapiens
gaaacccggacaccaggaagaagaaaaagagaacaaagcaccagaaagaaagccagaggacaaaacccagccggcacaaacca

SEQ ID NO: 23010 - RNA, 62 nt, Homo sapiens
cgggaccgcggccaacggggaacgaggacgcggacgcgaaggcaggcgaccacagcacacaa

SEQ ID NO: 23011 - RNA, 55 nt, Homo sapiens
cgggacacacgggcggagcaggaccaaccagacaaggcgggagagacggcaggac

SEQ ID NO: 23012 - RNA, 74 nt, Homo sapiens
gcgccgcagcagagagcacaacaccccgacccccaaggaggcagaggagccaccaggcacgcaacagcacccag

SEQ ID NO: 23013 - RNA, 78 nt, Homo sapiens
cggggcggccgccagcacaagcgcacccgcacaggagccgggcagagaaaagaacgcgaggagaaccccaggaggagg

SEQ ID NO: 23014 - RNA, 73 nt, Homo sapiens
gacccggggcgaagcagagcgggcagccgacagacaccagccgcacccaagcgcaggggggcagagagccacg

SEQ ID NO: 23015 - RNA, 75 nt, Homo sapiens
ccacacgcagcgcgcaacaccccacaggagggcgagcggcagagcgggacaagacaccccggacacgggaggcgc

SEQ ID NO: 23016 - RNA, 73 nt, Homo sapiens
aagggagggcgacgagagccgaagcagaggccaagaccaaccccggccggggacacaagcaacagccagaaca

SEQ ID NO: 23017 - RNA, 71 nt, Homo sapiens
ccacccacgaagggaggaaaagggcagggacagcgcaggcagcagaaaagcgccaggcaggcaggaaagcg

SEQ ID NO: 23018 - RNA, 63 nt, Homo sapiens
acaagaggagcgcacgggaacacaccgcccagccacgcggcagcgcacccacaccagaaagcg

SEQ ID NO: 23019 - RNA, 81 nt, Homo sapiens
cgggaccgcggccacggacggaacccggagggcggaccacaaggacccagagagggaccagggccaaagaagagccggggg

SEQ ID NO: 23020 - RNA, 75 nt, Homo sapiens
ggaagaggggcgagaggaacgccccccgggcggcggggagggaggacccagcagccagcgaagccccaaggaagc

SEQ ID NO: 23021 - RNA, 86 nt, Homo sapiens
ccaaggcacggaggccgcggggcggggggcaaggcacgcagccgggcccgacccgcgggccgcgggcgcagggccagccgaggccc

SEQ ID NO: 23022 - RNA, 91 nt, Homo sapiens
cgcgggcgagcggccggcggcgcgggcccggcggcggcggcagcggggccgggccggagcgccacagcagcaccgggaccggaggcccaga

SEQ ID NO: 23023 - RNA, 86 nt, Homo sapiens
acggggagcgcgccgagcggagaccggacgaccgagacaggggcccggcaccgcgcccgagcccacccacagacagaaggggagga

SEQ ID NO: 23024 - RNA, 61 nt, Homo sapiens
cggcaccgcagaacgccacaaccagcgccagccaggaaagcgggagcgcgggagcaaagga

SEQ ID NO: 23025 - RNA, 77 nt, Homo sapiens
cagccagagcgcagaggcggcggggcgagagggcggcgaaggaggcagaggcacagcgcagaacggccgagcgacca

SEQ ID NO: 23026 - RNA, 67 nt, Homo sapiens
aaaaacggagaaaacccgcgacgccaaccacgacgaagcggaaggcagaagggaccccgggagggcc

SEQ ID NO: 23027 - RNA, 68 nt, Homo sapiens
cggaaaagagagggccggcccaagcccccaagaagcccgggacgaacaccaaggccccgcgcgcgccc

SEQ ID NO: 23028 - RNA, 83 nt, Homo sapiens
gggccgagggagggccgagccagccgcggccggaggagcccccaggccggcacgagcagccgggggaagcagcggcagaacca

SEQ ID NO: 23029 - RNA, 83 nt, Homo sapiens
gcacccccgccccacccggcacccccaccggaggacacaagagacgccggcccaccagccagcggggagccgcccaccccaca

SEQ ID NO: 23030 - RNA, 83 nt, Homo sapiens
cgggaagcaccaaagcgcgccaagaccaagaaggacaagaaggggagaagaaaagaaacggcaaaagaaaaaagaaaagagaa

SEQ ID NO: 23031 - RNA, 74 nt, Homo sapiens
ccaccaggccgccgggggccgcgcgcccggacggaacagccccaagccggaaacccaggaacggaaacagaacg

SEQ ID NO: 23032 - RNA, 80 nt, Homo sapiens
aggcgcgggcgagccggcgacggacgcggcgcgcgaccgacacgaaggggaaacccaaggcgccagaggagagaaaggac

SEQ ID NO: 23033 - RNA, 76 nt, Homo sapiens
ccaggagagaaagcaaaggcacccaaaccggggccacagcaaccacgggaagggagcaaaaccggaaagaaagggc

SEQ ID NO: 23034 - RNA, 104 nt, Homo sapiens
gggcaggacccgaacccgccgcgaggggcgagaaaggcccacgcagcccccaagcagacaagcagaccggaagaccgacggaagaccacaccccgagggagccc

SEQ ID NO: 23035 - RNA, 83 nt, Homo sapiens
gaggaacagacaccgagccagcaagcccccaacggccgagaggagggagacccaggaccaagaacaaggggcacccgcaagcc

SEQ ID NO: 23036 - RNA, 67 nt, Homo sapiens
agaggagaagacaccaaaaagcaaacggaccagaccgaccaccaaaacagcaggcgcaaaaacgaac

SEQ ID NO: 23037 - RNA, 67 nt, Homo sapiens
ggcacacccacaaagccgaacaagcagaaccagggcgaaacccaaaggcgcgggagggccccgacga

SEQ ID NO: 23038 - RNA, 40 nt, Homo sapiens
gggaggaccggaacccaggggccccacggagcggaccagg

SEQ ID NO: 23039 - RNA, 62 nt, Homo sapiens
gcggcggcaccgggaggccgggccgagcggaacagcagcagaggacgacagcacgcaggcaa

SEQ ID NO: 23040 - RNA, 82 nt, Homo sapiens
gagagcccgcaccaaacagagcagcagcagcagagagaaacagcagaggaacaagaggcgagaggcgcaggcagccacaaaa

SEQ ID NO: 23041 - RNA, 63 nt, Homo sapiens
cgccaagcgaaccaaaacaaagccgcgagaggaccccccagggcagcacgaagagggcggggc

SEQ ID NO: 23042 - RNA, 90 nt, Homo sapiens
gggcaacgcgggggagacagcgccgggagaggccggcagccccgggacacccccgcaagcgagcaggcaccaggcggagaagcagaacag

SEQ ID NO: 23043 - RNA, 57 nt, Homo sapiens
cggagcccagaagacagagggcgagaccaaaggggcacgaacacacggcagggcagc

SEQ ID NO: 23044 - RNA, 80 nt, Homo sapiens
cggagcggccggacggaaagcgacaagggaggcgccgccagcggccgggaccgaacaggcgaaaaggcacacacacccgc

SEQ ID NO: 23045 - RNA, 79 nt, Homo sapiens
gacacaggcaagaacccaggaagagacgaggaggaaagcggaaagagaccgacaccaacagaaagggagaacaacagcc

SEQ ID NO: 23046 - RNA, 91 nt, Homo sapiens
ccggcagggcggagaggagcggccggagcagcgagggcccggcgaggagaaccaacggcccgaaagagagaccagcgaaccagaagaaaaa

SEQ ID NO: 23047 - RNA, 40 nt, Homo sapiens
gaacacccggaagccgagaaaggaaaagaagacagacccc

SEQ ID NO: 23048 - RNA, 68 nt, Homo sapiens
cccgccaggggcggaggaggggacggcacgggaagggagacaaggggaaacgagaagagaagaaaaag

SEQ ID NO: 23049 - RNA, 82 nt, Homo sapiens
gggcggcgcggacccccaaaagagggacgccgcccaagacccagggccacccgaaaggacaaggcgccagccggcacgaagg

SEQ ID NO: 23050 - RNA, 71 nt, Homo sapiens
cccacgcccaggcggaaggagaggggagaccagaaaacagggccagacgggaagaaacgagaagggaccag

SEQ ID NO: 23051 - RNA, 83 nt, Homo sapiens
cacccaggaaacagcgcaaggggcaacaccggaggacagcaacccccaccgaacaaagaaggaaaaagcgcagcagaaagcga

SEQ ID NO: 23052 - RNA, 61 nt, Homo sapiens
caccaggaagagaggaagcgggggccgagaccacacaggcaccaacaagaaggaaacgaca

SEQ ID NO: 23053 - RNA, 79 nt, Homo sapiens
gggacaaagcacaggaggaggagaagcgggacagcaggaaggaagaaccgccaaaaagagggaaaaacgggcgccagga

SEQ ID NO: 23054 - RNA, 40 nt, Homo sapiens
aagggagggaggcggggagaaggaaccggagaggacacag

SEQ ID NO: 23055 - RNA, 71 nt, Homo sapiens
aaccaccggacagaacagcaacaagaaaaacgaaaagcgcaggaggaggacagaaaagcagcgcaggacgg

SEQ ID NO: 23056 - RNA, 75 nt, Homo sapiens
agggccaaagaagggagagagggagcacgaggcagccccggccaaggaccgggggcagagacacccacaccacca

SEQ ID NO: 23057 - RNA, 75 nt, Homo sapiens
gccccgcgaagaacgaacaaggggaaaaaagagccggacgacagagcacggcaagaggagcagcggagcgggacc

SEQ ID NO: 23058 - RNA, 86 nt, Homo sapiens
ccggccggagcgggaggcgggccagcgacaaaaagagaagaaacaggacgagaagaggccccccaaaggacacaggacagaccgag

SEQ ID NO: 23059 - RNA, 54 nt, Homo sapiens
cacgagaagccaggcaacgggagggccacaggagcggggccaccaggaagggca

SEQ ID NO: 23060 - RNA, 57 nt, Homo sapiens
agaagaccaggccagagggcccaaggcacaacaacccggggcgggggcgaggaccaa

SEQ ID NO: 23061 - RNA, 73 nt, Homo sapiens
cggagagcccgccaccaaccccgacaggagggaaaccgagccacgagagaaaacaccgggggacagcaagcag

SEQ ID NO: 23062 - RNA, 86 nt, Homo sapiens
cgggcggcgcggcgaccgggccccggagagcacacacagaccagccaccacaacagcggcacagaagacccggcgggagaagagag

SEQ ID NO: 23063 - RNA, 62 nt, Homo sapiens
cgaggaggcaggaccgcacgagggaaagaacgccggacaacagcggcgaagaaggcaaaccg

SEQ ID NO: 23064 - RNA, 35 nt, Homo sapiens
cccgccccgcagacccaccgagggcaacaacaaca

SEQ ID NO: 23065 - RNA, 61 nt, Homo sapiens
cggagagcgggacaagagcgcggggcaagggccggaacacaggcagggaaagcacgacgga

SEQ ID NO: 23066 - RNA, 74 nt, Homo sapiens
gagaacccgaccccgcggagacagcgagacccgccaggagcaaaggcagacggacagacggggagaaggccaaa

SEQ ID NO: 23067 - RNA, 77 nt, Homo sapiens
ggaagcggacgcgggaggacggcacaccgcggcgggagacccgacacacccaccccaccgggccgcgacccccagcc

SEQ ID NO: 23068 - RNA, 79 nt, Homo sapiens
agccgcggcagccgcggaccaccgccgccaggaagacgaccccgacgcaggccaggagccgcggacagaagccgagcac

SEQ ID NO: 23069 - RNA, 58 nt, Homo sapiens
cggaagaccagggccccccaggacaggaagcacaagaagaaaagacacaggaaaagag

SEQ ID NO: 23070 - RNA, 52 nt, Homo sapiens
ccaccgagagggaacagagacgaaagaaagcgagagggcgggaagacgcaaa

SEQ ID NO: 23071 - RNA, 77 nt, Homo sapiens
agaggccgcagcggcaaggagagacgcgcgaggggcgccgaagcgagggaacgacaaaacggaaggcagagacccca

SEQ ID NO: 23072 - RNA, 85 nt, Homo sapiens
caagaaacgggcagccaggcccccacagcccgcagggcgaaaccaagaggagggaagcaggcagacgcgaggccggccaacaaga

SEQ ID NO: 23073 - RNA, 42 nt, Homo sapiens
accacccccccagggcggggcagggcgaggggaaaaggaagg

SEQ ID NO: 23074 - RNA, 67 nt, Homo sapiens
aacggcccaaggacacagcccgacagggcgaccggcacaaccgaagagccaagcccccccagcccac

SEQ ID NO: 23075 - RNA, 82 nt, Homo sapiens
gcaggccgcaccaaggagcgcccagagacgcagcaacaaaagaagcaggaaacacaggaggcgccggccagaaacacaaaac

SEQ ID NO: 23076 - RNA, 70 nt, Homo sapiens
cccacggacccaccgcgcaggcgcgagacccacggcggcagcaacaacagcccgacgacagcagggggag

SEQ ID NO: 23077 - RNA, 77 nt, Homo sapiens
aggagaccgaacacaaccccacgccaaagaaaccagcccgaccagaaacaccacgcgaagacaaaaaaaaagcaaag

SEQ ID NO: 23078 - RNA, 74 nt, Homo sapiens
gaagcgagaggaaaaggcaaacgacgcagacagagggaaaaaagacaaggcagcgagaggaagaaaggacacaa

SEQ ID NO: 23079 - RNA, 72 nt, Homo sapiens
agagcggaagcccaaacgggaaagcaccaagcggaaaacgagacgaaggacaagggaccaaaaggcggaccc

SEQ ID NO: 23080 - RNA, 41 nt, Homo sapiens
aaagcagaccgggcagaaggacccggcaccaacagaaagaa

SEQ ID NO: 23081 - RNA, 59 nt, Homo sapiens
ccgcaacaacgcccagcgaggccggggggggcacagagccccggaagacagcccccagc

SEQ ID NO: 23082 - RNA, 78 nt, Homo sapiens
gcgaccccaaggacgggcaccaccaggaggcggcacacaacaacgccaggcacccccgaaggccaccgcacacaccaa

SEQ ID NO: 23083 - RNA, 80 nt, Homo sapiens
aagagaggcaaaggaagaacaacagaggaccccagccagagaagcaaaagaaacaaggcaagacggaagcaagaagaaaa

SEQ ID NO: 23084 - RNA, 78 nt, Homo sapiens
acgaccagcaggggcaaccaccccaggcccccaacagacagccagaaggaaggagccacaagaccaagcgccacaagg

SEQ ID NO: 23085 - RNA, 73 nt, Homo sapiens
gccgcaccgcgggcccgccccaggaccccggcagggaccggcgacgaggccggaagaagacggcacgggaccc

SEQ ID NO: 23086 - RNA, 71 nt, Homo sapiens
gagaagagcgacaggcaagcggaacaggacagaggaacccgacccgggaaggggaagaggcaagccgggcg

SEQ ID NO: 23087 - RNA, 69 nt, Homo sapiens
agggggaaaaaggaaggccgccggacagcgcagagccaagacggagaaacaaagcccaaaaggcagagc

SEQ ID NO: 23088 - RNA, 82 nt, Homo sapiens
acgaagagacgacagaccagaccaagcaacaggcgccaaaaggaagaagagacgcgcccacaagcgcgccccaaggcaaagc

SEQ ID NO: 23089 - RNA, 84 nt, Homo sapiens
caacggcggcacccacgcagacaccagccgcgccaggcccagggccccggccaggcccagccccgcgggagacccggccagcac

SEQ ID NO: 23090 - RNA, 67 nt, Homo sapiens
accaagaaacagccaaagaaccagaacccaaaaacaccagaccagcgaaaaaagagaacgggcccga

SEQ ID NO: 23091 - RNA, 74 nt, Homo sapiens
gagacgaaccagacgccaagcgaaaacaagcagaccggaagaccgacggaagaccacaccccgagggagcccag

SEQ ID NO: 23092 - RNA, 74 nt, Homo sapiens
aaagaaaggacccgagaaaggagccagaaacagcgagccgacagaaccaagaaaagggcacgacgaacaaacac

SEQ ID NO: 23093 - RNA, 82 nt, Homo sapiens
aggcacgggggccgggggcggggacagaaccgcgaggaaagggagggagagggacagaccagcagacaccagacggcgggcc

SEQ ID NO: 23094 - RNA, 86 nt, Homo sapiens
agccaggagcagagcgacagcggcgagcagaacacggcgagcgggaggaaaaggcccacacgaccaggaagaaagaagaaagagag

SEQ ID NO: 23095 - RNA, 60 nt, Homo sapiens
aagcgccgcggcgcgggcagccgggaggagacaacaacaagagccgagcccggaagccgg

SEQ ID NO: 23096 - RNA, 77 nt, Homo sapiens
aaacaggaagaagaaagaaagggaagaagggagacaaaggaaaacaaaggcggaaccacaccgaggcaaacaaagaa

SEQ ID NO: 23097 - RNA, 106 nt, Homo sapiens
gcacagaagcgggacacgcgccacgcaggccgagccgagagcccgacccggccagaaccagcaggcgaagacgcaggagagcacagacggacccgcacgacccgga

SEQ ID NO: 23098 - RNA, 77 nt, Homo sapiens
caccggccagccagcgggaagcccccagcgaggcccgggcagcgggccagcgggaggggccccggcccgcccaggga

SEQ ID NO: 23099 - RNA, 79 nt, Homo sapiens
aggacaaccgccagaccgacacgccaagagcgagggcaccaaaaagaaagaaggcggagcagcccccgcccgcaacaac

SEQ ID NO: 23100 - RNA, 76 nt, Homo sapiens
agccagagccggagcggacccccccacgagcgcgacccgaagaccaaaaggagaaaaaggcagccccggagacgaa

SEQ ID NO: 23101 - RNA, 81 nt, Homo sapiens
gggggagaagcaggcggcggaaacccgcaccccaccgacccagggccgccccacagaagacacacgcaacaaagaccagga

SEQ ID NO: 23102 - RNA, 79 nt, Homo sapiens
cggcggggcgcccggagccggccccgcccacccgcaaacagacccagcccgcggaaggcgagacggggcacggagccag

SEQ ID NO: 23103 - RNA, 73 nt, Homo sapiens
cacaaaaacaacaaggccaccaaacgagagcagccaacggagcaaaggagcagcaaaagggggacaagccaaa

SEQ ID NO: 23104 - RNA, 57 nt, Homo sapiens
cagaaaggaggacaacgggacccagaagagggaccagaagagacaaagaggcccacc

SEQ ID NO: 23105 - RNA, 58 nt, Homo sapiens
gcaacccccgggaagccaagccgcaggacagaacgaccgcccggccagcccacccccc

SEQ ID NO: 23106 - RNA, 81 nt, Homo sapiens
ccggaccggaaggggagaccgcgacacccacacccacaccacagaaggcggccccgcagcagaggcgagccgccaggggaa

SEQ ID NO: 23107 - RNA, 78 nt, Homo sapiens
gggcacagaacagcgacagacaaagaagaccgcacacaagccaacaacaagaagacagcccaacaaggcgggacgaca

SEQ ID NO: 23108 - RNA, 79 nt, Homo sapiens
caaggccagaggagggggccgcggggagaggggccagcgcggaggcgagggcgggccggaaccaaaaagaagccccaga

SEQ ID NO: 23109 - RNA, 71 nt, Homo sapiens
gggccccagcccaagggcgagaaggacccgaggacggacaggagcgccgcagggccaccgcagggcagccg

SEQ ID NO: 23110 - RNA, 73 nt, Homo sapiens
ccggggcgcagacgcggagccgggcaccaggaccagaccagagagcgcggaccagaagagaagaagccagacc

SEQ ID NO: 23111 - RNA, 71 nt, Homo sapiens
ggaagaaagagcagaggaaagaaaagaaacaccgaaccgccacccaggcccaagaagaacgccgaccagga

SEQ ID NO: 23112 - RNA, 75 nt, Homo sapiens
gcccccgagagcgagacacaggaagaacagccagacggcagcaagaaaaagcagaggacagaaggggccagcaag

SEQ ID NO: 23113 - RNA, 60 nt, Homo sapiens
gagaagggaggaaaaccaacaaggggaaagaccgaggcggacaggaggagacgcagaaag

SEQ ID NO: 23114 - RNA, 39 nt, Homo sapiens
ggaaaccggagcgcgcagcagaaggcggaaaacacaagc

SEQ ID NO: 23115 - RNA, 81 nt, Homo sapiens
aaaccggagagaaagaaagaaaagagcagacaccccaacgagagacacagacgcgccccgagcgggcgagcacagaagcac

SEQ ID NO: 23116 - RNA, 46 nt, Homo sapiens
ccaaccagcaaagcggcgaacacaacaagcaacggcgaagcaagac

SEQ ID NO: 23117 - RNA, 84 nt, Homo sapiens
gagcgcgcacccccggggagagcgacgaggacgagacgcagaccacagcgacgaggacgacgccaggaagacaccaccggacac

SEQ ID NO: 23118 - RNA, 66 nt, Homo sapiens
cggacggggagaggggagcgccggggcggcccaggcgagcgggcaaccaagggcagaccgcacaag

SEQ ID NO: 23119 - RNA, 72 nt, Homo sapiens
gggaacgaaggaccagggggacccaccccagcccagaaagcccggaaagccacaggggcaaaaccaacgggg

SEQ ID NO: 23120 - RNA, 72 nt, Homo sapiens
gcgcggcgaagggcggggagcgcggcgggcgcgcgccaggcgcagaaggagaaacggaaacagacgaacagg

SEQ ID NO: 23121 - RNA, 69 nt, Homo sapiens
gaggaccgcagcgcagcggccgcgccgagccggcaggagcacgagaaggcggaaacgagcggagccgac

SEQ ID NO: 23122 - RNA, 65 nt, Homo sapiens
ggcgagagcccccacgggaaggggaggagcacagaacgccaggaccaaaacagggagaaacacag

SEQ ID NO: 23123 - RNA, 82 nt, Homo sapiens
ccggcagccagcggcagggacgaccccgcgcggccccccgacaagggaccgggcgggccccgcaggaaacccccaccggccc

SEQ ID NO: 23124 - RNA, 81 nt, Homo sapiens
gcagacaagacgagcccaccacggacagcaaacaggccggacagcccgggagacgagccccggagccccaacgaaaggcag

SEQ ID NO: 23125 - RNA, 71 nt, Homo sapiens
ccccacgacacaagagacagcgccgggcagaggcaggggcgacaaagcacgcagccgaacgcggaccaggg

SEQ ID NO: 23126 - RNA, 70 nt, Homo sapiens
aagacggccagggaaccaaacagcagagcaggcccgggggcgaaaaacaccaccagggcaagggaagggg

SEQ ID NO: 23127 - RNA, 73 nt, Homo sapiens
acaagaagaagagcgccacagcggcaaacaggcagacagaacaaagaaccaggaggcagcaaggacgagccca

SEQ ID NO: 23128 - RNA, 54 nt, Homo sapiens
ccgcacgggccgcgcaacaggccccgaggacaccgccgaggagacacaaccgcg

SEQ ID NO: 23129 - RNA, 77 nt, Homo sapiens
caggaagacggccagggaaccaaacagcagagcaggacggacaagaacccaggagaagcaacaaaagaagagaagag

SEQ ID NO: 23130 - RNA, 99 nt, Homo sapiens
aaggcccggggagaggggagccgcacgccacagcgaaggcgcgagggacaagagcagaacgcgaccggaaaggagagagagacagaaccacagacaagg

SEQ ID NO: 23131 - RNA, 90 nt, Homo sapiens
agcggacaacggagaccagaccacgcagccacgcgggcgagcggcggggagcggcgaagccgcgggcgagcaaaagcggcaggcgacaga

SEQ ID NO: 23132 - RNA, 74 nt, Homo sapiens
ccggagccccgcgcgcacccagccgccccagcggcgcggcgccgcccacgagagccaacggaccacaacagaga

SEQ ID NO: 23133 - RNA, 74 nt, Homo sapiens
gaagcaaggaagcgggcaaagggcaggcacgagcaaggaggagccccgaaaagcaaagaaaaaggaaggacgaa

SEQ ID NO: 23134 - RNA, 78 nt, Homo sapiens
ggccgggccccgccaccgcaaggaggggacacagcgaccacgacggagaagcagggccaagaaaagcgacaccaagca

SEQ ID NO: 23135 - RNA, 122 nt, Homo sapiens
gccaccaccacgccagccgcaccagccgcccaagccgcacagccgcggcggcagcagcaggagagggagggcacaaggcgcgacgagcggagcggccgagcccggagagccggagagacggc

SEQ ID NO: 23136 - RNA, 80 nt, Homo sapiens
ccaccagcagcagcagccgccacgaccgggagccccgcacccgcccggccccacgggccgagacgggcagcggcaaaaaa

SEQ ID NO: 23137 - RNA, 39 nt, Homo sapiens
caccggaccagaccccaggaaagaccagccacgcgagaa

SEQ ID NO: 23138 - RNA, 102 nt, Homo sapiens
gcaagccagcaaggggagcaagaaacgcaacacggagacggagaggaaaggcaagggcagaaaagaggggaaaaggccagccgcacgcaggcaaacgaaaac

SEQ ID NO: 23139 - RNA, 69 nt, Homo sapiens
agagccaacaaaaaaaggaccccgaaaaagcaaggaacagaagccaccgcaaaaaaggagccgccggcc

SEQ ID NO: 23140 - RNA, 82 nt, Homo sapiens
acgccgggaacccgccgcgcgccgcgaccccaagcagggaaagggagcagcaccggccacacccacagcacgaccggaaccc

SEQ ID NO: 23141 - RNA, 80 nt, Homo sapiens
cagcgcgcggcccccacaccacacagagagcgagggccgggagaggaaggccccaagcagccagcagaaaagcaaccaga

SEQ ID NO: 23142 - RNA, 68 nt, Homo sapiens
cggcgccgcgccggcggcgggggagccccccagacccgaaaggagacaagaggacagccgcacggaac

SEQ ID NO: 23143 - RNA, 78 nt, Homo sapiens
ggcgaccgcccgcccagccccaaagggggaaaggcggagccacgcaccggcacagggcaggacccgaggcgccagcag

SEQ ID NO: 23144 - RNA, 76 nt, Homo sapiens
gagcggagaaaaagggcacagcaccccagcacgaagacaaaaaggaaccaccaggccacccagaggagaaggccac

SEQ ID NO: 23145 - RNA, 79 nt, Homo sapiens
gcaggacagcaggacggccacgagacggggcagaggccgcggccaacgggccggaaggaggcggccaaccagggcacgg

SEQ ID NO: 23146 - RNA, 84 nt, Homo sapiens
aaaggcgcggcgcgcagagcgaggcgcgggaccccaggagggggacaggaggcgcggggcccagacaagccagcgccagggagc

SEQ ID NO: 23147 - RNA, 73 nt, Homo sapiens
gacggaccgagaccggaccgagagcggaccgagagcgcgaaacgcacgagaaggaggcgaagcgcaccaccag

SEQ ID NO: 23148 - RNA, 83 nt, Homo sapiens
gacacgcgacccggagacagcccaaaacccggaagagcgccccaggagaaacaagagaaaggagcaaccagggaaaagaagaa

SEQ ID NO: 23149 - RNA, 52 nt, Homo sapiens
cacgcgggcccgggggcccgcgcagcgcggcaagaaggagggggcagagcac

SEQ ID NO: 23150 - RNA, 81 nt, Homo sapiens
ccgccccgccaaccgcaaccagacgccagcgggacgaggaccgagaccgcggccgggaccgagggagggagccaggagcgc

SEQ ID NO: 23151 - RNA, 77 nt, Homo sapiens
acgcccagagaagcgcggccagacagcccaccccaggggggcacgaacaacaagacaagcaaccaagaaagcgacaa

SEQ ID NO: 23152 - RNA, 101 nt, Homo sapiens
cgagaccgagcgaaaggcagacgaccggagacgaggggggagaaccagccgacggagcaggcagcagcccagccacgccacccccaacccacccaacagac

SEQ ID NO: 23153 - RNA, 85 nt, Homo sapiens
gcggaccgcccaaggccaaccccccaaagacccacggcagggcaaccccaccgcggaaggcaggcacacagacgagaacagagag

SEQ ID NO: 23154 - RNA, 76 nt, Homo sapiens
agcggggacaggacgggaaagcaagaaggcaaacaaagcaaagaaacaaccaagaaacggaggaagcagcaccggc

SEQ ID NO: 23155 - RNA, 83 nt, Homo sapiens
agagacagcagccaaacccccagcccgaaggagggacccagacacccccgcagcacgcgaaggcacaggcgacagccacccca

SEQ ID NO: 23156 - RNA, 77 nt, Homo sapiens
gaagaggaagaggaggaggaggaagaggagacgaagggcggaagaacaacagccaggaggagcagcgccgcacaaac

SEQ ID NO: 23157 - RNA, 75 nt, Homo sapiens
acccccagaagacacccccagggcagaaaagcgaccaggcgaggcggaaaccccaggcacccgcggccccagaaa

SEQ ID NO: 23158 - RNA, 81 nt, Homo sapiens
aagagaaaagcaacagaggcggagagacacagggggagcgggccggagagaagagaggggcgcgaggagaaggaaacaggc

SEQ ID NO: 23159 - RNA, 33 nt, Homo sapiens
ggccgaaccccgacccagagggccacccgccca

SEQ ID NO: 23160 - RNA, 75 nt, Homo sapiens
gaggagagccacgcaggaccacagcgcagcaaagaacacagaggacccacaaagcaggaagggacaacaaacgag

SEQ ID NO: 23161 - RNA, 52 nt, Homo sapiens
cccccgcgacacagcccccgccccgacaaagaagacaccaggagccacagcc

SEQ ID NO: 23162 - RNA, 71 nt, Homo sapiens
gaaacggggaaagcaacaaccaaaggccagggcacaaaaaagggaaggaaccgggaccacaaacacggagg

SEQ ID NO: 23163 - RNA, 63 nt, Homo sapiens
gcccaaacaccaccaccaaggggcccagcccgccccaaggaaaagagaagagcgacacagcag

SEQ ID NO: 23164 - RNA, 87 nt, Homo sapiens
aggccccagagacaggcccgcagaagagagaaggagccaggagacaacgccacagccaaaaaagccccaccaacacggcaccggcag

SEQ ID NO: 23165 - RNA, 37 nt, Homo sapiens
aaaacccccaccgcagaaaccaaaaacaggcgggaga

SEQ ID NO: 23166 - RNA, 78 nt, Homo sapiens
gagaagggaaggaaacagcaagcgaagccgaaaaagcgcccgagacgggcccgccgaaaggaaaaaggcgcaggcaca

SEQ ID NO: 23167 - RNA, 57 nt, Homo sapiens
cagcacaagagccggggaagacagggaagccagacagaccaaaccgcacaaacaaag

SEQ ID NO: 23168 - RNA, 38 nt, Homo sapiens
gcccagaccacagcaacggaagggagcccggacgacag

SEQ ID NO: 23169 - RNA, 98 nt, Homo sapiens
gcaccaggcgggccagagcggccgggcaggaccgcagccccccccaggcaggggaagcgaggagaacgagccggaccagggaccgggacccagggcca

SEQ ID NO: 23170 - RNA, 34 nt, Homo sapiens
ccggacccgacgaaggccggaccaaggccccagg

SEQ ID NO: 23171 - RNA, 61 nt, Homo sapiens
cccaggcgcggaagagaagcagcggcaggaggagacaggacacagaacagagaagaagcag

SEQ ID NO: 23172 - RNA, 65 nt, Homo sapiens
cacggaaagaagaccagagaaaggacacgacgccaccgccgaagcccaggccaaacacaaaagac

SEQ ID NO: 23173 - RNA, 80 nt, Homo sapiens
aacaaagcgcgggaacaaagcagcccaggcagaccccaggcgggcacaaaccgaagaggacaaggagagaagcagacaga

SEQ ID NO: 23174 - RNA, 71 nt, Homo sapiens
ggaaacgccaccagcaggaggaagaggcagcaacagcgcaagagcaccagccgcaaggagcacggacgaga

SEQ ID NO: 23175 - RNA, 52 nt, Homo sapiens
agaaaaccgccacgccaccgaacagcccacaaggaagcgggaccaacgaaga

SEQ ID NO: 23176 - RNA, 78 nt, Homo sapiens
aaagaaggagaggaaaaccaacaacaccaaggggaaagcaaaggaagagagcgggcaacaaaagaggcaaaaacacaa

SEQ ID NO: 23177 - RNA, 63 nt, Homo sapiens
ggccaagacgaaaagaagaggaccagcaaaggaaggagaacagcacggaccgggcaaacacgg

SEQ ID NO: 23178 - RNA, 82 nt, Homo sapiens
cggaccagaccagggccgagcacagcacgagccagggagccgccgggaccggcccgggagacgacaacccaaaccgaaaagg

SEQ ID NO: 23179 - RNA, 71 nt, Homo sapiens
aacagaggagcaacaaggagaaaaccgagcgagcagccgacgcggcgggcacgggcgggcgacccggcgcc

SEQ ID NO: 23180 - RNA, 77 nt, Homo sapiens
cggagcacaccaggaaaaggcagaaaccacaaacagcccgcagggcaacggaagcagacaaaaaagggcagcaaaaa

SEQ ID NO: 23181 - RNA, 75 nt, Homo sapiens
acaacccacggaggaaggagcacgggaagccgcaggagccacaaccagccggcacaaggaaacagaacaaagaga

SEQ ID NO: 23182 - RNA, 79 nt, Homo sapiens
cgcccccaggagaaggagcgagcgcaacagccggcgagagagaacaccgagcagaggcaaccaaaggggagggaaccga

SEQ ID NO: 23183 - RNA, 76 nt, Homo sapiens
ccggaagagcgccccaggagaaacaagacaagcccccacgaggaaaacccccccaccgaaggagggccccacgggg

SEQ ID NO: 23184 - RNA, 45 nt, Homo sapiens
aaagggaggcacgagaagcagaccgaacagagacgggggcaccag

SEQ ID NO: 23185 - RNA, 76 nt, Homo sapiens
ccggccgggcaggggaccccgacccaggacggaccggaaggcccagaaccaagaccacagagaagcaggcgaccag

SEQ ID NO: 23186 - RNA, 72 nt, Homo sapiens
gcagccaagcgccgccgggagaaggaagccaacaccggagccagaaagccgaacccacggccagaggaacag

SEQ ID NO: 23187 - RNA, 104 nt, Homo sapiens
cgccacccagggccagacacgcagggccaccagaccccgcggcacacaggggaaccaaggggggagcaggccccccgaacgaggaaaaggagccaaccaaagac

SEQ ID NO: 23188 - RNA, 69 nt, Homo sapiens
cacaacgggcagcggcagcggaccccagagccagagcacacgcaaaaaaggcccggggcagccacccag

SEQ ID NO: 23189 - RNA, 76 nt, Homo sapiens
ccagagaaaggagagcggccgcaagggggggccgaagaagccagggggaggaaagcagacagacccaccaagaggg

SEQ ID NO: 23190 - RNA, 88 nt, Homo sapiens
aacagccggcagccagaagcagccaggcaaggccaaacacccggagaccgggacaggacagccaggagggggcgcacaccgccgcgaa

SEQ ID NO: 23191 - RNA, 83 nt, Homo sapiens
agagcgcacaccggggcaaaagggacaagggacgcacaagaccagccacgcaccgcacacgaccgccacaggaacggaccgcc

SEQ ID NO: 23192 - RNA, 84 nt, Homo sapiens
agccgggggacggggcgccgaggcggcacagccgcccagccacccccaggacgcccgcaacccgacacgggggagaagggaagc

SEQ ID NO: 23193 - RNA, 58 nt, Homo sapiens
cagacgcagggcgcccccggcccagagggaggcacaacagcgaggacaccaccgagcc

SEQ ID NO: 23194 - RNA, 52 nt, Homo sapiens
aaagggccaaagaagggagagaggggcggaagaagccaaggagcccgacggc

SEQ ID NO: 23195 - RNA, 66 nt, Homo sapiens
gaacccaggcccgaccacaagggagcgggagcaaccccacaaaaaggagagcgcgcgccgcgcgcc

SEQ ID NO: 23196 - RNA, 75 nt, Homo sapiens
caggacgaaggaacaaggccgaccgggccaccacccaccacagcacccgcggaggaagagagaagggcacagacc

SEQ ID NO: 23197 - RNA, 71 nt, Homo sapiens
gaagagaagaaacccagcgaaggggacaggccaagaggacgggaccaccaggaggagggcagcaccggaca

SEQ ID NO: 23198 - RNA, 84 nt, Homo sapiens
acgaccggcggggggcgcggcgccgggacgcaccgcaccgagggcgagcccagggaggaggacaggagaacgggcggggcgaaa

SEQ ID NO: 23199 - RNA, 76 nt, Homo sapiens
aagaggagagaaggacgacaagcccaccgagacgggagggagacaagagccggcgcaccgcaaagcggaagcgggg

SEQ ID NO: 23200 - RNA, 64 nt, Homo sapiens
agccgcccaagccgcacagccgcggcggcagcagcaggagaggagccaccgaggccacccgagc

SEQ ID NO: 23201 - RNA, 66 nt, Homo sapiens
gcgcccacagcccacagccccacagggagaggagccagggagccggaaaacaaaaaccagcaaagc

SEQ ID NO: 23202 - RNA, 74 nt, Homo sapiens
gggaagcaagacaaggagcgaccccacaccaaagagcccagcacacacagggggccaggggaaggaccgcccac

SEQ ID NO: 23203 - RNA, 73 nt, Homo sapiens
caccaggcaaaaccagagacggcgccacagccagagccaccccagaagcgaaaggggaaaagcgaagggaaga

SEQ ID NO: 23204 - RNA, 71 nt, Homo sapiens
cagccgcagcaccaggcacggaagaggacagcaccgacagcacgagagagcacggcgccccaggagacaga

SEQ ID NO: 23205 - RNA, 77 nt, Homo sapiens
acgggcccacacaacccaggcaaccaacaggagaccaagacacaccaccccagggggggcccaaccaccaggacgaa

SEQ ID NO: 23206 - RNA, 60 nt, Homo sapiens
cacggcgacgccccaggggaaaacccccgggaccaggaaacagaacgacagcccgcaccg

SEQ ID NO: 23207 - RNA, 78 nt, Homo sapiens
caggccaggagaccgcaaggcccgagcgcgcagcccaggcaacgacaggggaaccccagggaccagcggacaggacag

SEQ ID NO: 23208 - RNA, 87 nt, Homo sapiens
ccaaggcagaaccacccagcaggacccgcgcagaagaaccaaaggacgaaggaggaaagagccaaccagacagccaggaagaccccc

SEQ ID NO: 23209 - RNA, 84 nt, Homo sapiens
ccaaggagagagccagagaaaggacgagcagcaagcagggagcaaggagcaccacgccgacgccagcagcgcaccgccgggggc

SEQ ID NO: 23210 - RNA, 72 nt, Homo sapiens
gaggccccagcaaagaggacaaaagagcggaggagcggcgagggacgcagcaccagaaaagagccccacaac

SEQ ID NO: 23211 - RNA, 66 nt, Homo sapiens
cacccggaagcaaccaccacccaccggacagagagccagaaacgaaggcaagcggccagcaaagaa

SEQ ID NO: 23212 - RNA, 77 nt, Homo sapiens
ccagccaacaccggccgggacagggaaaagacagaagacaaagcagacacacaagccaaggaagccagagagccagc

SEQ ID NO: 23213 - RNA, 70 nt, Homo sapiens
gccaggcccagcgagccagaagcccccccagcaggggccagcagggaggagcccaggcaaagacagcagc

SEQ ID NO: 23214 - RNA, 78 nt, Homo sapiens
agaggacacagcacagccacgcagcaacgacaaaacggaagaacgcagaagacagcaacagccccagagcaaaaaggc

SEQ ID NO: 23215 - RNA, 55 nt, Homo sapiens
aagagcgcagaaaagacagcccaggaaaaccgcggcacaaacccagcaaagccga

SEQ ID NO: 23216 - RNA, 87 nt, Homo sapiens
ggaggagcggcgaagcgcggcgcaggccgccaggaagcggcggggccaccggccggcgcgccccccccaggacgccgagcgccccca

SEQ ID NO: 23217 - RNA, 76 nt, Homo sapiens
cggggggggccgcgcccggccccgcgcgggcggacggcggaggcgcccccaggggcccaagaaccagcgggaaccg

SEQ ID NO: 23218 - RNA, 73 nt, Homo sapiens
gacgcagggcgcccccggcacgggccggcaagaacacaaggaggcaacaccagcgcacccgaaggagacacca

SEQ ID NO: 23219 - RNA, 74 nt, Homo sapiens
aaaagcgggcaacaacgcccacagacagaccgaacccgaagagcccaagcagccaagaaaaaggcaaaaaaaaa

SEQ ID NO: 23220 - RNA, 84 nt, Homo sapiens
ccaggcacggagaggacggcgccccacgaggcagaaacagggagcggaggcccgcggcagccggcaggcgcccgagcacgccaa

SEQ ID NO: 23221 - RNA, 68 nt, Homo sapiens
cgggcgaaaccggaccgggcccggaggagcgaacaaggcgacaacacagggacgggccgggacgccag

SEQ ID NO: 23222 - RNA, 74 nt, Homo sapiens
gaaaagcggcccggaccgaaggcgcaagagggaggcgcacacacaggaaagcgacggcaacccaaggcaaaaca

SEQ ID NO: 23223 - RNA, 74 nt, Homo sapiens
cccggacccggaaggggcggaggaagcaacaacaggcgacgggcccaaacagcggaggccaaacacagcgaacc

SEQ ID NO: 23224 - RNA, 76 nt, Homo sapiens
aaaacgaaccaggacggcaacagcagcccacaaaagggaggggcaggacccagaccccaagaggaagacccgggcc

SEQ ID NO: 23225 - RNA, 97 nt, Homo sapiens
gacagaccgagccgggcaccgccacggaggacggagggaggagagcgacagccagcagggaaacaacagggcaagggaagaaaggggcgaaaagaaa

SEQ ID NO: 23226 - RNA, 83 nt, Homo sapiens
aggagggagaagcgagcgaggccacgccgcaagaagagccacaggaaagcaaagaggcgagccacgaaaagccaagggacaaa

SEQ ID NO: 23227 - RNA, 76 nt, Homo sapiens
aagacccaggacaccccgaagccgagaaagccagggccccccacgcgagaacccgggccggggcccgggggcccga

SEQ ID NO: 23228 - RNA, 108 nt, Homo sapiens
aggaggcgcgggcggagcggaaagaggaggagaggggaggaggcgaaggcccggcggccgccccggcccgggggggagagcgggagcggccgggccgagcacgcgcac

SEQ ID NO: 23229 - RNA, 71 nt, Homo sapiens
ccagaccccggccgccgaccgcggccccgccggccgccggccgcgcgggggggacaagagaaaaaaagggc

SEQ ID NO: 23230 - RNA, 40 nt, Homo sapiens
gccgggagggcggccgcagcagggacgaaacgcccacccc

SEQ ID NO: 23231 - RNA, 84 nt, Homo sapiens
gcaaacaaccaggggcagggaggcacaaaggggaacgcagggcagggaggccaccagggcggaggcacccgccaaaggaccccc

SEQ ID NO: 23232 - RNA, 102 nt, Homo sapiens
gcccccaggcgaagaagcgcagccgcaccggccaagggacagaagcagacaacaccacggggaacgcggacaaaggacaaaagaccaaaaacagcgggcgag

SEQ ID NO: 23233 - RNA, 77 nt, Homo sapiens
ggaaagcaacaaccaaaggccagggcacaaaaaaggagggcagaagagcgagaagcagagagcgacacagcggcagc

SEQ ID NO: 23234 - RNA, 79 nt, Homo sapiens
gagacacgcgccgggaggagcggggccccccgggccgccggcccgccgccccacagagaagacggcccagcagagcacc

SEQ ID NO: 23235 - RNA, 80 nt, Homo sapiens
gaacaccacgcaccgcagccgcgagagaggcaagccgggggcccagaggcagagcacacaaccaggaaccaaaaaccgcg

SEQ ID NO: 23236 - RNA, 62 nt, Homo sapiens
gcggaggcggaagcaggaccggggcacggaccagaagcagcaaggcagcaaccaaaacacca

SEQ ID NO: 23237 - RNA, 59 nt, Homo sapiens
caacccgacccgacgaacaagccagcgccagggagcacaaccacaagcccaggagagcc

SEQ ID NO: 23238 - RNA, 71 nt, Homo sapiens
cgccgcaggggaccggccgggccggaggcaaggggccagaggacagaggacagaacggccgagcgaccagg

SEQ ID NO: 23239 - RNA, 85 nt, Homo sapiens
ggagacggacgaggagaggaggagggggacgagcagcagcggccccaacacccccgaagcggaaacacgaagacccaaaacggaa

SEQ ID NO: 23240 - RNA, 71 nt, Homo sapiens
gcgccgggagaccgcggaggccgacaggacgggcgccgccccgcgcggcaggggggaccacaggcagcagc

SEQ ID NO: 23241 - RNA, 64 nt, Homo sapiens
gcacgcaagcgagcaccagcagaccaagcccacgaagaccggagaagaggacggcgccacccgc

SEQ ID NO: 23242 - RNA, 79 nt, Homo sapiens
cggcggagaaagacaggcaacgacgcagccagagcagcaagaggccaaggggacgacggccacgggcccgggaagccac

SEQ ID NO: 23243 - RNA, 76 nt, Homo sapiens
agcagaccagcaccgagcccgaggaaagagccgagcgaaccaaccgaacaagagcgaagcccccaccggaagcacc

SEQ ID NO: 23244 - RNA, 77 nt, Homo sapiens
ccgacccacgaagcgccagaaaacggcaaggaagccccgcaaacccccggcaagaggagcagcagcggcggggccaa

SEQ ID NO: 23245 - RNA, 79 nt, Homo sapiens
agacgagcccaccacggacagcaaacagggccccagcgcaaagcccaaggccacaccaggacccagcacgccccggggg

SEQ ID NO: 23246 - RNA, 78 nt, Homo sapiens
ccgacccacagggaaaaagaccacaaaacaaaccacccaacacaagcaaagaccacgaagccggaaaagaagacagaa

SEQ ID NO: 23247 - RNA, 73 nt, Homo sapiens
ggcagcgcagcccaggaggcagcaccaagggccgcggcagacaaccgggagcgcagggaacgagaggcaggcg

SEQ ID NO: 23248 - RNA, 86 nt, Homo sapiens
agaaaaaacccagcgagaccgggccggaacgaaagcaggacggaggagcgaccaccggcacgccgaaggaggcggcgacgcgaaaa

SEQ ID NO: 23249 - RNA, 75 nt, Homo sapiens
aacaggaggaaaacggccaacccaccgcgccgaaagaagaaaggccaggcagcgcgaccaaacgaaaaaggcaca

SEQ ID NO: 23250 - RNA, 72 nt, Homo sapiens
gccgggcgggggcgcgccccgcgcgcagggaccgcccgaccaggacggaaaggagagcggacccaccgacca

SEQ ID NO: 23251 - RNA, 85 nt, Homo sapiens
cgacggacgacggccagcacagccggcccgggagagcgcacggacggggaacaacagaaaaaacaagagaggaagcccagaggaa

SEQ ID NO: 23252 - RNA, 58 nt, Homo sapiens
cgcggaccgcgggccagaccaggaagaaggaggccgaccaggccgacaaagcagacgc

SEQ ID NO: 23253 - RNA, 78 nt, Homo sapiens
gcaagaggcggagccgaccaggccgacgagaaacccccacgaggaagaaaggccccggagagggaggcaccgggcacg

SEQ ID NO: 23254 - RNA, 77 nt, Homo sapiens
cccagcacaggaggcgagggggacagcaccccccccccccaccccgcgcaccacggcgaccggaggacggcagaacc

SEQ ID NO: 23255 - RNA, 51 nt, Homo sapiens
cccgagaggaaacacccccagaagaggagaggagccaagcccaacgggacg

SEQ ID NO: 23256 - RNA, 62 nt, Homo sapiens
ccgccgggaccggagggaggaagcgggacacccgggagcaggaaaggccgccgaacccggga

SEQ ID NO: 23257 - RNA, 62 nt, Homo sapiens
gagcaagagggcagaagaacaagaaggagaccgagaagggaaacagcacggccagggcccgg

SEQ ID NO: 23258 - RNA, 59 nt, Homo sapiens
cccagcggaccgaacaggcggagcccggcacgggcaaacagagcaggcagggaaccgcc

SEQ ID NO: 23259 - RNA, 73 nt, Homo sapiens
aagaaggagaacaaaagcaaagccccagacggacggcacacaagaccagaagaaagaaaacgggaaaaagacc

SEQ ID NO: 23260 - RNA, 74 nt, Homo sapiens
gaaggacgcaccccaacgcagggagcccacaggacaggcagaaggcgccaggaaggaaacacaggggagagccg

SEQ ID NO: 23261 - RNA, 83 nt, Homo sapiens
gcggccacagcgcggccgcaggcccgcacggaacgcaacaccagaggcacaggaaacagacaaccaccccaaggggcccaaga

SEQ ID NO: 23262 - RNA, 89 nt, Homo sapiens
gcggagcgggcccaccgggcgcagaaagaggaggcgcgagacaaggacggcagcaagggacaacagggggcaacccgggcagggccaga

SEQ ID NO: 23263 - RNA, 72 nt, Homo sapiens
ggccgggggcccgcagacaacaaaaggcgacggccaaaggaagaaggggcacacaccccaggagggggaggg

SEQ ID NO: 23264 - RNA, 78 nt, Homo sapiens
aagcaaggcccaaaagcggaacaggcaggccagcaagcacaccaggccacgacaggggaagaagaaggcaagaaggaa

SEQ ID NO: 23265 - RNA, 53 nt, Homo sapiens
agaaggacggagaggaggcgagcgagcgaggcagaagcacggagccacacaaa

SEQ ID NO: 23266 - RNA, 82 nt, Homo sapiens
cccggcggggccagccggcgagcaaacccaagagcggcacccaaaagcaagcgcgggaagcgacacccagaccccacgggag

SEQ ID NO: 23267 - RNA, 72 nt, Homo sapiens
aaacaggagcgaagcccagcgggccggacggggcggggggaacgcaacccccagccacaacgcgaaccgggc

SEQ ID NO: 23268 - RNA, 82 nt, Homo sapiens
caacacggggcaagcaagaacagaccgccacaccagaaagagaagcggaagagagggcgaggcaggaagcgggagagaacac

SEQ ID NO: 23269 - RNA, 79 nt, Homo sapiens
gaccggacacagaggaaggagacaagaacagaaggcaggcgaggaacagacgggcacggaacaagagacccaggcacga

SEQ ID NO: 23270 - RNA, 70 nt, Homo sapiens
cgggaggacaccacccacagaaccaagaaaagggcacgacgaacaaacaccagcgagggacaggaccaaa

SEQ ID NO: 23271 - RNA, 81 nt, Homo sapiens
ggcgcgcggaggcgggagcgcggaaacggaaccgggaggcgacgcacacgagcggaggcgaagacaacaggcacaaagaga

SEQ ID NO: 23272 - RNA, 58 nt, Homo sapiens
gacgggccccgcggccgcccgagcaggaggacgaacagggaacaccaagggagccggg

SEQ ID NO: 23273 - RNA, 91 nt, Homo sapiens
gccgcgccgcgggccggagaagcggccgcggccagggaacggggcacgcggccaacgacgagaagaggcgaacggaagcaacacccgggaa

SEQ ID NO: 23274 - RNA, 70 nt, Homo sapiens
cccagcccagggaagaaagcagcagagaaaacagacacagcgcccgaagacaacaaacacagcacaccgg

SEQ ID NO: 23275 - RNA, 76 nt, Homo sapiens
ccccgggccaacaccggccgcccgagcaagagccggagcgcgcaaggggacaaagccgcgaaaaggaacccacaaa

SEQ ID NO: 23276 - RNA, 72 nt, Homo sapiens
aggcacgccaacaacacgaaggaagagcccaggcggcagaagacggaaacaaaagagcaaagaagccagcac

SEQ ID NO: 23277 - RNA, 74 nt, Homo sapiens
ccgcgggacaagagacgggaaaagagaacaagaacacacaagacaagggccgagcagcgagggagcagacagaa

SEQ ID NO: 23278 - RNA, 84 nt, Homo sapiens
gccgcgccggggccgcgcggccccgcggagccagggagcaccgcggacgccccagggcacaccgcgcaccagcgagaggaggag

SEQ ID NO: 23279 - RNA, 65 nt, Homo sapiens
aagacaacagaacacacgccgcgcggggaaacaaggaaggcagccgcgaccagcaccagggccag

SEQ ID NO: 23280 - RNA, 73 nt, Homo sapiens
aacccgcgcgacaagccaaacagcagaaggaccgagggaacagccaggagagcaagcaaaagggaggcacgac

SEQ ID NO: 23281 - RNA, 71 nt, Homo sapiens
ggccccccagccggcagaacaggaaccggagaagaaacccagaggaaaacccagaacaaagcacaagggag

SEQ ID NO: 23282 - RNA, 55 nt, Homo sapiens
ggcaacaggggcgagaaaggccggccgcgagaggagacgacgaagacccaaccga

SEQ ID NO: 23283 - RNA, 88 nt, Homo sapiens
ccccaccggaccccgccgcccgagcgcgcggccccggaagcacccgaccaagcgacacccgccgcaagccacgccacgcgggagagag

SEQ ID NO: 23284 - RNA, 112 nt, Homo sapiens
cccacagggcaagggcagaaaaaaagaagggaaaggagcagggaaaagaccagaagcagaacgaccaacacggagaagaccacaggagacggaagaagcaaaagaagaacca

SEQ ID NO: 23285 - RNA, 101 nt, Homo sapiens
gcaaaacgcggccagcgggggcaagaacgaaacgcacgagcaaaagaacagacacgaacgcgggaggagaccaaacccgacaaggcaggccacagagggac

SEQ ID NO: 23286 - RNA, 79 nt, Homo sapiens
cccagcaaaaggaggaggagaaacaggccaacaacagaggagccaagaggccaggccacacaagccccagccaaaacca

SEQ ID NO: 23287 - RNA, 67 nt, Homo sapiens
ccaggacgagaacagcaacaggagcaagggaacaccacaaacagaaaaccagggggggagccaacag

SEQ ID NO: 23288 - RNA, 89 nt, Homo sapiens
ccaagggagccagcggaggagcaagaaggaccacaggcggagcagcagcagccggagccaggaccgcggaggggcaggacgggcaggcc

SEQ ID NO: 23289 - RNA, 57 nt, Homo sapiens
agaaagggcgaccaccaaaaaaacggccacagggagaccagcagcgacccaagccag

SEQ ID NO: 23290 - RNA, 81 nt, Homo sapiens
agcccccgagcagcgggacacaggggagggagcaaagccgcacacggaggggacagcggacaagaggacacgaccagacga

SEQ ID NO: 23291 - RNA, 77 nt, Homo sapiens
aggagcaagggaaagaacccggcggggaaaagggaaggaaaagagacgcagggggaggcccggaacacggggaggag

SEQ ID NO: 23292 - RNA, 34 nt, Homo sapiens
ggggcaaagcaaaaagggccagagagaaggcgcg

SEQ ID NO: 23293 - RNA, 68 nt, Homo sapiens
ccgacacaaaagcagagcgcgaacggagaaagggagacaagcgcgggacaaccaacacaaccaaagag

SEQ ID NO: 23294 - RNA, 75 nt, Homo sapiens
aggacacagagccccaggacacagagacacaaaaacagaacagggacaccaggcgccaagccaggcagcaggccc

SEQ ID NO: 23295 - RNA, 68 nt, Homo sapiens
gcccacacccgggcgcggccacacgcgacgggggagccgcggaaacgcacagccgaggaaaacgggac

SEQ ID NO: 23296 - RNA, 80 nt, Homo sapiens
cacaagaaaaccacaagaacgcaccccccaggacccgagccccaaagacagaaaagccccgagacggaagagaagagaag

SEQ ID NO: 23297 - RNA, 67 nt, Homo sapiens
agcaccgcccacggagggccaccaaaacagagcggaaagcagaaaaacacacaggcacgcaacaaca

SEQ ID NO: 23298 - RNA, 75 nt, Homo sapiens
cgccgacccggggcccggccgcggcgaccggggcccacgccagccgggccaggagcaccggccacacacaggaca

SEQ ID NO: 23299 - RNA, 73 nt, Homo sapiens
gggagcgccgagccgcccccacagcgagcaggggaagcgacagagccaaagaagaccagaaagaacacacaaa

SEQ ID NO: 23300 - RNA, 75 nt, Homo sapiens
aaggaaaggagaaaacacccaaacggaaggacacagagccaacccagaagagccaagaggcgggagcaccagaca

SEQ ID NO: 23301 - RNA, 70 nt, Homo sapiens
gcacccagaaaaccggaacaacagggcaggacccccaaggaggacaaggcaaaggaacaaggacagcagg

SEQ ID NO: 23302 - RNA, 69 nt, Homo sapiens
aggcggaaaaagacaccaccaacggaaaacaacacagacccaacagaggaagccgcaagaaacgggacg

SEQ ID NO: 23303 - RNA, 76 nt, Homo sapiens
gggccaaggcgaccaagggaggccccgggaggccgaggcggcggaagccgcagaaggaccggccagaagcaagccg

SEQ ID NO: 23304 - RNA, 74 nt, Homo sapiens
aagaaacaggagccagaaaagcgaggaggggaacagccaaaccaggaaaggaaccagaggaaagcagccccaac

SEQ ID NO: 23305 - RNA, 65 nt, Homo sapiens
gccacgacgacagaaccggaggcacagagcacacaacgcaagggaacagccacggggaaaaggaa

SEQ ID NO: 23306 - RNA, 79 nt, Homo sapiens
cgccagccggggaaggccgccggcacgagcggggaacggcacagggaggggacagaccaaccggcagccaaccgcacaa

SEQ ID NO: 23307 - RNA, 81 nt, Homo sapiens
agccggagacgagaccagaggccgaaccgggcgacaagaggccgggcgccccgcaggacacaagaaagagacaaccaaccg

SEQ ID NO: 23308 - RNA, 91 nt, Homo sapiens
ggacacagccaagaaagaacagacccacccgcaagaacccagggcagaaaggagagaaaaccaggaagaaaggcaacggaaagcacagggc

SEQ ID NO: 23309 - RNA, 74 nt, Homo sapiens
ggacacagagcacaagcccccgaaagacagagaagcaacaacccacggccccagagccccagcagcaaacaaag

SEQ ID NO: 23310 - RNA, 68 nt, Homo sapiens
caccaaacccccagcaagggacggaacaacgacagaggcaaaagggaaagcaaggggaagggcccaag

SEQ ID NO: 23311 - RNA, 68 nt, Homo sapiens
gcgggcagaggggacaaccaacgcagggccgggccagccccacaaaggagaaccggggcaagagacgg

SEQ ID NO: 23312 - RNA, 82 nt, Homo sapiens
agggaaacggccgaggggagcccaagcccagcagaagaacgacggaagacagaaccggagagaagaaaaccaaagggacaaa

SEQ ID NO: 23313 - RNA, 74 nt, Homo sapiens
gacacacgaagaagaaacaggacagagggcggaggaaggcgccgaaaaccgaccgacccgggaggccaccacgc

SEQ ID NO: 23314 - RNA, 99 nt, Homo sapiens
cgagccgccgcccccgggaggccggcgccgcagcccgggcccaggccccggcagcgccgggacaagagaacaagagggagggacgaagcgcacagcaaa

SEQ ID NO: 23315 - RNA, 76 nt, Homo sapiens
ggcgccgccggcgcggccggcacacgaggcgggcaacacaacaaggcgcggacacccagacaagcgcgccaccggc

SEQ ID NO: 23316 - RNA, 85 nt, Homo sapiens
acgaggccacgggagacgcgaagcccgcgccgaggccgaagcgaaaagggccccgggaagaacgcagcgcggcggccgggccgca

SEQ ID NO: 23317 - RNA, 77 nt, Homo sapiens
gacccgaccccggacccgacgcggagagcgcagggcgaggcagaagaacaagccgggcgggggcccgagcaacacgc

SEQ ID NO: 23318 - RNA, 84 nt, Homo sapiens
gcgggaggacaccacccacagggcacacaggcccgagcacaaacacaagaaacgcacgcccgccagcgagaagagagagaagca

SEQ ID NO: 23319 - RNA, 78 nt, Homo sapiens
ggcgccagcgccccggacgagccgaacgccgggcgcagaacaggcaacccgaaaccgccggagaaaaaaaaagacagc

SEQ ID NO: 23320 - RNA, 77 nt, Homo sapiens
gagccccagcacagagggaccgggagccgcaccaacgaggcgacccgcggcgagagcccccccagagcgccagggcc

SEQ ID NO: 23321 - RNA, 48 nt, Homo sapiens
gcagacgcacgaacacccaaccggcccagcacgacagagacccggaaa

SEQ ID NO: 23322 - RNA, 57 nt, Homo sapiens
gagggaccggagcaaaaagcgcacgcaaggaaaccgacaagacaagaccacacccgg

SEQ ID NO: 23323 - RNA, 91 nt, Homo sapiens
agcggaagacgcgaccaacccaggcacagcggagccggcgcggggccacaaagaccgagagacgaggcacgacccccaggaccccagaagg

SEQ ID NO: 23324 - RNA, 77 nt, Homo sapiens
cgaaaagaagggggcgacccgacgaccagcggggccggcacgcacggaccgccagagcggaacgaccccagagcgag

SEQ ID NO: 23325 - RNA, 77 nt, Homo sapiens
cagaagcaggcccccagccgcagccacaacaccggcaggaaccaccaggacagagaaaggaagccgggggaccaaca

SEQ ID NO: 23326 - RNA, 87 nt, Homo sapiens
accgccgcagcccgcggagccgggccgggcgccggagccgcgccccaccccgccagcccagagccacgacgacggagccgccgcacc

SEQ ID NO: 23327 - RNA, 73 nt, Homo sapiens
agagcgcggaacaggacgccccgagacccgaagaggcagaagccaccaagcgggcccagcacggcacccggac

SEQ ID NO: 23328 - RNA, 60 nt, Homo sapiens
acaagcgggcagaacagcgcggcaggcgggagcagcggaagacaccaaggccagggaggg

SEQ ID NO: 23329 - RNA, 81 nt, Homo sapiens
gggcccgcgcagcagcgaccacggccccccccgagcccacacaaagcgaggggaagcggcaacacccgagagccgcacccg

SEQ ID NO: 23330 - RNA, 75 nt, Homo sapiens
agagccaaacggagaaagaggcccaagggaccagaggagaacagagcaaccacacgaagcagaacgcagcgcccc

SEQ ID NO: 23331 - RNA, 71 nt, Homo sapiens
aggacacccaggagacccccaagaacagaagacgaccaccagacacccggagaagaagcggaggaagccac

SEQ ID NO: 23332 - RNA, 68 nt, Homo sapiens
aaaaaaacagacaagcagacgaagaacagccgacaaggagcaaaggccaaggagcgacagcggagagc

SEQ ID NO: 23333 - RNA, 74 nt, Homo sapiens
agcacccgagaggaccggcgagggcacaggaggcggagcaagcggggagaaaccgacaagggaggcgaggacgg

SEQ ID NO: 23334 - RNA, 56 nt, Homo sapiens
cgagggaacccgaccggacccagccccagaagaaaaggaagaagcacaagagcacc

SEQ ID NO: 23335 - RNA, 78 nt, Homo sapiens
cggaacggaacagcccacggcccaggagagacccagcacgccggcccggccccagaccggccgccccgggcccgagcc

SEQ ID NO: 23336 - RNA, 64 nt, Homo sapiens
agcgggacacccaagcaaagggccaaaggagagaaacgaggccaagaagaagcaaccggagaga

SEQ ID NO: 23337 - RNA, 78 nt, Homo sapiens
gcacgaggggaagcgcggcccgaaggagggacccagacacccccgcagcacgcgaaggcacaggcgacagccacccca

SEQ ID NO: 23338 - RNA, 64 nt, Homo sapiens
gacgacgcaccgcaggcagacaaaagggccaaagaagggagagagccaccccccgcggagagcg

SEQ ID NO: 23339 - RNA, 73 nt, Homo sapiens
cggaaagaaaagggccggggaagaacacagcaggcgcagaacaaaaaaggaaacaaaaaagggccaagacagc

SEQ ID NO: 23340 - RNA, 70 nt, Homo sapiens
cgcaccaaggcaacgcaagccccaacccgcgcgacaagccaaacagcagaagcagcaagagcaccgcgac

SEQ ID NO: 23341 - RNA, 74 nt, Homo sapiens
gcggcggaaaaccccaaaaggacaaagaggagaaaacgaagagcaccccacagaaccagaaaagcaagagacga

SEQ ID NO: 23342 - RNA, 59 nt, Homo sapiens
cgcggaccgcggacagcgaacccggaggggaagggggccagacaaccagggaagcacag

SEQ ID NO: 23343 - RNA, 78 nt, Homo sapiens
ggcaggacggaaggggaagaggcccacccggagaaccccacggagaaccagaggaacagagccgacaggcacgaagaa

SEQ ID NO: 23344 - RNA, 78 nt, Homo sapiens
cagcgaacggaagcccggaggcagaggccccacacagccgcagaaagcaacaaagcgagagcacaagaaaacagcccc

SEQ ID NO: 23345 - RNA, 86 nt, Homo sapiens
gagcgcggcgggacggcgcggggccgcgcccggagcgccccgccgcgcacacccaaaaggagaaccgacgggagaagaaagaagag

SEQ ID NO: 23346 - RNA, 77 nt, Homo sapiens
gaacacccagaacccagaagccaccaagagacacagcgaaacggagcggccacaccagcgagcgccagcgccaagaa

SEQ ID NO: 23347 - RNA, 77 nt, Homo sapiens
cggagcgcaggcccggccgacggccacacggcggccgcagggcgccggagccccccagggagcgaggcggccagggc

SEQ ID NO: 23348 - RNA, 79 nt, Homo sapiens
gcgacgggacccccccgcagaagacaagggaggcgaggacggacaaaaggaaacggacgggaggccagccagcagaagg

SEQ ID NO: 23349 - RNA, 84 nt, Homo sapiens
acgacacagcaggacgaggaagaagaacagccgagagagcaacaagccagcccgggaccgaggaagaagccaagaggagaaaga

SEQ ID NO: 23350 - RNA, 55 nt, Homo sapiens
gaacgcgccaggcaaccaagcggcagacgagaaggacgaaagaccagaaggagag

SEQ ID NO: 23351 - RNA, 70 nt, Homo sapiens
cgacagaggagcggagaaccgcaggcccagagcacgagacacgagacaggagagaaaggagagacaaagg

SEQ ID NO: 23352 - RNA, 87 nt, Homo sapiens
gcacccaggccaggcaccggccgccaccagggcacgcggaagaccaccaaaagcaggaaaacgagacggcggaagcgcaagagcccg

SEQ ID NO: 23353 - RNA, 74 nt, Homo sapiens
gaccagggcaacaccaaaaacaaaacgaaccaggacggcaagcggagcagagagcggcacgggcggacaaaggc

SEQ ID NO: 23354 - RNA, 73 nt, Homo sapiens
cgcggagccgagccggaacgcggcagcccccgccaggcccaccaagggagagcccagagacaagcaaagaggc

SEQ ID NO: 23355 - RNA, 72 nt, Homo sapiens
gcaccggcccaagaaacagaccgacccgcgagacacgcggacggacggagggcaccacgaccagagcagaag

SEQ ID NO: 23356 - RNA, 74 nt, Homo sapiens
gcagagcacccccaaagacagagaagaaagcagagacaggggacaccaagaacgaagcacccagaccagcaaaa

SEQ ID NO: 23357 - RNA, 80 nt, Homo sapiens
cacgcgcaggcgcggcgggagcccgccccccgcacggaggagcggccgccgccgcggcggcacggaggagcaccgcgccc

SEQ ID NO: 23358 - RNA, 75 nt, Homo sapiens
gcggggacggaaccgggacccgggcgcccgcgcccgccccaacccagccacagaggcgggaggcggcagaagcag

SEQ ID NO: 23359 - RNA, 73 nt, Homo sapiens
gccaagcgaccccgcccagcccgagcgcgggaacaggagaagcaagggccaggcaggaaggagcaaagaaggc

SEQ ID NO: 23360 - RNA, 78 nt, Homo sapiens
cccggggagccgcgcccccacgccggaccggcccggcagggcagagacacccaagacacccccagcaaagcagcagac

SEQ ID NO: 23361 - RNA, 41 nt, Homo sapiens
cgcgagccgcagccggcccgccgccaccggggaccgcaagg

SEQ ID NO: 23362 - RNA, 76 nt, Homo sapiens
caagagggggacccaaggacacccggagaagggccaggcagcgccaaggaccgggacagacaaacccaaaagaccc

SEQ ID NO: 23363 - RNA, 78 nt, Homo sapiens
caaaagccgacaccggccccgcacgcccgggaaggagaaaaggagggaaagaaaagaggcccggaagagagccaccac

SEQ ID NO: 23364 - RNA, 50 nt, Homo sapiens
ccgacggagcgccaggacggaagaagccaagaaggaagggcagcacgaga

SEQ ID NO: 23365 - RNA, 65 nt, Homo sapiens
aagcacgcccaggccaaagccagacaccgcacgaaaaagaagaccaccacaaaacacaaaacaac

SEQ ID NO: 23366 - RNA, 76 nt, Homo sapiens
ccggagcggccaaggccaaggcgccgcggagaacaccacagggaggacggaggcacaggaggaggagaggacacgg

SEQ ID NO: 23367 - RNA, 58 nt, Homo sapiens
cggagccgcagagcgggcaccaggcgggcacgaaaggaaagccgagaaggcacgacaa

SEQ ID NO: 23368 - RNA, 73 nt, Homo sapiens
ccagacgcagcgcagcccggccaagcccgccgcgcccggcgggaaaacggcacaaggcgacgagggagggcag

SEQ ID NO: 23369 - RNA, 63 nt, Homo sapiens
gggcgcgcggcagcgggcgcggcgggcggcgcgcagagagagagcgcaagcagaacaagggga

SEQ ID NO: 23370 - RNA, 76 nt, Homo sapiens
ccccgcacccagaggaaacaggggcccggaagaaaacccgcggccaggcgaggcggggggcaagacagggagccag

SEQ ID NO: 23371 - RNA, 88 nt, Homo sapiens
ggagagggggcgacaacgagcaaggaaaccggccaagaaggacaagaaggggagaagaaaagaaacggcaaaagaaaaaagaaaagag

SEQ ID NO: 23372 - RNA, 78 nt, Homo sapiens
ggccgcacacgagccacgggccaaagaccccacacggggagcacaaaggagagcacccgggcagagaaggccccgccc

SEQ ID NO: 23373 - RNA, 73 nt, Homo sapiens
gaacaggggccagggaaaggagcagagagagagagcagaagagccgagaaggacagagggccagccccaggcc

SEQ ID NO: 23374 - RNA, 80 nt, Homo sapiens
ggaaacagccagaaaaagggacggacccacagaagagagggagcccagaccagaaaaaaggagccagaagaacaggaaga

SEQ ID NO: 23375 - RNA, 79 nt, Homo sapiens
aagggggaccgaccaggacgacacgaaggaggaagaagagacgaagagacagcggagaagcgggagcggaaaggacgaa

SEQ ID NO: 23376 - RNA, 75 nt, Homo sapiens
gacccgaggggcaaagccagacagggacggcagagaacgccggagcacgaagacaaagaagggagagagaggacc

SEQ ID NO: 23377 - RNA, 86 nt, Homo sapiens
cgacgaggaacgaagggacaagacccgccagaacagagcccgcggccccaaaaagcggcgcaagacggagggcgggagaaggagcg

SEQ ID NO: 23378 - RNA, 71 nt, Homo sapiens
acacacacggcgcaccccccgagacccccggacccggccgcccagaagaagagccgccggccgacgagaca

SEQ ID NO: 23379 - RNA, 63 nt, Homo sapiens
cccacccacacagagagacagcagagccgcgaaacaaaaagacaggcagcaggacccgggccc

SEQ ID NO: 23380 - RNA, 55 nt, Homo sapiens
cgcagggcagggccccgcccggcggggaaggaaggagggccccggagcagccaca

SEQ ID NO: 23381 - RNA, 76 nt, Homo sapiens
ccaaccagcaggccaggccgaggacggagggggagggccccccggaccagcccgggagacgggggggccgagcgag

SEQ ID NO: 23382 - RNA, 59 nt, Homo sapiens
caagggacaccaagccccacccaagggaaggaagggaacacggacgacgagacacgacc

SEQ ID NO: 23383 - RNA, 57 nt, Homo sapiens
ccgcccaccacccccacaagacgcccgcgcgcccaggaacacagaccaccaggagcc

SEQ ID NO: 23384 - RNA, 49 nt, Homo sapiens
cgaagaaagaagacgaagaaagcggggacgcacgaaagaagaaaggaca

SEQ ID NO: 23385 - RNA, 83 nt, Homo sapiens
aagcgcagaaagcaggcgaacccgcggcgcaaaacggcccaaaaaaacagaccaccagccgcgaggacaggacccccagaaac

SEQ ID NO: 23386 - RNA, 76 nt, Homo sapiens
ggaagaagaacgacccgcccggggcagcagaacgaagggaccccaaaacccccgaagcccaacaaacaaggacagg

SEQ ID NO: 23387 - RNA, 75 nt, Homo sapiens
gcagcggggcggggcgaagaagcagcacaaggcgagccagaccgcaaaacgggacaagcccgcacgcgcagagac

SEQ ID NO: 23388 - RNA, 73 nt, Homo sapiens
ggaccaagaaccagacaggggcaaggccgaggggaacagcacacagagaggaggcggaagcacgccagcagga

SEQ ID NO: 23389 - RNA, 63 nt, Homo sapiens
ggcacggggcgggcagcggcgccgggcacaggagggaagagcaaggcgaaacaagcacccagc

SEQ ID NO: 23390 - RNA, 57 nt, Homo sapiens
cgcagacgggacacagcacaccggagagacgaggggagagacaaaccagccgccaca

SEQ ID NO: 23391 - RNA, 72 nt, Homo sapiens
gagcccagaaagagcccccgaaagccgaagaacgacgaagagagaaaggcagggcaccccaccacagcgaca

SEQ ID NO: 23392 - RNA, 89 nt, Homo sapiens
ggaacgggaagaggaaaaacgcgaaagaaagaagagagcacagaagcgagacagcagggcaccaccacccgaacacaacacaaaggaag

SEQ ID NO: 23393 - RNA, 79 nt, Homo sapiens
agagagcaaaacacaagagagcagggaggagaaggaccacgggaggcagaccccgacgacacaggaacccaaagcgagc

SEQ ID NO: 23394 - RNA, 77 nt, Homo sapiens
cgcccaccccagaccacaaagacacgcccaaggaccacagccgcgcaacgggcgaccccgagggaacagagccacag

SEQ ID NO: 23395 - RNA, 74 nt, Homo sapiens
aagaacgaaaaaaaaagaacaagaagaagccaccgggaacccggcggagaaacgccaagggaccacggaacagc

SEQ ID NO: 23396 - RNA, 76 nt, Homo sapiens
ggaccagcagaaaccagaggacaaagaaacagccggaaaagcacgagcacaagacgaaaacgacacgccagaagac

SEQ ID NO: 23397 - RNA, 75 nt, Homo sapiens
gggagagcggggaagggggaaaggcaccaggacaagcaaagcaaaagcggcaggcgacagaggcggcccaggacg

SEQ ID NO: 23398 - RNA, 77 nt, Homo sapiens
acaagaaggaagacggagcaaaaaaaccagacgagagacagaagacgaaagggcaagaaagagagcacggacaagag

SEQ ID NO: 23399 - RNA, 68 nt, Homo sapiens
ccgagccgacgccggggcgaggaccgacggagacacaagcgggacggaagaggcccggcgaccggaca

SEQ ID NO: 23400 - RNA, 65 nt, Homo sapiens
cagacgggacagggaggagaagggcagaaccccagagagggaggagaaggaccgagaggacccag

SEQ ID NO: 23401 - RNA, 75 nt, Homo sapiens
ggagaaccagaccggcgacccgcgacgccgagcacccaggcgacgcccaccaaggccgaggaggaggagacaaag

SEQ ID NO: 23402 - RNA, 75 nt, Homo sapiens
gaaacccacgccccgggaagagcccagcagcccaggcacggcagaggcagcgacagagaaaaccccggagcaggg

SEQ ID NO: 23403 - RNA, 69 nt, Homo sapiens
cagaaagacgagcagaaaaccgagccgacaacacggaacgagaaggggcaaagaagagagaacacagaa

SEQ ID NO: 23404 - RNA, 59 nt, Homo sapiens
aaacggcagggaagaggcgagacagaagagagaggaagaggggaaccgcccaaaagccc

SEQ ID NO: 23405 - RNA, 75 nt, Homo sapiens
gcaagaggaccgagccgagcaggcaggagccacaaaggcccaacaaagaacgcaagaggaccccacagaccggag

SEQ ID NO: 23406 - RNA, 71 nt, Homo sapiens
acagccaaccagcggaaaaggacaacggaggcagagaccaagcaggggcgaaggggcccccaaagggaagc

SEQ ID NO: 23407 - RNA, 81 nt, Homo sapiens
ccagagacacgaagaagagaaaaagcggggaaaacaaaaaaaagaaggagggaagagggggccaggaccaggccccacccc

SEQ ID NO: 23408 - RNA, 69 nt, Homo sapiens
accccagaggaaccagacgagcagacaagggcccacaccaaagccaccagagcaagacagggacggagc

SEQ ID NO: 23409 - RNA, 131 nt, Homo sapiens
gacgaggggcgagagacggcggcggccgaaagcggagagagcgggcgggcggccgggagacccacaggccaggccacagggcaccacaacacgcccacccaggaggcggccggccaagcccagccaggcgc

SEQ ID NO: 23410 - RNA, 76 nt, Homo sapiens
cgggaggcgcggcgagggcgccagaccggccaacgccccaccggcgccacgcggggcacagccacacaggcgaccg

SEQ ID NO: 23411 - RNA, 83 nt, Homo sapiens
gccgccgccgccgccgcgccgcgccgcgccgcaccccgagcgaccggccgcaggagggaagcgcacggaaaccgccccgggag

SEQ ID NO: 23412 - RNA, 92 nt, Homo sapiens
cgggaagcaggagccccaggacagaggagagcaaagcagacagccacccccaccacccaacacagcagaggaacacgacgagaagaccagaa

SEQ ID NO: 23413 - RNA, 74 nt, Homo sapiens
aaacaagggcgcggccgcgcccaggagcacggacgccagaacggcgcaaaaaccagacaccccacaccaccacc

SEQ ID NO: 23414 - RNA, 81 nt, Homo sapiens
acggccacagcaacccagggacagaaggacaccgaccagcgaagaccagacccaggacagaagcacgcagaaccacagaag

SEQ ID NO: 23415 - RNA, 80 nt, Homo sapiens
caacgcccgccggggagccaagaggcaggcccgagggccccccggggccccccgggcaaggaaggagggccccggagcag

SEQ ID NO: 23416 - RNA, 64 nt, Homo sapiens
ccgcccgacccaaccggcggccgagcgcgagcaagcaaaggaaccgaggaacaaaacagccaga

SEQ ID NO: 23417 - RNA, 37 nt, Homo sapiens
cccagaggcaacaaaggcgagacacgaaggacgaaaa

SEQ ID NO: 23418 - RNA, 77 nt, Homo sapiens
cagggagagcgggcagccccaggggacaggagacagacccagcacggaccccccccccagccgggcgaggccccgaa

SEQ ID NO: 23419 - RNA, 75 nt, Homo sapiens
aaagaagaacgccacaacaccgccgccacggacgcagcacaccaaccacaaaaagagagcccacgaacggcggga

SEQ ID NO: 23420 - RNA, 91 nt, Homo sapiens
agcgcaccgcggacgcacacagaacaaccccggccgcgcagccgacgcgaggcccccccagcgcagccaccgggccgaggcgcccagccgc

SEQ ID NO: 23421 - RNA, 84 nt, Homo sapiens
cacacgaagagcgccgcgcgcagagaccccgcaggcgacagcaaaggccagacgcaccaacaaccccgccaccaccccaccacc

SEQ ID NO: 23422 - RNA, 83 nt, Homo sapiens
gaaccagccgggggccaaccgaggagccacgcagcagaaccgacagaagaaaaggcccaccgggcagacaaccccagccggca

SEQ ID NO: 23423 - RNA, 84 nt, Homo sapiens
gagaggagagccggggggaagggcgcgcgcccggacgccacgcacccgcgcgagaaggcggacgaaagaaagaaggagcaccaa

SEQ ID NO: 23424 - RNA, 65 nt, Homo sapiens
accggcgccaacccacaacaggaccacagaaaacacggacccccggaagcacgaaaaacagaccc

SEQ ID NO: 23425 - RNA, 83 nt, Homo sapiens
gcgagcggcggcgggggccagcccccagcccggagaagccaaaggcaaagaaccagaagcggaaccggaagaagacgaacaga

SEQ ID NO: 23426 - RNA, 101 nt, Homo sapiens
cggagcgcgaaggccgggacccggccccggcccacaggggggggcaaacccgagagaacggagaaaggacagggacaggaaagaaagaaaaagaaaagaaa

SEQ ID NO: 23427 - RNA, 78 nt, Homo sapiens
aagcaggagagggccagcagcagccaaaggacagaccaggaagagcagaagggacgagcgcgagaagaacggcacaca

SEQ ID NO: 23428 - RNA, 61 nt, Homo sapiens
ccgccaagggaaagcaacagccaaacgccaacggcaagaaagggaaggccgcaaacagaca

SEQ ID NO: 23429 - RNA, 54 nt, Homo sapiens
ggggccgaccgcaacacggcgcggaaaacgcgaacggggggagagccagcaacc

SEQ ID NO: 23430 - RNA, 46 nt, Homo sapiens
gggaaggagaaggaagacggcgaggaccgcccaagacgacagacag

SEQ ID NO: 23431 - RNA, 76 nt, Homo sapiens
gaaagagaacagggccagaggacgccaaggcccccaagcgcgagcaagaggacagggaggccgcacagaggaggag

SEQ ID NO: 23432 - RNA, 94 nt, Homo sapiens
gggggcaggggaaagaagaggaaagcgcccccacccgcagaggggagccgccaccaaaagcagacggaaaacccacggggaagaccacaccccg

SEQ ID NO: 23433 - RNA, 68 nt, Homo sapiens
ggcaacagcaggacaaaaccaccgaagcccaggcagcgggacaaccgcaccaggcacaagaccggcag

SEQ ID NO: 23434 - RNA, 79 nt, Homo sapiens
cagacagggggccgggaaagaaagagcgccgggacagggggaggaaagcaccgaggcacaacaggagccagcacgagac

SEQ ID NO: 23435 - RNA, 71 nt, Homo sapiens
cccgcccccggagagagcacgaaggacccagcagggcaccagcggcagcggagagccgcccgaccaaccgg

SEQ ID NO: 23436 - RNA, 70 nt, Homo sapiens
ggagaagagggggacgcggaagaggagagggagcgagaaccagacagcaggggaacaaaccagagcggcc

SEQ ID NO: 23437 - RNA, 79 nt, Homo sapiens
acggaaaggggagggcgaaggaccagcggaaggggagagcggcggcaggagaagagccgccaggaggagcagcggccaa

SEQ ID NO: 23438 - RNA, 68 nt, Homo sapiens
acaccagcaagacgacgaagaacagcagaaagagccgcagacgcacagcaaccaccggacccgaaggc

SEQ ID NO: 23439 - RNA, 81 nt, Homo sapiens
agggaagaccccgaaggaccaagggacacaggagaaggacccacagaggagggaagcaggaaagcaagaagaacacaccca

SEQ ID NO: 23440 - RNA, 73 nt, Homo sapiens
aagcccaaaccccaggccaagcaaccaccagcagcccccagagcggaacacagcgcggcacggcaccgggccc

SEQ ID NO: 23441 - RNA, 58 nt, Homo sapiens
cggccagcacagcagagagaagccagaacagacacaagggcagaaggaaggcagcgca

SEQ ID NO: 23442 - RNA, 78 nt, Homo sapiens
gaaacggaggacagcggcagaagagacggaaagaaaacggcaaggaagaagccgaaggaaaaaagcaggcgagaacaa

SEQ ID NO: 23443 - RNA, 77 nt, Homo sapiens
cgagccggagcggcaggcagaaggggggccacccccgggcgccaggggggacacaaccggggacaccagccaggaga

SEQ ID NO: 23444 - RNA, 74 nt, Homo sapiens
cagcccgcggaccggagaagccccagaacaacagggcccccaggcgagccacgccaccgggcacggagcgaggc

SEQ ID NO: 23445 - RNA, 84 nt, Homo sapiens
gggggaagcggaggcacgggcggcccgcaggaccggaccgggggaggaaggcaggccccgaagccccagaacaagccagaagag

SEQ ID NO: 23446 - RNA, 89 nt, Homo sapiens
ggagacagcggcagagcacgagcggaccgcgagagacgagagcacgacacggccgcacgggcccacgccagaaaacaggggcacagacg

SEQ ID NO: 23447 - RNA, 106 nt, Homo sapiens
aaaacaaaacaggacagcacaggcacagaaggccaaaaaggcaaccacagagagagagagggaggggaacaggcccaaagacgcacccacagagaaacccgacccg

SEQ ID NO: 23448 - RNA, 76 nt, Homo sapiens
gccgcccgccgcagcggaggaccaagacccacggcgaagaccaacgaaagacccaaccgacaaaacaaccaaaaca

SEQ ID NO: 23449 - RNA, 73 nt, Homo sapiens
cggacagcaaggcgaggaagaagcgcagccagagccaggggagccaacaggaaagccagcggacggccacacg

SEQ ID NO: 23450 - RNA, 69 nt, Homo sapiens
gccccaccgcgcccccgaagcacagacacagacgggcaccggcagcacgcgcgggaaaaaaccccagca

SEQ ID NO: 23451 - RNA, 74 nt, Homo sapiens
gcgcggaggaggcggggaccgggaccgggacggaccgggaggacaacggcaagcggagaagagcaaggccgaac

SEQ ID NO: 23452 - RNA, 70 nt, Homo sapiens
cagaacaggggacgccccacggccagaaagccgaggccccccagcagcgaacgagcgaagaaaccgcaaa

SEQ ID NO: 23453 - RNA, 71 nt, Homo sapiens
cacgcaaaggagaaaggaaccgacagacaccgccagaagcaccaggacagccacaagggcccaccaggcgc

SEQ ID NO: 23454 - RNA, 82 nt, Homo sapiens
gaggaccccaggacacccggacagagaggcgagacccaccaacaacaccagggacacaacagcaaggagcagaaaccgaaac

SEQ ID NO: 23455 - RNA, 66 nt, Homo sapiens
cccaaacgacacccccaagcaggccgagaaggagggccagaaggaaggaaaaaggaagacagggga

SEQ ID NO: 23456 - RNA, 75 nt, Homo sapiens
gaagggaggcgagaagaaaagccaccaccaccacagacagagggaagagcggaacaccaacaaaccagcagagcc

SEQ ID NO: 23457 - RNA, 73 nt, Homo sapiens
aaaccaagggcgggggggcacaaggccacgaaacggcacgccggagccaagaaagaaaagcccccgcaacgcg

SEQ ID NO: 23458 - RNA, 79 nt, Homo sapiens
cagcgaccacacgggagggggcgcccacggacgggcaggcaccccacgaccccggccaagggcgccaggaaagccacag

SEQ ID NO: 23459 - RNA, 85 nt, Homo sapiens
gccaagcaaaccgggaaaggagaggacccggagccgccggcaggcgcccgagcacgccaaccccaaccccacggacagcgccccc

SEQ ID NO: 23460 - RNA, 74 nt, Homo sapiens
cgccccgcccgcgcaccgcgcggcagcgccgagccgagaggggaccccgggcaaggacggcacggcccgccgaa

SEQ ID NO: 23461 - RNA, 67 nt, Homo sapiens
gaagaggagaagacaccaaaaagcaaacggaccagaccgaccaccaaaagggaagcaaaaggccagg

SEQ ID NO: 23462 - RNA, 78 nt, Homo sapiens
cgggacggaccgagaccggaccgagagcggaccgagagcgcgaaacgcacgagaagggaagcagacggaaagcaagac

SEQ ID NO: 23463 - RNA, 74 nt, Homo sapiens
agcacaaccacccgggcccaaccagcccagcgcgcggccccaccgcaggcaaccaggggagagagagggaacac

SEQ ID NO: 23464 - RNA, 69 nt, Homo sapiens
ggaacagcaggaccaagcgccaccaggcacacacggcagcgcagacacggggacccggcaaaccgaaga

SEQ ID NO: 23465 - RNA, 53 nt, Homo sapiens
ggggagaaccggcgccggggcggacgcacccaaaccccaccaacaacgaacgc

SEQ ID NO: 23466 - RNA, 82 nt, Homo sapiens
agaaggagggcagccgcgggaggagaccggggaaccgcacgcgggcaacggaagagcagacgagaagacgcggcgaaaggaa

SEQ ID NO: 23467 - RNA, 126 nt, Homo sapiens
agccgggcgccggcgccaccacaacccaccacgccgagggcccaccccaccagcgagggcgccccgacccaaagcgcgccccggagggcgaacgcgggaacccggcgccgacgccggcagcaggaa

SEQ ID NO: 23468 - RNA, 60 nt, Homo sapiens
aagagggaagcagacgagagcaaggagagggcggggacacagcgggcaggaagaagacgc

SEQ ID NO: 23469 - RNA, 65 nt, Homo sapiens
cagacacaaaaaaggggagacgggccagacaagccacagcaagcgcaaaaagcacggagcaaaac

SEQ ID NO: 23470 - RNA, 38 nt, Homo sapiens
gaacacacagagccaccagggcaacgcagaggggagcc

SEQ ID NO: 23471 - RNA, 74 nt, Homo sapiens
agggaccggcaaggcgagggagacaccggggccccacagggacaccgcaggggggagaaaaggccaagggcagg

SEQ ID NO: 23472 - RNA, 65 nt, Homo sapiens
ggaggaggaggggagaggccggaggacaccaacaggccagccgaccggcaggccagggaaaacag

SEQ ID NO: 23473 - RNA, 56 nt, Homo sapiens
ggaaaggaaaaaagggccagacacgcacagaacccaaagcccaagagggccccagg

SEQ ID NO: 23474 - RNA, 88 nt, Homo sapiens
ccggagccagaggaggagaccgggacagagagaggagcaagaggacccgcggacacgcaaagggccagcacaacagaaaagaacgggg

SEQ ID NO: 23475 - RNA, 74 nt, Homo sapiens
aggcgacgggggacacaggaccaccaggacaaaagaagggcagcacaaaggaaagccccaaaccccggaacggg

SEQ ID NO: 23476 - RNA, 55 nt, Homo sapiens
aaacgaggaaaccgggaaagccaccgaaaaggagacggcgcaggaccggggaacc

SEQ ID NO: 23477 - RNA, 70 nt, Homo sapiens
gcacaaggaaccagcccaagaagcaggaaccaaacaagacaaaggaggcagcaaacagcacacaacggac

SEQ ID NO: 23478 - RNA, 76 nt, Homo sapiens
ccacgggcccggagacccgcagcccaaggacacaaaggggaggcaagcaggggggcaaaggaaagaaggcagaaag

SEQ ID NO: 23479 - RNA, 40 nt, Homo sapiens
agcccccgagaacgggacacagagacggggccacaggccc

SEQ ID NO: 23480 - RNA, 83 nt, Homo sapiens
gaacagagcgccgccaaggacgaaagaagacagagaagcaaagaagcaggcccgaaaagaaagcgaacacacaaaacaagaaa

SEQ ID NO: 23481 - RNA, 56 nt, Homo sapiens
gaaaaggcggaagaccgccaaaaaggacacggagccagaaagagccagccccaaga

SEQ ID NO: 23482 - RNA, 81 nt, Homo sapiens
ggccggccccagcccggcgcgccaagggcgcagcgggaagaggagcggaaaaacaagcaaaagaaaaacagggaaagagga

SEQ ID NO: 23483 - RNA, 33 nt, Homo sapiens
ccggagggagaagacaggccaagaagggaccca

SEQ ID NO: 23484 - RNA, 81 nt, Homo sapiens
acaaaaggaagaaaaaacaaaacaagaagcagcccaaaacagagcaagggcaaaagaaccaaagggcaaacgaagaaaacg

SEQ ID NO: 23485 - RNA, 55 nt, Homo sapiens
acccaagcgccgcggaaccacgccgccacgacccccaggacccaaagacaggacc

SEQ ID NO: 23486 - RNA, 79 nt, Homo sapiens
gaaagaagaaagcccagagaagcaaaaaggaaaaggggcccaacacagaaagggccagcagaagggaagcaccaaaaaa

SEQ ID NO: 23487 - RNA, 65 nt, Homo sapiens
ggaccaccggcaccaccaaaggggagagcccaacaagcgagaaacgaaaacaaaagaaaagagag

SEQ ID NO: 23488 - RNA, 82 nt, Homo sapiens
gaaggacgaggcgaggcgagaaacgaggaaagaagcacgaaggaaaaagcaccaggaaagggaaaagaaagaaacacagccg

SEQ ID NO: 23489 - RNA, 83 nt, Homo sapiens
ggagagcccgagccaacggaggaggccgagaagaacccacagagacaggaagcacacgcagccacaggaaaaagagcaaacag

SEQ ID NO: 23490 - RNA, 92 nt, Homo sapiens
ggcccggaccggcacccggacaggaggagccagggcccggcccgaaaggagagccaccccaccaacaacgaacgcggcaggcgcacaaggaa

SEQ ID NO: 23491 - RNA, 91 nt, Homo sapiens
gaggacgaaagaaggccgaaaggaagaaaagcagagaacaaagccaaagcagcaggaaggaacaggaaaacgggccacaacacaaccccca

SEQ ID NO: 23492 - RNA, 75 nt, Homo sapiens
ccggccccaccagcggaagcgcgcgcgggggaagacgacgacacgcggaggcgccggaagcccccacccaacaag

SEQ ID NO: 23493 - RNA, 81 nt, Homo sapiens
cgacccggggcggcggcggggcgaccgcgagccgggaacgcccgaagccgcaggaaccccacccccagccgcacgcaagaa

SEQ ID NO: 23494 - RNA, 61 nt, Homo sapiens
gccgggcaagggcggggcgagagggcagaacgccgcccggacaggaaggagagaaaaggcg

SEQ ID NO: 23495 - RNA, 78 nt, Homo sapiens
cgacgcaagaccagcaacagaacgcgccgagcccccgcgacccaccgaaggccggggggggcacccgaggaggaagag

SEQ ID NO: 23496 - RNA, 56 nt, Homo sapiens
ggaccacgccgaggcccacgcaccccgggcaccacagaaaagcaaggcgaaggagg

SEQ ID NO: 23497 - RNA, 76 nt, Homo sapiens
gacgcccagccaaacaaaaaggaaaggagacaagcagagacgaaccaggcaaaggcgggccgccaccaccaggcca

SEQ ID NO: 23498 - RNA, 80 nt, Homo sapiens
gcacccagagagggacaccgagaccaacggaacgagaaagcggaccagcggcaggagcggcccagaaacggggcgcgagc

SEQ ID NO: 23499 - RNA, 69 nt, Homo sapiens
ccgacgccaggcagcgcccccaaacggaaaaagacaagggcagagcagccggggaaaagggccaagaag

SEQ ID NO: 23500 - RNA, 69 nt, Homo sapiens
gcacaagaaacccaagcgcgaggcgaaagggcgggggcgccgaggaagaaccgggggggacagccacca

SEQ ID NO: 23501 - RNA, 72 nt, Homo sapiens
cagaaggaagaggcggacggaggagcaggcgagaagagaagggacccagaggaaggagccagaagagaaaac

SEQ ID NO: 23502 - RNA, 58 nt, Homo sapiens
gcagggccagggagacgaggcccggacagggacgaaggacaggcgggcgggaccccca

SEQ ID NO: 23503 - RNA, 35 nt, Homo sapiens
accagccaaacaaacagggaccccgacggagagac

SEQ ID NO: 23504 - RNA, 52 nt, Homo sapiens
agaaacaaaggccaaggcgaaacccggcacacaagcaacagaagaaaaggag

SEQ ID NO: 23505 - RNA, 59 nt, Homo sapiens
caaggagacaacaacccagagccggaacgggcccagaaggacaaaccggcgaccacaca

SEQ ID NO: 23506 - RNA, 79 nt, Homo sapiens
agcgggagcgcgagaagagagagcccgggaagagagcagcgcagcggaggagggggccgcaagcgaccggcccgaggac

SEQ ID NO: 23507 - RNA, 71 nt, Homo sapiens
agcccaaccacccaacgggcccgggcaagcacaacggagacagaaccagccgacaggggggagcccaaccc

SEQ ID NO: 23508 - RNA, 76 nt, Homo sapiens
agaacccgaccaaaagagaccaggacccccgagacgcggggagccccgaggaaggacaccccaagaagggccaaac

SEQ ID NO: 23509 - RNA, 56 nt, Homo sapiens
ccgaacggcaccagcaaagacccagcccagcagaagccccaggggacagggagagc

SEQ ID NO: 23510 - RNA, 84 nt, Homo sapiens
gccggccgacccccgcgcgacggcgacgcgggaggccagaccaacgggacccacccccaccacggcacagcgagcgagagccgc

SEQ ID NO: 23511 - RNA, 63 nt, Homo sapiens
aagccgcagcggaaagcaggagcacaggccaaaggaggaccggggaggagcgaaggcggccga

SEQ ID NO: 23512 - RNA, 74 nt, Homo sapiens
cgaccgaaacaccagagcggagccgcggagcccgggccagaccacaggaaagcgcaggaccccgaccccagcag

SEQ ID NO: 23513 - RNA, 56 nt, Homo sapiens
aaaacgcggaaaaccgacacaacagccaaagaccacgggggccaaacaccaggaga

SEQ ID NO: 23514 - RNA, 58 nt, Homo sapiens
ggagaaacagaccaaggggagacacgcagaaagggacaacaagggaggcaaggcccag

SEQ ID NO: 23515 - RNA, 77 nt, Homo sapiens
cacaccgacgcaggaagccaccgagacggcgaccgggcgccgagacaccagagccacaaggaccagccaaggaagca

SEQ ID NO: 23516 - RNA, 74 nt, Homo sapiens
ccaaagcgagaacccccagggggcacggccccaggccaaaaccaggccccccaaagcaagcaaggaggcacaga

SEQ ID NO: 23517 - RNA, 67 nt, Homo sapiens
acacacccccaggaggcccggcagagcagcaacacagcacccggcggcaaaccaaacaaaaccagag

SEQ ID NO: 23518 - RNA, 51 nt, Homo sapiens
gacaggaccccggacgagcccggcgaggaaaccgaaaccagcccccaaggg

SEQ ID NO: 23519 - RNA, 76 nt, Homo sapiens
gggagccccgcagacgggacacagcacaccggagagacgaggaaaagacaagcggagaaaggaccgagggcagcag

SEQ ID NO: 23520 - RNA, 75 nt, Homo sapiens
cgagacccccaagacggcagacacccagcagaggccacgcaagcccccccgggagagcaggaagacagcagggac

SEQ ID NO: 23521 - RNA, 60 nt, Homo sapiens
aaaagacgggcgccgcgggcagcgcgcggcccgggcagcagacgggagcgggccgagaaa

SEQ ID NO: 23522 - RNA, 80 nt, Homo sapiens
ggcgcgccgggggccggccgcgccggccggccgggaccaggacccaaagacaggaccacgcaccagcagagaaggaaagc

SEQ ID NO: 23523 - RNA, 92 nt, Homo sapiens
aaaaagccaagagacgcgaggacaaagcagcagaaccacacaggcgacgaagaaaaggggggacaggcacacaggccacaaggccggcagcc

SEQ ID NO: 23524 - RNA, 72 nt, Homo sapiens
ccaccagccaaagcagaccggagggggaacacccacacaaagaaaagccacgaccaaggaaaaccgccgccg

SEQ ID NO: 23525 - RNA, 59 nt, Homo sapiens
aaggcaaggaaaaacacaacccaagaagggaccccacagagaagcgagggaagaggaca

SEQ ID NO: 23526 - RNA, 67 nt, Homo sapiens
acaccagcgcggaagcggcggcagaacacccggacacacacacagacaaagccgaccaccaaaagag

SEQ ID NO: 23527 - RNA, 84 nt, Homo sapiens
aagggaaggcgcgaggaggaaaggaggacgaggcagaagccccagaggagcccgaaacccccaggcgggcaggaaggagagccc

SEQ ID NO: 23528 - RNA, 82 nt, Homo sapiens
caccccacccaagaacagagacacggccgagacgccacaagccccaagaaccgcaaagccacgggaaagagcgcccaacggc

SEQ ID NO: 23529 - RNA, 78 nt, Homo sapiens
gaacaaaaaaaaagaagccccaccagccaagcaaacaccccccccaccaccccaccagaaagaccgacacagacaacg

SEQ ID NO: 23530 - RNA, 87 nt, Homo sapiens
agagggaaagggaaggagaaggagggacgcaggcgcaggccaggcaaacaccagcaacacccgggacaaaaacgggggccaccaccc

SEQ ID NO: 23531 - RNA, 58 nt, Homo sapiens
aaagcaagaggcaaaaaggagggccgaggacaccaaccacacacaacgccagccaggg

SEQ ID NO: 23532 - RNA, 77 nt, Homo sapiens
ggacccaaggagaggcacccgggacggaaccgcgaaagacaccagcacccgaggccagcaacaacaccgccagcaag

SEQ ID NO: 23533 - RNA, 81 nt, Homo sapiens
aagaagaacagagacagcagccaaacccccaggagccaaaaaccgaacacccggaaggggacaagggacggcgaacagacc

SEQ ID NO: 23534 - RNA, 74 nt, Homo sapiens
ggggagagccaccggccccagcagcaccgaaggggaagaacggaccacccaccgccggagcccccagccgagaa

SEQ ID NO: 23535 - RNA, 81 nt, Homo sapiens
caggacagaccgagcccccggaaaccccaggggcgggccccggccagggcccaggcagccggggcggaacccccagacagc

SEQ ID NO: 23536 - RNA, 79 nt, Homo sapiens
cccagaccaccgacagcaccaagcccgcccacagagacggcaagccgggccgccagcgccggggagacgcggcccccag

SEQ ID NO: 23537 - RNA, 72 nt, Homo sapiens
aaaaaacgggagacacacacaaacagggcgcagccagaaaaggggagaagcgcaaacaccagagccggaccc

SEQ ID NO: 23538 - RNA, 82 nt, Homo sapiens
acgagcagcgaagagaacgcgcccaagggcggggacacgggccgcgcgaaaaagggaagaggaagaacgcgagaaaaaaacg

SEQ ID NO: 23539 - RNA, 84 nt, Homo sapiens
aaaacccagcgagaccgggccggaacgaaagcaggacggaggagcgaccaccgacaaaaccacggagcgggggaaaaccagccc

SEQ ID NO: 23540 - RNA, 80 nt, Homo sapiens
cgagaccaaccgacgggacccacaggcaaagcaggaaaggaccccaccccagcccacggaaaccaaggacaggaggagag

SEQ ID NO: 23541 - RNA, 68 nt, Homo sapiens
agggacaccaggacagccccagggaaccgggccgcaccacgagcccaagagaacgaaagcacagaaaa

SEQ ID NO: 23542 - RNA, 79 nt, Homo sapiens
ggaccacaagacaacgcggagcggcgaagagcaaccagaaagagagcacaagcccaggaacggggagaaacgccagacg

SEQ ID NO: 23543 - RNA, 57 nt, Homo sapiens
gccccgcgagcgggacacaggggccaggcacaaagagggcgggacacccaggaggag

SEQ ID NO: 23544 - RNA, 72 nt, Homo sapiens
ccgaggccggccccccacgcgcacacaagggagcccccccaccacccccgaggccagaacgcggagacggac

SEQ ID NO: 23545 - RNA, 75 nt, Homo sapiens
aaagggacggacaaaggaacaggaccagaacggccgcagagaaaaccgcacacaaagggaaagaaaaagacaaag

SEQ ID NO: 23546 - RNA, 63 nt, Homo sapiens
gaaggaccaagaaccagaggagaccagggagacaaaccggaacacgacagaagccacagcagg

SEQ ID NO: 23547 - RNA, 71 nt, Homo sapiens
cgcccccgggacgcagccggaggaggcgaggacacacgggggaagacagcaaagacgggagaggagagaca

SEQ ID NO: 23548 - RNA, 78 nt, Homo sapiens
acccccagacgggagacaccgaggccgccggcagagacaggggccaggccaggggcaggggaagcacccaaccaacga

SEQ ID NO: 23549 - RNA, 69 nt, Homo sapiens
gaacgggaaagaacagagaaggccaggaagaagcaaaggaagacagaaaagacgccaccccagcccgac

SEQ ID NO: 23550 - RNA, 40 nt, Homo sapiens
cgccccaaggccagacaaaacgaaccgcgacggacccgca

SEQ ID NO: 23551 - RNA, 79 nt, Homo sapiens
acggagaagcacggcagacagggcaaagaaaagggacgggaccaacggggaaccccggcgggcgccggacacagaaggg

SEQ ID NO: 23552 - RNA, 53 nt, Homo sapiens
aagggagagccacccaagagacaagcagaggaacagggagggcccccgccagc

SEQ ID NO: 23553 - RNA, 81 nt, Homo sapiens
gggagagaagaagacggagccccccgagcgcacggaggggagaagggggagaaagccaccacacaacccaaacaagaggga

SEQ ID NO: 23554 - RNA, 54 nt, Homo sapiens
caccggaacccgaaggagcagggagggcgaacgccaggggcaggggaggcagga

SEQ ID NO: 23555 - RNA, 71 nt, Homo sapiens
accgggagagcgaccagggacaaaagagcaacaggcagaacgagaaaaagaggaaggacacaacgcaaagc

SEQ ID NO: 23556 - RNA, 65 nt, Homo sapiens
gaggcaaagagacaaggagagaagaaccaaagaagcaaaacacgaggaccagaacagagaagaaa

SEQ ID NO: 23557 - RNA, 79 nt, Homo sapiens
cagccgagcacacgccgccgccgccgcacggggcccccccgagcacgagccccaccaacggccagcccagggacggcgg

SEQ ID NO: 23558 - RNA, 65 nt, Homo sapiens
aggcacccaacagaaagggagggccagcagcgggaccagagcacggaccagccaacagccagacc

SEQ ID NO: 23559 - RNA, 88 nt, Homo sapiens
gccgccagggagcccccgcgcgcccggccggcccggagcaccgagccgcggcacggaggagacgagccaaaccaggcgaccgagcagc

SEQ ID NO: 23560 - RNA, 38 nt, Homo sapiens
ccccaagagcgggacgcaggaaacggggccaccaggag

SEQ ID NO: 23561 - RNA, 73 nt, Homo sapiens
ccaagaaggaggcacaaggaaaacaccacaagcggcacaggaggagaggaagcggcggcagagaagcgaaccc

SEQ ID NO: 23562 - RNA, 79 nt, Homo sapiens
ccgagacaaaggcaccaggccaccacagaaacaaaagcaacaaagaggaaagccaaggacacgcaggacgaagaaggag

SEQ ID NO: 23563 - RNA, 41 nt, Homo sapiens
gaccggggaccgagaggccaggaaagaaagaagacaaaagc

SEQ ID NO: 23564 - RNA, 39 nt, Homo sapiens
caccggcgggaggaacaaaagacacccgaggaagacaag

SEQ ID NO: 23565 - RNA, 36 nt, Homo sapiens
gcggcgacaagggcagggcccccccaaggagaacag

SEQ ID NO: 23566 - RNA, 75 nt, Homo sapiens
ggaaacagcccggaccggcagacccagcaaaagcgccacagggaggacacgggagccagaggaaccaagcacacc

SEQ ID NO: 23567 - RNA, 58 nt, Homo sapiens
caggaccagagggcgcgaggcaaggggagaagcccgacagagaaaggagaaaaggccg

SEQ ID NO: 23568 - RNA, 67 nt, Homo sapiens
aaaaagccaggcccccacccaccccacaaccaaagcgcaagccccggggcagagacacaggacaccc

SEQ ID NO: 23569 - RNA, 38 nt, Homo sapiens
gaaccggcacagcccccggggcacggaccgaagagggc

SEQ ID NO: 23570 - RNA, 92 nt, Homo sapiens
caggcgaccggcccgcagcaagaggcggacgagaaggacagggaaggcgccgaccccgacagaacgggccccgcacccgcggccccggggca

SEQ ID NO: 23571 - RNA, 68 nt, Homo sapiens
ccggccggcggggccgccggcccccgacagcagacggcccgccacgggccccgcagccgcgcccgagc

SEQ ID NO: 23572 - RNA, 102 nt, Homo sapiens
gggcgggcgcccgccggcacgccgccagccccgggggccacgagcgggaccccaccaaaacggacaaaagagcccccacgagaaggacagccggcagccaga

SEQ ID NO: 23573 - RNA, 76 nt, Homo sapiens
gccagcaggggcgagaaccccccaggagaacggccaaaggggggaggagggcgccagcgaacccgccgagccagcc

SEQ ID NO: 23574 - RNA, 80 nt, Homo sapiens
ggagagcggccagcacagcagagagaagccagggcaagaaggaacagacaaaaacggccggaaggaaacacaggacacca

SEQ ID NO: 23575 - RNA, 67 nt, Homo sapiens
ccgcccccccacaccagaacagggcagcagaccgcgcgccagacgccaaggacgcccacagagcacg

SEQ ID NO: 23576 - RNA, 44 nt, Homo sapiens
aggccaaccgcgagaagagacccaggacaaccaagagagagaca

SEQ ID NO: 23577 - RNA, 62 nt, Homo sapiens
ggaagagggcggcgacgggggggacgagcggagcccgggacaggaggacaaaccggcgacca

SEQ ID NO: 23578 - RNA, 104 nt, Homo sapiens
cggggccgaggagcgggcacagggcaaggcggcggacggcgcgcgcccgaggcgaggaggagcgcggcgcaggaggcaaagggaccccaagaaaccaaagggca

SEQ ID NO: 23579 - RNA, 77 nt, Homo sapiens
ccccgagcagcgggaacagggccgcaccacacccgccagaggaagagcaggccggaacaccggaccagcaccaccga

SEQ ID NO: 23580 - RNA, 75 nt, Homo sapiens
gaagcaagaggaacagaagcaagagaaggagaaagccaaaaagaggagcaagaggggggggcccccccgaagaaa

SEQ ID NO: 23581 - RNA, 72 nt, Homo sapiens
cccccagaggccgcgacgacccccaggggacgaagggaacccgccgggcggcccggcacccagccccccggc

SEQ ID NO: 23582 - RNA, 59 nt, Homo sapiens
caccgggcgcaccccacccgggccgcccgaagcccaggccacagcaagccacaagcgcc

SEQ ID NO: 23583 - RNA, 74 nt, Homo sapiens
ggacgacaggccgggaggccaggaagcagggaccggagaggacgcacgaggggacagaacagagaaagacacag

SEQ ID NO: 23584 - RNA, 78 nt, Homo sapiens
agagcggcacgggaacagcggcgagaccagaccaggacaaaggaaaggaaaagccacggcgaggaaagccgcagaccg

SEQ ID NO: 23585 - RNA, 88 nt, Homo sapiens
cgggcgccacgcgcggcgcacacgggcgcgggccggagggacaggcaagaaggaagaaggcagaggcgcagccagggggaccgcggag

SEQ ID NO: 23586 - RNA, 47 nt, Homo sapiens
cgcaggaggccccaacccgggcccgccagcagcgcgcagcccgcccg

SEQ ID NO: 23587 - RNA, 81 nt, Homo sapiens
cgcccgcgcaccaacgcccaggaccagccgcgaagcagacgcaaacagaccagaaaaacacagagaagcaagaaaaaccaa

SEQ ID NO: 23588 - RNA, 99 nt, Homo sapiens
agggacccgcaagcgacccgacagaggcacaaaaagcggggaccacaccacacaggcaaacccaagaaccagcagagcagcgaaaacggagccagaacg

SEQ ID NO: 23589 - RNA, 73 nt, Homo sapiens
gccgggccccgagcgaggagcccagcggacaaagcggcaaaggagaagaacgagccagccccgggcaacaaag

SEQ ID NO: 23590 - RNA, 55 nt, Homo sapiens
cacccacccaaagggacgaaggagaagaaggaggagaaaagaaggaaggaaagaa

SEQ ID NO: 23591 - RNA, 77 nt, Homo sapiens
cggcacgccagcccacacccccggccagccggcgccggagcgaaacacgacggaagaccagccagacaaacaaggcc

SEQ ID NO: 23592 - RNA, 83 nt, Homo sapiens
cccaccccacagacccgccggggcgaaagccacggagcacccggcaaacagaggaccagggccacagggcgccaagagcccag

SEQ ID NO: 23593 - RNA, 80 nt, Homo sapiens
agagccccaccaaggcgcgggggggccgagccacgagcacagccaccacacgcacgaggagagacaggcggcgcagagca

SEQ ID NO: 23594 - RNA, 79 nt, Homo sapiens
agaaagaaaagccgaaagagcggaaggagggccccggagcagccacaccaccgaggccccacccagcacgagcacagcc

SEQ ID NO: 23595 - RNA, 77 nt, Homo sapiens
gaggggaggcaaagggaggaggaggaccggaggggcacaggaggcaggcaaaaccacaaacggcggaacgacggacg

SEQ ID NO: 23596 - RNA, 78 nt, Homo sapiens
caaccccgccccgggcaaggacccgcccagcccccaagagcggaacagcgcgggcgccaggacaagacggaggcgggg

SEQ ID NO: 23597 - RNA, 84 nt, Homo sapiens
ccacccaacccccaggacccaggcgcgcaaacacccggggggaccccgggcacacagcagcccgagcacccagaggccagcagg

SEQ ID NO: 23598 - RNA, 54 nt, Homo sapiens
accggagaggaccgcacaccggaggccagccaggagcccggaccgcaaaccaca

SEQ ID NO: 23599 - RNA, 82 nt, Homo sapiens
cgacgcgccgcaccgccgcggcccggcccggccccgaggccggcaacggagacccaagacggcaaacagaagggcgcaggaa

SEQ ID NO: 23600 - RNA, 35 nt, Homo sapiens
caccacgccgagaacccaggaacccgcgcccagaa

SEQ ID NO: 23601 - RNA, 64 nt, Homo sapiens
agggacaggggccgcagccagcagcagggacgcagccagcgaggccaccagcgccccgcgaaag

SEQ ID NO: 23602 - RNA, 68 nt, Homo sapiens
aacaggcccagaccgacaacgcccgaaaccagagggcggggccaggcagacagagacagaacgagacg

SEQ ID NO: 23603 - RNA, 54 nt, Homo sapiens
acaagacgaacaaacccggaaacccacagacaccaaaacacgaagcaaagggga

SEQ ID NO: 23604 - RNA, 37 nt, Homo sapiens
ggacgagcaacagaccacagggaaaaggaccacaggc

SEQ ID NO: 23605 - RNA, 73 nt, Homo sapiens
gggagcgcgaagacccggggacaggcagcgcagcccaggaggcagcaccaaggcgggggagcgggaggagcca

SEQ ID NO: 23606 - RNA, 68 nt, Homo sapiens
cggaaagcagaggacccagcaaaggaacagagacagacccgggggcccccaaggagagggaagaagcc

SEQ ID NO: 23607 - RNA, 47 nt, Homo sapiens
agccccgggcacccccaggggaccaacccagacaccgaaaacgagaa

SEQ ID NO: 23608 - RNA, 77 nt, Homo sapiens
ggaacagcgagcggagccggcaggaaggggaccgggcggcggagcggcggaagaagggcggagaacggaaaagcacc

SEQ ID NO: 23609 - RNA, 70 nt, Homo sapiens
cccaccaccgcaaacagcacggagggcccccagacccagacagcaaaacagggaggcgccccacacacag

SEQ ID NO: 23610 - RNA, 54 nt, Homo sapiens
gccgccggagccagccaacgagcgaagagcgggccggggccaggcggggccgcg

SEQ ID NO: 23611 - RNA, 74 nt, Homo sapiens
gagggcaagaggacgccacaaacacccaccacagcagaggcccggccaacgcaacagggagcccacgcaagagg

SEQ ID NO: 23612 - RNA, 81 nt, Homo sapiens
agcgagcccaacccgcggccccggcgccaagccgccgcaccccggccagggacgcacaccgagacgaacacagaacagcac

SEQ ID NO: 23613 - RNA, 60 nt, Homo sapiens
acaaggcacacagagacagacaaagcagccgaaaagggggccaggaagcaaaaagaccag

SEQ ID NO: 23614 - RNA, 48 nt, Homo sapiens
aaggaagccaagacagaagacaccccgcccgagccaagaggcgaggag

SEQ ID NO: 23615 - RNA, 79 nt, Homo sapiens
accagaagcacaagcacgaaagccacaaaaggggagaggcccaggaggacagaaccaagaaggagcgagggaggagcag

SEQ ID NO: 23616 - RNA, 52 nt, Homo sapiens
ccagcaccgcacgcccgcaagggagacaggaagggaaggggcggagacgggc

SEQ ID NO: 23617 - RNA, 77 nt, Homo sapiens
gaggagacagagggccgagaaggacaggacaggcacccaagacaggccagaccgaagcagaagcacgcagcaaccaa

SEQ ID NO: 23618 - RNA, 82 nt, Homo sapiens
gaggaagagacaacaccagagggccccagaacaggccgagggagagggaaaagcggaacccaccggcgcggcggccaagcca

SEQ ID NO: 23619 - RNA, 106 nt, Homo sapiens
ggagcggggcgcgggccgggaagaagcgccgcgcacggaccggcagagagccacgaggagggagaaccgaggagcagccacaagggacgagggcagcagacaacac

SEQ ID NO: 23620 - RNA, 61 nt, Homo sapiens
gggcgcgggggccgcgcgaagacaggaccagggcacggaggacagcggccgaagccagagc

SEQ ID NO: 23621 - RNA, 54 nt, Homo sapiens
accggcagaaggaagaggaagaacggccacagaacagggaggcgcagagcgaaa

SEQ ID NO: 23622 - RNA, 71 nt, Homo sapiens
ccaacaccgggccggggccccgcagaccgccggaccccgaggggccacggccagccccccagaagcccagc

SEQ ID NO: 23623 - RNA, 79 nt, Homo sapiens
gccaagggagccgcgcaaaggccccggcaagaagaagaagcgcacgcgaaggggccagagcccccgaacaaagggagag

SEQ ID NO: 23624 - RNA, 64 nt, Homo sapiens
ccggcgcggaagggggccggcgaggccgccgcccaccgcccgccgccaggggcgaaggccgccc

SEQ ID NO: 23625 - RNA, 85 nt, Homo sapiens
aagcgcagcccgaagaaaaacaaccaccagcgagcaaaaaggcaaagaccaagaccaccaagaagcgccccagcggcaacaccaa

SEQ ID NO: 23626 - RNA, 77 nt, Homo sapiens
ggacccgcgggaccgcgcccgccgcccggggagcccggcggcagcgcggagcgagcagaccggaaggccccaagagg

SEQ ID NO: 23627 - RNA, 80 nt, Homo sapiens
gcgccgggaccaggagaaccaagaccaagggaggaccccccaaggacagcagcacaccgagccaaagagcgagacagccc

SEQ ID NO: 23628 - RNA, 83 nt, Homo sapiens
gacacaagccccggacccgggcagcacggagagccgcaggagaagcccaggagacgcccgcagagcccgcccccccggcagcc

SEQ ID NO: 23629 - RNA, 54 nt, Homo sapiens
ggggcacaaagcccccgggggaccgagcagaaggaaacccccaacaagcagaac

SEQ ID NO: 23630 - RNA, 71 nt, Homo sapiens
acgcccaagccccaccgcgagaacgaaggcacagcgacccaggaaaaaaaccaccagagaagaggggcccc

SEQ ID NO: 23631 - RNA, 71 nt, Homo sapiens
aggaccagcaagaggaccggaaaaaagcagcaagcccagggccaggagccgacacaagagcggacagcgcc

SEQ ID NO: 23632 - RNA, 90 nt, Homo sapiens
ccacccggaagcagaaagaggcggaagcccaggcccccagccccgccaccacacagcagcccccagcagccaccaagcacagaccccccc

SEQ ID NO: 23633 - RNA, 80 nt, Homo sapiens
ccgggcgcgcgcgccagcaagcgaggccaaaacccagagaagaaagaagaagaaagcggcagaagagagcagaaaacaaa

SEQ ID NO: 23634 - RNA, 76 nt, Homo sapiens
cagccgcaagacccgccacaagcaacgcgggaagagaaggaaacaggaacacgaaagaggaaaaacgcacaagaaa

SEQ ID NO: 23635 - RNA, 84 nt, Homo sapiens
caggacagagacaccacgggcagaccacggagggcgcccgcgccggcagaggaggcgagcacccgccagggagaggaacccccg

SEQ ID NO: 23636 - RNA, 61 nt, Homo sapiens
gagagaagagaggacccacagacgacacaaaacagggaagaagcccagcggaggcgaacgg

SEQ ID NO: 23637 - RNA, 80 nt, Homo sapiens
gacacaggaacaaagaggcccaggacaaaggggggagcaaaccaccacaaaacggagaaaaagcggggaaggggggcaaa

SEQ ID NO: 23638 - RNA, 84 nt, Homo sapiens
agcggaagagagaaggaaggaccgggcagaccagaaacgggggcagagccggccaggggcaccggaaggagccacaaggggcga

SEQ ID NO: 23639 - RNA, 74 nt, Homo sapiens
ccaggagcgcagcgggccagcggacgaggagcacgaagcccaggggagccagaaaaacacagcgggaccggcaa

SEQ ID NO: 23640 - RNA, 84 nt, Homo sapiens
cagagacggcgaaagcgagcaggaacccggaagaggaagaaggagagacgaccacgcaacagaaaaagagcgcacccaagggaa

SEQ ID NO: 23641 - RNA, 75 nt, Homo sapiens
ggcccccgggcgcgggcgaggccgggcggcgccgccccaccggacccgcaggcacaagcagaggaaccagggaac

SEQ ID NO: 23642 - RNA, 67 nt, Homo sapiens
gaaaagaaccgagcagcggagcagggcggaaaggacacagcaggggccagacaaccagacccgggag

SEQ ID NO: 23643 - RNA, 55 nt, Homo sapiens
agacaggcggccaaacagcaccaagcggaggcacggcgcacacgcagacccaccg

SEQ ID NO: 23644 - RNA, 70 nt, Homo sapiens
aacccgccacgcggccgggaggaagacaaggaacgcccccacgcagcgacaaaacgaaacacagggcggc

SEQ ID NO: 23645 - RNA, 75 nt, Homo sapiens
agcgacacacgaggcagggagaaggagcccacccggagaaagaggcgacccgcggcgagagcccccccagagcgc

SEQ ID NO: 23646 - RNA, 75 nt, Homo sapiens
gaggaaaaagccaggaccaaagagaggccaacagaaaaagacacgcgcaacaaagcagacgagaacacacaagaa

SEQ ID NO: 23647 - RNA, 59 nt, Homo sapiens
acggcgcggcagagccccgacgccacagaacgcaccacgcgcgcccgagcggacaagag

SEQ ID NO: 23648 - RNA, 62 nt, Homo sapiens
gaaaacaaggccccagccaggagacgccgacaggacccaggggcaggccagacgggacagcc

SEQ ID NO: 23649 - RNA, 76 nt, Homo sapiens
agagacgaaacacgcaccaaaaacaaaagagagcgcacgaccgaccaaaaacgggaagagaggaaaccgccacccc

SEQ ID NO: 23650 - RNA, 81 nt, Homo sapiens
gccgagggcgggagagccggcgagcggagcggagcgcggaagccagacggaaggcacgagggccgacacgccccccaacgc

SEQ ID NO: 23651 - RNA, 72 nt, Homo sapiens
ggcggggaaaaaagcccgaggccaggaacggcgaaccgaccagccagagaagcaaaagaaacaaggcaagac

SEQ ID NO: 23652 - RNA, 69 nt, Homo sapiens
aggccacgagggagacccacccccaccaagccaccgcaagcggcaggaggaccgagcggagaagccagc

SEQ ID NO: 23653 - RNA, 68 nt, Homo sapiens
agagagaacgcccggaaagagcccaggacaacacaggcaaagaaaaaagacagggccaggcccagccc

SEQ ID NO: 23654 - RNA, 59 nt, Homo sapiens
cggggaaacccggaccgggaaaaggaaaccagaagagggacgaagaaaacagcgcagcg

SEQ ID NO: 23655 - RNA, 70 nt, Homo sapiens
gaccagggagggaaagcacagccaagacccagagacggaacaagaaagccagcaccacggaggaggagag

SEQ ID NO: 23656 - RNA, 70 nt, Homo sapiens
cgaggcacaccgaaggagaacgcgccaccagggggagcgagaagcacccccaagaagcagggcaaaagca

SEQ ID NO: 23657 - RNA, 74 nt, Homo sapiens
gcgcaagaaaccgaaggggacccagcccggggacacaagcccccaagcaacccccagccacaacgcgaaccggg

SEQ ID NO: 23658 - RNA, 70 nt, Homo sapiens
ccaccgccaggccgaggaagggaccgcaagcgcaggaccgagcccaccgcacgggcagcagaacgagggc

SEQ ID NO: 23659 - RNA, 57 nt, Homo sapiens
gcgaaccagccgaaagccaccagccaccgcaaaaacaacggcaaggggaaaagggag

SEQ ID NO: 23660 - RNA, 74 nt, Homo sapiens
agggacaaagagcaaacagacagggccgcagacaccaaaaaggcaaggacagaacccaagcaggccggagaaaa

SEQ ID NO: 23661 - RNA, 72 nt, Homo sapiens
gagcagcaaaaacagacaagaaagaagacaagcggaagcgggaacgacagaaaggcggagggaaaaggggcg

SEQ ID NO: 23662 - RNA, 80 nt, Homo sapiens
caagagcgggggcgggaccccgccgcggcgggaggccacccgaagggccccccaagcccagggaccgcagaggacgggga

SEQ ID NO: 23663 - RNA, 78 nt, Homo sapiens
agacacccaagaagaacacggcaagggaaccccccacgacggaaagggaggagaacggccgaaaaagccgccgggcca

SEQ ID NO: 23664 - RNA, 76 nt, Homo sapiens
aagaaaaggcccaggaagaagagcaagaaccagagcaaccaagaaagaagggaaaaaccagccgggcgaaaagcaa

SEQ ID NO: 23665 - RNA, 85 nt, Homo sapiens
gagcgcccgcaccacaccccacgaggcaccacagcgaacacaacccccggggccggccagaacacagggccccccagcccaccag

SEQ ID NO: 23666 - RNA, 74 nt, Homo sapiens
gaggggagcacagagcgagaccaggaaagaagggggcagaagagggaaagcaccgggaggaaagagagccacac

SEQ ID NO: 23667 - RNA, 67 nt, Homo sapiens
ccagaccggcgaccgagagcccggaccagcagagggccgacgggacacagagccacaaaagaggaaa

SEQ ID NO: 23668 - RNA, 37 nt, Homo sapiens
acaagacaaggccgcgagccagagcacagagcaccac

SEQ ID NO: 23669 - RNA, 91 nt, Homo sapiens
cggaggaaagcaggaaaaacaacagcacacagcaaaagagacagacggacaacagcccaacaacacccagcaggaagaggcagaggaagag

SEQ ID NO: 23670 - RNA, 85 nt, Homo sapiens
cccaccggcggcagagcaccgcgcccagggccggcggacagcaacacgaccaccaagagcccaaacgagaaggaagccgcggagg

SEQ ID NO: 23671 - RNA, 64 nt, Homo sapiens
ggcacagagccacgaaaagcggcgggaagaagaacaacagccgaggccaacacagagaacaccc

SEQ ID NO: 23672 - RNA, 71 nt, Homo sapiens
ggagcaggccaggcgcgcagcagaggccaccccggggccggagggccgaggagggcacgccacgcacagcg

SEQ ID NO: 23673 - RNA, 60 nt, Homo sapiens
cgacaggaggaagaacaccacccgcaagggcaagaacacagccccacagcgaggcccaga

SEQ ID NO: 23674 - RNA, 77 nt, Homo sapiens
ggaaccaggccaccgggccaccgcaacccagggggccagggacgaaaacagacaggacagccaaacaggaccagcag

SEQ ID NO: 23675 - RNA, 87 nt, Homo sapiens
cgcaacacggcgcacgaagagaacagcaaagagaaacgcacaggaagaccaagaccgcaacccaccaaggagcacaggacgaagagg

SEQ ID NO: 23676 - RNA, 62 nt, Homo sapiens
cacaacacgggggggagagccacaggcagcggcgaggggcacagaacgaagaggagcaggaa

SEQ ID NO: 23677 - RNA, 71 nt, Homo sapiens
acagaacccaccccacagggcggagaacggaaaagcaccaggaagcagagaggaccgcagaagggaaggag

SEQ ID NO: 23678 - RNA, 82 nt, Homo sapiens
aagacggcccagcagaggagaaagaccccgccaggcagcaaaaacaagcagggggcagaaccgaagagccaagccgcaggaa

SEQ ID NO: 23679 - RNA, 64 nt, Homo sapiens
gcagagaaaaacaacgagagaaaaagcagagccccgaagaccaagacgaccaagcacggaaaga

SEQ ID NO: 23680 - RNA, 84 nt, Homo sapiens
ggaaagggacaagaagggcaaagccgaacccagcagcccggcaagcagacagcaaccaaaccggcaaacccaagacgggaggac

SEQ ID NO: 23681 - RNA, 74 nt, Homo sapiens
cagaggagaaaaggcggacagcagcgcaggcaaaaaacaggaaaggaaaagccacggcgaggaaagccgcagac

SEQ ID NO: 23682 - RNA, 53 nt, Homo sapiens
aacgggaggacgcacccggggaaccagcaaacaaggacacgaagaccaaggag

SEQ ID NO: 23683 - RNA, 77 nt, Homo sapiens
gggcaaccggaagaccacggaggagaaaagaggcggcccacccccccggccgcgagagcaccggggcgcacaagacc

SEQ ID NO: 23684 - RNA, 107 nt, Homo sapiens
gcccggaccggccgagaggaagacgagccgggaggaacggcccggaaacaggaggacgagaaggccggaacaacgaaggggaggcaccaaggagaaccgcggacaca

SEQ ID NO: 23685 - RNA, 82 nt, Homo sapiens
aggacacaagaggacgcgggaagaacaggacacacagaggaccaacgaggcaggggaacgaaaggggaacagagaagcccag

SEQ ID NO: 23686 - RNA, 77 nt, Homo sapiens
gagggccgcagagcaagaagggcaaggggacgcgagaaaggccgacagaacaggccccgcaggaagggacaggaaaa

SEQ ID NO: 23687 - RNA, 76 nt, Homo sapiens
acaaggcccgggggccagaacacaagcaagcaaggggaaaagaaacaaacaacaagaagaaggacaaggaacgaag

SEQ ID NO: 23688 - RNA, 73 nt, Homo sapiens
ccccgcaggagaacgagcccccaccccggcaagaaaggggcgaaacagaccccgaaaagcccggaaggacaag

SEQ ID NO: 23689 - RNA, 72 nt, Homo sapiens
cccagcacgggaggccgagggcgggaggggggcaaccagaacgaggagcaacgagaggggcacgggaaagga

SEQ ID NO: 23690 - RNA, 74 nt, Homo sapiens
caaggaaagaggcacacccagcccgagcaagacacccaggggcccccaccagccccagcacacgacaggagcga

SEQ ID NO: 23691 - RNA, 69 nt, Homo sapiens
cgcacgcccagcggccgccggcgaagaagggcggacgggcaagagacggaccgcaggcccaggcggcga

SEQ ID NO: 23692 - RNA, 111 nt, Homo sapiens
gcggaccaccggcggggaggagaccaggcgacaccgcgacaccccaacaaacaccagcgcggaacgagaaagggaacgaaccgaggaacccggccccacagggcaggggga

SEQ ID NO: 23693 - RNA, 84 nt, Homo sapiens
ccaggccagaaacagaagacggcccagcagaggagaaagaccccgccaggcagcaaaaacaagcaggaaacaggacggacacaa

SEQ ID NO: 23694 - RNA, 75 nt, Homo sapiens
cggcggaaagacgcccggcaagagagccgcacaagcgccggccaaggcgaggaggaggccgagaccagccagggg

SEQ ID NO: 23695 - RNA, 90 nt, Homo sapiens
cagggggccacacgccccccccccacgccacacacaccgagggcggcacgccacaggacggcacccaccgcaaggccacaccaccaacgc

SEQ ID NO: 23696 - RNA, 71 nt, Homo sapiens
gcgagacccgccaggagcaaaggcacaaggcacaaagcaggaggcaggaggccaggaagaggcccagaccc

SEQ ID NO: 23697 - RNA, 44 nt, Homo sapiens
acaaagcaaggcacgcgggaagcaagcagcagcaacagccaagc

SEQ ID NO: 23698 - RNA, 40 nt, Homo sapiens
gcccggcagccaccccacgggaacccaggccaccagaaga

SEQ ID NO: 23699 - RNA, 75 nt, Homo sapiens
caggcaggagaaggcaccacccgccgcggggcgaggaccgggacccggcccgcgccgagccccacagccgaaacc

SEQ ID NO: 23700 - RNA, 80 nt, Homo sapiens
aaacaccccccccaccaccccaccagaaagacaggacccagaccagccaaagagaagaagaaaggaagcaaaacaaagaa

SEQ ID NO: 23701 - RNA, 82 nt, Homo sapiens
gcccggccagcccaccagagccgaggcagaggaccacccgcgagcgcagaaaggggaaaccgaggaaggcagggaccggaaa

SEQ ID NO: 23702 - RNA, 78 nt, Homo sapiens
ggccccaaggaaaagaccaaccaggcccgacccacagggaaaaaaaccgcaaggccacaaaccagacggaagcagcca

SEQ ID NO: 23703 - RNA, 69 nt, Homo sapiens
cgcccccgggccaagcagccagcagaaacaagcaacaaacgcaaaaacggagaggagccgccgcaccca

SEQ ID NO: 23704 - RNA, 69 nt, Homo sapiens
aacccagcccgagagagcgacgggaggaggggcaggagagaacggcacggggaaaagggacggcgagag

SEQ ID NO: 23705 - RNA, 121 nt, Homo sapiens
caccggcggggaggagaccaggcgacaccgcgacaccccaacaaacaccagcgcggacggcacccgggagcccggcgggaagggccgcagcccgcgcgggacccccgagacagaaacggaa

SEQ ID NO: 23706 - RNA, 109 nt, Homo sapiens
gaagaagcgagcagaagcacgaagaagcccgaagggccagaaacgggaagagaaagaagaccaggcccagagacacacagcccccccaccacgcgaaaaacaggaaggg

SEQ ID NO: 23707 - RNA, 78 nt, Homo sapiens
aaaacacaggacacgcggcagagaggaagaaagagggccacggacagaggcgcagcagaggaaccgcagaagaacgcc

SEQ ID NO: 23708 - RNA, 66 nt, Homo sapiens
cagaaaggaacggcaagacaacaaggcagcagcaggaacaggaacagccaggagcacaaacaaaag

SEQ ID NO: 23709 - RNA, 74 nt, Homo sapiens
agccacagagggggaaagccaaggaaaaacggagagccacaaaaaaggaagcgaaaggacaaagaaacaagcga

SEQ ID NO: 23710 - RNA, 78 nt, Homo sapiens
gcccagcaccccgagaaccgcaggagccagagagagggaaagggcgggggcaagacccagagaagacaaaacaacagg

SEQ ID NO: 23711 - RNA, 59 nt, Homo sapiens
ccagagcgaaacgaagaaccgcagccccggaagccgagcaaccacgacgccggcgccga

SEQ ID NO: 23712 - RNA, 77 nt, Homo sapiens
gaggacgaaagggacgggagcgccaaaaaagagggggcgaagggaaaagccccgcaggaggccgaagcagcaaaaac

SEQ ID NO: 23713 - RNA, 60 nt, Homo sapiens
ggggaccgcacacccaagacccaacagaggaagccgcaagaaacgggacgacaggaaggc

SEQ ID NO: 23714 - RNA, 43 nt, Homo sapiens
gacagaaccagccaacaaaaggccgcaggaagaaaagagagaa

SEQ ID NO: 23715 - RNA, 87 nt, Homo sapiens
aggcccccgcggaggaaacgcagcggcgaacagcgggaaggaacggcgcggagccagacacggaacacggcggagacagggcacgac

SEQ ID NO: 23716 - RNA, 65 nt, Homo sapiens
acgcagggcgcccccgccagccagcaggcaacaggcccagaccaggcccaaagagcccaccaaca

SEQ ID NO: 23717 - RNA, 57 nt, Homo sapiens
cgacacagcacgaggaaaggccccggagacgggggcaggggagcagcagaacaagca

SEQ ID NO: 23718 - RNA, 77 nt, Homo sapiens
ggccccaaggccggaagaagggagagcagaagccgcgaaaaaggggggccgagggcagcggggaagaagaaaaggaa

SEQ ID NO: 23719 - RNA, 81 nt, Homo sapiens
cgaggaccgggcgcccgcgagacgaggagcgggcgcccagaggaggagagaaagaaagccagcgcaacgagagaaccagca

SEQ ID NO: 23720 - RNA, 76 nt, Homo sapiens
ccggccaaggaaccagccggccacaaggaagcaaccagccagaacaccccagagacggggcccgcccccccccccg

SEQ ID NO: 23721 - RNA, 77 nt, Homo sapiens
ggagcaaaaaaagagcccgcaagaagaacagagacagcagccaaacccccaggggagaagcagaccgcaccaggcgg

SEQ ID NO: 23722 - RNA, 73 nt, Homo sapiens
accacaggaaacacagcaccgacccaaggcaagacagcgaagaagaaagaagaacagaacggagccccacacc

SEQ ID NO: 23723 - RNA, 69 nt, Homo sapiens
gcagaaaaggggagcaaagagaacacgaaacaaccagccaaagcgccgcccgcggccgcccccgcaccg

SEQ ID NO: 23724 - RNA, 73 nt, Homo sapiens
gaaggaaacacaggggagagccgaccaccaccggaaccccaacaccagcgcccgcacaagaggggcgccaggc

SEQ ID NO: 23725 - RNA, 79 nt, Homo sapiens
gagcggcgaggcgaagcagcggggcgggacacgccggacaagcaggggaaaggcaagacggcgcaccacggccaggcgg

SEQ ID NO: 23726 - RNA, 67 nt, Homo sapiens
acccaggagagaaacacgcaaaacaaggaaaggcacaagcgacaccgaaagaaccgagggaaggaga

SEQ ID NO: 23727 - RNA, 62 nt, Homo sapiens
aggcgccgcggggcggccgccagcacaagcgcacccgcacaggagcagaagacagagggagg

SEQ ID NO: 23728 - RNA, 80 nt, Homo sapiens
agccgccagaacgcggaagcgagcccaggacacagaggcgaacagccgccccgcacgggaaaagcgcgcgacaccccccg

SEQ ID NO: 23729 - RNA, 67 nt, Homo sapiens
agcaggcccagacagacagcacgcaggggccccacagacagagcccgaaagagggaacggcaccacg

SEQ ID NO: 23730 - RNA, 55 nt, Homo sapiens
ggaagcaccacacggcaacaagaccacccaacagggagcacgccggaaagcacag

SEQ ID NO: 23731 - RNA, 70 nt, Homo sapiens
acgcaaacgcagaagacaaggcccacgaggccgagaacaccaggcgggggagcaagagacgaggaagaac

SEQ ID NO: 23732 - RNA, 66 nt, Homo sapiens
cagcaaggcccccggcagcgccggccacacgaacgccggcgccagcagcccgggggcgacgacgag

SEQ ID NO: 23733 - RNA, 71 nt, Homo sapiens
gcaagcaacaccacacaccaaaaaagcgcggcacgaagacccgaagaaacacacgggcaggcggaaaggaa

SEQ ID NO: 23734 - RNA, 70 nt, Homo sapiens
caagcggggagcgcccgcgacagaggagggaggaaaacaaccgagggcagaacgaggcgacggcaaaaca

SEQ ID NO: 23735 - RNA, 75 nt, Homo sapiens
aagcccaaaggggaagacagggacggaccacgggaccaagcagacaaaccaaggcgaccaacgacgaagagcaga

SEQ ID NO: 23736 - RNA, 70 nt, Homo sapiens
ggcaggcggaagcgccagaggagccaccaggcacacagagaaaaaaagggaacaaaacacagcaagcaga

SEQ ID NO: 23737 - RNA, 78 nt, Homo sapiens
gcagcgacccccacgacagcccgccccccagaggcaggcccacccagccaacaggcaaggccccggggcaccagccga

SEQ ID NO: 23738 - RNA, 79 nt, Homo sapiens
aggagcccagagaagccgggcaccagagcaagagcaaaacgcacccccaggagggacgggaaaacgcagcacagacagc

SEQ ID NO: 23739 - RNA, 76 nt, Homo sapiens
gcagccccaagcaagaaaagggagcccccaagcccgagagagccagaaagccccgagcaagagagaaacgcgggac

SEQ ID NO: 23740 - RNA, 67 nt, Homo sapiens
gcggcaagaggcaaggacgcacacagcaacacgacggagaccgagaaaaaccgccgcgcagggacca

SEQ ID NO: 23741 - RNA, 61 nt, Homo sapiens
cagggaaagaggagaaggaaggagagagagaaaaggggggcagaaagaagaggaggacaac

SEQ ID NO: 23742 - RNA, 89 nt, Homo sapiens
acggcgcaagcggcgcgccagagcggcacgagccaaaacagagggagacgagaaaagggccgagcacaagccaagaaggcgccccaaag

SEQ ID NO: 23743 - RNA, 73 nt, Homo sapiens
cagagaccaaagcacaacgaccagggcgaccgccccccgggccaccagccccaccagccccagcaacaccccg

SEQ ID NO: 23744 - RNA, 77 nt, Homo sapiens
gcgacgccccgcccagagagcagcaccagcagaagagggcccgaccacggcaacccagaggcgaagcaggacacccg

SEQ ID NO: 23745 - RNA, 81 nt, Homo sapiens
ccgagccacccgcccgcccaaggcccgcgggcgggagaacggaaaaccccaacccgagcaaagagaaaggaccacagcgga

SEQ ID NO: 23746 - RNA, 75 nt, Homo sapiens
ccccagcgcagaacggaggccagcggacgcgcaccggcaaaccaggcgccccgaggagaagcccagcccgccagc

SEQ ID NO: 23747 - RNA, 71 nt, Homo sapiens
acaagaagaggaacacgaacaaccacgccacggggacaaggacaccgccgcccagccacaggaccgacacc

SEQ ID NO: 23748 - RNA, 80 nt, Homo sapiens
gccggggaccccggagcaaaaacaggagagaaacagggccacacagagcccagaccggaggaccccagggcccagggcag

SEQ ID NO: 23749 - RNA, 73 nt, Homo sapiens
cagcaaccagcccaaaggggcacagaaaagaaacagaaaagaaacaaagaaccagacggccaacgaccacggc

SEQ ID NO: 23750 - RNA, 85 nt, Homo sapiens
cgccacggaggggacaggcacaaagaagcccaccccgccgggcgccaggcagccgggacccgccgggcaggaggagggaagccgg

SEQ ID NO: 23751 - RNA, 86 nt, Homo sapiens
gccaggcggcgacacgccaaccccgagcaaagcagcgccgggaagagaacaccaggcacggaggccgacccaaggggcccggccag

SEQ ID NO: 23752 - RNA, 76 nt, Homo sapiens
gcccgaggcgcaagagacaaggcagccacacaaaagggaagcgggcagaaccgagaaaaacagcagagaccagggg

SEQ ID NO: 23753 - RNA, 72 nt, Homo sapiens
gagagaaaaaggcagaagagggaaaccaacggaggaaaagcaaggcgaaaaacccgcccaggaccccaagac

SEQ ID NO: 23754 - RNA, 76 nt, Homo sapiens
gaacacaacagcaaccagcacagaaagaccgaggccaaaagaaaggaagaaaacccccaaaaagccaaaaggccaa

SEQ ID NO: 23755 - RNA, 73 nt, Homo sapiens
ccggcgccccggcgcgaagaggcggaccggacggccgaggaccagccaaggaagcaacacagcagcgagagaa

SEQ ID NO: 23756 - RNA, 69 nt, Homo sapiens
ccaagagcgggaaaggggccccacagacagagcccgaaagagggaacggcaccacgaccccaggcagca

SEQ ID NO: 23757 - RNA, 54 nt, Homo sapiens
gacgagggagcaccgagaaagcagggcgcaggcgaaaccgggccccaacagagg

SEQ ID NO: 23758 - RNA, 73 nt, Homo sapiens
ggaagcaccacagccaccacaccaagacaccaggggagaccagccgaaggacgaggcaagcccgaagaccaga

SEQ ID NO: 23759 - RNA, 63 nt, Homo sapiens
agcggggagcggggacgcacggagagggcagcggcaccgcacccacaaagccaagagacaagc

SEQ ID NO: 23760 - RNA, 70 nt, Homo sapiens
aacgaccacccgagaccaacagagaggacgagagggaagacggaaaaagcgagcaaaaaacaaaaagaag

SEQ ID NO: 23761 - RNA, 59 nt, Homo sapiens
agaacggaaaacacaccgaggccaagcaacaggcgcacgcggaggagggcgacgaggac

SEQ ID NO: 23762 - RNA, 68 nt, Homo sapiens
gagcaggaccagggcggaacgcacccaggacagcagaccacagcccggcaggcccaaaaacccaaagg

SEQ ID NO: 23763 - RNA, 85 nt, Homo sapiens
gagcgcagcagagggagcgccgaaggacaagaacagcgccgcaccagcagacgccgacaccccaggccacgagccccaggccacg

SEQ ID NO: 23764 - RNA, 69 nt, Homo sapiens
cacgagagaacaaaaaaacaacaccgcgaaaggggggagaaaaggccaagggcaggagacacgagacgc

SEQ ID NO: 23765 - RNA, 82 nt, Homo sapiens
gaccgagcagcccgacccccaacggaccccgccccggaggagcgcgcaccgaccagcgaagcaggccccggcagcccacgaa

SEQ ID NO: 23766 - RNA, 76 nt, Homo sapiens
cccagcgcgcagcccggaccagccaagccccaacggcccccgcgccgggcgcagcggggggaagccagccaggaca

SEQ ID NO: 23767 - RNA, 82 nt, Homo sapiens
ggcgcccagcccggaccaggccgggacacaagaaacaaacgaagcacccccaggcgaaccacgggaacaaaggcgaggacaa

SEQ ID NO: 23768 - RNA, 63 nt, Homo sapiens
gccgaaggaccggaggaggaccacgccgcaccccacaaggacccgagccccaaagacagaaaa

SEQ ID NO: 23769 - RNA, 78 nt, Homo sapiens
cgccgagaggagaccgccggccagaacgagcaggacaccagcagccgcaacggcacacacgcccgccaccaccccagc

SEQ ID NO: 23770 - RNA, 75 nt, Homo sapiens
aagacaaagccagcggaggacaccaagacggggaccaaagcgaccgcacaccaaacaaaggggccaaaagacgcg

SEQ ID NO: 23771 - RNA, 86 nt, Homo sapiens
cccggagccgcacaaaccagggccgccagaagccaggggagccgccaccaaaagcagacggaaaacccacggggaagaccacaccc

SEQ ID NO: 23772 - RNA, 76 nt, Homo sapiens
ggagcacgaccgaggcggcagagaccacaagaaccaggagagacccagagccagcgcaggggaagccgcaaggacc

SEQ ID NO: 23773 - RNA, 76 nt, Homo sapiens
gccgcacggcccaacgcaaggaggggagaagagagaggaaaaccccgccgcaggcgcgaagggccgggaaagaggc

SEQ ID NO: 23774 - RNA, 72 nt, Homo sapiens
cagcccagagcaccacgcggcaagaacgccaaggggccagagaacaagcccagacagcaagacgcgagcgca

SEQ ID NO: 23775 - RNA, 82 nt, Homo sapiens
acagccaccagccgcagaacgggggcgcgggagagcagccggacccagaccagggagcccaggaggaggaaggaacccgagg

SEQ ID NO: 23776 - RNA, 56 nt, Homo sapiens
gcacaccagagacggcccgcggccggcgcgcaggggacggaaagagagccgcagcg

SEQ ID NO: 23777 - RNA, 78 nt, Homo sapiens
gcccacgcagcgccggacaaaacaacaagaaccagccaccaggaccaccagggcgggccgaacagaagagcagaggaa

SEQ ID NO: 23778 - RNA, 76 nt, Homo sapiens
agaaaaccgggcgcagcccaaaccaagccaggcccgaagagcacccagacagggaccccgcccgccagacccaggc

SEQ ID NO: 23779 - RNA, 89 nt, Homo sapiens
cagggagacacagggggggagccccgagagcaagggaggcaccagcgaccgagggcgggacggggagccggccccggggcaaccagacc

SEQ ID NO: 23780 - RNA, 82 nt, Homo sapiens
agggcgcggcgcgcgaggagcaggaaaaggacaagcccaaccagggaccaggccaaaaccagacgccacgccccacgggccc

SEQ ID NO: 23781 - RNA, 75 nt, Homo sapiens
ggaaacggggagcaggaacaggggggaccaaggggaggcccccacgacacaggagaggcagagggccaggccggc

SEQ ID NO: 23782 - RNA, 87 nt, Homo sapiens
ccagaggccgcggacaccgaccggagggacgaggcaccaagccagacgcccaagggagcaaggagaacccccagggaagcagaagga

SEQ ID NO: 23783 - RNA, 66 nt, Homo sapiens
cacacgcacaagaaaaaggacacaggaaccgcagcacaaaagggagccgaaaggaggggcagcccg

SEQ ID NO: 23784 - RNA, 81 nt, Homo sapiens
ccgggcgggaagcggaggccggcacgcccgcccgaggcgacggccgcggcgcacaggccagaacacaaagcggaaccggaa

SEQ ID NO: 23785 - RNA, 80 nt, Homo sapiens
cggcagaacaagagcaccccagaagacagagagccgcgccaagcaacagccagacgccgcacgccagcccagcccaccac

SEQ ID NO: 23786 - RNA, 68 nt, Homo sapiens
gcgaaagcacaccaagggcggagaacggaaaagcaccaggaagcagagaggaccgcagaagggaagga

SEQ ID NO: 23787 - RNA, 59 nt, Homo sapiens
gggcgcggggccgaaccccgggaaaagcgcaggaaaaacccgaggacccaccgcaaggc

SEQ ID NO: 23788 - RNA, 58 nt, Homo sapiens
gagaaggcagagcgacccaggcacagaaacaggaacacgaaagaggaaaaacgcacaa

SEQ ID NO: 23789 - RNA, 76 nt, Homo sapiens
gccgcggccccaggcgcgcggagagcaggaagcggaagaaagaagagccaagaagggaagaaaacaagaaaaagaa

SEQ ID NO: 23790 - RNA, 82 nt, Homo sapiens
agagagaagggcggcggggacggccacggcgcgcagcgagcggcacagggccaggcggcgcaaccccgggccaagcgacccc

SEQ ID NO: 23791 - RNA, 69 nt, Homo sapiens
accagcgcccaggaagccaaagaaaaaaaaacggagggacccaaccaagcaaagggcgagagaagcagc

SEQ ID NO: 23792 - RNA, 86 nt, Homo sapiens
gccgggagagccacgggccgcgccgggcacagccggaaagcaggaccgcgacggcagcagagcagcgaaggcaagggaccggccac

SEQ ID NO: 23793 - RNA, 78 nt, Homo sapiens
ccgccaacacccagccgcggagcgcaagcccccccgcccacccgaggcagaagacagcggagaacccacgaacagcac

SEQ ID NO: 23794 - RNA, 79 nt, Homo sapiens
cacaaaaagagcccccaggacagagaccaaccgggggacccagaaagaagcacaaaacaaacgacagcagcagagaaac

SEQ ID NO: 23795 - RNA, 77 nt, Homo sapiens
acacccaaacggaaggacacagagccaacccagaagagccaagggcgccggccgagcccgggaaaacgacagcagca

SEQ ID NO: 23796 - RNA, 81 nt, Homo sapiens
gggcggcccggggcacccgcacgggaagcaggcccgccacaggaccaacacgagaaccacccgccggaggagaagaacaag

SEQ ID NO: 23797 - RNA, 75 nt, Homo sapiens
gccagcacgggaccccccaagagaagcgcaagagcaacaccccaccccaagaaccccagagacccaaccgccaca

SEQ ID NO: 23798 - RNA, 64 nt, Homo sapiens
aagcaggaaccagaaccagacaacacagaacgaggaaccccagagaggacagaagccaaccagg

SEQ ID NO: 23799 - RNA, 57 nt, Homo sapiens
caccgaagacgggccccaacacccagagacgaaagacgaagcacaggacacacaaaa

SEQ ID NO: 23800 - RNA, 80 nt, Homo sapiens
gagcaggaggaacccagaacagggccgggcggcccaagggaaaagcagcggccgcaaggggcagagagaagagcacacag

SEQ ID NO: 23801 - RNA, 78 nt, Homo sapiens
ggaggaagaagaagcggaggggccgggccacgacccgccaggaaaggaagccacagaccccgccggggaagaacagga

SEQ ID NO: 23802 - RNA, 85 nt, Homo sapiens
cgagccggagagcgggccaccacgggacccaccgcccggcgccccagccgccccgccacaggaaggaggggcaggaacagcagag

SEQ ID NO: 23803 - RNA, 75 nt, Homo sapiens
gaagggacaaccggaagcaaaaccgagagacgccaggaagccggacgcgcagggaaaacgagaggacccagccac

SEQ ID NO: 23804 - RNA, 80 nt, Homo sapiens
accacagaaacaaaagcaacaaagagggcgcgcccccacccggggccgagaaccacaccgcgggagaaggccacggggca

SEQ ID NO: 23805 - RNA, 57 nt, Homo sapiens
ggacagcggaaaagcggccccaaggcgaacaaaagccgcaaaggaccacgcagaaac

SEQ ID NO: 23806 - RNA, 83 nt, Homo sapiens
cgggcgcgccgcaccccagcagcacccaagcagggacaagaacccaagaaacaggaaaaaacccaaaacaccaaaaggaccag

SEQ ID NO: 23807 - RNA, 58 nt, Homo sapiens
gcggagcccgcagaccgcagaaggccggagacaccagcagggaagagcccggagcagg

SEQ ID NO: 23808 - RNA, 69 nt, Homo sapiens
cccagagggaagcggaaaaacgggggacgaccgggcagcggggaagaagaaaaggaaccgaggcccccc

SEQ ID NO: 23809 - RNA, 57 nt, Homo sapiens
ccgagcccaggcagcccagcccgcccccagaaaccagaggggcgcacccaacgcgca

SEQ ID NO: 23810 - RNA, 74 nt, Homo sapiens
gccggccgcgagcggcccccgagagccaaggcaaacagcccaagacaggccccaacgcaaccagacacggacag

SEQ ID NO: 23811 - RNA, 74 nt, Homo sapiens
gaagccaggcccacccacaaaacagcgaaaggccgcaacccaggggggaggaagaagggaagcgaagaagcccc

SEQ ID NO: 23812 - RNA, 89 nt, Homo sapiens
cagcccaaaagcagcaaagaacaccaagacggcgaccacaggaaggacacaggcagacggaaggaaaaacaggggccgcagaaaggaag

SEQ ID NO: 23813 - RNA, 85 nt, Homo sapiens
ccgggaccaggacggggcgaaccgagcaccagaagaagaagaggacaggcccaggaaagggaagaacaaaggaagagagcaggaa

SEQ ID NO: 23814 - RNA, 47 nt, Homo sapiens
aaaagggacccggccaaggagcacccacgggagaccggggggcaaga

SEQ ID NO: 23815 - RNA, 53 nt, Homo sapiens
gacagccaccaaggggcagcagacccaccggaaagaccagccgacagcgacca

SEQ ID NO: 23816 - RNA, 81 nt, Homo sapiens
cacgcaacccgcccccagaacacggcaccaacaaacaacagcacccaccaacagagggaggaggaaccccgcaagggcaga

SEQ ID NO: 23817 - RNA, 72 nt, Homo sapiens
cgggaccgcaaagaacaggagcccacagaaggcagaggcagaaccacagcccaaaggcaggcccggcaccga

SEQ ID NO: 23818 - RNA, 79 nt, Homo sapiens
agaaacaaaaggccaccgaagaggggaaccacaaaaccaagaaacaaaaagcagcaagaagcaaagaaggaagaaagcc

SEQ ID NO: 23819 - RNA, 74 nt, Homo sapiens
aaaccgcgccacaggagccacacagggaagaagacggcacgggacccccagcacaggcagcaggccgggagaga

SEQ ID NO: 23820 - RNA, 74 nt, Homo sapiens
aaagcagaagaagaggaaagacagaaccagccaacaaaaggaggaaagacaagccccaaaagcagccgggaaag

SEQ ID NO: 23821 - RNA, 80 nt, Homo sapiens
ccccaccggcaaggagcgggacggccccggcggcgcggcggcggggacgagaccggagaccggaggaacagaacaccgca

SEQ ID NO: 23822 - RNA, 73 nt, Homo sapiens
cccgacagggggccaaggggagaagaaaaccgggcaaggcggggccggcagggagagccacggacagacacgc

SEQ ID NO: 23823 - RNA, 85 nt, Homo sapiens
ccgcccgcggaccgcggcccgacgaggaagcacgaaagcaccaacgagacccgccacacgagacagcccagagcaagcacacgga

SEQ ID NO: 23824 - RNA, 72 nt, Homo sapiens
gcgcagcgccccggcgcgccccgaccagaaaaggggaagaaggccaaccgggggccaagggggaagggaggc

SEQ ID NO: 23825 - RNA, 81 nt, Homo sapiens
gggcgcgccccgcgcgcagggaccgcccgaccaggcccggcccacacggaaggcccggcacacccgggagccagaaggcgc

SEQ ID NO: 23826 - RNA, 75 nt, Homo sapiens
gagaaggacccgaggacggacaggagcgccggccggggacgcaacgcccgcaccccggcgggccaggacagagcg

SEQ ID NO: 23827 - RNA, 69 nt, Homo sapiens
gccgagaagcggggcaccacgaaggaccgaagaggagacagacccagcacggaccccccccccagccgg

SEQ ID NO: 23828 - RNA, 84 nt, Homo sapiens
ccgccacagcggacgcagaagcagcgggcagccagggcccaggacagaagccccagccccagcccacacaccccaggagcccgg

SEQ ID NO: 23829 - RNA, 74 nt, Homo sapiens
aaagccagccagagcaacagcagcaaggaggagagaaagaaagccagcgcaacgagagaaccagcagaaaagaa

SEQ ID NO: 23830 - RNA, 77 nt, Homo sapiens
gggcccggcgacgaacaccacccagcacaggcccccgcacccaggcgcccgcgcagacagcgagacaagacggccca

SEQ ID NO: 23831 - RNA, 59 nt, Homo sapiens
ggcaagggggaaagaacaccgaccagagaagaccaccccacacagaccgcgccccaggc

SEQ ID NO: 23832 - RNA, 79 nt, Homo sapiens
ccagagacgcgacaaaggagcggaggagcagcgcagcgcccgaggaagccggggccgagggaacaggggacgggggcag

SEQ ID NO: 23833 - RNA, 78 nt, Homo sapiens
gagcccccccacagcccaggcgcaccccccgcgccaaaggagcggagcccgaaagagccaggaagacggaagaagagg

SEQ ID NO: 23834 - RNA, 76 nt, Homo sapiens
gcccggcccgggacacggggcacccaccccggagaggaaagcggaaccagaccgagggcagccagccagcagccag

SEQ ID NO: 23835 - RNA, 70 nt, Homo sapiens
gcgaacaaagcaccggcaggaggagcaaagcccacaggcccccacagagagcacacaaacaaagcgaaac

SEQ ID NO: 23836 - RNA, 57 nt, Homo sapiens
agccaacaggcagcggggcgggcgagcgcaggacgagaccagcagacagaacggagc

SEQ ID NO: 23837 - RNA, 79 nt, Homo sapiens
cagcagaccggaccacagaggagggaccccagacaggagaacgccacggggagacggagcgggcggggcccggcacgaa

SEQ ID NO: 23838 - RNA, 63 nt, Homo sapiens
ggggagggaaagcacacggagaacccgcaggggccaagagagcaagggcagacgggccaagcg

SEQ ID NO: 23839 - RNA, 71 nt, Homo sapiens
gggagaaggcgcaacgcggcgcgccccgggggcgccgagggcacaagggcaacgacagaagggcgaagcca

SEQ ID NO: 23840 - RNA, 74 nt, Homo sapiens
cacggcgacgccccaggggaaaacccccgggaccaggcagagaaagcaagagacgcaaccgaacgcagagcgga

SEQ ID NO: 23841 - RNA, 81 nt, Homo sapiens
ggcggcgccaggccggcccagcccaaaggacagcaaggggggagacggagagaaagcgaggagggaggaaccagaaaaggg

SEQ ID NO: 23842 - RNA, 64 nt, Homo sapiens
ggaaccccgcaagggcagaagggaagaacaggagaccaccacccggaacgccgcacagaccaac

SEQ ID NO: 23843 - RNA, 71 nt, Homo sapiens
ggaccccccccaacgaggcgggcggccgagccgggaagccaaccagggcgagacacagcacgccgcaggca

SEQ ID NO: 23844 - RNA, 78 nt, Homo sapiens
aggcaaaggaaaggcaaaacaggaaaggaaccagaggccgcagagaaaaagacgaaaaagagccacgcccccacgagc

SEQ ID NO: 23845 - RNA, 59 nt, Homo sapiens
agcaaggaggaggacgcgccacccacaaccccgagggagagcggcaccaaaagaaccac

SEQ ID NO: 23846 - RNA, 86 nt, Homo sapiens
cggggcgggcacggcccgcgaggagcagggaaaaccgagggcggaggccagacacaagaagaggaggaaccagccgaacagcacaa

SEQ ID NO: 23847 - RNA, 80 nt, Homo sapiens
gaaagacaccggccagcggccagagcgagcagccaaaagaagcaagggaaagaccaggagccagaaaccaaccaaagagg

SEQ ID NO: 23848 - RNA, 93 nt, Homo sapiens
gagaagagcaaggccacgccggccgcgcgcgccagcaagaagaccgcgcccgagcccaggcgggccggagaaggggcgacgcgggcacccccc

SEQ ID NO: 23849 - RNA, 52 nt, Homo sapiens
cccacagaggggcgacgggaagaaaacgccagagaagcagagcagcccggag

SEQ ID NO: 23850 - RNA, 77 nt, Homo sapiens
cccagcccgggccgagccaacaggaccagcagggcgggcaggcccacacagagaaggagggggcagagcacggcagg

SEQ ID NO: 23851 - RNA, 81 nt, Homo sapiens
aacaaaagagggggagcagggagccggaaagaagagaagaccagcaaaaggagaccccccgcaaacaagccaaccagacaa

SEQ ID NO: 23852 - RNA, 71 nt, Homo sapiens
gagggcgagaggcccacaggcacacagcagaagccccgacacagaagaagccgaaaagccagcagccgcac

SEQ ID NO: 23853 - RNA, 54 nt, Homo sapiens
ccagcagcacccagccgaaggagcacccacccgcaaagcagcccgaggaggcac

SEQ ID NO: 23854 - RNA, 80 nt, Homo sapiens
agcgggagcccggccggagcgggcggagacgccgggcagccgaacggagggcgacggagggagaacacaggcacagaagc

SEQ ID NO: 23855 - RNA, 59 nt, Homo sapiens
ccggggcaacgggccgacagcacagaggcagcgagaagaaaaagaagagagagacacgg

SEQ ID NO: 23856 - RNA, 76 nt, Homo sapiens
cgccgagggcacaggcaagacgaagaagaagaggccaacggaagaccgagacaccggcccaggaagcagcagcaca

SEQ ID NO: 23857 - RNA, 72 nt, Homo sapiens
gggaacacccacggaagagaacgcccgagccccaacccacgcgccccaaggaagggccgggccggggcacgg

SEQ ID NO: 23858 - RNA, 79 nt, Homo sapiens
gagaagaacagcacaggacaggccggggggggcacagagccccggaagacagcccccagcgaccagacccagggccaga

SEQ ID NO: 23859 - RNA, 70 nt, Homo sapiens
gaagcgagcacggaagcgcgacaacacacacacagcgacagcacaagaagagagaggaaccagaaccacc

SEQ ID NO: 23860 - RNA, 73 nt, Homo sapiens
cccagagcgggacacaggcacccgacaggaggaccacgccgaacaaggaaaggaacagaccacgcaaaagaac

SEQ ID NO: 23861 - RNA, 76 nt, Homo sapiens
gccccacacccccccggggggggggaaaaggaacaaccgaaggagaaggacaccaagccgaacagcgagcagaacc

SEQ ID NO: 23862 - RNA, 80 nt, Homo sapiens
cccggcccacacccccgccacgcccgccacggggcgagcaccaaagccaaggaagcccagaagaaagagcaccccccgga

SEQ ID NO: 23863 - RNA, 78 nt, Homo sapiens
acaggcggcggccggaaggcggcaagcccggcagcgggaacacagagagcgaagccaggagcgccaaaagcaggggaa

SEQ ID NO: 23864 - RNA, 78 nt, Homo sapiens
gcaaagcgcacagccaggaggaggacccggcagaacagcacacaaggccgagcagcaaggaacaacagcgcccccaga

SEQ ID NO: 23865 - RNA, 55 nt, Homo sapiens
agaaaacacacacacacaaagcccaaggaaccaaacggccggaagaagagagagg

SEQ ID NO: 23866 - RNA, 75 nt, Homo sapiens
gggaggagcccagaccggaccacagacacaaggacaagaaagccaccaggacgagaaaaaccaccggacagaaca

SEQ ID NO: 23867 - RNA, 80 nt, Homo sapiens
ccgcgacccgacaaacccgcgaggcaccgggccggacaccacgacaggagagggaacccaccaagaccaaccggcacacc

SEQ ID NO: 23868 - RNA, 115 nt, Homo sapiens
agccggaacgggccggaggagcccccgccaccgcgcagcgcgcagcagcagaggagaccagggcgccagggaaggaccgcacacaagccgcaccggacacgcgcggagcgggagg

SEQ ID NO: 23869 - RNA, 81 nt, Homo sapiens
gcagcaacagacacgaggaaggcggcggcgccgcaggaccgcagcacccagaggcagcacaagggaaaccacaggaaaagg

SEQ ID NO: 23870 - RNA, 72 nt, Homo sapiens
gcaagcaaccagagcggaagcccaaacgggaagaagcgagcagcgcaaagcacaaagaacgcacaccaccag

SEQ ID NO: 23871 - RNA, 76 nt, Homo sapiens
cccaaacggaaggaacggaggcggaggaggaagccaagaacgggagcgaagccacgcagcggcaccaacgaccggg

SEQ ID NO: 23872 - RNA, 58 nt, Homo sapiens
aaaacaaggccggacgaaaggagacaacagccacacaaagcagcaacaggagcaggga

SEQ ID NO: 23873 - RNA, 63 nt, Homo sapiens
gcgcgcaggaccacggggaaagccaagaaaaccagggggagaccgcaccaggaggaaaacaga

SEQ ID NO: 23874 - RNA, 66 nt, Homo sapiens
gcacacaccacacaccacggccacaccaccacccaggccacacaggcgacgagcaaagaccaacac

SEQ ID NO: 23875 - RNA, 86 nt, Homo sapiens
acagcaacagccagcaggaggaagggcacagacccacaagaggagaacgggcagagcacagccgccaagcggggcgccccccgacg

SEQ ID NO: 23876 - RNA, 72 nt, Homo sapiens
aaagaaaaaccgaacgggcagaggggagagcggccagaagaggaaagcagaggaggcccgccaggccaaagg

SEQ ID NO: 23877 - RNA, 63 nt, Homo sapiens
cggcgaaggaggcagaggcacagcgcagaaagaccacacagggaaacgaccagggagagacca

SEQ ID NO: 23878 - RNA, 77 nt, Homo sapiens
caaaacgcacccccagagagacccaaaggagaaggcgagggcagcggccacacggaacagcccccgccagaaggacc

SEQ ID NO: 23879 - RNA, 78 nt, Homo sapiens
aaacaagagaccacagaagcacaaaagaccccacagcgagagagagcaaacgaaacaggcaaacgagacaaaggacca

SEQ ID NO: 23880 - RNA, 82 nt, Homo sapiens
gggacaaagcggcgagaccaacaacccagcagaaggaaaaaccgcacacagggaccgagcccagaacccggacgggcagaca

SEQ ID NO: 23881 - RNA, 73 nt, Homo sapiens
gccaggagggggcaggagagccgcagccgaagaaggaaccaccaaacgccacagaggcgcacaagacacccac

SEQ ID NO: 23882 - RNA, 73 nt, Homo sapiens
ccggcgcgccggcgcgcggcgcggacaggcccaaacggccaccaggcaacgcaccaacaacaccacacaaaaa

SEQ ID NO: 23883 - RNA, 83 nt, Homo sapiens
ggggcgagaccccgcccggaccgcaggccgcaccgcgaggaacccgagcccaccggcagcaccgcaccggagccccggcccaa

SEQ ID NO: 23884 - RNA, 76 nt, Homo sapiens
aaggcccggaccgccgggcgcgcggggccccgggccgagggcggagaacggaaaagcaccaggaagcagagaggac

SEQ ID NO: 23885 - RNA, 68 nt, Homo sapiens
agggagacaaccggcagaaaaacaccagagcgcgcgggggacaagcaaaaacggccagacacaagaca

SEQ ID NO: 23886 - RNA, 75 nt, Homo sapiens
ggaagcgcgccgacacgcacaacaagacacacagaaggaaaagagccggagaaaaccagacgagagacagaagac

SEQ ID NO: 23887 - RNA, 86 nt, Homo sapiens
cgcgcggaccacccccacgaacgaggggagacgaggcaccggcgggagcgaccggcgcgcaaccgagaacagccaaggcggcccga

SEQ ID NO: 23888 - RNA, 78 nt, Homo sapiens
gagcccagggaagcagccgaccagccgcggagccgggggcaggccccggagcagacacagcccaccggccgagcccca

SEQ ID NO: 23889 - RNA, 49 nt, Homo sapiens
caggacacaccaagccaagaaggacggaaacaacgaagcaagcccaagg

SEQ ID NO: 23890 - RNA, 71 nt, Homo sapiens
agcagaacacaagaccaacccgccaaaaggaaacagaagagacagaaggagaggaccagaacagacgaacc

SEQ ID NO: 23891 - RNA, 37 nt, Homo sapiens
agaggacgccaaccaaacgcgaaccaagacaggaagc

SEQ ID NO: 23892 - RNA, 75 nt, Homo sapiens
caaagaccccccccacaggggagacagaggggagaaaacgcaggccacaaagacaggaccaagaggaaaaaacaa

SEQ ID NO: 23893 - RNA, 63 nt, Homo sapiens
gcaacgaagccgaggcccccaacgcaggacacaggaggaacagcacagcagcgggccggaaaa

SEQ ID NO: 23894 - RNA, 74 nt, Homo sapiens
acagcaacccgaagacagggaaaagaaccccacagccgagccaaaggccaacacaagcacacaagggaggagac

SEQ ID NO: 23895 - RNA, 76 nt, Homo sapiens
aaaggagcagggaagaaggaacacgaggcagggggccacacgcaaggggaacagggaaagggagcagcaccggcca

SEQ ID NO: 23896 - RNA, 72 nt, Homo sapiens
agccgcacaagagggggaaacggggaaaaggcaagcagcacgaaacaaagcaggacaaggcggacccaggcg

SEQ ID NO: 23897 - RNA, 76 nt, Homo sapiens
ccccggcccgccggagcgggaggacagccgccagagcgggagggcagagacacagaaaggaaggagaaaccaagag

SEQ ID NO: 23898 - RNA, 56 nt, Homo sapiens
acccagaggccggggaccgccaaccccccaagaagcagaggagagcgcgcgccgcg

SEQ ID NO: 23899 - RNA, 76 nt, Homo sapiens
ggagaaggaccaagaaccaggcgggggagcgggaggagccagagcacaccgcaccacggccacaggcgcccgaaga

SEQ ID NO: 23900 - RNA, 71 nt, Homo sapiens
gcggaaggcgcgaggcaacaaggcacccgccccgggccaccaccacagaccagacggcccgccccggcccc

SEQ ID NO: 23901 - RNA, 77 nt, Homo sapiens
gcggcagacgggaccacgaggcaacgccccagcggagcccaaaaaaccaggcacccaaaacagaagggagaaaaaca

SEQ ID NO: 23902 - RNA, 78 nt, Homo sapiens
gggggcaccggaacccacggggcagaggcagggaccaaagccccacggcggacgccggcaaccccaccaggagacaac

SEQ ID NO: 23903 - RNA, 57 nt, Homo sapiens
cgcgcgcgcaggcgcccagcgcgaagggaccaggccaacggaccacaccaaaagcca

SEQ ID NO: 23904 - RNA, 85 nt, Homo sapiens
cggcccgcgcacgcccggagagagagacagggcagggcagcagcacgaccgacccagcagccccggcagacccagggaacggaaa

SEQ ID NO: 23905 - RNA, 68 nt, Homo sapiens
aaccagccgcaaggaggaaaggcaaacgaaggagagagaagaaacgaagaggccagcgaagacggagg

SEQ ID NO: 23906 - RNA, 71 nt, Homo sapiens
gcccacccagagacccacggaacgcagaaggagaggaaccagccaggggaccggaagagaagagaaaaaca

SEQ ID NO: 23907 - RNA, 74 nt, Homo sapiens
ggccgggcggagagaaccagcgaggacgaggcggcagagaggccccgagacccagaacgcaaaaccaaggcccg

SEQ ID NO: 23908 - RNA, 80 nt, Homo sapiens
agaggaagcgaagaggagacacagaggggagcgaaaggccgacagcagggccggaaaagcaaagagagcagagagaaagc

SEQ ID NO: 23909 - RNA, 70 nt, Homo sapiens
aaagcagaggggaagcgccagaagggcagagagggaacggcgcaaaaaccagacaccccacaccaccacc

SEQ ID NO: 23910 - RNA, 57 nt, Homo sapiens
gcaagaggacgccacaaacacccaccacagcagaggagaaacaggaagaacccgagc

SEQ ID NO: 23911 - RNA, 68 nt, Homo sapiens
aaaaaggaccacgaaggccagccaaagcggcaccacaaaccccgcccaccagggaggcagggccagcc

SEQ ID NO: 23912 - RNA, 53 nt, Homo sapiens
caccgggaggcaaagcgggacaggcggagcgaccggccgggccgaccacggcg

SEQ ID NO: 23913 - RNA, 79 nt, Homo sapiens
cggaggaaggcacagccacccagcacacggaccagcacgccggagccgagagaaggcaggccacaaagaaagcaagaga

SEQ ID NO: 23914 - RNA, 94 nt, Homo sapiens
ccaaccagggcagaagccgaacacgacagaaagaaaggccaaagcagcaggccaacagagcacaggcaaggcaccgagggggggcaacaccaaa

SEQ ID NO: 23915 - RNA, 82 nt, Homo sapiens
ggccaccggagcacgaggagcaggagaggggaacgggacaccaagcagaaccacgccagacaagacccagacggcgaacaga

SEQ ID NO: 23916 - RNA, 84 nt, Homo sapiens
agccagggcacggccgggacgagccccccaagagaacccagggggagccacgccggagcgggcaccggcgcggacccaccggag

SEQ ID NO: 23917 - RNA, 73 nt, Homo sapiens
gagcgaaagcgccggaagggcaagagaaccccagagggcgcggaagccccagcaaacaagaccaccggcaccc

SEQ ID NO: 23918 - RNA, 77 nt, Homo sapiens
caggggacagaccccacggacgcagcacagggaccccaaggggcagcacccgagggacccgaggagcccaccaagcc

SEQ ID NO: 23919 - RNA, 74 nt, Homo sapiens
agggcacgggcggcagcccgagaccgcagcagggaaacccaccgggacagacacgacggaacagaacaccagga

SEQ ID NO: 23920 - RNA, 75 nt, Homo sapiens
aagagaggacaccgacagagcaccagaaagcccacgccaggaggcaggcgccaccgggcgcacaacaaaggcgcc

SEQ ID NO: 23921 - RNA, 80 nt, Homo sapiens
gggcgccgcccgcgcccgggaccgacccccgccgcggccgcgccgaggaggcgaaaggaagaaagcacaagaaacaccca

SEQ ID NO: 23922 - RNA, 84 nt, Homo sapiens
cggcgccccggagagccccgcggcagccgcgccggggccaaggacacggaaaaaggagaccgcccagggaagacccacgggacg

SEQ ID NO: 23923 - RNA, 81 nt, Homo sapiens
agaaggagaacgacggcaccggaagagccgaggaaacccagacccaagaccaaccgaggaggaggaggagggagacgcgcc

SEQ ID NO: 23924 - RNA, 68 nt, Homo sapiens
ccgggcaggaagacaaaaacaggacaggagagacaacggaggcaagaaagacggagaagcgagaagag

SEQ ID NO: 23925 - RNA, 72 nt, Homo sapiens
gcagaaacgcaccaggccaaagaaagagaaagcagagaaagggggaggcggacccggcaacacgaaccggaa

SEQ ID NO: 23926 - RNA, 72 nt, Homo sapiens
gaaaacgggcagggcagccacaaagaggagcacgagcaagccagggcgagcaggaagaagaacaagaacaca

SEQ ID NO: 23927 - RNA, 75 nt, Homo sapiens
gcccccgcgccgccccgaagcccaggcgcgccgggcggcgagacccccgaggccaggagcgggagcaagccaggg

SEQ ID NO: 23928 - RNA, 78 nt, Homo sapiens
cccagcagcaacagcagcagcaagagggaaaaaccccaagaggaagacaaacaaccagcccagaaccaaaagagcaga

SEQ ID NO: 23929 - RNA, 60 nt, Homo sapiens
agccaccggggagaagcccaacaaggacgagaccacagcagacacagagacgggcggaca

SEQ ID NO: 23930 - RNA, 84 nt, Homo sapiens
caaggccagcaccagcgcagccccggccgcccaccgcccacgagccgcagaaaggacccaggagcgaaacagaaacaaaaagaa

SEQ ID NO: 23931 - RNA, 41 nt, Homo sapiens
gagcgaggcggagggagaagcccaacaacgcccgccgccgc

SEQ ID NO: 23932 - RNA, 75 nt, Homo sapiens
ccccaacaggccccggggcccggcgcggccgggggcccccccaggagcaggcgaacccagagacccggacaccag

SEQ ID NO: 23933 - RNA, 51 nt, Homo sapiens
aaacacacagacgaaggcaaaagagggccggggacacaagcaacagccaga

SEQ ID NO: 23934 - RNA, 75 nt, Homo sapiens
caggcaacacgacaggcgcaggaccccggacaaacaacagcccggggccgcgggcagcaggaagaccaacgggga

SEQ ID NO: 23935 - RNA, 80 nt, Homo sapiens
cagccgccagccgagaagaggcacacaggggcaacacccccacaaagagcaagccagccggacgcaccacgggggggaag

SEQ ID NO: 23936 - RNA, 77 nt, Homo sapiens
cgcggcagggagcgcgggggcccgcgcagcagcgaccacgcggcggagaaaccaccacaaacacgaggccagcaacg

SEQ ID NO: 23937 - RNA, 73 nt, Homo sapiens
ccggcgcgagaacaacgggaacgaagaaggacagaacggacaaggcagagcaaggaaaagacggccacccaag

SEQ ID NO: 23938 - RNA, 67 nt, Homo sapiens
cgggcagagaggcagaaggaaaaccgcaccgaagcagccaaggccaagaagagcaagcggcggaaag

SEQ ID NO: 23939 - RNA, 70 nt, Homo sapiens
ggagaacaagaggaagcacacggaagagcgaaaaagagaaagcgacgagaagaagcagaagaagcaaaag

SEQ ID NO: 23940 - RNA, 74 nt, Homo sapiens
aggaacgcggaaaaaggcagccacgaggagggaggcgcgcgccgggcaggcacagccagaagaaccacaggcca

SEQ ID NO: 23941 - RNA, 69 nt, Homo sapiens
gcgccagacgagaaccggcaaagggaggggagagagagcaaccaaagcagagacgggacacaccgagga

SEQ ID NO: 23942 - RNA, 57 nt, Homo sapiens
ccaacaccagcgcggaaaaaggagaaggaagccaacaccggagccagaaagccgaac

SEQ ID NO: 23943 - RNA, 73 nt, Homo sapiens
gaaaacacagccgacccaagacgggcgaacagaggaggaccagagagagaagaaaaccggaccaaacaggggg

SEQ ID NO: 23944 - RNA, 89 nt, Homo sapiens
ccaaagaagggagccgaagcgaggcggaaaacgaagacagcacacacgccaaagagggcagcaccccacccaccacaaaacgagcaaca

SEQ ID NO: 23945 - RNA, 71 nt, Homo sapiens
aaacagccccccccgaccacacaccagaaccggaggaggaccgcggagggaacaccagcgacgccgacaaa

SEQ ID NO: 23946 - RNA, 42 nt, Homo sapiens
ccgcgggacaagaaaacagcgcccacagaggaacacaaaaaa

SEQ ID NO: 23947 - RNA, 68 nt, Homo sapiens
acgaacccccccccccgaggcccacgcggaccggcagcgccaccggaccaccagacaaggacacggcc

SEQ ID NO: 23948 - RNA, 62 nt, Homo sapiens
ggcaagggggcaggagcgggagcgcagcgaccacaccgaagaaaaagcggggaaggggggca

SEQ ID NO: 23949 - RNA, 70 nt, Homo sapiens
caaaaccagccgacaaagagggggcccaagaagggaggacgcccgaccccacccagcccgcaccgggcag

SEQ ID NO: 23950 - RNA, 36 nt, Homo sapiens
gacaccgccggggccaagggcggggaccagaaccac

SEQ ID NO: 23951 - RNA, 47 nt, Homo sapiens
cccagggaaccaagaaaaaacccaggcgccacccgggcagagcggac

SEQ ID NO: 23952 - RNA, 55 nt, Homo sapiens
cagcagaagcaggggaaaacaccaggggggaaaggcacccgggacaacggcacaa

SEQ ID NO: 23953 - RNA, 75 nt, Homo sapiens
ggccagcgacggcggcgccgggaagcacccacggagcgagagagacccgcgaaaccgacccaagaaaaagaagaa

SEQ ID NO: 23954 - RNA, 76 nt, Homo sapiens
ccagaagggagaccagcagaacccaccaggagaaaggaggacccgggaagacagagacgggcaacggaaagcgaac

SEQ ID NO: 23955 - RNA, 69 nt, Homo sapiens
ggaaagccagaaggcaccagagagaggccgaacggagcagacaaaggacaaaaggaagagccgacgaga

SEQ ID NO: 23956 - RNA, 59 nt, Homo sapiens
ccgaacgggggggagcgaagaacagagcgccgggacaggaaaccacaaccggacagaga

SEQ ID NO: 23957 - RNA, 73 nt, Homo sapiens
cggacgcgcccaggcgaggcggggaagcaggacccaggcccaccggcggggggcaccaaaagaaagcacaacc

SEQ ID NO: 23958 - RNA, 70 nt, Homo sapiens
ggcaccaaggaggagcagccggaagagggaaagacaaaccaaggaacaggaccacaacaacccaaagcag

SEQ ID NO: 23959 - RNA, 82 nt, Homo sapiens
agggaagccgcaacaagaagcgaagaccgaagcaagagcggcaggcccagaaggggaagacccccagcgaacagagacccaa

SEQ ID NO: 23960 - RNA, 71 nt, Homo sapiens
gggacccccagccaaaggcaaagggggcccccaaagggaagccaaacacaaaggaagaagcccggagacga

SEQ ID NO: 23961 - RNA, 74 nt, Homo sapiens
caacaacgcaccaggcgcagacagacaagcacagagccagcaacacaaaagaagagccagaggaacagcaaggc

SEQ ID NO: 23962 - RNA, 58 nt, Homo sapiens
ggagaaggagggacgcaggcgcaggccaggcgccaacgcaaagccacacgggcacggc

SEQ ID NO: 23963 - RNA, 80 nt, Homo sapiens
ccgaaaacagcccagcacacgggaggcaaacgaaaaccggaacagcagcacagcaaaggggcagaaaagaagcagacaaa

SEQ ID NO: 23964 - RNA, 74 nt, Homo sapiens
cgagcacaccccccggaggagagccgcgcaggacggcagcggaacacccccagaaccggcacccgccacaacgg

SEQ ID NO: 23965 - RNA, 71 nt, Homo sapiens
aaagacaagggggcaaaggacacccagagcaacaaaccccaaagaacaaagacaagcaccagaaggggaca

SEQ ID NO: 23966 - RNA, 74 nt, Homo sapiens
accacagacaagaaagcccccacggaaggccacgagggcggaccccggcgagagacaggcgagagacagaagaa

SEQ ID NO: 23967 - RNA, 81 nt, Homo sapiens
ggggaagggagcgcccaccagaggagcgaaagagagaggaaaaagccagcggggacaaggaggcaggccgcacaacccggc

SEQ ID NO: 23968 - RNA, 66 nt, Homo sapiens
caacacacgaagggccaggcaaccagacacacaaccaccagaaggagagaagaacagaagccagag

SEQ ID NO: 23969 - RNA, 64 nt, Homo sapiens
ccccagaagcagcagacggcacacgcagcagaagcccggagagacgacacgagaaagcggacag

SEQ ID NO: 23970 - RNA, 77 nt, Homo sapiens
caagccgaaggaaaggcagaacgccgaacaggagcaacaggcgagaaagagaccaagacgaaaaagcgaacgcaaac

SEQ ID NO: 23971 - RNA, 73 nt, Homo sapiens
gccacgggccgggcgcggcaccacgcccgccccagcggagaggggaccaggaggcaaaagaaacaaaagaaca

SEQ ID NO: 23972 - RNA, 78 nt, Homo sapiens
acaaccacaaaagacaaggccggaaccagcgcaaagccaggacacggccaggggacagagccgaggacacagacccca

SEQ ID NO: 23973 - RNA, 38 nt, Homo sapiens
gagagcacaaacacgacagggagagacgggggcaccag

SEQ ID NO: 23974 - RNA, 77 nt, Homo sapiens
gaggaaggaaccaaggaagagaagaaggaacggaaacaaagagccggaagcagaagcagaaacccagcccaccagag

SEQ ID NO: 23975 - RNA, 67 nt, Homo sapiens
ccggccagggagaaaagcccaaccgcgcaaacaagcagaagggaacccaagaccacagacaacaccc

SEQ ID NO: 23976 - RNA, 78 nt, Homo sapiens
acgagaacgccgcgacagaaaaaccaaacacagccacagcagccacagggacaaacagacacaaaacgagcaaaagga

SEQ ID NO: 23977 - RNA, 56 nt, Homo sapiens
gccaggagaaacggggacgagagaggcaaaccaagaaacagggcaaggagcggagc

SEQ ID NO: 23978 - RNA, 84 nt, Homo sapiens
cggcgcgcgccaagacgccgccaaccgcagggacgcgccaaggccacggccgagggccagggagcagaagacccaaaagaaacc

SEQ ID NO: 23979 - RNA, 81 nt, Homo sapiens
gcagacccggggcccccgggcccccggaccagggagaccggccgggaacagacggccccgacaagggaccgggcgggcccc

SEQ ID NO: 23980 - RNA, 74 nt, Homo sapiens
cagaaggcacagaaaaggacggcccacacccaccacccggaaccgcacggacacgacagggcagggcacggacc

SEQ ID NO: 23981 - RNA, 77 nt, Homo sapiens
ggccgcggcgcggcggcggcgccgccgggcgggcggggcacacagggaccaagaagccccggggacacgcgagaaaa

SEQ ID NO: 23982 - RNA, 78 nt, Homo sapiens
cccccgaacccccagcccaaacccggaaacccagcggcccagccggggccggccgcgcacccagacccgagccgccgc

SEQ ID NO: 23983 - RNA, 88 nt, Homo sapiens
acggcaagggcaaccgcggggcaagcgggccacgcacccgcaccaaggccaagggcgcgcaccgaggaaggcggcggcggagcgcagc

SEQ ID NO: 23984 - RNA, 56 nt, Homo sapiens
accagagggcaagagaagaaacgccccggagcagccaggcacacgggacaagacca

SEQ ID NO: 23985 - RNA, 72 nt, Homo sapiens
ggacaggagaaacaggggccaaaaaaccaaaggagaagaaaaccacagaaggccagcaagacagaaccgcca

SEQ ID NO: 23986 - RNA, 72 nt, Homo sapiens
cgcggcaagggggcagggggaggagcagaaacacagcaggacaggccaagaagggacccagacacgacccgg

SEQ ID NO: 23987 - RNA, 72 nt, Homo sapiens
ggccggccgccacggggccacaagggggcgcagaggacggaaagaaaccgacggccccaggagagagccagc

SEQ ID NO: 23988 - RNA, 72 nt, Homo sapiens
cccaaaaagagcaaacaaccggggcagacaacagaggggccaacacacgacaccgcacgaaagcaaggggag

SEQ ID NO: 23989 - RNA, 68 nt, Homo sapiens
agcaaggggcgaccaaagagagaggaacaaacaggcaaggagcgccacggaaggagagcgcagacgag

SEQ ID NO: 23990 - RNA, 95 nt, Homo sapiens
ggagcccccggaccacacagcgcccaggccagagaaggggaaggaggggcagcgacaacggcaagcggagaagagcaaggccgaaccgagaggaa

SEQ ID NO: 23991 - RNA, 67 nt, Homo sapiens
gaagccgaagaagcagagacaggaaaagggagagcccaggaagaaggagaaagacaaagccccgaga

SEQ ID NO: 23992 - RNA, 54 nt, Homo sapiens
acaaaaagaaaaaagaacaagggaagacagggcgggaagagccgacggggccag

SEQ ID NO: 23993 - RNA, 76 nt, Homo sapiens
acgggaccggagacggcaggacgagcaaagccaagccaggccaagaagcggaagaccagggcccgggacccagaca

SEQ ID NO: 23994 - RNA, 63 nt, Homo sapiens
ggcggaggaacagcggcagccacaggagccaggcgggaaagacacaaagcaggcaaaaacaca

SEQ ID NO: 23995 - RNA, 66 nt, Homo sapiens
ggacaagcaccacggaaacaagcgcaggggggaagaagaaaacaaaccacacaccaagcacaaaac

SEQ ID NO: 23996 - RNA, 76 nt, Homo sapiens
ggggaggcaaagacgacaccgggcgccgaggcgccacaaaaggaaagacaaggagccgggccgagaaaccgaacca

SEQ ID NO: 23997 - RNA, 65 nt, Homo sapiens
agagggcaggaaccaccgcccaaaggaagaccgacaagcaggcagcgggacccgaccaagaaagc

SEQ ID NO: 23998 - RNA, 75 nt, Homo sapiens
gcaagaaaacaggaagggagccccaaaggaaaccacacaacaagaacgcgccagaagacccaccaaaggcaccag

SEQ ID NO: 23999 - RNA, 72 nt, Homo sapiens
agccacgcagacacagccagacgaagacaaccccaaacagccgcaacgccccagggaaaggccaagaaaaca

SEQ ID NO: 24000 - RNA, 59 nt, Homo sapiens
ccggggccgggcgcacaccaggaacagaaagggaccaaccacccaccccagagcccaga

SEQ ID NO: 24001 - RNA, 80 nt, Homo sapiens
gcgaaggccgggacccggccccggcccacaggggggggcaaacccgagagaacggaggcacaggaagcggagcgagaccc

SEQ ID NO: 24002 - RNA, 57 nt, Homo sapiens
gaaggaaccgcgaccacagagaaggagggggcagagcacggcaggcagaaggggcca

SEQ ID NO: 24003 - RNA, 72 nt, Homo sapiens
gccgccccacccggccggcacacaaccagaaggagacccaacaccccggccagacgggccaccaggccggcg

SEQ ID NO: 24004 - RNA, 65 nt, Homo sapiens
acaagaaagggacacagcgacgacgggaaaggcaggaagaggagaggcggacgcagggccgaacg

SEQ ID NO: 24005 - RNA, 73 nt, Homo sapiens
ccagccccgaaaaggcgacccggggaaagacagcccacagccagaacagaaggagcggcggacacacagaccc

SEQ ID NO: 24006 - RNA, 93 nt, Homo sapiens
ccaaacacaagaaaacacacagacccaacgacaagaggagaggaagaggaagaggcgagagcagagcaacggcagaacaagaacagcagcacg

SEQ ID NO: 24007 - RNA, 103 nt, Homo sapiens
ccaacagccgcagccaggccgggggcgccgcgacgcggggacagcaacggagcgggagagcggcgccgaaaagcgaaaagaaacaagccgcggcaacagcgac

SEQ ID NO: 24008 - RNA, 75 nt, Homo sapiens
agcccgaagagagaaggcaaagaacccggggaaagaccagcaaagaggcccgccagacgaacgggccgggacaca

SEQ ID NO: 24009 - RNA, 37 nt, Homo sapiens
cacgacacccgaagccgggaaagaggagcgccgcgcc

SEQ ID NO: 24010 - RNA, 60 nt, Homo sapiens
gcgaaccagccgaaagccaccagccaccgcaggggcagccccccccgaagccggacggaa

SEQ ID NO: 24011 - RNA, 71 nt, Homo sapiens
ccccgcagcgacgcggcggcaagacggggcgggggccggaccaagccaccgaggaacgggagcgggggcca

SEQ ID NO: 24012 - RNA, 78 nt, Homo sapiens
aacacgggcccggccaccaagagcgagaaacaggaggacgaccagagaaccagcaggaaggcgcgacaccaagccagg

SEQ ID NO: 24013 - RNA, 46 nt, Homo sapiens
cggccgacaggcggcgcgggcggcgggcgacgcgccacagagcggg

SEQ ID NO: 24014 - RNA, 84 nt, Homo sapiens
cgcgccccaagcccgggcgccaccgcgccaccccgcgaggcgacagggggaccgcggcgcgagggacgcaccgccccaggacgg

SEQ ID NO: 24015 - RNA, 80 nt, Homo sapiens
gaggagaggcagggcgcgagggcgggggcagcggcagaacaagagggagcagccaggggggcagcggggggcaggcacca

SEQ ID NO: 24016 - RNA, 62 nt, Homo sapiens
gccaggacgacgaggagcagggccgacgcgcaggacgccagaaagagggcaacggccgacga

SEQ ID NO: 24017 - RNA, 72 nt, Homo sapiens
aaccacgaggaaggcacagccccacacgcaacacggccgagcgaccagccacacggcacccggccagaagga

SEQ ID NO: 24018 - RNA, 74 nt, Homo sapiens
gaaacaacacccgaggcggcccgcgacggggcaaaaagagcagcagaaaacaggcagaaaagcagagagccagg

SEQ ID NO: 24019 - RNA, 75 nt, Homo sapiens
ccaagagaacaagggaaccagccaaaaggcggagaacggaaaagcaccaggaagcagagaggaccgcagaaggga

SEQ ID NO: 24020 - RNA, 77 nt, Homo sapiens
gggccggcgggaggcgacaggaaacccgccacgacaaccgcaccaacaaagacagagccccggaagcaggacgcaag

SEQ ID NO: 24021 - RNA, 62 nt, Homo sapiens
ccgcagcaccgcaccggagggcgagcggacccccggagaaggaggcaggggaagcacaaaag

SEQ ID NO: 24022 - RNA, 70 nt, Homo sapiens
aagccgcgcggggacccgacgcccgcacgggaaacaccacaaagcgagcaaacccaccaaagagggccgg

SEQ ID NO: 24023 - RNA, 72 nt, Homo sapiens
cagcgggacaccagcacaagcgaggcagcgacgcggccgggagaggggccgccggccggaacaggcccagca

SEQ ID NO: 24024 - RNA, 73 nt, Homo sapiens
ggccacacgcgacgggggagccgcgggggaaaaagaaaagggcgaagacccgaagcagcgcaggaacagaaga

SEQ ID NO: 24025 - RNA, 115 nt, Homo sapiens
gccggagcgcgaaggccgggacccggccccggcccacaggggggggcaaacccgagagaacgggagaggagccaagcccaacgggacgggaaaacggccacagccaacgacgcag

SEQ ID NO: 24026 - RNA, 77 nt, Homo sapiens
ggaggcgccaaggagaaaaagaaagaggacgagaggagaaacgagaggggaaaagacgacaacggcaggaccaggcc

SEQ ID NO: 24027 - RNA, 75 nt, Homo sapiens
gcgcccggagagcgaccaaacacaaggggaaccaagaccaggacaaagaagacccggagagacaagccggaggac

SEQ ID NO: 24028 - RNA, 60 nt, Homo sapiens
gaaagccgggcgacggccaccaccgaggaagaaccagccaggggaccacagaaaaccagg

SEQ ID NO: 24029 - RNA, 78 nt, Homo sapiens
gcagggccccccacccccacccaggggggccccacagggaggcgcgaggggcaggcacaggagccggcgagccaggcc

SEQ ID NO: 24030 - RNA, 77 nt, Homo sapiens
gaaggaaggcgcccaaggccagggccagcagggagaccccccccgcaaccaggaaggcggggagagcgggcagacac

SEQ ID NO: 24031 - RNA, 69 nt, Homo sapiens
gacgggcaggagccgaaagggaagcacacggaccagcagaacagaaacaagaaaacggccggagacccc

SEQ ID NO: 24032 - RNA, 53 nt, Homo sapiens
gcagccgagcggggccggccacagagaagacggcccagcagagcacccaacca

SEQ ID NO: 24033 - RNA, 83 nt, Homo sapiens
acgggccccacacagcccaaggcaggggaaagcgcagggggaaccaaaggcagacccagaagagcacaaaacagagaaaaggg

SEQ ID NO: 24034 - RNA, 72 nt, Homo sapiens
ggggggggaagccgcagcggaaagcaggagcacaggagcagaaaagcgaggcaagggcggcaggggggggcg

SEQ ID NO: 24035 - RNA, 81 nt, Homo sapiens
ggccgcaagcggacgggagacaacaccgccacgagacaagccagggaagcacagacggaccacagccagggcacaagaccc

SEQ ID NO: 24036 - RNA, 75 nt, Homo sapiens
acacacccccaggcaacgaggagacggaagacaacccagggagagcaggaggagaccaaacaccagacggaggcc

SEQ ID NO: 24037 - RNA, 94 nt, Homo sapiens
gaaaaaagagagggggggaccgaccgcaacagaacggacccgcaaggcgccaccggaagaaacgggaggggaggagccgggaaagacagcgcca

SEQ ID NO: 24038 - RNA, 71 nt, Homo sapiens
gaagaccgaacaccagaggaagccgcaggacccccgaggaaaggccagggaagaggcaaccagcccaagcc

SEQ ID NO: 24039 - RNA, 70 nt, Homo sapiens
ccccccgccagagccaggagacgaccaccacaagacaaagcaacgagaagacgacccggccggaggcacc

SEQ ID NO: 24040 - RNA, 75 nt, Homo sapiens
agccaagcgaccaagaagccaaagaacggcaggcaaaaagcaagccacacgcgcacaccgcgaccagaagaccag

SEQ ID NO: 24041 - RNA, 55 nt, Homo sapiens
agaccaggagagccaaggaggagaaaggcgcaggcagcaaacggaaaagagccag

SEQ ID NO: 24042 - RNA, 93 nt, Homo sapiens
caggaggaaggaagaggaaggagagcagcggcagccggcgggcagcagccggccgacccagagcacggcagcagcgaccccacgcacggaagg

SEQ ID NO: 24043 - RNA, 105 nt, Homo sapiens
gaacaacccgcgcccaggccagcgccccaggccaagagggacccacccggcgggaccggagggccggaagcgggccgggacaacgggcaggagccggaagggcga

SEQ ID NO: 24044 - RNA, 65 nt, Homo sapiens
ggcccgggcaggccgaacacaggagaagaaaagaagcaaccagaaagacggcaaaaaccaggagg

SEQ ID NO: 24045 - RNA, 81 nt, Homo sapiens
gccggacggcgggccccgggaccgggcgggaacccgcggggagcgggacacgaacggccaaccggccggccgcaaccgggc

SEQ ID NO: 24046 - RNA, 74 nt, Homo sapiens
agaaaggacggagagcccaagaaaggaaaaagcagacggacacaaagacaggaaacgaaggaacaaggaacgca

SEQ ID NO: 24047 - RNA, 84 nt, Homo sapiens
cgacgccgcgggaggcggaaacgccgggagcgcgaggccagggccccacggcccaggagccggagagcacagggccgcagaaga

SEQ ID NO: 24048 - RNA, 64 nt, Homo sapiens
aggcgagaccacccaaaggggggaaaagaacagaagaaggagcgaaaagccagaggcgcagagg

SEQ ID NO: 24049 - RNA, 92 nt, Homo sapiens
cacccgagcgaagaagaagcgaagacggacccacggggaacaacaagacaacaagaggagcaagaacaacacaagagcagggcccgggggcc

SEQ ID NO: 24050 - RNA, 52 nt, Homo sapiens
gggagagggaccacacagaaacgggaaagacaaggagccgggccgagaaacc

SEQ ID NO: 24051 - RNA, 76 nt, Homo sapiens
cgccacagacccaggccagcacccacccaccgggacaggccgcccgggcgcggaggcgccggagacaagcgcaggc

SEQ ID NO: 24052 - RNA, 61 nt, Homo sapiens
acgcagggcgcccccggacaagcccaagaagaaggagaaaagaccggcggaccgggcaaaa

SEQ ID NO: 24053 - RNA, 72 nt, Homo sapiens
agaccgaagagaaggaagacaaggaccgacaagacggaaaccgggagggggaaaagcgagaaaaagacccaa

SEQ ID NO: 24054 - RNA, 75 nt, Homo sapiens
agccacaccaagaagcaagggacagaagccaaacaaccaaggaaaagaagaaaaggaagcacagccaacaaaaac

SEQ ID NO: 24055 - RNA, 62 nt, Homo sapiens
agacacccaagaaggcaagaaacaacagcgcccgacaagccagaggcgacccgcggcgagag

SEQ ID NO: 24056 - RNA, 77 nt, Homo sapiens
gaaacggaacaccaaggagaaaaaggcagccccggagacgaaaagacaaagcaccaccaacagacgaggaacagcga

SEQ ID NO: 24057 - RNA, 87 nt, Homo sapiens
gaacagggcaaaggagagcacaaccacgcagggaagcccaggggcagggcgccagaacaaagaagagaaacgcagcgcaaccaaaac

SEQ ID NO: 24058 - RNA, 81 nt, Homo sapiens
aggaggaggaggaggagcgaagaggaaagggagcaagcagggcggggcgcgcaccgcagcccacgccgagaggaccccggg

SEQ ID NO: 24059 - RNA, 69 nt, Homo sapiens
ggacccaaggacgcgaaaaccagacaaagggagcaccagccagaccgggaagaaacgaaggggggaggc

SEQ ID NO: 24060 - RNA, 43 nt, Homo sapiens
accagaacgaacccccccccccggagaaccagaaggaacaaag

SEQ ID NO: 24061 - RNA, 74 nt, Homo sapiens
cgccaggacacgagaggagagacaacacagacaagaaaaaccaaaggacgcaaaaaagcacagaaccacgacca

SEQ ID NO: 24062 - RNA, 74 nt, Homo sapiens
gaggaccaggaggaggaggcagagacgcagaaccccagacaggcgcccgcgggcacgccgcccgccgggcaccg

SEQ ID NO: 24063 - RNA, 35 nt, Homo sapiens
ggggaaagaaccaaagcgagccgaccacggagcgg

SEQ ID NO: 24064 - RNA, 91 nt, Homo sapiens
ccagcgcagccccggcgcccaccgcccaccgagccgggggaggcaagcaggggggcaaaggaaagaaggcagaaagggaggccaggagcgc

SEQ ID NO: 24065 - RNA, 70 nt, Homo sapiens
ggcgggggccgggcgcaggcgcgcagaacggacccagagcccggcccggcgaagagccaccagcggcgac

SEQ ID NO: 24066 - RNA, 41 nt, Homo sapiens
cggagccggaacccagccgcgccagggaccccggcccagca

SEQ ID NO: 24067 - RNA, 70 nt, Homo sapiens
agaagggccaccccacagacgacaagacagcaacagccacagaggaagaacaaaagaaagaaaaaagcac

SEQ ID NO: 24068 - RNA, 71 nt, Homo sapiens
aaagcaccacagggaaacacaagcagaaacagacaggaccacgcaaaaccaaaggacgcagacacaccaag

SEQ ID NO: 24069 - RNA, 82 nt, Homo sapiens
ccagaccccgacacaaggaggagcgaaggagacgagcaggggccagcgccagccaccaaggaagagagaggagaaaaccgga

SEQ ID NO: 24070 - RNA, 79 nt, Homo sapiens
gcgacgagcaggggcggcggcgcagagcgccgcccggcgggcgccgggagccgccaggaacccccaagacccccgcccg

SEQ ID NO: 24071 - RNA, 73 nt, Homo sapiens
gaggagcagcgcaacgagcggaggcccggagccacacccgaccccacaggacgaccgcaggcccaaaggggac

SEQ ID NO: 24072 - RNA, 75 nt, Homo sapiens
agaacggaggcaaaggcgccccacaccacagacggaccacccaagaagaccaaggcccaaaaggacccaagagag

SEQ ID NO: 24073 - RNA, 78 nt, Homo sapiens
ggggacgcccgacggcagcgcgggaaacgcaaaccgaggaccagacgcggaggaagaggaaaggaacgagcccaaggg

SEQ ID NO: 24074 - RNA, 78 nt, Homo sapiens
gacaagagccacgcgaggacagaaaacgcaagacaacaggagaggaaagcggaaagccaagagagcgaccaaaccccc

SEQ ID NO: 24075 - RNA, 87 nt, Homo sapiens
cgccggcggagcggagggagaccgagcggcggcggcaagcggcgcgagcggcgagccccggaggaacgcgcaagagagggacaagac

SEQ ID NO: 24076 - RNA, 90 nt, Homo sapiens
ggaacggaccagccgccggccacccaaggaaacacaaacgccgaaaggacgaggaacgggccggaaaagcaaaacaaacggagagaggag

SEQ ID NO: 24077 - RNA, 68 nt, Homo sapiens
acagcaggaaagaagggggaacaacgagagccaaagaaagcgaggaccaggaagcaaagccggaaaaa

SEQ ID NO: 24078 - RNA, 74 nt, Homo sapiens
gagaagaggaaggcggcgggcgcagggacccgaacacggaagaaagacacgcaggaggccgcggccgagcagcg

SEQ ID NO: 24079 - RNA, 86 nt, Homo sapiens
cccacgccgcccggccaagaaccgggggcggcggcagacaagaggacagcgcccgccgccgcccggaaccgaagaaggagcgaacc

SEQ ID NO: 24080 - RNA, 76 nt, Homo sapiens
ccgcggcacggcccaggggcgcacgcgggcgcacgcacggaggaagagcgaccagcagagaaccggccccaccaac

SEQ ID NO: 24081 - RNA, 35 nt, Homo sapiens
aacccccggagggaggggaagaagcaggagaagca

SEQ ID NO: 24082 - RNA, 73 nt, Homo sapiens
gaggccggcagcagccgcaaaggaaagcgaccagagggaacacaaacgggcggaaaggaccaagaagcaagag

SEQ ID NO: 24083 - RNA, 54 nt, Homo sapiens
ccccccgcacgagcagccccgccggaggccgcacagcggacggcgcaggggcgc

SEQ ID NO: 24084 - RNA, 84 nt, Homo sapiens
aaggccaccaagagacaaaagaagagaaagccccaagcgacaggggagggacccagaccgaggaggagaaggggcggcccggag

SEQ ID NO: 24085 - RNA, 82 nt, Homo sapiens
cgacgaaacagacccgaagagaagcccaaagacaggaagaaccgaggccacggcagccaacagggagaacacagccgacccc

SEQ ID NO: 24086 - RNA, 83 nt, Homo sapiens
cagcgacagccacacaacggacagggaaaagaagaccccggagcaggcccgaaaggcggaccagccagaggccccgaaggcac

SEQ ID NO: 24087 - RNA, 76 nt, Homo sapiens
aggaagaggaggaggaagaagaagggaggggggaggaacgaggacgggaaccgacaacagggcggacgaaaccgcc

SEQ ID NO: 24088 - RNA, 82 nt, Homo sapiens
cggaaccggcggccgccaggcgccaacaggaccgggagagaccggcggacaggccaaagagaaagagaaaggagagcaagag

SEQ ID NO: 24089 - RNA, 88 nt, Homo sapiens
ccgagggccccgacagacaaggagccgcgcgagccggaagaacaagaggaacaggaggagaagagagagacaagaggaggcaacccga

SEQ ID NO: 24090 - RNA, 63 nt, Homo sapiens
ccagcagggcacacaggaaggaacaggaggaaaccacagagccccacaggaagccccaagcag

SEQ ID NO: 24091 - RNA, 86 nt, Homo sapiens
ggccgcccgggagcgagcggaggagcaggcgccggaggaaacaaacagaagcgcacgagaacccaggccgcaaggaacgaaaccca

SEQ ID NO: 24092 - RNA, 87 nt, Homo sapiens
cccagggagcggcgcagaccgagacccggacagggcaggaaacaggccggacagcccgggagacgagccccggagccccaacgaaag

SEQ ID NO: 24093 - RNA, 76 nt, Homo sapiens
ccgccccccgcacaagaagaaggaaccagcaaagcgccacgaagcacaagcaagaggaccagccaaaaccacacag

SEQ ID NO: 24094 - RNA, 86 nt, Homo sapiens
ggacgacgcgccaaccagacgcgcgggagaaaccgggagaagccggccaggcaggcacaccccaccacaacgccacacgaccagcc

SEQ ID NO: 24095 - RNA, 79 nt, Homo sapiens
agcgccgcccccccgaagccacacccccggggccccaggaaccaaaggaaggggaagggaggcccagaggaggagcgga

SEQ ID NO: 24096 - RNA, 87 nt, Homo sapiens
cccaccagccccagcagcagaagcagcgccgacgagcccccggaaccacacccagagcacagaccagcagacaggacagaaaaccag

SEQ ID NO: 24097 - RNA, 53 nt, Homo sapiens
ccacaagacccaaggcgcgcggggccgcgcagcgagacgacgggaccgaagga

SEQ ID NO: 24098 - RNA, 58 nt, Homo sapiens
aggcaaggggccaccaggaggccagggggcgccagccgaagcagcaagaagcccagcc

SEQ ID NO: 24099 - RNA, 75 nt, Homo sapiens
aggaaaaaaccaaacaagcaggaaaagacgcagcacaaaaggccaaaacgcaggaagggcgaaaggaaaaacacg

SEQ ID NO: 24100 - RNA, 67 nt, Homo sapiens
cgccggggggggcggcccgcagcgaaggaccggggacgaagggaacccgccgggcggcccggcaccc

SEQ ID NO: 24101 - RNA, 98 nt, Homo sapiens
gccaaacaaaaaggaaaggagacaagcagagacgaaccaggcaaaggacgaagcaaaggagagaacccaagggacacccaagagcgagcaccaggaag

SEQ ID NO: 24102 - RNA, 60 nt, Homo sapiens
ggacgaaagggcggaagaccgacgcagaccgccggcgacaaccggaccgcgcgaaccggc

SEQ ID NO: 24103 - RNA, 72 nt, Homo sapiens
ccagacccacagaagcccacacgggcacaggggccccgccagcaagggaaccaagcggcacgcaggcaacac

SEQ ID NO: 24104 - RNA, 74 nt, Homo sapiens
gaggccgggaaccagcgaggaaaaagaacggggacacgcgagacaccaagagaagaacgaaaaaacagcaaacc

SEQ ID NO: 24105 - RNA, 82 nt, Homo sapiens
cgcgccagcacacgacaccgagccgccgccgaccgagaagaccccccaagcgccagaaccccccaaccaagagaagaaagag

SEQ ID NO: 24106 - RNA, 76 nt, Homo sapiens
aaagacggggaggacgagaccgcggcaaaaaagacggggaacaacaggcaaagcaaaaagaagaacaagcaaccca

SEQ ID NO: 24107 - RNA, 76 nt, Homo sapiens
ccaccacagcaagacaccacgggaccaaaagagcggccgaaccccaggaccagccccaggagaacgacccagggag

SEQ ID NO: 24108 - RNA, 73 nt, Homo sapiens
gaaagaaaaggagagcaccacgagggagcgcaaccccagaagacgcagagccagaagacgcaaaagcggcagg

SEQ ID NO: 24109 - RNA, 84 nt, Homo sapiens
ccggagcccgagccgcgggaagaggcggcgccgccacccccccccagcaggccgaggcagagcgagaccagccacccagcccgc

SEQ ID NO: 24110 - RNA, 81 nt, Homo sapiens
aggagcgccccaaaaggaaacagccggggggggcacagagccccggaagacagcccccagcgaccagacccagggccagag

SEQ ID NO: 24111 - RNA, 72 nt, Homo sapiens
ggccaagagagccgcgacggcccagaccaggcgaggcgcagaaggggacagaacagcccaccagaagagccg

SEQ ID NO: 24112 - RNA, 75 nt, Homo sapiens
gaaaaaacgggagacacacacaaacagggcgcagccagaaaaggggagaagcgcaaaggccaaaaccacaccaaa

SEQ ID NO: 24113 - RNA, 73 nt, Homo sapiens
cgggggcgagcggacccgcagccccaaaacgaaaaccggggaagaagggagggccagaggggaagaaagagga

SEQ ID NO: 24114 - RNA, 66 nt, Homo sapiens
gacaaaaccggcagccccccacacaaggagcagcaggaaaggcggcgcggaagagggagcaaacca

SEQ ID NO: 24115 - RNA, 77 nt, Homo sapiens
ccacacacaagggacggccacacaacagcagccccgaaacagcggaaaagcggcgacaaccggcgggcccacagcca

SEQ ID NO: 24116 - RNA, 75 nt, Homo sapiens
gcaaacgacaacagcgccaaggaaagaaaacccagaagacacgagaaaaacccaacggccgccaacagaaaaaac

SEQ ID NO: 24117 - RNA, 81 nt, Homo sapiens
cgcaaggaacgaagacagcgggccaacaaggcccagggaccaggcacgcagcacgggggcaggggccgacccagaacgcca

SEQ ID NO: 24118 - RNA, 83 nt, Homo sapiens
ggcagaagagaagcaggaaggaggcagaggcacaccgaaaggcaagaagcaagcaaccaggcgccgcaccagaagaggacgcg

SEQ ID NO: 24119 - RNA, 71 nt, Homo sapiens
aggcaccgcaccagcccgcggaccggagaagccccagaacaacaggccaccaaggcccagagcgggcacgg

SEQ ID NO: 24120 - RNA, 75 nt, Homo sapiens
ggagaaaaacggagggagaaaaagcaagaggaaagcaccaaacagaaacggaaaaagaagagaaaaaagaaaaga

SEQ ID NO: 24121 - RNA, 39 nt, Homo sapiens
ggagccgcagccaaaagggcaggccggagcgcgagaggc

SEQ ID NO: 24122 - RNA, 78 nt, Homo sapiens
acccgagccagaggcgccggcccagccaaccgccgggcgcccccggacagaccaacgaggagcaccggcccaggcgga

SEQ ID NO: 24123 - RNA, 74 nt, Homo sapiens
ggcagaccccgcacaagcgaaaggcaggcacaaagaaccaagaaaaccgaagaccacacaaaggacaccacaac

SEQ ID NO: 24124 - RNA, 54 nt, Homo sapiens
gacccggacccagcccggagggcaacgcacggccaagaagagagcgggcccaga

SEQ ID NO: 24125 - RNA, 76 nt, Homo sapiens
gagaccagccgaccaacaggacgagagaagcccacaaaggaggaaacagaaaccagaccagaacgcagaagcgaca

SEQ ID NO: 24126 - RNA, 68 nt, Homo sapiens
gcagcacacccaccgagccgagaggggacgaggcccaaccaacccaccaggcaagaaaggaccaccag

SEQ ID NO: 24127 - RNA, 65 nt, Homo sapiens
cggacgcggaggcccaaccgaagaaaacaagagcccgagcgaagagaggaaggacaggacaagcc

SEQ ID NO: 24128 - RNA, 73 nt, Homo sapiens
cgcccgggccagcggccgcgcacccccggccggaggcaccagcgcgaaccacgggaacaaaggcgaggacaag

SEQ ID NO: 24129 - RNA, 74 nt, Homo sapiens
cagaaccagaccgggagcacgcacgccacgaaggcaaaggagaaagccgagagagacgacaggagggagccaga

SEQ ID NO: 24130 - RNA, 77 nt, Homo sapiens
agaggcacaggcccaggcagaccgcagcaaagggcgccgaccggaccacccagccaacaacccaacgagacaggaga

SEQ ID NO: 24131 - RNA, 79 nt, Homo sapiens
cggccgcggcaaggcaagagcggcggcgccaaggggggcaggccggaccgaaggacaggagaagggcagcaccaggagc

SEQ ID NO: 24132 - RNA, 56 nt, Homo sapiens
ggcccaggcgaagcaacccgaagagagaggagaccccagaaaagcggcacgaagcg

SEQ ID NO: 24133 - RNA, 71 nt, Homo sapiens
gaaccggaagccgacccggagccgagcaaccaggacgcgaaccccaaccacacaggcagcaagagccggca

SEQ ID NO: 24134 - RNA, 79 nt, Homo sapiens
gggacccggcaggccgcccccggcaagcgccagcagcccgggggcgacgacgaggaccaggagccaggggcgggggaac

SEQ ID NO: 24135 - RNA, 75 nt, Homo sapiens
gggcgggaaacgcggaagcggagcgcaggagaacaccaaccaccagggaagagcgggaaagaaagagaaaggaaa

SEQ ID NO: 24136 - RNA, 81 nt, Homo sapiens
gcgaaaaaggaccgacgaaagcagaggcagaggagccgaagaccagaagcagaagcaggccagaaagaagccagcaggaag

SEQ ID NO: 24137 - RNA, 87 nt, Homo sapiens
ggggagcgagggacccccgacccaagcgcgaaaaccccggagggaggagcagacacgagaggcgagggacgacagagcaagcggcag

SEQ ID NO: 24138 - RNA, 35 nt, Homo sapiens
acccagggaagagaagaggagggcaaaacacagaa

SEQ ID NO: 24139 - RNA, 55 nt, Homo sapiens
acacacaacccgacccgacgagccacaagggagcaccagccgaagcagaagcgcc

SEQ ID NO: 24140 - RNA, 67 nt, Homo sapiens
cgagagcgggaaccggaaacaggggacggacgcgacagaacaaaaggaggagagaaagaacccacgc

SEQ ID NO: 24141 - RNA, 68 nt, Homo sapiens
cgcacgggcgccacgcgcggcgcacacgggcgcgggccggcgccgcgaggccgcggccaggccgagcc

SEQ ID NO: 24142 - RNA, 70 nt, Homo sapiens
cgccagcacaccccagcacgacccgagagcacagaggggcaaggcgaaaagacacgagacacccaccacc

SEQ ID NO: 24143 - RNA, 75 nt, Homo sapiens
acgaacgcacggacaacacggcaaccaacccgcagaagaccagagagagaacccccggaagacacggggaaaaga

SEQ ID NO: 24144 - RNA, 79 nt, Homo sapiens
cgaaacaggagacggggagggcagcgcaagccacaggaacgagccacgagaagccccaacaaaacaagacccacagaga

SEQ ID NO: 24145 - RNA, 73 nt, Homo sapiens
acggcaggaaaggaggccaggacggagagggagaagggaagacacaggaagcgccgaggaaggaaaccagccc

SEQ ID NO: 24146 - RNA, 74 nt, Homo sapiens
cagagcccagggcaggacaccgacaggaacagggaccacgggggggggccgcacagagccagagagcacgacca

SEQ ID NO: 24147 - RNA, 57 nt, Homo sapiens
agccaagcaggaccacccaccagccaccagccagccggcccggccggacgaaagaag

SEQ ID NO: 24148 - RNA, 73 nt, Homo sapiens
aagcgcccgccgaaaaagagaaggcaccgcaggcagcagaagaccggaggaccggggcgagggaccgagaaga

SEQ ID NO: 24149 - RNA, 83 nt, Homo sapiens
ggcgggagcgcgagggaggcacgagaagcccggcgacggaggaacgcaggcgcgccaggaagggggaaggacacagaagcaag

SEQ ID NO: 24150 - RNA, 77 nt, Homo sapiens
accgccagagaacgaccgaagacaccgaccggcacagccagagacacggaaaccccacccccggcaggcaggagggg

SEQ ID NO: 24151 - RNA, 55 nt, Homo sapiens
gaggaggccccccagccacgggaacaacggccgagcgaccaggagaggagccccc

SEQ ID NO: 24152 - RNA, 45 nt, Homo sapiens
cacgacccccaaccaggcaaggaccgcaagcgcaggaccgagccc

SEQ ID NO: 24153 - RNA, 53 nt, Homo sapiens
gaagagaggagggagaacacagaaaccggccccagggcaaggccagagaaggc

SEQ ID NO: 24154 - RNA, 83 nt, Homo sapiens
agccagcgcgccgcagccccccaagcggccgcgagaagcagcgggggggcaggcgacgaaggagaaagccaggaaggcgaagg

SEQ ID NO: 24155 - RNA, 33 nt, Homo sapiens
cggaggagcggcgaggcccacagccggcagcac

SEQ ID NO: 24156 - RNA, 83 nt, Homo sapiens
cacggcacaggaagaacccggggcgaggaccaggcaacccacagcaaggcacgccggccagcggggaagcgcaggagcggcgg

SEQ ID NO: 24157 - RNA, 81 nt, Homo sapiens
cgaaggcgaggagacggagcacggcccccgaggacggaggcacagcgcagcgacgagaggggccccgggaccaaggacacg

SEQ ID NO: 24158 - RNA, 73 nt, Homo sapiens
aagaaaagaacccagacaagaggcaccacagacaaagaacgcaaacccaagcggcaacacggcggggcacgca

SEQ ID NO: 24159 - RNA, 78 nt, Homo sapiens
cgagccgagagccgccaagccggggacaagcccagaaggagagagccaaacaacaacaggaggaaacgggcgggccac

SEQ ID NO: 24160 - RNA, 57 nt, Homo sapiens
caaaccgcaccgaggcccaagaaggggccaggcgcggggaggagaaggaacagaaga

SEQ ID NO: 24161 - RNA, 78 nt, Homo sapiens
gagggagaccacagaggggccggcccaaaagccccaggagaccagccacaacggggcgacacaggacccggaggacga

SEQ ID NO: 24162 - RNA, 73 nt, Homo sapiens
gaggcgcgcaggagccaaggaacagagacgccaagcccgggcccggaggcacgagacaccagaagaaagggac

SEQ ID NO: 24163 - RNA, 101 nt, Homo sapiens
gcgggggaacgcggagcggacggacgacaacggggccggaccgcgcgcgcaggagcaggcggaccgggaagaccggggaacaaaggcaccggaggcccacc

SEQ ID NO: 24164 - RNA, 87 nt, Homo sapiens
cgcggacccgcacccgcaccccgaggagccgaggagcgagcaccccaagacggcacccgggcccgaggcagaccacaccggaagggg

SEQ ID NO: 24165 - RNA, 72 nt, Homo sapiens
cccccccccagaaccccgacaccaaccgggaaagaaaagcggacaacgacacagagcgcccacacagccacc

SEQ ID NO: 24166 - RNA, 80 nt, Homo sapiens
ggaacagaaacaagagaggaacggagcaagaagcgacacaaggagaaaaggagaagagaaaagggaaggcacggaggaag

SEQ ID NO: 24167 - RNA, 72 nt, Homo sapiens
acacacgaggcgcaccagagaccggacccgccagaccagaacacacaagaaccgggagaacgaacaaaccaa

SEQ ID NO: 24168 - RNA, 76 nt, Homo sapiens
ccgaagacaagacggacaaggcacaaggaagccacgaggagcaggagaaccagcgcgcgacgcaagcccgcccacc

SEQ ID NO: 24169 - RNA, 74 nt, Homo sapiens
ggaaaccccagagaaaaagcgggacaaaccagagcaccaagggaaaggaaagccagaggaccagcagaacgcaa

SEQ ID NO: 24170 - RNA, 51 nt, Homo sapiens
gcaccacggggacgcaaaggcgaccggcccgaggaccgccgcacgaccaaa

SEQ ID NO: 24171 - RNA, 81 nt, Homo sapiens
acccgcgccgggcaccgaggaccagccaagacaggcaagacccacaaaccaccaccaacacagaaagccagaacggccgag

SEQ ID NO: 24172 - RNA, 41 nt, Homo sapiens
gagaagcacgaaaaaggacacgggaggagagaaagaaccca

SEQ ID NO: 24173 - RNA, 79 nt, Homo sapiens
ggccccgaagagagcccggaaccaccggccgcagccgcagaagcagcgacacaggagagaacgagcgggagagcacgac

SEQ ID NO: 24174 - RNA, 57 nt, Homo sapiens
gcgccggccccaacacggaccggggggacgggcacccgcggcgcccccccccgcccg

SEQ ID NO: 24175 - RNA, 74 nt, Homo sapiens
gccgaccagccgcggagccgggggcaggagagagcaaacggagcgagcacagacagccccgcggcgcagccccg

SEQ ID NO: 24176 - RNA, 70 nt, Homo sapiens
agcacaaagacacgagaagggaccgcgaccgacccaggaagccacccgcagaggggcaaggagaaagggc

SEQ ID NO: 24177 - RNA, 60 nt, Homo sapiens
gccgcacggacaaccggcaccagcacaacgccaccagggggggcaccccccagaagaaac

SEQ ID NO: 24178 - RNA, 70 nt, Homo sapiens
cccaggccagaccggagcagcggggacagcggaggcacccaccacgggccaggcgggccagaggcaagcc

SEQ ID NO: 24179 - RNA, 72 nt, Homo sapiens
aggcaaaggccaagaagggggcagacaggaaaaaaaggaacggaaccgaacagaagaaagagaagaccccaa

SEQ ID NO: 24180 - RNA, 78 nt, Homo sapiens
ggaccggcccacgcccacaaggaccagcaaacccacaaggggcaccgggcgagaacgcggacaagcaaacaaagagga

SEQ ID NO: 24181 - RNA, 68 nt, Homo sapiens
agggagaacacagaaaccggccccagaacaaaccaggggagggaaacgagaaaaacgacgccagcggc

SEQ ID NO: 24182 - RNA, 74 nt, Homo sapiens
ccgccaaaggggccggcgaagaaagggacacagccaagaccacccgccaccgcaacagcggcccagggcaggca

SEQ ID NO: 24183 - RNA, 59 nt, Homo sapiens
gcgcagcaaagaagagccacgcaggccaggaggccggacggggcaaccgcaaggagcgg

SEQ ID NO: 24184 - RNA, 94 nt, Homo sapiens
gacgccgccacagaggcggacaggaccccccgagcagaagacaagaagaccgacgccacacgcccacggcccccagggacaggcaagacacacc

SEQ ID NO: 24185 - RNA, 69 nt, Homo sapiens
gcggaaacgaccggcagggagggaaggcaagagccaacccaaaaccaaacaggcggcacccagaagcca

SEQ ID NO: 24186 - RNA, 90 nt, Homo sapiens
cgccgcgcgcgggagcccagggagcgccgcgcgaccaggaggcggcggcgccgccggcggacacaaccagagggaagcacgcccgggcac

SEQ ID NO: 24187 - RNA, 76 nt, Homo sapiens
aaaacccgaagcggaaaggggccaaggcagcgcagagaggccacggaagcacagccaaggaagacccccccgaccc

SEQ ID NO: 24188 - RNA, 73 nt, Homo sapiens
aaacaagcggggagcggcccccaaggaagaaccgaggggagaaaagaccccaaggccccacccagaccaaagg

SEQ ID NO: 24189 - RNA, 56 nt, Homo sapiens
cggaaagcccacagcagcagacgccaggaggggcggccccgcagccgcggccccca

SEQ ID NO: 24190 - RNA, 71 nt, Homo sapiens
aaaacgcggaaggacacgccaaaccgcaaacaagaacaaggccagaggcaagaagaagagcaccagagggc

SEQ ID NO: 24191 - RNA, 77 nt, Homo sapiens
gggcaccagcccccccacaccgaccaacgggaacccccaaagaaggaggagacgagcaaggcggagaacggaaaagc

SEQ ID NO: 24192 - RNA, 80 nt, Homo sapiens
agacccggggacccccgacgccaggcagcgcccccaaacgcggagcgggacccggggcaccagaggaccgagagagaaaa

SEQ ID NO: 24193 - RNA, 66 nt, Homo sapiens
agaggaacggggcaacgcgagcagaacagcccagccagagagggaaagcccgccccaacaccccag

SEQ ID NO: 24194 - RNA, 75 nt, Homo sapiens
caagacaagggccaacgcggcaccggccccgcccgccaggccacgaacgacgcacggaggccacaacaccacacc

SEQ ID NO: 24195 - RNA, 82 nt, Homo sapiens
gacaggacaacaccacagcccaccgggacaccgacccaagcccagcagaagccaacagacggggccgcaaccagccacccgc

SEQ ID NO: 24196 - RNA, 83 nt, Homo sapiens
caaccgcaaccagacgccagcgggacgaggaccgagaccgcggccgggaccgagggacagcccagagcaagcacacggaggcc

SEQ ID NO: 24197 - RNA, 69 nt, Homo sapiens
gcacaacaacaggaacccagacagcgcggcgaacgcaagcagacggaagaagacgaagaaaacccgaag

SEQ ID NO: 24198 - RNA, 75 nt, Homo sapiens
aaccccaagaggaagacaaacaaccagcccaggcgcagacaaaacgaagcgaaaccccgaaaagagcaccagggg

SEQ ID NO: 24199 - RNA, 73 nt, Homo sapiens
agaggaagcaacacgacaaagccaaccgacccaagcagcaaaggaaggaaaggccaagaggagccaccgcgcc

SEQ ID NO: 24200 - RNA, 60 nt, Homo sapiens
gggccacccaggacaggggcacccagcccagagcagccagacccagaggagccgaggagc

SEQ ID NO: 24201 - RNA, 73 nt, Homo sapiens
cggaggaggggccagcgccagacggcggccacaaccaccccacagggaaccaagaccaggacaaagaagaccc

SEQ ID NO: 24202 - RNA, 87 nt, Homo sapiens
gaaacaccaggcgcggcggcccagccccgacacaggaagacagagagcaagaccccagcccaaccgaggcggcaaggacagcccggg

SEQ ID NO: 24203 - RNA, 84 nt, Homo sapiens
ccggcaggaaggggaccgggcggcggagcggcggaagaagggaccaagaaaggcccagggaccaaagcccggacaaggcccgag

SEQ ID NO: 24204 - RNA, 85 nt, Homo sapiens
acgccccccagaaaaacagagcagccggccgcccacaacaccaaggacgcacccccgggcgcgccggacaggccgccgcggcggg

SEQ ID NO: 24205 - RNA, 37 nt, Homo sapiens
aaagcgagcgcaaggaggcagacagaaggacagagaa

SEQ ID NO: 24206 - RNA, 74 nt, Homo sapiens
gggagaagcaaagcaaaccaaaacaaccgccagaagaaagaaaaaaagaccgagggcaaaagggaccgaaacaa

SEQ ID NO: 24207 - RNA, 73 nt, Homo sapiens
gaaaaagggggaacccgccccacgcgagacacaaggcaggacaggcagcgagagccagacaagccagacacca

SEQ ID NO: 24208 - RNA, 78 nt, Homo sapiens
gggacacgcgggggcggcacccggcaaaggaaggggggaaagggaagaagacagcggcaccgaacaagacaaggcaac

SEQ ID NO: 24209 - RNA, 83 nt, Homo sapiens
gaccagcaaggcggcagagcaaggggcacgcagaaggaccggccacgggcgacggccggggacgccggagagcccacaaggag

SEQ ID NO: 24210 - RNA, 58 nt, Homo sapiens
cccacagcccccaccaacacaggaagaaaggaaggaggagaaggaagccacgaccccc

SEQ ID NO: 24211 - RNA, 85 nt, Homo sapiens
cgcggaccggcgccccggcgcgaagaggcggaccggacggccgaggcagcaccgggaccggaggcccagagcgacggacggagaa

SEQ ID NO: 24212 - RNA, 68 nt, Homo sapiens
gaacaacgggcacccacaacagaagacagccggcaaccaagaagaaaagagggcaggggcgccaaaag

SEQ ID NO: 24213 - RNA, 82 nt, Homo sapiens
ccggacagcacagcacacgacacccccgggaccgcggagagaagcagcggacagcagagaggccagcccaccagggcaaggg

SEQ ID NO: 24214 - RNA, 55 nt, Homo sapiens
cgacaacaaaaccacagagaggccagcgcccaaagcgccgcaggccacacgccgc

SEQ ID NO: 24215 - RNA, 57 nt, Homo sapiens
ccccagagacaacccagaccagcccgccgcagcaagagagagcaaggagcaggcgca

SEQ ID NO: 24216 - RNA, 62 nt, Homo sapiens
cagcccagcaccgacagccgacgcgcagaagcagagccaccgggggcgagcaacggcccaac

SEQ ID NO: 24217 - RNA, 68 nt, Homo sapiens
ccccaacagcccaccccacaaccggcagccacagaaggcggcacacagcagagcccaggcgcaggaaa

SEQ ID NO: 24218 - RNA, 77 nt, Homo sapiens
gagaaaaagaagaagcagagagaaaacaagcaagagcggaggcaagaaggcgcggaggaccaaggaaacacacagaa

SEQ ID NO: 24219 - RNA, 73 nt, Homo sapiens
aagacaaccccaccagcaccacaggggacccagagacagggcggccgcgccccggagaaccccaaccggaaag

SEQ ID NO: 24220 - RNA, 74 nt, Homo sapiens
gcccccggggcaaacccgagccagccggccaagaacaagaaccccgccaccgcggagaagcggcccaagcggag

SEQ ID NO: 24221 - RNA, 78 nt, Homo sapiens
aggacggcgagaaggcggcgcgcgaggcaagcgcgcgccgaggagaacagaagcggagaacacaaagccacaagccaa

SEQ ID NO: 24222 - RNA, 62 nt, Homo sapiens
ggcacgccggcccgcagcgggagggacaggagaacaggcacgaccccaccggcaccaccacg

SEQ ID NO: 24223 - RNA, 78 nt, Homo sapiens
ccggcaaaagccccgcccagaggccaacgcgcggcggcggggagacgcaggcgccaggcaacagcagcgcaggagaag

SEQ ID NO: 24224 - RNA, 78 nt, Homo sapiens
ccgcccaagagagcaagaccgggcccacgagagaccagaccggaagaagcagggaaagcagaaaaaaggaccagacca

SEQ ID NO: 24225 - RNA, 81 nt, Homo sapiens
cccgagcagaggaagagcaggggcacagagagaggagagagaccagagcgccaccccaagcaccggcacagcaaaagaagg

SEQ ID NO: 24226 - RNA, 76 nt, Homo sapiens
aaagccaagaggaggacagcgcacacagcaagcacgagacgagaaaacagcgagcccggacagaagcgaaaaacag

SEQ ID NO: 24227 - RNA, 74 nt, Homo sapiens
cacccccggagccgaggccaggagggcgcgaaaaggggaacgaagcgcggaagcgggcaagccacccacaagaa

SEQ ID NO: 24228 - RNA, 80 nt, Homo sapiens
ccgggccggccccgccgcggcccgcgcccggccccgcgcgccggcgcaccagagcgacagacagaacgccggaggcgagg

SEQ ID NO: 24229 - RNA, 72 nt, Homo sapiens
cacccccacaggccccaggaaccacagcaaccccggggaagcgggacagaagacacgaaagaaacagaaaac

SEQ ID NO: 24230 - RNA, 42 nt, Homo sapiens
gcccagaaagccgggacaaagggccagcgggacggcaccgcc

SEQ ID NO: 24231 - RNA, 66 nt, Homo sapiens
aggcagacgaagggaaagcccagaacaaagacagcccaacaaggcgggacgacaacaccacagaca

SEQ ID NO: 24232 - RNA, 69 nt, Homo sapiens
acagagaggagggagaacaagcaacggcggggacagagagaggcagaagaaaaagcacccccaagcgag

SEQ ID NO: 24233 - RNA, 84 nt, Homo sapiens
gaccccgcgcaagggggacaggcggacgaaagaggacacgggaagaacaaagacagaccgcacacaggagcgcacccagaaaac

SEQ ID NO: 24234 - RNA, 74 nt, Homo sapiens
ccagaacgccgccaccaaggaagaagagcgccaaaagacaggaccaagggcggagaacggaaaagcaccaggaa

SEQ ID NO: 24235 - RNA, 87 nt, Homo sapiens
cccccaccgcgggggcgcagagcgggcaagagagcgccagaaagagcaaaacacagagacgcggccaacagaaggaaccaaggacag

SEQ ID NO: 24236 - RNA, 35 nt, Homo sapiens
caaggaaaagggcgcgcgcccacccgggcagaaaa

SEQ ID NO: 24237 - RNA, 74 nt, Homo sapiens
gcacggggaaacgaccgccccaaaacgaaaccaaagacaagccccagacgaaagcgagggagccaagaggaacc

SEQ ID NO: 24238 - RNA, 82 nt, Homo sapiens
agaagagacccaaggacaacgcaagggggaagagagagaaacaaaagcgccagagccaagaacggaaaggcccgagccaaaa

SEQ ID NO: 24239 - RNA, 87 nt, Homo sapiens
agcagcgagcgagccagcagcgggaccggacgaggaggcagcacgagcagcgagaaggcacgcagagcaaccacgaacgagccgcgc

SEQ ID NO: 24240 - RNA, 41 nt, Homo sapiens
cgagcggagcggaagcggacgagaaaaagccccggggcggg

SEQ ID NO: 24241 - RNA, 74 nt, Homo sapiens
gcccgaacacccaagcccagaaggacaaacggaggagcaagcacagacgggacggaaaaggcgcacacgacccg

SEQ ID NO: 24242 - RNA, 64 nt, Homo sapiens
gccgaagcacggaggacccggcacgaggggcacccagccggccggcgcacaggagcgagagacc

SEQ ID NO: 24243 - RNA, 70 nt, Homo sapiens
gcagaacaaagccaaaggcccgacaaggagacccggaaagaaggaagaaaccaaacgaaacacaacgacc

SEQ ID NO: 24244 - RNA, 51 nt, Homo sapiens
cccgccagcaaggcggcgcgcccaggagacaggaagggaaggggcggagac

SEQ ID NO: 24245 - RNA, 61 nt, Homo sapiens
agaaaagccaaagacaccgaaagcaagaacacgggaggacgcagaggcgcagccgagccaa

SEQ ID NO: 24246 - RNA, 78 nt, Homo sapiens
aaaaaggggaaggggccgacaaaagcgcagcaagacggccgcgcggcccgcaggagacaggggccaggccaggggcag

SEQ ID NO: 24247 - RNA, 82 nt, Homo sapiens
agaaccgcggcagaagccgagcaacaccccggccaccgacccacaaggccaagcaaacacagaaagggaagaaacaagaaaa

SEQ ID NO: 24248 - RNA, 40 nt, Homo sapiens
cagggccccgggccccggaaggccgacagacagagccgga

SEQ ID NO: 24249 - RNA, 76 nt, Homo sapiens
gcgaaacgcagcagagcgaagcgaggacaaggccacccaggaggaccagagcagaagacagcccaacagcccaccg

SEQ ID NO: 24250 - RNA, 68 nt, Homo sapiens
gcggagcgaagcaggcagcgggagcgaggaggccacaacacagcagcccccaggagagcaggaaaagc

SEQ ID NO: 24251 - RNA, 82 nt, Homo sapiens
gggcaccgcggacggggccgcccagggcgccggccgagcccgggaaaacgacagcagcagcagggccggaagacgccaccgc

SEQ ID NO: 24252 - RNA, 81 nt, Homo sapiens
gcggaaggcagcgcccagcagcgcaggagccccccaacagagcgagagaggcacggagcgcagcaggaccagcgagagccc

SEQ ID NO: 24253 - RNA, 67 nt, Homo sapiens
caaggcgagaggaggccgcggagaaccgaggcagcagcggggggccagggcgcaaaaccgccaaagg

SEQ ID NO: 24254 - RNA, 55 nt, Homo sapiens
ccccgggcgggaagacagaaccagggccgggggccagagaaccgcagccagaagc

SEQ ID NO: 24255 - RNA, 54 nt, Homo sapiens
gggggaccgaccgcaacagaacggacccgacaggagcgcgaaaggggaacccac

SEQ ID NO: 24256 - RNA, 68 nt, Homo sapiens
gaccgaaaaggaagcggacagcagaccacagcccggcaggcccaaaaacccaaagggacagaagcacc

SEQ ID NO: 24257 - RNA, 81 nt, Homo sapiens
aggggagagccgccggccgcgcccaggaggagcaccggaaggggacccgaaagaaacgagccccggcacaaagcagaccgc

SEQ ID NO: 24258 - RNA, 81 nt, Homo sapiens
gcgccgcgcccggaccccaggccaagacaaggggcgcagagcggggggacaggcgcaagaccggagaagcaggagcggaac

SEQ ID NO: 24259 - RNA, 70 nt, Homo sapiens
aggaccccgccagcccaagaagcgaggacagcagccacccacgcacccgcggccaaaacacgacaggggc

SEQ ID NO: 24260 - RNA, 67 nt, Homo sapiens
ggcacgaacgcacgagaaaagggcgccgcagagaaaggccacacccagcaagggacaaggaccggag

SEQ ID NO: 24261 - RNA, 81 nt, Homo sapiens
agggagaccacagcaagacgccaggacccacggaagccagaaagaaacggccagccccggaggaggaagcggacacagcaa

SEQ ID NO: 24262 - RNA, 66 nt, Homo sapiens
gccacaacccgggcaagggagcacacagccgcggcagggaaagcgccacgcccacaaagcacaacc

SEQ ID NO: 24263 - RNA, 37 nt, Homo sapiens
cgggaaccacacaacaggaacggaaaacagccccaaa

SEQ ID NO: 24264 - RNA, 87 nt, Homo sapiens
cggccacggaggcaccagaagaagcaccagcggaggagggaggaagcgaaggcgcggggagagcggagaggacaggaggagcaacgc

SEQ ID NO: 24265 - RNA, 77 nt, Homo sapiens
ccagcgccaggcaacacagaaagaagacccgggacaacaggagaagcggaaggagaccacccaccaggcgcaggccc

SEQ ID NO: 24266 - RNA, 72 nt, Homo sapiens
cgggaaccaggacgcacagcccaagaagaaggggcagaccgaaaagggcggaaaaggaccaaggcccgcaaa

SEQ ID NO: 24267 - RNA, 75 nt, Homo sapiens
gagaagaagggaaaaacggagcaacgcaaggcaggcaacaagggaggaaaaagcagcgaaacagacaacccccca

SEQ ID NO: 24268 - RNA, 68 nt, Homo sapiens
agagcgccgagccagacccagccccacccggacgccagcacgaaccccccagaacggaagggaacccc

SEQ ID NO: 24269 - RNA, 84 nt, Homo sapiens
cggaaccagcacacccccaaacgcggcccgcgggcccacgccagcaccagcgcaggcggcggagaaagagcccagcccgacaaa

SEQ ID NO: 24270 - RNA, 81 nt, Homo sapiens
accaggccggggagcggcacggcgaggcccgcaagcgcaaggggaaaaggaacaaccgaaggagaaggacaccaagccgaa

SEQ ID NO: 24271 - RNA, 78 nt, Homo sapiens
cgagaaagcaagaaccagagaaacacacgccgaggccaaagaaaggagcaccaccccagcaaaccgcgggagccccag

SEQ ID NO: 24272 - RNA, 76 nt, Homo sapiens
acagaagcgagaggaaccagaaaaagggagcacaaggaagacacccacacagccgacagagacagagcagacccag

SEQ ID NO: 24273 - RNA, 60 nt, Homo sapiens
cagcgaggcaagggggagacaccccgcgcgacagaagggcgcgcgggggcacagcccagg

SEQ ID NO: 24274 - RNA, 82 nt, Homo sapiens
ggcagggcaccgcgcgaagcggccaaagccgcccagacggccaccggcgggaggaacaaaaggggcgagacgggacaccccc

SEQ ID NO: 24275 - RNA, 55 nt, Homo sapiens
ggaaaaccccagcgaaacaccaagaggaaaccggaaggcaaaaagccaaaaggac

SEQ ID NO: 24276 - RNA, 72 nt, Homo sapiens
agaaagaacagaacagcgaaacaagagggagccccaagagcacagccaaaccaccagagcgaagggaggaca

SEQ ID NO: 24277 - RNA, 40 nt, Homo sapiens
cagagccaagacggagaaacaaaggagccgcggcgcccag

SEQ ID NO: 24278 - RNA, 68 nt, Homo sapiens
cgcgcacagaaacgcgggcgggcgcacagcgcccagcggcgagcaaggcaaccagcaagaacaggcca

SEQ ID NO: 24279 - RNA, 82 nt, Homo sapiens
gggaagacaggccagcgcggccaagacccaccgcaaggggagccgccaccaaaagcagacggaaaacccacggggaagacca

SEQ ID NO: 24280 - RNA, 76 nt, Homo sapiens
ggaagaccaagacacgagagcacggaggaggaccaggccaaggggaacaaggaccaaaccgcccggcgagcaagcc

SEQ ID NO: 24281 - RNA, 66 nt, Homo sapiens
agaccacggacagcaggcccacacccaggaaagagggacacacaggaagacgaacacggaacgggc

SEQ ID NO: 24282 - RNA, 67 nt, Homo sapiens
gcggccgggcacgccggaaaaggccgaagggcacgaaagaggcaagagaggggagaaagaccccacc

SEQ ID NO: 24283 - RNA, 108 nt, Homo sapiens
cgggcggccagcggcggccccggggcgcagccagggaccgccccccgccgacagggaggcacccaccaggggccaggccggaggcagagggcaagccgcgggagcgac

SEQ ID NO: 24284 - RNA, 81 nt, Homo sapiens
cagagcccgccgccgaccgccgcccgccacacccgccgccaggcggcgggggcccgggcagggcccgagccccggaggagg

SEQ ID NO: 24285 - RNA, 48 nt, Homo sapiens
cgacgaggggggcggggccggcagaccacaggaagaggaggcccgagg

SEQ ID NO: 24286 - RNA, 72 nt, Homo sapiens
ggaacaaaccaaaagcaaccggcaaacacggaagccaaggacagccaagcagagaggagaaaaacagaacac

SEQ ID NO: 24287 - RNA, 82 nt, Homo sapiens
ccgaggagcaaaagcgaaggccgcggggaaggggcccgggcagccggcacccgcacaacccagggggccgaacccagaccaa

SEQ ID NO: 24288 - RNA, 48 nt, Homo sapiens
gccagacgcacccacgagcagagcgagcaccagggaaacaacagccaa

SEQ ID NO: 24289 - RNA, 83 nt, Homo sapiens
aggcaaaccaagaagaagcaagcaggccggccaaaggacaaaagggaacccaggaccgacccaaccacgcacgggacagagag

SEQ ID NO: 24290 - RNA, 72 nt, Homo sapiens
gagcaaaccgcggcccgaagagcaaaggagcagcaaaagggggacaagccaaaggaggggagaaaggggaga

SEQ ID NO: 24291 - RNA, 73 nt, Homo sapiens
accaccaggagcagagcggaggcaaccagccaaaacaacggaaaacagcgacagaaagagcgggcgagaaagc

SEQ ID NO: 24292 - RNA, 60 nt, Homo sapiens
cggacccggaccgggggagccaaaaaccgaacacccggaaggggacaagggacggcgaac

SEQ ID NO: 24293 - RNA, 71 nt, Homo sapiens
caccggccgggagggcccagggcggggcccgagggagacgccagggaccaggcccagacaacccaccccag

SEQ ID NO: 24294 - RNA, 72 nt, Homo sapiens
acgggacacaaccccgcggaccggccacaggcacgggcagggggaaagacagagaagcgaagacagagacgg

SEQ ID NO: 24295 - RNA, 71 nt, Homo sapiens
ccaagaaggaacccagaagaggacgacacgcagccaaaaaccaggccggggaagccaagggaggccaagca

SEQ ID NO: 24296 - RNA, 82 nt, Homo sapiens
gaggcccacgcagcccacagacagccccagccgggcccagggcgcgcaaacgaaggaaaaggaaaaccaacagcgccacaaa

SEQ ID NO: 24297 - RNA, 73 nt, Homo sapiens
caggaaggaaagcgaaagaagcagggaacgacaagacacagagaagaagggaaagaacccaagggagaacgaa

SEQ ID NO: 24298 - RNA, 80 nt, Homo sapiens
cgcagcaacaagggcccccgacgggcgcggccgaggcaagaaccgggcaccgcgcgccgcgcccccccaccagccccgcc

SEQ ID NO: 24299 - RNA, 58 nt, Homo sapiens
caaaccacaaaaacaaaacaagcgcccaaaacgcggacaccaggggggaaaaaccaca

SEQ ID NO: 24300 - RNA, 68 nt, Homo sapiens
cccgggcggccgcaccgccagcccagaaaaaccgacacaaggcggcccaggaagcgaaaaggagaaag

SEQ ID NO: 24301 - RNA, 72 nt, Homo sapiens
cccaacagccgacacggagagacaagcgaaaggaggggagccaggaagaccggagcagacacacaaaggacc

SEQ ID NO: 24302 - RNA, 64 nt, Homo sapiens
agccagaggaagccagcccacgcgccgcccagggagaagccccgaaccaagcaaaagaagagag

SEQ ID NO: 24303 - RNA, 78 nt, Homo sapiens
cgcccgccggcaaagcccagcagcacaagcaccacggccggcacagaggaggagaagccacaggggccacccagaggg

SEQ ID NO: 24304 - RNA, 76 nt, Homo sapiens
aacaccaaaaacaaaacgaaccaggacggcaagagccgacgaagaggcagagaccccggagcaacgaccccgcaaa

SEQ ID NO: 24305 - RNA, 80 nt, Homo sapiens
aacgagccagccgaacagagaagagggacgcacgaggggaagcgagagaaaaacaagcgccacacggcagaccagaggga

SEQ ID NO: 24306 - RNA, 71 nt, Homo sapiens
gcggccaggccaaccgaagacccgaacaccgccgcggacacaccccacacacgcaagaacagaaggaccga

SEQ ID NO: 24307 - RNA, 76 nt, Homo sapiens
accccggaagggcggacaccccacacgccgccacccccaccggagcggagacggagcggcggcaagcagcgagaga

SEQ ID NO: 24308 - RNA, 76 nt, Homo sapiens
gcggcccgggagcggaggaaccgcgcgcagagacgggcgaacaacgaaccgccagggggaccgcgcacaggcgcac

SEQ ID NO: 24309 - RNA, 78 nt, Homo sapiens
ggaccaagacgagcccagcgcaaccccaagcgcccaaagggcagagaaagagcgagagggaaaggaagagaaccaaca

SEQ ID NO: 24310 - RNA, 53 nt, Homo sapiens
gagggccgccgccgccgacagaacaccgaggagcaacacccccagggagccca

SEQ ID NO: 24311 - RNA, 83 nt, Homo sapiens
cgacaagccgcggcagccgcggaccaccgccgccagggagggagccacaccaaagccggacccccccagccggaccggaccaa

SEQ ID NO: 24312 - RNA, 89 nt, Homo sapiens
acagcagccagccggcccgaggacaccgacaccagcagcgggcgacgcacgaggcacacaggaaggaggggagcagggacgcgcggcgg

SEQ ID NO: 24313 - RNA, 77 nt, Homo sapiens
ccacccccgaggaccacgaccccccacaaagccaggaaagccaggcccggcccggcggaaaaggagaggcagaccca

SEQ ID NO: 24314 - RNA, 77 nt, Homo sapiens
ggccccggacgccggagaggcaccggaccgggaaccaccgggcggaaaaaaccaggccagccaggcacggggccagc

SEQ ID NO: 24315 - RNA, 56 nt, Homo sapiens
ccggacaggacagagaaccaggcggaaaccccacaagcggccaccaccaaccggaa

SEQ ID NO: 24316 - RNA, 71 nt, Homo sapiens
aacaagagcccgggccagcacacaaggaacggaaaacagccccaaagcagcagaccgaagaaagaagaccc

SEQ ID NO: 24317 - RNA, 36 nt, Homo sapiens
caggcgcgccagaccccccaccggcccccagaagcc

SEQ ID NO: 24318 - RNA, 58 nt, Homo sapiens
agaagcggaaagcagaagcgcgcagcaacggcggaccaagaacgaaagcagggaggaa

SEQ ID NO: 24319 - RNA, 83 nt, Homo sapiens
ccgggccgaacccggcaccccggagccggggacacgagacacaggcggggccgggacccgcccggaccgggcccgaagcagcc

SEQ ID NO: 24320 - RNA, 70 nt, Homo sapiens
cggaagcagaggaagagaaagaaccacaccaagagacccaagaggacgaaacagagcaaaacggagggaa

SEQ ID NO: 24321 - RNA, 78 nt, Homo sapiens
gaaaccagggaaaaaggaaaaagagaaaagaaagaaccagacaaagacaaggaacaagagacggggcgccagggccag

SEQ ID NO: 24322 - RNA, 81 nt, Homo sapiens
accgggccggggccccgcagaccgccggaccccgaaaaaacgaacgggaggcagccaacggacgggagaggcgaggaagac

SEQ ID NO: 24323 - RNA, 73 nt, Homo sapiens
aagggccggcgccagcgagaagccgagagagcccccaacccgcgcccgaaagccgaccagaacacacaaaaac

SEQ ID NO: 24324 - RNA, 53 nt, Homo sapiens
cacggaccaagaaggagggagcggcggcagcagacaccggagaaggaccaaga

SEQ ID NO: 24325 - RNA, 78 nt, Homo sapiens
gggaaagaggcggagcgcgggacagccgcgacacacagcgacaaaagaagcgaagccaggaacaagaggcggaagaca

SEQ ID NO: 24326 - RNA, 70 nt, Homo sapiens
acaggaccacggaaaacagggaagaccccggcgcccggcaaacacaccccgggaaacaaagagaaccggg

SEQ ID NO: 24327 - RNA, 78 nt, Homo sapiens
cagccagcccgaagaaaagggaaaacgcgcgggccaagggcaaagagagaacgcagcgacccggagcacgagggacca

SEQ ID NO: 24328 - RNA, 77 nt, Homo sapiens
ccacaccgccccaaacaaccccaagaggcgaaagcgcgccaagagccggacgagccgaggagccagggggccggccc

SEQ ID NO: 24329 - RNA, 74 nt, Homo sapiens
caacacccgggaaaggaagcgcacaggaagccggaaacggcccaaaggagcgaggcggggaagggaggaagagc

SEQ ID NO: 24330 - RNA, 76 nt, Homo sapiens
gcgcacaagaaacccaagcgcgaggcggagccgggagcggaggaggccagcagccaggcagcaggccgcacagccc

SEQ ID NO: 24331 - RNA, 78 nt, Homo sapiens
gacgccggagaccggcgccggcgacgcccgcgaggagcaaccggacgaccaaggggacgaagaaaacaaagccagaag

SEQ ID NO: 24332 - RNA, 78 nt, Homo sapiens
gaaccaggcagacaacgagggcggacgccacgcacgggccgccccgggcaccagaacgccagacggagccacgggccc

SEQ ID NO: 24333 - RNA, 73 nt, Homo sapiens
cgcacaaccagaggaaaaaagaaagagaaaaggaaagcagaagacaagcagccaacggcagacaccgagagca

SEQ ID NO: 24334 - RNA, 55 nt, Homo sapiens
gcaccgcagggcccgaaggacaaggaggaaaaagcagcgaaacagacaacccccc

SEQ ID NO: 24335 - RNA, 81 nt, Homo sapiens
ggagcacgccgcggggagcgcgggcgccggggcggagcgcgcagaaaagcacgaaacacaaagcaaaacggagaaggacga

SEQ ID NO: 24336 - RNA, 69 nt, Homo sapiens
aacccgggccaaaccacccccacccagccgcaaaccgaagaccacgggccggggagaaacgaaaccagc

SEQ ID NO: 24337 - RNA, 75 nt, Homo sapiens
gagcggaacagcgccgagaaacaagacccgccagaacccccggcagagcaaacacgcaaaacagagaacgaggaa

SEQ ID NO: 24338 - RNA, 73 nt, Homo sapiens
cagacacaaccaagcaccggagaaaacccacgcaacagaagccaggcaaggaacgcggagaaacaaaaggcag

SEQ ID NO: 24339 - RNA, 82 nt, Homo sapiens
cggacacagggaaaaggagacaaggacggcagcaagggacaacagggggcaacccgggcagggccagacaggccacaagaag

SEQ ID NO: 24340 - RNA, 49 nt, Homo sapiens
aaccacccaggaagaggacaacccagagagcccggccggagagaaggag

SEQ ID NO: 24341 - RNA, 74 nt, Homo sapiens
ggggcacaacgcggccggcgcccgcacccaccgagaaccagccaccgacccgaagagagaagggcacagaccaa

SEQ ID NO: 24342 - RNA, 71 nt, Homo sapiens
caccacccggggcccccccagccgcaccaccaagacaacgggagacgcagcaggcgagagacaagagacac

SEQ ID NO: 24343 - RNA, 80 nt, Homo sapiens
cggcagagcacgagcggaccgcgagagacgagagcacgacacggccgcacgggcccacgccagggaccccgacggagaga

SEQ ID NO: 24344 - RNA, 61 nt, Homo sapiens
cacaaagcacaccgccaaacccaggccagagcacagagacgaggacgcgcacaggaaagga

SEQ ID NO: 24345 - RNA, 82 nt, Homo sapiens
gggaccaggcgaagcggccgagcaggcgagcgaacgacggcccccagaagccgccgaacgccgcacccccggggccgaggag

SEQ ID NO: 24346 - RNA, 83 nt, Homo sapiens
gcgaagcggccccagagggagcccgaaaacacgagaaagccggaagcaccccacgcagaaccggcccacacacgaggaaggcg

SEQ ID NO: 24347 - RNA, 73 nt, Homo sapiens
aagagaggaagcgggggccgagaccacacagcaacccccagccacaacgcgaaccgggcggacgaaggaggcg

SEQ ID NO: 24348 - RNA, 82 nt, Homo sapiens
acgccgacacgacgccgcgggcaggcgcgcgcacccggcagcgcaccgcaaaggccccagggagccccgcgccaggcaccag

SEQ ID NO: 24349 - RNA, 72 nt, Homo sapiens
cccgacgcgagggcagccccgccagggagaggaagacgaggaagcagaagaacaccaagcccaccaacaagg

SEQ ID NO: 24350 - RNA, 61 nt, Homo sapiens
caggcgagggggaccccgaaaggagagccccggcccggcagggcccggcccgccccccacc

SEQ ID NO: 24351 - RNA, 69 nt, Homo sapiens
cgcacaaaagacaaggaagaggagcgaaaagccgaaaaacaagggacgaacaaaacaccgaggaaggac

SEQ ID NO: 24352 - RNA, 82 nt, Homo sapiens
agagcaccaacacaggcgcgaagaaagaagaacggggcaggaaccaggaccgaacccgccccccaggaagcccggggcggcg

SEQ ID NO: 24353 - RNA, 75 nt, Homo sapiens
ccagaagcgcaccaagaaacaagaaccaacaccaggaacgccccacccaagaagagcgaggcgggacaaacaagg

SEQ ID NO: 24354 - RNA, 75 nt, Homo sapiens
caaagacaacggacaaccagaagaggacaccaaccagaagacggagagagcacccgcaaaaggacaggacaagca

SEQ ID NO: 24355 - RNA, 32 nt, Homo sapiens
gccgcgcgaggacgcggcggagagcggccggg

SEQ ID NO: 24356 - RNA, 81 nt, Homo sapiens
caagaaaaacaaagccaaggaaaccccaacacagagccaagcgccaagcagagggcagaccgacggaacccaggccagcca

SEQ ID NO: 24357 - RNA, 62 nt, Homo sapiens
agccacgaaaacaacacacggagagacaagagcaacaacaggaaacgccgaagggaccaggc

SEQ ID NO: 24358 - RNA, 59 nt, Homo sapiens
cgagcccccgccaccgagccaccagaaagaaacagagcccaagaccacaaacaaaaaag

SEQ ID NO: 24359 - RNA, 42 nt, Homo sapiens
acaaccgggcgccgacgagacggacagagcgccgccaccgcc

SEQ ID NO: 24360 - RNA, 82 nt, Homo sapiens
gacgaacaagaaccccaaccggaaaacaagaaggaccaaaaagaccgcagcagaaagagaaggcagaacagaggaagaccag

SEQ ID NO: 24361 - RNA, 76 nt, Homo sapiens
gacacgaggaaggcggcggcgccgcaggaccgcagcacccagaggcaagaacggaagcacgggcggaggaaagcac

SEQ ID NO: 24362 - RNA, 80 nt, Homo sapiens
cgagcaacccccaggagaagagcccaagcagcgccagacaaagagcaagggccgcacagcgaccacaggggaaacggcgc

SEQ ID NO: 24363 - RNA, 68 nt, Homo sapiens
aaagcggacgccggggaggccaaaaagaagcaaacaggggcaggaaaacccaaaacgaaaaacaaagc

SEQ ID NO: 24364 - RNA, 72 nt, Homo sapiens
agaggcgcgcacgagagacaccagcacgcgccaccaccaaccaggccgccaggcacagagaaggcaaacggg

SEQ ID NO: 24365 - RNA, 118 nt, Homo sapiens
ggccgcgcagaggcagcagcagccgcggagcagagccgccggggagggagccagaagcaacgagaccgagacaggggcccggcaccgcgcccgagcccacccacagacagaaggggag

SEQ ID NO: 24366 - RNA, 79 nt, Homo sapiens
ccgcccgccgccggccggcgcgcgccccacagagacgccccacaaccgcccgggcgcggacggggcccggcgaaccccg

SEQ ID NO: 24367 - RNA, 115 nt, Homo sapiens
cggggaggcgcagcccgaaggccccgggcaaagcggacaccgggggcccggcggacaggacccgcggccgagagacgcggaggagcggacgcggaggccgccggggagcggcggc

SEQ ID NO: 24368 - RNA, 76 nt, Homo sapiens
ggcagccaccaaaacagacccgggcagcaccagaacacaaaagaacccgaaacaagagagacccaaaagggccaga

SEQ ID NO: 24369 - RNA, 75 nt, Homo sapiens
aaggacaccaggcagaggcaaggacacgccgggggcccagcacggcaccagggggccgcaaccgccccccagaac

SEQ ID NO: 24370 - RNA, 82 nt, Homo sapiens
cgcagacagcggccaagaagacacaaaggacggaggcacggacccgagccccaaagacagaaaagccccgagacggaagaga

SEQ ID NO: 24371 - RNA, 82 nt, Homo sapiens
ggagggggggaccacgaaaggagcaagagcaagacaccggacaccgagggcccccaaaaggcgaacagaagacaagacgaaa

SEQ ID NO: 24372 - RNA, 48 nt, Homo sapiens
agagcgaaaggaaacagacagccggccaaaagggaccgaacagacgaa

SEQ ID NO: 24373 - RNA, 79 nt, Homo sapiens
ccgccgggagaaggaagaacggcgagaggcggggcaccaggcccagacggcgaacccgagcaagcaaccaccgcccggc

SEQ ID NO: 24374 - RNA, 80 nt, Homo sapiens
ggaaaacccagaaaaccagcaggagaccacagcaagcaaaggaccggaccccagcgaacacgaagagaaaagagacaaaa

SEQ ID NO: 24375 - RNA, 82 nt, Homo sapiens
gacgcccagcccggcgcacggcccaggcgaagccgacgagcccgaacagacgcaccagcgggaggaagagggacggcccagg

SEQ ID NO: 24376 - RNA, 76 nt, Homo sapiens
aaagacagcaggcaaaacaggcgccaggaacggaggggcagccgcacccaagaaggacagaccccggcaagaagca

SEQ ID NO: 24377 - RNA, 44 nt, Homo sapiens
gccaccaggcccgcacggggaccggaacggaccaccagggggcc

SEQ ID NO: 24378 - RNA, 71 nt, Homo sapiens
cgccagaaaaccagagaccggccagaagaaaaggaggcaaggcaaaggcgcagaaccgccaggagacaaac

SEQ ID NO: 24379 - RNA, 73 nt, Homo sapiens
acacccccaggggcagccagaaacagccggcagaccaagcaaccagggaagaccacaacaagcaagcagcagc

SEQ ID NO: 24380 - RNA, 67 nt, Homo sapiens
cacgggagaccaggggcagagaaaccccagaccaggaaacccgggaaggaaccgggagaaggacaga

SEQ ID NO: 24381 - RNA, 75 nt, Homo sapiens
cacggaggagccgcggggcgccgccacggccgcccggaggccccacccacagagaacaggcaacaaaacagccgg

SEQ ID NO: 24382 - RNA, 74 nt, Homo sapiens
ggggcacccaaggaccagccggaagacaacaagggaaaaaagaggggcacggcccgaaacaccagcgccagcag

SEQ ID NO: 24383 - RNA, 50 nt, Homo sapiens
cgcaagaggccagcgaaaaccgaagggagaaaacgggccggaggaaaagg

SEQ ID NO: 24384 - RNA, 82 nt, Homo sapiens
gcaagccaaaaaagcccaggaagaagacgaggaggcgaagagcagggacgccagagcagcccagggccagaacagcacgaca

SEQ ID NO: 24385 - RNA, 66 nt, Homo sapiens
cgggcgcgcccgcagcgcccgccacagacaacgaagagaggaaagaagcggaaaggagggagcaca

SEQ ID NO: 24386 - RNA, 76 nt, Homo sapiens
agcgagcgagggggggcgcgccggaaaccggagcgcgcagcagccaaaccaaacaggaagcacccaccagccaaga

SEQ ID NO: 24387 - RNA, 81 nt, Homo sapiens
ggggcacagcgggaccaggaccgcacaggacaacccaaaaggagacaggagaagaaccaagcgggcaaaggaagcacagag

SEQ ID NO: 24388 - RNA, 80 nt, Homo sapiens
agaagaaccggaggaggaagagcgcacaaccaagagggcaaaaacgaaagcaacggagccagaagaaagcgaagaaggac

SEQ ID NO: 24389 - RNA, 75 nt, Homo sapiens
gggcacaggagggaagagcaaggcgaagaagcggaaaccgcggagcagcgacagcggcggccaagccacggcagc

SEQ ID NO: 24390 - RNA, 57 nt, Homo sapiens
aagacaccggcacgcaacaggagccaaggaccaagagaacgaaccagacacacaaag

SEQ ID NO: 24391 - RNA, 83 nt, Homo sapiens
ccagcgcgagcgaagcggcaccgaggccggggccaacgagccaacgccaggcgccgcccacagagaccgaaggagcagacgag

SEQ ID NO: 24392 - RNA, 83 nt, Homo sapiens
ccaaggagagggcacaccggcacgggggaacgcacaacagccaccgcagcgaacagacccagcacaacaccgcgcccggaaag

SEQ ID NO: 24393 - RNA, 61 nt, Homo sapiens
cggggggacgcgccaggcacagcagcaggggacccccaaggacacagcacgggaacccgaa

SEQ ID NO: 24394 - RNA, 77 nt, Homo sapiens
gaaccggacagaagcgcggcggcgcggcgcccagggagggaaggagcagcgaacggcgacagggccggggggaagga

SEQ ID NO: 24395 - RNA, 78 nt, Homo sapiens
aagacaggccagaaaggaggggccagaagagcaaagaggaaaaaagagaaacagccaaaaagagagcaaagagaacac

SEQ ID NO: 24396 - RNA, 77 nt, Homo sapiens
gcaagcggcgcgagcggcgagcacgagccagggagccgccgggaccggcccgggagacgacaacccaaaccgaaaag

SEQ ID NO: 24397 - RNA, 75 nt, Homo sapiens
aaaccacgcgccacacaaagagccgcgggggcgggacacaaggacaccagcaacacggaggagcacgcccggaaa

SEQ ID NO: 24398 - RNA, 74 nt, Homo sapiens
gggacgcagcggaagaaaagaaagggcggagaacggaaaagcaccaggaagcagagaggaccgcagaagggaag

SEQ ID NO: 24399 - RNA, 75 nt, Homo sapiens
agaacaaaaacccgcaaaggcacagagcaggcacccaaacaggcaaccccaagaaaagggaaagaaggccagaga

SEQ ID NO: 24400 - RNA, 91 nt, Homo sapiens
ccagaagcgggcggcgcgggggagagaccgccgaccaggcacgcccaaccccgcgaaggaaggggacccaagccgccaggacccagggcaa

SEQ ID NO: 24401 - RNA, 75 nt, Homo sapiens
aaaaacggcggaaaaaagcggagaagaggacaaacagagcaacgaacagcaggacggcgggggcagcagacacag

SEQ ID NO: 24402 - RNA, 82 nt, Homo sapiens
agcgcagggagaaggaagaggggaaaaggacggccggagcagcagaacaagagcggagaccaagggagccccgcagcagcag

SEQ ID NO: 24403 - RNA, 80 nt, Homo sapiens
agggaacccgggacaagaacgcagccgccggccgaccaccggaacggacagcccccccagcgggaggccaccgccccacc

SEQ ID NO: 24404 - RNA, 72 nt, Homo sapiens
gaggaccgccaccggcgcgacacggcccgaccccaccgcagcgcccccgacccagagagacggggcgccagg

SEQ ID NO: 24405 - RNA, 68 nt, Homo sapiens
gaagagacgacacaaggagacgaggggaagaggcaaccaagggcagaccgcacaagcagccccggaac

SEQ ID NO: 24406 - RNA, 75 nt, Homo sapiens
accgcagcaccaagcggcccgggaggccaacagacccaacccagaaggcaccaaacggagggggaacaggcggca

SEQ ID NO: 24407 - RNA, 80 nt, Homo sapiens
gccaccggggcagcggaccagcagagaaggagaaaagggcagccggacagccggggaagcagacggcacacgacccggag

SEQ ID NO: 24408 - RNA, 78 nt, Homo sapiens
gggacgcggggggaggacacccaacacacacacagggaccaagaaaggcccagggaccaaagcccggacaaggcccga

SEQ ID NO: 24409 - RNA, 82 nt, Homo sapiens
cagcagcccagacgcggcacagagagggccgggagcgcgcagccaggccgacgcccgccgcggccggggaacaggccacagc

SEQ ID NO: 24410 - RNA, 75 nt, Homo sapiens
ccacagcagggggcagacacacgggggaacaccggacaaccgaagaagcgcggcgacgacagaaccccacgggca

SEQ ID NO: 24411 - RNA, 81 nt, Homo sapiens
cggacccaccacagggccccgccagccccagccccggagaggagcagggaccggaagccagagcacagaagagcccgggcc

SEQ ID NO: 24412 - RNA, 71 nt, Homo sapiens
aacagacaccgagccagcaagcccccaacgacgagaagaggcgaacggaagcaacacccgggaaaagcagc

SEQ ID NO: 24413 - RNA, 72 nt, Homo sapiens
ggcccgggagcgcgagggagcgccaagggcacgggaagaccggaggggacgaagaacgggcaaaaggccaaa

SEQ ID NO: 24414 - RNA, 72 nt, Homo sapiens
gagaggaacggggggagagaacccaaccagggggaaacacagaacgcagggaagaaggagaaagacaaagcc

SEQ ID NO: 24415 - RNA, 69 nt, Homo sapiens
agacggcggggagacacagagggccacccgcaagggcaggagaaagcaacacaccgcaacgaaggccca

SEQ ID NO: 24416 - RNA, 71 nt, Homo sapiens
aaaacgagaaagaagaagaaaacaggaaccgcccacagcaccgcaggcggcagccgggagggcaccacacg

SEQ ID NO: 24417 - RNA, 69 nt, Homo sapiens
gaagaagcacccgagaaaaagagagacaacgagggagggaggcaagcgggaacgaaaccaggaggacgg

SEQ ID NO: 24418 - RNA, 82 nt, Homo sapiens
ccgcccagacggccaccggcgggaggaacaaaagacaggccgcaccaacaagaagggcagagcagcccccgagcgagccacg

SEQ ID NO: 24419 - RNA, 80 nt, Homo sapiens
aggaagagggacggaaccaccagaagccagcccccaggcggaacgcccgccccgcagagaggagccaaggcgagcgcaac

SEQ ID NO: 24420 - RNA, 72 nt, Homo sapiens
cgaccagagccacacaccagagggaccacaccggcgagcacacagagaggggaagggcagcagcagcagaga

SEQ ID NO: 24421 - RNA, 72 nt, Homo sapiens
cgaacaagcagagaggagaacaagagagagaggaaagaaaggcccgcaagaagcccagcgcagcaagaccgc

SEQ ID NO: 24422 - RNA, 82 nt, Homo sapiens
aaaaggcggggccgccgcccccagcgcgcaacccaggaacccggaaggggaccacggaccaagaggaccagaaagaaaaaaa

SEQ ID NO: 24423 - RNA, 73 nt, Homo sapiens
gggccggacgcacggcccggcagcaggggggaaccgggccccagcccgacagcgcgcgggagggagcgcggga

SEQ ID NO: 24424 - RNA, 70 nt, Homo sapiens
ggggggcaggggggagcccaccacccacccgagcggagaagcgaggacacacaggagcaccagggaggca

SEQ ID NO: 24425 - RNA, 75 nt, Homo sapiens
ccaaaaaggaaagacaccggcggaggcgcaagggacaagcgcaccagaaagagacggacgagcccgaacacgcga

SEQ ID NO: 24426 - RNA, 80 nt, Homo sapiens
acgcgcggagaaagagaccaccgagcggcggagaaaccaccacaaacacgaggccagcaacgaccaacaagacagacccg

SEQ ID NO: 24427 - RNA, 69 nt, Homo sapiens
gccaaaccaaagggacagcaccagagagcgccacaaaccccaaaaacgacgcgggggaccccaccacgc

SEQ ID NO: 24428 - RNA, 62 nt, Homo sapiens
aagagccagagcagacaaaaagcccggacaggacagagaaccagaaagcaccgggaggaaag

SEQ ID NO: 24429 - RNA, 80 nt, Homo sapiens
cacgcacaggcaacggccgaggagagggaagggagaggcacacccggcagaccacacgagcgggacacagaccagggagg

SEQ ID NO: 24430 - RNA, 107 nt, Homo sapiens
aaggaaaagaaaggaagccgcacgagaaaagacggagccaggcaaagcaagggagagaaggacccaaagggaaaaagggaaaagcgagcggcaaggaggggaaaacc

SEQ ID NO: 24431 - RNA, 64 nt, Homo sapiens
cgaggggcagcggcaggagagccggccgcgacaggacgccacaaaagaagacccaaagcaccaa

SEQ ID NO: 24432 - RNA, 69 nt, Homo sapiens
gacgcagccggccaggccgcgcagaccaggagaagacgaaccgaggggacggcaaagaagagggacgca

SEQ ID NO: 24433 - RNA, 86 nt, Homo sapiens
cgcacaccccagcgcgcaaagcgcgaggggcgagagccccagcccccagcagccgacaggaggcccgcaagagcaggcaggcagcc

SEQ ID NO: 24434 - RNA, 79 nt, Homo sapiens
aagcccacccgaaaccacaaggccgacccgccgcagcaagagagagcaaggagcaggcgcagagcagagcagagcaggg

SEQ ID NO: 24435 - RNA, 53 nt, Homo sapiens
aagcaggggaaagcccgggccaagcgggaggcgcccaaagaaggccaagaaga

SEQ ID NO: 24436 - RNA, 64 nt, Homo sapiens
gcagaagagaaccacgggagcagcaaaccagccagcacgggggcccagccagccagcagcgagg

SEQ ID NO: 24437 - RNA, 85 nt, Homo sapiens
cggacgggccaacccaaaaccagggcggcaaaacgagcgggccaggcccagcccccggacacgggcggccggaaggcgaggcccc

SEQ ID NO: 24438 - RNA, 74 nt, Homo sapiens
ccaagccaagagaggaggaacgcaacaggcagacagccacaagagagcgaggccgaagacccagaggaccccag

SEQ ID NO: 24439 - RNA, 37 nt, Homo sapiens
acaccgagacagcagaggaaccggggaagcggagccg

SEQ ID NO: 24440 - RNA, 71 nt, Homo sapiens
ggagacggaaggacacaaggcggcaccaggacgccgaaaagcgaccggacgcaggcacagggacacgcgag

SEQ ID NO: 24441 - RNA, 77 nt, Homo sapiens
accaccagaaggaacaaagaaccagacaaacgaaggggaccagaggaaacccccgacagaccggagaccccgaaccg

SEQ ID NO: 24442 - RNA, 65 nt, Homo sapiens
cacgccggaggaaccgagaagagcagagcggagggagccccagacacgacgggcagacacagccc

SEQ ID NO: 24443 - RNA, 84 nt, Homo sapiens
ggggagggggccccaacgcgcccgggagccccgacacgacagagcaggcaccaagggccaggcccaagcccagcagaccaacag

SEQ ID NO: 24444 - RNA, 65 nt, Homo sapiens
cccaacccaaaacaggacagagcgcgaccacacacaccagaacgaggagcagagaaagacgcccc

SEQ ID NO: 24445 - RNA, 58 nt, Homo sapiens
agagcccgcccaacaaacagaggacaggcacgaaccaaagcagcaccaggcgccggag

SEQ ID NO: 24446 - RNA, 76 nt, Homo sapiens
aagccgggagcagacaagaggcaaaagcagaccggaaaacccaccggcaagaccacacccgaggggagcccaggac

SEQ ID NO: 24447 - RNA, 73 nt, Homo sapiens
ccggccgcccacgccagccacaggaaacgccaagagcgagcggacgaggagcccggaagagaccaggaagcag

SEQ ID NO: 24448 - RNA, 35 nt, Homo sapiens
cagaagccagggcacaacgggcgcacaagaccaga

SEQ ID NO: 24449 - RNA, 37 nt, Homo sapiens
aaccgaccgcggcaagagcagaaacaccagaccagac

SEQ ID NO: 24450 - RNA, 83 nt, Homo sapiens
caacagcgaaaagcaaggcagcggacacacgccgccggcaggccaggaacagaagccgcagcggccaagaaggacagcggcgc

SEQ ID NO: 24451 - RNA, 71 nt, Homo sapiens
cgccagggccaggcggcacaccccccaagaccggcggcccaacccaccggggacaagagaaaaaaagggcg

SEQ ID NO: 24452 - RNA, 86 nt, Homo sapiens
caaagccaccgacccaccgcgcccgggccgccggcaggcggccgcagcaacccgccggggggagagagacgcgggaaccgccagca

SEQ ID NO: 24453 - RNA, 67 nt, Homo sapiens
acgcgggaaaaacggggcccaaaaagagagaggaagccaccacgcaaccagaccccgaacacaaacc

SEQ ID NO: 24454 - RNA, 55 nt, Homo sapiens
cgcagggcgcccccggaaagcaaaaccagggggcaacaaagaaaaaaacaaacaa

SEQ ID NO: 24455 - RNA, 75 nt, Homo sapiens
gcccagggagaaaggcccaccggccgggagggcccagggcggggcccgagagaaacagcaccaggacacgcccgc

SEQ ID NO: 24456 - RNA, 67 nt, Homo sapiens
aagaaagccaccaggacgagaaaaaccaccggacagaacaggagaaaagaagcagcccacgaacccc

SEQ ID NO: 24457 - RNA, 78 nt, Homo sapiens
cgccagaggaggccccccagccacggaaacgaacacagcacccacccacacccacacccgcgacgggagggaggagcc

SEQ ID NO: 24458 - RNA, 80 nt, Homo sapiens
cccagaagcccccgcagagagaacaaaaaaaagaacggaaaaaaaccaggggaggggaagaagagcccgaagaagaaccg

SEQ ID NO: 24459 - RNA, 62 nt, Homo sapiens
ccgaacaggcagggccagacccagacaccaagggaacccaaggggaagcgagcgggcccacc

SEQ ID NO: 24460 - RNA, 90 nt, Homo sapiens
gcggcgcaacgccgccgcgccgagggaccgccgggcggcggaaagcagcggaccagcaccaccacagccagccagaacagaaggcccgaa

SEQ ID NO: 24461 - RNA, 69 nt, Homo sapiens
caaaaagaagggcggagcacacaggagcacacccaggacagacagccccaggagcaggccgaccacacc

SEQ ID NO: 24462 - RNA, 77 nt, Homo sapiens
ccaaggacaccacagccccgacgaacacggggacaccaacaggacccgggcggagaacggaaaagcaccaggaagca

SEQ ID NO: 24463 - RNA, 79 nt, Homo sapiens
aagagggagacagggcgaaccacagacagagcccgcaaaaaacgaaggaaagaggcagaaggccagaagggcgaagaag

SEQ ID NO: 24464 - RNA, 74 nt, Homo sapiens
aggcaccggccgagccacggagcaaggggccaggaacaacggggaagcgagagaccgaaacggagccgacggac

SEQ ID NO: 24465 - RNA, 54 nt, Homo sapiens
acagccaccacaccaagacaccaggggagaccggagaaggaaccgcaccgcaca

SEQ ID NO: 24466 - RNA, 69 nt, Homo sapiens
acaccgccagagacgccgagcaaaagcccagaagacaagagagaccaggcaagggagccacaccaaccg

SEQ ID NO: 24467 - RNA, 71 nt, Homo sapiens
gcagcgagagaggggacagcgaaaaagcgagggagaggaaccccaaacaaaacgcacaaccaagggggccc

SEQ ID NO: 24468 - RNA, 71 nt, Homo sapiens
ccacaccgcgcgaaaaaagagacagccaggcaaagggaaggaaagggccaaagccaagagaagccacagca

SEQ ID NO: 24469 - RNA, 58 nt, Homo sapiens
ccggcgccgcgccggcggcgaggcagcagcgccccgagccccggcggcaacacccccc

SEQ ID NO: 24470 - RNA, 69 nt, Homo sapiens
gggagacccgccgcagagggacagggcagccggagcgcgcgccaggaccggcagagacgcaccacgccc

SEQ ID NO: 24471 - RNA, 77 nt, Homo sapiens
cagagccacggaaggaacagaaacgccgaagggaccaggcagacgggaagaacccagaaagaaaggagcgccccaaa

SEQ ID NO: 24472 - RNA, 77 nt, Homo sapiens
ccagcaggggcagaggcaagggagacagcaaccaaccaggaccccgcgggcacggcgggacgggacaagacaccaag

SEQ ID NO: 24473 - RNA, 78 nt, Homo sapiens
ggcgacgcacaggcgcaagacacaccggaggcgacggccaggccacagggacgaagccacgacagcagagaggagcac

SEQ ID NO: 24474 - RNA, 52 nt, Homo sapiens
gagcggagggggggcgccagccggccagcggggaagcgcaggagcggcgggg

SEQ ID NO: 24475 - RNA, 68 nt, Homo sapiens
agaacggaggaagacagaccagccggacacaagagggcaagaaaggcgcgacgggccgaaaagggacg

SEQ ID NO: 24476 - RNA, 53 nt, Homo sapiens
aaacagcaagacagcaaccaaccaccacaaagaggcaaagagccccagcgccc

SEQ ID NO: 24477 - RNA, 76 nt, Homo sapiens
cgggagagggcaggcgagaaggcggcgaggaagcgcgcccggcgcacggacaagccgccgcaagaaaaggagacag

SEQ ID NO: 24478 - RNA, 72 nt, Homo sapiens
ccaaacgcaccaacagggagggccgagagacacgccgcgagaagcacgcacagggccgcgggaagaccagcc

SEQ ID NO: 24479 - RNA, 80 nt, Homo sapiens
accaccaggccacccaggggcgccagggacgaacagcggggacgccccagcagaccgcccaggagaggaaagcaggagga

SEQ ID NO: 24480 - RNA, 40 nt, Homo sapiens
acaagagcaagaccccaagcagcgcaagaaaccaggaacg

SEQ ID NO: 24481 - RNA, 54 nt, Homo sapiens
caaggcagaacacgaccgacacgcgagagaagaacaaggagaaggaagccggaa

SEQ ID NO: 24482 - RNA, 57 nt, Homo sapiens
accaggagcccgagagagaagggggagaagaccgacagaagcaccagaccaagaagg

SEQ ID NO: 24483 - RNA, 84 nt, Homo sapiens
ccacgcccaaacaggacacagccccaggaggcagggaccgaaggagaagaaggagaaggggaggagaaggcaagccggaaagag

SEQ ID NO: 24484 - RNA, 100 nt, Homo sapiens
gaggggaacaccggcgagcccgggcggggccggcagcaccgcggccgcaggcaggaggggaagcagaaagcaaacggccccgaaggaggaggaccgggaa

SEQ ID NO: 24485 - RNA, 82 nt, Homo sapiens
ggaggccgaggcggcccaagagaggaggacggaagggggaaggggacacagaagccgcagggccaccggaaaacccggaccc

SEQ ID NO: 24486 - RNA, 74 nt, Homo sapiens
ccccggcaccgcagggcgcgaggaagaggaagcaccaaccgcccccaggggcagcggggagcgggggccgcagg

SEQ ID NO: 24487 - RNA, 34 nt, Homo sapiens
gcagggggaacgggagggggaagggagggcaagc

SEQ ID NO: 24488 - RNA, 85 nt, Homo sapiens
ggcgggggccccagccccacagaccagcccagcacaggcggccgagcccgacccaagcaaccacggcccggccccaaaggcggga

SEQ ID NO: 24489 - RNA, 79 nt, Homo sapiens
aaggcgacgccagcgccgaggcgcggccgcggcggccgcgccccagggcgcggggacgaaagcaccgggaggaaagaga

SEQ ID NO: 24490 - RNA, 87 nt, Homo sapiens
gaccccgcaggacggaaacccacaggcacacccaagcaagcagacagacccacaagcagaagaagcaagcaaagaggaggggaagaa

SEQ ID NO: 24491 - RNA, 69 nt, Homo sapiens
gcaagaacgaaagacccggcgccaacagaccacaccaaaccaacccgggagacaggcggcggcgcggac

SEQ ID NO: 24492 - RNA, 71 nt, Homo sapiens
acaccagcggccaaaagagcagccacagaagaccaaacgcagaccagcccaggaaggcgccaaacggacga

SEQ ID NO: 24493 - RNA, 74 nt, Homo sapiens
gggcccggcaggacgaggacgaaggccgagggaagaaacccacaaacccagagacagcggaggaaaaaccccaa

SEQ ID NO: 24494 - RNA, 58 nt, Homo sapiens
gggggaggagagaaagggcaacccacgagagaacagagacacagcagcacagaagacg

SEQ ID NO: 24495 - RNA, 74 nt, Homo sapiens
gcgagcgcagcgcgaccgggaggcccagacgacaggaggcacgagacgacaaggagaggccagcggaagcccca

SEQ ID NO: 24496 - RNA, 54 nt, Homo sapiens
gcaggcacccagagagcccagccccgagggaggcagccccccaggcccaaacca

SEQ ID NO: 24497 - RNA, 67 nt, Homo sapiens
acaccaccacacaccgccggggaccgggagggccccaggagagaagcaaagcggagggaaaccaccc

SEQ ID NO: 24498 - RNA, 83 nt, Homo sapiens
ccacggaccgcagcgcaagacacgccaagaagagggagccgccaccaaaagcagacggaaaacccacggggaagaccacaccc

SEQ ID NO: 24499 - RNA, 80 nt, Homo sapiens
ccagaacacgccaaggaggggcagggaaaaccagacgagagacagaagacgaaagggcaagaaagagagcacggacaaga

SEQ ID NO: 24500 - RNA, 58 nt, Homo sapiens
agagggacccggacaaccagaggcagccagcagggggaggggcgggacgagcaggccc

SEQ ID NO: 24501 - RNA, 71 nt, Homo sapiens
aagaaagcagcaaacagcgaccgccaagagacacacagggcaccagaccggaagagccagccaagaagcga

SEQ ID NO: 24502 - RNA, 57 nt, Homo sapiens
cgagccggaccggagagcacaagccggccacgcaaagaacagcgaacgacaagagga

SEQ ID NO: 24503 - RNA, 59 nt, Homo sapiens
gaaaaagaaaaaaagggaggagagccaacaaagaaccaggaggcagcaaggacgagccc

SEQ ID NO: 24504 - RNA, 60 nt, Homo sapiens
cggcgaaggaggcagaggcacagcgcagcacgaggaaaacagaaaagcagaaaaaagaag

SEQ ID NO: 24505 - RNA, 73 nt, Homo sapiens
caggcggagggggacacccgggcggggcagagcagcccccagccagccgcgagaaacggcgaggaaagagagg

SEQ ID NO: 24506 - RNA, 40 nt, Homo sapiens
gggggggcgacaacggcaccgggacgaagaaaacccgcgg

SEQ ID NO: 24507 - RNA, 40 nt, Homo sapiens
acacgcacacacagggggcccccggacggcgcggcaagcc

SEQ ID NO: 24508 - RNA, 80 nt, Homo sapiens
cgcgggcccagcgagggcgagccgggcgggggagcccaaggaagaccagccacacgcaaggggaaggcgaggcgagaacg

SEQ ID NO: 24509 - RNA, 90 nt, Homo sapiens
ccggcggacgcagccggacggcgccagacggaaaccagcggcgccaaacaagggaaccgacccagagaggaaagaaacaaggcagaaaga

SEQ ID NO: 24510 - RNA, 78 nt, Homo sapiens
gggcccaaaccgccgcgcaagcagaccagcggggagacgacacgccaggaggcgcccgagggccccacccgccgggac

SEQ ID NO: 24511 - RNA, 56 nt, Homo sapiens
gacggccaccggcgggaggaacaaaaggcgggccaccgaaggcaaacgcgcgccac

SEQ ID NO: 24512 - RNA, 77 nt, Homo sapiens
ggaagaaaacacagcgggccgccgcgaccggggaggccaggccaggaaaacacgccgagaaaacaaaggcgaagcaa

SEQ ID NO: 24513 - RNA, 53 nt, Homo sapiens
gaacccaaccagggggaaacacagaacgcagggacaaaaacgcggaggggacc

SEQ ID NO: 24514 - RNA, 69 nt, Homo sapiens
gacacgcggacaggacacagaagccaacaccagccgcacccaagcgcaggggggcagagagccacgaac

SEQ ID NO: 24515 - RNA, 74 nt, Homo sapiens
agggcacggaccgaacgaagcacagacgccaaagagcagggaccaaaagaagagcccgacacgggaagagaaga

SEQ ID NO: 24516 - RNA, 75 nt, Homo sapiens
gaaaagcggcacgacaacaaaaccacagagaggcaggaagagcggagagcagccccaaaaccagaaaacaaaggg

SEQ ID NO: 24517 - RNA, 79 nt, Homo sapiens
cggcggcaaagagaagagaagacgacccaccagacagccagcacagggccggagcgagggagagcaggaacacagagag

SEQ ID NO: 24518 - RNA, 71 nt, Homo sapiens
gcaccgccaagaccaggcgcgccagccaaaacagggaaggagagcacagcaaacacagagaaaaggagagc

SEQ ID NO: 24519 - RNA, 41 nt, Homo sapiens
gcacacgcgcaggccgacggacaccgcacaaccaccccaca

SEQ ID NO: 24520 - RNA, 72 nt, Homo sapiens
cgcgcgccgagggcgaggcggacgcgcggcgcgcaggccgccgacggcccgcacagggagggcacagcaagc

SEQ ID NO: 24521 - RNA, 71 nt, Homo sapiens
gcagaaaaacgggccgaaaaaaacaaggcacgggcaacaaccgccagggaacagcaaaaaacgagagcagc

SEQ ID NO: 24522 - RNA, 74 nt, Homo sapiens
ccgccagagcggggcacggagcgggacagcccagaagaaaagagggcacaagccaaagagaccgaagaagaggg

SEQ ID NO: 24523 - RNA, 58 nt, Homo sapiens
gccgcgacagcgaacagcgcggccgcagcacccaggcgaaccgaccaggaagaaggaa

SEQ ID NO: 24524 - RNA, 71 nt, Homo sapiens
ccaacaccggacaccgagaggaaccacaagcagcaccgaggagcaacacccccagggagcccagaccgaca

SEQ ID NO: 24525 - RNA, 76 nt, Homo sapiens
agagaacaaaaaacaccacagacacgcacaggagaagggcccggagaacacgagaggcgagggacgacagagcaag

SEQ ID NO: 24526 - RNA, 74 nt, Homo sapiens
agagcaagcgggggaccgaacaaggcaaaaggggacaaacaacagaccaaggggcggaaaacccgaagccagga

SEQ ID NO: 24527 - RNA, 79 nt, Homo sapiens
aagaaggcagcgcggcgagacacacaacaaggccccccgaagcccaggaggagcggagcggaaaagcgcacagaccgcc

SEQ ID NO: 24528 - RNA, 82 nt, Homo sapiens
aaggagcggcggacacacagacccccaccaagcagaaaaacaaccaccagcgagcaaaaaggcaaagaccaagaccaccaag

SEQ ID NO: 24529 - RNA, 75 nt, Homo sapiens
cgagcgggcggcaccgaacaccgggggcgggcagccgaggccgggaaccagcgaggccgacaggcaagacggcag

SEQ ID NO: 24530 - RNA, 85 nt, Homo sapiens
aaagaaggacagggacacaaacaccagagggaaaaagaccacagaaacagagacaaagcaggaggacacaagaagggaggaaagg

SEQ ID NO: 24531 - RNA, 74 nt, Homo sapiens
gacccacacagacaacagccggggcagcgcagcccggaccccgacccacccggcccgggagaccggcacgccac

SEQ ID NO: 24532 - RNA, 57 nt, Homo sapiens
ccaaggggacaaaccaacagaagggcaaccagggagaaaacgggccggaggaaaagg

SEQ ID NO: 24533 - RNA, 81 nt, Homo sapiens
gaaccagcccaagggaagccgaaaggaccacaaagaagggaacagcaagaggcaaaagcgcgagggacagcgccagccggg

SEQ ID NO: 24534 - RNA, 73 nt, Homo sapiens
cgggaggaagagagaaaagagagaaccccaaccggggaggaaaaccgacgaagacgggacagagcgagagaga

SEQ ID NO: 24535 - RNA, 77 nt, Homo sapiens
ggcgaaggaggcagaggcacagcgcagcacaaagcaagccagaagaacacacacacagcacaggaagaaaggaggcg

SEQ ID NO: 24536 - RNA, 83 nt, Homo sapiens
ccgccgccgcgccgcgccgcgccgcaccccgagcgaccgcccccaggcccaggaagcccacccagccccgccacgcagagccc

SEQ ID NO: 24537 - RNA, 70 nt, Homo sapiens
aagaacagccaggcccgggccaagaacgggaaaacggcagaaccagcacagccaccagaaaacgggaacg

SEQ ID NO: 24538 - RNA, 75 nt, Homo sapiens
gagacgcaccgcgggacgggaaccgcgacacaaggagacaaaggacaggcagaaaccagaacaggcaaagggccc

SEQ ID NO: 24539 - RNA, 66 nt, Homo sapiens
caccagcaccaacggaaccccaccggaaagacaggaagaaccagaagacaaaaacaaggccgcgca

SEQ ID NO: 24540 - RNA, 76 nt, Homo sapiens
agaccggcaccgaagaccggccggcccagggagaacgcaaaaccaccacccccacaaaaaacgcagggagaaaagg

SEQ ID NO: 24541 - RNA, 78 nt, Homo sapiens
aaaggcggcgccgaggagcgggacaacccaggagcagacagagaagcgcgcagcagaaaagcacggcgccgagaggaa

SEQ ID NO: 24542 - RNA, 82 nt, Homo sapiens
ccggagaggggagagaagggggagccggcgagaggggcccccaggaccacaccccagccacccacccgcagcccccaagcaa

SEQ ID NO: 24543 - RNA, 74 nt, Homo sapiens
gagaaggaccaagaaccagggaagcccagaggcacggggcagaacaccaacagagggccgaccgggggaggaca

SEQ ID NO: 24544 - RNA, 70 nt, Homo sapiens
cgcggcgccgccagacagcgagcgaggcggagggggaaaagccagccagaacacagaacagaacacacgg

SEQ ID NO: 24545 - RNA, 73 nt, Homo sapiens
aacgaacccaaaaggagccaggagaaaaaggacagggccgagaccccacaagccagcaggcagacccaccacg

SEQ ID NO: 24546 - RNA, 94 nt, Homo sapiens
gaagcgcagaaagcaggcgaacccgcggcgcaaaacggccaggcagagcagcccaccagggaggggagggggggaggcgcaccccgcgcccacc

SEQ ID NO: 24547 - RNA, 74 nt, Homo sapiens
cggccaagaaacccccaagagggcacaacaccagaccacgagaaaagaccagggggcccgagagaccacaaaac

SEQ ID NO: 24548 - RNA, 82 nt, Homo sapiens
cggccgaggggaggaccagacccgagccgaaggggaggcggaggacagcccaggggcgaggagagaaacagagcccagacgc

SEQ ID NO: 24549 - RNA, 84 nt, Homo sapiens
gggccccaggagcaagcacgcccggaagccgagacccccgcgagggacgagaggcggcccgcagcagaccacagcaccgggacc

SEQ ID NO: 24550 - RNA, 69 nt, Homo sapiens
gaaggaccaagaaccagggccacagagccgaacacagcagagggggacaagcccacggagacgggagcg

SEQ ID NO: 24551 - RNA, 85 nt, Homo sapiens
caagaaaagcgcaggccgggccgcaacgacgcagcacgcagcacggggaacgagcgagacgacgggaccgaaggaccccgccaga

SEQ ID NO: 24552 - RNA, 52 nt, Homo sapiens
gcagaggccagccggcgggcaggagcggacgcccagagagaccagccccaac

SEQ ID NO: 24553 - RNA, 82 nt, Homo sapiens
aggaagaagcggagggcgaggaggagcagaggagcacacagagaagcagacagggcgcacgaggcccgccagcgccccggac

SEQ ID NO: 24554 - RNA, 79 nt, Homo sapiens
cgaggaaccagaacgaaaagcgccagaaaggagccaggagcaggggcgcggcagaggcgcggacgagcagcgcagggcg

SEQ ID NO: 24555 - RNA, 73 nt, Homo sapiens
caggaacaaggagaagaccaggaagagaaagagaaaggacaagcaggaacccccagagcaaaaccgaacggaa

SEQ ID NO: 24556 - RNA, 88 nt, Homo sapiens
gcagaagggaggcccaagacccacaacaaaagaaccaagaaaacaggggcccgaaacccaaggcagacagcagaaaaacagggccgcc

SEQ ID NO: 24557 - RNA, 101 nt, Homo sapiens
cagggcggagaggagcggccggagcagcgagggcccggcgaggagaaccaacggcccgaaagaggaggcacacgacgaggacggggcccagcagacgccag

SEQ ID NO: 24558 - RNA, 66 nt, Homo sapiens
aaccgggcgaaagccacaccaagcgagcaccggaaggaaaaagggcaggccccagaggggacggac

SEQ ID NO: 24559 - RNA, 61 nt, Homo sapiens
aagggcggcggaccgggagacaccccgcacacacacccaaggagaaaaccggaagagaaag

SEQ ID NO: 24560 - RNA, 74 nt, Homo sapiens
agcccgagcacgccgagaagaagggacgccccacaggacacccaggacccacggccaaacacacaggaacgcca

SEQ ID NO: 24561 - RNA, 73 nt, Homo sapiens
gcggcacgacagagcaagcagacaggccgccaaagagcaacccacaaggggacaaaagcggcaagagaagaca

SEQ ID NO: 24562 - RNA, 78 nt, Homo sapiens
agaggaaagagagccgggcgacccaaccaagggaccagcagacaggcagcaaagaaaggaggagaagcccagccgcgc

SEQ ID NO: 24563 - RNA, 79 nt, Homo sapiens
ggggggccaagggcccagcgcaccaacggcgaccggaccggcacggacggccgcccgaggaaacgccaagagcgagcgg

SEQ ID NO: 24564 - RNA, 59 nt, Homo sapiens
cggggagagcggacaagcgccacgggacggagcaagcgagaacggaggcgcccgggagg

SEQ ID NO: 24565 - RNA, 77 nt, Homo sapiens
gcgccggcagggaggcaagcgccccgacccgcaggccagacggacaagagcggacggagacacggcacccaacccca

SEQ ID NO: 24566 - RNA, 68 nt, Homo sapiens
cgcgcccgcccccgagcagcgggaccagaggcccacgcggaccggcagcgccaccggaccaccagaca

SEQ ID NO: 24567 - RNA, 50 nt, Homo sapiens
ccagggcaacgccgaagggggaaagccccagagagaccacccaaaggagc

SEQ ID NO: 24568 - RNA, 57 nt, Homo sapiens
cggcggggacgagcaggaagcgcggcgagcggggagggacaggcgcgcgaagaggac

SEQ ID NO: 24569 - RNA, 59 nt, Homo sapiens
cgggacggacgggaggggcgccgcggcggcgggcgcccccagagagaggaaaacgagac

SEQ ID NO: 24570 - RNA, 78 nt, Homo sapiens
gcccacaaccgggccggccccagagcccaccgggaggagaaggaggaggaacgggggcagagaagaacggagagaaca

SEQ ID NO: 24571 - RNA, 58 nt, Homo sapiens
caggcgaagcggccgagcaggcgagcgaacgacggcgacacgggcggaccacaaaccc

SEQ ID NO: 24572 - RNA, 41 nt, Homo sapiens
ccggcgcggggcaggcaagagagcaggaaaaaagggaccag

SEQ ID NO: 24573 - RNA, 61 nt, Homo sapiens
cggggacacgacgccccaaaccgccaggagaaaaaagaacccagcggggccgccccacccg

SEQ ID NO: 24574 - RNA, 72 nt, Homo sapiens
aggagcggggagggggacacacaaccgcccagccggcgagggacgccgcaggaaccacaggcccggagaagg

SEQ ID NO: 24575 - RNA, 95 nt, Homo sapiens
gcgaaccgaaggcggaacggacagcaaaaacacagggcagaccccgcaaaagaaaagaccaggcacggacacggaggcgcggggggaccacgaag

SEQ ID NO: 24576 - RNA, 84 nt, Homo sapiens
ggggaaaaaagaccacgaggagcagggcagggcgccggccgagcccgggaaaacgacagcagcagcagggccggaagacgccac

SEQ ID NO: 24577 - RNA, 71 nt, Homo sapiens
ggcacaagaagacgcccccacccaaaccggggagcaggagagggcacgcgaaaaaagcccaggacccaccc

SEQ ID NO: 24578 - RNA, 80 nt, Homo sapiens
gcgggacccggcgaagacgcgaccgcggcgcgagcaccagcgacagaccaaagccgcgcccagcaggcgcccagcagcac

SEQ ID NO: 24579 - RNA, 79 nt, Homo sapiens
gggccccccgaggcgggcccaccgccgcccccgacccgaggaagaagagaaaacaaaaaacgacaaaaaaacagaagaa

SEQ ID NO: 24580 - RNA, 83 nt, Homo sapiens
caaccccccaccgaccagggcagcaggcacgagcaaaggaacacaacgggccaaggcagagaaagcaagagacgcaaccgaac

SEQ ID NO: 24581 - RNA, 76 nt, Homo sapiens
cgggccgccacggcaggccaccgccagcgcagcaagggaaggaaaacagggcgcagaaccccaggaggcagagaac

SEQ ID NO: 24582 - RNA, 40 nt, Homo sapiens
ggagggacaggggcggaccagacccagcagggaggccaca

SEQ ID NO: 24583 - RNA, 74 nt, Homo sapiens
accaacagcagagaaaagagaggaaacacgaagaagaaacaagaagagggccaaaacgccccggaaagagggcc

SEQ ID NO: 24584 - RNA, 82 nt, Homo sapiens
agcgcgggacaccgcaaccccgcagagcgcaccacaaagcgcgcaacgccaacccaggcgagaggaaaccagacgccgccac

SEQ ID NO: 24585 - RNA, 87 nt, Homo sapiens
aagccgagaaggagaacaccccgagcgaggccaacccaggaggaggaggccacagcccacaccagaagcaaaagcaccaagagcgag

SEQ ID NO: 24586 - RNA, 77 nt, Homo sapiens
cgccgcgcaccgcccgccccgcaccggcaaagaacggacagcaaccgcgaccgaacaaggcacgaaggccagaggac

SEQ ID NO: 24587 - RNA, 84 nt, Homo sapiens
gaggaaaaaaccacgacaaaaccacccaagcccgaaggaagcacaaacaggaaaggaacaaccggaccagccacgcaaaaacag

SEQ ID NO: 24588 - RNA, 55 nt, Homo sapiens
aggagagaggaccacccagaggagcaacgcgggagggcccccaagacccaacaga

SEQ ID NO: 24589 - RNA, 50 nt, Homo sapiens
aaaaaacaggcgcgccaggccgacgccgagaagccagccaaggacggcaa

SEQ ID NO: 24590 - RNA, 76 nt, Homo sapiens
agccagaccccaacagggcacacacgaaacgggcaaccggggccagggccagcaccagagagcagcaagaagcggg

SEQ ID NO: 24591 - RNA, 69 nt, Homo sapiens
aacgggggagagccacggaagccgacagacaaccaggaacaggacacccaaccgcgagaccagcaagga

SEQ ID NO: 24592 - RNA, 76 nt, Homo sapiens
cgagcgcggcgcggggcggcgggccggccgaaggagcccagaccgagaaccgggggaacgcgggcgccggaacgac

SEQ ID NO: 24593 - RNA, 69 nt, Homo sapiens
gcgaggacgacggggcgagaccccgcccggaccgcagaaagcgagccgaacaggaagcaaagggcagaa

SEQ ID NO: 24594 - RNA, 76 nt, Homo sapiens
gagcggagcccccggaccacacagcgcccaggccagagaaggggaaggaggggcagcggaccggaccccccaggga

SEQ ID NO: 24595 - RNA, 66 nt, Homo sapiens
ggaagagaggaggcgcgagagcgggaagaggcggcagacagcgggccggccagcggggaagcgcag

SEQ ID NO: 24596 - RNA, 81 nt, Homo sapiens
ccaccacgccagccaccacgcggcgcacaacgcaggaacaccgcacgcgcggaggagggcaaaaaagggagcaaacaccgc

SEQ ID NO: 24597 - RNA, 77 nt, Homo sapiens
cgggccgcggcgcccggggaaagccgggccccgagggcggaccgagcgcgcagaagaaagccgcggaaccgcgacac

SEQ ID NO: 24598 - RNA, 71 nt, Homo sapiens
agagagacgagagaaacccacgaagacgcgcggagaaagagaccaccgaggaaaagaaaagccaagaggaa

SEQ ID NO: 24599 - RNA, 55 nt, Homo sapiens
gcaagacaacaggagaggaaagcggaaagccaagacggggaagggagaccgcgag

SEQ ID NO: 24600 - RNA, 72 nt, Homo sapiens
ggagccagaaggaagaggaggacacgacccagggcgcggggaaggccccaccgaggcaccaccaaccaaagc

SEQ ID NO: 24601 - RNA, 42 nt, Homo sapiens
gaacgaagcccggcgggagcgcaaagcgggccagacacgaag

SEQ ID NO: 24602 - RNA, 57 nt, Homo sapiens
gaaaaccagaagcgcagaaaaagggacccaggcgacagacacagcaccggccccggc

SEQ ID NO: 24603 - RNA, 44 nt, Homo sapiens
accacaagcaggccaaagagagagcagccggcacccgcacaacc

SEQ ID NO: 24604 - RNA, 83 nt, Homo sapiens
gacgcggcacagagagggccgggagcgcgcagccaggggaacgcccgcggacggcagggcgcgacaagaagcgcccgcccgac

SEQ ID NO: 24605 - RNA, 78 nt, Homo sapiens
aggccaccacggggagccaagaccacagagccgagacggcccagacgcgcggcacaggcacgcgcgagccggggcgac

SEQ ID NO: 24606 - RNA, 70 nt, Homo sapiens
aaacaggccggggcacagcacagcgccggcgcaagcgagacgacgggaccgaaggaccccgccagagaca

SEQ ID NO: 24607 - RNA, 83 nt, Homo sapiens
gaaccgcccgcggaaccacagcccagcacggggcaggaaaggagggcgaaacacaagcaccacccccggaagcaccaggagcc

SEQ ID NO: 24608 - RNA, 80 nt, Homo sapiens
gcgccccggggacgccgccccccggaaaaggagcgccccacagcaaggcgggcaggagggcgcacgcccacagacggggg

SEQ ID NO: 24609 - RNA, 79 nt, Homo sapiens
gggaaaggccagcgcagaaacgcaggaacaagacacgccagaaaagacaacgcagcagcacaagaaccccccagggcac

SEQ ID NO: 24610 - RNA, 73 nt, Homo sapiens
aagaagaggcacagagaaaccaaaaaccaccgggggaagggcaaaagaacgcggcagaacggaggcaggcagc

SEQ ID NO: 24611 - RNA, 75 nt, Homo sapiens
cacagggccggagaggggaaccagcagaaggcaaacgaacacgcgcagcgcagaggcccggcagccccaaggaac

SEQ ID NO: 24612 - RNA, 77 nt, Homo sapiens
ggaaggaagagaggagcgacgccgggggcgcagaccgggcaagaccacccgcaagcacgcggggaggcacaggagag

SEQ ID NO: 24613 - RNA, 32 nt, Homo sapiens
aaaacccaaacgagcaaccagccagagggcac

SEQ ID NO: 24614 - RNA, 76 nt, Homo sapiens
cgccgccccgccagcgccagacggacgaggcggcggagaacaagcggcagagcacagcagacaagacgggagagaa

SEQ ID NO: 24615 - RNA, 62 nt, Homo sapiens
accgcagccgagcggggccggccacaggaaaaaagcggcaccaagccaaggagggacgaacg

SEQ ID NO: 24616 - RNA, 65 nt, Homo sapiens
ggaaaagcgaggcaaggcaggcggagcaagcaaaccccgaaaccacaccaccagggcaagaaacc

SEQ ID NO: 24617 - RNA, 88 nt, Homo sapiens
ccaagaaggacgagcccaagagcggcgaggaggcgccacacccccccgacgccgcgcggggacgcaagcagacgaggcaaagccccgc

SEQ ID NO: 24618 - RNA, 37 nt, Homo sapiens
ccacacgcgcaaagcccgcaccaggacaaaagaaggg

SEQ ID NO: 24619 - RNA, 79 nt, Homo sapiens
gagacggaaaccaacacgccagagcaaagcgagacagaagaggagaacacgaaaggaccggagaaacacaacgggagaa

SEQ ID NO: 24620 - RNA, 61 nt, Homo sapiens
gcggggccgaaaacaacgacaacgagcacaggagaaacaggcgccaaacgacagagacccc

SEQ ID NO: 24621 - RNA, 82 nt, Homo sapiens
gggaaccgggcgcggcggccgaggccggggaagcagacaccccaccccgacaggacagcggagcggcccggccaccagaaac

SEQ ID NO: 24622 - RNA, 73 nt, Homo sapiens
aggccacaaacagaacagagaccggaagaagagagcccgagcccagcacaggcccgacaaccagcgccgccac

SEQ ID NO: 24623 - RNA, 40 nt, Homo sapiens
agaaggaagcagagaagagcgagagaacaccacagaaccg

SEQ ID NO: 24624 - RNA, 70 nt, Homo sapiens
ccaacacccggggaccaccaggaagacgcagaggagacgcccccaggaccaggcggcaccagccgcacgc

SEQ ID NO: 24625 - RNA, 61 nt, Homo sapiens
gaccccgccggccggaaggcgaagggagggccgccccaaccgacgcaccagccggaggagg

SEQ ID NO: 24626 - RNA, 56 nt, Homo sapiens
ggagacacgcccgcgcgcagcaccggcaaggaacagagcacacaaaagagggacaa

SEQ ID NO: 24627 - RNA, 75 nt, Homo sapiens
ggaccgcggaggcaccgagaacggacgcaagcggggaggggaagaccagcgcgagagagagggcgggaaacgggc

SEQ ID NO: 24628 - RNA, 77 nt, Homo sapiens
ccacgacccagggcagaagacggagagcgggccccaccccaccgcccacaccggggcagggcgaggcccaggcgggc

SEQ ID NO: 24629 - RNA, 79 nt, Homo sapiens
gcacaaagcccgacagggcaacacccgacaaaggaacaccccaccagaccacccagcaagcccacaaaaaaggcacaag

SEQ ID NO: 24630 - RNA, 76 nt, Homo sapiens
gccccggcagcggggaggaggcgcaaagcggaccagaaggggggagccacacaaacggagacgcgaacccacaaag

SEQ ID NO: 24631 - RNA, 81 nt, Homo sapiens
cgggaggagagccagggacgggcagcaagaaaaggcgacggcggagacagaagagaggagagcccacaaacggcaacagcc

SEQ ID NO: 24632 - RNA, 73 nt, Homo sapiens
agaccggcgagcccgagcagaaaaccagaaggcaccgacaggaaaggaaaaggagaaccaggcacccgggggc

SEQ ID NO: 24633 - RNA, 65 nt, Homo sapiens
gccacccggcggcggggccgcagcccaaggaagaacccaagaaggcagaagccagccccgcaggc

SEQ ID NO: 24634 - RNA, 76 nt, Homo sapiens
aagcaagaaggcccggacacagcaaaccgggccacaggcccgagagcccccagacaggggcacgaggaggcaaaac

SEQ ID NO: 24635 - RNA, 74 nt, Homo sapiens
gcgacccgagcgccggagggagacaaccggcagaaaaacaccaggagacaagcgcaagcagccagagcccgggc

SEQ ID NO: 24636 - RNA, 71 nt, Homo sapiens
gaccagcgcggcagaacgccaaggcccaaggcccagcacgacagagacccggaaagcgagcagcaaagacc

SEQ ID NO: 24637 - RNA, 75 nt, Homo sapiens
cccaggagccggccagcgcgccggagccgccgagaggcggagaagaacccaaccaaaaccaggcggcaaccccgg

SEQ ID NO: 24638 - RNA, 89 nt, Homo sapiens
gcaacaccgagagaggaggagccagacgacaagcacacacaggcgcgaaacggaaaaaggaaacggccaagaagcggaaagagaccaga

SEQ ID NO: 24639 - RNA, 74 nt, Homo sapiens
accagaagggagagaccaggacacagagaacagacaccacgccacccaagagagagcaaaaaccgagaaccaga

SEQ ID NO: 24640 - RNA, 81 nt, Homo sapiens
cggcgccaggcggccgggcggggaccgcccccccccagccgcccgcccccgccaggagagagcaacgaaagagaggacaaa

SEQ ID NO: 24641 - RNA, 60 nt, Homo sapiens
aggaaacaaagggaggcggaaccaggcgccccgggccgggggggcccggcagcacccggc

SEQ ID NO: 24642 - RNA, 98 nt, Homo sapiens
gaccacccaccaccggccaggcagcacccgccaacgcgcccaaggcaacaagcgaacgcgaccacccaaagccagacgcgaacagggaagaaaacgca

SEQ ID NO: 24643 - RNA, 79 nt, Homo sapiens
cagaggccgagaggcgggcaaagggagaaaaccacgagaccagaagacggggaccgaaagccaaggggacccgcgacca

SEQ ID NO: 24644 - RNA, 55 nt, Homo sapiens
ccgcccgcacgggcgcgccaagggcacagagggagaggcaccagacccggaggag

SEQ ID NO: 24645 - RNA, 81 nt, Homo sapiens
aaccacgccagcggccaccagcaggaagacccaaagaaaagagggcggaaacccgggacaagaggaacagaaaaagggcca

SEQ ID NO: 24646 - RNA, 75 nt, Homo sapiens
cgcagggaggagcgggacaccccggaagcgggaaagaacccacaggagggccagaggacaaagcacggcggaaga

SEQ ID NO: 24647 - RNA, 49 nt, Homo sapiens
gacaaaagggccaaagaagggagaggagagaagcccccagccaggagag

SEQ ID NO: 24648 - RNA, 70 nt, Homo sapiens
gaagaccggaccgggggcaccggaccgagggcaggaagcgggccaagcccaggacccagcaagggggcac

SEQ ID NO: 24649 - RNA, 78 nt, Homo sapiens
agaagggccgagcacagcaagcaaaggaggaaggaccgagcgcaggaaccaggccagcgcccagcaagcggaaggcca

SEQ ID NO: 24650 - RNA, 73 nt, Homo sapiens
cggcgccaccaccagcaccaggggaagaagcgaccgccgaaaagaaaaaaaacagaaaacgcgagggaccaag

SEQ ID NO: 24651 - RNA, 72 nt, Homo sapiens
aagacacgcagcaggaacaaagggaaagagcagcacacaaaaggaaacgagcgagagagaagagggcacagg

SEQ ID NO: 24652 - RNA, 79 nt, Homo sapiens
ggaacaggggaggcaagcagcccaagccccaaaggaaaggcaaaacaggaagcggagaagcggaggagaccaaggaggc

SEQ ID NO: 24653 - RNA, 75 nt, Homo sapiens
aagagagggagcagagggaaagggaaggagaaggagggacgcaggcgcaggccaggacagcccaggccaagacag

SEQ ID NO: 24654 - RNA, 57 nt, Homo sapiens
cagccgcaccccagcgccaaggagcaggggaaggagacgggcaggagcgagccaccc

SEQ ID NO: 24655 - RNA, 73 nt, Homo sapiens
gaagagacgcccccgaagagcaaaggaacagaacccccacagcagcacgcaggcgccccgcagacagacagcc

SEQ ID NO: 24656 - RNA, 60 nt, Homo sapiens
cgcaaacacccccagacaaagaaaacagggccagacgggaagaaacgagaagggaccagg

SEQ ID NO: 24657 - RNA, 84 nt, Homo sapiens
agacaagcggcggggccccggcccaaggagaagacaccggaccacgccagagaaacccacaaggaaggaggaggagccaaacca

SEQ ID NO: 24658 - RNA, 74 nt, Homo sapiens
ccaggacgaccacccgagaaaaaagcccacgaagaaaacccagcaagacagaccgggaccacgccccaaaccca

SEQ ID NO: 24659 - RNA, 34 nt, Homo sapiens
aagggacaccgaagaggacagcagaccacagccc

SEQ ID NO: 24660 - RNA, 58 nt, Homo sapiens
cgcggaaggcagcgcccagcagcgcagggagggaccaaaggacaaccggaccaaggga

SEQ ID NO: 24661 - RNA, 78 nt, Homo sapiens
gcggagagcgaaagagaggacgaacaccagaaggcagcagccagaaacccgagaagcaagggaaagcgggcgaaaagg

SEQ ID NO: 24662 - RNA, 82 nt, Homo sapiens
gcccaagccgaggaccacggcgcacaagcaccaagcggcaacggccaaaccaaggagggagaggaacaaagagcgcagaaca

SEQ ID NO: 24663 - RNA, 78 nt, Homo sapiens
caagcagcagaaggggaggacagacacggagaggagcggggagagaagaacaccgggacccagaaaagcccaaacaga

SEQ ID NO: 24664 - RNA, 71 nt, Homo sapiens
accgggaaaggcaggaaacaagccgcgggaaaggcacggggccaaaaaggcacgagggaacgggaaagaac

SEQ ID NO: 24665 - RNA, 75 nt, Homo sapiens
acacgaagacaaagccacagaaacaggcaacgagacgccgaaagaaacccaggagggagaaacagggaaaagagc

SEQ ID NO: 24666 - RNA, 73 nt, Homo sapiens
aggaggagcccgacacggccaaaggcccaaacaaaaagcagcggcgcgagggcggcccgcagaagagcacaga

SEQ ID NO: 24667 - RNA, 114 nt, Homo sapiens
acaagcggggaaacggcaaagcgcagcccgcagacagaggggcgacgaccgcacaacagaaggcaaaaaacaggcagccagacgaaacacaggagacgagcgaacaagaaaaag

SEQ ID NO: 24668 - RNA, 77 nt, Homo sapiens
aggagaaggcaaagaggagggaagagaacaaccccaaccaggcaccaaaccagaaccggacagcagaggagccaggg

SEQ ID NO: 24669 - RNA, 78 nt, Homo sapiens
cgaagagacagacaaggcaaagcgaaaggcaccgcaacaacgcccagcgagagacccacgcaaggagagaagcacaag

SEQ ID NO: 24670 - RNA, 76 nt, Homo sapiens
ccgcaggaacggcacccaacagagagcccagaagagcagacagggggaacgcggaagacaacaaccaaggaaacag

SEQ ID NO: 24671 - RNA, 83 nt, Homo sapiens
aacggaacacacagcaggagagaaggccaagagaagcagggacagacagccacaacagggaaagagggaccccagcacacaaa

SEQ ID NO: 24672 - RNA, 76 nt, Homo sapiens
aaggaccaaacggagaaccagccaacagacagcagcaaaacgggaagagggaaaccaacgccacgcccaagggcaa

SEQ ID NO: 24673 - RNA, 76 nt, Homo sapiens
ggacaccaccccaacgaaggggaaggggaagaagcgacccgagacagagcccgaggcagccggcacccgcacaacc

SEQ ID NO: 24674 - RNA, 82 nt, Homo sapiens
ggggagcgccgccgccgcagcgggaccgcgcgaccggcgcccgcccgcgaaacacccagaccccaaagaagccccgacccca

SEQ ID NO: 24675 - RNA, 73 nt, Homo sapiens
aagaccggcggcccaacccaccgggcgacagccggggacacaggcagcgaaggcagaggaaaaggagaccgaa

SEQ ID NO: 24676 - RNA, 74 nt, Homo sapiens
aaaagccgcaccaacaggacgacaagaggggaaagaaccagacgacaggaaggcacagaacgaagccgcagaag

SEQ ID NO: 24677 - RNA, 79 nt, Homo sapiens
aggcgcccaccggggcccgggaccggggccagcggccaaaacgcgcccaccccacgggaggccgggacgggacaacgaa

SEQ ID NO: 24678 - RNA, 74 nt, Homo sapiens
ccggacgaacggggggaggaccaacgccccgaagacagggaaaccacaagaaggaccccgacgcgagcccacac

SEQ ID NO: 24679 - RNA, 59 nt, Homo sapiens
cagcaagcgggcggcaagacacggggcgacgccacagagaaagggcagcaggagcgacg

SEQ ID NO: 24680 - RNA, 55 nt, Homo sapiens
cggcgccggccggcgccccggggcccaagcggcccagaaggacggaacagccagg

SEQ ID NO: 24681 - RNA, 75 nt, Homo sapiens
cgagagcgcgaaacgcacgagaaggagcagccaacacgaacgggcaggaacacaaccgacaccgcgaaaacaccg

SEQ ID NO: 24682 - RNA, 83 nt, Homo sapiens
acccccgcggacagcgccgacgccggggcacggccacgcacggccgaaagaagaaaacccgagcagagaaaacaacaaagcgc

SEQ ID NO: 24683 - RNA, 87 nt, Homo sapiens
acacgagcgagacgagggaacccagagagacccagccccagccccaagggcagagcccgggcgcgccaggcacagccaagagcggac

SEQ ID NO: 24684 - RNA, 59 nt, Homo sapiens
cgaagcagggccgacacaagcccgcagaggagaggagaaaaccaggggcggaaggaccg

SEQ ID NO: 24685 - RNA, 79 nt, Homo sapiens
cacaaccacccgccccgaccccaagaagaccaaaccacccacggcccaaggaagacagaccgccaggacagagccaaaa

SEQ ID NO: 24686 - RNA, 74 nt, Homo sapiens
acacacaggagagcggcgcagaaaaacaaaaggagccgagacgaagaggagcagaaccagaagggacacacagg

SEQ ID NO: 24687 - RNA, 78 nt, Homo sapiens
aaacacaccaggaggggcaacaaaccaccccaacacccaggacgcgcacagagcggggcaacagacggaacgagagca

SEQ ID NO: 24688 - RNA, 82 nt, Homo sapiens
cgggaggccggagccaagccagcgacccaccaggagacccgcacaaccgaagagccggacccagcgccaccccccaccagaa

SEQ ID NO: 24689 - RNA, 66 nt, Homo sapiens
ggaaccaccgaaagcggcgcaacgaggggcaggacacagaagaaaaaagggacggacacaccaaga

SEQ ID NO: 24690 - RNA, 79 nt, Homo sapiens
agcacaagcagggacacacggacaccagaagaaagaagcccggcgaggccggagggccacccccggaagcaaaggccgg

SEQ ID NO: 24691 - RNA, 94 nt, Homo sapiens
ggccggggacccggcccgggaccggcggcgcgcggcggccgaggccagagcgggaagcgagccgagagcggacgcagccaccacgccgcaccaa

SEQ ID NO: 24692 - RNA, 55 nt, Homo sapiens
ggcgaacagacagaaggagaaaggaggaaaaacagccaggccgccccgccaccgg

SEQ ID NO: 24693 - RNA, 125 nt, Homo sapiens
agaagacggcacgaagaggagcgcaggagcagccgcagagaccgaagaccaaaaagcgccccggccgccaggaggaggggcagcgggaggaggggcagcgaaaggagagcgaggacacgaagggg

SEQ ID NO: 24694 - RNA, 77 nt, Homo sapiens
ggcggcaccaggaaagaggaaggacaaggggcagacccaagcgagaggcaccaagcaaggacaggacaaaggagaaa

SEQ ID NO: 24695 - RNA, 69 nt, Homo sapiens
aacgcggaagaaccagacacgcgcccgccgccaacaacaggaggggccaaagggagagggacaacacac

SEQ ID NO: 24696 - RNA, 79 nt, Homo sapiens
gcaccacgcacccgccgggcaacgaagagaccccacccaaaaaaggcgcagaaacagaggacaaggggaacggcgaggg

SEQ ID NO: 24697 - RNA, 70 nt, Homo sapiens
ggagggcacggaagccggggcagcggccacagcaacggacggaggaggcacaggaggaagaccacgcggc

SEQ ID NO: 24698 - RNA, 99 nt, Homo sapiens
cggggagaccacagagcaaacgagagaccaaccagggcggaggaaagcagaccccgaaagcccagaccggacccgcaccagcgcaccgcccaacaccgc

SEQ ID NO: 24699 - RNA, 69 nt, Homo sapiens
agacgacgccgaggccagcgcggccgacaacagggaaacggccagcaaggacaaaaaagagaggaaaca

SEQ ID NO: 24700 - RNA, 79 nt, Homo sapiens
gacccgcgacccgaaccggacgaccggcccgcgcaacgccgcgacccgaccgaccggcgcacggagacacgggcggccc

SEQ ID NO: 24701 - RNA, 80 nt, Homo sapiens
agccgcaccagccgcccaagccgcacagccgcggcggcagcagcaggagagggagacccgaccaccggaagccacggccc

SEQ ID NO: 24702 - RNA, 56 nt, Homo sapiens
gccgcagcggccacccgcccagcggcgggccaagagagccgaccaaacaccccacg

SEQ ID NO: 24703 - RNA, 54 nt, Homo sapiens
ggagccagccacaagggcggaacacagagagggcaaggccagagaaggcgggag

SEQ ID NO: 24704 - RNA, 55 nt, Homo sapiens
gagaggagagaaccagaagagaggagcagagaggaaagcaacggcgcaagcggcg

SEQ ID NO: 24705 - RNA, 70 nt, Homo sapiens
cgcagaacaccaggccagcaccaccggcaggcgggaaaacggcacaaggcgacgagggagggcagaccgc

SEQ ID NO: 24706 - RNA, 60 nt, Homo sapiens
gccgacagcccgccgggacgccggccgacgggacaccaaggacgccccaggacacgacag

SEQ ID NO: 24707 - RNA, 82 nt, Homo sapiens
gcaccccgcaggggaagccccaccgggccagccgacaccgggggacccaaggccacgcgggcccggcggggggccgggccgg

SEQ ID NO: 24708 - RNA, 75 nt, Homo sapiens
ggccaagcggaaaagacgagaagcacgacggccacgaagacggcaaggaggaaaggaagaggaagacggcaagaa

SEQ ID NO: 24709 - RNA, 100 nt, Homo sapiens
acccaggcgccacggagcccgaaaaccgagaccacgaagaagcccaaagggccgccgaccaggcggaggcagggcacacgcagcccaacccccgggccaa

SEQ ID NO: 24710 - RNA, 77 nt, Homo sapiens
cagcagcgcagccccccaaccgacgccacagaaaaccagacgagagacagaagacgaaagggcaagaaagagagcac

SEQ ID NO: 24711 - RNA, 79 nt, Homo sapiens
aagagcaggaaaagcaccagagagaccagagggcggaaggaacagaaaggcccaagggagaacacacagaaggcaagac

SEQ ID NO: 24712 - RNA, 69 nt, Homo sapiens
gagcccacgaacccgaagcccccaaagagagaaccggagagcacccaacaaaacacaggggaaacacga

SEQ ID NO: 24713 - RNA, 57 nt, Homo sapiens
cgaggcaacagaggaaaacaaacaaacgcaaacgggaacgcaaagcggaggaacgga

SEQ ID NO: 24714 - RNA, 80 nt, Homo sapiens
gcgagccagcaggagcggcgcggagcggcgagggacccgcagggagccaccgaggcacaccaaagggaaccaagaaggga

SEQ ID NO: 24715 - RNA, 63 nt, Homo sapiens
aggaaggccccacggcgcgccagccaggaagagcccgagcccgggaccacaagagcccccagg

SEQ ID NO: 24716 - RNA, 72 nt, Homo sapiens
ggacccaaagcgggaaccaaaggcacggaggaaaccaaaccccccaaaggcccaggacaggacgaagccccc

SEQ ID NO: 24717 - RNA, 80 nt, Homo sapiens
caaggacacaacccggccgcagagcccagacacgcagaccccaccaagaggcggagcgacccggcccaaggacccaacgc

SEQ ID NO: 24718 - RNA, 61 nt, Homo sapiens
gacagggagacacggcaggaacccgcgaagcgggaagccgagcacagcggggaagggggag

SEQ ID NO: 24719 - RNA, 90 nt, Homo sapiens
ccccccccccacccccggcccgggagcccccgcccggagacaaaggccacaaggacgccccaggggcagcggagcggcaggcccagaaga

SEQ ID NO: 24720 - RNA, 83 nt, Homo sapiens
agacgagaccaccggcaacacgccaacacagcacccggcagcggcagccccagcccaggaccagccgcacagacccagaccca

SEQ ID NO: 24721 - RNA, 75 nt, Homo sapiens
acagcccggcacagccccagcggagcgacgcagaagacggggacgcaccacgaggcacgcccaccgagacgacgg

SEQ ID NO: 24722 - RNA, 73 nt, Homo sapiens
cgcggcccccgcccgccccgccgcccgagccggcgccaagggaagaagcccagcggaggcgaacggcccccgc

SEQ ID NO: 24723 - RNA, 83 nt, Homo sapiens
aacaggaccaacggaagaagcggcggccgacgcaggcacccccagcgcgccggcagggcgcccgcgccggcagaggaggcgag

SEQ ID NO: 24724 - RNA, 66 nt, Homo sapiens
cccggcccggagcccccagcgcagcggccgcgcgcagacgggacacggccggccaggagcggccgc

SEQ ID NO: 24725 - RNA, 53 nt, Homo sapiens
gacgcgccgcacagagcaacgcgccccagcacaggcacaggaagagggcggca

SEQ ID NO: 24726 - RNA, 64 nt, Homo sapiens
gcccccacccaaggagaggccaaggcccgacaacaagccaaaacgcaccaaaggcagaggacag

SEQ ID NO: 24727 - RNA, 75 nt, Homo sapiens
gcaccgccggccggcggccggagaaacgaggagccagcggagccgcaacaccaaggcaacccccccaacgaggag

SEQ ID NO: 24728 - RNA, 84 nt, Homo sapiens
cgggaggaggccggggccgcgcgagggcgcccagcggcaaggagagagacaccacacaaaaaggaaggagagagaaaacaggac

SEQ ID NO: 24729 - RNA, 81 nt, Homo sapiens
ccccccccccgccgccaccgcccaggaccgccggccgggggacgagccggagcagcagccagacagaaaaagcacagaaac

SEQ ID NO: 24730 - RNA, 58 nt, Homo sapiens
ccaggcaccaccggccccggaagagaaaaggccccaaaggaagagagccgaccagcgg

SEQ ID NO: 24731 - RNA, 77 nt, Homo sapiens
acagggacggagcggagaacgcaggaaccggcccacgggaggccgagcaggaccaacaacagacggccagccccacc

SEQ ID NO: 24732 - RNA, 85 nt, Homo sapiens
ccgcccacccacagccccccccagccccaccaccccgccgaagcccagccccgagcccagcaggcccccagaagccgccgaacgc

SEQ ID NO: 24733 - RNA, 53 nt, Homo sapiens
cccacgccaccgaagagccaagcccagggggccaaagggcgagggcacaaaaa

SEQ ID NO: 24734 - RNA, 74 nt, Homo sapiens
ccccccgcggcggcagccacagggaacgacggaagagacgcgcccggcaaggagaagccacaaagccacggcac

SEQ ID NO: 24735 - RNA, 80 nt, Homo sapiens
ccacgagcacacgcagaagggggaaagagaccgggacagaacagcggacgacagcagacgacccgaagggcccggggcaa

SEQ ID NO: 24736 - RNA, 80 nt, Homo sapiens
ccggccaaaaagacacagcggaagaagaagaagagcagacggcagccaccaagagaaggagggggcagagcacggcaggc

SEQ ID NO: 24737 - RNA, 72 nt, Homo sapiens
gggacagcacaaaagaacaaaaagagaaaaacagccacaacagagcgcaagagcggacgcaccaagccaaag

SEQ ID NO: 24738 - RNA, 80 nt, Homo sapiens
agaggaagagcgaggaggaacgcgcaaggcaaagcaccgcccacagggacacaagcaggcaccaccacagcaaaaaaaac

SEQ ID NO: 24739 - RNA, 77 nt, Homo sapiens
gaggagcagaaaccagccacgggccggaggcaaaaaaaccgccagcgcggcagcaccgcgggggccggaccggaggc

SEQ ID NO: 24740 - RNA, 55 nt, Homo sapiens
gggcaaccagggaaacaggagaggcaagagcaacgaaccaaagcaaaggaggccg

SEQ ID NO: 24741 - RNA, 81 nt, Homo sapiens
aaaaccaagacaacccaacaaacaaccggagggagggaacccgcgcccagaagggaaggccacggacggggaaacgcaagg

SEQ ID NO: 24742 - RNA, 88 nt, Homo sapiens
ccaggagacccgaccccaagggagacggcgaaaaccaaagaagaaaagcaccccaagagacgagacaaagcagggcgagccaaagccc

SEQ ID NO: 24743 - RNA, 69 nt, Homo sapiens
aacaaaaagaagaagaacggcgagagccgggaagaaacaccagacccaacagaggaagccgcaagaaac

SEQ ID NO: 24744 - RNA, 78 nt, Homo sapiens
caacagcacgccacacaaggggagccgaaggccccaaagcgggaaagcgcaaagggcaaggaggcgaaaggaacacgc

SEQ ID NO: 24745 - RNA, 67 nt, Homo sapiens
aagcacccggcggccaaaggccaggacaccaacgggaccagaaggcaaacaccagcaacacccggga

SEQ ID NO: 24746 - RNA, 35 nt, Homo sapiens
gaagacagagggcgagacgacaagcccgacaccca

SEQ ID NO: 24747 - RNA, 86 nt, Homo sapiens
gacccacacagcaaggagaagagaaagcacaaagcaggagaccccccccagggagcaacagcgagcaacaggcaacgaaaacagac

SEQ ID NO: 24748 - RNA, 71 nt, Homo sapiens
agcaaaggaggaggggacccaccggaaccgaggaagggaaacaggcgagcagggacgacgagcagaagaga

SEQ ID NO: 24749 - RNA, 73 nt, Homo sapiens
aacgcacgggaaacccaagaaggagcaccggcccaaaaaggcaaaggaagaagagagggcgaaggaggccaca

SEQ ID NO: 24750 - RNA, 76 nt, Homo sapiens
acagggagcccacagaagaccaacacgaaaccagcccagagaaacaaagcaggaacaggcacaaggacgaacgaga

SEQ ID NO: 24751 - RNA, 75 nt, Homo sapiens
cagcccaaacaacggcaaacaacgaccagaaagaggcaggcaagcgagaaggaggacagggagagaagaccaacg

SEQ ID NO: 24752 - RNA, 61 nt, Homo sapiens
ccggccccaggcgcgccacagccgagccgaacgccaccagggcaagcaaaaagcaacagca

SEQ ID NO: 24753 - RNA, 72 nt, Homo sapiens
cggaagcaaggcagaagaggccgagagcgcgcgccgcgcgcccgcacaaacgccggggacaacaacccgaag

SEQ ID NO: 24754 - RNA, 76 nt, Homo sapiens
agagagaaggacgcggagaagaaggcccagagaggggcaacaaggagccccaggcccaggccaccagggcagaggc

SEQ ID NO: 24755 - RNA, 58 nt, Homo sapiens
aaaggaaacacacaaacgcagggggaacacccaggccaggaggaagcgaagaaagagc

SEQ ID NO: 24756 - RNA, 74 nt, Homo sapiens
ggaccaagaaccagcacaagcagcgcgcccggcggaggaccagggggacgggagccaggagcgacgagaccgag

SEQ ID NO: 24757 - RNA, 57 nt, Homo sapiens
agcagcacgggcggacgcggaaggaacgggcgcaccacgccaccccgccacgagagc

SEQ ID NO: 24758 - RNA, 73 nt, Homo sapiens
ccggaagcaccaggacagcgcccaagggccccacgaccgacccggagcgaccgaccccaagccggccaagggg

SEQ ID NO: 24759 - RNA, 74 nt, Homo sapiens
acagcagagggggaaaaaaacaggcggaaggaggagagagaggaaacgcccgccaacgcccagacccggcaaag

SEQ ID NO: 24760 - RNA, 79 nt, Homo sapiens
cgggaagaccagccccaaaggaacaaaagaagacaccagaagaagccacagagcacccgcggccaaacccccccaccca

SEQ ID NO: 24761 - RNA, 98 nt, Homo sapiens
cggaaaaggagcaccccaggcgagcagcaggcacaccgcagcaaggggaacaggccgagagcagccagaagacaaagaggggaagacacagaaccaac

SEQ ID NO: 24762 - RNA, 75 nt, Homo sapiens
aaggaagaaccaaagaaaacaagagggccagaggaggacagcacgaagcaccacacccacccaaggagccccaga

SEQ ID NO: 24763 - RNA, 54 nt, Homo sapiens
ggaacggcccccccccagcccgccccaaaagaacaaaccaggggagggaaacga

SEQ ID NO: 24764 - RNA, 54 nt, Homo sapiens
aaggccacgagggcggaccccgagcaaacagaacaaaaacaagaaaagcgacag

SEQ ID NO: 24765 - RNA, 63 nt, Homo sapiens
gggagaaaccccacccccaagaaccaacccccaaaggcgggacaggccagaggcagaggcagc

SEQ ID NO: 24766 - RNA, 63 nt, Homo sapiens
agcgcgaccgagaacgaaagagaccagaggaacacagccgaggcagcgcaccgcaaaggcccc

SEQ ID NO: 24767 - RNA, 70 nt, Homo sapiens
aagaaccaaacgaccgacaccgcaagaccccgaagcccagcgcagagaagagagaacaagagaaacaggc

SEQ ID NO: 24768 - RNA, 59 nt, Homo sapiens
cgcggcgaagaaggggacgccgacaaggagaagacagaggagccagaccaagagacagc

SEQ ID NO: 24769 - RNA, 76 nt, Homo sapiens
ccccacggagcagcacccacccgcacagccgaggaacacgaggacccaaagaacaaacccggagagaagaaaaccc

SEQ ID NO: 24770 - RNA, 80 nt, Homo sapiens
cgagagaaggaaaaggagagaggcagggaggggaacgggggcaacccgaccccacgggcggcgagaggcacgggacacac

SEQ ID NO: 24771 - RNA, 34 nt, Homo sapiens
cggaacgcggcgaccgccagaaccgagggaaacg

SEQ ID NO: 24772 - RNA, 57 nt, Homo sapiens
aggaaccaccacccaagaagccagcagccagccggggagccaccaccaacacaggca

SEQ ID NO: 24773 - RNA, 68 nt, Homo sapiens
gggagaagccagaagacggccaggggaaacggaaaaccacccaggcagccccggcaggaccagcacac

SEQ ID NO: 24774 - RNA, 84 nt, Homo sapiens
ggccacggcagaccacccgccccgaacacgacggcgggacccggaggcggagaaggccaaggccgcaaacgacgccggcggcag

SEQ ID NO: 24775 - RNA, 77 nt, Homo sapiens
cgacagccgcgacggcgagcccgggccgcgcccgagaaaaccagaaggcaccgacaggaaaggaaaaggagaaccag

SEQ ID NO: 24776 - RNA, 73 nt, Homo sapiens
gaggggaccgaggcacacaaagggacggcacccagcgagcggcgagaccaaacccgagaggaagaggaagaac

SEQ ID NO: 24777 - RNA, 75 nt, Homo sapiens
acacgcccggaagaccagccaacagcccccagaagggaaacgagggcaggaaggggaacgacccacccgaacacc

SEQ ID NO: 24778 - RNA, 72 nt, Homo sapiens
ggcgaacacacaggaggggagcgccagcgggagagcgccagggaacggagagggaaccaaaggagaggggca

SEQ ID NO: 24779 - RNA, 77 nt, Homo sapiens
gggccgggccgggcaagacggcgaagcgcgcgccgcgcccggaccccagggcgggacgaccccacaacccgagcgcc

SEQ ID NO: 24780 - RNA, 76 nt, Homo sapiens
acgacagaagcagcaagaaccacagaagccagcagacccagcacgggacagaggcaagcaagccccagaaggccca

SEQ ID NO: 24781 - RNA, 76 nt, Homo sapiens
gaccagaggggccgggacccggaaagggacccaccccgaagaccggagcgcagcagcccggaggagaggcagaaag

SEQ ID NO: 24782 - RNA, 81 nt, Homo sapiens
ggaaacaggcggagccgcgcccgggccaccccgaggaagcacaggcggcggagaggcgcggccacacacgggaggcacccg

SEQ ID NO: 24783 - RNA, 69 nt, Homo sapiens
cgccaaaagcgacaggagcaaaagcggcccagaaggacggaacagccagggaggcgcgacacggcaagg

SEQ ID NO: 24784 - RNA, 84 nt, Homo sapiens
agggcagcggccacacacagacggcccaacccgacacgagccaagcaagcagaagaaaaaaggaaagcggcagacagagggcac

SEQ ID NO: 24785 - RNA, 58 nt, Homo sapiens
caaccgggcgcaggccacaggaccagcacggaggcaaacagaagcccacccccaacgg

SEQ ID NO: 24786 - RNA, 77 nt, Homo sapiens
ggcgcccacagccacgggaccggcgcagcaaagaggaaaagagagaagacgacagcggaggccgcgcggaaggcaac

SEQ ID NO: 24787 - RNA, 74 nt, Homo sapiens
cgagacagaagcgcggccagagagaacaagcgacccgacgagcgcaaggagaggaaacggaacgccaagcgaag

SEQ ID NO: 24788 - RNA, 88 nt, Homo sapiens
agcagcccaggaccgagaccggagcagccggggcggagcgggaggaagccagcccgagcaggcccaggggaggaggggcaaccacaga

SEQ ID NO: 24789 - RNA, 81 nt, Homo sapiens
aaaccaagcaagcaagaccagacagacaaggagaagccgagaagaacgagccaccaggaagccaccaacaagaaaacggca

SEQ ID NO: 24790 - RNA, 75 nt, Homo sapiens
gggacaagcagcaaggcgcggggggccacgcgaggccgaggaaacacaagagagaaaaagaccgcgagccgaagg

SEQ ID NO: 24791 - RNA, 77 nt, Homo sapiens
cggcccccgggaccccggccgcggagcgacgccgacggcaaaggacaccggaaggaagagaagagaaccacgacaag

SEQ ID NO: 24792 - RNA, 83 nt, Homo sapiens
cggggcgcgcggcccccgcgcgccggcgcgcgggcgggccccagaccacgagaagcaacaggcacaaggccggcggaaaaaaa

SEQ ID NO: 24793 - RNA, 116 nt, Homo sapiens
caacagagaccagaaccggaggccagacaaggaggaccgcacgacagcggcccgcgggacccaaggccagccagccccaggcaccagcggacaggacagggaggacgaaggccccc

SEQ ID NO: 24794 - RNA, 82 nt, Homo sapiens
cggaggaaagcgaccaggcggcggaacagcaggccggacagaagccagccagagcccacaaacagccgagcaacccagaaga

SEQ ID NO: 24795 - RNA, 62 nt, Homo sapiens
aaaaacggccaagaggcagaccaggaaagggaggggcccgagagaagagaagagcggaggaa

SEQ ID NO: 24796 - RNA, 68 nt, Homo sapiens
caccgggccgcaggaccaccccgcacaccacccaaggagggcacaggaaaagaccccacaagcaagga

SEQ ID NO: 24797 - RNA, 78 nt, Homo sapiens
gaaaaacacccaccgaaaaacagagggagagccccagagcagccccggagaccaagagaaaacccacggccaccgggc

SEQ ID NO: 24798 - RNA, 76 nt, Homo sapiens
cgcagaccgcagaaggccggagacaccagcagagaaccgagcggccggagcagaaacgagcggaccacggagcccg

SEQ ID NO: 24799 - RNA, 69 nt, Homo sapiens
cagggccaccgcgcaagggcgcgcgggggcacagcccaggcgcagcagcggacccccccggccccggag

SEQ ID NO: 24800 - RNA, 84 nt, Homo sapiens
aaagcaaaacaccagagaaacaccacccacagaaaggagaaggagaggagagccacaaaaccacagaaagagaagacgacacag

SEQ ID NO: 24801 - RNA, 35 nt, Homo sapiens
gggacacccaccaggcaaggcgcgggcacagggag

SEQ ID NO: 24802 - RNA, 74 nt, Homo sapiens
aacgagaagcgcaaagccagacccgaagacaaaaccacccacgaaagcgaaaagacccaaaacaaggcagccac

SEQ ID NO: 24803 - RNA, 72 nt, Homo sapiens
ggaagcacagagggaaaggaaggcggaaaagcccaaacaggaaacccccgagaagcgcaccaagaacagaag

SEQ ID NO: 24804 - RNA, 117 nt, Homo sapiens
aggagcaagcccgcaaagcccgacagagccaccaagcggagcaggagcacagaggcccagcccaggccagcgccagcccacagaccaaggagacaagacccagcacggacaagagga

SEQ ID NO: 24805 - RNA, 72 nt, Homo sapiens
cgggccaaaggaaaacaccacaagaggacaaccggaaaggagcgccgcaggaggggcggggagaggagacgg

SEQ ID NO: 24806 - RNA, 77 nt, Homo sapiens
cccgagaaaccgcagcacacacgaagaaaaaagcgggcacgggcagcacaaagccggagggcgccgggcacggggca

SEQ ID NO: 24807 - RNA, 78 nt, Homo sapiens
agcaccccgagaaccgcaggagccagaggggaggcagggagcccagaaagaagagaaaaagagagagaagccaccgcg

SEQ ID NO: 24808 - RNA, 75 nt, Homo sapiens
cgcgaccggcggcggcgcgcacagaggacagaggccacgaagccagagcgcaaccagacgagaagggaagagggg

SEQ ID NO: 24809 - RNA, 69 nt, Homo sapiens
gggccccaagagcacagaccagcagccgccaaagcgaaaggggacaaaaaccggacgccgccccccccc

SEQ ID NO: 24810 - RNA, 80 nt, Homo sapiens
acggccaccggcgggaggaacaaaaggacgagagaggagcgcgggccgagagcggagagcgggacgcaaggaggaggacg

SEQ ID NO: 24811 - RNA, 75 nt, Homo sapiens
aaagcgaaggggaaggcgccgaagaggacgaagggcggagaacggaaaagcaccaggaagcagagaggaccgcag

SEQ ID NO: 24812 - RNA, 78 nt, Homo sapiens
ggagaacaaggaaaaagcacaccaaacagggcagcaggagcagagagaccaagggaaaccgagaaggccaggagcaac

SEQ ID NO: 24813 - RNA, 78 nt, Homo sapiens
aagccgcgccggagcggagcgcgggcgccggggagccagagccccaaggcagcgaaaccaaagaagaaggcagaagcc

SEQ ID NO: 24814 - RNA, 74 nt, Homo sapiens
accagagcccgcgcgagcggcccagacagcagggcaagagacgcagacgacggaccggaacgacccccaaggca

SEQ ID NO: 24815 - RNA, 72 nt, Homo sapiens
gagcccaccgaagggcaccagcacacgccgccagccaaaccagaccccggaagagaacaggccccgacaaac

SEQ ID NO: 24816 - RNA, 75 nt, Homo sapiens
acaggggcgagaaagaagaagaaaacggcaaagggccgggcgggcaccaccaggggccaacccaaaccagacgcc

SEQ ID NO: 24817 - RNA, 72 nt, Homo sapiens
cgcccgcggcggcagcgcgaccacgaaggccgcacccgaggcgggaacaaggaacagacaagaaaaagggaa

SEQ ID NO: 24818 - RNA, 71 nt, Homo sapiens
gaaaagcccgggagcagaagggaggcccaagacccacaacaaaaggggaaggaccccccacagcgggaggg

SEQ ID NO: 24819 - RNA, 66 nt, Homo sapiens
gaaggaccaagaaccaggacccaccggagcgccgcgcggggcaggccgggcgggcagaggacgggc

SEQ ID NO: 24820 - RNA, 44 nt, Homo sapiens
caacaacagcggccagagggcccaaacaggacaacggaacaaag

SEQ ID NO: 24821 - RNA, 71 nt, Homo sapiens
gcccaagggaagcaaccccacaggcacaagaccggcagggaggaagccaagaaaaagaaacaagaaaaaac

SEQ ID NO: 24822 - RNA, 37 nt, Homo sapiens
ggaaaaaggacagaagggagccgaggagccgccggcc

SEQ ID NO: 24823 - RNA, 64 nt, Homo sapiens
gcagcaaacacgggacaaaaaccagaccaggaaacgggggcgcacaggaaacagaaaaaacagc

SEQ ID NO: 24824 - RNA, 79 nt, Homo sapiens
ggacaaggacagaacaccagcacggcgaagacaacccagaaaagaaaaggccaggggcgccgaaaaacccgggaacaaa

SEQ ID NO: 24825 - RNA, 36 nt, Homo sapiens
gcccaacggccagacaggaggaaggcagagaaaaaa

SEQ ID NO: 24826 - RNA, 81 nt, Homo sapiens
acacagacgaaccaggacagcagacgacccgaacggacgaggcgaggggacggcggggagcgcaggacagacgcccccgcg

SEQ ID NO: 24827 - RNA, 67 nt, Homo sapiens
aggacccaccaggccgaagccagccggagcagcggcacagaaaggaaggaggagaaggaagccacga

SEQ ID NO: 24828 - RNA, 79 nt, Homo sapiens
aggaacagggaccacggggggcaacccgccgagggcgcggcacggaggcagcgggccgcgccagacgaccgccacggag

SEQ ID NO: 24829 - RNA, 67 nt, Homo sapiens
ccaagagacccaagaggacgaaacagacggcaaaggaacacgcaaacacacaagaggggacaagacc

SEQ ID NO: 24830 - RNA, 68 nt, Homo sapiens
ccccggcaacgcggcaagccaaagcgccacaggaaaaagggccaccccgaccaccgggccccacggag

SEQ ID NO: 24831 - RNA, 66 nt, Homo sapiens
gccgagccggacggccgcgaagaggcgggccggggaaagggagcagcaccggccacacccacagca

SEQ ID NO: 24832 - RNA, 60 nt, Homo sapiens
acacgacaccaggcgaaccggccacgcacccccgaagccggcacccaaaagagaaaccac

SEQ ID NO: 24833 - RNA, 71 nt, Homo sapiens
cccgcccacgcaaacccaaagaccccgccggagacgagaggaaagaccacagcaagaccacgcccccagcc

SEQ ID NO: 24834 - RNA, 68 nt, Homo sapiens
gaccggacagaaagccaaaaaggagaaagccaacgccaagaaccaagaaagacgacgcggaacgagag

SEQ ID NO: 24835 - RNA, 68 nt, Homo sapiens
ggaaaaggaagcaaagggaaacgaaacacagacaccaccacgaccaaagaaaagccggacgcggcagc

SEQ ID NO: 24836 - RNA, 75 nt, Homo sapiens
acaaggaagcaaaagcccagaagaagaccgaggagcagggagcaaccacaaggaaaggaaaccaccgaaccgagc

SEQ ID NO: 24837 - RNA, 75 nt, Homo sapiens
aaaggcccccgccacccccaagccgggacccccgcgccacccccaccccggaccccgccccagagacgaagagga

SEQ ID NO: 24838 - RNA, 90 nt, Homo sapiens
ggacccacagaagagcgaagcgaggacacacccaggaaaagaccaggacggacaagcacagccggaagggggcagacccaaaggaaacgc

SEQ ID NO: 24839 - RNA, 75 nt, Homo sapiens
cccccgcccacacagccggcccccggcccacgcagccccaccaccgcccggaggagaacaaacgcgaccagaacc

SEQ ID NO: 24840 - RNA, 80 nt, Homo sapiens
aagccagcagacaacgacagaaaaccacccccaggaaagaaagaagaggccgaaagcagcgaaacaacgaaggccgagaa

SEQ ID NO: 24841 - RNA, 80 nt, Homo sapiens
acagacacccgccacaccgcagcagacagagagacaagaccccagccagccccgccaggcagcagccgggacagaccgga

SEQ ID NO: 24842 - RNA, 75 nt, Homo sapiens
aggcaccaaccacagacacacaggaggggaagagcacccagacaaaggaaggcagagcagcgaggagaaaaaaac

SEQ ID NO: 24843 - RNA, 78 nt, Homo sapiens
aagaaaaaacaccagaggaaacccagcaaaacaaaccgagcggcgcgcagcccaaacccgacccaggcacaggcacaa

SEQ ID NO: 24844 - RNA, 81 nt, Homo sapiens
cccccggggcaggggcgcaagcggcggagacgagggcacccagaaacgccaacaaagaccggcagagccacaacaagagcg

SEQ ID NO: 24845 - RNA, 75 nt, Homo sapiens
gccgccaggcaaagcaacaccacagacagagagacggccacagcacaacaggccaaaacagaagaggcaaagccc

SEQ ID NO: 24846 - RNA, 81 nt, Homo sapiens
caccgggacggaccgagaccggaccgagagcggaccgagagcgcgaaacgcacgagaagacgccgaacggaacaaggaaca

SEQ ID NO: 24847 - RNA, 76 nt, Homo sapiens
aacaaggaaccggccacggaaacagaaggccagaaacagcagcaaaaccgccccacggcgaccccaggaaacacag

SEQ ID NO: 24848 - RNA, 82 nt, Homo sapiens
acgaggaccgagaccgcggccgggaccgaggcagacaggcagcaaagaaaggaggagaagcccagccgcgcgagggcgggag

SEQ ID NO: 24849 - RNA, 78 nt, Homo sapiens
caacaggaaagcagcccgaaaaagacgcgagaagccacacggcacagggggggccacccccagaggaggcagaacgaa

SEQ ID NO: 24850 - RNA, 70 nt, Homo sapiens
ggacgaccgacgccaaacgggacccccaccaaccaggaaaaggagcgccacaggacagcgcggacgccac

SEQ ID NO: 24851 - RNA, 88 nt, Homo sapiens
ggacgaggcggaagaccgcgcgcagggccgcagcgggagcggacggcgagcgcgagcggcgcgagaaagccgagacgcaccagagccg

SEQ ID NO: 24852 - RNA, 78 nt, Homo sapiens
agagcccgaggaccccaccaggcaagggcagcaccgagaagcggggaccaacagaaaaaaggcaagcgagaagagaga

SEQ ID NO: 24853 - RNA, 53 nt, Homo sapiens
cgggaaggcagacagcgagggcgacgagaagaagagagggcgaaggaggccac

SEQ ID NO: 24854 - RNA, 68 nt, Homo sapiens
cacaaacgcagccaacccaaaaagagccaaagagcacagggacagaaaaacagcgcagacgagccgca

SEQ ID NO: 24855 - RNA, 70 nt, Homo sapiens
caagaacccagccaaagccccaagaagaacggaaaagccagccaggacaggacacccccggcaccgagga

SEQ ID NO: 24856 - RNA, 71 nt, Homo sapiens
cccgggcacaggaaggggacggaacccgagcaaccggggcaccgcgaaccggcgcccacgcccccgccccc

SEQ ID NO: 24857 - RNA, 73 nt, Homo sapiens
cgacaggaggagacaggcgagagaggaggacacgaccggaaggagggccccggagcagccacaccaccgaggc

SEQ ID NO: 24858 - RNA, 78 nt, Homo sapiens
gggaccacagaacccaccgaaggacgaagggaaagagaacagaaaaaacagggcagaggagccacgcacccaggcgga

SEQ ID NO: 24859 - RNA, 74 nt, Homo sapiens
cagcaggagcagacggccgaggaaagaccgcgaccgcacaagcagccgccagcggaaccaagcggcgcggcaca

SEQ ID NO: 24860 - RNA, 69 nt, Homo sapiens
ggaagggacaaaacagaggcaacaaggcacaaggcgagaagggaaggcaagagaccaccaggagcgaaa

SEQ ID NO: 24861 - RNA, 80 nt, Homo sapiens
caacgcgggacaggaagggccgagcggcgggaaagagccaacgccggcggaccccagcgacacagcagaaccagcagcac

SEQ ID NO: 24862 - RNA, 96 nt, Homo sapiens
ccacagccaggccagccaacaaggccaacccccaccacccaccccccaggagggagaaggggagccaaccaaggagagcgaaggagacccacggga

SEQ ID NO: 24863 - RNA, 53 nt, Homo sapiens
ggaggaaacgggcaggggcacaacagcaggacgcccagaacagcgcaccggac

SEQ ID NO: 24864 - RNA, 76 nt, Homo sapiens
cgccccggaacagaaacagaccgcgcggagcgacgcacgagacgaggacggggaaggaggagcccacaggggagag

SEQ ID NO: 24865 - RNA, 97 nt, Homo sapiens
gccggcccagcgccgcggccaaaccccaggacaacgcgccgcaaaagggaacaagagccccgccccagaggcccccgccgccacccccgagacagag

SEQ ID NO: 24866 - RNA, 71 nt, Homo sapiens
aaacacggcacaaaacaaggaaagagagcgccccacaggaagcccgcagaaggcaagccgaaagaaggacg

SEQ ID NO: 24867 - RNA, 68 nt, Homo sapiens
gcacaagcaggacaaggggaagggccgaacgcccccggcggacaggggggacagcgccgaccagcggg

SEQ ID NO: 24868 - RNA, 75 nt, Homo sapiens
cagcagcaaaaggggcaaggggaaaagacagacgaacagaaaagacgaacgagccacaagcagcagagaagacca

SEQ ID NO: 24869 - RNA, 67 nt, Homo sapiens
gcaagcgaccgaggcaccgaagcccgccccagcacgcgagggagaagcccgagagaaaggaccacgc

SEQ ID NO: 24870 - RNA, 73 nt, Homo sapiens
gaaaccaggccacagggaccgcaggcccgagaacacgcagacagccgagagccaaaaccgcaggcagaagaga

SEQ ID NO: 24871 - RNA, 71 nt, Homo sapiens
gacaacacccgaaccaagaccaggaagaagccggccagcacgaggcccgggggacaagggcgccaacgcgg

SEQ ID NO: 24872 - RNA, 73 nt, Homo sapiens
cccccgccacaccccagcgacgaccacaaaaccggaccccccgcccaccccagcagaagaaccaggacaagaa

SEQ ID NO: 24873 - RNA, 76 nt, Homo sapiens
aaggaaaaagaagaaacaccaagacaaaaacaaaggccgggccgagaacgaacagcgcaagacgcgagcaaaaaga

SEQ ID NO: 24874 - RNA, 55 nt, Homo sapiens
gggagggagggaagaaaggagagggcccgacccgaaaagcgcagccaaccagacg

SEQ ID NO: 24875 - RNA, 79 nt, Homo sapiens
gaggccggggacaaccacagcgcgaaccgcacaagacgacggaacccacaaaagacgcagagagcccgagcccagcaca

SEQ ID NO: 24876 - RNA, 73 nt, Homo sapiens
ggggcagccgccgcacgcccccgggagcgcgggcaaaaggaaacgaaagagcccagacacccaagagggccaa

SEQ ID NO: 24877 - RNA, 76 nt, Homo sapiens
gcaaacaccaaagggcgagacacaccgcacccaaccaccaccaagccgccagaccaccagaggagaccaagcaggc

SEQ ID NO: 24878 - RNA, 83 nt, Homo sapiens
gccaaggaacacgcacaaaaaagggcagaagagaagcaggaaggaggcagaggcacaccgaaagaaaaccagacgagagacag

SEQ ID NO: 24879 - RNA, 81 nt, Homo sapiens
ggggacaaggagaggcggccaccagcgcagaaacgccacggccagaaagaggagacccgaaagaccaccggggcaagcaca

SEQ ID NO: 24880 - RNA, 56 nt, Homo sapiens
ggggcgaggacccccgagccagagccagcgggccggcaccggcacgaggagcgcac

SEQ ID NO: 24881 - RNA, 80 nt, Homo sapiens
cggaccgcccccgagcccggaggggggagaaaaggagaaaccagagcagcaacagcgcaaggaaaaagcgccaaaggccc

SEQ ID NO: 24882 - RNA, 86 nt, Homo sapiens
ccgcgcccggccccgcggggccgcccggcccgcccgagaagaagccagaagaggaaggacccaggaaacagcgcgaccagaggagc

SEQ ID NO: 24883 - RNA, 39 nt, Homo sapiens
agaaaaagcccggagaaccaggcagagggaggagcgaga

SEQ ID NO: 24884 - RNA, 68 nt, Homo sapiens
gaggccccacgggcggagaggcggcgcggcccaaccgggcggagaacggaaaagcaccaggaagcaga

SEQ ID NO: 24885 - RNA, 82 nt, Homo sapiens
ggccccgcgcccgcccaggggcgcgcgccgcgcggccccacggacagcggaagcacgggccagacccgcggacacagagcag

SEQ ID NO: 24886 - RNA, 77 nt, Homo sapiens
cgccagacgccccaaacaaacagccggacacggcagcggcccccgggacaaaacccagagaaccacgccccggccgc

SEQ ID NO: 24887 - RNA, 80 nt, Homo sapiens
gagcgccggggccaggagagcgcgccggcgagaagcggccgagccagcagcaggcggagacgccagcgacgaaccgaaga

SEQ ID NO: 24888 - RNA, 56 nt, Homo sapiens
gccacggaggggcagccacccccggaagaccgcaggaaagcaggaaggcaagaaag

SEQ ID NO: 24889 - RNA, 76 nt, Homo sapiens
aagaaaggagaagaaagcagacaaaaccgccagcaggcagaggagaccgaggacaggccggacaccgcagcccaaa

SEQ ID NO: 24890 - RNA, 78 nt, Homo sapiens
gaccgccgcagagggagaaagaacaaggccaaggaagcgcggcagccacccagaaccggaaagggcagagaaagcagc

SEQ ID NO: 24891 - RNA, 80 nt, Homo sapiens
gcagccgggagccgccccgcgccgccgcagagccgcccacagggggcagcgggacaacacgaaggccaccgaggggaaga

SEQ ID NO: 24892 - RNA, 75 nt, Homo sapiens
aaggaacccaagcagggcgaagggaacgcaaggcccccgaccacacgcccgcgcgagagagaaggcagaaacaaa

SEQ ID NO: 24893 - RNA, 83 nt, Homo sapiens
gacacccgagcacagagacgaagaggaccaggagcaaacagaaggacaaccaaagccaagcaacgaaggacaggaccgccccc

SEQ ID NO: 24894 - RNA, 62 nt, Homo sapiens
ccggcgccgagggcggaaccgagcgggaaaaggaagagagaaggacgcaagaccagcacaca

SEQ ID NO: 24895 - RNA, 70 nt, Homo sapiens
cagcagagcgcaggaaagacaagccgggagcagacaagaggaacaggaggcccggacccccagcacaagc

SEQ ID NO: 24896 - RNA, 67 nt, Homo sapiens
ccaacagcaaaacgcccgcggaaaaacacgaaagaaaaaagcagagagaacacaagccaagccgaga

SEQ ID NO: 24897 - RNA, 71 nt, Homo sapiens
gcccggacacagcaaaccgggccacaggagaaagaacagcaacaaaagcgggcaccaaagacaaggaaccg

SEQ ID NO: 24898 - RNA, 71 nt, Homo sapiens
gagaagccaaggccaggggcaaacagaaccaagaaaagggcacgacgaacaaacaccagcgagggacagga

SEQ ID NO: 24899 - RNA, 83 nt, Homo sapiens
aggagaaggaaagcgaaggggaaggcgccgaagaggacgaagccgcagcgccagcgaggggcccggagaccagccaaccggac

SEQ ID NO: 24900 - RNA, 80 nt, Homo sapiens
gacccccacgacgggaagccaaggagaagagaccaaggcgcaggaacagcgacggacagcgcacgaaacacacaaagaac

SEQ ID NO: 24901 - RNA, 41 nt, Homo sapiens
cgggacaagaaaacagcgaaagcaccgggaggaaagagagc

SEQ ID NO: 24902 - RNA, 61 nt, Homo sapiens
cccgcaacagaaaaaaaaagcccagcaaagagccacaggccacaggaacgcgccgaaacac

SEQ ID NO: 24903 - RNA, 63 nt, Homo sapiens
gggacaccagaacgcaaagcgacaggcgaggaaacagaaacaagacccggcgcaccagaacca

SEQ ID NO: 24904 - RNA, 115 nt, Homo sapiens
gaagacagggagcgagagcggagaagcgggaggagaccacccaaacgcggcacgggagggacagagcgaagaaccccccaagaagacgaaacccccgggccacaagaaggggggc

SEQ ID NO: 24905 - RNA, 57 nt, Homo sapiens
ggcgcgccaggaccgcggggagaccgggcacacggacggaggcagcacggcaggaga

SEQ ID NO: 24906 - RNA, 74 nt, Homo sapiens
ccgaagccgcgcaccaaacgcacagcccgcaagaagaagcaccaagcaccagagagagaggggcgccggagcca

SEQ ID NO: 24907 - RNA, 51 nt, Homo sapiens
aacacggaggcacacaggggaaacccagacgacaaggaaggccaagggacc

SEQ ID NO: 24908 - RNA, 55 nt, Homo sapiens
gaaagcagccccagcgccgaggcagaacaacggggaacgcacgcggaggaagaaa

SEQ ID NO: 24909 - RNA, 65 nt, Homo sapiens
ccgccccggaacagaaggcgcggccgaaaaagggcagaaaggcggaagccaaagcaggagagaca

SEQ ID NO: 24910 - RNA, 76 nt, Homo sapiens
gaagaccagggagcagaccgccaggacgcgaccaggaaaggaagagcacaacaggaagaggagagccagagagacc

SEQ ID NO: 24911 - RNA, 62 nt, Homo sapiens
gaaagccgaagagagaggcggcagcagaagcaaagcaggccaagggacaacagagccgacac

SEQ ID NO: 24912 - RNA, 81 nt, Homo sapiens
gcgaggggagcaccaggaccgggccggaacgagacgcacgcggcggagaaaccaccacaaacacgaggccagcaacgacca

SEQ ID NO: 24913 - RNA, 78 nt, Homo sapiens
gcccggccaaggagaaagcgccccacaccagagagggagccacggcaccaagcggggagcaagggagcccccggccgc

SEQ ID NO: 24914 - RNA, 61 nt, Homo sapiens
cccggcggcgggccgaggagccgggcgcaaggagcggaagagacggcccgccacgggcccc

SEQ ID NO: 24915 - RNA, 34 nt, Homo sapiens
gcgggccgccagacgggaaggacggagcgccggc

SEQ ID NO: 24916 - RNA, 61 nt, Homo sapiens
cacacccccaacaacaggcagcagggagaagaaaagcaacacagcgaccagaaaaaacagg

SEQ ID NO: 24917 - RNA, 72 nt, Homo sapiens
aaagagcaaaagacggacggaaccacaaacaaggcgcagaggagccagagcggaagcacgaccagcagagaa

SEQ ID NO: 24918 - RNA, 68 nt, Homo sapiens
aagcccgccgccccggggacaagaaacagagcaaaaaccggaaagaagaagagagggcgaaggaggcc

SEQ ID NO: 24919 - RNA, 76 nt, Homo sapiens
cgcccagcagaagaagagaggagggagaacacagaaaccggccccaggccaaggaaaaggaacagagagagcagaa

SEQ ID NO: 24920 - RNA, 73 nt, Homo sapiens
ggggggcccggaccagaccaagaggagacgcgagagcgggaggaagcggccaccggaaagaccaggcaaaagg

SEQ ID NO: 24921 - RNA, 53 nt, Homo sapiens
aagagccaggaccaccggaagccagaaaggaaagggcagcggaggcagagccg

SEQ ID NO: 24922 - RNA, 76 nt, Homo sapiens
gcagggacccgggacagcggagagggcgggggggggcacccccaaaggaagggccccgggcaaggagaagcccagc

SEQ ID NO: 24923 - RNA, 75 nt, Homo sapiens
gccaagaagcagaccagcacaggacccaacaagaagcaagaagagcaggagacgaaggagaccggcgaggaccaa

SEQ ID NO: 24924 - RNA, 62 nt, Homo sapiens
ggcgagagaagccaaggacccgaccagaaacccagaaaccgaccagagggcaaaggggagac

SEQ ID NO: 24925 - RNA, 63 nt, Homo sapiens
cgccgcacagccccgcgcccgagaagacgaccccgacgcaggccaggagccgcggacagaagc

SEQ ID NO: 24926 - RNA, 104 nt, Homo sapiens
ggccgggcgggcgcacgcgggcgcacccgccccggcgccgccggcccgcgggaccgacagccgggcagagccgacaaccccggaacgcgggcaaaaggccccag

SEQ ID NO: 24927 - RNA, 70 nt, Homo sapiens
gcaggacagccagcagaacccgaaagccagccagcccacgcccgaccccccggaccccagcccgcacgcc

SEQ ID NO: 24928 - RNA, 83 nt, Homo sapiens
gccggcgccggcgccggcgccgcggccccggcgcggacccgccaccggaggaggagacaagcggaggacaacgcagaagccaa

SEQ ID NO: 24929 - RNA, 73 nt, Homo sapiens
gaaacccccgccaacacaccacgggaccgggcaagggaagaaaagagggccgcccagagccggaccagcaaac

SEQ ID NO: 24930 - RNA, 72 nt, Homo sapiens
caggcaacggggaccccggagcccagaagacagagggcgagagcccacgcccccaggacgccccggccccac

SEQ ID NO: 24931 - RNA, 75 nt, Homo sapiens
gcaagcgaggggagagaagacgacagaacaagagaccaggcgacacaaaccacaccagagccagacacaggaaaa

SEQ ID NO: 24932 - RNA, 74 nt, Homo sapiens
gcagcaacaacgggcagggcggaaggcccggagcagggagcaaaccgcaagggaccagccgaaacaagaaaacg

SEQ ID NO: 24933 - RNA, 54 nt, Homo sapiens
aaaagaggaagagggcgggaaggcagggaagaagacggcacgggacccccagca

SEQ ID NO: 24934 - RNA, 48 nt, Homo sapiens
aggaggaaaagaagccagaccgagccgagcagaaccggccagaaggaa

SEQ ID NO: 24935 - RNA, 82 nt, Homo sapiens
gccaaagaaaagcagggacaacaggaacaggaacagagacgccaagcccgggcccggaggcacgagacaccagaagaaaggg

SEQ ID NO: 24936 - RNA, 73 nt, Homo sapiens
gcagacgcgaaggaacggcaaagagaccagaccggaagaagcagggaaagcagaaaaaaggaccagaccacaa

SEQ ID NO: 24937 - RNA, 95 nt, Homo sapiens
ccccaccacgcagccagacccaacggacacgcagagccccccaggccacccaggaccagcggcacacccccccgcggcccaaaaagcccgggcag

SEQ ID NO: 24938 - RNA, 78 nt, Homo sapiens
gaggcaggaccaaaagggaaaagcaccggaccgaccaacgggcagagggagcggccacaagcccaagggccagacagc

SEQ ID NO: 24939 - RNA, 78 nt, Homo sapiens
cccggacaggaggagccagggcccggcccgaaaggagagccaaacccagaaggaaaggagaggagaaggaagagcaag

SEQ ID NO: 24940 - RNA, 70 nt, Homo sapiens
ggacgccccaccgccgacgcccccagccaccaggcccaggcggccgagccgcgagaacaacggagacggc

SEQ ID NO: 24941 - RNA, 72 nt, Homo sapiens
caaggagagcgaccacgggagcggcagcccgcacagcaagcaaagcacaggggaacaagaaaaccacaccaa

SEQ ID NO: 24942 - RNA, 78 nt, Homo sapiens
gaggagcgaggcacaggcgagccacccacaagaagcagaggacaggaggccccgagggaagcgggagaggccacccgc

SEQ ID NO: 24943 - RNA, 55 nt, Homo sapiens
gcccgggcaggggcggggcaacgcggaaggcgccggcggcgccggagcaggggac

SEQ ID NO: 24944 - RNA, 73 nt, Homo sapiens
ccagaagacagagggcgagggaaaagcacagggccaggaagcagagggacagccaggccagaaacaggcccag

SEQ ID NO: 24945 - RNA, 42 nt, Homo sapiens
ccggcacaggacggccagaggcaaagcaaggcaaggccagcc

SEQ ID NO: 24946 - RNA, 80 nt, Homo sapiens
gcacgacaacaaaaccacagagagagccaagaacgagacaagcccacgcacaacacgaccagagggacacggagggacgg

SEQ ID NO: 24947 - RNA, 74 nt, Homo sapiens
agcgggaggccagcgccgcacaccaggcaaaacgggagacgcaccacaggggagagacacgccacccgaccgcc

SEQ ID NO: 24948 - RNA, 83 nt, Homo sapiens
aggcggccaagcacaacggcggcacccacgcagacaccagccgcgccagggacccagacaggagcgcgggaagaagccggccc

SEQ ID NO: 24949 - RNA, 36 nt, Homo sapiens
acagcggggcggagaggggaaccaagaagaccgagg

SEQ ID NO: 24950 - RNA, 75 nt, Homo sapiens
aaaagagaacaaccagagaaggccgccaaagcgaagggcaggacgaagagaggcgacgcccccggaacacaacaa

SEQ ID NO: 24951 - RNA, 80 nt, Homo sapiens
caacaggaccagcagggcgggcaggcccacacaggaaaaagaacagaggccaacccgacaagaggaccaaggccaccaga

SEQ ID NO: 24952 - RNA, 72 nt, Homo sapiens
cgaagagcagcaggaaaccgacgaacaacacaggaccagcacccacaaaagcgaaaagccagacaggaacac

SEQ ID NO: 24953 - RNA, 85 nt, Homo sapiens
agaaccgagccagacagggacggaggacgagcaaaagagcaccgaaccggagaccgaggagcgcaaggccacgagcggcgcagcg

SEQ ID NO: 24954 - RNA, 63 nt, Homo sapiens
gcggggggacgccggcggagacgcgggcgaggcccacacgggacaggaagggaaccggacagg

SEQ ID NO: 24955 - RNA, 100 nt, Homo sapiens
cgagacccccacagaaaagagggaggagcacaaaccagaagcgaacaccgagcggagaacacagcacggaaggccaagcggaaaagacgagaagcacgac

SEQ ID NO: 24956 - RNA, 85 nt, Homo sapiens
cgggaggcgcagcggcgcgcgccgggagcgggggcgcgcggccgcggaccggaaacaggcacagaacagaaggaaaggacgaaga

SEQ ID NO: 24957 - RNA, 79 nt, Homo sapiens
gggaccccggagcccagaagacagagggcgagacgaccccaagccagcacaccccgggggagcagccggagagaacacg

SEQ ID NO: 24958 - RNA, 42 nt, Homo sapiens
acagccgcgggagacaggcaagagagagcacaaggagagaac

SEQ ID NO: 24959 - RNA, 81 nt, Homo sapiens
gaacaggccggagcggcccagaccccgcccgcgggagcgggcagcacaaaccacgagaagcaaaaacagaggaagagccaa

SEQ ID NO: 24960 - RNA, 81 nt, Homo sapiens
aggagaaagcccaaagcagccagggagacccaaaccgaaggcagcacggcacacgccaaaaaacccgcagcccaaagggca

SEQ ID NO: 24961 - RNA, 83 nt, Homo sapiens
agcgcgggaggagccgggcgcagaaccagaccgggagcacgcacgccacgaagggccgcccccaaagccaaccaaggagagga

SEQ ID NO: 24962 - RNA, 80 nt, Homo sapiens
cacccgcagcgcagaaggaaccggcaaagcgcaggaacgggaacgcaggagcgaccaggcaccaccccaggcaaaagaac

SEQ ID NO: 24963 - RNA, 74 nt, Homo sapiens
aaagcaggcagagcaacccccaggaaggaagacccacaagagaccacgcagagacagcacccaaccggcagcag

SEQ ID NO: 24964 - RNA, 40 nt, Homo sapiens
cccaggcgcgcggagagcagggaacggagggaaagcgaca

SEQ ID NO: 24965 - RNA, 79 nt, Homo sapiens
gcggcgagcggcccggcgcgcgggcagaggcggcggcgagagcgcggggccgggccccagggaaccgggaggacgacgc

SEQ ID NO: 24966 - RNA, 89 nt, Homo sapiens
ccggcggaaaaccgaagggaaggccagcagcgcgcggagaagaacggggagccagccgcgccaggcccagacacgcagaggagacccga

SEQ ID NO: 24967 - RNA, 74 nt, Homo sapiens
cgccagcgaagagcaggcacagaggcaggacagaacaaaggagacacacccgggaccggcaagcaagacccaga

SEQ ID NO: 24968 - RNA, 82 nt, Homo sapiens
acagcgccaccccgagcagcggggaagcgagagaacgggccgcacggcagccagcccagcaaagcgcacccgcacaacgaaa

SEQ ID NO: 24969 - RNA, 75 nt, Homo sapiens
caaagcaacaacacaagaggcacagcaggaaccagggcacacagccgagcacaacaaacaacggagaagcagaaa

SEQ ID NO: 24970 - RNA, 63 nt, Homo sapiens
gcccgagagagaagggagacaggaagccagccggccccaacccagggaggggggggacacgac

SEQ ID NO: 24971 - RNA, 67 nt, Homo sapiens
acagcaccaagcacaagacggaacaaaagggaacgaagggaaggcaaaggcaggacaaagcggaggc

SEQ ID NO: 24972 - RNA, 80 nt, Homo sapiens
gggcgcaaccaaagcaccagaccccaccagcaacgcagccggcccagcccaccccaggcccccccagcccagcaccacca

SEQ ID NO: 24973 - RNA, 65 nt, Homo sapiens
aacaggccaagaagaaccgggggacacaaggaaaagcaaccagcaaccaaaagaaagcccacgcc

SEQ ID NO: 24974 - RNA, 55 nt, Homo sapiens
gacaccaagggacgcagcggaagaaaagaaaggagcagacggcccccccagacga

SEQ ID NO: 24975 - RNA, 36 nt, Homo sapiens
gaaacaccaaacaagcagagagcgcagaagacagga

SEQ ID NO: 24976 - RNA, 58 nt, Homo sapiens
caggcggggcacccagccaccagaaagggccaggccacaaagccagggcccaacagca

SEQ ID NO: 24977 - RNA, 86 nt, Homo sapiens
aggccgccccgaccgccgaacaagagagggagacggggcggcccaccgccagcacaggacagacaggcacaccccagcaacacggg

SEQ ID NO: 24978 - RNA, 58 nt, Homo sapiens
cagaggaaaaaccacaggaggagacacgagaggaacagaaaaagggccaaaaacgacc

SEQ ID NO: 24979 - RNA, 83 nt, Homo sapiens
cgggcgaagcgacgagccgcgaggaggaccgggcaagcggaaagccggaagacgccacacgcggggagagagaccccccgaca

SEQ ID NO: 24980 - RNA, 52 nt, Homo sapiens
gcaacaagcgcgccacagggagaggcaaggaaaaagcgaggagaccgcagcc

SEQ ID NO: 24981 - RNA, 74 nt, Homo sapiens
gagccggccaagcagaaggaggcgcacaacccaccacaaagagagagaaagcccgaaaccaggaaccgaagaag

SEQ ID NO: 24982 - RNA, 74 nt, Homo sapiens
gcgcgcgccaaagggcgacggcacacagagagaccgagcaggagagccaacaaaggcaccaagaccaaggagga

SEQ ID NO: 24983 - RNA, 76 nt, Homo sapiens
gcaaaccccgccagaggcacacacggcaaaggccgaagaggaccaaaacaaagcaaggaagccgcacgacaaggaa

SEQ ID NO: 24984 - RNA, 76 nt, Homo sapiens
ccccacagggaagaggaacagaagcaagaccgagaggaacgccggaaagggggagccacgcccaaaaacaagaacc

SEQ ID NO: 24985 - RNA, 82 nt, Homo sapiens
caccgacaagacaccacggacgagagacaaacgccgaaggacagcccaaaccgagagacgcagcggagaacgggacgagcag

SEQ ID NO: 24986 - RNA, 78 nt, Homo sapiens
agaaacacccgaacagcgaaggggagcggaggagcgggagagcgccccgcgggagagccccggcgccaaagcacccag

SEQ ID NO: 24987 - RNA, 78 nt, Homo sapiens
agccaagaagcagagagcaccgcccgacgcgcgggagaggagcagcgggcgggaggaggcccggacggagacacacgg

SEQ ID NO: 24988 - RNA, 87 nt, Homo sapiens
acagacgacacaccacaggggacagggagagcacccgccacaccgaggaagagcgaggcgcgaagaggagcggcgcccgggaggcag

SEQ ID NO: 24989 - RNA, 76 nt, Homo sapiens
agagcgaggaggcaaaaaggcggcaaacgccaagggaagggaaccggcagcgaacgaggaaggggaaggaaaagcg

SEQ ID NO: 24990 - RNA, 80 nt, Homo sapiens
gcagaggccaggaggacgaggagagacagaagaagcggaggccggcaaagccaaggcaagagacgcggagccgaagaggg

SEQ ID NO: 24991 - RNA, 85 nt, Homo sapiens
gagaggccagaaaggcgcaggccaagcgcccacgccggaccgggcaggcggggaaggaaaacagcaacacagagcgaacaaaaaa

SEQ ID NO: 24992 - RNA, 79 nt, Homo sapiens
ggaaggaaccaggagaaacggaggcacccgaaagccaccacaaaggggagccgccaccaaaagcagacggaaaacccac

SEQ ID NO: 24993 - RNA, 76 nt, Homo sapiens
gacacgaagaggaggaagcccagggaaaaaccacgcggagaagggagagacaacaaaaaacaaggaaaggcaaaga

SEQ ID NO: 24994 - RNA, 60 nt, Homo sapiens
gcgccaaagccagacaaggccaaaagggcggggaacggaccaccagccccaacgcacgcg

SEQ ID NO: 24995 - RNA, 79 nt, Homo sapiens
ccaggccgacgccgaggccagcgccaaccgcagagcggggccgcgagggggacacaagagaccccggagagggaagccc

SEQ ID NO: 24996 - RNA, 83 nt, Homo sapiens
accagagacgggagaggaagaacacaggcagagaagaggcgaggcggcgaggcacccggcgcccggcgcgcccgcgccagccc

SEQ ID NO: 24997 - RNA, 55 nt, Homo sapiens
accgcacgcggaggcggcgcccgcggggagaggcaccagcaacagaccaaccgca

SEQ ID NO: 24998 - RNA, 80 nt, Homo sapiens
gcccaagaggcaacgagagcccccacaaagaccaaacgacaaagaggcggagaaaaaggcagaaggaagaagaggaccca

SEQ ID NO: 24999 - RNA, 75 nt, Homo sapiens
gacgcgagagaaggacccacggcgcgcgaaggcaagaacggaagcacgggcggaggaaagcacaagcagagcccc

SEQ ID NO: 25000 - RNA, 83 nt, Homo sapiens
cgacgaggaagcacgaaagcaccaacgagacccgccacacgaccacggagagaaccagaccaggaggcgggcgagcaggagcc

SEQ ID NO: 25001 - RNA, 75 nt, Homo sapiens
gcacaccccaggagaagaacccagaaaagacagcaaaaaaccagccccacgcaggccaaaagaaaaaaacgaaca

SEQ ID NO: 25002 - RNA, 78 nt, Homo sapiens
gaaggcaagaggcaggaccgacaggcccccagcacaagggggcaccaggcggagaaggacgccacacgcagggacccg

SEQ ID NO: 25003 - RNA, 57 nt, Homo sapiens
aaaggggggcaggcacagggggggcgccaaggggacaaagcccggagccggagccgc

SEQ ID NO: 25004 - RNA, 66 nt, Homo sapiens
aacggagagccacaaaaaaggaagcgaaaggcgaagcgaggaacaaggcccaaaaaaacagcacag

SEQ ID NO: 25005 - RNA, 74 nt, Homo sapiens
aaagagaagaaccaaaacggccccgccgccccagaagcgggaaggcagagcagcacgcgaagagacagaaacca

SEQ ID NO: 25006 - RNA, 82 nt, Homo sapiens
acagcggacggcgcggcccagaacagcgaaaccagggcgagcggaggccaggcagccagagggacccccaccgggagaagga

SEQ ID NO: 25007 - RNA, 71 nt, Homo sapiens
ggccaaggacggaacaggacaaaggccggaacggagaaacccacacaaaaacacacaagggaacggccaga

SEQ ID NO: 25008 - RNA, 61 nt, Homo sapiens
ccgccgccagaacaaccgggcgccgacgagacgggcacgcagcacgggggcaggggccgac

SEQ ID NO: 25009 - RNA, 82 nt, Homo sapiens
acggagagaacacgagcccacagacaaaccgaccgcccgcgccgacagccaaaaagggccacgcgaagaggacccggcccac

SEQ ID NO: 25010 - RNA, 80 nt, Homo sapiens
ggacgccggcgcgggagagaaagcaacaggggaagaacacaggcgaggacagagggagaaagagccaagaaagaaaacaa

SEQ ID NO: 25011 - RNA, 65 nt, Homo sapiens
agcgaaggggaaggcgccgaagaggacgaaggccacgaggcccagggaacccggaccacagaacc

SEQ ID NO: 25012 - RNA, 79 nt, Homo sapiens
accaaagcagccgcccccgcagccccgacaaggagcccggaggcagaggcgccacaccacgcaaagaggaacccgccgc

SEQ ID NO: 25013 - RNA, 72 nt, Homo sapiens
cgccaggaggccacggacgaggcggccccgaaagaagcgcacaagcagcgagagccagacagaagaaaaaag

SEQ ID NO: 25014 - RNA, 83 nt, Homo sapiens
cgcgcgccaccgacaagcccaggaccgacagcagaggagcgcaagaacggagaacaccgacggagaaaacaggagcgcggcga

SEQ ID NO: 25015 - RNA, 83 nt, Homo sapiens
gagaacaaggaggacagcagagaccagcagcgagagcaaagaagacgaagagagaacagaaaggaaagagaacacacagaagc

SEQ ID NO: 25016 - RNA, 75 nt, Homo sapiens
cgacccagccagaacgccaacggccaaccgccgcaagaagacgagcaccacacaggaccggcacacaaagacagc

SEQ ID NO: 25017 - RNA, 59 nt, Homo sapiens
cggcgccgggggagaccaggaaggaaagaagccgcccagagaagaacaaggcccaggca

SEQ ID NO: 25018 - RNA, 76 nt, Homo sapiens
cccggcgaggcgcagaaaccccggacaaggcacgccagacggcggagccgagaccgccacccacgccgaccgggac

SEQ ID NO: 25019 - RNA, 70 nt, Homo sapiens
ggcgcgagaagacccaaaccgacaaaaaacaagagaaccaagcgcaaggggagccgccaccaaaagcaga

SEQ ID NO: 25020 - RNA, 57 nt, Homo sapiens
gaacacaggcacgaccaagacagccacccacgcacccgcggccaaaacacgacaggg

SEQ ID NO: 25021 - RNA, 64 nt, Homo sapiens
gcaacagacggaccaccaccaaccgggcaggggcaagacgccaagagaaaaggcgagagcacaa

SEQ ID NO: 25022 - RNA, 88 nt, Homo sapiens
cgcccgggacccagagcgggcagggcagcgggggcagagacggggaacagggccacccacacggacgccaacgcgggggcagaaccgg

SEQ ID NO: 25023 - RNA, 82 nt, Homo sapiens
gacacccagacgccaccccgcacagccgggagcggggaagaccgaggggcacgacaacaaagggccagcccgccggccgcag

SEQ ID NO: 25024 - RNA, 78 nt, Homo sapiens
ccgccaggcaggaggagcccccagacgaaccacgcccgaagagagcgcacagaaagacccgaggggacccaagcgcaa

SEQ ID NO: 25025 - RNA, 86 nt, Homo sapiens
gcgccaccaccacgccagccgcaccagccgcccaagccgcacagccgcggcggcagcagcaggagaggccccgggggcgccgaggg

SEQ ID NO: 25026 - RNA, 80 nt, Homo sapiens
ccaaccgaccgaggagcacagggagcaagcgggccgcgggcggggacgcaggagcagacccacagaagacagcacccccg

SEQ ID NO: 25027 - RNA, 77 nt, Homo sapiens
ccgcgacgccaaccacgacgaagcggaaggcagaaggcgacaaagcgggagcaaaaaaagcaacggcgacaacagca

SEQ ID NO: 25028 - RNA, 75 nt, Homo sapiens
accaggcaaagaagcggcaaggagcagcaaagcacgagaagagaaaccagagccggaccagaaagaaacagcaca

SEQ ID NO: 25029 - RNA, 82 nt, Homo sapiens
acgaaggggccccagagccaaggaggaaggggccggccaggcaagacaggccaacaccgccaccagagaaccacacaaagga

SEQ ID NO: 25030 - RNA, 83 nt, Homo sapiens
gcgcaggcccggccgacggccacacggcggccgcagggcgccggagccccccagaccagggggaggaagcgggcccgcacaca

SEQ ID NO: 25031 - RNA, 70 nt, Homo sapiens
aaaaagcagcaacagaaccgcggaggagccagcccagggaacccgaaagacaaagcacggcgggggaaac

SEQ ID NO: 25032 - RNA, 76 nt, Homo sapiens
acgcccacacagacgcccgggcagcagaagaaggcacagaaaacgaacgagaaacgagggagaagaagcagaaaaa

SEQ ID NO: 25033 - RNA, 77 nt, Homo sapiens
accacccaggcccacagcccgggacaggggagacccgccccaagaccagcaaagcaagcaacaagaagcacagaaca

SEQ ID NO: 25034 - RNA, 83 nt, Homo sapiens
cccccacacggagcccagcagcccagccagcggacccgacggcgagagggcggagaacggaaaagcaccaggaagcagagagg

SEQ ID NO: 25035 - RNA, 66 nt, Homo sapiens
gagcgggcagcggaagcgaggcccacaccgaagccgcccagcgcagcaggagaaccgcgcaaccac

SEQ ID NO: 25036 - RNA, 83 nt, Homo sapiens
agggaccaacacagggcaggaaaggagcagaacaaaccaaagccccaggagcacacggacccaggaagacagaccgcgaggcc

SEQ ID NO: 25037 - RNA, 75 nt, Homo sapiens
caccgggagcggcgaagaggcaccggaggaggacaccagaggaccagaacccacgagaaacagacgagccaacca

SEQ ID NO: 25038 - RNA, 67 nt, Homo sapiens
gcacgagaacaggaccaccaggaaacgcgcaagacgcccaagagaagaggacgcaagacacagacgg

SEQ ID NO: 25039 - RNA, 74 nt, Homo sapiens
gcaccaaaggaaaaccaccagacccgcccaacacgaagaacaccaggaggagagaaagaacccacgcaggacga

SEQ ID NO: 25040 - RNA, 82 nt, Homo sapiens
gagaaggaaggggcccaagcacgggccagaacacagagacagcagcccaggcaaggaagggaaccggcagcgaacgaggaag

SEQ ID NO: 25041 - RNA, 110 nt, Homo sapiens
cccagccgggccaacagaccaggaagggcagaagggcaagcccggcggcagaacccccgacaacaggcacaaagagagaaggaacacccacagggcagacagagaaagaa

SEQ ID NO: 25042 - RNA, 71 nt, Homo sapiens
caaacccggacagggaaagaccaaaggccaacagcaagaaagggaagccgagaaacagccagacgcaaaga

SEQ ID NO: 25043 - RNA, 76 nt, Homo sapiens
gagccgaacagaaagcacccaggcacgccagacaccgccaccaccgagaagacaaaacaagccaccaaacccagag

SEQ ID NO: 25044 - RNA, 80 nt, Homo sapiens
gggcgccagccacggaagaccggcggccacaaggccgcccagccgcacgcgacgacagcgcccacggaccaaaccaccca

SEQ ID NO: 25045 - RNA, 72 nt, Homo sapiens
gcggagcggaccgggcaaggcagggggggcagagagcgcccccccggacagccggaaggccacaggaagaaa

SEQ ID NO: 25046 - RNA, 80 nt, Homo sapiens
gggacacgacgccccaaaccgccaggagaaaaaaggcaaaagcagaccggaaaacccaccggcaagaccacacccgaggg

SEQ ID NO: 25047 - RNA, 60 nt, Homo sapiens
ggccccccagccagggaaccagaccgaaaagggcggaaaaggaccaaggcccgcaaaagg

SEQ ID NO: 25048 - RNA, 77 nt, Homo sapiens
gggcggaggaagagcaccaggggcaaaaggcaaaggggagagaagggacaaaagggagacaccaccagaacaggccg

SEQ ID NO: 25049 - RNA, 75 nt, Homo sapiens
accaaaggcagaaaagaaagagagacggccgccacagcccagacggcgaaagcgggccaagagacccccgcccgc

SEQ ID NO: 25050 - RNA, 59 nt, Homo sapiens
aaccacgacgaagcggaaggcagaagacgggaacaaaggagaaagggcacgaagagaga

SEQ ID NO: 25051 - RNA, 77 nt, Homo sapiens
cgcgcgacggccggccgacccgggccggccgcgggagcaggccagcaagacagaaccgccaaagcgcggaaggcaga

SEQ ID NO: 25052 - RNA, 85 nt, Homo sapiens
caccaccaacggcaagcaacgcacagcgaggaggacagagcgggagccaccagcgccaaagggaagccaggagcccgggggcacg

SEQ ID NO: 25053 - RNA, 83 nt, Homo sapiens
agccgggccagagccaggggccgggagggcgccagaaacggcgaggaaagagaggagccccggaaagaaaaggacagacccgg

SEQ ID NO: 25054 - RNA, 88 nt, Homo sapiens
cgcagggcccccacaccgcgccgccaaggcaagggagggagagagcaaaaccagcaggaggcaaagggaccccaagaaaccaaagggc

SEQ ID NO: 25055 - RNA, 71 nt, Homo sapiens
aaggagccggaaggagggaacgaagcagagcccaacaggggagccgagaagccgaagcagaaggaaaccag

SEQ ID NO: 25056 - RNA, 82 nt, Homo sapiens
ggcggcggagaacaagcggcagggagaagagccaaggagaccaaacccagcagcaccgcagcagcagaagaacaaggagaga

SEQ ID NO: 25057 - RNA, 73 nt, Homo sapiens
acgcgaggacggggcccaggaacggaaaagggcagccgcacggaagcacagagggaaggagaaggagacacag

SEQ ID NO: 25058 - RNA, 74 nt, Homo sapiens
ccacggagagaggggagacccaggcgcaggcaacacccccagcccacaaagaccacagaccccccccagaccac

SEQ ID NO: 25059 - RNA, 79 nt, Homo sapiens
agccagcgaacacagacagacaacaggcaggagacagagagaaagcaacagcaggccagccccagagcccggggagcac

SEQ ID NO: 25060 - RNA, 37 nt, Homo sapiens
gagacaggcggccacaggggacaccacgccaccagcg

SEQ ID NO: 25061 - RNA, 81 nt, Homo sapiens
aaggcaccagcccaagcgccccccccgccccccaggaggggcgagagggagccgcagcgagcagacaccagcggggcagaa

SEQ ID NO: 25062 - RNA, 73 nt, Homo sapiens
acaccccgaccacgcggccgagaggccgccaggcacagagaaggcaaacgggagggcgaggacaccaagagca

SEQ ID NO: 25063 - RNA, 74 nt, Homo sapiens
gaaggaacgccaggcacagaaggccggcccacagcccaaaaagaaacaggaccgaaagccagagcgaagccaaa

SEQ ID NO: 25064 - RNA, 68 nt, Homo sapiens
ggaaggcgacagaagggcgcagggcgaagcgaggaacaaggcccaaaaaaacagcacaggagaaccag

SEQ ID NO: 25065 - RNA, 54 nt, Homo sapiens
aacaaggaagagaaacaggagaaaaggccaaaccaaaagggaacagggcaacac

SEQ ID NO: 25066 - RNA, 72 nt, Homo sapiens
gcagaggagaacggaagccgggggcgagaggcaagacaaaagaaaaccccagacggaaagaggaagcggcag

SEQ ID NO: 25067 - RNA, 89 nt, Homo sapiens
cgcagcgccaggccagccgaagaaggcgagcaggggcgggagagccccgcagaagacgccgacgagaaacggccagaggacccccaggc

SEQ ID NO: 25068 - RNA, 74 nt, Homo sapiens
gcgcgcccgcgcggcgcggggaccgcggcccggcgagaacgcggacaagcaaacaaagaggaaaaagagggcaa

SEQ ID NO: 25069 - RNA, 74 nt, Homo sapiens
gagaacaagacgaagggaagaccaggagccaaaagccggaaaagagcaggagaggagccgggagagggagcagg

SEQ ID NO: 25070 - RNA, 61 nt, Homo sapiens
cacgccagacgaccccacccgcgccgcgacccggcaccgacgagagggcgcaccgcgccgg

SEQ ID NO: 25071 - RNA, 59 nt, Homo sapiens
gcccggacaccccgggcccgccagcaccgccggccaggaggagagcgcaccaccaaaaa

SEQ ID NO: 25072 - RNA, 85 nt, Homo sapiens
cggcccggccccggcgcagcccggaaagccggcaagacgagaaagcagaagaagccacaaacgaaggagaccagaaccaacacag

SEQ ID NO: 25073 - RNA, 121 nt, Homo sapiens
ggccaggacagggcaaagggagcccagaccacggggagggggcaccgacggagcccgagagccccaaccagaaaccacagacgccgggaccaacccccacccacagacacaacccagccac

SEQ ID NO: 25074 - RNA, 75 nt, Homo sapiens
cagggaacagaggaaggcacaaacgggcgcggggagagaaaccccagccgagcaaacagaacaaaaacaagaaaa

SEQ ID NO: 25075 - RNA, 74 nt, Homo sapiens
acagagaccggccaaaccacccagcaggaggggggagcccagagaggaccagaaggggcacaggaaggcgcggc

SEQ ID NO: 25076 - RNA, 72 nt, Homo sapiens
ggcccggaaagacgccaaaaacagggaaagggccagcacaggagagagaaacacagcccaaagaaacacacc

SEQ ID NO: 25077 - RNA, 84 nt, Homo sapiens
ccgagaccaaaggcaccgggccggcgcggggcccccggggccggaaagggacccagccccgaaccagaagcggcaaacagcaca

SEQ ID NO: 25078 - RNA, 69 nt, Homo sapiens
gcccagaagaacaaccaacaccgggaaaacagcgaggggcaaacagaaagaggagccaaacccaaggga

SEQ ID NO: 25079 - RNA, 89 nt, Homo sapiens
cgcgcccgcgcccccgcgcgacgccaggggacagaccagagcaggaccaaaggcgcacagagccgaaccccaccaggggccaggcagcg

SEQ ID NO: 25080 - RNA, 80 nt, Homo sapiens
ggccaccgcgcacccacgaacgcccaccccccgaacccagccgcaccggcccgagagagaaagggaaagaaggagcggag

SEQ ID NO: 25081 - RNA, 62 nt, Homo sapiens
gacgccagaagagaaccacaaggacagggacaagcgcacagcggagaaagcagcgcggccag

SEQ ID NO: 25082 - RNA, 111 nt, Homo sapiens
gccaagcaagcaggaaaacgcagagaaaaaacagaccaggggaacccagccgaaagcgcgaagacaggagcaggaagagagagagggccaagacaggaaaaaggcaaagag

SEQ ID NO: 25083 - RNA, 71 nt, Homo sapiens
gcccccggccacccggcgcgagaccagaagcggaaacaccgcgacggggcccacaggccacccgccagacg

SEQ ID NO: 25084 - RNA, 52 nt, Homo sapiens
ggcaagccagcaaacacaaggacaccccagggacaggcggccgacaggaagg

SEQ ID NO: 25085 - RNA, 74 nt, Homo sapiens
gaaaaaagaaaccgagaacggaaggcagaaaggacccgagaagagaagaaaggccaaaccccaggcaggagcaa

SEQ ID NO: 25086 - RNA, 89 nt, Homo sapiens
gcagcacgaggaccccaaacagaccacccccggcgcaaacggggacagcgccgaccggaacagggaccacggaagcccaggaccagccc

SEQ ID NO: 25087 - RNA, 100 nt, Homo sapiens
ggcacccaacggccgccgcagaggcaccaccaggagcagaagaacggcgccacaaaggaggaaggaccgagcgcaggaaccaggccagcgcccagcaagc

SEQ ID NO: 25088 - RNA, 75 nt, Homo sapiens
gaggaagcagacccacagagaaggccagacgcaggcagaacaagcagaacagacgacaaacggaaggagcaaagg

SEQ ID NO: 25089 - RNA, 73 nt, Homo sapiens
gggacaaggaggggaacggcaaagcagggagcagagccagacagccaccacccgggcagccaccgagagacaa

SEQ ID NO: 25090 - RNA, 70 nt, Homo sapiens
acaagccacaaccacaaaaaggaaagcagagaaggagaagaagggaccagcccaacagcgaccacccacc

SEQ ID NO: 25091 - RNA, 69 nt, Homo sapiens
acaacccgaaggcgaacacagaggaaaccgcaccgcccggagaaccgagggaaacgacaagaagcagca

SEQ ID NO: 25092 - RNA, 72 nt, Homo sapiens
gcgggcacaggaccgacacccagcccacacaccccagggacagcaacagagcgaacaggacgcaggacgagc

SEQ ID NO: 25093 - RNA, 77 nt, Homo sapiens
acgaaccaaaagcaaccgcgaagagcagaaccagggggaaggccccgggcagccgagcgccagggaaacaacccacg

SEQ ID NO: 25094 - RNA, 57 nt, Homo sapiens
ccacggccccggcggccaaacaccgcgaaaagccagccgcacagagcagagaaggag

SEQ ID NO: 25095 - RNA, 63 nt, Homo sapiens
gagcgagaaagccggccccagcaccaccaagaaacgcggagcgaacccggccaggcgagagaa

SEQ ID NO: 25096 - RNA, 75 nt, Homo sapiens
cgcgacggagacgaaccgcaggaacacgggaccgaggagccagcccccagcacccggaccaccaggcagccacgc

SEQ ID NO: 25097 - RNA, 73 nt, Homo sapiens
gaggacgaggaacggcgcgccagaggaagaaaaaagcccaccgcccagaggccccccggacaccaacagcaag

SEQ ID NO: 25098 - RNA, 52 nt, Homo sapiens
aagaaggccagcgaggaagggaagagccgcaggaggagaaccaaacgcgcgc

SEQ ID NO: 25099 - RNA, 73 nt, Homo sapiens
gagcacgggccgagaccaccgaggagagccggacggaagagccaacacccagccccaagaacaaacgcgaacg

SEQ ID NO: 25100 - RNA, 62 nt, Homo sapiens
cggccacgagacagaccgcacagcagggcaccccagacaggagcacccaacaccgggaagag

SEQ ID NO: 25101 - RNA, 72 nt, Homo sapiens
ggccagaccccgggagcccagccaccacagacagagccgcgcaagaccgcagagaagaacacggagaaacac

SEQ ID NO: 25102 - RNA, 72 nt, Homo sapiens
caaggaaagcgacgacgcaacggggcggcacacaaggagcgaagggcagggagaacgccaggcacagcacga

SEQ ID NO: 25103 - RNA, 32 nt, Homo sapiens
ccaaggccgcaacaaaacacagcgcacggcgg

SEQ ID NO: 25104 - RNA, 76 nt, Homo sapiens
cgaggaaggcaccaagcccccagacaaaccgaaggcgacagagacaggcgccaggggagaggaggcagaaggagac

SEQ ID NO: 25105 - RNA, 71 nt, Homo sapiens
cgcaacggcaaggaagacgggggcgacagacccccgcgaccagcccaaagagaggggccagagaacgccgg

SEQ ID NO: 25106 - RNA, 58 nt, Homo sapiens
aaggagacggcagagccaaggccgggacaccaggaaggacaagacgggccgggagacc

SEQ ID NO: 25107 - RNA, 88 nt, Homo sapiens
ggaaaccaggaagacagaggcgggcacagaaagcgagagagccaaagacgagaggagaggaagcagccacacggagagaggaggccgg

SEQ ID NO: 25108 - RNA, 74 nt, Homo sapiens
agaggcaaggaaaaagagggaacggaaaaagcaacaaaacacaccaagaaaagggaaccgaagcggacaacagg

SEQ ID NO: 25109 - RNA, 86 nt, Homo sapiens
cccgggcggccgccgagaaggaccgcgcgcgggagcgaggcccgcggagcgccgccgcgcggcacgagccaggagacagggacagc

SEQ ID NO: 25110 - RNA, 132 nt, Homo sapiens
ggcagcacagggcccggagaggacccgacagagaggagcggagaacacagccacccgccaggggaaggagggagccccaggaacaggagcccaccgaagaacgcccgacagaacagagacccccaccagggc

SEQ ID NO: 25111 - RNA, 74 nt, Homo sapiens
gacaaggcgaccaaccaacaaccacgggaagccgcggccccaagcaccagcccaccagaccgaaaagggcggaa

SEQ ID NO: 25112 - RNA, 61 nt, Homo sapiens
ccagcagccaccaggagcccgagagagaaggaaggccggcccacagcccaaaaagaaacag

SEQ ID NO: 25113 - RNA, 68 nt, Homo sapiens
aagagaaagagagagagcaagaaggaagggcgacaacacgaccgacagggccagaaagaccacaagag

SEQ ID NO: 25114 - RNA, 77 nt, Homo sapiens
ccacgccgcaggaggcggagcccagaaccgggacaacccagcaaacaggccagacccgacaggagcgacaaacacgc

SEQ ID NO: 25115 - RNA, 73 nt, Homo sapiens
ggaagacaaaaggaaacaaaacagaagacaacaagcaagggcaagggcgcagcacgcagacccgcaagcccca

SEQ ID NO: 25116 - RNA, 74 nt, Homo sapiens
ccgcgaagcgagagggcgggcgcggcggcggccacgcaggcaaggcagcaccccgacgacaagacaccccgaga

SEQ ID NO: 25117 - RNA, 67 nt, Homo sapiens
gcacagcgccccagggagagacgaagcgcgccaggagccgaacagaaagggcagccacagagaaggc

SEQ ID NO: 25118 - RNA, 75 nt, Homo sapiens
acaccaaacagggaacccaagccggacgggccaacgcacggcccggcagagccagcaccccccgcggcagccaag

SEQ ID NO: 25119 - RNA, 82 nt, Homo sapiens
gccaccgccacgggccgagacacgcagcggcggccagggaccagggaccgggcaaggggccgaagaagacaagaggcacaca

SEQ ID NO: 25120 - RNA, 84 nt, Homo sapiens
caagaaaaggaacggccaagacaagcaaaaagcccacagaagccaacggacaagcgccaacggaccacaccaaaagccaccaaa

SEQ ID NO: 25121 - RNA, 82 nt, Homo sapiens
ggaggccacccaggcaagacccaacgacccggcggagcgagcacccccggccccagacagccacaccgggaaggagaagcgg

SEQ ID NO: 25122 - RNA, 63 nt, Homo sapiens
gacccggaaacaggggccacggagccacggccacggccgcaaggagcgggggacagcgaagga

SEQ ID NO: 25123 - RNA, 79 nt, Homo sapiens
aaaaacagccccacacaaagcagaagaagaccgaagggaagacccagagcccaaggaggaagggggacgacaaagcgac

SEQ ID NO: 25124 - RNA, 69 nt, Homo sapiens
ggaacgcaggacccaaagcacaccgaaaacgagaaacgaaagagacacgggggcacaaccgagcccggg

SEQ ID NO: 25125 - RNA, 41 nt, Homo sapiens
gggcagacgagcgaccgcagcccaaagaaacaccgggccag

SEQ ID NO: 25126 - RNA, 85 nt, Homo sapiens
ccaaggagccgccaaagccagacggaagggaaaaggccgaggcacagcgggaagaccgcaaagacgacccgagacagggaacagc

SEQ ID NO: 25127 - RNA, 77 nt, Homo sapiens
gagagcggaccgagagcgcgaaacgcacgagaagagagaaaaggaacagccgaagccaggggcaagcgaaaccacag

SEQ ID NO: 25128 - RNA, 89 nt, Homo sapiens
cgcgaccacggcggcgcagggagcaggcacagccccgcaggacccaagcccgcagacaccgcagccagcggaaaccaagcacccaaaag

SEQ ID NO: 25129 - RNA, 57 nt, Homo sapiens
gccaagccaggcccagcagccgccaccggacccgagccccaaagacagaaaagcccc

SEQ ID NO: 25130 - RNA, 69 nt, Homo sapiens
cggacaggaaaggaacacagacagagcaccggacaagagcagagaaagagacgaggaggggaccccaaa

SEQ ID NO: 25131 - RNA, 52 nt, Homo sapiens
agggacgaagaaaggccaagacaagcgcgcacgcggccacacggccacggcc

SEQ ID NO: 25132 - RNA, 76 nt, Homo sapiens
ggaaaaccgaggaagccaaaggcggacgacggagcccccggcagccgagcacagaagggaagagccgcgggggcca

SEQ ID NO: 25133 - RNA, 89 nt, Homo sapiens
cgggccgcgccgggcacagccggaaagcaggaccgcgacggcagcagagcagagaaagacagcaaagaaaaggagaagaaaggaaaaaa

SEQ ID NO: 25134 - RNA, 77 nt, Homo sapiens
acacaacaggaaaacaaaagaggagaaaggggacaacgcgacggcgggacccagggacgccccgcagaagaacaaca

SEQ ID NO: 25135 - RNA, 78 nt, Homo sapiens
aaagaaggccaaaaccgcacaagaaggggcggcacgccacagaaaggaccaagacagcaggaacgaaccaaacccggg

SEQ ID NO: 25136 - RNA, 34 nt, Homo sapiens
ggcggaggaacagcggggccccgggcaaggggag

SEQ ID NO: 25137 - RNA, 77 nt, Homo sapiens
cgcccgcgcacgcgcaagaccgcgaggcgagacccgcgaagagaacagccggggggcggaccgggccccaagaagac

SEQ ID NO: 25138 - RNA, 76 nt, Homo sapiens
ccgggccagcggccgcgcacccccggccggaggcaccagcgagagccaggaaccccaagacggaggacacacacgc

SEQ ID NO: 25139 - RNA, 59 nt, Homo sapiens
gccagggaacccggcaccgccccaggggagaggccaccacacgggccgcccacgacgga

SEQ ID NO: 25140 - RNA, 81 nt, Homo sapiens
cagcgcgccccgccgccgcgccaccgaaggaagcacccagacaccgggaaggccggggggggcacagagccccggaagaca

SEQ ID NO: 25141 - RNA, 78 nt, Homo sapiens
cgccgcgggaagggcggggagcggagccaggccccggagcaagaacgagcccaagggaaccagccaagcggagagagg

SEQ ID NO: 25142 - RNA, 54 nt, Homo sapiens
gaacagaacccaaaagccgacaaccccagaaacagcgaaccagaaaaggaaaac

SEQ ID NO: 25143 - RNA, 67 nt, Homo sapiens
gcccagaaggacaaacggaggagcaagcacagacggaacagaaagacaacggacaaggcaggaagaa

SEQ ID NO: 25144 - RNA, 74 nt, Homo sapiens
gaggaagagaaagcgaaccgaagagacagggaaaagccgggccacagaagcaccaccacaagccacaccaacaa

SEQ ID NO: 25145 - RNA, 73 nt, Homo sapiens
ccacgcccgaccccgccccaggcccggagcgagagcgagagaagggaccagccagaagaaacaaccgacaacc

SEQ ID NO: 25146 - RNA, 70 nt, Homo sapiens
aggccggagagagagaaacaggagacaggagagagagaagaagagacgaacggaaaacagccccaaagca

SEQ ID NO: 25147 - RNA, 83 nt, Homo sapiens
gccaagaggcaaaggggaggacgcagcaaaccaccagaagggagcccacccagaggcagggggcgacccgaacccaaaggagg

SEQ ID NO: 25148 - RNA, 81 nt, Homo sapiens
acaggcgaggcggaggccgaggacccggggccgaggagcgggaagaggcgggaaaccgggagaagccggccaggcaggcac

SEQ ID NO: 25149 - RNA, 79 nt, Homo sapiens
ccccccgcagcaggcagcccccggagccccccgggacccacagcaccccgaggcccgacccaggagaagcaggaaacaa

SEQ ID NO: 25150 - RNA, 78 nt, Homo sapiens
cggcgaggcgcagcgaccgccagcaccaccaccggcaggcgcaccaaggccgcgccgacggaagcccccaaagcagaa

SEQ ID NO: 25151 - RNA, 72 nt, Homo sapiens
aaggaagcggagaaccacaaacgcagaagagacaacacagaaaccagggcggaggcaggaacagcagcaaaa

SEQ ID NO: 25152 - RNA, 75 nt, Homo sapiens
gcccagcccagcaaggcacccacacgggggaaaacaaagaccaaagagggcgcgacaagagacggacaaaaagac

SEQ ID NO: 25153 - RNA, 85 nt, Homo sapiens
aaaaaaaggaggccagaaaagagagcagcaggaggaagagcgccgagacggcagccagccacagagcccggcagcagggcccgca

SEQ ID NO: 25154 - RNA, 84 nt, Homo sapiens
cagccgcccagaacccgaccaacaccagaacccagcgcccccagaaaaagcggggaaaacaaaaaaaagaaggagggaagaggg

SEQ ID NO: 25155 - RNA, 78 nt, Homo sapiens
cggagcggagccgcaccaagaccaggccggcgacagcaccaagaacccacgcaggagagaacaaggagcaggccaacg

SEQ ID NO: 25156 - RNA, 74 nt, Homo sapiens
cgccgcgcgagggagccgaagaagccgagcggagggcccccagcagcccagcccgcaaggaagaagggaagcaa

SEQ ID NO: 25157 - RNA, 113 nt, Homo sapiens
gacaggcggaggcccccgggcaagaggcgcaaacaagccaacccaggaggaaaaacggaagggccaaagccccaagaacccagccacgcaaagcggggagaggaccaccccgc

SEQ ID NO: 25158 - RNA, 83 nt, Homo sapiens
cgggacgcgcgcgggcacccacggagccccggggcgcgccggccgcccgcaggacaccgagggcccagccgcgcaccagcgac

SEQ ID NO: 25159 - RNA, 79 nt, Homo sapiens
ccgcccccggccgccggcagcggccgcgccgcgccacccaagcaaccacgacggcagagacaggagaggagagccacgc

SEQ ID NO: 25160 - RNA, 68 nt, Homo sapiens
ccacacacagaacaacgcaccaagcacgaacgccaagcacagccggggggaaaccacaccacccgcca

SEQ ID NO: 25161 - RNA, 73 nt, Homo sapiens
ggaaggcaaccaaccagccgccgaaacaccacgccacacaccagcggaggcgagcaaaaaaagcaacgcaagg

SEQ ID NO: 25162 - RNA, 86 nt, Homo sapiens
gcgggggagggccccaaggcagggcccaggccacagccggaaccaaaaagaagccccagagccggggccaggagccccaagcgccc

SEQ ID NO: 25163 - RNA, 55 nt, Homo sapiens
caccacccggagacacggcgccagacacacaggcaaagcgacaaacgcaggaacc

SEQ ID NO: 25164 - RNA, 76 nt, Homo sapiens
aacaacagaagcagcggcagcagaaggaggcaacagacgcggagccacccaaccaaggaagaggagcaggacggag

SEQ ID NO: 25165 - RNA, 80 nt, Homo sapiens
ccagggccgggaagcaccagcggccccaggaggggagcaacgagaagaagacaacagggcaccggcccaagaccgcgacc

SEQ ID NO: 25166 - RNA, 89 nt, Homo sapiens
gaccgccgcgccaggccagaggagacagaagagaccgggcgcagcgcgacccgggaagcccgccgaggcaaaagcagaccggaaaaccc

SEQ ID NO: 25167 - RNA, 77 nt, Homo sapiens
cgcgccagaaaacagcagagacccagaggagggaggggggggccggcccacaccccggcccccggcccgcacccccc

SEQ ID NO: 25168 - RNA, 69 nt, Homo sapiens
aggggaaacgcgcccaggaaggaagaagccagcaacaccaaaagccgaggcggagcgccgcacccaggc

SEQ ID NO: 25169 - RNA, 61 nt, Homo sapiens
cagcgcaggagcacagagcccaagaggcagcaaggccagcagccacagcccaggcaaagcc

SEQ ID NO: 25170 - RNA, 93 nt, Homo sapiens
gacgcccccagcagccggcagcagcccccggggcaagagcaggagcccggcaccccccgccgacaaggagggccagcacaaacacgggaacgg

SEQ ID NO: 25171 - RNA, 77 nt, Homo sapiens
cggcccgaccggccgcgacagcgaacagcgcggccgcaggcaggggaaaggaagggagcagcgaagccagggaggag

SEQ ID NO: 25172 - RNA, 85 nt, Homo sapiens
gcggcagcgggcgacggaccgggcccagacagggcgggaccaccaggagcagagcggaggccaccagcccaacaccaccgggaag

SEQ ID NO: 25173 - RNA, 71 nt, Homo sapiens
cagaaaccaggacagaaggagaaggagacccggaacaagcaaaggaaccccaaacggggcgacggcacgag

SEQ ID NO: 25174 - RNA, 73 nt, Homo sapiens
gcagccggaaacaggaagcaaggagaagagacaagagaggcgaggaggacaaaagcgaaggcaaacaccaagc

SEQ ID NO: 25175 - RNA, 71 nt, Homo sapiens
gaagcaggcgcagacacccaaaacagcagcacaccggaagagagcggaaccgcaggggaagccccagaagc

SEQ ID NO: 25176 - RNA, 51 nt, Homo sapiens
acgggggcgcaacaggccacaggcagcggccagcaaaccgcaaacaccaag

SEQ ID NO: 25177 - RNA, 57 nt, Homo sapiens
agagcggagaacacagccccccccagggaccggaccaaaccagagacaaaaggcaca

SEQ ID NO: 25178 - RNA, 77 nt, Homo sapiens
gcgacaggaacgagagaagaagaaggaggccgcggccagaaacccaagaaaaagcgaaggaacgcagagcgaagaca

SEQ ID NO: 25179 - RNA, 77 nt, Homo sapiens
ggcggaagacgcagacgccggccagggccaccggccaccaaacgcaccacgggcagcaggacaggaagcagggagcc

SEQ ID NO: 25180 - RNA, 53 nt, Homo sapiens
caacaccacgaagccgcaaacccaggcgcgggacaaccaacacaaccaaagag

SEQ ID NO: 25181 - RNA, 78 nt, Homo sapiens
gcgagccgcggccacgcgagagggacacgcaggacgagcggccgaagcagcgcggcacagccagggcgaaagaagacc

SEQ ID NO: 25182 - RNA, 61 nt, Homo sapiens
caccacccagaggacaacacacggacccccccaacagacggacagagccgccggcccaggc

SEQ ID NO: 25183 - RNA, 79 nt, Homo sapiens
gaaggaccaagaaccagaggcagcagcgccccgagccccggcggcaacaccccccaacgagggagccgggaggccccac

SEQ ID NO: 25184 - RNA, 66 nt, Homo sapiens
acccgggagaacacccccccaggaggcgaggagagggggcgcagagcgacaccacaggcaagcggg

SEQ ID NO: 25185 - RNA, 68 nt, Homo sapiens
cagacgcagggcgcccccggacccaccgcgaggcgggggaagcccgcaaaccccccgaaccgaggaca

SEQ ID NO: 25186 - RNA, 67 nt, Homo sapiens
cgggccacgcgcgacgccgcgcgaggggcgacccaggggcgccagcaaagggaagaaaccccaacag

SEQ ID NO: 25187 - RNA, 77 nt, Homo sapiens
cggcccgcgcgcccgcacccggccgccggggccgcccagcagacgaggaagagaacccacaaagaagaaaacaccca

SEQ ID NO: 25188 - RNA, 98 nt, Homo sapiens
gaaccaagccacaggagacacccccccaagcaccagcgcggaagcgaacaggcacgaaagagacaaggccagacggggcagggaacaacgggcgaaag

SEQ ID NO: 25189 - RNA, 72 nt, Homo sapiens
cgcggccagaccgcggggcacacaccgcagggccgggccagcgccaccgcccggaccggccccaccccggcc

SEQ ID NO: 25190 - RNA, 56 nt, Homo sapiens
ccagcccacagcagaagacaacaggcacaaagagagaaggaacacccacagggcag

SEQ ID NO: 25191 - RNA, 81 nt, Homo sapiens
ggccgaccgagacgggcggagaggagaaggcaaaagcagaccggaaaacccaccggcaagaccacacccgaggggagccca

SEQ ID NO: 25192 - RNA, 75 nt, Homo sapiens
ccggcgcgccgcggcccggagcgcggcccgaggcccgcccagagggcgcgcgggggcacagcccaggcgcagcag

SEQ ID NO: 25193 - RNA, 80 nt, Homo sapiens
cagaaaagaacgccaaccgaaccaggcgaccgaaaggccggacaaaaagcggacagcggaagagagcaacaggaccgggg

SEQ ID NO: 25194 - RNA, 76 nt, Homo sapiens
acagcgggaagcgaaagaacgcagaggcccacagcaagggaaagggagcagcaccggccacacccacagcacgacc

SEQ ID NO: 25195 - RNA, 73 nt, Homo sapiens
aggggcgagcaggccggagggaccgggaagagcaccacagaccgccaaaggcccacgggcagcaacccgagga

SEQ ID NO: 25196 - RNA, 81 nt, Homo sapiens
gaaccccaaacccaaaccgcggcggcgacccaccacgccagccagcgcaaaccagcaaaagcagaaagcacggaccaaacc

SEQ ID NO: 25197 - RNA, 69 nt, Homo sapiens
acggggacggagggccgagaagcggggcaccacgaaggaccgaagagggggagagagacgcgggaaccg

SEQ ID NO: 25198 - RNA, 74 nt, Homo sapiens
ccaaggaaaaggacgagaacgccgcgacagaaagaggcacagcacaagggggggaaaagaacacaaggccgaaa

SEQ ID NO: 25199 - RNA, 77 nt, Homo sapiens
cagcgcagcccaggaggcagcaccaagcaggcaccacacccgagggcgccacgcggccacaagacgggagggaacgg

SEQ ID NO: 25200 - RNA, 87 nt, Homo sapiens
gggccgaggggccaaccagcgaagagcgacaagccgcggcagccgcggaccaccgccgccaggggcggaaaacaccccaaaagccaa

SEQ ID NO: 25201 - RNA, 85 nt, Homo sapiens
cgccaagagaagggcacccgcacggccggcccggggacgcacaccgagacgaacacagaacagcacgaccagaggggaagccaag

SEQ ID NO: 25202 - RNA, 78 nt, Homo sapiens
cgccaccaccgacgagcgaagagcaaggcacagccagggcgaaagaagaccccgccaccggcccccacgcaccaccaa

SEQ ID NO: 25203 - RNA, 80 nt, Homo sapiens
aaccacgagccaaacaaccagcccaaccacacgcaacaaccagcagcacagagaacgaagacccccaggggacaagaacc

SEQ ID NO: 25204 - RNA, 75 nt, Homo sapiens
gcccccacggaaggccacgagggcggaccccgggcgaagcggccaggcccgggcggacgcagagccagagcgccc

SEQ ID NO: 25205 - RNA, 81 nt, Homo sapiens
cgcccgggccagcggccgcgcacccccggccggaggcaccagcaacagccagcaaagacaagagcagaccagcagccgcag

SEQ ID NO: 25206 - RNA, 81 nt, Homo sapiens
gaaggcgcaacgcggcgcgcaggggacacgaacaccaaaaagcgggcaaccgagggagggcacccccgagaccccggcacc

SEQ ID NO: 25207 - RNA, 81 nt, Homo sapiens
cgcaaggccgggaaacaaagggaggaacggagccccgccagacgccccaaacaaacagccggaccgggcagcccggccccc

SEQ ID NO: 25208 - RNA, 75 nt, Homo sapiens
ggacagaaagccaaaaaggagaaaggcacgccggggaaagccaccgccagccggaggacacaaacgccaggagag

SEQ ID NO: 25209 - RNA, 72 nt, Homo sapiens
gaaaaccagaaggacagcaacagcgccgcaccaccgaaaaagcggagagaggaaaaacaggggccgaaagaa

SEQ ID NO: 25210 - RNA, 77 nt, Homo sapiens
agaacccagaggcgggaggggccgggaggcagaggggcaggggcagaagcccccggggagagacagacagagggaca

SEQ ID NO: 25211 - RNA, 84 nt, Homo sapiens
gggaaccggcggagcgcgcgagcagcggcggccgcgcgcgggacggcgcggcgcccggaccacgagccggcagggccagaagac

SEQ ID NO: 25212 - RNA, 59 nt, Homo sapiens
agcgagggcggcccggggcacccgcacgggaagcaggcccgccacagccaaggccgaca

SEQ ID NO: 25213 - RNA, 51 nt, Homo sapiens
gcagacaaaagggccaaagaagggagagaggagcgaacagacaacacaccc

SEQ ID NO: 25214 - RNA, 67 nt, Homo sapiens
cacaaaagaggagaaaaccgggcgcagccgggcacgagggagaggccgagaagaaacagggaacgga

SEQ ID NO: 25215 - RNA, 70 nt, Homo sapiens
ggcaggccagcagcaagaaacaggaaagggcaggcagaaggcaaaggaaaacaaaaggaggaagaggcgg

SEQ ID NO: 25216 - RNA, 76 nt, Homo sapiens
cgaccaagacgcggcccaagggcccggcggcgcgagcaggaaggaccagagaagacacacaacaaccccacggagc

SEQ ID NO: 25217 - RNA, 87 nt, Homo sapiens
gcgccaccgcagacagcggcaagacaagcacggaaccgcccgagacggcgcacccacgacgcgcacaccaccggcagaccggcgcca

SEQ ID NO: 25218 - RNA, 72 nt, Homo sapiens
gggaagaccacaaccacgaccacaaaccggcggagccacagaaccgcccgccgcccgagacagaagaccaac

SEQ ID NO: 25219 - RNA, 70 nt, Homo sapiens
aaagaaggagggccccaggaaagacaccaaaaaggcaaggacagaacccaagcaggccggagaaaagaag

SEQ ID NO: 25220 - RNA, 77 nt, Homo sapiens
gaacaggggcccgccagccccgcggcgcccgggcccgggcggcggcccaccgcccacgggcccagaaggggaagacc

SEQ ID NO: 25221 - RNA, 55 nt, Homo sapiens
acaacccgcagccaggccccccaggccacccaggaccagcggcacacccccccgc

SEQ ID NO: 25222 - RNA, 57 nt, Homo sapiens
cacaggacgcggaaccgcacgcagagaaagaacaaaaaaccggccccacgcgcgaag

SEQ ID NO: 25223 - RNA, 78 nt, Homo sapiens
ccccgaaaccgcggcggggcagagcaacaccgagcaacaagaaaaacgaaaagcgcaggaggaggacagaaaagcagc

SEQ ID NO: 25224 - RNA, 73 nt, Homo sapiens
accaggcgccggccaaccgcgcggaggaggaaacaagggcagagccagcaaagcacgcaggggcgcgagagaa

SEQ ID NO: 25225 - RNA, 84 nt, Homo sapiens
cagggcgcagggccgggccgccgcgcaccgcagcgccggggcacgacacaaaaacagggaaagggagcagcaccggccacaccc

SEQ ID NO: 25226 - RNA, 78 nt, Homo sapiens
gacgccccaccacgaggccagcacgggaacgcgaagcgccaaagccagacaaagacccagcccagaccaggcacaagc

SEQ ID NO: 25227 - RNA, 72 nt, Homo sapiens
cgggccaccgcggaggggcgccgcccaacccagaaccagcagcgggagagcagcagaggaaccgcgggcccc

SEQ ID NO: 25228 - RNA, 65 nt, Homo sapiens
ggggaaacaccaggacccaggcgcgggcagccacagccaaagaaaaggggaaggaacaaaccaaa

SEQ ID NO: 25229 - RNA, 73 nt, Homo sapiens
aaaaacacaacaaaagaaaccaacaccgcaaaaagaccacagcgccaaagagaagagaaggagccaagacacg

SEQ ID NO: 25230 - RNA, 62 nt, Homo sapiens
cccgggggggcagcgcacggaggagcggcgggccagacaggaaaacaggaaaagccaaccgg

SEQ ID NO: 25231 - RNA, 63 nt, Homo sapiens
ggaggagcacagaggccagaagcaagccagggcagacggacgagaaccacggagaagcacgag

SEQ ID NO: 25232 - RNA, 79 nt, Homo sapiens
caaacagacaagacaccagaaagacagcacccacaaaagcgaaaagccagacaggaacaccagacagaagaacgccggg

SEQ ID NO: 25233 - RNA, 68 nt, Homo sapiens
cacacgagaaggagacacgagacaagaaccagagaaacagaaaagaagacagaccccggagcagcggc

SEQ ID NO: 25234 - RNA, 67 nt, Homo sapiens
ggcacgcacacggaaacaccgcagccgccaagcgcagaaccggccgaaaagcacaaacagcaagaaa

SEQ ID NO: 25235 - RNA, 84 nt, Homo sapiens
ccagcgggaccgcccaccagggcgccaaggcgcggaagcaggagcgacgggaaccggcagcaggcgagagccaggagacgcccc

SEQ ID NO: 25236 - RNA, 82 nt, Homo sapiens
cgcacccgccccacagccccacccaggcagacgcccggacgcacacggccggagcccaacagaaagcccagccccccccacc

SEQ ID NO: 25237 - RNA, 116 nt, Homo sapiens
ggcagcgcgcccgcgcccgggagcaggaggagcgcggcgcccgcagaggagcgcagaggcggagacagaggggccaacccgcgagcgcggaaggacaccgggaccggggaaggcgc

SEQ ID NO: 25238 - RNA, 82 nt, Homo sapiens
cccgcaccgggggagcgcacgagcccagcggagcgccgcagcacagcgccaggacaaacggcacgggaccccaaccaggacg

SEQ ID NO: 25239 - RNA, 79 nt, Homo sapiens
ccgggaagcgcgcaccgccaagcagaggaagcacccgcgagaaagaagggcacagcgaaacagcccggccaaaagagcc

SEQ ID NO: 25240 - RNA, 73 nt, Homo sapiens
gagaagggaaacagaggaaaaagcacaagcgaagaccgaagcccaaagcagaaaacacgaaccccggaaggaa

SEQ ID NO: 25241 - RNA, 66 nt, Homo sapiens
accaccaggcagagaagcgggcccacaaaccaacaacgaaaaaaggggacaacaccccagccacac

SEQ ID NO: 25242 - RNA, 61 nt, Homo sapiens
ggagcggaggaggagccgccgccgccagccgcagaacaagaacggcaggcgaaagaccgac

SEQ ID NO: 25243 - RNA, 84 nt, Homo sapiens
gacgagaccgcaacaacaccaggccaaggaccaggaacgagccagcagaaaccagggaaaagaaccccacaacagccaaccccc

SEQ ID NO: 25244 - RNA, 74 nt, Homo sapiens
ccagaaaagagccagaggacgcgccggccaagggggggcacagcaggacaagggcaaaggaggaagaacgggga

SEQ ID NO: 25245 - RNA, 73 nt, Homo sapiens
aagaagcggaaaaaagaaaaccagaagcggagcgggggcccgagaagccgacggggacgccagcgcagggaac

SEQ ID NO: 25246 - RNA, 57 nt, Homo sapiens
ggagaaggcagcgcggacccgagcaaaaccgcacggagacgccaaacgcaacagaaa

SEQ ID NO: 25247 - RNA, 42 nt, Homo sapiens
acacaaccagagcgaggacgacccccccaagacacaagaccc

SEQ ID NO: 25248 - RNA, 76 nt, Homo sapiens
ggcgcgcgcgcgcgcgcagcaccaggagaggagggaacgcggagcgggccaagcaaacacagaaagggaagaaaca

SEQ ID NO: 25249 - RNA, 52 nt, Homo sapiens
acacccggagcagcgccacaagggacaggcaagcgaagaaaccaggcaggcg

SEQ ID NO: 25250 - RNA, 69 nt, Homo sapiens
agcgagggggggcgcgccggaaaccggagcgcgcagcaggcgggacaagggcgcaccggggcgcagcga

SEQ ID NO: 25251 - RNA, 81 nt, Homo sapiens
ccagacccaggagagcaaggcccagaaagaggacacaagaggaagcccacaggcagagagggcagagcgaggagccagaca

SEQ ID NO: 25252 - RNA, 52 nt, Homo sapiens
gcgagaagcgagcgcgacaaacccagaaccaccgacagagcaaccaaccgca

SEQ ID NO: 25253 - RNA, 71 nt, Homo sapiens
cgggcccaagacaaaaggggcagaagcgccaaggacggcccggaggagccgggaagggagcgacgcgcaga

SEQ ID NO: 25254 - RNA, 82 nt, Homo sapiens
aggagaagcgcagcgacggcgcgggagagcgcgccagccggccgcgaagaaagcacaccaggaaagccacccgcgcgcaaag

SEQ ID NO: 25255 - RNA, 89 nt, Homo sapiens
ccgagcgcagccgcgcagggagaagaggcacccaggagggggaagacagagaagaccacacaaccgaaggggccgggcaggacggcccg

SEQ ID NO: 25256 - RNA, 74 nt, Homo sapiens
acagacaccgggcaagcaggaaacaccaagcagcggggaggcaaccaacaaggaagaggcacgcgacggagcag

SEQ ID NO: 25257 - RNA, 86 nt, Homo sapiens
agcccccaagcaccgcgcgcccggcccggccccgggccgagcgcgccgcggcacagaagccgggcggaagcccacgcacaggcgcc

SEQ ID NO: 25258 - RNA, 99 nt, Homo sapiens
gacaagggggcacgcagccggggaccgcccggccgcgagccggcgcagacgagcggaggaaacggcaccaacaaagcgggccccaaggcaaacaggcca

SEQ ID NO: 25259 - RNA, 74 nt, Homo sapiens
aacggaccccgaggacaggaaaaacagacacagaacgggggcaaagcgggggaggccaacacagacagcccgaa

SEQ ID NO: 25260 - RNA, 85 nt, Homo sapiens
ggccgaggcgaaccgaggggccggcggccgcccggcccggccgcggacagaaaccaagaagcacgaagagaggagagacagcaaa

SEQ ID NO: 25261 - RNA, 84 nt, Homo sapiens
gggagcccggccggagcgggcggagacgccgggcagccgaacggagggcgacggagggagccgagcaccaagggaagcggagca

SEQ ID NO: 25262 - RNA, 76 nt, Homo sapiens
gggaacccgccaaaaagagcacccacagcaagacagggaagaagaccgcaacacagcaacccagaccacaaaaaca

SEQ ID NO: 25263 - RNA, 95 nt, Homo sapiens
ggaaaccaaagccaaagcacgaacaaggaggacaagggcaccccaggacagaaaaggaaagacgagaagggaccgacggaaaagaaaagagcgca

SEQ ID NO: 25264 - RNA, 74 nt, Homo sapiens
ggccccagagaaagaccggaagagacagccgaccgcgaaggaacagaggacaagcaagcggacgaagaccggag

SEQ ID NO: 25265 - RNA, 70 nt, Homo sapiens
gccgcaccgccaacccccgagcaagacggggacaccccccaggcacagccacaccccagcggccaaggac

SEQ ID NO: 25266 - RNA, 68 nt, Homo sapiens
ggaccaccggggagcgaaacacagagaaccgggaaacccaagaaagggggagaagagggagacccgaa

SEQ ID NO: 25267 - RNA, 79 nt, Homo sapiens
cgggggcgccgaaagccagcccagccgcgaaaagccccaacacccccaaccaccgggcagccaagcagggaaaagccaa

SEQ ID NO: 25268 - RNA, 83 nt, Homo sapiens
gccggcgccgggccccacaaacggcagaagaaggaaaccgaaagaggcgggacgaggccaacgagggcgcaagagggccaaga

SEQ ID NO: 25269 - RNA, 73 nt, Homo sapiens
aaccgagcaacgcggccccagccgcggagacacaacaacagaggcagcaacgacaacaggcacaaagagagaa

SEQ ID NO: 25270 - RNA, 41 nt, Homo sapiens
acacaccccagaacagcaaccgacagaccaggagaagaggg

SEQ ID NO: 25271 - RNA, 75 nt, Homo sapiens
agaggaaaaaggaaagaaggcgaccgagcccgaggagccgcccagcaaaacccaacgggaacccgccggaaaacg

SEQ ID NO: 25272 - RNA, 38 nt, Homo sapiens
ccccgagaaccgcaggagccagagagaagaccgacaaa

SEQ ID NO: 25273 - RNA, 78 nt, Homo sapiens
gaggcagaggcacagcgcaggcagcccggcggcccgcgagcccgggagacgccagagagccccggacaggacccgacg

SEQ ID NO: 25274 - RNA, 75 nt, Homo sapiens
cccgcacgggaggccccagagggaaggagacccaacaccccggccagacgggccaccaggccggcgccccacgcc

SEQ ID NO: 25275 - RNA, 80 nt, Homo sapiens
caggaaggaggcagaggcacaccgaaaggcccaccaagccgagaacaccaggaaacagcccaggggaaggccacggagaa

SEQ ID NO: 25276 - RNA, 76 nt, Homo sapiens
gggacacaggcccccaaacaccacccagaaccagcaaccccccacgagaacaggggaaagaaccagacgacaggaa

SEQ ID NO: 25277 - RNA, 81 nt, Homo sapiens
cggccgccgccgccgcgagcgccccgcccaccagagagggaaggcaggccaaccgacagaccaccaacacccggaccaagc

SEQ ID NO: 25278 - RNA, 84 nt, Homo sapiens
gcagcacaggacagccaccgcgcgggccagcgcccacgcggcgaagaggaaaaaaaacagaacaggaggggagagggcaggaac

SEQ ID NO: 25279 - RNA, 72 nt, Homo sapiens
aggccagggcccagcaaagcaacagccaagccagagccgggccccaacaacccggggcgcaagcagccccag

SEQ ID NO: 25280 - RNA, 115 nt, Homo sapiens
ccagccagcagcagacgcaaggccgaccaagccaggcaagagagaggaaggaaaagggaagccacggccagcaagggcgcaccggcggagcaggaaccgcgcccgagccacacgc

SEQ ID NO: 25281 - RNA, 84 nt, Homo sapiens
gcacccgcgccagcaccacgcccgcgccgcgccgccgccaccagcccaagagaaagaaaaaaggcagcggaaagaagaaaagaa

SEQ ID NO: 25282 - RNA, 69 nt, Homo sapiens
ccaaccgcgaagcccgaggcagcccaagccgggcccgcacgagagacacagcagcgcgcggccccgagg

SEQ ID NO: 25283 - RNA, 62 nt, Homo sapiens
gcgacagccggcccccagagagaggcaggaagaggcggagggagagccaggaaggagaacac

SEQ ID NO: 25284 - RNA, 63 nt, Homo sapiens
aacgcgaccggcccagcgaaggggaccccgagaacaaaccaggggagggaaacgagaaaaacg

SEQ ID NO: 25285 - RNA, 87 nt, Homo sapiens
gaagccccaacagcacggcgggccccagcccgaagagaagcgaaggacgacagccaggggaggacaccacggcaccggagcacgaag

SEQ ID NO: 25286 - RNA, 78 nt, Homo sapiens
aaagagccaaagcagcagccccgacagccacggaacagaaagccaacaggcagaccagagacagcgccacgcacccgg

SEQ ID NO: 25287 - RNA, 82 nt, Homo sapiens
cgcagaaccaggcaccagagcaagacagcggaagaagacccagggaaacccccagccggaaccaaaaagaagccccagagcc

SEQ ID NO: 25288 - RNA, 71 nt, Homo sapiens
aaacgcacaaccaagcggagagacaaaaggcaagaacaacccaagaaggacagcgcgacagaaggacagca

SEQ ID NO: 25289 - RNA, 69 nt, Homo sapiens
aggacccacggaagccagaaagggacacacaggaagacgaacacggaacgggcgagaagaaagcagaga

SEQ ID NO: 25290 - RNA, 64 nt, Homo sapiens
gggagcgggcccgcgcgccgagggcgaggcggacgcgcggcgcgcagggacgacgcgggcccag

SEQ ID NO: 25291 - RNA, 70 nt, Homo sapiens
gggacggagagacaagaaacccagagaacgcccccgacaccacaaggcgcgggccccggggccgcggcga

SEQ ID NO: 25292 - RNA, 56 nt, Homo sapiens
ggagcgacggggaggcgcggccaacggggccacaaggaaacacaagagagaaaaag

SEQ ID NO: 25293 - RNA, 74 nt, Homo sapiens
aagaggaggaggaagacagcacacaccaacaccgcagagacaaggaaagcagcaaaaacagagaaacacgaaga

SEQ ID NO: 25294 - RNA, 35 nt, Homo sapiens
cccaggcacacgacgccacaccagcggacagccac

SEQ ID NO: 25295 - RNA, 80 nt, Homo sapiens
gccgccgcccacccgcggcgcggggaaaggcgcgagacccagaggccgcggccgcggacccaaagacaggaccacgcacc

SEQ ID NO: 25296 - RNA, 83 nt, Homo sapiens
caaccagaccaaggcagaagaagagaagaaggagagggccacggacagccaagcaccccaggaggcccccggagcccagaggc

SEQ ID NO: 25297 - RNA, 61 nt, Homo sapiens
acggcagacccagcgccggaagaaccggaagcccagccagggacaagcacccacagagacg

SEQ ID NO: 25298 - RNA, 86 nt, Homo sapiens
gcaagggacagacgggaaaaaagagcaccaccacgagagaagaaagaaaaagaaaccgccagcccagagacacgaaagggacagag

SEQ ID NO: 25299 - RNA, 84 nt, Homo sapiens
ggcaggcgccgggggaggccacagcggccgggaccaagcgaggagcggccagccaacaggacagcccccggcgcaaggaagaaa

SEQ ID NO: 25300 - RNA, 63 nt, Homo sapiens
accagcaaggcggcagagcaaggggcacgcagaaggaccggccacgccccggcacaaagcaga

SEQ ID NO: 25301 - RNA, 77 nt, Homo sapiens
acgccaggcgacagaagacgcggaaggagcacgaggaagcaaacaaccggacggcacccccggcaaggggagcaccc

SEQ ID NO: 25302 - RNA, 71 nt, Homo sapiens
gcggggccgcgccacccgcaaacagggcagaagagaagaaccggagaggagccaacccaaggggggaaagc

SEQ ID NO: 25303 - RNA, 81 nt, Homo sapiens
agaagggacgaggagggagaagacgaggagagcggaaaaaccccaaggcacggagggcagaagccgcaggacagaagcaca

SEQ ID NO: 25304 - RNA, 77 nt, Homo sapiens
agggccagagccaggccgcccacagacgggggcccaaaacaccacccaggccgcgggggacccgagggggacccagc

SEQ ID NO: 25305 - RNA, 81 nt, Homo sapiens
aaaggacacgacgcccccaagaagccacacgccaccagaaagcaacagcagagcccagggccgaaaagaaaacaggagaac

SEQ ID NO: 25306 - RNA, 64 nt, Homo sapiens
acaacaacccaagagaagacaagaaggagagccggaagaagaggaaagcaaagaagccaagaag

SEQ ID NO: 25307 - RNA, 56 nt, Homo sapiens
cacagagaagcaaaaaccggaaaagacggcaggaaccgaaagagcgagccccaggg

SEQ ID NO: 25308 - RNA, 59 nt, Homo sapiens
cggcgagccgaaaagcgagcgcgaggaaaaggcggcgggaggggagaagcagaccgcac

SEQ ID NO: 25309 - RNA, 70 nt, Homo sapiens
gcacacccggcagaccacacgagcggacagcagaccacagcccggcaggcccaaaaacccaaagggacag

SEQ ID NO: 25310 - RNA, 77 nt, Homo sapiens
ggcgcgcggaccccgccgagccagcgccggccgcgcgccgcgcccgcgccacagaggcgggagcaccagacagcgac

SEQ ID NO: 25311 - RNA, 74 nt, Homo sapiens
ccaaagaaccggagagccggaaacagaagggcggaaacagggagggccacagcccccgcccgggagacaaagcc

SEQ ID NO: 25312 - RNA, 71 nt, Homo sapiens
cgggccgccgggcgggccggcggccgccaggaagcgcccacagcccggcgggcaagcaccagaggcgcccg

SEQ ID NO: 25313 - RNA, 60 nt, Homo sapiens
gggaaaccggcagcgggacggaacagcccaaccagcaacagcagcgcccaaggacaagcc

SEQ ID NO: 25314 - RNA, 68 nt, Homo sapiens
ccggggacccccgacgccaggcagcgcccccaaacgaaagcggaaaagcccaggaagaaagaccagca

SEQ ID NO: 25315 - RNA, 77 nt, Homo sapiens
aaaaaagaaagagaaaaggaaagcagaagacaagcagaggcggagaagaacccaaccaaaaccaggcggcaaccccg

SEQ ID NO: 25316 - RNA, 79 nt, Homo sapiens
ccgagaaagaggcgcacaccccgcacagcagcacacagacacagaggcaaccggagcgaagaacaccacagggacgcca

SEQ ID NO: 25317 - RNA, 64 nt, Homo sapiens
aaggcacaaacaaggacccagaagcccgcggcaagacaagcacaaggcaccaaaaagggaacca

SEQ ID NO: 25318 - RNA, 77 nt, Homo sapiens
ccagcacaggaaccggcaggagaaggggcccggcagccgcccgaagggaagaaagcccaaagagaaagcgaaccgaa

SEQ ID NO: 25319 - RNA, 65 nt, Homo sapiens
caaggaagcgacagccaggaccaggcacccgggaaggggaggaaggagcccccgccgacaaggca

SEQ ID NO: 25320 - RNA, 78 nt, Homo sapiens
agcccccagagccggggaagcccagggaagaaggcgaggcaccggaacagacgcaggaagggaaggaagaaggccagc

SEQ ID NO: 25321 - RNA, 79 nt, Homo sapiens
gcgaaaaaaaagggaagaggagacaccccgggggccccgagcaaaccagggggggggaaaagagcccagccaaccacga

SEQ ID NO: 25322 - RNA, 103 nt, Homo sapiens
ggagagccggcagacaacgaagcaaagaggaaagcagacccaggccaggcgaggaaaaaaaaccgccccgggcggggaacggaggagaggaaaacgggggaca

SEQ ID NO: 25323 - RNA, 74 nt, Homo sapiens
cagaccgaggaaaaggagagaggccaagggcagggagccagcaccggccaacgggcggagcacgggagggacag

SEQ ID NO: 25324 - RNA, 82 nt, Homo sapiens
ccacccccccgagggcaccaacaccagcggggcgccgagcccggaccgacaggaaagaaggagcccacaaagaaaagaacac

SEQ ID NO: 25325 - RNA, 66 nt, Homo sapiens
acaacgcaccccgcaacaggaagaccgcaggaaagcaggaaggcaagaaagccaaggacgaaaccc

SEQ ID NO: 25326 - RNA, 58 nt, Homo sapiens
acgcaccagacgaccgcggaacaaacagaagacagccacagaagaaaagcggccaggc

SEQ ID NO: 25327 - RNA, 81 nt, Homo sapiens
ccagggcgcagggccgggccgccgcgcaccgcagcgccggggcacgacacaaaaacaggcgggggccgggcccaggaacca

SEQ ID NO: 25328 - RNA, 67 nt, Homo sapiens
aggcaaagagacaaggagagaagaaccaaagaagcaaaacacgaggacccagaccggaacgggcacg

SEQ ID NO: 25329 - RNA, 73 nt, Homo sapiens
ccgcccgggccagcggccgcgcacccccggccggaggcaccagcgccccgagccccggccccaaagacccaaa

SEQ ID NO: 25330 - RNA, 71 nt, Homo sapiens
agaaccgacaaggaggagaacccaaggggaaaaagacaccaagccaggcgcaagacgggcacagaaagagc

SEQ ID NO: 25331 - RNA, 47 nt, Homo sapiens
gacaaagagaggagccgaaggagaagcagcaaagaaggcaccgaagg

SEQ ID NO: 25332 - RNA, 72 nt, Homo sapiens
caaacacagaagaaagccacgggaggaagagagaaggcgaaggcacaaaacagagaggcacagagagaaaac

SEQ ID NO: 25333 - RNA, 68 nt, Homo sapiens
ggaaaggcgccgaagaggggccagcacgaaagcagccaggagaagagcacaagaaacaagagccagca

SEQ ID NO: 25334 - RNA, 78 nt, Homo sapiens
cagccgcccccgaagggaaacagagacaaagcggacacccgcccgccggggcccagacagacgagagcggcacgagga

SEQ ID NO: 25335 - RNA, 75 nt, Homo sapiens
cgcgcggcgcggcggcggcccgccccgcggcccagccccaggagagaagaccagaggaagagggaccagaaccag

SEQ ID NO: 25336 - RNA, 93 nt, Homo sapiens
gcgaggacggggaggacgcgccgcggccaggcagggaggagaccggcacccagacaggggcgaaggcagaggacggacacacaggcgaagccc

SEQ ID NO: 25337 - RNA, 77 nt, Homo sapiens
acagaccacaaaccacgaggaccaccgcgcccaggggcaggcgccgagaaagggccgaaagaaaagaaacgaaagcc

SEQ ID NO: 25338 - RNA, 53 nt, Homo sapiens
ggaccggacccggacccaaaggccagcaagaagaaagggcaggcgagagaggg

SEQ ID NO: 25339 - RNA, 76 nt, Homo sapiens
cagccccgcggcgcccgggcccgggcggcggcccaccgcccacgggagaggaagacgaggaagcagaagaacacca

SEQ ID NO: 25340 - RNA, 53 nt, Homo sapiens
gggaaccccggagaaaaggccaagaaggcagaaaagagcaccggccagcagaa

SEQ ID NO: 25341 - RNA, 64 nt, Homo sapiens
ccacacccgcccccggagagagcacgaaggacccagcagggcaccaggccgggcagagcgaaac

SEQ ID NO: 25342 - RNA, 81 nt, Homo sapiens
agaaagagcaaggaccgcaagcagagacaaggacagaaaacgggccccagacacaagccccaccaagaggacaccccagga

SEQ ID NO: 25343 - RNA, 74 nt, Homo sapiens
cagacccgcccaacagaaaaagagaggagggagaacacagaaacccgccccgggagggcagaccggccagaagc

SEQ ID NO: 25344 - RNA, 39 nt, Homo sapiens
gaacaaacaccgccgcaaaagggaagccgaccaacggcc

SEQ ID NO: 25345 - RNA, 63 nt, Homo sapiens
ggggcggagcagacacagacagcagagggaggaagagaccagaagagcaggaggaaacaaagg

SEQ ID NO: 25346 - RNA, 77 nt, Homo sapiens
ccacagaaacaaaagcaacaaagagggggggaagcgaggcaggaagcccagcacgccgaaggccacgcgacccaggg

SEQ ID NO: 25347 - RNA, 73 nt, Homo sapiens
gaacaaagcgaggccagagaaagagaagcggcacccccaggaagcgcgacacgggcgcagccccgagcccaca

SEQ ID NO: 25348 - RNA, 37 nt, Homo sapiens
ggaaagcacaccaccccagccaagcacgcccggccag

SEQ ID NO: 25349 - RNA, 84 nt, Homo sapiens
agccacccccaccccaccaagagaacggcagcagccaccaccaacagccacaagggcaccggcacacccaacggccagcaaggc

SEQ ID NO: 25350 - RNA, 74 nt, Homo sapiens
gggcccacccaggggaccagaggcgaagcccaagcacacggaagcggcaggagcaaaacggaccaaggagaaca

SEQ ID NO: 25351 - RNA, 83 nt, Homo sapiens
ggaccgccgccgccgccgccaccagagccggggccggacgagaaagccgaaggagacgacggaggagaccggcagagggcacg

SEQ ID NO: 25352 - RNA, 72 nt, Homo sapiens
gaacgagcaaaacgggcgcaacgaccaaaggaacaggcaacgaaagcaaaccgagagcaggcgaaggccggg

SEQ ID NO: 25353 - RNA, 61 nt, Homo sapiens
aaggaggcacccaccagcagcagcaagggcaaggaaggaaaacacccggcagggaaggaag

SEQ ID NO: 25354 - RNA, 80 nt, Homo sapiens
ggagccggcagcccagcacccgggagacccgaccaccggaagccacggcccggacccccgccacgcaagaccgcgcccgc

SEQ ID NO: 25355 - RNA, 104 nt, Homo sapiens
accgaggacacccggggagaagccaaggagcgcgcccaagcaccgaaaacaggacaccagaagagcagccggccccgaccgacccaacgcgaccaaacgcagcc

SEQ ID NO: 25356 - RNA, 82 nt, Homo sapiens
cgaagagaagagcaaagccgagagaggaaacacagcagaaacaaagaagcagcgcgaaagcagggcaccgaacggaccaaga

SEQ ID NO: 25357 - RNA, 85 nt, Homo sapiens
gaggacacccggggagaagccaaggagcgcgcccaagcacagacaccaggcgccgagaaggccagcagagaaacaggcaggagag

SEQ ID NO: 25358 - RNA, 37 nt, Homo sapiens
cacagagagagagagggagggcaccaggacaaaagaa

SEQ ID NO: 25359 - RNA, 74 nt, Homo sapiens
agccagaaaagccggcaaaaccacacagcgaaaaggcgcgaccgcccagggagacggaacccacacagaccaac

SEQ ID NO: 25360 - RNA, 89 nt, Homo sapiens
cgggggagcgggggagcgaaacaacccgaagagaacagccaggccggacggcggaggggcacacgccagagaaacagccgcagcaccgg

SEQ ID NO: 25361 - RNA, 73 nt, Homo sapiens
ccgcacccccgagacagcagccgccaccggacacagcagcaacacggggaaaggagccaacgccggcggaccc

SEQ ID NO: 25362 - RNA, 78 nt, Homo sapiens
gcacaggccccgcggcccgcccaacagagcaccgagagcgcggcgcagaaagcgcccgggggaggagcacggcgaacc

SEQ ID NO: 25363 - RNA, 72 nt, Homo sapiens
ccggccccaggaccccaagcagggccaccagcgcccaaagcagacaaagaaggagaaaggcagaggagggcg

SEQ ID NO: 25364 - RNA, 70 nt, Homo sapiens
aagaaaggacacagggcaggcccaaccaggaaggagacgccaggaggccagggcagcaccgggcagcgag

SEQ ID NO: 25365 - RNA, 76 nt, Homo sapiens
ccgcgggagcaccgggagccgagggcggaggcgacacccagggagagcagaaagacgagccgccggggaaaaagcg

SEQ ID NO: 25366 - RNA, 71 nt, Homo sapiens
ggagacgcgacaccgccagcaaaaaacagggggcaagcgcgagaagagcggcgcccacaaccccccgagcg

SEQ ID NO: 25367 - RNA, 69 nt, Homo sapiens
cacagaaaaggccacgacccaccccgaagagcaacggaaccagcgccgaggaagaagagagggcgaagg

SEQ ID NO: 25368 - RNA, 77 nt, Homo sapiens
cgagcacccaggcgacgcccaccaagggccccccgggccggccgccggacgacacagcccgccgccaggcacgggga

SEQ ID NO: 25369 - RNA, 78 nt, Homo sapiens
gaaaaaggagcaccacaggggcgaagcaaagccaccacagacagcccgaacaagggcccgaccgagaagacagaggaa

SEQ ID NO: 25370 - RNA, 69 nt, Homo sapiens
cgagcagggggacagacagaccggaacgagaccgggcgaagacgacaagaaacgaacgacagaagaagg

SEQ ID NO: 25371 - RNA, 81 nt, Homo sapiens
caacaaccgacaagaaaccgggaggaaagaagacaagagagaacgcaaacaggaagcgaggagaacacaccagcgggcaca

SEQ ID NO: 25372 - RNA, 73 nt, Homo sapiens
aaacaccaccaacaaaccggaacagcaaagagagggcgagaacccggaggagggcagccggacacgcacagca

SEQ ID NO: 25373 - RNA, 77 nt, Homo sapiens
ccggagacaacagaacacaagccacagacggcccgccagcggagccgggagagaggcgcgagagagacagggcacca

SEQ ID NO: 25374 - RNA, 70 nt, Homo sapiens
gcaagggaaaaagcccaggacgacagggaggcgaaggcgggggaagcaccgcaaacaacaaagcggaaaa

SEQ ID NO: 25375 - RNA, 76 nt, Homo sapiens
gccacggcaggggcagcagaagaccaaagcaggcagcgaaccgcagggagaaagaacgagaaacacagcccaaaga

SEQ ID NO: 25376 - RNA, 71 nt, Homo sapiens
gaggagcgaacaaggcgacaacacagacggccaagaaagagcagaccagaaaagaaggcaacgggaacggg

SEQ ID NO: 25377 - RNA, 76 nt, Homo sapiens
acaaagaaaggcaccaccgaggaggaaagcacaagcagggcgggacaaagccccaagcaaagcccagcacagcggc

SEQ ID NO: 25378 - RNA, 74 nt, Homo sapiens
ggaggcggcggcgggaacgagggcgagcagaggacgacaggccgggaggacgaaaaggaaaggagaagacaaag

SEQ ID NO: 25379 - RNA, 77 nt, Homo sapiens
ggccccccagacagggaagaaccagaggagggaccgaacaggacgccacggggaaccagaacacaccggagccgagg

SEQ ID NO: 25380 - RNA, 76 nt, Homo sapiens
cgaagacccggggacaggcagcgcagcccaggaggcagcaccaagggcgcagaacagccagcagaagcacaccaac

SEQ ID NO: 25381 - RNA, 62 nt, Homo sapiens
aaagaggaagcccaccacaaaaacgaaggcggcggcgaaccccaagcccgacggggacccac

SEQ ID NO: 25382 - RNA, 84 nt, Homo sapiens
ccacacgacccacaggagccccaggagcccagacaccagccccccaccagaaccgggagaagaccgcgcccccgcccgcaaaca

SEQ ID NO: 25383 - RNA, 86 nt, Homo sapiens
cggaacggagccgaggcgcaggggcgcgggcagagccagagcccaagcccccgcagggagcccaccgcgaccaggaccaccgccac

SEQ ID NO: 25384 - RNA, 72 nt, Homo sapiens
gaaagccacaaaaggggagaggcccaggaggacagacaggaagggaaggggcggagacgggcggaacgcagg

SEQ ID NO: 25385 - RNA, 64 nt, Homo sapiens
ggcaagacccaaggcgacgaccgacaggggggaaaggaggaggaagccaagaacgggagcgaag

SEQ ID NO: 25386 - RNA, 58 nt, Homo sapiens
acaaacagagccagcaagaacagccaaacaggagaccaaaggaaagacgacagaggac

SEQ ID NO: 25387 - RNA, 86 nt, Homo sapiens
cacgaggccgccagcagcgacaaacgcccacaaagcgacaacacaggcagcacaaccggccaccccccggacccgggagggcgaca

SEQ ID NO: 25388 - RNA, 56 nt, Homo sapiens
cagaggccgagacccccaccaccgcaggcagcccagacaggaacggccgaacacag

SEQ ID NO: 25389 - RNA, 100 nt, Homo sapiens
agcgcccggcggaaaaccgaagggaaggccagcagcgcgcggagaagaacggggagccagccagaggagcagccaagaagccccccaggggcccgcagac

SEQ ID NO: 25390 - RNA, 78 nt, Homo sapiens
gagggccacgggccccagcagcccaggcaggccccccggggggaaaagacgcagagagagaggcacccgggcccgcca

SEQ ID NO: 25391 - RNA, 51 nt, Homo sapiens
aaaagggcagggacagcgcaggcagcagaaagccacacacgaggaggggca

SEQ ID NO: 25392 - RNA, 85 nt, Homo sapiens
cggcggcggcgagccgcgcgcgcagccgacgcgggaagaagcgggcgcgggcagaaaccccacgaacccacgaaacccaaagcac

SEQ ID NO: 25393 - RNA, 78 nt, Homo sapiens
ggccaccggcgggaggaacaaaaggggaacgcccgcggacggcagggcgcgacaagaagcgcccgcccgacgagcggc

SEQ ID NO: 25394 - RNA, 74 nt, Homo sapiens
agaaggaagacccagggacagggaaagcaacgcacccaggaacggagggccaaggcagacagccagaagacagc

SEQ ID NO: 25395 - RNA, 78 nt, Homo sapiens
acagggcaggccagggcaagaaccaggcccgcccaaggcagagaacagcccaccaccacccgagcgcagcccagagac

SEQ ID NO: 25396 - RNA, 68 nt, Homo sapiens
aaaacacaagagagcagggaggagcccgagaaaagcacagcacccgcaggccaacacaggaccaacag

SEQ ID NO: 25397 - RNA, 42 nt, Homo sapiens
agcaccagcaccagcagagggcggaccccaaggagaacaggg

SEQ ID NO: 25398 - RNA, 63 nt, Homo sapiens
gaaggggacaacaaacagggaaggcaccgagacgaagcaaagcgcgccccaagccaagcggcg

SEQ ID NO: 25399 - RNA, 54 nt, Homo sapiens
agcaccggaacaaggagggggcagccaaccacgggaagggggcggagcagaaac

SEQ ID NO: 25400 - RNA, 70 nt, Homo sapiens
aggggagaggcccaggaggacaggcacgcagaagccagcggacgcccgcaacggggaccggccagagacc

SEQ ID NO: 25401 - RNA, 74 nt, Homo sapiens
gacaaagggacaacgccaaccagagaaacagaccaaccaaggcggaaagcaaaagccaagcaaagcgggcccgg

SEQ ID NO: 25402 - RNA, 66 nt, Homo sapiens
gggaacaaaccagagcggccccaaagcacacgagagcaagagacaagaccgcgccgcggccgagcc

SEQ ID NO: 25403 - RNA, 72 nt, Homo sapiens
acaacgcccgcccacccaggcccgaagaggaaaggaggagacccaccgaaggcagggaccgaaggcagggaa

SEQ ID NO: 25404 - RNA, 80 nt, Homo sapiens
gaggagccgaggcgagccaacagcacaaagaccacacagggaaacgaccagggagagaccaacaggaaccacagcggccg

SEQ ID NO: 25405 - RNA, 55 nt, Homo sapiens
gaaggagaaacgcgggaacagggaggggaaagaaagcagagcgcagacccaagca

SEQ ID NO: 25406 - RNA, 70 nt, Homo sapiens
aggcgggggcaggcggagaaggagacaccggaggacgaagagggggagggagcgaggcggccagggcccc

SEQ ID NO: 25407 - RNA, 60 nt, Homo sapiens
aaacaggagcggagcagccaaagagggaggacaccaggagaacgaagcaaaagcgggccg

SEQ ID NO: 25408 - RNA, 70 nt, Homo sapiens
gcggaggaggaaacaagggcagagccagcaaaggacagagagagggaagagcacagacaaaaaaaggacg

SEQ ID NO: 25409 - RNA, 49 nt, Homo sapiens
gaggaaaggaaagaaagcacgagacaacgagcagaagaaggaagcaaga

SEQ ID NO: 25410 - RNA, 68 nt, Homo sapiens
cacgcgcacaaaacagaaaagcggagcaagagaaaaggagggagagagcagggcacgagggagaggcc

SEQ ID NO: 25411 - RNA, 78 nt, Homo sapiens
agagagagacagagggaaccggcagggcaagcggcgacacacgacgggcccaggcccaggcccaaggccaaggagaga

SEQ ID NO: 25412 - RNA, 67 nt, Homo sapiens
cagcagaacgaaagagagaagacgaaaccccgacaagggaccgggcgggccccgcaggaaaccccca

SEQ ID NO: 25413 - RNA, 73 nt, Homo sapiens
gaagcccaaggccacgcagaaaaaaaccagaccgccgacacccagacgcaaaaaccaagagacggggcaccgg

SEQ ID NO: 25414 - RNA, 79 nt, Homo sapiens
ccagacgagcacggaagcacaagcaggaaggaaaacacaggaggaggccgaggggacgcgggacccggcagagacagag

SEQ ID NO: 25415 - RNA, 75 nt, Homo sapiens
agagggccaccgcccgccacccgcgcgccgccgccgaggagaaaggcaggaaggaaaagcaaacacaaggaaccg

SEQ ID NO: 25416 - RNA, 101 nt, Homo sapiens
agaggaaagcacaaagaaacacgaagcaacggggcagcgaaaacgcacaagccccccaagcacaaagacaggggcggaaagcagggaaaacaccacaccaa

SEQ ID NO: 25417 - RNA, 67 nt, Homo sapiens
accagccaagacaacaagaacgccgccgccgcacaaggagggaagcggacacacaggacgagaaacc

SEQ ID NO: 25418 - RNA, 63 nt, Homo sapiens
cccacgcccggcccggcccggccccgacacgcccagagaggaccaggaaaaaccccagaccac

SEQ ID NO: 25419 - RNA, 46 nt, Homo sapiens
gaaaaaaagagcacccgagaccccacggaagaaccaaacagcgcac

SEQ ID NO: 25420 - RNA, 63 nt, Homo sapiens
cccccaaccccacgccaccgaagagccaagcccagagagagcaaagaccccaccagagaagac

SEQ ID NO: 25421 - RNA, 72 nt, Homo sapiens
aagagacagacaccgccccgagacgaggccccgggggcgccgagggcacaagggcaacgacagaagggcgaa

SEQ ID NO: 25422 - RNA, 82 nt, Homo sapiens
gcggcccacgcgcagcgacagggagaggacaccggggcaggggcgcccgcgggacgacacgccaagcaccgaccagagaacg

SEQ ID NO: 25423 - RNA, 84 nt, Homo sapiens
ggaggggccggcccccggagcgacagaaacaaggccagaagacagcgccagacgaccacaccaacccagagggagagagccaag

SEQ ID NO: 25424 - RNA, 78 nt, Homo sapiens
caaccgacccggcgaccggcagacccaggggcaagacagaccggggaggcccgaaaagaaagcgaacacacaaaacaa

SEQ ID NO: 25425 - RNA, 89 nt, Homo sapiens
gccgagcaggacaagggcaggcggcgcaggacgcaccggcacgcaacaaggaagaaggaccggggagacaggaacacgggcaagacagc

SEQ ID NO: 25426 - RNA, 77 nt, Homo sapiens
accaaaaagaagccgcagcccccggacaccagaagagcccagcagaacaaagcggcaagcgggcgccaggacccccc

SEQ ID NO: 25427 - RNA, 76 nt, Homo sapiens
agagaacagagaagagccaaacaaccaaggaaggaagagccaggagcagaagcgaagagagagagagagaagagag

SEQ ID NO: 25428 - RNA, 61 nt, Homo sapiens
agccacccaaaagaagaacaaaacccaggccacacccccggaccaccaggacggccaagca

SEQ ID NO: 25429 - RNA, 76 nt, Homo sapiens
gcccgcgcggccagagcccaggagcgaagcccggacgcaaccgagaccaaaccaagcacaacccacgacgaggggc

SEQ ID NO: 25430 - RNA, 75 nt, Homo sapiens
gacaaccaggcaagcggaagaaccgaacacacaaagaacccagacacccgagccagcgcaaaaaacagagagaac

SEQ ID NO: 25431 - RNA, 42 nt, Homo sapiens
ggccagagggcggggagaaccagggagaagcagaagcccgca

SEQ ID NO: 25432 - RNA, 70 nt, Homo sapiens
cgaggcgaaaggagagagaaaagcagaggaagagccacaaccggagacacccaacaccacccaggcagcc

SEQ ID NO: 25433 - RNA, 89 nt, Homo sapiens
gcggaagcgccccaccgcgggcgccaaggggagcagaaggaccggacacagcaagaggagccaggagcacggggggaacaagaccgccg

SEQ ID NO: 25434 - RNA, 71 nt, Homo sapiens
gagaaggacgaaggaagggcaagagggaacagccaaggccacagacaacgcacaaaaggcgaggacaacgg

SEQ ID NO: 25435 - RNA, 80 nt, Homo sapiens
agaagaccgagcaaagagaccccggaacgaccaaacacggaacagggcacgcggaacaggagaggaggaaacagaccgag

SEQ ID NO: 25436 - RNA, 109 nt, Homo sapiens
ggacgcccgcggccggggcccgacccccccaccgcagcccaccccgcaggcgggcaggcgcagacaggcccaaaccgccaggaacacacagcgggaaacgcaggggaag

SEQ ID NO: 25437 - RNA, 65 nt, Homo sapiens
gaggagaagacaccaaaaagcaaacggaccagaccgaccaccaaaacacaagaccgcggagaacc

SEQ ID NO: 25438 - RNA, 66 nt, Homo sapiens
gcagaaccacagaaacggggcccgaccggaaaagggccaagagcaggaacccgagaagcagagaac

SEQ ID NO: 25439 - RNA, 136 nt, Homo sapiens
agaggacacccgaccggaaaccaaaccccccagcaccagagggagagcggacaacccgccagcagagcagagagcaagagagcacaaggcaagccccaaaccaccggcagccaagagacgggaaggcgcacgagca

SEQ ID NO: 25440 - RNA, 57 nt, Homo sapiens
cgcgagccccaagaaccggccaccggccccacacgaccgccccggcacaaagcagac

SEQ ID NO: 25441 - RNA, 53 nt, Homo sapiens
acaacagccacacgagacgcaaccgccacggcaccggggcggagcgccgagag

SEQ ID NO: 25442 - RNA, 65 nt, Homo sapiens
gacacaccacgccaagggaacaccgcagcgagagaaaccacgacaaggacaacaagggccggggc

SEQ ID NO: 25443 - RNA, 72 nt, Homo sapiens
cggcgcaaacccacacggagggcacaccagaagaacgcgggagacagaggcgcccgcccaacccgagaaccc

SEQ ID NO: 25444 - RNA, 94 nt, Homo sapiens
agaacccaggaacggaggaaaaccgaaacacaggccagggccaaagggccagccaccaggcccagccggagcgcaccacccaagcaaggcagga

SEQ ID NO: 25445 - RNA, 72 nt, Homo sapiens
agacaagaggaaccgcgccccagaaggcagaggaacacaacaggagcagaagaagcgcagaagcaagggaaa

SEQ ID NO: 25446 - RNA, 124 nt, Homo sapiens
gacggacccagggcagacggagcaaagcccccacgcccagccaggagcaccgccgaggacccagcacaccgaggggcgggaaaccaacccgcaaggcagaaccagcaagggaagggcgaaacag

SEQ ID NO: 25447 - RNA, 79 nt, Homo sapiens
gcaggagaggccaagagaaagacgaaaaggggaaaggagaaagaagggagaagaaacagagaaccccaaggacaaggcc

SEQ ID NO: 25448 - RNA, 67 nt, Homo sapiens
gccgggagccagaagcacaggcccgggcgaaggggccacgcgagggcagagccgaacacaacaggca

SEQ ID NO: 25449 - RNA, 58 nt, Homo sapiens
gggacacacggcagaaacggaccgagaaacacagcaggcggccacacggcggagggga

SEQ ID NO: 25450 - RNA, 78 nt, Homo sapiens
ccaaggggaacaaaaagagggaggcgaacagccacccgggcacaggaagggggcgaagaagagcagagcagccgaagc

SEQ ID NO: 25451 - RNA, 43 nt, Homo sapiens
caccaggagcccgagagagaaggcgcgcgacggccacgagccc

SEQ ID NO: 25452 - RNA, 85 nt, Homo sapiens
ccggccagcgacgcaccgagaaaggaaggaaaaccgacgaaaaaagcggggaaggggggcaaaaaaaagaagcaagcgaagcacc

SEQ ID NO: 25453 - RNA, 78 nt, Homo sapiens
gggacacccgggagcaggaaagaggccgggaagaaggagggacacagcagcgcggagagcggcccgggacgagagaga

SEQ ID NO: 25454 - RNA, 63 nt, Homo sapiens
gaagaagcgcaaaaaacgaaggaagaccaacgacaggcgcaagaaaccgaccgacccgaccaa

SEQ ID NO: 25455 - RNA, 77 nt, Homo sapiens
ccaaggaagccacggcagacacacaacccgacccgacgagagcagaaaagcgaggcaagggcggcaggggggggcgc

SEQ ID NO: 25456 - RNA, 82 nt, Homo sapiens
agcaggcagcggcagcaccgggagcagcagaggaagcgcagcccccgggaccggcccgacagagccgccgaccgacagcagc

SEQ ID NO: 25457 - RNA, 40 nt, Homo sapiens
gggaggaggggcaggcccggcggcagcggacaaaagcaag

SEQ ID NO: 25458 - RNA, 70 nt, Homo sapiens
aagcagagaaaaacggaggggagccaagaagccaacaaaagaggaaaagcgggacccaaagacaggacca

SEQ ID NO: 25459 - RNA, 43 nt, Homo sapiens
gcccccgagcagcgggacacaggcgaggcaggagaaggcagaa

SEQ ID NO: 25460 - RNA, 80 nt, Homo sapiens
ccagccgggaacccccacgcggccagcgaaaacgcccaggaggaaacgaagagacacccacaagagcgccgaagaggaca

SEQ ID NO: 25461 - RNA, 71 nt, Homo sapiens
gccggccggacaagcccaggagccgaccagagagcaggacagcagaccacagcccggcaggcccaaaaacc

SEQ ID NO: 25462 - RNA, 68 nt, Homo sapiens
cccgaacccccagcccaaacccggaaacccagcggcccagccgggagccaccaacagagccaggagcc

SEQ ID NO: 25463 - RNA, 75 nt, Homo sapiens
caggaggccagggggcgccaggagacgaacacaaggccacccaagcccccccaacaagaggcgagggcgggagga

SEQ ID NO: 25464 - RNA, 47 nt, Homo sapiens
gcggagaaaaggcgacagcccgccaagacagcggcgcgagggcggcc

SEQ ID NO: 25465 - RNA, 76 nt, Homo sapiens
cgcggagcgcgcagcccgcgccccccgcccccccaccgacacagcccagccgcccagccgaaccagcacgggccca

SEQ ID NO: 25466 - RNA, 76 nt, Homo sapiens
ggaacgaggcgccgaccccacaggaagggaagcacagcgacccgacagcagggaagaacggaaaccagagaaagaa

SEQ ID NO: 25467 - RNA, 65 nt, Homo sapiens
gaagaccgccaggagagccaccaaacccaagcaggcagcagaccaaagagcaagaccccaagaaa

SEQ ID NO: 25468 - RNA, 81 nt, Homo sapiens
cacaggggcccgcacgagccaaaggacacagcaacacccgaaagggaaggcgaggagcggaaggcgagcggagcggcggag

SEQ ID NO: 25469 - RNA, 76 nt, Homo sapiens
ggcacgccgccagccccgggggccacgagcggggaaaaccagacgagggcgacaagggaaagacaaccccccaaga

SEQ ID NO: 25470 - RNA, 71 nt, Homo sapiens
aaaagcagccgagaacccgccgcggcgcccgcccagggcggaaggagccagaagaccgcaccaccgaaaac

SEQ ID NO: 25471 - RNA, 88 nt, Homo sapiens
cgaaacacacaccgggccccaacacgccaggaagaggagcaggacggagggagaaggggccacacggaagggccgaggaggaggacgg

SEQ ID NO: 25472 - RNA, 79 nt, Homo sapiens
aacccgggcaaacaggaccacaggcccggaaaagggggcagggccaggccaggaccacaccccaacaacacaaaagagg

SEQ ID NO: 25473 - RNA, 77 nt, Homo sapiens
ccaggccagccgcagccgggggaggggcgccggaggacaccacagagaccgcggccaggagccaagaagaccagacc

SEQ ID NO: 25474 - RNA, 90 nt, Homo sapiens
gcccgggcccgaggaggcagccaagccgggccgcccgcggcacggccgaagcccgcagcccacgcacagccggagagcagccgagcacgg

SEQ ID NO: 25475 - RNA, 74 nt, Homo sapiens
caggacgcacagaaagaccggagcgggacaaaacacccaagcacacaaccagaaagaagggcacgaaaagaaag

SEQ ID NO: 25476 - RNA, 58 nt, Homo sapiens
gacaaccagaggcagccagcagggggagaacagggaagaagcgcgagcgaagcagggg

SEQ ID NO: 25477 - RNA, 80 nt, Homo sapiens
ggaagcaaggaacaaaccgaagaacagcgggaaagaaggcaaaacacggggagcaggaagaagagagccaagcgaacgcc

SEQ ID NO: 25478 - RNA, 72 nt, Homo sapiens
cacacccagccacgagagcaaaaccgaaccccccgagcggccgaggggcacgcagagccgagacgcgaagcg

SEQ ID NO: 25479 - RNA, 41 nt, Homo sapiens
cggaaaggcgcaggcagagagaacgcgacacacaccaagcg

SEQ ID NO: 25480 - RNA, 78 nt, Homo sapiens
acgagaccaccggcaacacggcacgggacgcgggcggggcaccgggaaggagaagacagccaagcaccgccccaaggg

SEQ ID NO: 25481 - RNA, 73 nt, Homo sapiens
aagagcaagaccaaaagaacaggaacgggacaagcagcacacacacagacagggaggaggaaagacaaagcgg

SEQ ID NO: 25482 - RNA, 72 nt, Homo sapiens
ccgaaggccggaaacgacacaacaagcacgacagaaaaaaacggaaaaggaaaccgaagcagccccaagccg

SEQ ID NO: 25483 - RNA, 75 nt, Homo sapiens
gggccacgaggaacaaagacagcccaccaggaagagcgaaaacggaaagcaaagacagcggaagccaaagccacc

SEQ ID NO: 25484 - RNA, 85 nt, Homo sapiens
acacagcagaaagaagaagcacgaaacgacccagaacacgcacgagacccacccaccagcacacaccaaccaaggaaaaaaggag

SEQ ID NO: 25485 - RNA, 75 nt, Homo sapiens
caccacccagaggacgggagggggaaggggccggagggcagggggcagggcggcagagaaccgagggaaacgaca

SEQ ID NO: 25486 - RNA, 57 nt, Homo sapiens
agcccacggcgggcgcaaagggaaagaaaggcaaagcgagcaagagggagaccaacc

SEQ ID NO: 25487 - RNA, 65 nt, Homo sapiens
caacaagaaggagaccaccaaacgggaccagccggcaaaaacaccccccccccgagcggggcggc

SEQ ID NO: 25488 - RNA, 76 nt, Homo sapiens
ggacagcgggaaaaaccggagcagaggccgggcgcagccggaccgcgaaacaagcagcccgacggccaggaggcga

SEQ ID NO: 25489 - RNA, 80 nt, Homo sapiens
gccggacgccagacgcacgacggcaaggggcgggcaggccggcaggccagaaccgcacgggcggacgggaccgcaggggg

SEQ ID NO: 25490 - RNA, 56 nt, Homo sapiens
gaaaagccccgcccgcccggaaggggccaagagggcccaccaggcacgggccagag

SEQ ID NO: 25491 - RNA, 60 nt, Homo sapiens
gagcgacggccccaggcggagaccgggcaggccagacggcacccgacagaagcagcacca

SEQ ID NO: 25492 - RNA, 78 nt, Homo sapiens
acaagaccaccgccaaacagaacacgcaagcacagcgacacacaggacgaaagagggccccacgcccaaaccaaacga

SEQ ID NO: 25493 - RNA, 82 nt, Homo sapiens
ccccggcccgccggagcgggaggacagccgccagagcggagccaggccaaggggagcaagcggggagacagagccggagccc

SEQ ID NO: 25494 - RNA, 63 nt, Homo sapiens
caggcccgcgggggagacgcagccggaggaggagaacggggcgaggaggaagaagaagaaacg

SEQ ID NO: 25495 - RNA, 71 nt, Homo sapiens
gggccaccgcaacccagggggccagggacgcacagggaacaccagaggcgggaccacgggcagcgcccagg

SEQ ID NO: 25496 - RNA, 83 nt, Homo sapiens
caggaaggaaaaggcgcccgagagccgcgaaggggaaggcccagagcgaggccccagggagcagaggagcagaccagacacgc

SEQ ID NO: 25497 - RNA, 49 nt, Homo sapiens
gggaaaaacgaggccccccaaagaaccaaaaaccgggaggcacccgacg

SEQ ID NO: 25498 - RNA, 80 nt, Homo sapiens
caagcgcaggggccccgggccaggggaagccggcgagcaaggggaagcccagccgcagaccgcacaaaccaagaaaaaac

SEQ ID NO: 25499 - RNA, 75 nt, Homo sapiens
aaaagaagaccgaaagcaaccacaaagaaccagcgaccagagggccaaaacagaagaggcaaagcccagccacag

SEQ ID NO: 25500 - RNA, 83 nt, Homo sapiens
aaagacccggaaagaagagacacagaggagccacacccccagggaggggggaagacagggcccagcaccacaggacgggccgg

SEQ ID NO: 25501 - RNA, 71 nt, Homo sapiens
cgacggaggcacccgggaccagccgggggggaagaacgaaaccagaacagaaagggacgggacagcaaaag

SEQ ID NO: 25502 - RNA, 80 nt, Homo sapiens
ggacacccacagcggggcggcggcggcggcggcgcggcccaaaaggaccaccagagagcgcggacgccaaaacacagccc

SEQ ID NO: 25503 - RNA, 84 nt, Homo sapiens
cccggccggagcgggcggagacgccgggcagccgaacggagggcgacggagggaggaacaagacaccaagggaaggaaacacaa

SEQ ID NO: 25504 - RNA, 72 nt, Homo sapiens
ccccggcgggcccgaggcggcgagagaggcaggcggagccgaccgggccagacgagcaaggagggaagaaac

SEQ ID NO: 25505 - RNA, 75 nt, Homo sapiens
gagcgagggggggcgcgccggaaaccggagcgcgcagcagccccaccaggcggggaagagccaagacccaaacac

SEQ ID NO: 25506 - RNA, 78 nt, Homo sapiens
aaggagacagcacagacagacggcacccacggacacggcagggcaacccaacaacagccaccgggacacccgcaggcc

SEQ ID NO: 25507 - RNA, 81 nt, Homo sapiens
gcgccagcgacaggcgcacacgcccaccggaagcaggagaagaagcagaagaagacaaagcagcaaaaacaaagaagcggg

SEQ ID NO: 25508 - RNA, 64 nt, Homo sapiens
aggcgggacccgcaccggaaggccacgccaagggaagcgcccgggaggcgcaggaagaagaaag

SEQ ID NO: 25509 - RNA, 74 nt, Homo sapiens
ggggagcggacggagcggggaacgacaagcccgagaaaggccgccccggggcaccgagaaacagaaaagccgcc

SEQ ID NO: 25510 - RNA, 80 nt, Homo sapiens
gccagcggagcgaccagaaacgaaggaggcccaaccacaaaaggagccgacggaacccagacggagaacaaaaggaagaa

SEQ ID NO: 25511 - RNA, 86 nt, Homo sapiens
gagcgcggaggcgggcgccggcggcgggcgcccggagagaccgacagaagcggacgagccgaggagcacaagggaagaaaagaagc

SEQ ID NO: 25512 - RNA, 63 nt, Homo sapiens
cccagggccagggagcaggagccagggccgagcacgggaaagaaacagaagcggagagacagg

SEQ ID NO: 25513 - RNA, 62 nt, Homo sapiens
acgcgggcagcgccgacaccccagccggcgacacagggacagaggacgcagaaaacaaccac

SEQ ID NO: 25514 - RNA, 83 nt, Homo sapiens
gcccggcccagaccacccccccaccgcgcccccacgcaaaaaggccgggccagcgacgacagagacccaggaaaccaaagcaa

SEQ ID NO: 25515 - RNA, 81 nt, Homo sapiens
gggcaaggacggcggcgcccagccggcccgccggggaccaaaagcagagcagcagcggagcggagcccggaagaccgcaga

SEQ ID NO: 25516 - RNA, 73 nt, Homo sapiens
agccacccagcgcccagcacacaaaacagcaggccacaagaacaccgagacgacacaagaacaaagacgggcc

SEQ ID NO: 25517 - RNA, 70 nt, Homo sapiens
aagaccgacccaccaggacagaggccaagaagaagcaaccggagagaggaaaacagcccaaacaagaaag

SEQ ID NO: 25518 - RNA, 77 nt, Homo sapiens
ggaaaggcaaaaggacaggaggagaggagagacccagagccgacagaagaagaccacaacaaaaaggacgaagaaac

SEQ ID NO: 25519 - RNA, 83 nt, Homo sapiens
ggaaccacaagcaccagcacgccggcaagcgggaggggcgaacggggaagacaggccgaggagcggggagaccaaccagcaga

SEQ ID NO: 25520 - RNA, 81 nt, Homo sapiens
caggaggcccggccacacccgcccgcggccggcggaagacaccgcagacgagggcaagagacgggagaacagaggcgagag

SEQ ID NO: 25521 - RNA, 75 nt, Homo sapiens
cgcgggccacgcagagacaccagcaagagcgagggcccacgaccccgccgggcgggaaaccaacccgcaaggcag

SEQ ID NO: 25522 - RNA, 76 nt, Homo sapiens
ccagacgccaccacgggcacccgcgccgggcaccgaggaccagccaagacagcggagcggcggacaccagaagaga

SEQ ID NO: 25523 - RNA, 64 nt, Homo sapiens
acaacccaaccacaaagagagggagagccagggagcggcggggaaggacacgaggacaggacac

SEQ ID NO: 25524 - RNA, 82 nt, Homo sapiens
cccggaacgccgaacaagacgggagcaagaggacagaggaaagagacggaagaagaagaaagcaacgcgaagggccaagaag

SEQ ID NO: 25525 - RNA, 67 nt, Homo sapiens
caccgaggcccacaagaacgccagaaagcacagcaggggccaaggcgacagcaaaacggagaaagag

SEQ ID NO: 25526 - RNA, 79 nt, Homo sapiens
acaggacaccgaagccaaccggaaaagcagggaaccagggagaccaggacaaggaacagaaagacccacgggagacccc

SEQ ID NO: 25527 - RNA, 65 nt, Homo sapiens
ccaaagcagcaggagcgcagcacgaaaacggaaagggaagggaaaacccccaacggagacaacga

SEQ ID NO: 25528 - RNA, 74 nt, Homo sapiens
acggagcccgacaggccaaaccacccccacccagcccccaagagcgggacaagggaaagaggcaagaccggaaa

SEQ ID NO: 25529 - RNA, 78 nt, Homo sapiens
agaccggcccgaccgcccacagacccaaacaaagggaaaaacacacgccacacgcgaccagagaggagacgaacgaag

SEQ ID NO: 25530 - RNA, 115 nt, Homo sapiens
gcaggaggcacacccggggcagcagcaccacagcagcaccgccagcccagcaaacgggacgcagccagcaaaggcccgggcggccacagggcggccggacacccggcacccgggg

SEQ ID NO: 25531 - RNA, 86 nt, Homo sapiens
cccccagggccggggccggagcggccgaccgcaccgaggaccagcagagccgccaaggaaccagaggagacccaagccgggaccag

SEQ ID NO: 25532 - RNA, 75 nt, Homo sapiens
cgaggcggcggcgcccggagggcagcgaggagggggccacggagcgaaagccgcagccagagaagaccgcggacc

SEQ ID NO: 25533 - RNA, 86 nt, Homo sapiens
ccgggggccgaggggccaaccagcgaagagcgacaagccgcggcagccgcggaccaccgccgccaggccggggcacccgcacgggc

SEQ ID NO: 25534 - RNA, 38 nt, Homo sapiens
cgcagggcgcccggcaagaaagcaaaccccacgagaac

SEQ ID NO: 25535 - RNA, 56 nt, Homo sapiens
cacggagacggccagaacaccacagcccacaaaggccacgaagacggcaaggagga

SEQ ID NO: 25536 - RNA, 48 nt, Homo sapiens
caaggccgagcccccgaaacaaccaaccagagggggacaggggagcac

SEQ ID NO: 25537 - RNA, 77 nt, Homo sapiens
cagaccgaggacacgagcaccagcagcacggcaggggagcgagcagcccaaccggagcagagccacacaaggaagac

SEQ ID NO: 25538 - RNA, 66 nt, Homo sapiens
aacggcaccagcagagagaaaaggaacaacggaggaacaaagcaaaggccccgcagaggcggaaag

SEQ ID NO: 25539 - RNA, 55 nt, Homo sapiens
agaacgggagaagacccggagacgaggacgcgcacaggaaaggacgcggaacaag

SEQ ID NO: 25540 - RNA, 73 nt, Homo sapiens
cgccacagaaaaaggagagacaaacagaagcagggcccgagggcaggacagcaggcaccggcgaagcacagag

SEQ ID NO: 25541 - RNA, 76 nt, Homo sapiens
ccaaagccgcccagacggccaccggcgggaggaacaaaagaccccgggcgacacaggccagagaagccgaggaccg

SEQ ID NO: 25542 - RNA, 77 nt, Homo sapiens
caggccagcgcgcggacaggaaccggacagcacaccagggccgggacacacgaggggcccccaaagggaagccaaac

SEQ ID NO: 25543 - RNA, 59 nt, Homo sapiens
cagaggcgggaggggccgggaggcagaggggcagggaggccggaccacggaaagacccc

SEQ ID NO: 25544 - RNA, 93 nt, Homo sapiens
gcgcgaagcggccaaagccgcccagacggccaccggcgggaggaacaaaagagccgagacaacccaacggagaggcgggaaacggagagacaa

SEQ ID NO: 25545 - RNA, 80 nt, Homo sapiens
gaccccaagagcagacaaagccacaacaccccaacggcccaaaacagacgaagaccacaagggaaaagccgggccacaga

SEQ ID NO: 25546 - RNA, 76 nt, Homo sapiens
caccgccgcgcagcacgagcggaccacacccaggaccacagcagaccacagcacacgggcgcagccccgagcccac

SEQ ID NO: 25547 - RNA, 67 nt, Homo sapiens
aagagcccaacaccacccgagagccccaagggcgagggaaaaaaagacaggacaacaggagagcgaa

SEQ ID NO: 25548 - RNA, 69 nt, Homo sapiens
gcacgagcaaaaggaagcaacccagaagagcgaaggacccagcgaggagggaacaggagccggccacac

SEQ ID NO: 25549 - RNA, 78 nt, Homo sapiens
agccccaaagcgagcgaagcagggcgccgccacgccgcaggaggcggaggaacaaaagcccagcccggcagcccacag

SEQ ID NO: 25550 - RNA, 76 nt, Homo sapiens
ccaacccccgaaacaagaaagcagaaccagcagcaaaaggggcaaggggaaaagacagagccgccggcccgggcgg

SEQ ID NO: 25551 - RNA, 75 nt, Homo sapiens
agcaccggagagacagcacagcacccacaaagcaacggcgggggggcgaacaggcgccggcaccgggaaggaggc

SEQ ID NO: 25552 - RNA, 87 nt, Homo sapiens
agggcacggcaagagcgggcgccaccagccacacgacagacacgcagcggccagccagcgcccggaagggaagggacaacgaagcac

SEQ ID NO: 25553 - RNA, 64 nt, Homo sapiens
caccgccaccgacacagcggcggaccccacaccaagacggccaggccacacaggcgcgggcccg

SEQ ID NO: 25554 - RNA, 75 nt, Homo sapiens
gcagggggcgaggacagcggccgccgaacaccaagcgccgcacaagcaagggggaaagcggaccaagaggaaacc

SEQ ID NO: 25555 - RNA, 37 nt, Homo sapiens
cacgcagagccccaaagcgaagccgacgagcccgaac

SEQ ID NO: 25556 - RNA, 57 nt, Homo sapiens
aggggacagaagcagcggaaccgggagggcgcacgacccccgcgacccgagaacggg

SEQ ID NO: 25557 - RNA, 76 nt, Homo sapiens
cgcggccagcgcgggcacagaggcgcacacgaacaacagggaacaggcgcggaacagcccggaggagaggaccgaa

SEQ ID NO: 25558 - RNA, 85 nt, Homo sapiens
gcagcagaagagccaaggaaaaacagcaagaacccaaaaggcaccagagcagagcggggaaccgaacagaaagacagcgacaccc

SEQ ID NO: 25559 - RNA, 53 nt, Homo sapiens
aacagggaccacgaggagcacagcggggacaacgaggcaagccacagccagga

SEQ ID NO: 25560 - RNA, 79 nt, Homo sapiens
ggagacagaagaggcgccaggacgaaggcccacgggcaagggaagaaaacgccagagaagcagagcagcccggagcgag

SEQ ID NO: 25561 - RNA, 81 nt, Homo sapiens
gcagaagaagcaacacgcaaacgagagcgaggcaagaaaaacagggaggcagcacccccaggcagagcggccgggacagaa

SEQ ID NO: 25562 - RNA, 81 nt, Homo sapiens
caaggaaggaaagaaaccacagagacaaaaacacaggacaaccaaacaaagaacacgaagagagggccggcacccgccgga

SEQ ID NO: 25563 - RNA, 77 nt, Homo sapiens
cggcgcccaggagcgggggccccgcagaaggggggaccggcggggggaggaaggaaccggcgccgagaggcaacaag

SEQ ID NO: 25564 - RNA, 77 nt, Homo sapiens
agcaccgggccccgcgaccggggcccggggaaggcccgccgcccgccccaggaaacccaccagagaaggcgcggcca

SEQ ID NO: 25565 - RNA, 72 nt, Homo sapiens
agaccccaagagagaccggaaaacgcaagacacaagcaagacgaaggacagagagggacgggcagacgcccc

SEQ ID NO: 25566 - RNA, 75 nt, Homo sapiens
gcgccgaacccccgcaaaaaggagaacacgaacccaggaggaggaggggggagccgagagcgccagcccccagcc

SEQ ID NO: 25567 - RNA, 72 nt, Homo sapiens
aaggagccgcaaggcacgaagcacgaagggagagaacagaaggagcacagaaaagagagcgcgcagggaaga

SEQ ID NO: 25568 - RNA, 84 nt, Homo sapiens
ggccaccgaagccaccgcggccacggagaagggcgagaagaagaaggagcccgagaaccagcagcccaaaggagagcggaaaaa

SEQ ID NO: 25569 - RNA, 70 nt, Homo sapiens
ggacggccaccaagacgccaccggcagaccacccaagaagaccaaggcccaaaaggacccaagagagaag

SEQ ID NO: 25570 - RNA, 75 nt, Homo sapiens
agggcagaaagccagacaccaggaagggcggggaacacagagggaggaaccaggcgggcccgggagaagagaagg

SEQ ID NO: 25571 - RNA, 66 nt, Homo sapiens
gaccggggggccccagccccgagccggcgaacaagagaagcaaacaaagacccaagcgacaaaaga

SEQ ID NO: 25572 - RNA, 119 nt, Homo sapiens
gaaggggaggagcacagaacgccaggaccaaaacagggagaaacacagccagaagacccgccccgccacgagaacacacccccaggcggagaaaaaagagaagccaggaaagagagcga

SEQ ID NO: 25573 - RNA, 80 nt, Homo sapiens
accaaacaaaaaaacaggacagagaagacaaagaggggccgaagccccggcccgaagcacagggcagaacacacggcagc

SEQ ID NO: 25574 - RNA, 35 nt, Homo sapiens
ccaaagccccacacgaggacccaaaaagaagggga

SEQ ID NO: 25575 - RNA, 64 nt, Homo sapiens
gacaggcgacaccgccaaggagaaggacgcgccagaccagggcggggaagcggaagagggaagc

SEQ ID NO: 25576 - RNA, 77 nt, Homo sapiens
cggccaaaccacccagcagagcagacagacagcgaacacggaagccacgaaaagcaaaagcacaggaagccggcaga

SEQ ID NO: 25577 - RNA, 77 nt, Homo sapiens
cagagagaacggaggcgagacgacagcccaaacaggagcggagcagccaaagaggcgaagggaggaggcagcgaaaa

SEQ ID NO: 25578 - RNA, 68 nt, Homo sapiens
cgcgaagagacccagagaccgggagcagccaccccacgggaaagcaggggggcaagccgagcggcaac

SEQ ID NO: 25579 - RNA, 81 nt, Homo sapiens
acgaaagcaaaccacccccagaacccgaggaaccccgaggcaggcaggcaccccaggcccgcagcccccagcccacacccc

SEQ ID NO: 25580 - RNA, 75 nt, Homo sapiens
gcgaccggcgcccgcccgcggaagagagaaggccacgcccgaccccaagcaacaacggggcagggacaggcgcga

SEQ ID NO: 25581 - RNA, 76 nt, Homo sapiens
gcagcggccagccgggaggaaccaaagaaaaccagagacccagacacgcgaaggaacgaaaggccaaaaggcaaaa

SEQ ID NO: 25582 - RNA, 121 nt, Homo sapiens
cgggcccgggggccggggccgcgcgcccgggccgcgaggacgaggcggcgccgccgggcgggaggcacccgccggcgccccccggcacaacccgcgggcaccagccccggacgacaccgcg

SEQ ID NO: 25583 - RNA, 57 nt, Homo sapiens
gcggagcagcagcacccagagccgccaagcgaaggaagagccaggaaagcaaaaggg

SEQ ID NO: 25584 - RNA, 74 nt, Homo sapiens
ggagccacgccccacgaccgccaggcaaaagcagaccggaaaacccaccggcaagaccacacccgaggggagcc

SEQ ID NO: 25585 - RNA, 84 nt, Homo sapiens
cgacccgcgacgccgagcacccaggcgacgcccaccaaggcgaccccgcacacacacccaccagccacggcagcccagcgggga

SEQ ID NO: 25586 - RNA, 71 nt, Homo sapiens
aaacagggaaaacacaaacgccacaggcacacggacacccacggcccgcaagcaaaaaagaaaaagaaaaa

SEQ ID NO: 25587 - RNA, 71 nt, Homo sapiens
cagccaggcccagccccgaagggcacaccggagggccgggggcaagacggagagaacggcccaggaagccc

SEQ ID NO: 25588 - RNA, 78 nt, Homo sapiens
cgcccggggcaacgggccgacagcacaggaaccaacgcagagccccagaacaaaagaacacagaggaaccagaacaga

SEQ ID NO: 25589 - RNA, 74 nt, Homo sapiens
caacagaaagaggggggccgcagccaaccaggaccagaacaagggccgggacccgcaagaacgccgagcgaagc

SEQ ID NO: 25590 - RNA, 68 nt, Homo sapiens
cggcagaccccagacccaaacaacggcagaagcagaacggaagacgaggacagagcccagggacagcc

SEQ ID NO: 25591 - RNA, 78 nt, Homo sapiens
gaccgccagagcgaacagagaaccggggccagccgacgggacggacaacccccgccccacccaccaaggaccaaaagc

SEQ ID NO: 25592 - RNA, 58 nt, Homo sapiens
ccaggccacagccgggaagcagagggagaaaggggccgcaaggccaggcgcgcagagg

SEQ ID NO: 25593 - RNA, 82 nt, Homo sapiens
gggaaagcaggaaggcgaaggacaagaagagggcccgcagagagcaccaaaccacacaccccaaagcaggccgaagcggaag

SEQ ID NO: 25594 - RNA, 78 nt, Homo sapiens
ggacaaaggccagagacagacacacggggagacgaagaaggcagaaggagccacaaggaaaaagacgaacagccaagc

SEQ ID NO: 25595 - RNA, 69 nt, Homo sapiens
agaagagacgccacaaaccccagggaagaggaccaaagcgaacagaaccagaaagagacaagaagggac

SEQ ID NO: 25596 - RNA, 83 nt, Homo sapiens
aaacaggcgaaggagcggggccgacacaccccaagcagcccaccaggggcggacaccccggaaaacccgcccaagcaacagag

SEQ ID NO: 25597 - RNA, 75 nt, Homo sapiens
gagggcacgggcggcagcccgagaccgcagcagagacccacacgaaggccggcaccccgccaagggcaagaaccg

SEQ ID NO: 25598 - RNA, 73 nt, Homo sapiens
gacgccccaagcccgggccgcaccacaggagaaaacgcccccaaacgaccgggagacagagcggagaagaaga

SEQ ID NO: 25599 - RNA, 75 nt, Homo sapiens
aaggacaggggaccagaggccaaggcagccacaaggagggcagccagaggggaagaccacaagaggggcagcaga

SEQ ID NO: 25600 - RNA, 77 nt, Homo sapiens
cgggggcagggcaaaacacacagcgaggccagcccagaacaaagcaggccacggaaggagcacacaaaacaagcccc

SEQ ID NO: 25601 - RNA, 48 nt, Homo sapiens
ggagccaagcagcgagcagccaacccaaggaaggaaagaaagaagcga

SEQ ID NO: 25602 - RNA, 74 nt, Homo sapiens
agcacgagagccaacggcacggggagccgggcagagaaaagaacgcgaggagaaccccaggaggaggccagagg

SEQ ID NO: 25603 - RNA, 69 nt, Homo sapiens
gcgccaacagagcccgagggaccgccggacgagaggccaggcagcacccacccaaaggggccaccagcc

SEQ ID NO: 25604 - RNA, 53 nt, Homo sapiens
ccaagagcaggggggcccagcagggcaccacacagagaggggcgcgcacagac

SEQ ID NO: 25605 - RNA, 49 nt, Homo sapiens
ccgacgcagacgacagacaagagaagagaggaaaagaaacccgggggag

SEQ ID NO: 25606 - RNA, 91 nt, Homo sapiens
ccgcaccagggcaggcagacgaggacgcgggcggaagggcacggcagccccggcaggaacccaagaaggcagaagccagccccgcaggccg

SEQ ID NO: 25607 - RNA, 85 nt, Homo sapiens
gcgcgggaagaagccggcccggggccgcggacgaggaccagcagaggccagcacgagaacccagggacgaacagcggggacgccc

SEQ ID NO: 25608 - RNA, 66 nt, Homo sapiens
cgggggcgcgcggggccggcccaggggacgccgacagggggagaggcaccagcaacagaccaaccg

SEQ ID NO: 25609 - RNA, 75 nt, Homo sapiens
gagaaaaagagagacaacgagggaggagaaacaaggaagagcaacgcgcgagggacagaaaaacagaagcaaagg

SEQ ID NO: 25610 - RNA, 63 nt, Homo sapiens
gcgagcggagcggcgcggggcgggcggcggccccggcaggggaagacagagggggccaccagc

SEQ ID NO: 25611 - RNA, 54 nt, Homo sapiens
cagggagcgcaccccaggaaaccaagaaccaggagcggcagaccgccgccagga

SEQ ID NO: 25612 - RNA, 68 nt, Homo sapiens
ggagggccaacagaagaaaaacggaacagagccaaagagcaggaacaggacgggcggacaggacaaaa

SEQ ID NO: 25613 - RNA, 45 nt, Homo sapiens
gcaaaaccgaacccaccgacagacccggacagcaagggccaagcc

SEQ ID NO: 25614 - RNA, 80 nt, Homo sapiens
gcggagaacgcaaagagcgccggcgcggcgcggccgggccgcgccccccggcgggccggacggaccaacgagaccgaaaa

SEQ ID NO: 25615 - RNA, 54 nt, Homo sapiens
aacaggcggcagggcgcacggcagccagaccgaggccaaaagaaaggaagaaaa

SEQ ID NO: 25616 - RNA, 55 nt, Homo sapiens
gacggccgcgcggcccgcagggcgcagggagcaggagaagcggagcgaaggggcg

SEQ ID NO: 25617 - RNA, 75 nt, Homo sapiens
gcaaagggacagcacagaggccgccccagcacccggcccccggccaggccaccaccaccgcccgcaccaccaccg

SEQ ID NO: 25618 - RNA, 79 nt, Homo sapiens
ggcgaccaaccaacaaccacgggaagccgcggccccaagcaccagcccacgcgcgaccgcccagggagacggaacccac

SEQ ID NO: 25619 - RNA, 68 nt, Homo sapiens
ccggacaaccagaggcagccagcagggggaggacaccgccgcccagccacaggaccgacaccgaaaaa

SEQ ID NO: 25620 - RNA, 71 nt, Homo sapiens
gcccgcgccggcccagcgggcggaaaacgaaaaggaagcaagccacaaaagaagacccaaagcaccaacaa

SEQ ID NO: 25621 - RNA, 83 nt, Homo sapiens
agcaccccagaggggagagaggacacggcgggccgaccaaggaccccaaggccaaggagcgggagcggaacgaagaacaccgg

SEQ ID NO: 25622 - RNA, 59 nt, Homo sapiens
ggcggccaaggaccggccgacacgcggcccccgaccggacaggaggacaacccgaccgg

SEQ ID NO: 25623 - RNA, 75 nt, Homo sapiens
gccccagccccgcccgcccccagcccgagcgcgcccaaagggagcaaggaggaacagcgggaacgccaccggccg

SEQ ID NO: 25624 - RNA, 72 nt, Homo sapiens
aagacccaagagaagaagaaaagagggacacaacagcagccacaggaaccgagaacaggaggcccggacccc

SEQ ID NO: 25625 - RNA, 74 nt, Homo sapiens
gaacagaagaacaaacgaggggacgggggaggacaggagacaggaagagagaggaggacagaggacgagcacga

SEQ ID NO: 25626 - RNA, 65 nt, Homo sapiens
ggaagagaagacgcaagaagggcaaagcaccacaggggaaaacaagcagaaccggggaccagcca

SEQ ID NO: 25627 - RNA, 75 nt, Homo sapiens
cgaaggggaccccagcccccccagccgaaacgggagaagcagaccgcaccaggcgggaccccgaaaaagcccaaa

SEQ ID NO: 25628 - RNA, 75 nt, Homo sapiens
aagcggaaagagcgacaaacaaagaaagacggaccagggagccaggagacggaagaccaccaacggacgcgacca

SEQ ID NO: 25629 - RNA, 83 nt, Homo sapiens
ggagcaaagagaagacaccggaagaagggaccaagaaaggcccagggaccaaagcccggacaaggcccgagcaccaggaccgc

SEQ ID NO: 25630 - RNA, 88 nt, Homo sapiens
gggccggaccccgcggcgcccccggcccggagcaacgagcgcagcgccgagaaggagggggcagagcacggcaggcagaaggggccaa

SEQ ID NO: 25631 - RNA, 81 nt, Homo sapiens
ggagcccggcccgggcgagcggggcgcgccgcagagcggcaccgaaggacaggaggccaccccagcagacaggccaaggcc

SEQ ID NO: 25632 - RNA, 73 nt, Homo sapiens
cgccacaccgacccacaggagcgcccgcggaggagcgcccggaagcggaacccgcccagaaccgagggaaccg

SEQ ID NO: 25633 - RNA, 57 nt, Homo sapiens
gacaagaagaagacagaacgcccccaccaccgcaaacagccgagaaacagacaaccc

SEQ ID NO: 25634 - RNA, 57 nt, Homo sapiens
ccaacaacggagaaaccccccaccagaagaagaaccccaggacacaggggccaggca

SEQ ID NO: 25635 - RNA, 84 nt, Homo sapiens
cccgaagcccacgccaccgaaaaggccaggacaacggccacagagaagccggaagacacgggcgccgggaccggaagcaccaaa

SEQ ID NO: 25636 - RNA, 53 nt, Homo sapiens
acggggggaggacccgaccagggagccggcggaagagcgagacacgaaaacac

SEQ ID NO: 25637 - RNA, 75 nt, Homo sapiens
cggccgcgggaggggaccagggaagcggcagccaaagcaccggcaggaaccggcaggagcacgagcacacacacg

SEQ ID NO: 25638 - RNA, 77 nt, Homo sapiens
cggcaggaccagcgcgaaagagaccggacgcagccgccaccgagacgagggaggcaccgccccaacccccccccgcc

SEQ ID NO: 25639 - RNA, 73 nt, Homo sapiens
gcaagcgaagggagaggcaacggccgagacccacccagcaaagcagcagacgggaggacggggggccggagaa

SEQ ID NO: 25640 - RNA, 88 nt, Homo sapiens
cagagggagcgccgaaggacaagaacagcgccgcaccagcaggacccggccgccgaacgacaggaggacgccccggggaacgaacgga

SEQ ID NO: 25641 - RNA, 88 nt, Homo sapiens
gcagaaaacacagggaaggggaaaacagagcgaagcacagaaggaacccagccagccggcggaagcaagcagcagaggaagcggaggc

SEQ ID NO: 25642 - RNA, 41 nt, Homo sapiens
gacgcggacaagggcggcaggcgaacccaggcacccagaga

SEQ ID NO: 25643 - RNA, 80 nt, Homo sapiens
agcacacaggagaagcaagaggcgcaaagaagaagaccacacgaggccccgcgcagcggagggcggggcaccaggcccac

SEQ ID NO: 25644 - RNA, 69 nt, Homo sapiens
aaaaaggaccaaccggcaagggacaacggccaagggggccaggaggagccccagcacagcagagaaaaa

SEQ ID NO: 25645 - RNA, 57 nt, Homo sapiens
aaaacccccaagcaaccccaagcaaaagggcaaacaagagaaggccgaggaggagac

SEQ ID NO: 25646 - RNA, 71 nt, Homo sapiens
cggaagcgggagaagcaagacgaagaacagagccgaaaaccagaccgcagccgacccggccggggacgcgg

SEQ ID NO: 25647 - RNA, 72 nt, Homo sapiens
acagagggccccccggagggcaccagaacaaaaggcgaaagcaaaccgagaaggacacccggacagggaaga

SEQ ID NO: 25648 - RNA, 86 nt, Homo sapiens
gcagaggaggcggccaaggaccggccgacacgcggcccccgaccggggaaaggaaaccaaaccaggaaagaaggacaaggagcgag

SEQ ID NO: 25649 - RNA, 77 nt, Homo sapiens
ggaggcgcccaggcgcaggaacagacgccccaccaggccagcggggcgcagagagaacccgggcccaggcgacgaag

SEQ ID NO: 25650 - RNA, 56 nt, Homo sapiens
gggggaaaggcaccaggacaagcaaaggagaccggaaaccgagagaaacgaagacg

SEQ ID NO: 25651 - RNA, 77 nt, Homo sapiens
ccaacgcgggacaggaagggccgagcggcgggaaagcccccagccggggccgggcccccgggccggcgaagagaccg

SEQ ID NO: 25652 - RNA, 71 nt, Homo sapiens
caaagaaggaagcgcgcaccgggggaacagcagagggcggaggaagcgggaggaagaacagacacagagcg

SEQ ID NO: 25653 - RNA, 79 nt, Homo sapiens
gaggagcgggaaacgggagggaaccagcaacaagccggggccaggcacaaagagggcgggacacccaggaggagggcgg

SEQ ID NO: 25654 - RNA, 71 nt, Homo sapiens
agcagccaacacgggacggagaaagcaggacaagcagccgcgaaaccaagaccaagaagaacaaccgcaga

SEQ ID NO: 25655 - RNA, 78 nt, Homo sapiens
cccgggagacccaggcgggacagagggagccaggcagagagagggccgaggcagacaagggaaaggccgcgcagggga

SEQ ID NO: 25656 - RNA, 58 nt, Homo sapiens
aaaggagggaaacagaacaaagaaggagaacagacagcacgggggaggacacccggga

SEQ ID NO: 25657 - RNA, 72 nt, Homo sapiens
aaccagaaagagaacgggacaacaaaagagccacccaagcaccgagacaaccaagcaagggccagcagaaac

SEQ ID NO: 25658 - RNA, 77 nt, Homo sapiens
ggagacacagcccgcggaagccgcacaagagagacacggggcaagacgccaagagaaaaggcgagagcacaaagcac

SEQ ID NO: 25659 - RNA, 79 nt, Homo sapiens
caagagacaccaaggagacgcccaaggaaccccgccggccaccggcgcggaaaacccagcggacaaagaggccacacaa

SEQ ID NO: 25660 - RNA, 54 nt, Homo sapiens
cacccacgcggaaacacggagacaagcccacaagcccaggcggaccgagcccgg

SEQ ID NO: 25661 - RNA, 69 nt, Homo sapiens
cccccaggccacaagacaccgccggaaccgacaaaagccccaggccacccccgacgcagccggaggccg

SEQ ID NO: 25662 - RNA, 51 nt, Homo sapiens
gcagccagcggcagggacgaccccgcgcggccggacaccagagagcgaccg

SEQ ID NO: 25663 - RNA, 41 nt, Homo sapiens
ccgagaagcgggaacaggaaacgagaggaagcaaagagaaa

SEQ ID NO: 25664 - RNA, 83 nt, Homo sapiens
gggaaagacaccacacagcgcagcgggaccacgccggagccgaggacacccgcgcacagaggcccgccagccaccgcagaggc

SEQ ID NO: 25665 - RNA, 34 nt, Homo sapiens
cccgaagccgaccagccggacgaagccaagccca

SEQ ID NO: 25666 - RNA, 68 nt, Homo sapiens
aggcgcgcccggaccgacgcgcaccccggacaccccggaacccaggacgagaaaaaacagagcggaac

SEQ ID NO: 25667 - RNA, 74 nt, Homo sapiens
cggcgcgagacggaggcgaggcaaacggggggcgcggagggaccagcgagcggccacgccacccgacccacgcg

SEQ ID NO: 25668 - RNA, 72 nt, Homo sapiens
gaacagggcaggaaaagaagcgcgcaagacgcaacacaaacgagaaagacagcccgaacggagaaagagaca

SEQ ID NO: 25669 - RNA, 54 nt, Homo sapiens
caacgcagccgcgggagcaaagcgggccccaggcagcaggagccgccgcaccag

SEQ ID NO: 25670 - RNA, 83 nt, Homo sapiens
caacccgagggcacagaccaaccgaaaggagacaaaggaggacaggaaaacaggaggcagaggaacaaaaaaagacaccacga

SEQ ID NO: 25671 - RNA, 80 nt, Homo sapiens
cgagcaaccgccaggacagccccgggagagcggcacgcagaggggagcgaagaagggagccacccaaaacacgcggaaac

SEQ ID NO: 25672 - RNA, 75 nt, Homo sapiens
aaaagaaaaaccagacaccacaccagacgagagagaccgagaagagacggccagcagacagggaagagaaagcgc

SEQ ID NO: 25673 - RNA, 105 nt, Homo sapiens
gacgaaccgagaagcagacgcagcccacgcaccaccccagacccggcggaggaacggagaagcagccgcgagaggcgcagaccaggaggcccgcggccgccccag

SEQ ID NO: 25674 - RNA, 56 nt, Homo sapiens
cagcgcaaggaacccagcccaacaccaccaaaagacgccacaaagacacaggaaga

SEQ ID NO: 25675 - RNA, 87 nt, Homo sapiens
agccacccagcaggcgcgcagcggaccgaagacccgggagaagcagccgaaaagggaggcaaagcagaggagccgcaaccaagcggc

SEQ ID NO: 25676 - RNA, 64 nt, Homo sapiens
aggaagagggagaccccaacggcaagagaagacagcccaacaaggcgggacgacaacaccacag

SEQ ID NO: 25677 - RNA, 59 nt, Homo sapiens
ggcgcccgccgggacgccgaccgccgggacgaggcagagaccccccaagggccagaggg

SEQ ID NO: 25678 - RNA, 72 nt, Homo sapiens
gagggcacagagagcgaaggaccaagggaaacacagcagaaagggcacaacagcaggacgcccagaacagcg

SEQ ID NO: 25679 - RNA, 79 nt, Homo sapiens
gagaaagacacgcaacaagcccccgagggagagcagcccgggccaccccgccccaggagccccggagagaggcagccgg

SEQ ID NO: 25680 - RNA, 53 nt, Homo sapiens
gacccggcacagagccccccccccagaggaaggaggaagccagcccgagcagg

SEQ ID NO: 25681 - RNA, 63 nt, Homo sapiens
ggaaggcaccggcagccaaggacgacgagaacggcaggagcccagcggacggaggccgcccac

SEQ ID NO: 25682 - RNA, 81 nt, Homo sapiens
gacccgcccagcccccaggaggcgggccggagcgccccaggggcggacaagcgacccgccggagccaaccggagagcagcc

SEQ ID NO: 25683 - RNA, 75 nt, Homo sapiens
caggggaacagacagaaggagcaggaaccaaaggacccaggacccggccccgccgccggggcgccacggcaagag

SEQ ID NO: 25684 - RNA, 76 nt, Homo sapiens
cacagcagggcggagggccccaggcgacagccacagccccgccacacccccaaggccgaggagagaagaaggcaag

SEQ ID NO: 25685 - RNA, 60 nt, Homo sapiens
gcgcggaggcggaggcggggcagaaccaaaggcaagaaggaaaaaacacgacacaccaga

SEQ ID NO: 25686 - RNA, 56 nt, Homo sapiens
ggagagcggccaagagagcagaacaagaacccccgccaggggagccaggacaggag

SEQ ID NO: 25687 - RNA, 80 nt, Homo sapiens
ggaaggaggcccggacaccgaggggcccaccagaccaggggaggaggagaaagggagaaggggagggccaacaggagcgg

SEQ ID NO: 25688 - RNA, 39 nt, Homo sapiens
ccgagcgccagcaggaccacgcagccagccccggacgga

SEQ ID NO: 25689 - RNA, 39 nt, Homo sapiens
ggggggcacgcccgcccgggccggggaagggggaacgga

SEQ ID NO: 25690 - RNA, 68 nt, Homo sapiens
ggcagcgcgagccgggaagaagccaagacaagaagcggagaagcgagagaaacacagggacagagcaa

SEQ ID NO: 25691 - RNA, 67 nt, Homo sapiens
cacaccacacgcagcgcgcaacaccccacaggagacaagcaaacaacggaaaggagggggaagcaac

SEQ ID NO: 25692 - RNA, 75 nt, Homo sapiens
ccggaacgggagccaacaggcagcggggcgggcgagcgcaggccacccacgcgacgcacacccccacagagagcg

SEQ ID NO: 25693 - RNA, 63 nt, Homo sapiens
cccaccaacaacaccacaaaaccacagccaaggcaaagcgaaaaagaccgcagggaaggccgc

SEQ ID NO: 25694 - RNA, 74 nt, Homo sapiens
gacagcccaaacgccccacgaccaggggaaaaagaaaagggcgaagacccgaagcagcgcaggaacagaagaga

SEQ ID NO: 25695 - RNA, 68 nt, Homo sapiens
aggccgggcgagcgcaaaggaaggcgccgggcccgacccgcgagagggcggagaacggaaaagcacca

SEQ ID NO: 25696 - RNA, 78 nt, Homo sapiens
ccaccgcccccgcgccccgcaccgcggcaaagagaggacgcagcgagaaaggggaggagagagaaagaaaaagccaga

SEQ ID NO: 25697 - RNA, 77 nt, Homo sapiens
gcggagcagggaacaagacgcccgaaccagcgaagaaccccccacagcgcgcgggcgcagccacggggaaaaagcgg

SEQ ID NO: 25698 - RNA, 67 nt, Homo sapiens
aggaagggagagccacccaagagacaagcagaggcgcagccgagccaaagaaaaagccggccagggc

SEQ ID NO: 25699 - RNA, 59 nt, Homo sapiens
cggaacgcccgccccgcagagaggcaccggagacgcgggcagaaaaaggaaaggaaggc

SEQ ID NO: 25700 - RNA, 78 nt, Homo sapiens
ggaaaagggcagccgcacgggcgaagacaagacccaaaaggagaccgagagcaaaagaaagacgagaacaggcacagc

SEQ ID NO: 25701 - RNA, 64 nt, Homo sapiens
ggacaccaaacaccgccgccgcgggaagaacaacgcaccccgaaagcgccacgaaaaggaaagg

SEQ ID NO: 25702 - RNA, 79 nt, Homo sapiens
ccgccaagggccccaagagggcacacagcacacaccgacagaccaaaagaaggggagcccagaagcgagaggaaaaggc

SEQ ID NO: 25703 - RNA, 47 nt, Homo sapiens
aaaggggaaggagacccaaggaaaggcagagacagaggaagaggcag

SEQ ID NO: 25704 - RNA, 54 nt, Homo sapiens
cacggccagcgagaggagaagacgccgcaacagagcaaaggcacaacaccacgc

SEQ ID NO: 25705 - RNA, 82 nt, Homo sapiens
cgcgcccggaagcccgcggccggaggagccgcaggggcccggacaaggagagccggcagcgcccgagggagcaaggagaaga

SEQ ID NO: 25706 - RNA, 78 nt, Homo sapiens
caaccacagcaagagcaccggcgaccgcaccacaagggacgagaccaaacggaagaggcggccagaccgaacccagaa

SEQ ID NO: 25707 - RNA, 73 nt, Homo sapiens
agagcaagaaccagagcaaccacaaggcagacaggacgaggaaacccagagcgcgaagccaggcacagcagaa

SEQ ID NO: 25708 - RNA, 81 nt, Homo sapiens
acagcacccgccaaccccggaagggaaggcggaccccggcagcaagcaacagagcgccaagcccccgcaccaagggggcag

SEQ ID NO: 25709 - RNA, 71 nt, Homo sapiens
gaggcgggggcggcccggggccggagaagggcagacacgaaaacacaaagagaagaccgaaggcggcgcac

SEQ ID NO: 25710 - RNA, 74 nt, Homo sapiens
cagcaccggaaacagaacccacacaaagaacaaaacgcccggaccgaaaaagccaacaggcagaccagagacag

SEQ ID NO: 25711 - RNA, 79 nt, Homo sapiens
gggggccgggaccccggaacgacagcccgccaaacggcaaccccgcccccaccgacaagaccagcggccgcccccccgc

SEQ ID NO: 25712 - RNA, 73 nt, Homo sapiens
caagacaccaagagaaggcaaggcggcaccagcgcggggacgaacagagacaagggaggcgaggacggacaaa

SEQ ID NO: 25713 - RNA, 82 nt, Homo sapiens
cccaccccccgccagccacaaggacagccaccacccgaggaccccagcgcacgcggacaggccgcggaggagcgggccgccg

SEQ ID NO: 25714 - RNA, 60 nt, Homo sapiens
ccgcccagccccgagagcgggaacagagaggggggaaaggaacggaagaccaagaacagg

SEQ ID NO: 25715 - RNA, 86 nt, Homo sapiens
acgcaagcaaggacgaagcgaagaaacgggaagcaaggaacaagggcaagacggacagagggaccccccagaaaaccaccgggcgc

SEQ ID NO: 25716 - RNA, 82 nt, Homo sapiens
ggagacaggaggccgcggggagacgcgggggacggggcaggaccacagggcggaagggcaagaaagaaggaaagcccaagag

SEQ ID NO: 25717 - RNA, 55 nt, Homo sapiens
gcacacgagcggaggcgaagggggaaagcaggggagaaaagaaaagaaagacggg

SEQ ID NO: 25718 - RNA, 66 nt, Homo sapiens
aaacagaaacacccagcgccgaggcgcgggacgcgaagcaacaggcgacccagcggcacgcgagaa

SEQ ID NO: 25719 - RNA, 78 nt, Homo sapiens
cagagggggccgcggggggaggagagccaaccagcaggcccggacaggcagacgggagcgggccgagaaaaaccacag

SEQ ID NO: 25720 - RNA, 78 nt, Homo sapiens
ggcgaggcgagccagggcccgcagcgagggaccgaggaacccgggagccaggaaggaaggagcgcccagaagcaggga

SEQ ID NO: 25721 - RNA, 60 nt, Homo sapiens
acccgggacgccagcgccgccacggggcagaccgaaaaccccacagcggagaaaaaggag

SEQ ID NO: 25722 - RNA, 67 nt, Homo sapiens
gagcacagaaggcggccccggaaggaaaccagcccgacacaacaacccacagccgggagaacccaac

SEQ ID NO: 25723 - RNA, 74 nt, Homo sapiens
agacgcacaggaggaggacagaggcgggggacacagccagggcgcaggcagcgcccaacaacacgggaaagaag

SEQ ID NO: 25724 - RNA, 80 nt, Homo sapiens
cgagggaaagggggccggagccgccaggagcgggacgacgccacaagacacccagaaacagagagcagcgaggaaacaag

SEQ ID NO: 25725 - RNA, 80 nt, Homo sapiens
cgccaacagcccaggggagccgcgcgcggcagggaggcggaagcgccgcaagagaggagggccaagcaaacgaagaacaa

SEQ ID NO: 25726 - RNA, 72 nt, Homo sapiens
gcgcgacgggccgccacggacgcagccgcagacccaagcagagaccaaccccccccccagcaagcagcccgc

SEQ ID NO: 25727 - RNA, 73 nt, Homo sapiens
cgccacaagcccacagcacgaagggcagagagcaacagacacagcaggagcaggagaagagggcaaagaaaaa

SEQ ID NO: 25728 - RNA, 76 nt, Homo sapiens
cggggaaaaaaaagagggggacaaaacaagaagggaccaagcagagggacacacgaaacaacaagaacaagcacaa

SEQ ID NO: 25729 - RNA, 73 nt, Homo sapiens
gcggcggcgaggcggacaggacggaagccgcgaacccccgaccgggagcccacggacgaagggagggaaggaa

SEQ ID NO: 25730 - RNA, 59 nt, Homo sapiens
gcacacccggaacccaagaccccaggggaagaggcacacaacagcggagccccggacag

SEQ ID NO: 25731 - RNA, 67 nt, Homo sapiens
ccaaagggcaccaccaacaagcccaacaagcacgggagaccaggccagcaggagaggaaccccagaa

SEQ ID NO: 25732 - RNA, 85 nt, Homo sapiens
acacccgcgcgcgcccgggaggaaggaacgaggcaaggagcaaagcagcggcgcagcccggggcgcacgggacggcagcgcggaa

SEQ ID NO: 25733 - RNA, 75 nt, Homo sapiens
cagccgaggaagagccgggaaagggcgcgccgccagagggaaacacaaagaagacaccagaagggccagcaccac

SEQ ID NO: 25734 - RNA, 63 nt, Homo sapiens
aacgaaccaggacggcaacgacgcacaaggaaaaacagagagaaaggccgagcaacaaacacg

SEQ ID NO: 25735 - RNA, 82 nt, Homo sapiens
caaaaccgccaagagaagaccaagcaaaaaggggcagaaaaccagaaggcaagaccagcagacaggcacaacagagagcaac

SEQ ID NO: 25736 - RNA, 70 nt, Homo sapiens
ccgccgcgcgccaaagcgcgccgccccgggcaaaaggacgaaggggcccagggcgcacgcgaccaaacac

SEQ ID NO: 25737 - RNA, 77 nt, Homo sapiens
ggcgaagacgccaagaccacgaagcccgacagcacccccgaggggagaagaagcgagaccccgacagagcggaaagg

SEQ ID NO: 25738 - RNA, 70 nt, Homo sapiens
gaggacgaggaggaacccacacccccaaggcacggggccacaccacgaagaagagccaccggcaagggag

SEQ ID NO: 25739 - RNA, 58 nt, Homo sapiens
ccgcaaccaggcccgcgccgccaccagacccaccaccccccgagcagacccaggcagg

SEQ ID NO: 25740 - RNA, 35 nt, Homo sapiens
ccaaggaccggcaagggggacacggaacccaagga

SEQ ID NO: 25741 - RNA, 71 nt, Homo sapiens
ccagacggcgccgccgcccgcggcgccccggggggcggcgcccacccgggaggacagaaagcaaggcaaac

SEQ ID NO: 25742 - RNA, 68 nt, Homo sapiens
gcggaggaggaaaccgcagccaaggaggaacacaagggcccacaggccacccgccagacgcagcgggg

SEQ ID NO: 25743 - RNA, 57 nt, Homo sapiens
cggaggcccgccggagggagcccccggcgggggcaagagccgaagaccggaaaccca

SEQ ID NO: 25744 - RNA, 65 nt, Homo sapiens
ggaggggggaagacagagcaaaggggcccgggaccgacggaagaagcggacggagcgcagccgcc

SEQ ID NO: 25745 - RNA, 73 nt, Homo sapiens
ggaaagcaacagggacgagaaacgcggaggagggcgcaacggacaccacaaccccgccccaggcaagcgaccc

SEQ ID NO: 25746 - RNA, 35 nt, Homo sapiens
cacaaagcagcccaaccaaagggggcgggacaccg

SEQ ID NO: 25747 - RNA, 75 nt, Homo sapiens
acagacaggagacaaagggccgccgcagaaacagagcaaagcagcgacaacaaagacagaggaagaaaaacagac

SEQ ID NO: 25748 - RNA, 75 nt, Homo sapiens
gcggcgcgcgccagaccggcgagcccgagcaggaaagaccacagcaagaccacgcccccagccgggggaccaggc

SEQ ID NO: 25749 - RNA, 74 nt, Homo sapiens
accccacaacaaaccaccaaggaaccgcggcccagggaaagggacaggcggggaagaaagccggagaaaagcac

SEQ ID NO: 25750 - RNA, 81 nt, Homo sapiens
agcgaagccacagaccccagaaacgggcaagcgcgcaaacccagaaacagcaagaaagcaccagccaagcagaagggagcc

SEQ ID NO: 25751 - RNA, 60 nt, Homo sapiens
ccaaaacaccaggaaggaacagacagaggacaggaggaaaaccagacgccagcaacccag

SEQ ID NO: 25752 - RNA, 55 nt, Homo sapiens
cagcccaccccacaaccggcagccacagggccaaccgccaggaaggaagagggac

SEQ ID NO: 25753 - RNA, 53 nt, Homo sapiens
gaacggcacacgcgagcgcccggcccccacgacacaccgaagaggcccacgga

SEQ ID NO: 25754 - RNA, 60 nt, Homo sapiens
ggggacgcaaaggccaaggggcggcaaaaaggaaaacgaacggccgaaccgcccagccac

SEQ ID NO: 25755 - RNA, 41 nt, Homo sapiens
gaaaggaagaggaggaaaggcggaggcgccggcccgggcgg

SEQ ID NO: 25756 - RNA, 79 nt, Homo sapiens
aggacaacgagaagaaccggaagccgacccggagccgagcaaccagcccaaccacagcacgggacccaaaaccagaggg

SEQ ID NO: 25757 - RNA, 59 nt, Homo sapiens
acaggcccaacacgcagacggcagggacgggagaaagaacagacaagccgcaagaaccg

SEQ ID NO: 25758 - RNA, 83 nt, Homo sapiens
ggccggaccccagcacacagaagccgagacgaagcgcgcaagacgcaacacaaacgagaaagacagcccgaacggagaaagag

SEQ ID NO: 25759 - RNA, 51 nt, Homo sapiens
cagcagggaagcagaaggcgcaggacccagcacccgagaggcgagccacag

SEQ ID NO: 25760 - RNA, 74 nt, Homo sapiens
acgaaggcaggaccacacggacgcgccagcaagccggccaaacaacaagcagccgcccacaaggaggaggagca

SEQ ID NO: 25761 - RNA, 80 nt, Homo sapiens
cgccgcccgcggaagggagcccaagcgcagaggaagccgaggaggcgcgggaccccggagaaagcgcaggcaaagccgca

SEQ ID NO: 25762 - RNA, 53 nt, Homo sapiens
acaacacaaggcagccacaggccaaaacagagggaaacaggagaaccgacaga

SEQ ID NO: 25763 - RNA, 69 nt, Homo sapiens
gggcgcgcgcggaacgaaagcgccgcggcaaaggaagcccccccaaaaagcggcggccaccccggcgag

SEQ ID NO: 25764 - RNA, 82 nt, Homo sapiens
ccccagcgcgggcagccggcgccgccaaggggcgggaagaagcccgccgccaccaccccaccaccagcgcagcagagaagaa

SEQ ID NO: 25765 - RNA, 54 nt, Homo sapiens
gaacagccaaccggcagaaggaaaacccaaggacagaggaagacaggccccgga

SEQ ID NO: 25766 - RNA, 80 nt, Homo sapiens
cacagacgcgccgcacggacaggccgcagccgccggggcaggagagccccgccaggaggccacgcgaagcgggggaaacc

SEQ ID NO: 25767 - RNA, 56 nt, Homo sapiens
agggacgcacccccacagggcagaagaacccccgagggcgggaaacggcaagagac

SEQ ID NO: 25768 - RNA, 79 nt, Homo sapiens
caacccaggacggaacccccagaaacaggcccggacccccccaccacccccaacgaaaggagaaacgaccaagacagcc

SEQ ID NO: 25769 - RNA, 51 nt, Homo sapiens
ggaccaggaggcgagcaacagacagacaagagaagagaggaaaagaaaccc

SEQ ID NO: 25770 - RNA, 81 nt, Homo sapiens
cagccaccagcgccacccgccgacaaaaaaaagggagagggaacaccaaccgaagagaaggggagaagcacagaggaagga

SEQ ID NO: 25771 - RNA, 78 nt, Homo sapiens
caacgaagaagggcgagggagcaagcgcacacgaagagaagcaaggcccaagacccaggcggcccccaagccacaccc

SEQ ID NO: 25772 - RNA, 77 nt, Homo sapiens
cgagccacacaggcacaggagagccaaaggaggcacgacagcagaggaagagaagcagcgaagccgaggcacagacc

SEQ ID NO: 25773 - RNA, 71 nt, Homo sapiens
cagccacccaggacccagccaccaacgaacgagaaaagaacaaaagagcaaaacagggcacaggaaccaca

SEQ ID NO: 25774 - RNA, 80 nt, Homo sapiens
aaccaacacaagccaacccacaagcggcagggacaccacaccagcgggacgccgccacgacccgaggagccggaggaagg

SEQ ID NO: 25775 - RNA, 57 nt, Homo sapiens
gcagagacagccaacaaaaacaggcgagaaggcaggcccacgggagccgagaccccc

SEQ ID NO: 25776 - RNA, 73 nt, Homo sapiens
gacccagcggacggaaccagcagggaaggagggaagggacgcgaagaaccccaaggacaagaaggaagcgacg

SEQ ID NO: 25777 - RNA, 76 nt, Homo sapiens
gaggcagccaggcccagccaggaggaagcaagaaacagaccggaggacgaagaggcccaacaggacacacgcgaaa

SEQ ID NO: 25778 - RNA, 92 nt, Homo sapiens
caggcacccgggcccagccgggaacccccacgcggccagcgaaaacgcccagggaagcgggagaggccacccgcccacgagcggaagaacca

SEQ ID NO: 25779 - RNA, 78 nt, Homo sapiens
cagacagggacggaggacgagcaaaagagcaccgaaccggagaccgaggagacaccggagacaggcgcgagaagacac

SEQ ID NO: 25780 - RNA, 66 nt, Homo sapiens
gggcggacagcggggcccgcggaaaacagacccagggaagagccgacgcaaggccagggggacaga

SEQ ID NO: 25781 - RNA, 79 nt, Homo sapiens
ggaagagagggagcagagggaaagggaaggagaaggagggacgcaggcgcaggccaggcgagcccccgccccgggaaag

SEQ ID NO: 25782 - RNA, 84 nt, Homo sapiens
gaacaggcagaagaggacggcaggaggccaggccggcagaggaaggagggccacaagggagccagagggacgcccgaggagaca

SEQ ID NO: 25783 - RNA, 72 nt, Homo sapiens
gcgagcgacgcaggacccacagggaaagaccaaaccccaaagcaggccaaacccaggaggacaacaagaagg

SEQ ID NO: 25784 - RNA, 73 nt, Homo sapiens
cggccaagaaaagacaagaaacaggaaaagaaaccgaaagaacgcaagaaggagccccccgagagcaaaccag

SEQ ID NO: 25785 - RNA, 79 nt, Homo sapiens
cgagaaaaggacgcgacacaagcacaaaagcggaggaaaagggagcccgggcgggcccacggcaccgaggaggcggggc

SEQ ID NO: 25786 - RNA, 82 nt, Homo sapiens
agggaagcgcccggggccggccgccgcgggaccgaggaaaagccgcaccagccaccagcgaacaggccaaagccagacacag

SEQ ID NO: 25787 - RNA, 72 nt, Homo sapiens
aaggacgggcgccgccagggcgagcccacaccaaccggcccacccaccgacgcggcaggacgcgcggaggaa

SEQ ID NO: 25788 - RNA, 75 nt, Homo sapiens
ccaccccgcaggagaacgagcccccaccccggcaagaaagggaaacgaaaagcaccagacagagacccccgcaag

SEQ ID NO: 25789 - RNA, 60 nt, Homo sapiens
gggaaaaggcagccaggacagaaacgccaaggacccaggcgacccaacaaaaggccaaaa

SEQ ID NO: 25790 - RNA, 65 nt, Homo sapiens
gcgggcccgaggcgcaccaagggcgaaggagccggcccaagacaggaacacagaggacgacgccc

SEQ ID NO: 25791 - RNA, 68 nt, Homo sapiens
agcgaaaaagccaaaagaggaaacgagccgccaaacagaaccaaaggcagacccagaagagcacaaaa

SEQ ID NO: 25792 - RNA, 54 nt, Homo sapiens
cccccacgcaagcccgggccacgagaaccgcaggacagacgcggagcagcaggc

SEQ ID NO: 25793 - RNA, 73 nt, Homo sapiens
acccaagacgcgcgagcacacaggagaagcaagaggcgcaaagaagggaacacagccgcacccgggcggccag

SEQ ID NO: 25794 - RNA, 80 nt, Homo sapiens
ggcgcgaccgcccggcaccgggagaaccaccgccaccgccaccaggcgcaaggaagaagagacgccgcgcggcagacaag

SEQ ID NO: 25795 - RNA, 48 nt, Homo sapiens
agcccgccgaacccgaaaggaggggaaccagaagaggccaaccagcac

SEQ ID NO: 25796 - RNA, 83 nt, Homo sapiens
aggcggacaacgagaaacggacaaccaacggccaagaacaagaacaaaggccgcgacggaggacaaggcaaaacaggagcccg

SEQ ID NO: 25797 - RNA, 80 nt, Homo sapiens
accagagaagggaaacgacacgagcaaaaacggggggcagagccagccacaggcacagcaagaaccccggaagagaagaa

SEQ ID NO: 25798 - RNA, 76 nt, Homo sapiens
accagaagccagagcgaggacgccggcaggacaggagcagccagaaaaacccgacagacaagggcgccgagagaac

SEQ ID NO: 25799 - RNA, 71 nt, Homo sapiens
cacccaccagcacagagagcccccggggcaggagacagcggcaacccaagcaggggcaaaaaaaaggggag

SEQ ID NO: 25800 - RNA, 68 nt, Homo sapiens
acaagaagagaaaaaggaaccccccacagcaaaaaagagaccccgcggaagacaccagaaggggcagc

SEQ ID NO: 25801 - RNA, 96 nt, Homo sapiens
caaacaccaccagccgggccccagcaggagcacggagcaagcggcagaggaggggccccggagggccgcgcccggacaaaccaggaccgcgaggac

SEQ ID NO: 25802 - RNA, 81 nt, Homo sapiens
cccggcaccgggagaaccaccgccaccgccaccagaaaacccgcagcccaaagggcagaagaagaagaagacgcaagacgg

SEQ ID NO: 25803 - RNA, 83 nt, Homo sapiens
gacgcgccgcccgaggccgcggccgccgcagcgagggcgccgagcaaccgaaccggagcagcaaagccgcgcgcggaaggcga

SEQ ID NO: 25804 - RNA, 77 nt, Homo sapiens
acacaaaacggaaacgaggcacaaagaaggacggaggcgcaaagaaggcacagaaggagaaacggcacaaccaccca

SEQ ID NO: 25805 - RNA, 65 nt, Homo sapiens
agcaccagaaggaaaccagcgcgccacccaggcgaaaaggcaagccaccggcacaacgcagccca

SEQ ID NO: 25806 - RNA, 80 nt, Homo sapiens
cagacagccaccacagaacaagagccggcggggaagagggggaccagaaagggacgacgagaccacagaaggccggaccc

SEQ ID NO: 25807 - RNA, 55 nt, Homo sapiens
agcgggccccaacccaccaaaagcacagagggcgaaccaaagaaggaaggcgacc

SEQ ID NO: 25808 - RNA, 54 nt, Homo sapiens
aaaacagcaaagaaacccacagacaggcaaggagagagacaccacacaaaaagg

SEQ ID NO: 25809 - RNA, 46 nt, Homo sapiens
aggacagccccaagacccagaaaagcagaaagaaccgggccccccg

SEQ ID NO: 25810 - RNA, 77 nt, Homo sapiens
ggcggaagggcaccccacccgggacagagagaggcagaagaaaaagcacccccaagcgagagagcggcccaaaaagg

SEQ ID NO: 25811 - RNA, 82 nt, Homo sapiens
aaaggagggagaacggaggaagaagcccgaaaagagacacaagaaaagcgcaagcagagagaagagagcaagacgaacgccc

SEQ ID NO: 25812 - RNA, 77 nt, Homo sapiens
ggaaaaggaggaacgccggcccgagaaagcccgccagcagagaggaaccagcaggcaaagaaagcaaaagaagagcg

SEQ ID NO: 25813 - RNA, 76 nt, Homo sapiens
aacaaacagcaagaaagaccacaagaccaggaaccaggagccgacaacaacccgacgcaaggcagccacaccaccc

SEQ ID NO: 25814 - RNA, 76 nt, Homo sapiens
cggcaacaccgcaaggccggcgcacagaggcgcagcgggccagcaggacgcagcaggcgacaaacgggccacaaag

SEQ ID NO: 25815 - RNA, 36 nt, Homo sapiens
gccaacaccgaggccccaggccgggaggaccaacac

SEQ ID NO: 25816 - RNA, 81 nt, Homo sapiens
ccacaggacaggagagaaagacgcgcccggaacaccggaggccgggccaggcacgagaggcacgcgcagaccggggaagcg

SEQ ID NO: 25817 - RNA, 75 nt, Homo sapiens
cagcgaccccaaaggcacgcccccggggcaaaggcacacaaggaaccaagaggcagaggggcgcaaccagcagga

SEQ ID NO: 25818 - RNA, 79 nt, Homo sapiens
gagaagcacgcacagggccgcgggaagaccagccccaaagcaaacaacacccaacagcccaaagcaaaggagcaacagc

SEQ ID NO: 25819 - RNA, 77 nt, Homo sapiens
gcaccccgcgccagaaaaaacgcagaacggcaaaaaggcaaggccacaaccggggcgaggccaagccagggagaccc

SEQ ID NO: 25820 - RNA, 82 nt, Homo sapiens
gcgaacagggcagcgcgaccggccagcgccgcgacgggaggagcgccggaacgccgaggcccaggaaacccagcaccaaaca

SEQ ID NO: 25821 - RNA, 55 nt, Homo sapiens
aggacccagaacacaacacgagagaaggagggaccccaacagaagaaaacaagag

SEQ ID NO: 25822 - RNA, 81 nt, Homo sapiens
ccggggccccaccgggcacagcaccacaacaaacagacggacacggaaagccacgcccgcccagagcaaagcacgagagcg

SEQ ID NO: 25823 - RNA, 76 nt, Homo sapiens
cacaaaggcggacacgaaaccaccgggaagcgccggggaacgcaggggaaggaacaaagcagagaaaccaaaaggc

SEQ ID NO: 25824 - RNA, 48 nt, Homo sapiens
aaagggacagaaccaaagggcacacgccagaaaaaagcgcagaagcag

SEQ ID NO: 25825 - RNA, 77 nt, Homo sapiens
gggagcgccacgaaccgcgcgccgcgagagccaagaaagaacaggcgacgcaacgaaagggcccggggacacgagcg

SEQ ID NO: 25826 - RNA, 84 nt, Homo sapiens
ccggcccgccccagcgccccgccccccccgccgcccccggcgggcccggcggcccacaccaggacaagacgcagaggaaggggg

SEQ ID NO: 25827 - RNA, 72 nt, Homo sapiens
gacggagaaaaaggaacagggaggggagaagaggccccaggaccggcgaggccccccccccagcagcaaagg

SEQ ID NO: 25828 - RNA, 84 nt, Homo sapiens
ccagaggggcccccacacacgaaaggaagacaagccgagaccaccaggagcagagcggaggcaaccagccaaaacaacggaaaa

SEQ ID NO: 25829 - RNA, 79 nt, Homo sapiens
ggccgggcggcagaggagaccgaaaagggaggaggaggcgagcacagagcgacagacagaacgccggaggcgagggagg

SEQ ID NO: 25830 - RNA, 59 nt, Homo sapiens
cgggacccaaggcccggagaaacgcaggaaacacacaggcccagaaggggaagaccccc

SEQ ID NO: 25831 - RNA, 83 nt, Homo sapiens
agcgggggggcgcgggagcaacgggaggccggacccagcgagcgggcggcacgcacgcaggcacgagaagagaagcccagagc

SEQ ID NO: 25832 - RNA, 48 nt, Homo sapiens
ggagggcgcagcggggacgcggacgcacggcagcaccgggaccggagg

SEQ ID NO: 25833 - RNA, 78 nt, Homo sapiens
gccaggagcagagcgacagcggcgagcagaacacggcgagcgggacccggcccaacgagcccacgaagaacacaccag

SEQ ID NO: 25834 - RNA, 58 nt, Homo sapiens
cgacgcgccgggcgccacaacgacccgggccagccgccggaacccgaacgggcgggcg

SEQ ID NO: 25835 - RNA, 77 nt, Homo sapiens
cgagccggacccagggagagcagggcagggaaaagcgccgggcggaccagcaggaccaagaacgcccagcccgcggg

SEQ ID NO: 25836 - RNA, 59 nt, Homo sapiens
ggcccaaccgaagaaaacaagggcggaaacagggagggccacagcccccgcccgggaga

SEQ ID NO: 25837 - RNA, 52 nt, Homo sapiens
caaaagaacccgcccacacggccaggaaaacagcagccagcaagaaagacaa

SEQ ID NO: 25838 - RNA, 69 nt, Homo sapiens
cagacagcacaaccagcgggaggccaacagacccaacccagaaggcaccaaacggagggggaacaggcg

SEQ ID NO: 25839 - RNA, 70 nt, Homo sapiens
caaagcaggaaccaggacacagaaagcaaaaagccaagacgaacgaccaaacaaccacccgcaaagcaca

SEQ ID NO: 25840 - RNA, 103 nt, Homo sapiens
gcgaaccgccccacgagaccaaacgccaacgaaccacgcccgacaagcagaggggggcgggggcgaaagaacagcgccaagcacaaccgacggccaggcccga

SEQ ID NO: 25841 - RNA, 74 nt, Homo sapiens
cccccgcccgaggcaaagccggcggaggcagccccccccccagacacggggacccggcaaaccgaagagcaacg

SEQ ID NO: 25842 - RNA, 71 nt, Homo sapiens
ggacacaccccaggaaaaagacagcccgcagcacgaccagcaggaacggaagcccggggcggcgacggagc

SEQ ID NO: 25843 - RNA, 55 nt, Homo sapiens
ccgcacgcccccgcccccgaggccaggaacgaaaagagcgagaagaagagaggcg

SEQ ID NO: 25844 - RNA, 77 nt, Homo sapiens
cgcgagccgcccgccaccgcaccaggaagaacagcgaaaaagagagcagcgaggaaggagccagacgccaacccgaa

SEQ ID NO: 25845 - RNA, 73 nt, Homo sapiens
aaagcgcgagacccgggcgggggcaccgagggcaccacgcgcggagggaacgacagagcaccgccaggaaacg

SEQ ID NO: 25846 - RNA, 75 nt, Homo sapiens
gcagaggccgagagcagagaagaaggagacccaacaccccggccagacgggccaccaggccggcgccccacgccc

SEQ ID NO: 25847 - RNA, 78 nt, Homo sapiens
aaaagcagcaccaacaccccaggaagacaagcaacggccgcaaacagcagaacggcaaggggaaaccagaagcggggg

SEQ ID NO: 25848 - RNA, 113 nt, Homo sapiens
gaagccacaggagaccggaggccaacggcagaagccaccacaaaagcgaaagggcacaccacaggcaaggcaagaggagggagagaggaaagccaaagagcgaagagagaaac

SEQ ID NO: 25849 - RNA, 76 nt, Homo sapiens
acaagcccacgggacacgcggcaggaacgggaaaagccaagaaagacccaaaagaccccagaccagaaagaggcgc

SEQ ID NO: 25850 - RNA, 78 nt, Homo sapiens
gaaagagaggaccgaaaaaaaagaaaaaacacgcggcagcgcaccccccacgggcagcagggggagaagcagagaacg

SEQ ID NO: 25851 - RNA, 71 nt, Homo sapiens
acccagaacggagggcacgagcgggccgagaccagaccagcgccaaccgaggaagcagagggagcaccaca

SEQ ID NO: 25852 - RNA, 69 nt, Homo sapiens
ccagaaaaaaagcgccccgaacaacggcaggaggacagaagaacgggcgaaaaacgaagaaggaagacg

SEQ ID NO: 25853 - RNA, 48 nt, Homo sapiens
aagggggagagggagaaggaacagagacagacccgggggcccccaagg

SEQ ID NO: 25854 - RNA, 71 nt, Homo sapiens
caagagggccgggacagcgcgggggagcggagaaacggccaagagaaaccagggaaaaaagagcgggagcc

SEQ ID NO: 25855 - RNA, 83 nt, Homo sapiens
cgcccacaacccaaaaacaaaagggagaacccagccagcaacaggacaccagccaacccgcccaggccccaccacacagcccc

SEQ ID NO: 25856 - RNA, 63 nt, Homo sapiens
ggccacggacacagaaccacaggggaagaaccacaggaaccggccgaaccagaccggagcagg

SEQ ID NO: 25857 - RNA, 84 nt, Homo sapiens
agacagggacagcgcaccaagaagaggcaggagagcggcgacaaaaaggaccggagcacaccccaaggaggaaaggaagcgaca

SEQ ID NO: 25858 - RNA, 78 nt, Homo sapiens
gcgagcgagggggggcgcgccggaaaccggagcgcgcagcaggcagaaaaaaccagcaggccaggaacacaacccacc

SEQ ID NO: 25859 - RNA, 61 nt, Homo sapiens
caaggggcgccaaaccacacagggaccagaccccacaagaaaacacacaaccacaggccca

SEQ ID NO: 25860 - RNA, 101 nt, Homo sapiens
gaccccacggagaccccaggggcaagacaggcgagagcaacgccaaacagagcaggacccgcgggacgagcgggaggggcggcaaggaaccacggacaggg

SEQ ID NO: 25861 - RNA, 100 nt, Homo sapiens
gaaccagccccagacaggacgccccgacaacaacccacggcagacacagcaggccaacccagaaccaccgaagaagaaaagacaaacgaaaaagacagcc

SEQ ID NO: 25862 - RNA, 74 nt, Homo sapiens
ccgaaagaagaagaggagaagaaaagaccagacacagcccacaccggcaggccaacaaccaagacgaacgaacg

SEQ ID NO: 25863 - RNA, 79 nt, Homo sapiens
gaaggacaggacgccgggaacgggaagacgccccccccccggaggcagccggccccgggcccaggccagcggaccaagc

SEQ ID NO: 25864 - RNA, 71 nt, Homo sapiens
gaaggagcacaccaccaacacggcaacgcaggccagcaaccccagccaagcaagagggaaggggaacagga

SEQ ID NO: 25865 - RNA, 69 nt, Homo sapiens
gccagccgcagcaggacaaaccgaagagaacgaaaggacacagccgccaggaagcaacgcagcgcggaa

SEQ ID NO: 25866 - RNA, 73 nt, Homo sapiens
cagcagaaaagaccagacagcaaggggaaggagggccccgccgcccagagggagggaacagcaccccagagaa

SEQ ID NO: 25867 - RNA, 68 nt, Homo sapiens
aagaaacagcggaccaaccccacgccgggcagcagcaagccccacccacaggccaggacagaggcgac

SEQ ID NO: 25868 - RNA, 51 nt, Homo sapiens
cccggggcgggaaaagaccaaacgcagcggaaacccagacagcgcacacac

SEQ ID NO: 25869 - RNA, 79 nt, Homo sapiens
ggacggagcccggcccgggcgagcggggcgcgccgcagagcggcaccgaaggacaggaggagaaccaagcacacgacca

SEQ ID NO: 25870 - RNA, 58 nt, Homo sapiens
agggccgacggcagaaaagcaggaaaaaaaccagacacaggaacggagagcaacagca

SEQ ID NO: 25871 - RNA, 79 nt, Homo sapiens
cccaaggcccgcgggcgggagaacggaaaaccccaacccgagaaagggcaggcggaagagaaggacgaacaggagaccc

SEQ ID NO: 25872 - RNA, 73 nt, Homo sapiens
agaagaagggcaggccagaagggagaagccaaccagagagcccagacggcgagggaacacgcgccccaacaag

SEQ ID NO: 25873 - RNA, 77 nt, Homo sapiens
caaacagcaggaccagaacccgcgaaagagggaagcggcaaaccaaaagagcaacgagcagcaagggaagaagaaca

SEQ ID NO: 25874 - RNA, 68 nt, Homo sapiens
aaaagaagggaaaggagcagggaaaagaccagaagcagagcgacacacaccgaacacaggaaagagag

SEQ ID NO: 25875 - RNA, 73 nt, Homo sapiens
ccccgggggggggccccggagcccacggagcaggagaagcccaaggcccaggaccgcgcagacgcgcaggacg

SEQ ID NO: 25876 - RNA, 77 nt, Homo sapiens
accgagaagacaaaacaaggacagacaagcagacggggccgccacacgcccaaccagggcaccgcaagcgggaagaa

SEQ ID NO: 25877 - RNA, 52 nt, Homo sapiens
ggcacagagcgcagggaaccgggggccaggcgcagcaggggagaaacgggag

SEQ ID NO: 25878 - RNA, 66 nt, Homo sapiens
gcagaacacaaagcacgcagaggagacaggaaaaggccaaaggaagggcgagaaggcccaaggcga

SEQ ID NO: 25879 - RNA, 87 nt, Homo sapiens
cgagcggggcgcggaggcggagaggcacggaggagccgcggggcgccgccacggccgcccggaggagagaaacaagaagcgccagga

SEQ ID NO: 25880 - RNA, 46 nt, Homo sapiens
cgcggcccgacggggcaccacagcaggaaagaggagccgaacaacc

SEQ ID NO: 25881 - RNA, 72 nt, Homo sapiens
agggccaaagaagggagagaggcgagcaaagacacagccaggcccccaaccggaaagcggaaaggaccgagg

SEQ ID NO: 25882 - RNA, 68 nt, Homo sapiens
cgcacggacgcaccccacgggaacccacgaccaaagcggaaggccggcccacgggggacagaagaccg

SEQ ID NO: 25883 - RNA, 61 nt, Homo sapiens
ccacaaaagcgaaagggcacaccacagacgacccacaggagcaaaccccgaaaaaccacgg

SEQ ID NO: 25884 - RNA, 79 nt, Homo sapiens
gaccccccgaacggaccccgcgagcaccagagcggcgaacacgccgacagggagggacaggcaagaaggaagaaggcag

SEQ ID NO: 25885 - RNA, 70 nt, Homo sapiens
gcgaagaagagcggaaaacaaggggagggagcaggaaccgagagagccaaggaccgcaggacaaacagcg

SEQ ID NO: 25886 - RNA, 58 nt, Homo sapiens
ggcagccacgaggggaccaaaccccacacccaggagccaaggaacgaacagggcgggc

SEQ ID NO: 25887 - RNA, 76 nt, Homo sapiens
ccggccgagaggaagacgagccgggaggaacggcccggaaacaggaggacagaagagcaccaggccagggggccaa

SEQ ID NO: 25888 - RNA, 61 nt, Homo sapiens
ggcggcagggccccgagccggcccgggcgagggcacagcagggggcgcagacaccaaaaaa

SEQ ID NO: 25889 - RNA, 77 nt, Homo sapiens
cagcgcggccgggcaggggcccgcaccacagccccaggacaaagaccaagccgagcccacccgaccagggcccggca

SEQ ID NO: 25890 - RNA, 45 nt, Homo sapiens
gcaaagcagaggaagaacagagcgagcgaacccacacagcggaag

SEQ ID NO: 25891 - RNA, 99 nt, Homo sapiens
cgaaggggcagaggccaagagcccaacaccacccgagagccccaaggaacccagaaccgcgggcagcaagaaccaccaaacaaggacaggagggaaggc

SEQ ID NO: 25892 - RNA, 79 nt, Homo sapiens
acaacagcagcgggaaagaagagcgggaagggacaaaacagaggcaacaagggaggggaacagggccaagagagaagcg

SEQ ID NO: 25893 - RNA, 87 nt, Homo sapiens
gggcagaggcgggagcccgaggagagcggagaaaaggaggacacaaggaggaggaggaagagcagccgcaggcagcacagcccccac

SEQ ID NO: 25894 - RNA, 58 nt, Homo sapiens
acgcgcacccggccggggagccaaagaccccgccccccgaggcgcagcccgaacccag

SEQ ID NO: 25895 - RNA, 59 nt, Homo sapiens
cccggccaccgacccacaaggaggaaagacaagccccaaaagcagccgggaaaggagcc

SEQ ID NO: 25896 - RNA, 74 nt, Homo sapiens
ggggaggcgcaccaggcgcggagaaaacaacaagagaaggacagcggccaacaagaaggcccaaaagcggggga

SEQ ID NO: 25897 - RNA, 82 nt, Homo sapiens
ccgagagcgagaaacaaagccacccagccaagaaggccaaggaagcaggcggagaaacagaaaagaaacccgcccccggaaa

SEQ ID NO: 25898 - RNA, 83 nt, Homo sapiens
gacgaaagagaaacccggagggcgccgggggaaagcaggcaggagggagagcgccgaagaaccaccccccgccccgggcgggg

SEQ ID NO: 25899 - RNA, 77 nt, Homo sapiens
gccaaaggaggacagggcagaagccgggggaccaacaccagacaccacaaaaccggcaacccacaggagggccagag

SEQ ID NO: 25900 - RNA, 56 nt, Homo sapiens
gccgcgcagcccggccgccggcccccaacagcgccggaggcggccggccccggcgg

SEQ ID NO: 25901 - RNA, 76 nt, Homo sapiens
cagccagaaaacacaccagcagccagcagcaggaagcaaacaggacagcacgcggcagggccgaagcaacaagaag

SEQ ID NO: 25902 - RNA, 77 nt, Homo sapiens
gcgggccaccccccaaaggcagcgggagaaggagacacaggagcacgacacccgcagaggcccagccccgacaggga

SEQ ID NO: 25903 - RNA, 87 nt, Homo sapiens
aggagaccccacggagcgggcgacgagcgacccgggagacacgacgaaggaggccccaacccgagcacaacagcaaccggccaaaca

SEQ ID NO: 25904 - RNA, 80 nt, Homo sapiens
gcgcgggaggcgaggaggcggcggcggagacgggaaacagcccgaacgcacagaagaaaccagcgcccagcgccgggaga

SEQ ID NO: 25905 - RNA, 71 nt, Homo sapiens
agcagccccgagaccccagagagggagcagaggcaggccgaccacaccgagacgcaaaaaggagcacacca

SEQ ID NO: 25906 - RNA, 77 nt, Homo sapiens
acgacaggccgggaggacacacagaaaggaggagcccaggaccaccgacagcaaggccccacagaaagcccacggga

SEQ ID NO: 25907 - RNA, 66 nt, Homo sapiens
acgaaggggcaacaccccggaaacacgacaagccaaagcaagacgaacgagagccaacagaagcaa

SEQ ID NO: 25908 - RNA, 41 nt, Homo sapiens
cgacggccgcgaccgggagagcagggcagaaaagaacagac

SEQ ID NO: 25909 - RNA, 48 nt, Homo sapiens
aggaggacgacgcccaggccggacccagcagggcccccggaacaaacc

SEQ ID NO: 25910 - RNA, 74 nt, Homo sapiens
agagagaggacacgaaacagagaggggaaggagcccagcgacagaacaagcagaggaaagacacgccagagaag

SEQ ID NO: 25911 - RNA, 65 nt, Homo sapiens
gggcccccacagcagagcggccacaagacaggaaacagggaacagaggaggcgcgcagaagaaag

SEQ ID NO: 25912 - RNA, 79 nt, Homo sapiens
agaagggaggcgggacgcaccacccggggaaagcagagggccccggacagaacaaggagccgggagacagcccccccgg

SEQ ID NO: 25913 - RNA, 75 nt, Homo sapiens
agcgaaaaagcggaacgaaggaagaccgcaggaaagcaggaaggcaagaaagccaaggacgaaacccacacggag

SEQ ID NO: 25914 - RNA, 78 nt, Homo sapiens
cccgccgcaaacagcccgccagacacggcaggccaagaagcaccgagcaagccaagcaaagccaaccggcgaagggag

SEQ ID NO: 25915 - RNA, 63 nt, Homo sapiens
cccgggccccagcagggccagagaccacggaagccccgggagaggagcggaagacccgggggg

SEQ ID NO: 25916 - RNA, 80 nt, Homo sapiens
caagcaaacagaagcgcggccaagaccaagacacccaggagaaagacagcggggaaaagaaaaaggagggggcaaaaggg

SEQ ID NO: 25917 - RNA, 72 nt, Homo sapiens
aagagcaagagggcagaagaacaagaaggagaccgagaagggaaacagccgcacagcccccaccgcccgccc

SEQ ID NO: 25918 - RNA, 85 nt, Homo sapiens
accaggagcaagagagaacagaaaacagccggccaaaggccaaggggggccggccagccggcaaaagaggaccagaacagagaag

SEQ ID NO: 25919 - RNA, 84 nt, Homo sapiens
ccaaagggcgagggcacaaaaaaccacaccccccaccgaggaagagcgggagaaagggggggcggccggccgcagagcaccgcg

SEQ ID NO: 25920 - RNA, 54 nt, Homo sapiens
gacagagaggacacgaaacggacaaggaggcaccgccccaacccccccccgccc

SEQ ID NO: 25921 - RNA, 82 nt, Homo sapiens
cggccgcagcgggccgcggccgaggaggcagcgcgaccccgcacgacgcccagaagagcacaaagaaccaacgccaaggcag

SEQ ID NO: 25922 - RNA, 66 nt, Homo sapiens
ccgacagcaggaaagaagggggaacaacgaggaacgaacaaagggaccgcgcgggagggcggccag

SEQ ID NO: 25923 - RNA, 73 nt, Homo sapiens
acacagggaaagccggaggaccacagacacaaggacaagaaagccaccaggacgagaaaaaccaccggacaga

SEQ ID NO: 25924 - RNA, 63 nt, Homo sapiens
agagggaccgacccgaggccagcagggaaagccccgcagcaacaggcaagaacaagaagagaa

SEQ ID NO: 25925 - RNA, 49 nt, Homo sapiens
gaaggccagagcacgagcacgggaaggaagaacaagcgggggaacggag

SEQ ID NO: 25926 - RNA, 79 nt, Homo sapiens
accgacgaggcggaggagagaacgagaagcaggcaccgggaaaacgcagaggaacgagggggagccacgaggagaaggc

SEQ ID NO: 25927 - RNA, 76 nt, Homo sapiens
ggacgaacgccggccgcaacccgccagccgcaaacaagcagaccggaagaccgacggaagaccacaccccgaggga

SEQ ID NO: 25928 - RNA, 79 nt, Homo sapiens
cgccgccacagggaagccgcgaagggagcggaggagcccacaggcgcaaagagcggagaagccaaaagggagagcacag

SEQ ID NO: 25929 - RNA, 79 nt, Homo sapiens
caccaggaccaccaccagaaaacccgcacaccgacccacaagcggaaagccacagcagaggggaggcacagcgagagca

SEQ ID NO: 25930 - RNA, 80 nt, Homo sapiens
gagggacggagcaggccggcgcgcgaacagcaacgggccaacgacccagccggaccgcgcggagagccggcggccgccag

SEQ ID NO: 25931 - RNA, 64 nt, Homo sapiens
accaggcacggcaggagcacgcagccaagacacagcgagcaaccacaccagcgcacaagaaacg

SEQ ID NO: 25932 - RNA, 72 nt, Homo sapiens
gccgagagccgcccgggccagcggccgcgcacccccggccggaggcaccagcacacaagacacccaagaagc

SEQ ID NO: 25933 - RNA, 67 nt, Homo sapiens
cgacgacaccgcacgcgcacggacggcacagcccgccgaacccgaaaggaggcaccccacgagcgga

SEQ ID NO: 25934 - RNA, 74 nt, Homo sapiens
ggccaggccgcaggaacgggccacacagcaggaggaacgcagggcaaaagaggaaacaaccagaaggacgaggc

SEQ ID NO: 25935 - RNA, 74 nt, Homo sapiens
agccccgaccgggagaggagagcccccaggggagccggcggaaagccggaaaaagaagaaaagcaaccacccaa

SEQ ID NO: 25936 - RNA, 68 nt, Homo sapiens
caccgcagcagagcccaccggcagggacgacggaccaggggccggcaaaaccggacccagaggacgag

SEQ ID NO: 25937 - RNA, 79 nt, Homo sapiens
gcccgcaagaggcagccgaggcccaggccgccacgcggccggcccgccggagaggcggcgaagagcaacaaggccgccc

SEQ ID NO: 25938 - RNA, 79 nt, Homo sapiens
ccccccggggcggacaaacagaagggcggacacggacaggccaggcccacggcccggcgacgaaggcacaagaaacccc

SEQ ID NO: 25939 - RNA, 62 nt, Homo sapiens
ggagcgcccaccagaggagcgaaagagagaggaagcagagcaagccaccaggccaaggcaag

SEQ ID NO: 25940 - RNA, 71 nt, Homo sapiens
acggggaccccggagcccagaagacagagggcgagcagaacaccaccccaccgccaccgggaagaaccagc

SEQ ID NO: 25941 - RNA, 74 nt, Homo sapiens
ggaaacaaaaacagcggaagaggccaaacacacaggaacgccagaccccagccgagggaggcaacagcaaaggg

SEQ ID NO: 25942 - RNA, 87 nt, Homo sapiens
gccgccgcgcacaccggcggcgggacgacgcggacagcgggcggagccgacgagcggcggacggagccaccaccaccccgagagacg

SEQ ID NO: 25943 - RNA, 77 nt, Homo sapiens
caaaggaaaggaccagcgaagccaccaagggcggcgggcagacaaccgcgcagcgccgggcggacgacgaggcaggc

SEQ ID NO: 25944 - RNA, 76 nt, Homo sapiens
cagagagaaaccaacagaggcaagaaggacaacaaggagaaggcccgacagagcagccgaggaacccagcggggcc

SEQ ID NO: 25945 - RNA, 63 nt, Homo sapiens
ccggagcaggaggagaaaggaaacagaggagagaacacggccaagagacagagaaggggggcc

SEQ ID NO: 25946 - RNA, 69 nt, Homo sapiens
ggagcagggaagaaggaacacgaggcagggggccacacgcaaggggaacaggcggcccggcagcaaggc

SEQ ID NO: 25947 - RNA, 56 nt, Homo sapiens
cggaggccacggcgcagacgcacgccccgccccgcaggaaaagggccagggacgaa

SEQ ID NO: 25948 - RNA, 71 nt, Homo sapiens
gacagggaaaccagcccaagcacaaaagggggcacgggggccagcaggagcaggagaagcaaacagagccc

SEQ ID NO: 25949 - RNA, 41 nt, Homo sapiens
acacagggccagccaccacgcccaggcggaggaaggcagac

SEQ ID NO: 25950 - RNA, 77 nt, Homo sapiens
ggcggccgccaggaagcgcccacagcccggcgggcacaacagcaggggcacccagcagggccagcagcagcacagag

SEQ ID NO: 25951 - RNA, 77 nt, Homo sapiens
caggaacacaccacaacacagcaggggggcaaccacagccagagagaagaagcgagagaaaaggaacggaagaaaaa

SEQ ID NO: 25952 - RNA, 57 nt, Homo sapiens
cgggcggccacacgacccacccaagcccacgaggcgggaaaagaagaccccggagca

SEQ ID NO: 25953 - RNA, 60 nt, Homo sapiens
gcgaaacccaaggcccgccgcccagccgacgacgcaggcacggcagacggagaacaggac

SEQ ID NO: 25954 - RNA, 73 nt, Homo sapiens
aaagacaagagacaacggcccaaggcaaagggagcaggagaaaaagccacggcggaaacagagagagaggaga

SEQ ID NO: 25955 - RNA, 73 nt, Homo sapiens
cgcggccggcccggccccccgcgcacggccagcgcagagcagggaacagacagcggagagggcacccgggacg

SEQ ID NO: 25956 - RNA, 60 nt, Homo sapiens
aagggaccaaggggaaacaaacgccaaaaagagagaaaaaccagaaagaaaacagacggg

SEQ ID NO: 25957 - RNA, 72 nt, Homo sapiens
acgagcacacgaagaaacaagacgagaagaacccggaagcaaacagacaggcacaaccgcagcggcaacaca

SEQ ID NO: 25958 - RNA, 48 nt, Homo sapiens
acccgggacgggccgagaggaccgcgcagacgcgcaggacggagcggg

SEQ ID NO: 25959 - RNA, 79 nt, Homo sapiens
acaggaacggaaacaaggagcaaaggaagaagagggacgcagcggagggacaaagagccaacagagacaaaggagacgc

SEQ ID NO: 25960 - RNA, 75 nt, Homo sapiens
accaagagggaagcacaggcaagggcagacgggggaggaggacgcaaagacaagccacagacaggaagcagcagc

SEQ ID NO: 25961 - RNA, 57 nt, Homo sapiens
ccggcgcacggcggccgcggcgcggcgccacgggaaagacaaggagccgggccgaga

SEQ ID NO: 25962 - RNA, 77 nt, Homo sapiens
gacccggagccgagcaaccaggaaagcgcaggcaggagaaggacagcagagccacaagggacgcaaaaagaaggggg

SEQ ID NO: 25963 - RNA, 72 nt, Homo sapiens
gaagaaacggcgagagcaacagacgggacgaaaggacaagcaagaaaggcccggacggagacacacggacac

SEQ ID NO: 25964 - RNA, 70 nt, Homo sapiens
ggcgcaccgacaacaaacacagacgcggccaaccacccaaagaggagcaaccaaggggaaagccaccacg

SEQ ID NO: 25965 - RNA, 75 nt, Homo sapiens
gagagcccacccccaacgcgacggaaaggcacgaaagccagggaagggcgagcacgggccagcccggccacagca

SEQ ID NO: 25966 - RNA, 64 nt, Homo sapiens
gcgcgcagaaccccgccgcaggacaaggggcgggcggccaagagagaagagggggaaaaaggaa

SEQ ID NO: 25967 - RNA, 98 nt, Homo sapiens
ccccagcgcagccagcacgcccggggcaagcgaccagccccccacacggacggagaaaccacgggccaaaagggcggggaacggaccaccagccccaa

SEQ ID NO: 25968 - RNA, 88 nt, Homo sapiens
gacagccaccaaggagaggagcccaagaggcacgcaccccacaaaaaaagggagccgccaccaaaagcagacggaaaacccacgggga

SEQ ID NO: 25969 - RNA, 83 nt, Homo sapiens
ggagcggccaccggccgcggcacggcccggggccgggagcgcccgaggaacacgccgcagcgcgccgggggcccggaaaggga

SEQ ID NO: 25970 - RNA, 87 nt, Homo sapiens
agcagaacggcacagaccaaacccagcggggaggccgaggaagaacagacgggagacacgagagagacagcagaaagaccacccagg

SEQ ID NO: 25971 - RNA, 77 nt, Homo sapiens
gcacccccgacaaacaccacgagaaccgcagcccacacggccccgggggcgccgagggcacaagggcaacgacagaa

SEQ ID NO: 25972 - RNA, 86 nt, Homo sapiens
ccgaggaccaccggccaaggaaaccccagggcccgcccaggacccccaagccgccgcggacgcagggaaagggagcagcaccggcc

SEQ ID NO: 25973 - RNA, 75 nt, Homo sapiens
ggaccacccaagggagagagacacaaaggcacagggacagagcgaagaaccccccaagaagacgaaacccccggg

SEQ ID NO: 25974 - RNA, 74 nt, Homo sapiens
ggcgacgcacacaacccccgaaagcggacaggccggaagaccaccaagagggacccacccccgcaaccccaggg

SEQ ID NO: 25975 - RNA, 76 nt, Homo sapiens
agggaagcagaaagagaaggaaggcagagaggccacaggggggacaaagcgaacaaaccgggagacacacaggaga

SEQ ID NO: 25976 - RNA, 82 nt, Homo sapiens
gcccggggcccaggcagaaggccacggccaggcaggcagccggcgggccccaggccacacagacccacccacaggccaccag

SEQ ID NO: 25977 - RNA, 60 nt, Homo sapiens
cgaccggagccgcccaggacggcaggggaccgcacaggcggagaacggaaaagcaccagg

SEQ ID NO: 25978 - RNA, 59 nt, Homo sapiens
cgagaagcgcaaagccagaaagaccacagcaagaccacgcccccagccgggggaccagg

SEQ ID NO: 25979 - RNA, 81 nt, Homo sapiens
acaacccaaccacggggaaaaggcaaaaacccacaccgcaacccagcgagagaaaggggccaccacagagcccgcagggac

SEQ ID NO: 25980 - RNA, 56 nt, Homo sapiens
accgcacgacaggcacagagcgcgcccagggaaagcagcccacagcgccaggccag

SEQ ID NO: 25981 - RNA, 58 nt, Homo sapiens
ccgcgcccgcccgacccgccaccgccaggccagccggacgagcgggagaggacaccac

SEQ ID NO: 25982 - RNA, 84 nt, Homo sapiens
gagccgcggcccggcggaaaggacagcagagagcggcggcaccaggcaagcgggagcggggaggccgaagcggggggccaaccc

SEQ ID NO: 25983 - RNA, 80 nt, Homo sapiens
gccagcccggcccgggcgccagggacagaggccagcgcgcgcaacacaagacaagaacccacgcgcgcgagccggcgggg

SEQ ID NO: 25984 - RNA, 90 nt, Homo sapiens
cgaagaaaacagccaagcaccagaaggagagaagggagaggagaggacccagacaccgggcaacgggcccagaaggcagacgggagacgc

SEQ ID NO: 25985 - RNA, 68 nt, Homo sapiens
cgccaaggagcgggcgcggcggaagcccgcgggccccgcagaagcagccggaggaggaaaaaacgccc

SEQ ID NO: 25986 - RNA, 86 nt, Homo sapiens
gggacccggcgaagacgcgaccgcggcgcgagcaccagaggggggccagcagcaagaacagagagagcagagagagccagaaggcc

SEQ ID NO: 25987 - RNA, 102 nt, Homo sapiens
ccgcccggcagcgccccgcgagaaggaggagcccccgcccggcagccaccccacgggaagcagcacccaagacacggaccccgccccccccggagcccggcc

SEQ ID NO: 25988 - RNA, 82 nt, Homo sapiens
agcgcccacggagcggacccccagagccgcgcggcgccgcagcaggaggacggaagacacgcggggcaccgggaaggccaag

SEQ ID NO: 25989 - RNA, 73 nt, Homo sapiens
ccgagcgcaacagcggcgggcggggcaccccagagaacacccgcagggggaccaggccggcacagcccggaaa

SEQ ID NO: 25990 - RNA, 86 nt, Homo sapiens
cgaaggaccgcggacccgccccgggacagcgaggagcgagggacccggacgcggagccccggaggccgcggcggacggacaccgga

SEQ ID NO: 25991 - RNA, 82 nt, Homo sapiens
ggacccgggccagcggccaagacgagacaccaggcgccgagaaggccagcagagaaacaggcaggagaggcccacaggcgcg

SEQ ID NO: 25992 - RNA, 56 nt, Homo sapiens
agagcggcggcggacgggggagcgcaccaagcccgaggaaacaaagaaaaaagagc

SEQ ID NO: 25993 - RNA, 69 nt, Homo sapiens
ggaacacgaccaaaaagaacacaccaaaagagcagagaagcaaaagggcccgaaaggcaccaaaaagca

SEQ ID NO: 25994 - RNA, 54 nt, Homo sapiens
agacggcggccccgggaccccgcccggcagccggacacaagggcgcaaccaaag

SEQ ID NO: 25995 - RNA, 79 nt, Homo sapiens
aaacaagccgggaaagggacaagaagggcaaagccgaagaggaccagagacaggagcgcgacagacaaaggagaaaaaa

SEQ ID NO: 25996 - RNA, 49 nt, Homo sapiens
caccccacagggaagaggggcggaagagcgcgggaggggaggccaccaa

SEQ ID NO: 25997 - RNA, 72 nt, Homo sapiens
cggggcacaggcaacccaagacggcgggagccggaacgggccaggaaagacagagagacggggcaccacggg

SEQ ID NO: 25998 - RNA, 59 nt, Homo sapiens
gcgccccgaacgagggggcgcgaggcaggcccccgcgaggacacccaccggaggaaaag

SEQ ID NO: 25999 - RNA, 59 nt, Homo sapiens
cccggacagaccccgaacaagcacgcagagggaacagaggcacagaaaagaagggagac

SEQ ID NO: 26000 - RNA, 57 nt, Homo sapiens
ggagaacacagaaaccggccccagcacaacaaccaaacagccaagaagcggggcagc

SEQ ID NO: 26001 - RNA, 73 nt, Homo sapiens
gaaaacacacggaagagcgcggccagcaccccaacgggccaaaggggcgccccagaacaaaccagaagcagaa

SEQ ID NO: 26002 - RNA, 74 nt, Homo sapiens
acagagcagacagaacagacaaggggacacgggacagccaaagaccggagcggagagagaagaaacaggccaca

SEQ ID NO: 26003 - RNA, 40 nt, Homo sapiens
ggagcgaagagccggaccaagcgccaggagcgaggagcaa

SEQ ID NO: 26004 - RNA, 81 nt, Homo sapiens
caccagccagcacccacgccaggcccagcgagccagaagcccccccagcaggggcagaccagggccagagcaccagaccag

SEQ ID NO: 26005 - RNA, 62 nt, Homo sapiens
gagggccaggcagacgcagggggcccggagcagagccagcaagaacaaagcgcccaacggcc

SEQ ID NO: 26006 - RNA, 112 nt, Homo sapiens
ggccgggggccggaccaagagacccagaccgggccaggcacgcggcccgggccgggagaccgggagccgcccccgccggcgcagcgcaccagacgggcggcggccgccggcc

SEQ ID NO: 26007 - RNA, 52 nt, Homo sapiens
gggagacgcaggcgccaggagacaagacccagcagagagaaaacggcacaag

SEQ ID NO: 26008 - RNA, 71 nt, Homo sapiens
ccaaagcagcggcgccggccgccccaccggcggaacccagcaaggacccggcgggggcaaggaagcacgga

SEQ ID NO: 26009 - RNA, 80 nt, Homo sapiens
gagccgcaccggaaaaacacgccacccgcgagcagcgggacacgagaggcaaagcgaaggcggagcaggagaaagcggca

SEQ ID NO: 26010 - RNA, 70 nt, Homo sapiens
cacaaagaacagcggcagacggaggagagggccgcaaaggaacgccacaaagaggagggcaaagcagaaa

SEQ ID NO: 26011 - RNA, 49 nt, Homo sapiens
ccacgcggccagcgaaaacgcccagcaaagcccaggaaagaagcgagga

SEQ ID NO: 26012 - RNA, 69 nt, Homo sapiens
gggacaagacccacagcaaagccagcgacagaagccaggggggcgaagacagcaagaaccgcaaggcca

SEQ ID NO: 26013 - RNA, 86 nt, Homo sapiens
agcgccaccaccacgccagccgcaccagccgcccaagccgcacagccgcggcggcagcagcaggagagaagggcggaaggaaaccc

SEQ ID NO: 26014 - RNA, 38 nt, Homo sapiens
ccaccaccgcaggcagcccagagcacaacagggagaag

SEQ ID NO: 26015 - RNA, 82 nt, Homo sapiens
caccagccaccaccaagccgagggaggaggacaacaagacgcgccgacgcgaggccaaaggcggaacgaggagaaagcacgg

SEQ ID NO: 26016 - RNA, 57 nt, Homo sapiens
aagagccccccccccaacaccgcgacacgcaggagacggcgaagaacagaggaacaa

SEQ ID NO: 26017 - RNA, 78 nt, Homo sapiens
ccggaggaacaccaaaggaaaaacagaaaaggcaagacaacgcagaaaccaaagaaaaacgccacccaaaacggaaac

SEQ ID NO: 26018 - RNA, 79 nt, Homo sapiens
ggaacgggagcgcaggcgccccccccccgccccccccccccaagggcaccccgagaaagccaagagagaaaacaggccc

SEQ ID NO: 26019 - RNA, 49 nt, Homo sapiens
cggcgcggcaaagccacccaggaaggcagacagcccgcgcgagaagcgg

SEQ ID NO: 26020 - RNA, 74 nt, Homo sapiens
acgcgagcccgcccccgacaaggccagcagagcccaagggcgccagccaccacccagacgaccagacgagagca

SEQ ID NO: 26021 - RNA, 84 nt, Homo sapiens
ccgaggcaaagaagcaggagcacacaaagaacagcggcagacggaggagagggcaaaagcagaccggaaaacccaccggcaaga

SEQ ID NO: 26022 - RNA, 78 nt, Homo sapiens
cccagccacgggcggccacacgacccacccaagcccacgaggcgagaggacgcgaggcccagagagggaaagccacgc

SEQ ID NO: 26023 - RNA, 61 nt, Homo sapiens
aagacccggaggaaacaacccaacccgccacacaaggaggaaaagggaaacagcccaggcc

SEQ ID NO: 26024 - RNA, 87 nt, Homo sapiens
cggaccaaggaggaggagagagaccgcgagccgacaccagcgaccaaggcgagggcgaggaagcagccaaaaacaaaacagaggaga

SEQ ID NO: 26025 - RNA, 40 nt, Homo sapiens
agcccccgaggagcgggacacaggaccagacagaccgagg

SEQ ID NO: 26026 - RNA, 81 nt, Homo sapiens
ggggaagaggaacagccaggggcccacggaggaggaagacaaggggcacccggacaccgcccccagagagagaggggcgca

SEQ ID NO: 26027 - RNA, 76 nt, Homo sapiens
gaccggagaaaaagggagcacagcaaggccgaaggcggaaacacgccaagcgccggccagaccgcaagagccccac

SEQ ID NO: 26028 - RNA, 60 nt, Homo sapiens
ccggaggaccgggacaccgcggaagcgggaaaggacccgacaaacggacagcaggaccag

SEQ ID NO: 26029 - RNA, 76 nt, Homo sapiens
cacacgcagagaccagcaagccacacccagaaccagcagcccgcagaagaaaggcaaacccaaggcccaaaaccca

SEQ ID NO: 26030 - RNA, 82 nt, Homo sapiens
cggaaggagagcgcagacgagcagagggcggcgacggcggcgcgaggaccgaccgggcccgcggacgaagaaggcacccccc

SEQ ID NO: 26031 - RNA, 64 nt, Homo sapiens
ggagaggaggcccgggccgcggccccgagcgcgcgggagcagggcgaaaccaagaaccacagac

SEQ ID NO: 26032 - RNA, 75 nt, Homo sapiens
ggagacaccagaacacccacacacagaggggaaagacccagagaagaggaaaaccgccgccggggccagcaagaa

SEQ ID NO: 26033 - RNA, 74 nt, Homo sapiens
acacccgccaccaccagggaagcgcagccaacaagcacgaccgcacaggcaaaggaaggcgaacacaaagagaa

SEQ ID NO: 26034 - RNA, 73 nt, Homo sapiens
gaagccgacgcgccggcgcaaagaagcccaagccaggacggaccccaagcaagccgcagaaccacaaagaagc

SEQ ID NO: 26035 - RNA, 75 nt, Homo sapiens
cagcgagacccgccaggagcaaaggcaaaagcagaccggaaaacccaccggcaagaccacacccgaggggagccc

SEQ ID NO: 26036 - RNA, 72 nt, Homo sapiens
cgggccggcgccggagacgagccggcgagcaccacgccgaaaaacgggagaacgccaaaaaacaaacgcccg

SEQ ID NO: 26037 - RNA, 62 nt, Homo sapiens
agcaggggcggaagccacacaggccagaacgaggaccgaagaagaagcaggagacacaccag

SEQ ID NO: 26038 - RNA, 71 nt, Homo sapiens
agggcagggcccgcagcagcagcccgggcaaacagccacgaagcgacccgcggccccagcacccaagggaa

SEQ ID NO: 26039 - RNA, 73 nt, Homo sapiens
cggcagccggcaaggccagaaaacccgcgagcaggaaccccaggaaacggccagggaagacagaaggaagcaa

SEQ ID NO: 26040 - RNA, 78 nt, Homo sapiens
gaaaggcgagggaagcgccgggccaacaagccgaggagaggcccacccgccaagcgcacaacccccaggcaccaaggg

SEQ ID NO: 26041 - RNA, 53 nt, Homo sapiens
cgcacagcaaaggcacaaagcgggggcaagagcagacggcggcagacaacacc

SEQ ID NO: 26042 - RNA, 69 nt, Homo sapiens
cggggcaggcgagcccgccacagagccgaaagggggggccccagcccggccgaacgggcgcacgacaca

SEQ ID NO: 26043 - RNA, 66 nt, Homo sapiens
gcgagcaaaccaccaaaaaagcggaggcgcgcaggagccaagaaaaaagacccacaggcgaagaac

SEQ ID NO: 26044 - RNA, 78 nt, Homo sapiens
ccgaagcaggccgaaaggccgcgggaacgcgcgccgccgacaaggcgcacaacaggacccagaagaccccagacgggg

SEQ ID NO: 26045 - RNA, 73 nt, Homo sapiens
ccgcgcggggcggcgccgggccgcgccgagccaagccagcagacggggccagcaagcacaccaagagcaagga

SEQ ID NO: 26046 - RNA, 80 nt, Homo sapiens
cgccaccagccacggaaagcagagcaaaaaagagccacgggaaggcaagagggaaaagaaaaaagagagagggacaagca

SEQ ID NO: 26047 - RNA, 75 nt, Homo sapiens
cagagaccacagaaggacgggagaacaccccacagggaagaggacccaaagaagagcgggcaagcgccccccgcc

SEQ ID NO: 26048 - RNA, 90 nt, Homo sapiens
agcagcgcgcagcgggcgcggcggccgagcaggcggagcgcacgacgacaggccccgcagaaggcgaacagccagcaaagacaagagcag

SEQ ID NO: 26049 - RNA, 76 nt, Homo sapiens
gccaaggacgcgacaaaggaccagccagaaaagggaccacaaaggagcaaacgaagaagagagaggggaaagcacg

SEQ ID NO: 26050 - RNA, 48 nt, Homo sapiens
ggcaggcaaaggcggaaaaaggcaccaggggaggggaccaggagagaa

SEQ ID NO: 26051 - RNA, 65 nt, Homo sapiens
gaccgacacccaagacaagacagcgcaaggcaggccgcggagacagacagaagaaggacacaaga

SEQ ID NO: 26052 - RNA, 84 nt, Homo sapiens
ccggggccgggcgacaggagcaggcaaaagcagaccggaaaacccaccggcaagaccacacccgaggggagcccaggacaccac

SEQ ID NO: 26053 - RNA, 75 nt, Homo sapiens
ccaggagccagggaggacgaagaaagaccaagggggagccgggagaaagaaaaaacaaagaagcagagcaaggga

SEQ ID NO: 26054 - RNA, 76 nt, Homo sapiens
acgaaaaacagggcacgaggcccggccaaaggggacagaggcgccaacgaagcaaagaagaaagacaagcgaccaa

SEQ ID NO: 26055 - RNA, 81 nt, Homo sapiens
ccaaacacacgggaccgaaacaggccggggcacagcacagcgccggcgcaagcacccagaaggaaccgacaagaacaggac

SEQ ID NO: 26056 - RNA, 49 nt, Homo sapiens
accgaaagccacagcaagaagggggagagagacgcgggaaccgccagca

SEQ ID NO: 26057 - RNA, 79 nt, Homo sapiens
gagcggccgagccacccaaaaacagggcgcagcaacggcacacagaggggagaccagacagaggacaccggcaaaacca

SEQ ID NO: 26058 - RNA, 88 nt, Homo sapiens
agccgcggagccgggggcagaacagagcccagaggggcccgccgggcccaaaacacacagcagaggggagagccggagaggacccgag

SEQ ID NO: 26059 - RNA, 63 nt, Homo sapiens
aaaagcacgcccaggccaaagcagaagcacacccaacacccgggaggcggggaagcgaaggcg

SEQ ID NO: 26060 - RNA, 64 nt, Homo sapiens
agccggaagaaccgcagccgagcggggccggccacagcccgcggaaacgccagagaaagcggcg

SEQ ID NO: 26061 - RNA, 75 nt, Homo sapiens
aaggccgcggggggagaccccaccaccggcagaggcagcgacagagaaaaccccggagcagggagaggacgaccc

SEQ ID NO: 26062 - RNA, 54 nt, Homo sapiens
ccgacaaggccgaccgggaggcagacgggcaaaaggaagcgaaaaggagagcag

SEQ ID NO: 26063 - RNA, 71 nt, Homo sapiens
gcccagaagaacggaagagcggcagcgaagccggccagcgcagaaccgcagcccagccgacaggcaccaag

SEQ ID NO: 26064 - RNA, 73 nt, Homo sapiens
cccccgcgcagccagcccgacgagcggcccggaccggccagagagaaggcgcgagggcgccacaccaaagcac

SEQ ID NO: 26065 - RNA, 77 nt, Homo sapiens
cccggaccgagccgacgccgcggggcagcgggccggcgccggcgcggggacaggaccggcccaacagggcagccggg

SEQ ID NO: 26066 - RNA, 99 nt, Homo sapiens
gagagcgggccccaacaccagccgccgccccgcagccccccgcagcacccagccggccacggaaaacccaaccccaagaaacagaagcaaaaaaggcgc

SEQ ID NO: 26067 - RNA, 73 nt, Homo sapiens
gccaccaggccgggaagcccacggaaggaagacagaaaagagacaccaaaaacgacagcggaaaagcggaaca

SEQ ID NO: 26068 - RNA, 73 nt, Homo sapiens
agcaacgcggaaggaagaacagaaacacgaccaaaggaggcaggaccgggcaaaaaggcagcaccccagagac

SEQ ID NO: 26069 - RNA, 76 nt, Homo sapiens
agcacgaggagacacaggcgacgaggaagcggggggacaccccagggccagccgccaggccagcgagcgccgacac

SEQ ID NO: 26070 - RNA, 86 nt, Homo sapiens
cgcagcccgcgccgcgccggccccacagccgcgccgggacaaggcacgaggcgcggcgaccaccacagcagagcccggcgaaggag

SEQ ID NO: 26071 - RNA, 70 nt, Homo sapiens
gagacaaaaacggcccggagaggagcaaagccaaagagggcgccaggggaacaagaagccgagcaacccc

SEQ ID NO: 26072 - RNA, 37 nt, Homo sapiens
ccaccaggcccagcccggagagaaccacgcgaggggg

SEQ ID NO: 26073 - RNA, 76 nt, Homo sapiens
gagcaggccacaaggggggggggagacggggcgaaagagggcgggaaacaagaaggacacgggccaacaacaggca

SEQ ID NO: 26074 - RNA, 64 nt, Homo sapiens
cccccaaaaccacaaacgccacgcagaacagccaccaagccaccagcgacggaaccagcaaccg

SEQ ID NO: 26075 - RNA, 69 nt, Homo sapiens
cagcaaaggagcagggcggacaaaaaaaaaagagaaagcgagccccaagagcaagcagacaaagcaccc

SEQ ID NO: 26076 - RNA, 81 nt, Homo sapiens
caaagacagcaaaaaaaaggaagcacaccagagcaggaggagcaagcacaacaggccgaagaggccggagaaggacacgcg

SEQ ID NO: 26077 - RNA, 49 nt, Homo sapiens
ccaggaaaggcgccgaagagaggaaaggcaagggcagaaaagaggggaa

SEQ ID NO: 26078 - RNA, 82 nt, Homo sapiens
gggacggaccgagaccggaccgagagcggaccgagagcgcgaaacgcacgagaaggggggacggaaaaacaaaggaacagcc

SEQ ID NO: 26079 - RNA, 72 nt, Homo sapiens
cgagcagcggccaaaccgcagacccagagacgccgcaaggcggagcggggacgagcagagccaacaaagcga

SEQ ID NO: 26080 - RNA, 75 nt, Homo sapiens
cggaccggccagagagagacaagaacaaccaaacagaaacaagaaagccagacaggacaaagaaacaagcgacgg

SEQ ID NO: 26081 - RNA, 75 nt, Homo sapiens
gggcacgagaaaggccagaccgagagagaaccgagagagggcagcaaaggagcagggcagggaagccccaacggg

SEQ ID NO: 26082 - RNA, 73 nt, Homo sapiens
cgagaagcccaaccacaggagaaaggggaaagaagaacaggaacaagagcaaagaccaagagccagggggggg

SEQ ID NO: 26083 - RNA, 54 nt, Homo sapiens
ggcaagacgaaccaaccagcacaacagggcggggacagagagcaccagcaccca

SEQ ID NO: 26084 - RNA, 80 nt, Homo sapiens
gagccgagcagaaggacgcaggcagcgggcccaggaaacaccagacacacccccagaccggacgacgaacgcccgacaac

SEQ ID NO: 26085 - RNA, 75 nt, Homo sapiens
ggcggaagacaggccacccagcggggagcacggcgagcagccaggccaggagagaaagagacggcgccgaggaag

SEQ ID NO: 26086 - RNA, 70 nt, Homo sapiens
cgagacccgggcgggggcaccgagggcaccacgcgcggaaaacaagccgacagaagaaagcagacagaga

SEQ ID NO: 26087 - RNA, 64 nt, Homo sapiens
caagacacggagcaaggaggaaaacacacgccaccgccccaccaacggggccaaccaaaaggag

SEQ ID NO: 26088 - RNA, 79 nt, Homo sapiens
cggcacgcgagccacgccagcagcggagcagccacagggcggacagccggaagagacagcgcacagacgcaggaaaagg

SEQ ID NO: 26089 - RNA, 83 nt, Homo sapiens
ggaggcgccacccagcccccccgcgaacgcccaaggcgcagaaacagccaggacccagccggggccccgagaggggcgaggga

SEQ ID NO: 26090 - RNA, 74 nt, Homo sapiens
agcagcacgggacccagcccaggccgcacggacgggggggggcgagaacgcggacaagcaaacaaagaggaaaa

SEQ ID NO: 26091 - RNA, 65 nt, Homo sapiens
ggccaggccaggaaaacacgggaagggagcccaaaacaggagcgcagcaagcaccgaacaagggg

SEQ ID NO: 26092 - RNA, 77 nt, Homo sapiens
acgcgcagccccggccccggcccgccggagaaacaggcacaaggcacaaagcaggaggcaggaggccaggaagaggc

SEQ ID NO: 26093 - RNA, 39 nt, Homo sapiens
gcgaccaaacaaaaagagccccgcgcagaaagccaaagg

SEQ ID NO: 26094 - RNA, 77 nt, Homo sapiens
gcgacgaggagagaggggcacccagagaaggagagcagcccggccaaggagggcagcccagggagcacagggcacga

SEQ ID NO: 26095 - RNA, 83 nt, Homo sapiens
aagagcggcccaccaaggaaaggggacagcaacagccggcgggcggaagacaagcagaccggaagaccgacggaagaccacac

SEQ ID NO: 26096 - RNA, 48 nt, Homo sapiens
gcagagacgaaagcccagccggacacaagagggcaagaaaggcgcgac

SEQ ID NO: 26097 - RNA, 73 nt, Homo sapiens
acgcggggggacgcccacccgggccacgagagggaaagcggcggcggcacaccaacaaacgggcccagaagac

SEQ ID NO: 26098 - RNA, 69 nt, Homo sapiens
caggcagcagaacgaggccccacccagcgcacacaccaccacacacggcagacaccagacagcggagaa

SEQ ID NO: 26099 - RNA, 66 nt, Homo sapiens
cgcagggcgcccccgaccgcacccagaccaacacagcagcaacgcgccacacaggggaaaccaccc

SEQ ID NO: 26100 - RNA, 70 nt, Homo sapiens
aggaaaagaagaagaagaccacaaaaaagagacccacagccagcaacaccacgaccaaagcaaaaaaaag

SEQ ID NO: 26101 - RNA, 85 nt, Homo sapiens
ccgcaacaggagcgaagcaacagaaccaagaaggagcgagggaggagcagcgagacagcaagagacgaccacagagccacagaca

SEQ ID NO: 26102 - RNA, 72 nt, Homo sapiens
cgacaagcccgcgccgcccccaggagcacaaaaggggcaacacgaacaggaccgagcacggaggagggcacc

SEQ ID NO: 26103 - RNA, 83 nt, Homo sapiens
gccggcccgaggacaccgacaccagcaggggcggggcccagaagcgcccagccgagagcgccaggaccaggcagagcgggcca

SEQ ID NO: 26104 - RNA, 70 nt, Homo sapiens
aaccagccacgccacacacgagggaccaaagaacccaccgccccgaggaaacgagaagcccagcaccaca

SEQ ID NO: 26105 - RNA, 80 nt, Homo sapiens
gaccagaccaggacgacaaagaggccccgagccccggccccaaagacccaaaacagagacaccccccagcccccgcgccc

SEQ ID NO: 26106 - RNA, 40 nt, Homo sapiens
caaccaagcagaggaacaagacaagcaacgaaagcccagc

SEQ ID NO: 26107 - RNA, 39 nt, Homo sapiens
ccccaagagcggaaacagggaccagggcagcagacgcaa

SEQ ID NO: 26108 - RNA, 81 nt, Homo sapiens
cggcgaccgccaagaaaggcagcgaggggagagcgagagcaagcgagacacgcccgacggccagccaacggggccagcccg

SEQ ID NO: 26109 - RNA, 79 nt, Homo sapiens
acggacaaaaaagaacaggagaagcgaacacaaccaggcgggcgcaaggcccgaagacgggacccaacgcaccaagcag

SEQ ID NO: 26110 - RNA, 77 nt, Homo sapiens
gagcgcgggaagacgccgcgaaagcagcgggaggccacggaggcaccacggagaaacaagaccaggcccagaacgaa

SEQ ID NO: 26111 - RNA, 52 nt, Homo sapiens
acaaagggccaacccagagggaagaggaaagcacaaagacacccaaccccag

SEQ ID NO: 26112 - RNA, 82 nt, Homo sapiens
acaacacccagaagcagcaggaggcgcgggcaggcagagcaccagacgagaacagagcagagaaacggaacaacaggaacag

SEQ ID NO: 26113 - RNA, 66 nt, Homo sapiens
gacgacgcaccgcaggcagacaaaagggccaaagaagggagagagccgagagcaagcaaagaagcc

SEQ ID NO: 26114 - RNA, 64 nt, Homo sapiens
ccggagccaagcggccgagacagccgcccaagcacagggcacccaccaggggcacacgcgccac

SEQ ID NO: 26115 - RNA, 79 nt, Homo sapiens
cagagacagcgcaaccgcgaccagggcgggaagaacaagcagcgaacaaagggaaccgaggagaccggcccggggaaca

SEQ ID NO: 26116 - RNA, 73 nt, Homo sapiens
gagaagccggaggcagcaagcaccgagaaggcgccaccagcaaaaccagagaaacaggcagagaaagacaccc

SEQ ID NO: 26117 - RNA, 77 nt, Homo sapiens
ggagggacccggaccaaagggcgcggaccccggcacccaggcccagggccgggcccggacgggccccggccgagagg

SEQ ID NO: 26118 - RNA, 76 nt, Homo sapiens
gccggaggagaagcaagaaggcccggacacagcaaaccgggccacagaaggggggcagaaagaagaggaggacaac

SEQ ID NO: 26119 - RNA, 40 nt, Homo sapiens
ccagcaccaccccccagaaggcaaaacccacagaccggaa

SEQ ID NO: 26120 - RNA, 76 nt, Homo sapiens
acaaggaaaggaaagacgccaaagaaagcagcaacgaccaagccagacaaggacggcacagggagcggacgaacca

SEQ ID NO: 26121 - RNA, 54 nt, Homo sapiens
gcgagagggccaggcgaacccagagggccaaagggcgggaagaccacggaaacc

SEQ ID NO: 26122 - RNA, 78 nt, Homo sapiens
gcggacaccgcggcgcccggccccccaggggcccccgcggcggccagaaggcacggcaggccgccgcgcccgagagcg

SEQ ID NO: 26123 - RNA, 85 nt, Homo sapiens
cgagaggcaaagcggggaggaacacagcaaggggggcaagccgagcggcaacgaaacaggagccacccaaacagcaacacgacga

SEQ ID NO: 26124 - RNA, 62 nt, Homo sapiens
gcccagccacggggcccgcccgccgccggaagcggggggaccgcacggggcggaagagcgcg

SEQ ID NO: 26125 - RNA, 71 nt, Homo sapiens
cagaggccaaaaaaaaaaaaaaaccgaaccccaggggaaaacggagcgccgaaaagcgaaaagaaacaagc

SEQ ID NO: 26126 - RNA, 37 nt, Homo sapiens
ggcgcgaaacggaaaaagggacccaaagaacaagcca

SEQ ID NO: 26127 - RNA, 80 nt, Homo sapiens
gcgggaggagacgggcccccccaggaccaggccaaccggagcgcacccacgccacaagccggacggcggcagcgcggccg

SEQ ID NO: 26128 - RNA, 42 nt, Homo sapiens
caaagaccagagacgaggggaggaacagcaccaggacaaaag

SEQ ID NO: 26129 - RNA, 76 nt, Homo sapiens
gggagggaaaaggccagaccaaggccgcaagagagaggggaaaggagaagccgcgggagcggaagacaggcccgga

SEQ ID NO: 26130 - RNA, 75 nt, Homo sapiens
cgcgggaccccccgccggaccccacagcaacaagggcgcccaccaacccgaggagagcggcagggacagccgccc

SEQ ID NO: 26131 - RNA, 68 nt, Homo sapiens
cgccggagggcggccacgcgggaccaccggcaccaccaaagaggcacccagaagccgagaaacaagcc

SEQ ID NO: 26132 - RNA, 39 nt, Homo sapiens
ggggcgccgggagcagggaccgcgggcgcgggagggccc

SEQ ID NO: 26133 - RNA, 36 nt, Homo sapiens
agcaacagcccagcaaggaggagccccgcgccaggc

SEQ ID NO: 26134 - RNA, 57 nt, Homo sapiens
aaggaagccaagacaaagccagacccagcgaaccaacggacccaaaaaacaaggagg

SEQ ID NO: 26135 - RNA, 64 nt, Homo sapiens
gacaagaaagcacggcaaaagaacgcagagggacacacaggaagacgaacacggaacgggcgag

SEQ ID NO: 26136 - RNA, 74 nt, Homo sapiens
aggcaggggccccaaaaccggaaaggacgcgaggacagaaacaacgaacgagcaaggaagggccaaggcagacc

SEQ ID NO: 26137 - RNA, 83 nt, Homo sapiens
aagcgcccggggggcgagcccgccgcacccgggccgcgccggcaccccgaccgccagggcccgccagcgacgcaaggacagag

SEQ ID NO: 26138 - RNA, 67 nt, Homo sapiens
gggggaccgaccgcaacagaacggacccgcgccaaggccgacagggggagcaacgcgccacgaaggg

SEQ ID NO: 26139 - RNA, 95 nt, Homo sapiens
ccgcagccccgggcacggcggaggcagcggagcccgggccacggggacggcaaaacagaacagaaaggcggagaaaaaagagggggaaaagacca

SEQ ID NO: 26140 - RNA, 53 nt, Homo sapiens
cgcgcgcgcaggcgcccagcgcgaagggaccagaacacagaagaccggccgcc

SEQ ID NO: 26141 - RNA, 73 nt, Homo sapiens
acaacagcacacgaaggaggccagcaaagaccgcaaaaaaaggagagaaacagaaaggaggacgaacagaacg

SEQ ID NO: 26142 - RNA, 74 nt, Homo sapiens
cggacaaaggaacaggaccagcaccgaacaagaggagaaaggagccggaacaaacccgggagaaccgaccagca

SEQ ID NO: 26143 - RNA, 78 nt, Homo sapiens
cgaacagcgcgacacaggaggaagcggggagagggggagagagaccccggaggacagggcgccacaggccgccaggca

SEQ ID NO: 26144 - RNA, 85 nt, Homo sapiens
gccgcagcagcagcggcagcacaggcacacagcaaagagcagcaggaccggagcagggaagggcaaacagagcgggacggcaagg

SEQ ID NO: 26145 - RNA, 76 nt, Homo sapiens
aaaaaaggaaggcaacaggaagacagggaagccgcacccaagcgaaggcagcggacaggccacgcagccacccggg

SEQ ID NO: 26146 - RNA, 75 nt, Homo sapiens
accccccaaccggcagaaacggacagaagaaaccagaggcgaaaacgaaccgagggaaaagcaggagaaggaaac

SEQ ID NO: 26147 - RNA, 55 nt, Homo sapiens
aaaaaaggcacacccgaaaccacacccaggggccgaagcacgaccgagaagcgga

SEQ ID NO: 26148 - RNA, 59 nt, Homo sapiens
caacacgaaccagagaagaaaggagaccacaggcacaaggggagcgcggccccaggaga

SEQ ID NO: 26149 - RNA, 54 nt, Homo sapiens
gagaagcaaacgaacgacagcccggcccgggagcacgggagaaaccagggcgga

SEQ ID NO: 26150 - RNA, 71 nt, Homo sapiens
gaacccagcacggaaggccaaggggggcagcagcggccgaccccagggaaagacgacgccggcccaccaag

SEQ ID NO: 26151 - RNA, 85 nt, Homo sapiens
gcagcccgggaggccgaacgggagggcgcacggaagaggcggccgggagagagacgaggacgcgcacaggaaaggacgcggaaca

SEQ ID NO: 26152 - RNA, 55 nt, Homo sapiens
ccgcgccggcgccccggagaggacggggacgggccccaggacgaggaagacaagg

SEQ ID NO: 26153 - RNA, 63 nt, Homo sapiens
aggggcggcgccgcgcggccgagagacggaaagaacaggccaagaaaagccaaagaaagcaaa

SEQ ID NO: 26154 - RNA, 77 nt, Homo sapiens
cgcgagaggaagacacccgaccgacaaaaggcacgcagcacgggggcaggggccgacccagaacgccagcgccgcaa

SEQ ID NO: 26155 - RNA, 85 nt, Homo sapiens
ggaggaagagggggcacccagcacacccaagacgcggcaacagccagggaccgacccagccccccagcagacgccagaaggaagg

SEQ ID NO: 26156 - RNA, 111 nt, Homo sapiens
cacaggggcccccaccacccggaggagcagcccgccccgccgggggagacgacccccgccaggccccggagccgcagaaccaggcgaggccagcagcaagacacggccagg

SEQ ID NO: 26157 - RNA, 71 nt, Homo sapiens
gaggcgcaaaagacccaaccggaaggcacaggaacaaaacagccgcgccacggccgcggagggaacccggg

SEQ ID NO: 26158 - RNA, 80 nt, Homo sapiens
aggacacggccacaacaccaagagggaaagacaaggagccgggccgagaaaccgaaccagagaccagagaagaaacgcaa

SEQ ID NO: 26159 - RNA, 79 nt, Homo sapiens
gacacaccggagcaagaccggccaccccgaccaagcagcaggcagccagggaccgagcaacagggacagaagcaggaag

SEQ ID NO: 26160 - RNA, 69 nt, Homo sapiens
gaagcacagaggaagacagaaaacccgaaagaagaacccaacaacagacgccaaaaccagaggaacaag

SEQ ID NO: 26161 - RNA, 93 nt, Homo sapiens
agcaaaggagcagccggccacgcaagggagcgaggaacaggaggcagcccggcgccgccagcagcgcgagagcaagagcaacgcggccacgcc

SEQ ID NO: 26162 - RNA, 70 nt, Homo sapiens
cggcggaccaccggagaagcacaagcagcacacaaggaacccccgggccggaaggagccgacccgcgggc

SEQ ID NO: 26163 - RNA, 79 nt, Homo sapiens
accccacggagcccgcccccggccagagagccgagcagggacacaccaccacaaccaggacgagcaacacgggcacacg

SEQ ID NO: 26164 - RNA, 78 nt, Homo sapiens
cgacagaaccaggaagaagaagcggaggaaaacggcgaaccgaagaccaaagagcggaaacagaagccagcccccaca

SEQ ID NO: 26165 - RNA, 68 nt, Homo sapiens
gacccgcccccgggccaggcagagcagcggaggagcggacaacccagagagaaacgccagaccacagc

SEQ ID NO: 26166 - RNA, 52 nt, Homo sapiens
gcgccgaaggagcggaggaaaggaaagagaagcagcgccccccacagagccc

SEQ ID NO: 26167 - RNA, 76 nt, Homo sapiens
gaggcaagaaaggggaaccccggagaaaaggccaagaaggcagacaaaaggacagcgacagacagcaaacacagcc

SEQ ID NO: 26168 - RNA, 68 nt, Homo sapiens
ccgacgccaggcagcgcccccaaacggaaagcacagagagcaggaacaaggcagccaagcacaaggac

SEQ ID NO: 26169 - RNA, 83 nt, Homo sapiens
gcaaggggccagaggacagaggacagacacacagcgaagacgacaacaacccggccaagggcccgggacaccgggaacggccg

SEQ ID NO: 26170 - RNA, 78 nt, Homo sapiens
gcggacccccagaaaaaccacagggaaggagcaggaaaccgaggaaccgaccccaagacacgagaggcgagggacgac

SEQ ID NO: 26171 - RNA, 70 nt, Homo sapiens
gaggaaacacaagcccagacaacaggaaaaacgacgagaaccagaaggaaaaaccagaagagaaaaaaca

SEQ ID NO: 26172 - RNA, 77 nt, Homo sapiens
ggggcacgacaagagaggggcccggcaacgaaaagacagcaagaccacacccacgggcaaaggacaggagccagaac

SEQ ID NO: 26173 - RNA, 74 nt, Homo sapiens
caacaacccgaggacgaaccaccccgcgccagcagcacagcacgagcccagaggcccggaaggcgcaaaagggg

SEQ ID NO: 26174 - RNA, 55 nt, Homo sapiens
ccaccgagccaccaaggagcagcccgggccaggaccggaaccggcaggagcacga

SEQ ID NO: 26175 - RNA, 77 nt, Homo sapiens
gcgccaggagcccagcagcaaggggaagaagcgggcagggccgaagaaaaaggaacgaaccccgaaagcgccggcgg

SEQ ID NO: 26176 - RNA, 75 nt, Homo sapiens
agagggacacaacgaaaccaaacaaccaccggacaccagaagagagaaggccaggccagacggcaaaaaggcaga

SEQ ID NO: 26177 - RNA, 54 nt, Homo sapiens
aaaagagacggagcaagagaacgcaagagacgacaacggcaagcggagaagagc

SEQ ID NO: 26178 - RNA, 66 nt, Homo sapiens
cagggaaacacaagcagaaacagacaggaccacgcaaagccagccgccgcgccaagaaacgcgcgg

SEQ ID NO: 26179 - RNA, 74 nt, Homo sapiens
ccgccggagcgacaaggcccacaaccgaaagcaaaccccacgagaacaaagcacggcagaaacggaaaaaaacc

SEQ ID NO: 26180 - RNA, 42 nt, Homo sapiens
cggcgacgccggagcggggggggggcgcagcaggcccagcac

SEQ ID NO: 26181 - RNA, 77 nt, Homo sapiens
acagaacgcagccaacagcagcaaagcaagcagcagccagcagccacaaagcggcggagaaaccaccacaaacacga

SEQ ID NO: 26182 - RNA, 52 nt, Homo sapiens
cgacaccgccggggccaaggcccaacaaaaacagaagaacaccagcccgcaa

SEQ ID NO: 26183 - RNA, 79 nt, Homo sapiens
ggcgcagcacgaagcagcccagaggagaaaccgccgcccagaagacagaagacgaccccgacgcaggccaggagccgcg

SEQ ID NO: 26184 - RNA, 37 nt, Homo sapiens
acaacccaggcaaccaacagaaacaaaacacacccca

SEQ ID NO: 26185 - RNA, 107 nt, Homo sapiens
aagcaacacacggcagaagcagaacgccgaaaacaacacaacagacaggccagaaagaagacaccgcaagaaacaaagccgaggaaagcgacaaagaggaccacaaa

SEQ ID NO: 26186 - RNA, 71 nt, Homo sapiens
cacgaggccggccccgcccaccaagagaagcagcggccccagccaccgggccgcaaggccaggcgcgcaga

SEQ ID NO: 26187 - RNA, 71 nt, Homo sapiens
agcccaacaacacccagacagccagacaagaccccaacgaagggccagaaaagggagaggacaaaacgcac

SEQ ID NO: 26188 - RNA, 79 nt, Homo sapiens
cacccagccacagggacccacgccgaccgccaggacgcaacaccgcagggcccagacacgcacgcccgcccgcccacgc

SEQ ID NO: 26189 - RNA, 90 nt, Homo sapiens
cccccccccccgccacgggggcgacccgcgccgccagggcagcagccagcaagcagacacgcagaaagcaaacaaaggcaaagacgcggg

SEQ ID NO: 26190 - RNA, 78 nt, Homo sapiens
ggacaggaacaggggccccggaaccgcagaccaacgccggccgagagaaaaggggacgccacggacaccgggaccgag

SEQ ID NO: 26191 - RNA, 71 nt, Homo sapiens
cgggaacacaggcccaggaaggaaaggaggagaaggaggaccgcacccagagcaagccggagaaccacacg

SEQ ID NO: 26192 - RNA, 58 nt, Homo sapiens
accacagcaagacgccgggaccccggaaaccagaaaggcccggagcaagcaccaaggc

SEQ ID NO: 26193 - RNA, 64 nt, Homo sapiens
gagacgcagagcacaggaaacggaggagcaacccgaaacgagagcccgaaaacgaccaggaagg

SEQ ID NO: 26194 - RNA, 65 nt, Homo sapiens
agagaaaaggagaaagggaacaagaggacccccaaccaaggaaaaagccagcgcagccaagcaga

SEQ ID NO: 26195 - RNA, 72 nt, Homo sapiens
gagagggcggcaggaaaggaagacaggagaaagaagacccggagaagagggcccccccgaggaggacacgaa

SEQ ID NO: 26196 - RNA, 65 nt, Homo sapiens
agcagcagccccgacagccacggaacaggccaggagggccgagggccacacggggccacagccca

SEQ ID NO: 26197 - RNA, 74 nt, Homo sapiens
cgccggccgccggccgcgcgggggggaaacccagacgacaaggaaggccaagggacccacgaccaaccaagaaa

SEQ ID NO: 26198 - RNA, 82 nt, Homo sapiens
gaggaccgaccccagcccacgggcacgcagaaggacaagcaggagacgccagggggaggaagcaggccgccaagaaagaaga

SEQ ID NO: 26199 - RNA, 76 nt, Homo sapiens
caacgggggcacgaagggggacacaggcgagaccgaacacaaccccagagccggcagcgggccccccgccgcggcc

SEQ ID NO: 26200 - RNA, 63 nt, Homo sapiens
gcagggcgccaaagcgagagagggaagcgcccggccgaggccccgggggccgcggcccggccc

SEQ ID NO: 26201 - RNA, 72 nt, Homo sapiens
caggaccggcaggagagacgggagcccgacacaggagccccggcaagcagcagcaaaccggacccaggagcc

SEQ ID NO: 26202 - RNA, 80 nt, Homo sapiens
gcgaggaccagaccagccgcaagagcaagaaccaagccacacaaacgcgccaggaaggagagaaacggaaaaaaagacaa

SEQ ID NO: 26203 - RNA, 39 nt, Homo sapiens
gagcggccgcgggcgacgggccgagaaaacaccagcacg

SEQ ID NO: 26204 - RNA, 73 nt, Homo sapiens
ggcaaaaccagggggacgacaaagggacacccacaggcgcacagaaccgcacggccaagcccacacagaggaa

SEQ ID NO: 26205 - RNA, 52 nt, Homo sapiens
cggaaacagaacaacgcaaagcaaaccagggcagcgcagacaagggcgaacg

SEQ ID NO: 26206 - RNA, 60 nt, Homo sapiens
aagacaagcggcggggccccgggaacaagccgcggggaagcaaaggccagccaccacaga

SEQ ID NO: 26207 - RNA, 78 nt, Homo sapiens
gcccacaagcagacacaccggacaagaccgacgaacacacgagaccggcgggggagccaagggagagggaagaaaaca

SEQ ID NO: 26208 - RNA, 74 nt, Homo sapiens
gaccgggaagggaaaacggaagaagcacaccccaccgaaccaggccccgacgagaaggcaccccgaagagccag

SEQ ID NO: 26209 - RNA, 52 nt, Homo sapiens
aacagcaggcagaaaaaagccggacccgacggggaaccaaggccggaggcgg

SEQ ID NO: 26210 - RNA, 78 nt, Homo sapiens
aagaagaggcggccagaccccagaccaggggggagcaggaccagcagggcccgaagacaccccgccaaaaggacagag

SEQ ID NO: 26211 - RNA, 106 nt, Homo sapiens
cgaaaggaccaagacccagaacaccaagaaaggacaagagacggaaacccaaagagaggcacacacaacgaccaagccaaggaccagccaaagaaagcagacccgc

SEQ ID NO: 26212 - RNA, 44 nt, Homo sapiens
agcaggagcggaggccggcggaagaaccacgaggccgaaagcac

SEQ ID NO: 26213 - RNA, 66 nt, Homo sapiens
cgcgcccgggagagcaagggcaaggccagagaaggcgggagaaagacacgaaccacagaacgcaac

SEQ ID NO: 26214 - RNA, 77 nt, Homo sapiens
acaggggggggcaaacccgagagaacggcgcacagagcagaggacgagaccggccggagcggagggggcgagcacag

SEQ ID NO: 26215 - RNA, 77 nt, Homo sapiens
acaaggccaagaccgccagcaaaggaagacgaggcacccagaggcgaaaaccggcgccaagcacggggacagcgagg

SEQ ID NO: 26216 - RNA, 82 nt, Homo sapiens
ggaaagagcgcccaacggccacagagcaccaaccccaagccaggcgcgcaggaagaaaagaaggccggaccacggaaagacc

SEQ ID NO: 26217 - RNA, 85 nt, Homo sapiens
cgggaggcgcccacccccaccaccgaccgcgcacaaagggacgcacaccgagacgaacacagaacagcacgaccagaggggaagc

SEQ ID NO: 26218 - RNA, 80 nt, Homo sapiens
cgcgcaggcggcggcggcggcggcggcgggcccgagcggaagccggaggcagcacggcaggagacgaggagaggacagca

SEQ ID NO: 26219 - RNA, 64 nt, Homo sapiens
gcagaaaaaacgcccagagccgagccacaagcccacgagagcagcccgagccaaaaagcaccac

SEQ ID NO: 26220 - RNA, 72 nt, Homo sapiens
gaaaacgcaccagaaaccagcaccccaagacgaccggaaaccgggccagcagaagagaacgcaacgaagaca

SEQ ID NO: 26221 - RNA, 81 nt, Homo sapiens
ccggagccgccagagccaaggccaagccccaagcagcaccccaagcagggggaggacaaggcacggcaacagaggaccacg

SEQ ID NO: 26222 - RNA, 77 nt, Homo sapiens
cagaccagaacaaggccgggaaaaagcgggcccggaaagaaaccccacaaccccggaaaggcccacacccaccaaga

SEQ ID NO: 26223 - RNA, 56 nt, Homo sapiens
accccgggaggcgaggacggccgccagaaaagcaggacggaaaccaccgggaaacg

SEQ ID NO: 26224 - RNA, 73 nt, Homo sapiens
gaagacgcccgaaccggcacaagcagggacagagaaccggcaaacgacagaggagcagggacggggggaaaag

SEQ ID NO: 26225 - RNA, 66 nt, Homo sapiens
gacagagaggagggagaacaagcaacggcgggcagcgccaggaggaacccaaaggcacacggccac

SEQ ID NO: 26226 - RNA, 77 nt, Homo sapiens
gcgagggagcgccaagggcacgggaagaccggaggggacgaagaacggaaggccggcccacagcccaaaaagaaaca

SEQ ID NO: 26227 - RNA, 84 nt, Homo sapiens
cccaggacgagaacagcaacagagcacaagacccagaaaaaaaggagaaagaagagaagaagaaaacaaccagcaggaaagaca

SEQ ID NO: 26228 - RNA, 84 nt, Homo sapiens
ggacgccagcaggccagccggccccgcccacacgaccccgggggagcggcagcaggagacggaagcggaagcacacgccagacg

SEQ ID NO: 26229 - RNA, 75 nt, Homo sapiens
aaaccaagcgcgggggaagaagagaaagaaaaccaggagagcgacgcaggggaggacagggaacggcgaggagcc

SEQ ID NO: 26230 - RNA, 65 nt, Homo sapiens
agccggaggaagaagagcggaccgcgcccaggcgagaaacggaggagagaggacaggcaaagaaa

SEQ ID NO: 26231 - RNA, 106 nt, Homo sapiens
agcggaagcagcgacgaccggggcagaaagccaaccaccaaaacccagcggaagagcaacaaggaccagaagaaccagcagcagaaaaaacagcagacaaacgcaa

SEQ ID NO: 26232 - RNA, 87 nt, Homo sapiens
gagcccgagcccgagcccgagcccgagcccgaacgcaagccgggagcgcggagcccggcaggcaaaagacgaccaggagacacaaca

SEQ ID NO: 26233 - RNA, 63 nt, Homo sapiens
gaccacagaagaaggaagggccacccaggacaggggcacccagagcccaaaaggcagagcgag

SEQ ID NO: 26234 - RNA, 81 nt, Homo sapiens
gcccgacaccgcgggccgccagacgggaagggcccaaacccccggacaaacgccgcccgggcgccagagcccccagagacc

SEQ ID NO: 26235 - RNA, 70 nt, Homo sapiens
cgacaccccaaaaagaccaggggcgggaaacgcccgagacaaacggaaggaggaagcaggaaccacgcca

SEQ ID NO: 26236 - RNA, 55 nt, Homo sapiens
cgcgcgcaggccggggagcgccagaaccccggggccaacagcaccaccggccacc

SEQ ID NO: 26237 - RNA, 42 nt, Homo sapiens
gggggggagccccgagagcaagggagacaccagaagaagccg

SEQ ID NO: 26238 - RNA, 74 nt, Homo sapiens
gaaagccagcagaggaaaaaagaacacagggagcgagaacgggccaggcaggaaggcaagcccaaagagcacag

SEQ ID NO: 26239 - RNA, 42 nt, Homo sapiens
cccgaggagcgcgggcgccgagaagacgaccccgacgcaggc

SEQ ID NO: 26240 - RNA, 65 nt, Homo sapiens
gagagaggcgcagaaggaccgggagcacagccgccgacccccacggcccacgaagcggcaacggc

SEQ ID NO: 26241 - RNA, 55 nt, Homo sapiens
gggagagagccaagcaaccaagccaacacaaaccgacccagcagaccacgggagg

SEQ ID NO: 26242 - RNA, 65 nt, Homo sapiens
ccgagggaggaagcaaacaccagagaggaaagccaggccagaagaaggaaggccggggaggggac

SEQ ID NO: 26243 - RNA, 84 nt, Homo sapiens
gagcaaagaagagcccgaacaaacaaacacccagaaacaagaggcccagcggagaacagaagcaagagcagaggccaggccgcc

SEQ ID NO: 26244 - RNA, 77 nt, Homo sapiens
gaacaaaaacagggccgagagaacagcagaagggcagacacaaggaacagccagccaggagaaaaacgaacccaaca

SEQ ID NO: 26245 - RNA, 83 nt, Homo sapiens
cggcaccaaacggcccgcgggcgggcggagacccagaggcccggcaagggcagcaggaaagacgagaccgggcacgccaacaa

SEQ ID NO: 26246 - RNA, 77 nt, Homo sapiens
agagcggccggagccgcggcggccgcggagaggccaacaggaggggagaagcggcgggagacaggccggccgaacgc

SEQ ID NO: 26247 - RNA, 89 nt, Homo sapiens
gcgggagcggacggcgagcgcgagcggcgcgagaaagggaccgcaaagcggagcggcaagcccgaacaaggagggaagaagaagaggac

SEQ ID NO: 26248 - RNA, 59 nt, Homo sapiens
cacgaaaaccggagaggagggaccaagaaaggcccagggaccaaagcccggacaaggcc

SEQ ID NO: 26249 - RNA, 75 nt, Homo sapiens
cccgcccgccccgccggcccaccccggggagcaacaggcgccaccccaagcaccggcacagcaaaagaagggaaa

SEQ ID NO: 26250 - RNA, 76 nt, Homo sapiens
cccagcgcagggggaaccagagaagagacaacagcccaagacacagcgccaggagaggcgcggggccgggcgggcc

SEQ ID NO: 26251 - RNA, 85 nt, Homo sapiens
ccggcggcccagcgccccggaggaaggaagaagaggacgccgggcgcgcaggccaagagacggagcagcagagcacccagaagca

SEQ ID NO: 26252 - RNA, 49 nt, Homo sapiens
gggagagaagcacgagaccgagacaccagccccagccgaaaagcaagaa

SEQ ID NO: 26253 - RNA, 77 nt, Homo sapiens
gcaccacccccccagggcggggcaggagcgacgccgacaaaggaggaaaagaagagaccagcgcagcagacaaacag

SEQ ID NO: 26254 - RNA, 79 nt, Homo sapiens
cacggcacaggcaccagcccgggcagcgagcgcaaaagcaaaagcgacaacccagcggccgcgcccacagcggccccag

SEQ ID NO: 26255 - RNA, 57 nt, Homo sapiens
acagcgcgagccaggacccggaagggccgggccggggcacgggcccacggcccccca

SEQ ID NO: 26256 - RNA, 92 nt, Homo sapiens
acaaaagaagagagacacaaagagcacaaaaaagcggaaaaacgagcggcccgaaggacccgcaacaggcacgcagcagcacacgagaagcc

SEQ ID NO: 26257 - RNA, 53 nt, Homo sapiens
acgcggggagagggaaccgcaggacgcagggccccagagacacaagcagcgag

SEQ ID NO: 26258 - RNA, 83 nt, Homo sapiens
ccgcagcgacgcggcggcaagacggggcgggggccggaccaagggaaaagaaagggaaccagacagaagccaggaggaaagaa

SEQ ID NO: 26259 - RNA, 85 nt, Homo sapiens
ggacgagcagcgaacgaggcaagcagcgccgagcccaggcaagagcccgcgagaagaagggcagccagcccgcccccgaggacag

SEQ ID NO: 26260 - RNA, 59 nt, Homo sapiens
ggcaaggggccaccaggaggccagggggcgccagcggcgcagcaccgcccgcggccaag

SEQ ID NO: 26261 - RNA, 102 nt, Homo sapiens
ggagggcgaaaaaaaggaagacacaagaaacagcccaagcggagcagacagcgcacgaaacacacaaagaaccaccaccgggaggaagccagacaaccccag

SEQ ID NO: 26262 - RNA, 74 nt, Homo sapiens
cggccccccacccgacccggcaccacacgcagaacgggcggacgggcgcccagccagagaaagcaagagcgcgc

SEQ ID NO: 26263 - RNA, 54 nt, Homo sapiens
cacacaacccaggcaaccaacagggcacgagacaaggaaagcacaaagagccag

SEQ ID NO: 26264 - RNA, 73 nt, Homo sapiens
aacccaaaacagggagggccccgacagcggaaccaacaagggcaaacaagggagccaggaacaggaaaaggga

SEQ ID NO: 26265 - RNA, 74 nt, Homo sapiens
gcggggagcccgagagaacccccagagcacaccaccggagaacaccgcaaggaggcagaggcaacagaacaaac

SEQ ID NO: 26266 - RNA, 87 nt, Homo sapiens
agacagccgaaggcaacggcagagagagcgacgcgcagcgccgccagggggccaggaaccagaagacgaggaagagaaggagccccc

SEQ ID NO: 26267 - RNA, 86 nt, Homo sapiens
gaaaagccgaaggcaccagacaggccggagcccaacagaaagcccagccccccccaccgccaccaccaccaccaccgccaccgcca

SEQ ID NO: 26268 - RNA, 79 nt, Homo sapiens
ggcccaaggggcccccgggcaccccggaccgcgcagccaccgcggcccccgcggacaaagggagccaaaggaaaaaaga

SEQ ID NO: 26269 - RNA, 77 nt, Homo sapiens
accgcgacaccccaacaaacaccagcgcgggcaccgacgagagggcgcaccgcgccggagcccgaccgcggggaccc

SEQ ID NO: 26270 - RNA, 67 nt, Homo sapiens
cggcggccccgggaccccgcccggcagccggaaacacaaagaagacaccagaagggccagcaccacg

SEQ ID NO: 26271 - RNA, 80 nt, Homo sapiens
caagcggggagcgcccgcgacagaggagggaggaaaacaaccgagggcagagacggaaaccagaacgaaaacccgcccaa

SEQ ID NO: 26272 - RNA, 77 nt, Homo sapiens
gcggccaagacccaccgcaaggagaggagccaagcccaacgggacgggaaaacggccacagccaacgacgcagcaga

SEQ ID NO: 26273 - RNA, 79 nt, Homo sapiens
aggccagggcgacccagcccccgcccgcagccggacgacacgaccgccgcccgcgggccgcaggagggaagcgcacgga

SEQ ID NO: 26274 - RNA, 83 nt, Homo sapiens
gcgggggacgcggggccagcccaggcagcagcaaggacaagaggagaaaagccagcaagcacaagcccgaacgagcagggagg

SEQ ID NO: 26275 - RNA, 61 nt, Homo sapiens
gccacacaacgcccgaccgcggacacgcagggagcgaccaagggaccaggaggagaagcaa

SEQ ID NO: 26276 - RNA, 71 nt, Homo sapiens
cagcgccacggcgggccgcgggaggacaccacccacaggaaacagcaaacgacacagaagaacagagccag

SEQ ID NO: 26277 - RNA, 74 nt, Homo sapiens
ggcagaggagggaaacggaccgccgggaagggggcacaccaggacagagcaaacagaaggggacccagaagcca

SEQ ID NO: 26278 - RNA, 54 nt, Homo sapiens
ggccaggaacaaccgcggagccagcgcccggcaaggagcgagcgggagacaccg

SEQ ID NO: 26279 - RNA, 74 nt, Homo sapiens
gggagggaggaaggggcaagagggggaaagcacaggggggggggggcgacgacgacagccaggagaagggagag

SEQ ID NO: 26280 - RNA, 60 nt, Homo sapiens
acacacccagcagcggccgaagaaaccaaaagcggagccccaccccaaacagccagccag

SEQ ID NO: 26281 - RNA, 118 nt, Homo sapiens
gcggaccaccggcggggaggagaccaggcgacaccgcgacaccccaacaaacaccagcgcgggcgaagacagggggaccggccacggcaacccgccccaggcaagcaacagcccagcc

SEQ ID NO: 26282 - RNA, 73 nt, Homo sapiens
gccagaggcgaggcagggaggacccacccccgggggaaaagaacgagagagcgccgaaaagcccagaaaacgc

SEQ ID NO: 26283 - RNA, 82 nt, Homo sapiens
agaggcgggccacaaagaaagacgccgagccgggccgccccccaccaccggcccacccccacgggcccgcaccgcggacccg

SEQ ID NO: 26284 - RNA, 71 nt, Homo sapiens
gccagcggccaggccaaaggagagggagaaggagcagaacaggaagaaacaagcccaggacgaagaaaaca

SEQ ID NO: 26285 - RNA, 63 nt, Homo sapiens
cccgcaccaggaggaggacgacagcacggccagccaggaaagcgggagcgcgggagcaaagga

SEQ ID NO: 26286 - RNA, 73 nt, Homo sapiens
accccacaggaccccagagcgacagcccgggacaccaagaaagaaccaaggcaccagcagaacagacaccccc

SEQ ID NO: 26287 - RNA, 76 nt, Homo sapiens
ggagagccgggggagcgcccggagggagcgcgccggagcggcgaaacccgggagaagacagaggagccagaccaag

SEQ ID NO: 26288 - RNA, 77 nt, Homo sapiens
gagcaggcgccgccccagcccgcgaacgggcggagaacggaaaagcaccaggaagcagagaggaccgcagaagggaa

SEQ ID NO: 26289 - RNA, 73 nt, Homo sapiens
aaaaaccagagcaaaacacacgaacgcgagaaagcaaacccagggggagaggcaccagcaacagaccaaccgc

SEQ ID NO: 26290 - RNA, 57 nt, Homo sapiens
acagaccgcggagacgcgcacaggacgggacaagagaggaccaaagaggagcagccg

SEQ ID NO: 26291 - RNA, 79 nt, Homo sapiens
cgaccgggaagaagcgaaaaggagcacgccaggcgaccacgagcccccaggccgagagaaagaccacagcaagaccacg

SEQ ID NO: 26292 - RNA, 80 nt, Homo sapiens
ccgccgcccagaacagaacgggccgaaaccggaagaccagccccgggggagcccaggacaccacgaaaaggaaggccaag

SEQ ID NO: 26293 - RNA, 82 nt, Homo sapiens
accggggaccccagcggacacggccacgggcagggcccgcgggaaagacagcaccaggcccgaagcagaaaacagagggaaa

SEQ ID NO: 26294 - RNA, 83 nt, Homo sapiens
gcggcgcggccgcgccagacagggcgcccgcgccggcagaggaggcgagcacccgccagggagaggaacccccgcgcacccag

SEQ ID NO: 26295 - RNA, 79 nt, Homo sapiens
aagcgggagcccgcgggagacaccacgcaaacaaaagaaaaccaaaaagcgaaaaaccgcaagcaacagcggaggacaa

SEQ ID NO: 26296 - RNA, 50 nt, Homo sapiens
caaggccggcagcgaggagaggagggcaagcgaagagcaggcaccacaag

SEQ ID NO: 26297 - RNA, 78 nt, Homo sapiens
caaagggcaaccagggaaacaggagaggggccgggcacagcacgcccgcggccccagaaccccaagcagacgccgcga

SEQ ID NO: 26298 - RNA, 92 nt, Homo sapiens
agcagcgcaggccggaacaacccaacaggcccgccagcacagagaccagaagacaacaaaaacccagccgcgggccaaggagggcaaaccaa

SEQ ID NO: 26299 - RNA, 86 nt, Homo sapiens
cgcgccagcaggaggcccacaagcagacacaccggacaagaccgacgaacacacgagaccggcacgcagcacgggggcaggggccg

SEQ ID NO: 26300 - RNA, 83 nt, Homo sapiens
caaaggccgggcgcagaacccccagaccacacgggagaacagagacccaccaagaaaccagaacccggacaagggaagggccc

SEQ ID NO: 26301 - RNA, 54 nt, Homo sapiens
aggaagccagcaagacggagcccgaggaaagcagaaaggaacagagacagaccc

SEQ ID NO: 26302 - RNA, 69 nt, Homo sapiens
ggaggaagcagcagcgaacccacccggccggcaccaccgccacggagccacacacacagaacgcacacc

SEQ ID NO: 26303 - RNA, 77 nt, Homo sapiens
acacggacacggcgaccaggcacgccccaaggcagcaggggacaagaaacgaaggaggcccaaccacaaaaggagcc

SEQ ID NO: 26304 - RNA, 74 nt, Homo sapiens
cagaaggaacaaaagaagccaggacccagccgcaagcaagaggccaggacccgccaggacacaaaggcacccgc

SEQ ID NO: 26305 - RNA, 72 nt, Homo sapiens
cgacaacccccagaaagccaagccggaaccgcaggaggcacacccgccagccagcggcgcccggggcaacca

SEQ ID NO: 26306 - RNA, 82 nt, Homo sapiens
agccggggcccggggcgggccggccgcgccgggagcgccaaccccccagaacaccggaaacgccaggccacaagggagcaaa

SEQ ID NO: 26307 - RNA, 73 nt, Homo sapiens
aaaggagcagaccggacgaggacagcgacagcagacaagcaacacaaggggaagaccggaaagaagccaaaga

SEQ ID NO: 26308 - RNA, 60 nt, Homo sapiens
ccccggcccacaggggggggcaaacccgagagaacggggggaaacccgcccagggcggga

SEQ ID NO: 26309 - RNA, 69 nt, Homo sapiens
aacaggaagaggaacccacgaaaaggagggagccaaagggccagaagaggaccacagcaaaaaaaaaga

SEQ ID NO: 26310 - RNA, 71 nt, Homo sapiens
gcagcaccgcggccgcagacccccaggcaaaccgccccgcagcaccacccggcccggcaaccaggaaagca

SEQ ID NO: 26311 - RNA, 78 nt, Homo sapiens
gccccacgccgaacaagaaaacaagcaaccacccagacagacgcaaacaacagcggacagaacagagaaggggaagac

SEQ ID NO: 26312 - RNA, 66 nt, Homo sapiens
cacggacggcacagcccgccgaacccgaaaggaggcgagaacgcggacaagcaaacaaagaggaaa

SEQ ID NO: 26313 - RNA, 53 nt, Homo sapiens
acgcaccaggccaaagaaagagaaggaagcccagaggcacggggcagaacacc

SEQ ID NO: 26314 - RNA, 40 nt, Homo sapiens
ggcagaggaccaggacgcgccagaacggagcagaaagaag

SEQ ID NO: 26315 - RNA, 68 nt, Homo sapiens
gccccagcagcaggaagacaacaggcacaaagagagaaggaacacccacagggcagacagagaaagaa

SEQ ID NO: 26316 - RNA, 74 nt, Homo sapiens
agaccaacagaagaaaaaacagcccaaaaacaaggaggacccggaaaaagggagacacacaaacgagccagaga

SEQ ID NO: 26317 - RNA, 75 nt, Homo sapiens
gagcggaccagagcccccgagaagcgaagaggacaagaggaaaaacagcgagggaaaagcagcaaggaaacacca

SEQ ID NO: 26318 - RNA, 74 nt, Homo sapiens
gagccggaagagaccagaagaacaaagacacaggcaccaaaaggcaggggaaccagaagaggccaaccagcacg

SEQ ID NO: 26319 - RNA, 51 nt, Homo sapiens
acgaagaaggcagcaagaaaaagccagaaggagagccccaggggcagaaag

SEQ ID NO: 26320 - RNA, 61 nt, Homo sapiens
cgaagcgaccaaagcgcacggcagcgagaggaggaggaccaccaacccagcagccgagaag

SEQ ID NO: 26321 - RNA, 75 nt, Homo sapiens
cgccacgaggacacggccccgacgggcccaaacccggaaacaggggcagggggaacagagggggcggagcccgga

SEQ ID NO: 26322 - RNA, 61 nt, Homo sapiens
caccacgaggggggacgagacacaaggacagcggccagagagccaacgggccggcaagcca

SEQ ID NO: 26323 - RNA, 77 nt, Homo sapiens
gaccggaaacgcccaggaaaacgagaaagaaagaagaggaaacgcccgcagaagaaggaagaggaacaagcaaaaag

SEQ ID NO: 26324 - RNA, 77 nt, Homo sapiens
gaaagaaagccagagaacacaagaacagagggacgaccagaaacacagccggacagcaaggaccagcaaaaggaccg

SEQ ID NO: 26325 - RNA, 83 nt, Homo sapiens
gaaaaaagcgcagaggagcagaccgcaaagcgccggaagaagcgaacacagaagagaacccgaacacagcaggagcaagcggg

SEQ ID NO: 26326 - RNA, 36 nt, Homo sapiens
gccagaagagaaccacaagagcggcacaccacacac

SEQ ID NO: 26327 - RNA, 78 nt, Homo sapiens
gccgccccaccggacccgcaggggccaagcgacagagaagcgacggaacagaaggagggagaagaaaaggacccaaag

SEQ ID NO: 26328 - RNA, 92 nt, Homo sapiens
caaacaccacgggggggagaacgccagaaggagcacgacccgagggaaagcacaagaaagggccgcccaggaccagagaccggaggcacaac

SEQ ID NO: 26329 - RNA, 82 nt, Homo sapiens
cggggccggcgccggcgccgacaccacgcgcaccggagccaagcggccggggcccccggagggccacaagccagagcgcccc

SEQ ID NO: 26330 - RNA, 89 nt, Homo sapiens
cgcgcgcccgcccgcgccgccgccggcacccccccgggcggagaacggaaaagcaccaggaagcagagaggaccgcagaagggaaggag

SEQ ID NO: 26331 - RNA, 66 nt, Homo sapiens
ggaagaaccaacgggaggcaagcagacaagacggaggagcggacgccgccagccaccggcgcgaag

SEQ ID NO: 26332 - RNA, 74 nt, Homo sapiens
ggaccgagaaccgaacaccaagcacccgcggccaaggccaaacgagcagcggcaggagggagagaaaaagcagg

SEQ ID NO: 26333 - RNA, 69 nt, Homo sapiens
ggacgccggggccgggccaggagcagagaccaggcaggaccaagagaaaggaaaaccacacgagaggga

SEQ ID NO: 26334 - RNA, 78 nt, Homo sapiens
gacgcagggcgcccccggagagaagagacgaggaggaggggagaccgcggcaggacacgaggacagcaacggcgcaca

SEQ ID NO: 26335 - RNA, 53 nt, Homo sapiens
cgcagggcgcccccgaaggagcgagggagggccgaggggaagaacagacacaa

SEQ ID NO: 26336 - RNA, 73 nt, Homo sapiens
cacacgcagaacgggcggacgggcgcccagccaggaagcgacacaaacccgccgggcgggcaaccaagaacac

SEQ ID NO: 26337 - RNA, 40 nt, Homo sapiens
gcggagacgcacaggcccggagcaccacgccgacgccagc

SEQ ID NO: 26338 - RNA, 69 nt, Homo sapiens
agcccacccaaaaggaaagccagacagacccagccccgccacccggagcacagcggaaacaaaaacaca

SEQ ID NO: 26339 - RNA, 76 nt, Homo sapiens
gcggcgcggccacggccaggcaggacccaaagacaggaccacgcaccagcagagaaggaaagcaaaccgaagcagg

SEQ ID NO: 26340 - RNA, 74 nt, Homo sapiens
cccacgacacaagccggcaaaggaccccaccacagacagccagaccacccccccaagcacaaagagccaagcgg

SEQ ID NO: 26341 - RNA, 44 nt, Homo sapiens
cgcagcagcagcagcgagaaggcaacgcaaccaccaccgaggcc

SEQ ID NO: 26342 - RNA, 87 nt, Homo sapiens
ggacccagcgccggcccccaggcgaagaagcgcagccgcaccggccaagggcccccgcggacccccagccccgggcccaggagcccg

SEQ ID NO: 26343 - RNA, 70 nt, Homo sapiens
cagaggagagaacacgccacaacggcagggggaccccaagcagaaaaaagaggaccaacacgaaaaacac

SEQ ID NO: 26344 - RNA, 83 nt, Homo sapiens
aagggcaggaagaccagggcgagcggagcggcagcgcgcaggccaaccccaccggaggcccgggaacgccaagaccggaagaa

SEQ ID NO: 26345 - RNA, 53 nt, Homo sapiens
agagcccgcgaacaagacaagggggcgaggaagagacaggcgggggagaagaa

SEQ ID NO: 26346 - RNA, 81 nt, Homo sapiens
ccccggacgggaaggcaccaagacggacagcgcaggagaagagggccacaagcgaaggcaaaaccaaacaccccagcccac

SEQ ID NO: 26347 - RNA, 61 nt, Homo sapiens
ccagagcgaggacgccggcaggggcggaagaacgggaagagggacaacagaagacggacga

SEQ ID NO: 26348 - RNA, 77 nt, Homo sapiens
gccgcccccggcgccgcgcgggcccgcagggagcgccgccagcagggcaccagggcaggggacggaggccaaacacg

SEQ ID NO: 26349 - RNA, 77 nt, Homo sapiens
aaaggccagcccacaaccgccaccacccaggagcccaaggcaagagacggcgacaaggcaagccagaagaaaccggc

SEQ ID NO: 26350 - RNA, 79 nt, Homo sapiens
gcgagaggaggccgccagcagaggcggagcccgcagaccgcagaaggccggagacaccagcaggaggagccaggaggag

SEQ ID NO: 26351 - RNA, 52 nt, Homo sapiens
gccaaaaaggaggagaaccgggaccagaagaggagcggcagggggcccggga

SEQ ID NO: 26352 - RNA, 72 nt, Homo sapiens
caagccaaggagaacccagcccgacggacccagagacggaacaagaaagccagcaccacggaggaggagagg

SEQ ID NO: 26353 - RNA, 32 nt, Homo sapiens
gaagcaggaaagggaagcaagacgaacagcaa

SEQ ID NO: 26354 - RNA, 104 nt, Homo sapiens
aggagagggcagacggacaagagcgcggaacaggacgccccgacgcgggccaggcacgacaccgcaacgacacagcagcgaagcgccggagaacgcacgggacg

SEQ ID NO: 26355 - RNA, 75 nt, Homo sapiens
cggagcggggacccaggagccggccagcgcgccggagccgccgaggggacaccagccaggagagaaccagaccgg

SEQ ID NO: 26356 - RNA, 91 nt, Homo sapiens
ggcgaggcggcggcgcccggagggcagcgaggcgaagcgcgaaagaggcagaagaagggggagagccaaagaagggcccaacaagaacaag

SEQ ID NO: 26357 - RNA, 68 nt, Homo sapiens
gcaaaaaccacagggggaagacgagagagagagcaagaaggccacggccaacagccgaaaacagcaag

SEQ ID NO: 26358 - RNA, 72 nt, Homo sapiens
gacagcgggaaaccgagagcaagcaagccagaagaaaagagaacacacacggagagcaccacgaggaagaca

SEQ ID NO: 26359 - RNA, 66 nt, Homo sapiens
aggaaagccagacaccaaggaagaaaccaaacgaaacacaacgaccaacgggaagcggaaaaagaa

SEQ ID NO: 26360 - RNA, 69 nt, Homo sapiens
aagaaggaagggaggacaccgcgacagaaccaggcgacacagccccaacgcggaccgagaaacggacac

SEQ ID NO: 26361 - RNA, 66 nt, Homo sapiens
aagcaaccaaaaggaagacgggaacccggcgcaaggggaaagaaccccgggagcgaagaagcggaa

SEQ ID NO: 26362 - RNA, 86 nt, Homo sapiens
caagaccaaggcaacaaggacaacaagagacgggacaagacagggcaaaggacagaccaggaacgcgcagaaaacaaaggcaaggc

SEQ ID NO: 26363 - RNA, 83 nt, Homo sapiens
aaacccccaaaccgacagccccaaagccggaggcgccacgagaacccaagaagccaagaacagcaaagggacgcaaagagcgc

SEQ ID NO: 26364 - RNA, 53 nt, Homo sapiens
cacagcgacagcacaagaagcaaacgaacacaagagacagggaacaccagacc

SEQ ID NO: 26365 - RNA, 70 nt, Homo sapiens
acaccgggagggccagacagcaaggaaagagcgcccaaaacagcccaagcaagcgggagggacaggagaa

SEQ ID NO: 26366 - RNA, 74 nt, Homo sapiens
acaggcccgggccaaaacagcaacccaaacacagaagggaaggagcagacagcaagaaccgacccccgccccag

SEQ ID NO: 26367 - RNA, 74 nt, Homo sapiens
cacccccggcgggcccgaggcggcgagagaggcaggcggagccgaccgggccaggggagagcccggaaaaccaa

SEQ ID NO: 26368 - RNA, 71 nt, Homo sapiens
gcaccccaaacgcgcaacaaccagaggagcacgagcgcaggagcgccgggaagaccggaggagaacaacac

SEQ ID NO: 26369 - RNA, 74 nt, Homo sapiens
ccaccgcagcagcacccgacaggacccaaagacaggaccacgcaccagcagagaaggaaagcaaaccgaagcag

SEQ ID NO: 26370 - RNA, 84 nt, Homo sapiens
accaccgccccggcccgcggggcgcgggccgccagcccggcaccgcccccccccgcgaggcgacagcgaccgaagaacagagcg

SEQ ID NO: 26371 - RNA, 75 nt, Homo sapiens
ggaagagaggaaagccaagagagggccgagaggaccgaaaggaggagcaggcgaacagggccacgaaagaacgaa

SEQ ID NO: 26372 - RNA, 83 nt, Homo sapiens
aggagcacgaaaacaaacaggagcaagaaacgagagcacaggagggagcaccaggcccacgagcccgcagagccaccagccag

SEQ ID NO: 26373 - RNA, 72 nt, Homo sapiens
ggaaaaaaaagacaaggaaacgcccgcgggacacggaaaggcagcaacaggggaagcggagggaggcaaaga

SEQ ID NO: 26374 - RNA, 75 nt, Homo sapiens
gaacgaaaggaccaacccggcaaagaaggaccaaaaagcacacacagaaaacaagccgcggcagaaacagccgag

SEQ ID NO: 26375 - RNA, 62 nt, Homo sapiens
accgcagaaggccggagacaccagcagggaggaagcccgaaggagcagacacgggccaggcc

SEQ ID NO: 26376 - RNA, 82 nt, Homo sapiens
ggaagaccgcgcaggccggagcaaaggccggaggaccagaaggacacgagggccggaacgcgggaaaacagggagaggaaaa

SEQ ID NO: 26377 - RNA, 61 nt, Homo sapiens
cgagcagagcccgcgaacaagacaagagcgccgagaacggacagacacgcgggagacgcgc

SEQ ID NO: 26378 - RNA, 83 nt, Homo sapiens
aaacgaggggagaagacggggcgaggaagacaccacccagggaaacccccggaggacaggccaggcacgaacgagacccacca

SEQ ID NO: 26379 - RNA, 77 nt, Homo sapiens
caaaggaggcaaaacaaagggccccggcacagggcaacgacacaaaaagagacaaaaacccccaaggagccaaacca

SEQ ID NO: 26380 - RNA, 69 nt, Homo sapiens
aagcaccagagaacagagaaccaagacaggcgcccagggcacaaaggggcgcgaagccggccaacggaa

SEQ ID NO: 26381 - RNA, 68 nt, Homo sapiens
gagagcggggaagggggaaaggcaccaggacaagcaaagggcagaggaaggagcagaggaggagacca

SEQ ID NO: 26382 - RNA, 51 nt, Homo sapiens
gaacgggaggcgcagaaagaggagcaagagaagaaacaacagccgcagcaa

SEQ ID NO: 26383 - RNA, 74 nt, Homo sapiens
ggcggggagcggagccaggccccgggcgcacaccacccgacgccgaaggaaggccgggcacgacaaccagccca

SEQ ID NO: 26384 - RNA, 104 nt, Homo sapiens
gagcaaaaaaagagcccgcaagaagaacagagacagcagccaaacccccagggaggggggaagacagggcccagcaccacaggacgggccgggaagccgccagc

SEQ ID NO: 26385 - RNA, 71 nt, Homo sapiens
ggccggagcgaggggcggaccgcgggcgcccacgaccaggcacaaggcacaaagcaggaggcaggaggcca

SEQ ID NO: 26386 - RNA, 68 nt, Homo sapiens
acaaaaaaaggaccccgaaaaagcaaggaacagaagccaccgcaaaaacacagcagcggacacaagcc

SEQ ID NO: 26387 - RNA, 66 nt, Homo sapiens
ggggagaggcaagcaacgagagaagcaggaaggaaaaaaaccagaagaggaccagcacaaaacagg

SEQ ID NO: 26388 - RNA, 53 nt, Homo sapiens
acccagacacacccacaacgcccaaaagcgcaggaaggaaagggacaaagagc

SEQ ID NO: 26389 - RNA, 80 nt, Homo sapiens
accgacagggaaggacgcaaaggcaaacgcgacacaagggcggaccgcaggcaaaacaagcagcagagggagaaccagaa

SEQ ID NO: 26390 - RNA, 59 nt, Homo sapiens
caccaaacgagagcagccaacggccccggaccagacgagcacagaccaaccaggcgggc

SEQ ID NO: 26391 - RNA, 68 nt, Homo sapiens
aaagaccgaccgaaccgaaccgaggcaaaagaaaggccggcagaggccgcccagacagagcacaggga

SEQ ID NO: 26392 - RNA, 72 nt, Homo sapiens
cgcagcccggagcgaccacagacggcagaacaccgcccgaggccagaacagagaaaaggaggccggacaaaa

SEQ ID NO: 26393 - RNA, 53 nt, Homo sapiens
accagccccggcaagaccgaaggcgccggccaaaagaggagaacacccacacg

SEQ ID NO: 26394 - RNA, 82 nt, Homo sapiens
gcacgaggaccccaaacagaccacccccggcgggacccggcaaagagagaggcacacgccgccgaaggccaggagcagaggc

SEQ ID NO: 26395 - RNA, 70 nt, Homo sapiens
agcaaggccaggacggacaaggagaacagaaaacaccaaaggacagagaagacgacagaaagaaaaaaga

SEQ ID NO: 26396 - RNA, 94 nt, Homo sapiens
gggacccgagccagcgccgcacaggaccggccaccgcccccgcaccgacggccagaaggacagcgagaaccccggcgcagcagcaccaggaacc

SEQ ID NO: 26397 - RNA, 73 nt, Homo sapiens
ggacaaagagcagggggggcgacccagaggagagcccaaacagacgacgcaaagacaggcaagagggacgcag

SEQ ID NO: 26398 - RNA, 74 nt, Homo sapiens
gcacaagagagagccccccacgcaacacagggagggcagccaaaagccaaaagccgagaacgacgaagacggcc

SEQ ID NO: 26399 - RNA, 107 nt, Homo sapiens
cagaaaaaccgacaagggcagcccaaggacacaaggaaagacacagggaccaagaaaggcccagggaccaaagcccggacaaggcccgagcaccaggaccgcagaag

SEQ ID NO: 26400 - RNA, 80 nt, Homo sapiens
agggagcagaggacagaaccggaccggaggcagaaacgggggagaaggaggaacacaaagaggaccagcgacaaaccaga

SEQ ID NO: 26401 - RNA, 79 nt, Homo sapiens
gaagccgaaaagcgcagcgagcggagccgccggaggaggagaaccaggaccaaagcaccagcacagaagggaagaacgc

SEQ ID NO: 26402 - RNA, 76 nt, Homo sapiens
agagcgcaggaacgcaagaagcaaagcgaaagggagaaagccaggccagcgaagacggaggaccacaccggaagcc

SEQ ID NO: 26403 - RNA, 87 nt, Homo sapiens
ccggcggcagggcaagcggcgacggaccccaaggaacacagacagaccagggaacacacgggaacccagaaaaccgacaagcgagag

SEQ ID NO: 26404 - RNA, 76 nt, Homo sapiens
agcaagggacccagcaggaaacagggaggccgcagggcaccaccgcaacagccaggaggcggaggcccgcccccag

SEQ ID NO: 26405 - RNA, 72 nt, Homo sapiens
cacgagggagaagacaaaaggcccgaggccaggagccaaagagcccgaacgcggcaacaacggacagaggac

SEQ ID NO: 26406 - RNA, 73 nt, Homo sapiens
cgaccggagaggggaacagacgcagggcagggccccgcccggcggggaagcgagcggcccgccccaccccagg

SEQ ID NO: 26407 - RNA, 64 nt, Homo sapiens
ccgcgacgcgcccggcccggagcccccagcgcagcggccgcgccgcagaaagcaacaaagcgag

SEQ ID NO: 26408 - RNA, 78 nt, Homo sapiens
ccagcgggacgaggaccgagaccgcggccgggaccgagggaaggagggccccggagcagccacaccaccgaggcccca

SEQ ID NO: 26409 - RNA, 43 nt, Homo sapiens
ggaagggaacaaaaaccaggaagaaacccgcgccgagcgccaa

SEQ ID NO: 26410 - RNA, 99 nt, Homo sapiens
ggcgcgccgccgaaggcgggcgcagcggcggagcggagcggagcccggagggaccgacagcacgaggaggagagaagaaaagcggcccgagacaacaag

SEQ ID NO: 26411 - RNA, 55 nt, Homo sapiens
cagccagcccgacagccgcaaaacggcggggaacgcaggcccgccacccacggca

SEQ ID NO: 26412 - RNA, 34 nt, Homo sapiens
cccccaaagacgggaacagccgaaccggcgccac

SEQ ID NO: 26413 - RNA, 59 nt, Homo sapiens
acgacaggcaccccagaacagcagaagcaaccccaagcgcccacccaagccgcgaaaga

SEQ ID NO: 26414 - RNA, 55 nt, Homo sapiens
acccccaccaaaaagggcacacacggagagaacaaacggccgagcgaccaggaga

SEQ ID NO: 26415 - RNA, 75 nt, Homo sapiens
cccccgagacggaggagagggccggaccacacagcaaaaaccaagccccacagaaacaaagaccaaaaaggcaca

SEQ ID NO: 26416 - RNA, 71 nt, Homo sapiens
acaggagccccagcgccaccgccgaccgaagccgcaaaagacaccagaggaccagaacccacgagaaacag

SEQ ID NO: 26417 - RNA, 84 nt, Homo sapiens
cagcgcaggcagcagagaacaagagaacgggcaacccagaccacacaccggacaaggaaacaggaaagcccaaaggcgagccac

SEQ ID NO: 26418 - RNA, 90 nt, Homo sapiens
ccgggcggcgcgaagcgcggggcgggcccgggcgcggcgggcgcgcccgccagcgcccggagaacgaaccaaaggcagacccagaagagc

SEQ ID NO: 26419 - RNA, 69 nt, Homo sapiens
gccagccacacacaggagcacaacaaagaacggacacggcacgccacacccggacaagggacagagaca

SEQ ID NO: 26420 - RNA, 75 nt, Homo sapiens
ggggccaggcggccggcgagaggaccaacggagcgcgaggcgggcgcggagaagcgcggagagcggggcccggcg

SEQ ID NO: 26421 - RNA, 80 nt, Homo sapiens
ccgggcgggacaggaggaagccggcagacgggcacaccggccaggaccggaccaaaaccacacccacacagcccaggcca

SEQ ID NO: 26422 - RNA, 78 nt, Homo sapiens
cccgcgcggacgggccggacagcagccgagcccgacccgcccgcccggacggcagcgccgcccaccaggcccgagagc

SEQ ID NO: 26423 - RNA, 68 nt, Homo sapiens
accaagaaccaggacgggaaaggaaaaaagaagaagcacacccagaacaagaaaccacagagaagaaa

SEQ ID NO: 26424 - RNA, 76 nt, Homo sapiens
accccgagagcgaaacacaggagccaggaggaggaaaggacaggcaacaagcaaggaaacgccaaaggaacacgag

SEQ ID NO: 26425 - RNA, 92 nt, Homo sapiens
cgaggggcaagacagcaagacaccgacacagcgccggggacagagacggcaccaggacaagcgagggagacacgggcggaagccgagaagag

SEQ ID NO: 26426 - RNA, 63 nt, Homo sapiens
cccccacaacaggaccgggccgcggccagaccaacagagagacgaccacaccacggagccagg

SEQ ID NO: 26427 - RNA, 73 nt, Homo sapiens
gcccaaggggaaggaagccgggcagggcagccggggggaccagcagccgcaccaggcacccggcaggacgagg

SEQ ID NO: 26428 - RNA, 73 nt, Homo sapiens
gagggacgcaggcgcaggccaggggaagcgacgaggaagccaagcaggccggaaggggaaagggagagcaagg

SEQ ID NO: 26429 - RNA, 68 nt, Homo sapiens
ccagagacgccgagcaaaagcccagaagaggacacacgaaacacaaaggggcgaaaacaaacaccgga

SEQ ID NO: 26430 - RNA, 84 nt, Homo sapiens
ggagcagaaggcaagcaccgggcagcagaagaccaggaaacaggccgacagcggaaaagaacgaccgaaacagcccagcaaaca

SEQ ID NO: 26431 - RNA, 80 nt, Homo sapiens
gggcgccaggcggcacggagaccacaggcgacgcgcacgacgacaccgaagaacggccgcggccggacaccagaaggcca

SEQ ID NO: 26432 - RNA, 65 nt, Homo sapiens
caagcgaggccgggcagagggaccacggggagccccacgagggcggaccccaaggagaacagggg

SEQ ID NO: 26433 - RNA, 72 nt, Homo sapiens
caaagaacagcaagcccggccagggcccgaacgccgagcagaggaagaggacaccagcccgggagaagaggc

SEQ ID NO: 26434 - RNA, 78 nt, Homo sapiens
acggggaagcgcaaaaacaagacggggcgccccacagaggggcgacgcacccccccaggcagcagcagcagcaccgga

SEQ ID NO: 26435 - RNA, 41 nt, Homo sapiens
agagcaggcccggccgagcaggcgaaaaaacgagaaagaaa

SEQ ID NO: 26436 - RNA, 75 nt, Homo sapiens
ggagcagagccgccaggcagaaggccccccgaacagcaggcgccaccagcccggaggggcaagacgccaagagaa

SEQ ID NO: 26437 - RNA, 70 nt, Homo sapiens
cgacaccgcaagaccccgaagcccagcgacgcacaaggaaaaacagagagaaaggccgagcaacaaacac

SEQ ID NO: 26438 - RNA, 73 nt, Homo sapiens
cgagggaaaagacaggcaacaggaaagcaagggaaggcgccccaacaaagggccccgccgccagcagaaagca

SEQ ID NO: 26439 - RNA, 76 nt, Homo sapiens
aaagcccaagagaggcaggcagcgacagccacacaacggacagaaaagcacggcgccgagaggaaggacacaaggc

SEQ ID NO: 26440 - RNA, 70 nt, Homo sapiens
acaaagacacaagaccacagcagccgcaaccgacacacaaagagaaaaagaaagaacccacacgaaaacg

SEQ ID NO: 26441 - RNA, 56 nt, Homo sapiens
ccggcgccgcgccggcggcggccacagcaaacacaggggcaggaaccggcaggaag

SEQ ID NO: 26442 - RNA, 78 nt, Homo sapiens
ccaagcgagaagaggacacgcaagccacaggccaccgccggaaccgcgggcccgaaggaaaccccaccacgcggcagg

SEQ ID NO: 26443 - RNA, 71 nt, Homo sapiens
accaccgaggccacgggacccggccaacgacacagacagaccgaggggacggaacacagagacacggcgac

SEQ ID NO: 26444 - RNA, 84 nt, Homo sapiens
agccggccaccgccgagacccagcacacgccgaccagagaccacgagcagacaggagacaaccagcacggaggagggagagaag

SEQ ID NO: 26445 - RNA, 75 nt, Homo sapiens
acccgccggcaacgcggagggagccagccaggggcagccggccgggccccagaagagcccaggaacacagaccac

SEQ ID NO: 26446 - RNA, 59 nt, Homo sapiens
agcggcccaggcggcggaaaagagcaggggagaagggcagaggaggggcgaagagaccg

SEQ ID NO: 26447 - RNA, 77 nt, Homo sapiens
gcgccgaggacaggcagccgaggcgcccccgcgcgagaaggacaccccaggaaccaagcagcaccgcccgccgccca

SEQ ID NO: 26448 - RNA, 84 nt, Homo sapiens
gggcgccagcccgaggcagaccgcacaaccgacaccagccaggagacgccgcaaggcagaagccaagaccggcccgaggcggcc

SEQ ID NO: 26449 - RNA, 67 nt, Homo sapiens
ggcacaacggggagaaagaaggcaaaggccgccacagaggagagccgaagccgcgggcaggaacagg

SEQ ID NO: 26450 - RNA, 77 nt, Homo sapiens
ccgcaaccggaggccagaaggaggggccacgggagcacgcccaaccaacaacagggacacaagcagacagggaaggg

SEQ ID NO: 26451 - RNA, 80 nt, Homo sapiens
ccgacccagcccaagagaccagcagggcgccacccgggaacaagcaggccccagcacccgcagagcagacacgcgagaca

SEQ ID NO: 26452 - RNA, 78 nt, Homo sapiens
gcgagagggcaccgcggacggggccgcccagcaaagcgggccagacacgaagaggccggcgaaggaagaaggaccagc

SEQ ID NO: 26453 - RNA, 51 nt, Homo sapiens
cgaaccaggaacaggcaagaagagacagaaggaagaccgaccacaggacca

SEQ ID NO: 26454 - RNA, 82 nt, Homo sapiens
gggcaccgagagggacacggggcaccgcgccgcagcggagaaaaaggcagccccggagacgaaaagacaaagcaccaccaac

SEQ ID NO: 26455 - RNA, 64 nt, Homo sapiens
gaagacccagaaagaaccaaaagagagaaaacaaagcgaaaaaccagaaacggcaaaagccaca

SEQ ID NO: 26456 - RNA, 81 nt, Homo sapiens
cggcccaacggaagcccggccccgggcccccacaccaccagagagcggccagcagcccacggagcagagcacccaccagac

SEQ ID NO: 26457 - RNA, 54 nt, Homo sapiens
ggaacgaagcagaaccggcccgccgcccggagcacggcacagaaaacgaacgag

SEQ ID NO: 26458 - RNA, 73 nt, Homo sapiens
aaaccggcaacagaaaaaccaagcaaaaacccggagaagcgcaaagcgaagaaaacgcccaaaaaaagaggag

SEQ ID NO: 26459 - RNA, 57 nt, Homo sapiens
gccggcaggggggcggagccacaagacaggaagccaaagaccgggaaccccaggggc

SEQ ID NO: 26460 - RNA, 74 nt, Homo sapiens
ccgcgggcaagaggacaaagccacgccaggagaaacgcggaccggcgaggacggggacgcgaggacaccgggcg

SEQ ID NO: 26461 - RNA, 77 nt, Homo sapiens
agccgggcaccagagcaaggaccgggacgagccaagcagaaggaggaccggagcggccagaagaggccaccaccgac

SEQ ID NO: 26462 - RNA, 83 nt, Homo sapiens
aggaaccaaggaagagaaaccagacagggcgggaccaccaggagcagagcggaggccaccagcccaacaccaccgggaagcag

SEQ ID NO: 26463 - RNA, 58 nt, Homo sapiens
agacggcggaaccaccagcacaccagccccgaggcagcaccaaggacaagaaggcagc

SEQ ID NO: 26464 - RNA, 89 nt, Homo sapiens
cgagcggggccacgaccccgaccccggcccggggcaaacagccggcaccaggagcagcaccagagcgaacgagcccccggggagcggcg

SEQ ID NO: 26465 - RNA, 96 nt, Homo sapiens
acagcgagcggaccccgaccccgaggcgagacggaaaggacagcgcccgcgccgaccccacggacgggccagcgagaggcagccaggaccacaaca

SEQ ID NO: 26466 - RNA, 57 nt, Homo sapiens
aacgcacggggaaggcaacacaggcacaaagaggagcaagaggggggggcccccccg

SEQ ID NO: 26467 - RNA, 73 nt, Homo sapiens
acaacgccgcggacgaccgcacgggcaggggagaaggaaccgacagaaaagccaaacgagccgggcgagaaag

SEQ ID NO: 26468 - RNA, 76 nt, Homo sapiens
accgcccccaggcacagccgcgcaacaccaagaaccagaaaacgaccgaagagggcacagccccagaggaccaaaa

SEQ ID NO: 26469 - RNA, 56 nt, Homo sapiens
accacccaggccccgacgccccgagagagggccgaggcagacaagggaaaggccgc

SEQ ID NO: 26470 - RNA, 77 nt, Homo sapiens
cccagccgcgcccgggagagcaagaaggaggggcagagggaaaaagaaaagaaacaagacaaccagaaggagaagaa

SEQ ID NO: 26471 - RNA, 77 nt, Homo sapiens
gaacagcaccgacacgaaaacccggacccgcaccgcagcgaaaaaacaccagcagcccagcaaccaaaaagaagacc

SEQ ID NO: 26472 - RNA, 88 nt, Homo sapiens
gcgaccggccagcgccgcgacgggaggagcgccggaacgccgaggcccagccagcagcgacgaacaaccgggccagaaaaggcagagg

SEQ ID NO: 26473 - RNA, 58 nt, Homo sapiens
aaggaccaagaaccaggccaaacgaccaagaaagcgggacgcggaaaacgggacccgc

SEQ ID NO: 26474 - RNA, 112 nt, Homo sapiens
gacaccacaggccccaccaagacgcgaggccgagaacaccagaccagcacgcccggggccaagggccgagagggagaaacaaaacgaggggggcacgaaagaagccgggagc

SEQ ID NO: 26475 - RNA, 77 nt, Homo sapiens
gagcgaccaggagccggggcggcgcaggaggagccgaggcgagccaacagcacgcggagcacagggcgcgccggcca

SEQ ID NO: 26476 - RNA, 73 nt, Homo sapiens
gggccgagaagcggggcaccacgaaggaccgaagaggagaagagagcggacccacaccagggaagacagggga

SEQ ID NO: 26477 - RNA, 63 nt, Homo sapiens
ggaccaaaagagaagcaccaaggaccagccgccacgacggaaccaagaacagcacgaaacaaa

SEQ ID NO: 26478 - RNA, 85 nt, Homo sapiens
cggcaacacggacacccacagcggggcggcggcggcggcggcgcggcccaaaagggcgaccagacgaggggagacggacggggga

SEQ ID NO: 26479 - RNA, 68 nt, Homo sapiens
ccaacgcaccagagccgagaaacgcgaaaaggaagcggaaggacaaggccgacgcgcacgaacacggg

SEQ ID NO: 26480 - RNA, 75 nt, Homo sapiens
gcgggaaaacaacagccgggggaaagaagcagccgaaaggaagaagaacggacagcagagagccaggcagggcaa

SEQ ID NO: 26481 - RNA, 79 nt, Homo sapiens
agcagccaccaaacacaacagagaggagggcacccccgagaaacggcgaggaaagagaggagccccggaaagaaaagga

SEQ ID NO: 26482 - RNA, 67 nt, Homo sapiens
accagaccggacccgagacccccaaaggccagaaaggcccgaaggagcccagcaagcccagacaacc

SEQ ID NO: 26483 - RNA, 57 nt, Homo sapiens
cccaggccaagagggacccacccggcgagaccgaaggagcagacgaggcacgagcgc

SEQ ID NO: 26484 - RNA, 78 nt, Homo sapiens
ggggcgggcgggggccgggcgggccaccgcaaggccaacacacgccccggcgccgaccagaagagcccaaggaggagc

SEQ ID NO: 26485 - RNA, 74 nt, Homo sapiens
gcgcggccgagaccggccgcagcgccgccgccgccgccagccaacaagccaaaggaagagccacggcacaagac

SEQ ID NO: 26486 - RNA, 85 nt, Homo sapiens
ggcggaccacaaggaaaagaaaaacagaagcacagaaaacaggaaaggaaaagcgacagcagcgcacaccagccggaacgaacgc

SEQ ID NO: 26487 - RNA, 46 nt, Homo sapiens
accaccccaggacaggagcagaggaggcccaaggaacagcacagca

SEQ ID NO: 26488 - RNA, 84 nt, Homo sapiens
caggccgggcgagcgcaggaaaaagccccgcaggaccgccgggagagccgcccaccccccacccggacgccgggcgcgcccggc

SEQ ID NO: 26489 - RNA, 50 nt, Homo sapiens
gccggggaagcgaggcaaagcggggaagcagggcggagaagagaaacgag

SEQ ID NO: 26490 - RNA, 78 nt, Homo sapiens
aaaccccagggaagaggaccaaagcgaacagagcgcacaggaaacaaccgcaaccagccaaggcacacaagcccagac

SEQ ID NO: 26491 - RNA, 56 nt, Homo sapiens
accaaccaaggagacgcgacacgggaaaggagcgcagggagaagaaacgaacggaa

SEQ ID NO: 26492 - RNA, 79 nt, Homo sapiens
gggagcgcagccagaacgcgccccggagcaaaccccagaaacgccggaccgaacacgcccccgacgaccagagagaccc

SEQ ID NO: 26493 - RNA, 74 nt, Homo sapiens
ccaagcccacagaaaaagggaaacggagaaagaaggcgagaaaggacaagccaggacccaagaaaaagcagcag

SEQ ID NO: 26494 - RNA, 68 nt, Homo sapiens
agcaaaaggaagcaacccagaagagcgaaggacccagcgaggaggaaaaggcacacacacccgcagga

SEQ ID NO: 26495 - RNA, 101 nt, Homo sapiens
ccagccccgccgagccgccaccgcaggcgaggacggcggaccccgcggcgggaggagccgccccgagacgggagacacgagagagacagcagaaagaccac

SEQ ID NO: 26496 - RNA, 93 nt, Homo sapiens
gacgcacccaccaggaagagggcgcacgccaggagcccccagccccaccccaagagcaccacccaaccaccaccccagggcagcacagccaaa

SEQ ID NO: 26497 - RNA, 76 nt, Homo sapiens
gccgcggccaggaccggcggaccggccgcccggcccagccaacaccgacgaaaggaggcaaacgaccaaacacggc

SEQ ID NO: 26498 - RNA, 78 nt, Homo sapiens
gagagcacagaggggaacagacaggccccagccgcaggccgccgaccgacaaccaaagaagccagccacacccgacca

SEQ ID NO: 26499 - RNA, 74 nt, Homo sapiens
cccgccaccgggcgacggcagggggaagaagagcgcaccgaaggcacaagggaaaccagaacaaaaggccagag

SEQ ID NO: 26500 - RNA, 76 nt, Homo sapiens
cagaaagaccagcaagcaacaccgagccaagggccacaacagaagaagagcccccaacagccaagaaaaaagagag

SEQ ID NO: 26501 - RNA, 58 nt, Homo sapiens
agcgaggcgccggcccagacccacccccagcggaaaggggcaggagggaacccggcgc

SEQ ID NO: 26502 - RNA, 74 nt, Homo sapiens
cagccgccggcaagccgcgaaggaagacagggagcgaggaggacacaggaccaggaaggccaaaagggcaccac

SEQ ID NO: 26503 - RNA, 51 nt, Homo sapiens
gaaggaccaagaaccaggaaggaggggacagagcagaaacagccaagagag

SEQ ID NO: 26504 - RNA, 81 nt, Homo sapiens
acaagccccacagagggaaaaccgaaagcagagacagcagggccagaaagacacacaggagagcggcgcagaaaaacaaaa

SEQ ID NO: 26505 - RNA, 81 nt, Homo sapiens
cggcccggcccgacaccgcgggccgccagacgggaaggggcggcacccaccccccgagcccgcccgccggccccagccccc

SEQ ID NO: 26506 - RNA, 42 nt, Homo sapiens
accagcgcgaggccacgccaaagcaagggcggaccagggacc

SEQ ID NO: 26507 - RNA, 84 nt, Homo sapiens
aacaaacaaaacagaaaaagaaaaagaagaaaaaagaaaccagcacacaggagagcgacgcaggggaggacagggaacggcgag

SEQ ID NO: 26508 - RNA, 84 nt, Homo sapiens
cgcacagaggaacacgccggggcccaaccacaagacgaccaaaggaggaagagggcaggcacgagcaaggaggagccccgaaaa

SEQ ID NO: 26509 - RNA, 74 nt, Homo sapiens
agaggcagcgcgaaaaaggcagcagagagacagagagagagaggaaggccacggcgagcccgggacaggcgagg

SEQ ID NO: 26510 - RNA, 85 nt, Homo sapiens
ggggcgccaacccaacggcccagcgaacagacccaaaccaggaaaaggaggccgagcagaagcgcaacgcagagcgggaagggca

SEQ ID NO: 26511 - RNA, 53 nt, Homo sapiens
caggcagcaggaagcacggcgggcgaaacaggcaaccaacccagggaaaagga

SEQ ID NO: 26512 - RNA, 55 nt, Homo sapiens
agcaggaaccgacgggaacagggggggagcaccagagagaaaaagccaaggaaga

SEQ ID NO: 26513 - RNA, 81 nt, Homo sapiens
gaggaccgagcgacagcgcacggcagcggcaccacggcgacgcacaagaaaggaccagaaccaaggaagaaaccggcagag

SEQ ID NO: 26514 - RNA, 72 nt, Homo sapiens
gcacgccgacagggagaaccccggcagggacgcacaacgcagagagggggcacaccaggccccagaccagcc

SEQ ID NO: 26515 - RNA, 62 nt, Homo sapiens
ccacgacccacagaaagaccaaaggacgcccccccaggaagcgggccccagaaccagacggg

SEQ ID NO: 26516 - RNA, 72 nt, Homo sapiens
gacccagggcccggcgaaggacccggccgaggcgggcgcaagagaaggcaccaagaggaaagcaccggggaa

SEQ ID NO: 26517 - RNA, 77 nt, Homo sapiens
aggggagcccagcggcgcgccggcagcaggccaagccgacgccagcgggcgccacccaacaggcgcaccgcccacgg

SEQ ID NO: 26518 - RNA, 79 nt, Homo sapiens
ggccacaagaaaagcaagggaaagcagcacgagggcaaaaaacagagccaaacagcccaagaccacaagagcaaacaga

SEQ ID NO: 26519 - RNA, 45 nt, Homo sapiens
accgggcgccgacgagacggcccaccgggggacggcacggcaggc

SEQ ID NO: 26520 - RNA, 67 nt, Homo sapiens
cgcgcgaagacggaagacgcgcccgcgccggagggagcgggaccgagaaggcgaagcgcagagcggc

SEQ ID NO: 26521 - RNA, 79 nt, Homo sapiens
caagaggaagagggaaaagacaagaaggggacgaagagccagcgaggcgcacaacggggaagcagccaagaaagagcgg

SEQ ID NO: 26522 - RNA, 87 nt, Homo sapiens
ccagccgaccagcaggaggacagggccggagcagccggcagcaagcagccaacgcagaaacgcaggcagcccgacaaaggcagcagc

SEQ ID NO: 26523 - RNA, 54 nt, Homo sapiens
cgccagcgccagcaccgccggacccaagcgaaaaaggcccgggacccgacccgg

SEQ ID NO: 26524 - RNA, 73 nt, Homo sapiens
ggcgaggcggaagggcaccccacccgagaggagccacgagccaggcggcgaacccgggacaaggaaccccgcc

SEQ ID NO: 26525 - RNA, 86 nt, Homo sapiens
aaggggcccccgggcaccccggaccgcgcagccaccgcggcccccgcggaaagggcagcaagacacgaagccgagaaagagcagcg

SEQ ID NO: 26526 - RNA, 81 nt, Homo sapiens
acgagagcccccgaggccgagccagggcgaaggacacgccaccagccagcaaacacagggacagacaacaacgccacaacc

SEQ ID NO: 26527 - RNA, 76 nt, Homo sapiens
gccaggagacaggaggccgcggggagacgcgggggacggggcaggaccacagaccagacaaagggagcaccagcca

SEQ ID NO: 26528 - RNA, 80 nt, Homo sapiens
ccgcccgccccagaccgcggcgaaaggcccacagggacacaagcaggcaccaccacagcaaaaaaaacagggagcacgga

SEQ ID NO: 26529 - RNA, 74 nt, Homo sapiens
caacgggacccaccccaggaaaaagcgcggcaaagcgcggcccacacaggagccaaggaaagcccaacaaggag

SEQ ID NO: 26530 - RNA, 74 nt, Homo sapiens
agcacaaaagaccggcaagcagggacggacagcaacggagagcgccccaacaggccagagcagccgccccaggg

SEQ ID NO: 26531 - RNA, 67 nt, Homo sapiens
gcgcccgccgacacgacgaggcgcgggcgcgcacccgagccgcaagggccacacccccggagaccaa

SEQ ID NO: 26532 - RNA, 65 nt, Homo sapiens
cgaccgggcaccagcaggacccgaggccaggagccaggggcccagaaggacccaaagacaggacc

SEQ ID NO: 26533 - RNA, 75 nt, Homo sapiens
cccacccaggacaggggaagagggcggaggaacagcgggggccaaggggagaaaaaacagaggggaggcggacca

SEQ ID NO: 26534 - RNA, 77 nt, Homo sapiens
ccaccgagacggccacagacaacggagacgcggacggcacgcacagcagagcacgccgcaggggacgcacacgcaga

SEQ ID NO: 26535 - RNA, 73 nt, Homo sapiens
caccacaaccggaccaccccacacacagaccaaagcaccccagaagaagcaccgggaagaacagcaggaagac

SEQ ID NO: 26536 - RNA, 54 nt, Homo sapiens
ggccacgcaggcgcaacgcaaagaccagccacgaggacacggaaaaagagcgga

SEQ ID NO: 26537 - RNA, 77 nt, Homo sapiens
cacacggagacaccagcaacaacaccaaggcccggagcagccacgcgaggggcccgacaaggccaaacccgcaccga

SEQ ID NO: 26538 - RNA, 77 nt, Homo sapiens
gccgcgggagggcgcccgcgcaccccaccggcagcccgccgccagcgaacccgcccacgccagcgaagccgacagga

SEQ ID NO: 26539 - RNA, 74 nt, Homo sapiens
cggccgcccgcgacaccccagcagaaggacccaaccgcggcacacagaaaacccggacccaccccgcccagaac

SEQ ID NO: 26540 - RNA, 69 nt, Homo sapiens
cgccagcacagcaagggcccgacagcccaaccagccgggggcaccggccacgaaacagagacacaccga

SEQ ID NO: 26541 - RNA, 52 nt, Homo sapiens
aaaaaggaaaacgcggaaaaccgacacaacagaaagaaccaagagggagaca

SEQ ID NO: 26542 - RNA, 78 nt, Homo sapiens
cccagccccgagagccgggaacaggggcccccggagggccacaagccagagcgccccggccaaggcagaccagcgggc

SEQ ID NO: 26543 - RNA, 85 nt, Homo sapiens
ggcgcccgcgccacagccaccagagccggcagcaaagagggaacagagccccccaagagaacccagggggagccacgccggagcg

SEQ ID NO: 26544 - RNA, 79 nt, Homo sapiens
gagagagcaccaacagacaccagagaggagaaggaggaaccagaggaaagccccagaagcaaagagaggagaagaaagg

SEQ ID NO: 26545 - RNA, 76 nt, Homo sapiens
aggccggccgcaggccgcacgagcaggccccaaaggcagaagaaacaggccccaccagagcacggaacagaaggac

SEQ ID NO: 26546 - RNA, 69 nt, Homo sapiens
cacggaccagcagaacagaaacaagcccggaaacagacagcacagaaaaacagggaaaacacgacagaa

SEQ ID NO: 26547 - RNA, 74 nt, Homo sapiens
caggcggcgcggagagggggcgcgagcgggggagacagacccagcacggaccccccccccagccgggcgaggcc

SEQ ID NO: 26548 - RNA, 58 nt, Homo sapiens
aggccggcggggcgacagggccaagaccccggccgcgacccagcagcaggagagcgga

SEQ ID NO: 26549 - RNA, 68 nt, Homo sapiens
ggaacaagaaccagggagaagccgcccgaacaccaggagagaacggagagccccgcccaggaaaccag

SEQ ID NO: 26550 - RNA, 46 nt, Homo sapiens
ggaacgcggaggacacagaagcccggaacgagaggggcccgggggg

SEQ ID NO: 26551 - RNA, 95 nt, Homo sapiens
cagcacaccacggaagcaacacacggaaccagccagaaaacaaggcgaggagggccccaaccgcagcacagcagccgcccccgcagccaccggcg

SEQ ID NO: 26552 - RNA, 77 nt, Homo sapiens
ccgcccgccacgcacgccagaaccgaggagagaaggcagccagggagccgaaaggaggggcagcccgggacagcccg

SEQ ID NO: 26553 - RNA, 72 nt, Homo sapiens
cgcagaagcgggcaaccagaccgaaaaacccgaagcggcccacagacaggacagcgcagaagaggcacagcg

SEQ ID NO: 26554 - RNA, 66 nt, Homo sapiens
ggacgccccaccgccgacgcccccagccaccaggggagacggacgcaaagacaagggagaagcggc

SEQ ID NO: 26555 - RNA, 78 nt, Homo sapiens
gagaccccgaaaacggaagcgcagggagaaggaagaggggaaaagggcacagagcagaggacaccacaggaaggaggc

SEQ ID NO: 26556 - RNA, 83 nt, Homo sapiens
cgccgggcccgggcaggggcggggcaacgcggaaggaaaacccaaccccaagaaacagaagcaaaaaaggcgccaaaaaaaga

SEQ ID NO: 26557 - RNA, 72 nt, Homo sapiens
ggaaacggcacgagacaggaagggaaaggagagacagcacaagaaaaggaaccagacgccgcaggcccacgc

SEQ ID NO: 26558 - RNA, 69 nt, Homo sapiens
ccccgcggaaaacaggcgccggggaagcccgcccggggagcgcagccaccagggcggaggcagggggac

SEQ ID NO: 26559 - RNA, 56 nt, Homo sapiens
acgacagccgaaaggacgacccaaaccagaacaaggaagccccccagaaaagaggc

SEQ ID NO: 26560 - RNA, 87 nt, Homo sapiens
cgcggcgcacacagagcagagacgagcgaggcggagggagaaggcggcacaacaccgacccacagagaacagaaaaaccggaggagc

SEQ ID NO: 26561 - RNA, 80 nt, Homo sapiens
agaacacgggcagggacagagcggaggaccacagaaggccggaggcaggacgagcagcagcagcccaggcgcagcacccc

SEQ ID NO: 26562 - RNA, 80 nt, Homo sapiens
ggaggaggcgaagcgagaggacagcgggagagggaaagcggagaggggaagagcacacaccagagcggcgcggggaaaaa

SEQ ID NO: 26563 - RNA, 72 nt, Homo sapiens
ggaccaggcgcggacccaaaaagcccccaaaacacaagaggacggagaagcgacgaaagaagccgggacaag

SEQ ID NO: 26564 - RNA, 49 nt, Homo sapiens
gcgagggaggagagagggagagccaaagaagacggcagccggcccgggc

SEQ ID NO: 26565 - RNA, 77 nt, Homo sapiens
gggcagccagaagaaggaccggaagcacacaacaggaaaacaaaagaggagaaaggaagaagacggcacgggacccc

SEQ ID NO: 26566 - RNA, 86 nt, Homo sapiens
cgcagaaagcaggcgaacccgcggcgcaaaacggaaccgaaggaaaagcacagaaaagagacccaccaagggcagaagcgaaggcc

SEQ ID NO: 26567 - RNA, 54 nt, Homo sapiens
aagaacgcgccaaacgaagagccagcccagaaacggcacggggccaaaaaggca

SEQ ID NO: 26568 - RNA, 103 nt, Homo sapiens
gccagccgggcaggccccgagaggaacccagccgacacgacgccgccggcaggcccgcgcaccagccaaaacagagggagacgagaaaagggccgagcacaag

SEQ ID NO: 26569 - RNA, 78 nt, Homo sapiens
cacaaccggacaggcagcaaggaaaagaaggaggccagcgggacacacaaagaaagacgaaggacacccaaagggaag

SEQ ID NO: 26570 - RNA, 84 nt, Homo sapiens
gaggacgggcccgcgggccacggccagcagccccggagaggacagcagcggacggccggaccaagaggcgccgccccccagcaa

SEQ ID NO: 26571 - RNA, 58 nt, Homo sapiens
aaggcaaacagcgaggcgcgccggaggaaggggacgacccaccggagcccggacgcga

SEQ ID NO: 26572 - RNA, 70 nt, Homo sapiens
agcacgaggggcgaaccacggaaaggaggaagaagacaccggggacagacaggcggaagaagaaagacgg

SEQ ID NO: 26573 - RNA, 79 nt, Homo sapiens
aagacccaaacaaaaagacacgaagaggaggaagcccagaacggccgagcgaccaggagaggagcccccgcccgaagac

SEQ ID NO: 26574 - RNA, 80 nt, Homo sapiens
gcagccaggcggaggcggcggaagccggcggagcgagacgagaacccggccgcgcaagggaaaagagcggaagcccgcaa

SEQ ID NO: 26575 - RNA, 58 nt, Homo sapiens
gagcccggcacgagcgccgacaacccggcgccagagccgaaaaccagcaccaagacca

SEQ ID NO: 26576 - RNA, 76 nt, Homo sapiens
ggggccagcgcaggggcgcgagaccgcccggacggcgaagcgcgcgggcggagaacagccagcaaagacaagagca

SEQ ID NO: 26577 - RNA, 106 nt, Homo sapiens
aagacggcaaagcacccagccgcagcgccagcagcggacaggcacagacaaccagggcggaccgggaagaaccaaagcgcaaccaccaaaggaagccgccaagcca

SEQ ID NO: 26578 - RNA, 82 nt, Homo sapiens
ggaagaaaggacagggagagaagccaagaaagacagggcaagcagagggaagacgggcacacggggagcgcgaccgaggagg

SEQ ID NO: 26579 - RNA, 57 nt, Homo sapiens
cccccccaacccggaaaaggggcgaaacccacaagcacggaacaagagacccaggca

SEQ ID NO: 26580 - RNA, 80 nt, Homo sapiens
gaacgcagcaggacaaacggacccaaggaacgcaagcagaaagaccgcaaagcagcagcacgaacaaaaggccgccccac

SEQ ID NO: 26581 - RNA, 69 nt, Homo sapiens
aaaaaccaaacgggaacacggacgaaggagcaagggcaacacccggagagaagagccgcaaccaaacca

SEQ ID NO: 26582 - RNA, 74 nt, Homo sapiens
ccgccccgggccccaccgccacccagccccccaccaagaacaaccacgcagaaacacgaaggagcgcaaaagag

SEQ ID NO: 26583 - RNA, 73 nt, Homo sapiens
aaaagccgggagacccaggccgagccgagaggcaagacaacacacccagaaggacaaaagccacgaggcacaa

SEQ ID NO: 26584 - RNA, 73 nt, Homo sapiens
gcagcgccaagaccgccggacccggggcgccgcggcccggcacgcaccggggcaggagaggcggaggacagga

SEQ ID NO: 26585 - RNA, 74 nt, Homo sapiens
gaaggagcggagacggggcgagaaccgggacacgggccaagaggccgcgaaccagggcgcgggagcagcaaccc

SEQ ID NO: 26586 - RNA, 70 nt, Homo sapiens
aaaaagaagcaaacaaaaccaaaccagcagaagaaacaagacagacgaagaaggaaaagcgaacagaacc

SEQ ID NO: 26587 - RNA, 75 nt, Homo sapiens
gagagggcagaagaggaggagccaccgaggaacgggagcgggggccaaacccgggagaagaagaagcgcgagaaa

SEQ ID NO: 26588 - RNA, 77 nt, Homo sapiens
ggccgaccaccggaacggacagcccccccagcaaaagagccaacacccaggccaggccgcccggaaggaggccgcca

SEQ ID NO: 26589 - RNA, 76 nt, Homo sapiens
aagaggcgcaccacgcggcccccgcccgccccgccgcccgagccggcgccaagaccccaagaagaagcggaagagg

SEQ ID NO: 26590 - RNA, 71 nt, Homo sapiens
gacgcccccagccaccagggggagccagcccggcgacagagggaacccggaaaaaccgcgcgaggagaagg

SEQ ID NO: 26591 - RNA, 86 nt, Homo sapiens
accgcaacagacacccaaaaaacgacaaggaggcaggaagacaacagcagagagaggacggcagggaaaaaccaaagcccggaagc

SEQ ID NO: 26592 - RNA, 76 nt, Homo sapiens
ggagcagagcacagacacagcaaccaccagacagacgagaacacacaagaaaaacccggggaaggcaagacgggga

SEQ ID NO: 26593 - RNA, 70 nt, Homo sapiens
ggcagagaccgggcgagcgacccaggaaggagagaggcccgggggaacccgcgcgaaggaaagccaagaa

SEQ ID NO: 26594 - RNA, 52 nt, Homo sapiens
ggaggagagaaagcgagaacaaaaccagcgaggcgccaagcccacgggcgca

SEQ ID NO: 26595 - RNA, 59 nt, Homo sapiens
accaggagcccgagagagaagggagaaaaccggaagagaaaggccgggaagcaggaaag

SEQ ID NO: 26596 - RNA, 51 nt, Homo sapiens
ccggacggggcgccacgaagggagggcaggagaaaggagaaaaagaggcag

SEQ ID NO: 26597 - RNA, 76 nt, Homo sapiens
aagcccacagagacgggagcggggggacccaggcgggccccgcggcggaccacagagaagcaggcgaccaggcgcg

SEQ ID NO: 26598 - RNA, 79 nt, Homo sapiens
aacagcagaaaaccggagcagaaacgacaggaaagcagagcagaggcggaagggccgaaagcgaggaaaccgcagggcg

SEQ ID NO: 26599 - RNA, 79 nt, Homo sapiens
gcggccgcacgcggggcgcgcccaagagcccacagagaaaagaagaaacaagggcaacgagaaaagaaaccaaacaaag

SEQ ID NO: 26600 - RNA, 84 nt, Homo sapiens
cgcaccccccgccggaggcccccgaagacacaccagggccagaggaggcagagaccggcggcagagggcggaagacgcacgggc

SEQ ID NO: 26601 - RNA, 75 nt, Homo sapiens
agggccggaggaaggcagcggcaagacagagcagaaagggggaaacccagaacaacgaacgaccgaggaagaggg

SEQ ID NO: 26602 - RNA, 65 nt, Homo sapiens
gcgaacagcgcgacacaggagacaacggcaagcggagaagagcaaggccgaaccgagaggaaggg

SEQ ID NO: 26603 - RNA, 76 nt, Homo sapiens
ggcccggaggaccggcagccggggggaagacaaggagggcagagaggagacaagagaagagcaaggcaagggacca

SEQ ID NO: 26604 - RNA, 54 nt, Homo sapiens
ccaccagggcaacgaggacaagcgagaagacgaacaaggccgcagggagagaaa

SEQ ID NO: 26605 - RNA, 54 nt, Homo sapiens
aggccacaaccaagagaaacaaccgagaagacagaggagccagaccaagagaca

SEQ ID NO: 26606 - RNA, 60 nt, Homo sapiens
caaaagccgacaaccccagaaacaggcagagaacggcaggaagaaggggaagccaaggac

SEQ ID NO: 26607 - RNA, 55 nt, Homo sapiens
gaggccaggcagacccagccaaaccggcacagcaagcaacccggccgaggggggc

SEQ ID NO: 26608 - RNA, 57 nt, Homo sapiens
ccacgacgggacacgccccggaggcaacaaccgagagaagaacaaacaccacaccag

SEQ ID NO: 26609 - RNA, 35 nt, Homo sapiens
cgaacgccgagggcggagggagaggagcaccacaa

SEQ ID NO: 26610 - RNA, 69 nt, Homo sapiens
acgcccagaggagccagaaacagccaaacaacagagagagggaaaccgccagacgaaccggaggccaca

SEQ ID NO: 26611 - RNA, 71 nt, Homo sapiens
agcgaacgaagagcaccgggagcggcgaagaggcaccggaggaggaccgaaaaggaacgcccaagcaggag

SEQ ID NO: 26612 - RNA, 79 nt, Homo sapiens
ggggccgccgccgggagcggggcggcacggggcgggggcaagggcgcccgcgggaccgaaggccaaaagaaaaaacagc

SEQ ID NO: 26613 - RNA, 61 nt, Homo sapiens
gcagaggaaaagagcaagccggcaggagaaagaaggccagaaaaaggaaaacccgagaagc

SEQ ID NO: 26614 - RNA, 83 nt, Homo sapiens
cgagcaaagaagagcccgaacaaacaaacacccagaaacaagaggccaagcacaaggcagggacaggggggcaccagaagaaa

SEQ ID NO: 26615 - RNA, 87 nt, Homo sapiens
cacgccaagcaaaccgggaaaggagaggacccggagccgcaaacggggacagcgccgaccggaacagggaccacggaagcccaggac

SEQ ID NO: 26616 - RNA, 75 nt, Homo sapiens
aacaacaaggccaccaaacgagagcagccaacgaccggagaaacaagggaaaaggcgaaaaagcaaagaacaggc

SEQ ID NO: 26617 - RNA, 69 nt, Homo sapiens
aaaacagaagagagacgcacagaaagacagcggaaagggcaccgacgaggcagagccaaggaggcagca

SEQ ID NO: 26618 - RNA, 80 nt, Homo sapiens
aggcaacccaacaaaacccaggccccaagagcacaagagagagacgcagaaaacgcaggacccccgcggacgcgaaggcg

SEQ ID NO: 26619 - RNA, 82 nt, Homo sapiens
cgcacgggaaccggaccaggaggaggcaggaccaaaagggaaaagcaccggaaggacgcccagagaccggcagcgcaaacac

SEQ ID NO: 26620 - RNA, 81 nt, Homo sapiens
gcagacagcccgaaccacccgacggaggggagcacagggcaccacggaaggccacagcaaccaagagccccccaggagaca

SEQ ID NO: 26621 - RNA, 84 nt, Homo sapiens
aacgccacgacagaaggcgccaggcgggaaaccggcccagcggccagcagggaaacagcagacagcccccccaacagacaggca

SEQ ID NO: 26622 - RNA, 51 nt, Homo sapiens
agaaacagaggacaaggcagcaaagaagagaagcgaaaagagggcaacaag

SEQ ID NO: 26623 - RNA, 83 nt, Homo sapiens
gaaggcgaacgccgcggccaaggagccgccaaagccagacgcggagcagaggaagccaagggaggaggccgaagacgcagaag

SEQ ID NO: 26624 - RNA, 77 nt, Homo sapiens
gaggcggacacgggacacgccacagcggcagaacaaaggcagggagggaaccgccggggccaacaacaagacggccg

SEQ ID NO: 26625 - RNA, 69 nt, Homo sapiens
gaacgaaacaagaacaccaggaggaagacaaaagagggccagaggaaggaaaggagcaggacggaagag

SEQ ID NO: 26626 - RNA, 83 nt, Homo sapiens
gaaaagcaaaaacgaaaccgaaagggggaaagaaacccagccagaaagcaacaggaccagggagcccacaagcccggagggca

SEQ ID NO: 26627 - RNA, 85 nt, Homo sapiens
ccccaggccgcgccgagcccgccgcgcgggcccgcccgacgcggaagcacccgacaggaggacgcccgccaggggagcagacaga

SEQ ID NO: 26628 - RNA, 46 nt, Homo sapiens
aaggagcaacccgggcagacagcccgaaaggggggcaaaccgaggg

SEQ ID NO: 26629 - RNA, 81 nt, Homo sapiens
aacgcaagaagacaacggccggccaggacggccagcagaagcaggcgagccccccgagaaaaagaagaaacgcgggaccac

SEQ ID NO: 26630 - RNA, 73 nt, Homo sapiens
ccgcacccgcccccccccggcaggagaggcggcaggccggagcaaacgagacggaagaaaaaaccgacggccc

SEQ ID NO: 26631 - RNA, 74 nt, Homo sapiens
acgcagaaccggggagccaccgaggacacaggggaagaaggaggacaacagacaacggcaagcggagaagagca

SEQ ID NO: 26632 - RNA, 69 nt, Homo sapiens
caagccgaagaaaggaagccacgcacaccaaaaaagagcgggcaacaaccagccacggagcccgcacgc

SEQ ID NO: 26633 - RNA, 71 nt, Homo sapiens
gggagcaagcgaagacaggaacaagaaaacaaaggcaaacaagaaaccaagaagaccgaaacagggagccc

SEQ ID NO: 26634 - RNA, 79 nt, Homo sapiens
ccgccccgccgcgcccaggagcggaacaacgcggcgagcgggcaggggccagcgcggagagacgggccagaacagaaac

SEQ ID NO: 26635 - RNA, 84 nt, Homo sapiens
ggaagcggaaaccagggccacagcacgcagccccaggcaggaggggcagcagcaggacagggaacccgggagacagcaacagac

SEQ ID NO: 26636 - RNA, 73 nt, Homo sapiens
ccacccccagcggaaagggacagcaaggcggcaaggcgggagaccagagagacccagcgggggaggcccacag

SEQ ID NO: 26637 - RNA, 77 nt, Homo sapiens
ccgcgaccgcccgcgccggcaccggggcggccggccaaagccagcgcccgagcggcgccgacacgggaagagacgcg

SEQ ID NO: 26638 - RNA, 56 nt, Homo sapiens
agacaccccccccgcccaggacaaacccaacgcgaaaagggaaaaagaaggaaaca

SEQ ID NO: 26639 - RNA, 64 nt, Homo sapiens
gacgggagcagaggaggagaagcaaaaagcgcagaacgccaagagaccagggcaccacagaaca

SEQ ID NO: 26640 - RNA, 85 nt, Homo sapiens
gacaacagagaaggaaagagagcagcaaggggggcaagaccagagaccacagaccccagaaccagggcacccggacagcgccgag

SEQ ID NO: 26641 - RNA, 71 nt, Homo sapiens
ccagcgcgaacccaggagcgcaaagagaaagaacaagaacacgcagcacgacaacgaagagaggaaagaag

SEQ ID NO: 26642 - RNA, 44 nt, Homo sapiens
agggcggggcgcccgcgggaccgcggaacagcgccaaccagcca

SEQ ID NO: 26643 - RNA, 52 nt, Homo sapiens
gccacgcgcccagcgccacaaggaaccacagcaggcacgcagcaccaccaga

SEQ ID NO: 26644 - RNA, 70 nt, Homo sapiens
cgccagcacccggcgagacgacaggcaaggaggagccaacccgcacaccggcacaaaaaacagacaccag

SEQ ID NO: 26645 - RNA, 78 nt, Homo sapiens
ggccgccacaaccgccagacaaccggagccacgccccacgaccgccagcgggagggacaggagaacaggcacgacccc

SEQ ID NO: 26646 - RNA, 33 nt, Homo sapiens
gcgcccggagacaagggggacgaccagcagcca

SEQ ID NO: 26647 - RNA, 76 nt, Homo sapiens
cagaaagcgcaaaagaaagggcccaaacgaaccgcggcccagagaggcgccccccagggacaagggagacagaccg

SEQ ID NO: 26648 - RNA, 73 nt, Homo sapiens
aggacccagaaaaaggaaagacccagaggccagccaaacgccggcggacagcaagacagccaaggccagagaa

SEQ ID NO: 26649 - RNA, 83 nt, Homo sapiens
caccgcagagcaaggaaaagagcccggaaagaagagacagcgaggagacaacccccagcccgccgggacccaccaagggcccc

SEQ ID NO: 26650 - RNA, 80 nt, Homo sapiens
acggccagcgacccgcgcaagcgcgagaccgaccgcacggggaggaagggacccggcaaagagagaggcacacgccgccg

SEQ ID NO: 26651 - RNA, 76 nt, Homo sapiens
cagacggccagagccgagggaaggggcaagccaccccgcccccaagagcaagccggcgcgaccgcccagggagacg

SEQ ID NO: 26652 - RNA, 80 nt, Homo sapiens
gagaccgcgggggagaggaggcgaagacaagagagccaggagcacagcaagcgggagcaggcagaccaaaggaacagaag

SEQ ID NO: 26653 - RNA, 79 nt, Homo sapiens
gccccgacgaggacgaccaacaggcagcagcgggccccgccaccggcacaccgaaggacacggccagccagaccgaaac

SEQ ID NO: 26654 - RNA, 74 nt, Homo sapiens
ggcagagaccgcaggaagaagcgaagagcaaaggagagccagagcgaacccaagacggggcacgccgggagaaa

SEQ ID NO: 26655 - RNA, 72 nt, Homo sapiens
acgcaaggcccccgaccacacgcccgcgcgaggccggagcccaacagaaagcccagccccccccaccgccac

SEQ ID NO: 26656 - RNA, 73 nt, Homo sapiens
ccgccgaccccccggcgccgcgccggcggcggcggccccagccagaaggcaaggggcggagaccaggcaccca

SEQ ID NO: 26657 - RNA, 113 nt, Homo sapiens
ggggcagccaggacccgggcccaaggccgcgccgaccgcacgcgcacggaacagcagcaaccccagcacgaagccagggcgaacagcagacaaagagacgggagcggagggaa

SEQ ID NO: 26658 - RNA, 49 nt, Homo sapiens
gcagcgcgggaaaccaaagaaggcccaccacaaaccaaacgagcaagaa

SEQ ID NO: 26659 - RNA, 76 nt, Homo sapiens
acaaacagaaagcgcgaagaggggaagcaaagcaagaacaagagacaacaagacggaacacgaagaggaagagaga

SEQ ID NO: 26660 - RNA, 83 nt, Homo sapiens
gaggacggccggaaaaacgaacagacgcacaccacagccagagcacagagcaccacgaacaaacagaaagcgcgaagagggga

SEQ ID NO: 26661 - RNA, 84 nt, Homo sapiens
aagggcaaccgcggggcaagcgggccacgcacccgcaccaaggccaagccccagaggacgacacaaaggggggagagagagaag

SEQ ID NO: 26662 - RNA, 81 nt, Homo sapiens
ggcccaaaccgacaaagaggcacggacaaaccagggaacaccaggagaggcacagggccaggcacacaacgagaccacggc

SEQ ID NO: 26663 - RNA, 72 nt, Homo sapiens
ccaggagaagagcagggggccgaaagaaagacagaaccagcacagcaaaaaaggcagcgcaccgaccccaac

SEQ ID NO: 26664 - RNA, 56 nt, Homo sapiens
caaaaccacaggcacaaagagaacagacaacgaagcggacagagaagagaaaaaag

SEQ ID NO: 26665 - RNA, 74 nt, Homo sapiens
cgggagcccagccaccacagacagcccccgaaacaaagagacgcacggcggaccaagagcggagggacccgggc

SEQ ID NO: 26666 - RNA, 55 nt, Homo sapiens
gagccggccaggacacacagaaaacaccccgaggggcccacaggaagagagaaaa

SEQ ID NO: 26667 - RNA, 80 nt, Homo sapiens
aagaggcagccaccacgggccggggggcaccagccgaagccaggcaagcaagaaccaacaagaagaccccaagccacaac

SEQ ID NO: 26668 - RNA, 71 nt, Homo sapiens
gaaaacggaaacagagcccagcccagaaaagagaggaaccagaaacaagcaacacaaagggaaacgggaca

SEQ ID NO: 26669 - RNA, 47 nt, Homo sapiens
gcaacacacccaccaaggaagcagagcgggcaacaaccagccacgga

SEQ ID NO: 26670 - RNA, 84 nt, Homo sapiens
cagcccccgaaggcccacaggacaggagagaaagacgggcccagcacagaagacagcacgccaccagaacagagacgaaaaaac

SEQ ID NO: 26671 - RNA, 67 nt, Homo sapiens
aaccaccccgccaggacgccgacgagccagccggccagagagggagagaccagaggcgcccccacgc

SEQ ID NO: 26672 - RNA, 75 nt, Homo sapiens
cgcgaggccagagagggggaggccgagaagcagcaaaggcaaacaaagcggccagaaagaggagccaaacccagc

SEQ ID NO: 26673 - RNA, 86 nt, Homo sapiens
cccagcccccgagggcgggacacagggaggagaagagggacccagaaggcgaggagaagaagcgaagcagcaacacggcgccccgg

SEQ ID NO: 26674 - RNA, 86 nt, Homo sapiens
gaaggacaggagaccaaggagaacaggaaacaggaacacgaaagaggaaaaacgcacaagaaaccgaagccaaggaggagaggagg

SEQ ID NO: 26675 - RNA, 81 nt, Homo sapiens
ggagccccgcgacgcgcccggcccggagcccccagcgcagcggccgcggggaaaggacaagggacagcagccgcagaagac

SEQ ID NO: 26676 - RNA, 80 nt, Homo sapiens
aaaagacccacaggaaaacgacaccaaaaggccagaagcggacccagaagaggggagcagcaaggaggaagacagccggg

SEQ ID NO: 26677 - RNA, 82 nt, Homo sapiens
ggagcggacccccaagacaggaccgcagaacagccaagagcgggcccgggccaaccgaggacaagcaccagcagaagcaaac

SEQ ID NO: 26678 - RNA, 76 nt, Homo sapiens
gggggagaacagacagccagcacgaaggcgaagcaaaggcaagcagaagaggaacagaagaagcagagcagagacg

SEQ ID NO: 26679 - RNA, 75 nt, Homo sapiens
gcccacacaggacagcgccggccacccaaagcacgggggcaacagagggggggacaaggaggaaggaagaaaaga

SEQ ID NO: 26680 - RNA, 62 nt, Homo sapiens
gaggaccaggcgcggcgcggcgcggcgaggggaaggaaggaaaagaaaacgcgcagaaaaag

SEQ ID NO: 26681 - RNA, 71 nt, Homo sapiens
gccccgaccgggagaggagagcccccaggggagccggcggaacaccacgccccaggaagcccccgagggaa

SEQ ID NO: 26682 - RNA, 74 nt, Homo sapiens
acccgaaaaacccccccacaggcccaaagccaagaagagagcgggcccagagccgacaagcagaccacgaaccc

SEQ ID NO: 26683 - RNA, 55 nt, Homo sapiens
ccaccgggggagcggggggacaggaaagcaggacggggggagcgaaagcagggag

SEQ ID NO: 26684 - RNA, 74 nt, Homo sapiens
cggagacccgggacgcagaagaaagcggccggggccgggccgagcacggggaaacggacaggagagacaacgga

SEQ ID NO: 26685 - RNA, 89 nt, Homo sapiens
agagcaggcggagaggaaaggggaaaaaggaacagacccaacaaaggacaaaccggcgaccacacacggggacgacggggaagccggac

SEQ ID NO: 26686 - RNA, 71 nt, Homo sapiens
cggaaacgaggaaaccgggaaagccaccgaaaagggaggggcaagcacaagacaaaacagagaaaagcaaa

SEQ ID NO: 26687 - RNA, 99 nt, Homo sapiens
acgacgcgcacaccaaggagacgaccggcaaccgcgacccaaacacccaacgagacgggcaaggggcaaggagccacaagccacgacccagaaggcagc

SEQ ID NO: 26688 - RNA, 85 nt, Homo sapiens
caaccggacaccaggcgcgaagggcaccacgacccgaaggcggagcagccgagaacgagccaaccagcacagaggcccgaaagca

SEQ ID NO: 26689 - RNA, 71 nt, Homo sapiens
cacggggccgggagacaacgccaacccaaggaaggaccaaacggagaaccaggggcagagccgaacacaac

SEQ ID NO: 26690 - RNA, 79 nt, Homo sapiens
aagccgcacacggagagggggaaccgagcagaccgggccaggaggcggcaaccaacaagggacagaacccaccagacaa

SEQ ID NO: 26691 - RNA, 72 nt, Homo sapiens
gaagaagccaaaagcaccgaacaccacaccccaaaagaggcggacaacacgaaaacagaggacagcagcaga

SEQ ID NO: 26692 - RNA, 71 nt, Homo sapiens
ggcacccccggccagacagacaggagggaaacacgaaagccaaggaggaggacgccgccagccaccggcgc

SEQ ID NO: 26693 - RNA, 43 nt, Homo sapiens
cccccagcaccccaccagagaagagcccggaacgccagagcgg

SEQ ID NO: 26694 - RNA, 79 nt, Homo sapiens
gcccgagacgggcccgccgaaagggaaaggaccagcagacccccagcagacccgacaaagaagacgagcagcaagacag

SEQ ID NO: 26695 - RNA, 41 nt, Homo sapiens
cacaaggcgcagggggaaaaaaaggacccaagggggcaaag

SEQ ID NO: 26696 - RNA, 90 nt, Homo sapiens
caagaaaacaaaggcaccggggacgccaccggagaagggaggaaaaccaacaagccgccaggagcaaggcagcgacccagggcacagcgg

SEQ ID NO: 26697 - RNA, 58 nt, Homo sapiens
gcgggcgggccccgagagcagcagcggcacggagcgcggacgcccaggagcgggcgcc

SEQ ID NO: 26698 - RNA, 78 nt, Homo sapiens
cgcgcgcccgaaggccaggacgacgaaccgcaccacggcgggaggccgcgcagccagggggagcagaggacagggaag

SEQ ID NO: 26699 - RNA, 84 nt, Homo sapiens
acagccgcacccgcgccccagcagggaaggcaaagaggagcccaaaagagaaacagaccaaaaagagccaccaacggaaaagaa

SEQ ID NO: 26700 - RNA, 82 nt, Homo sapiens
agacaccaaggagcgcagcagcgcgcagggcagccccagcgagcacccgaggaagggagccgaaaggaggggcagcccggga

SEQ ID NO: 26701 - RNA, 66 nt, Homo sapiens
aaaaacaccgacacagaggccccagcaaaggaaaggggggaaaagcggaagggaaaaagagccaga

SEQ ID NO: 26702 - RNA, 85 nt, Homo sapiens
cggcgcgggacgcagcgaagcgacgccccgggccgccaggagcagacgaagcccgcggagcaagccgcgccaggcccagcagaac

SEQ ID NO: 26703 - RNA, 76 nt, Homo sapiens
acaccaacaaccaccaacgaacagaccgcccagaacacagagagagcgggaagcagcacaagcgggacccaggcca

SEQ ID NO: 26704 - RNA, 68 nt, Homo sapiens
ggagccgcagccaaaagggagaacagaaaagcggagagacgacgacaccggggcaaagagggcggaag

SEQ ID NO: 26705 - RNA, 73 nt, Homo sapiens
aaacggcaaaaaccagacaacgagaaagagagaagaaagacagcgggaagaggccccgggcccacgggcagcc

SEQ ID NO: 26706 - RNA, 82 nt, Homo sapiens
gggaggcaaaggcacaagcgccccagaggacacacgccaaggagacgagagggccccaaagggaccagggacgcgcccgcgc

SEQ ID NO: 26707 - RNA, 63 nt, Homo sapiens
gcgagcggggggacgccggcggagacgcgggcgagggggcagcacgccgaaggagagaccaga

SEQ ID NO: 26708 - RNA, 77 nt, Homo sapiens
ggggacgggagaagacaacgggccgacgaagcgcggcagaccacaacgggcggagaaggaagcaaccagagacaaag

SEQ ID NO: 26709 - RNA, 63 nt, Homo sapiens
caaaaccacgggcgaggcgccgcggcacgcgaggccccgccagagccccccaagagaacccag

SEQ ID NO: 26710 - RNA, 75 nt, Homo sapiens
cagcagaagagccaaggaaaaacagcaagaacccaaaaggcagccccgcccccaaggaaccaacaggaggaacgc

SEQ ID NO: 26711 - RNA, 70 nt, Homo sapiens
caggccggaggaacggagcaccgcgcaaaaaaacgggggcgggccgagcgccgagacagagaaacacacc

SEQ ID NO: 26712 - RNA, 82 nt, Homo sapiens
aaacagacccggcgcccagcggagcccccgcgccccgacccagagccggaggagccaccaacagaagcaggagccaggaaac

SEQ ID NO: 26713 - RNA, 39 nt, Homo sapiens
gaggaggaggagaggaaaaagcagagggaaagggcgggg

SEQ ID NO: 26714 - RNA, 74 nt, Homo sapiens
cggacccagcgggcgccgcacaccacacccaaccgccacggaagggacgaccgaaaacccagccagacaaaaga

SEQ ID NO: 26715 - RNA, 83 nt, Homo sapiens
cgccgccccgcgagcacagagcccgccgccgaccgccgcccgccacacccgccgccaggaccgcgcagacgcgcaggacggag

SEQ ID NO: 26716 - RNA, 37 nt, Homo sapiens
ccaccccaccgcgcagggagcacggaaaagggaaaaa

SEQ ID NO: 26717 - RNA, 77 nt, Homo sapiens
ccccaggcccgaacaccaggcaggacccggacccagacacagcacacccaaaccacccgaggaccaaagaggaaggc

SEQ ID NO: 26718 - RNA, 76 nt, Homo sapiens
gcgcccgggcgcgcagcacggacccgccggcgccgcgccggggacggcagggagggcaagaacggaagcacgggcg

SEQ ID NO: 26719 - RNA, 59 nt, Homo sapiens
agcggggagacagcacaaggcagggggaaggaaagacccgccgggcaggaggagggaag

SEQ ID NO: 26720 - RNA, 74 nt, Homo sapiens
aacagcaacaacgggccggaagggcaaaacacaaggcaagggacgaaaggacaggacacccagcaacagaccga

SEQ ID NO: 26721 - RNA, 77 nt, Homo sapiens
gggccgagcggggccgggcgcccggccgcgcaccgggcggcgcggcgggaggacacccggaggagggacgggccaag

SEQ ID NO: 26722 - RNA, 73 nt, Homo sapiens
gaagggaggacaccagaacacacgcaccccggggacagggacagaggcacagaagagagagcacaccgagcag

SEQ ID NO: 26723 - RNA, 60 nt, Homo sapiens
caccagagagcgcggcgggagcgaggccgccgcgcaagaagcccagcagcccgagacccc

SEQ ID NO: 26724 - RNA, 79 nt, Homo sapiens
gccagccccggggcacacacggacagccaagagcacaagacacccagaaaaccccaaccaccgggaagaagaggaaaca

SEQ ID NO: 26725 - RNA, 73 nt, Homo sapiens
gcacacaacaacgagaagggcggagaacggaaaagcaccaggaagcagagaggaccgcagaagggaaggagag

SEQ ID NO: 26726 - RNA, 67 nt, Homo sapiens
gagcgaaaaggccaagaggaaagaccaggagaaggcggggaggaagacgacaacagggcagcaggca

SEQ ID NO: 26727 - RNA, 72 nt, Homo sapiens
agccgaggcagggaccccccaggacgaagcaaaaaacaaacccagacccgacaggggccaaagcagccgcgg

SEQ ID NO: 26728 - RNA, 62 nt, Homo sapiens
cggcggcgcccgcaccgcgcccgcaaagaacgcacaccagcaccagcccaccaaaccagcac

SEQ ID NO: 26729 - RNA, 54 nt, Homo sapiens
agcgcgggaagggaaacggaagccgacaccggaacagaaacacaaacagggacc

SEQ ID NO: 26730 - RNA, 58 nt, Homo sapiens
ggagcccaagaaaacaagcaaagccaccaaaaccccagccagggaacaaagaaaccag

SEQ ID NO: 26731 - RNA, 73 nt, Homo sapiens
aaacacaagggcagaaagagaagaccagacagccgggccagaacaggcgaaaaaaggggggagaacaagcaaa

SEQ ID NO: 26732 - RNA, 53 nt, Homo sapiens
ccaagggcgggagaaccaggaagccgggacaagcaaggggccaaggagccaag

SEQ ID NO: 26733 - RNA, 86 nt, Homo sapiens
gaaagcaccggaagaccccgaaggaaaaggaggaacgccggcccgagaaagcccgccagcagagggaaaccaaagggcagccagac

SEQ ID NO: 26734 - RNA, 77 nt, Homo sapiens
agccgggaccccagccaggagaaagacagcaaagaaaaggagaagaaaggaaaaaaacaaccccgggcaccccgcca

SEQ ID NO: 26735 - RNA, 74 nt, Homo sapiens
gaagcacgcgcccgcacccgggaccagcacaagggggccaccaccacaacagaagacgagaccgaaagccacca

SEQ ID NO: 26736 - RNA, 87 nt, Homo sapiens
cgcgccaggacagacgcacagacaccgcaggaagggcaaggacacccccacaacacggggccgaccacccagaacacaagggcggaa

SEQ ID NO: 26737 - RNA, 71 nt, Homo sapiens
gaggacagaggccagaccccaggcccgaacgcggacggcacgcagacgccagggcaagccagcgacgagac

SEQ ID NO: 26738 - RNA, 75 nt, Homo sapiens
ggcgcgggcagccacgcccggagacgacaccaagaggaaaaaccaggcaaggaagcacaagcgacaagaggagcg

SEQ ID NO: 26739 - RNA, 83 nt, Homo sapiens
cgcacccaaacccagccgcgcagcccgaagagagagcagcaccagcagaagagggcccgaccacggcaacccagaggcgaagc

SEQ ID NO: 26740 - RNA, 72 nt, Homo sapiens
gcaaaaccagagaaagaacacgcagcgaaacccacgacgacagaccggaccgccgcgccccccaacgaccag

SEQ ID NO: 26741 - RNA, 52 nt, Homo sapiens
cgaccgagaaaaaccgaaagagccagaggaaagacaagccccaaaagcagcc

SEQ ID NO: 26742 - RNA, 54 nt, Homo sapiens
gaggacaaagaagccacgaagcaaaaagacccccaagaggagcgccgcgcccag

SEQ ID NO: 26743 - RNA, 69 nt, Homo sapiens
aggaccaagaaccagaacgcggacaccaccaaaagagagaacaacaaaggaaaaaccgcaaagaagaga

SEQ ID NO: 26744 - RNA, 82 nt, Homo sapiens
aggacgaagaaaccgaagggaaagccaggaaaagcccggaaaagcagccaagcggaagacagagccgcaaagagacacgcag

SEQ ID NO: 26745 - RNA, 80 nt, Homo sapiens
gcgccgggggccggggagcgccagcaccaaggagacagacgagccggcgcagaaaagaaggagcgggcgccaaagaacag

SEQ ID NO: 26746 - RNA, 69 nt, Homo sapiens
gcccccagccgcagccacaacaccggcaggaaccaccaggacagaaaaccacacccagccgcaccggcg

SEQ ID NO: 26747 - RNA, 78 nt, Homo sapiens
gcaaaagacggacggaaccacaaacaaggcgcagagccccccgcgccccaccagccgggacacgacgaaaggaagaca

SEQ ID NO: 26748 - RNA, 70 nt, Homo sapiens
gaaaagcccaggaggaagcaggagcagcccaagcgccccccacagcaaggcaccggcaccggaccaacac

SEQ ID NO: 26749 - RNA, 50 nt, Homo sapiens
ccccccagccagggaaccgggggcccgcgggaccagcccggccggggccc

SEQ ID NO: 26750 - RNA, 79 nt, Homo sapiens
cacggggccgcggaccagagacgccacgcgccacaccagcaccagcaagcggcaggcgcggagccccagagagccgggc

SEQ ID NO: 26751 - RNA, 69 nt, Homo sapiens
agggggaggagacccaccagaaaccccgcaaggcgaggacgggaggacgcaaggaccaaaaaacaaagg

SEQ ID NO: 26752 - RNA, 73 nt, Homo sapiens
caaaggcaccgggggcacagggccaaaccaaagagagaagagaagaaaagagaaaagcagggacaacaaaaaa

SEQ ID NO: 26753 - RNA, 59 nt, Homo sapiens
aagccaaggggggagagaagaacccccgccaaaacagcggcagagaggcgagacacgga

SEQ ID NO: 26754 - RNA, 71 nt, Homo sapiens
cgaaccaagaagacccggaagcccaagaagggggaccggcccaaaaagacaggaagggaaggggcggagac

SEQ ID NO: 26755 - RNA, 74 nt, Homo sapiens
gccaccgacaaggccagagaaagaacaccaaccaaagcgccaaagaaaccacaacagaagacagcaaaccaaag

SEQ ID NO: 26756 - RNA, 56 nt, Homo sapiens
cacgagcaggcgcgagacgggggaacggacccccagaacaggccaacaccgcgcca

SEQ ID NO: 26757 - RNA, 75 nt, Homo sapiens
gggaagccccgcgccggccgcccggaagaaggaaccagcaaagcgccacgaagcacaagcaagaggaccagccaa

SEQ ID NO: 26758 - RNA, 112 nt, Homo sapiens
gaccgcaggagcagcaaacgcaaggggaaagagggggacccaaggacgcgaaagacacaaagcgagaagacccagcaaccagcagcaagaccaagagaggcccgggacccaa

SEQ ID NO: 26759 - RNA, 65 nt, Homo sapiens
ggcgccagagcggggagacgccagacaacacccaggcagaagcggaaagacagggaaggccgcca

SEQ ID NO: 26760 - RNA, 68 nt, Homo sapiens
aaggaccaagaaccagaggaagggcaaaacgcagaagggaagcaaaaggaacagggggcagaaagacg

SEQ ID NO: 26761 - RNA, 97 nt, Homo sapiens
gaaccgaacagacaagcaaaagagaaacagccagaagaaaggcgaggcgaagagacaacaggcacaaagagagaaggaacacccacagggcagacag

SEQ ID NO: 26762 - RNA, 49 nt, Homo sapiens
accggaaccacacacaccacaggaagccaaggggcgcacccaacgcgca

SEQ ID NO: 26763 - RNA, 77 nt, Homo sapiens
agcaagagaagcggggcaccagcggagccaaaggcaaacacagcagaccaggcagaccaggagccgaccaaaaagca

SEQ ID NO: 26764 - RNA, 85 nt, Homo sapiens
aagaaaggagcgaggagcagaaaccagccacgggccggaggcaaaaaacccagcagaccgggacccagccgaggccagcgaagga

SEQ ID NO: 26765 - RNA, 62 nt, Homo sapiens
ggcggagacccgaggccaaggagccacccagggccaccggagcagcgaaccgaagccaccga

SEQ ID NO: 26766 - RNA, 72 nt, Homo sapiens
gaagaaggaaagaggcaaacaaagagaggcaaggcagcacgacaaagccgcacccagggagaagcccacgac

SEQ ID NO: 26767 - RNA, 73 nt, Homo sapiens
cgcagggcagacagaaacaaacaacggaaacgacacaaccaggcaaagcacaccaaaccagaaaggggacagc

SEQ ID NO: 26768 - RNA, 96 nt, Homo sapiens
cagcgccgcgggccgcaggccgcgagcagcggacgccggccgccgcaggagaggcgggaggcggcagaagcagccagaggagggcacaggcggcgc

SEQ ID NO: 26769 - RNA, 58 nt, Homo sapiens
gccgccgaggaggcccggggagcgaaggagcgcagcaccaggggaaaaaagcagcgga

SEQ ID NO: 26770 - RNA, 76 nt, Homo sapiens
gggaaaggcgaagaagaaccaccacagcaggaaaacaaagagagaaggacacaggaaagaaagaaggccgcaacag

SEQ ID NO: 26771 - RNA, 40 nt, Homo sapiens
ggcgggaaggcaggggaggaaaaagcggccaacaggggga

SEQ ID NO: 26772 - RNA, 81 nt, Homo sapiens
cgcaaccgcagcacacagcgaccgggagaacaagacgagaaggacggagaagcgaaagccagaccggcaagagcggaagaa

SEQ ID NO: 26773 - RNA, 71 nt, Homo sapiens
cccagggagcgcaccccaggaaaccagggagccgccaccaaaagcagacggaaaacccacggggaagacca

SEQ ID NO: 26774 - RNA, 43 nt, Homo sapiens
gcaaacaaaagcagaaacaggcaagaggaagaaacgggagggc

SEQ ID NO: 26775 - RNA, 79 nt, Homo sapiens
aggccagagcccaaaccccaggccaagcagccaccagcagcccccagagcgggaccacagggggagacacgagagcccc

SEQ ID NO: 26776 - RNA, 80 nt, Homo sapiens
gcgagaagcagcgggggggcaggcgacgaaggcagaacacccggaaggaccgacgacaaaaacaacgaagcagcaacaca

SEQ ID NO: 26777 - RNA, 30 nt, Homo sapiens
agccgccaaacaggggcggaacaccaacca

SEQ ID NO: 26778 - RNA, 73 nt, Homo sapiens
agaacgggacccggccagaggaaagaacccgaggaaggacagaagcccccagcaacgcggaaccccaaaccag

SEQ ID NO: 26779 - RNA, 75 nt, Homo sapiens
cagagaggacggcaccagccaggaggggaaaagaaacaaacaacaagaagaaggacaaggaacgaaggcaaggag

SEQ ID NO: 26780 - RNA, 71 nt, Homo sapiens
caggaggaagcgaggccagacagcaagagcacccgacccacaggccagagaggcgggcaacacaacaaggc

SEQ ID NO: 26781 - RNA, 61 nt, Homo sapiens
aacagaaacaacgccaaaagaaaaaggagggcaccagaaaagcggcccgagaaaccccgcg

SEQ ID NO: 26782 - RNA, 36 nt, Homo sapiens
cccacgagcccgcaaggacccccccccccacgcggc

SEQ ID NO: 26783 - RNA, 78 nt, Homo sapiens
gcggcggccaggccagacccgaaggccaggagacccgaccccaaggaaggcccgccgaaggagaagggcaggaagacc

SEQ ID NO: 26784 - RNA, 74 nt, Homo sapiens
gccaccaggcagcccgacagagggaacagggagcggccccagaccacgccacagcagggggacggaaaaacaaa

SEQ ID NO: 26785 - RNA, 81 nt, Homo sapiens
ccggggagacgaggggaaagacgaagaggaggagaaaaaccagcggagagagagacggaggagcagacggcgaagacaaac

SEQ ID NO: 26786 - RNA, 68 nt, Homo sapiens
gggagaccaagagacagacaccgccccgagacgaggaagaaaggaaggggcaccacaagacacaaaga

SEQ ID NO: 26787 - RNA, 79 nt, Homo sapiens
gcgggacagcacagaggcagcgccacccgcggaaagccagcgacgaaggaggggacgaacaagaacagaaagggaacac

SEQ ID NO: 26788 - RNA, 69 nt, Homo sapiens
agccccggacggcagacgagagccacaaacacagacgccaggaagccggacgcgcagggaaaacgagag

SEQ ID NO: 26789 - RNA, 34 nt, Homo sapiens
gcgaccaagcgccacccgagaggaaaacccaaga

SEQ ID NO: 26790 - RNA, 81 nt, Homo sapiens
ggaagagaagagaacaacaaacagaggcagcaaaagaggagagcccgcgagccagaccaacacggagcaggagggggacca

SEQ ID NO: 26791 - RNA, 79 nt, Homo sapiens
cggggccgacagcccgccgggacgccggccgacgggacaccaaggcaggcagcccgaggcccacaagcagagaagagaa

SEQ ID NO: 26792 - RNA, 78 nt, Homo sapiens
cggccggcgggacaggggaaaacgacacagcaaagcccaaaaggaccgggagcagagccagcccaggcaacgggaaac

SEQ ID NO: 26793 - RNA, 65 nt, Homo sapiens
cgggccagacggagccaaggaaggcgccacacaaggaacacgccgccccacccgcaggagacagc

SEQ ID NO: 26794 - RNA, 89 nt, Homo sapiens
cggagacggccccaccggcaccgagaaagacaaagaaaggacagggacaggaaagaaagaaaaagaaaagaaaaacagaaagggcaaag

SEQ ID NO: 26795 - RNA, 98 nt, Homo sapiens
gcaaaagcaggacacaagacacaagaaggaaaggggaggacagcccaggaaacccgcagaaagggcagcaagacacgaagccgagaaagagcagcgac

SEQ ID NO: 26796 - RNA, 75 nt, Homo sapiens
cagaggaagacacacaaacggcgcggcagaaaaaccagcccggcgcaggccagcaagacagaaccgccaaagcgc

SEQ ID NO: 26797 - RNA, 84 nt, Homo sapiens
ggccggggccgggcgggcgagccccggcggccaccaaagcggcccccgcgcggacgaaggccaggccacgaacgacgcacggag

SEQ ID NO: 26798 - RNA, 78 nt, Homo sapiens
gcaagacgcgcagagcggggcccgaggccccgaccagacaggacacagaacagagaagaagcagacgagacagaaaaa

SEQ ID NO: 26799 - RNA, 72 nt, Homo sapiens
ggggacgggcccagaggcccagggaggcaggggcagaaacagagaaggaacagggagcgcagacgcgacgga

SEQ ID NO: 26800 - RNA, 53 nt, Homo sapiens
ccacagaacaaggaaggacaacacacgccggaacggggccaagggcgcaggcg

SEQ ID NO: 26801 - RNA, 74 nt, Homo sapiens
ccaaaagagaaagggcaacacagagacaaaaacaggagaaggaacacagggaaccgaccaaacggaaaagggca

SEQ ID NO: 26802 - RNA, 76 nt, Homo sapiens
gaggaggacagcgcacacagcaagcacgagaacagccaagggaaccaagcagaaaacagccagggaaaagacgcgc

SEQ ID NO: 26803 - RNA, 54 nt, Homo sapiens
agaaagagaacgggacaacaaaagagccacccaaggcagcaaagaccagaaccg

SEQ ID NO: 26804 - RNA, 81 nt, Homo sapiens
acccgaggccccagacccccgagccaaacaccgggcgggaaaccaggagacgcagacacggaagagaggcaccgccaccga

SEQ ID NO: 26805 - RNA, 83 nt, Homo sapiens
cgcaggcccggaggcggacagagaggcaagcgcagggggacggggaccagcagcgcgccgccgcccaggggcgccgacagcga

SEQ ID NO: 26806 - RNA, 74 nt, Homo sapiens
ggaaccaccagaagccagcccccaggcggaacgcccgccccgcagagagcccaagaccgcaaaaacagagcgcc

SEQ ID NO: 26807 - RNA, 61 nt, Homo sapiens
gaacacccacacacagaggggaaagacccagagaagaggccccgggaccaaggacacgcag

SEQ ID NO: 26808 - RNA, 38 nt, Homo sapiens
agagcccaaagagaccgggcagggaacggaaaggaggg

SEQ ID NO: 26809 - RNA, 81 nt, Homo sapiens
gaagcgacgagccgcgaggagaaggagcccgcagggccgccaccagcacagggagggagaggagccagaggacacggcgag

SEQ ID NO: 26810 - RNA, 65 nt, Homo sapiens
caccgcccggggccgggcagcgagcccacacagaggcagagcaacagggacacaagcaagaagaa

SEQ ID NO: 26811 - RNA, 83 nt, Homo sapiens
aggaggcgaagcgagaggacagggcggcagcagcagcggagcagagcgccggacagcaggaacgcgaccacgaccgacgcaac

SEQ ID NO: 26812 - RNA, 89 nt, Homo sapiens
ggggaaggagacagacccacgacgcagggagcaagaggccaggagaggcgaagcgcgcaaaagacgagccacagcaggaaaacgaagca

SEQ ID NO: 26813 - RNA, 67 nt, Homo sapiens
cgaggcggcgcaaagcccacggcggaccaccaaaagaaagggaaggaggaggagaaagccaccacgg

SEQ ID NO: 26814 - RNA, 53 nt, Homo sapiens
gcggaagcaggagcggacagcgcgggcggcaaagaaggggcgaccacagaggc

SEQ ID NO: 26815 - RNA, 74 nt, Homo sapiens
cggaagaccagcggacaacaaagaaggggcaaagagcgccgagacgaggaggaagaaaaacgcccaaagacagg

SEQ ID NO: 26816 - RNA, 66 nt, Homo sapiens
gcgggagaaaagaagccaaagaagaacaggacaggacgacgcacacaacgcaaggaacccaaaacc

SEQ ID NO: 26817 - RNA, 74 nt, Homo sapiens
ggaggccacacccaaaaaagggaggcccgcgacacagggagaccagggaaaagacagcacagacccagacagac

SEQ ID NO: 26818 - RNA, 74 nt, Homo sapiens
gagagccgcccgggccagcggccgcgcacccccggccggaggcaccagcaccaacccacagaggaccagagaga

SEQ ID NO: 26819 - RNA, 51 nt, Homo sapiens
aagcccaagaaacaaacaccccaaaagcacgcacgaaaccggcaagccagc

SEQ ID NO: 26820 - RNA, 80 nt, Homo sapiens
ccggcaggacggaaggggaagaggcccacccggagaaccccacggagaaccagagcggaacacgggcaacgggggaagac

SEQ ID NO: 26821 - RNA, 72 nt, Homo sapiens
cgccggcgagggaagcggaaccaaccgggaaagcccggggcaggcacgagacgacggagagggacaaacaac

SEQ ID NO: 26822 - RNA, 78 nt, Homo sapiens
gaaaccggcagaccccagacccaaacaacggcagaagcagcaccgaagggcacaaacagaaggcaccagccccaaaaa

SEQ ID NO: 26823 - RNA, 80 nt, Homo sapiens
gccgccccagccgcccgcggccgggagcggagccccgggagaaggacgaaccagaagcaaaccgcagccagaccgacccc

SEQ ID NO: 26824 - RNA, 83 nt, Homo sapiens
gcacgcgccacgcacacacaggacccgagggcccagccagacccaccccccagcagcacggggggcccgcacgccgaccaccc

SEQ ID NO: 26825 - RNA, 88 nt, Homo sapiens
cgcacaaggcgaggcggaaagagggcagaacaaccgggagggcggagcaggggagcgaggcacaggagcccgcccgcaggacgcccca

SEQ ID NO: 26826 - RNA, 69 nt, Homo sapiens
gggagagggagccaccccgggcgaccgcaagaaaaggaggagacacaggaacccgcgcacccacagcgc

SEQ ID NO: 26827 - RNA, 82 nt, Homo sapiens
ggggcagaaacagagaaggaacagcccccccagcccccagggacggccacccggccccgacgcaaccaggcgaagaacaacc

SEQ ID NO: 26828 - RNA, 66 nt, Homo sapiens
aaacgcagagggaccgagaggacaagggccgccacaggcgcccgcaaaggccccgccagagagaac

SEQ ID NO: 26829 - RNA, 80 nt, Homo sapiens
cgacacaccagcagcaggaccagcccccgacccacccaccaacgcccagggggcgcccaaggaaagaccacagcaagacc

SEQ ID NO: 26830 - RNA, 76 nt, Homo sapiens
gacgcaacacaaacgagaaagacagcccgaacggagaaagagacagaagccgggaccgaacgaaagagaacagaag

SEQ ID NO: 26831 - RNA, 55 nt, Homo sapiens
aaagcagaaagccacagaaaaagcccaaacaaccaacccccagccacaacgcgaa

SEQ ID NO: 26832 - RNA, 76 nt, Homo sapiens
gacgcggcaggaacccggcccagagaacccaggagaaacgagagggacagcaaggaagacgccagagagcggcaca

SEQ ID NO: 26833 - RNA, 97 nt, Homo sapiens
agaagcgggacacgcgccacgcaggccgagccgagagcccgacccggccagacccgacagggacagcggcaccacccaaaagaaaaggcccacggcg

SEQ ID NO: 26834 - RNA, 72 nt, Homo sapiens
gacgagaagggagacgccgaaaggcacagcaaaggcccagaagaaccaaagaacagcaagcccccccagcca

SEQ ID NO: 26835 - RNA, 82 nt, Homo sapiens
cggaccaggaccaggaacaccaaacggaccaaggccacccaccgacagcaccggccgagccgcggcgcgcaagggcagcccc

SEQ ID NO: 26836 - RNA, 91 nt, Homo sapiens
cggaagcacggggagacggagaaacgaccggccggcgaccggaagcaccggcgggccggccacgccagcggaaggcgcgcaagacaccccc

SEQ ID NO: 26837 - RNA, 77 nt, Homo sapiens
ggcggggccccagcgcccgggcgcggggcggaaaaggccggcagaagggaggcacgagaaagccggacccacagccg

SEQ ID NO: 26838 - RNA, 76 nt, Homo sapiens
cagcccccgggagcgggacacaggccccagcaggaggacccgccggaccagccacgaaaagccagagacaaggggg

SEQ ID NO: 26839 - RNA, 83 nt, Homo sapiens
ccggggaacccacaggagcgcggaagacgcacaagggaagacgcgcagcaaggcgggggagccaagggagagggaagaaaaca

SEQ ID NO: 26840 - RNA, 76 nt, Homo sapiens
ccgaggcgaccgcggaccggcgccccggcgcgaagaggcggaccggacggccgagcggaccgacccccagccgagg

SEQ ID NO: 26841 - RNA, 76 nt, Homo sapiens
cgagccccccggggcgccaaaacgcccccaacccagcgcaaaggaagaggaaggaaaaccgcccagccggggcacc

SEQ ID NO: 26842 - RNA, 77 nt, Homo sapiens
gggcaagagcaccgggacccacgcgaccccggggccacccaaggagggaggaagaggcgcggcaagggcgcggcaag

SEQ ID NO: 26843 - RNA, 76 nt, Homo sapiens
cagcgcggggcaacagggaccccgaaaaagaccaggaagggaaaacccagagaaacggagaaagaagagccagggc

SEQ ID NO: 26844 - RNA, 74 nt, Homo sapiens
cgaaagcggcgagagcgaagacccaacccaagagccacgggaagaaggaaagcgaacgcgaaaagaaaagccga

SEQ ID NO: 26845 - RNA, 83 nt, Homo sapiens
caccacgcagccagacccaacggacacgcagaccagccggcccggccggacgaaagaagcaccaggggccggcagggggccag

SEQ ID NO: 26846 - RNA, 114 nt, Homo sapiens
gcggagcagacccggacaaccagaggcgaggccccaacccgggcgaagcgaaaggggcccccccgggcggcgggcccccggcacccgaaagcccaggaccgggagagccagaga

SEQ ID NO: 26847 - RNA, 63 nt, Homo sapiens
gagcccgcaagcccggcccgagaccaaggaagccaagcggggaaagcgccaaacggggcgaca

SEQ ID NO: 26848 - RNA, 76 nt, Homo sapiens
agcggaggaaggagcaccccacgcccaaaagggagagcagcgcgcgccggggcggggccgccgcgccgggccgaac

SEQ ID NO: 26849 - RNA, 67 nt, Homo sapiens
aaacggaaggacacagagccaacccagaagagccaaggagccgggcagagaaaagaacgcgaggaga

SEQ ID NO: 26850 - RNA, 81 nt, Homo sapiens
ccggccgcggcacaccggagagcgacgggacccccccgcagaaggcaccaaggaggccccggccgaaggaccaggcaccac

SEQ ID NO: 26851 - RNA, 59 nt, Homo sapiens
acaggacaggaaccgagccagaggaaagcagaaacggcgaggaaagagaggagccccgg

SEQ ID NO: 26852 - RNA, 70 nt, Homo sapiens
gagaccgggcggagccggacgagcgcggcccagagaggaccaggaaaaaccccagaccaccaacacgcag

SEQ ID NO: 26853 - RNA, 35 nt, Homo sapiens
cacacacgccccaaccggcaagcagaagaggaaca

SEQ ID NO: 26854 - RNA, 56 nt, Homo sapiens
ggcagccccgcacgagcggcaaccgaaagccagcagcgggaaggggaggagcacag

SEQ ID NO: 26855 - RNA, 72 nt, Homo sapiens
ccccacagaaagccagaacaagcaaacaacggaaaggagggggaagcaacggccaaaagccgacacggccaa

SEQ ID NO: 26856 - RNA, 83 nt, Homo sapiens
gcacggccgcgacagaggaggacaacaggacccgagcgaaggagcagggggacaccaacccgcgggcccggcagccagcgacg

SEQ ID NO: 26857 - RNA, 56 nt, Homo sapiens
cgaagcccagcgggccggacggggcggggggaacgggagaggaagagaaagcagcc

SEQ ID NO: 26858 - RNA, 81 nt, Homo sapiens
gaaacggagaaggaacgagccagcagcggacagagccgggggggcgagcccgccgagagcgccaaggaggagacaacgggg

SEQ ID NO: 26859 - RNA, 83 nt, Homo sapiens
aaaagaagagaaagccccaagcgacaggggagggacccagaaccacagagccccagcggagaggccggccccagaaggaaccg

SEQ ID NO: 26860 - RNA, 78 nt, Homo sapiens
ggggcgcccaccggcggcgaaggcacacgcggcagagagaagcggacagagcaccacacaccccagcagacacaacca

SEQ ID NO: 26861 - RNA, 56 nt, Homo sapiens
acaggcccggagcggccgccggcccaaagggaggcccaagcagccccaaaaaacag

SEQ ID NO: 26862 - RNA, 87 nt, Homo sapiens
gcaccgggagcgccgcccgcgggcagcccaacaccccacaagacgaggccggcagaagagacaagagagacaccccaaccgacaaag

SEQ ID NO: 26863 - RNA, 79 nt, Homo sapiens
gacaggcggaggccccagggaagcgcagaaagcaggcgaacccgcggcgcaaaacgaaggagaggccagggagacgaaa

SEQ ID NO: 26864 - RNA, 72 nt, Homo sapiens
ccggaccgcaacaccgcaacccacgcaggcaagaaaaggggaaggaacaaaccaaagagcagaccccccgga

SEQ ID NO: 26865 - RNA, 116 nt, Homo sapiens
cgcccgcagcgagacccccagcagcagggcaaccccgggggcagcagcaacgccggacgcccacgcaagcagccaagagaaaccaccaagagccaggaaggcaaaggccgagagag

SEQ ID NO: 26866 - RNA, 76 nt, Homo sapiens
aagagcgacaggaggagacaggcgagagaggaggacacgaccgccccacccagaaagacaagcagggagaaagaga

SEQ ID NO: 26867 - RNA, 68 nt, Homo sapiens
aggaacagagccgaaggaggggaggagcggggggaggaggacccagaagggaaggcggcgggcacggg

SEQ ID NO: 26868 - RNA, 84 nt, Homo sapiens
ggcggcggcggccagcgccagagaggaggcagagagccccgcgacgagagagacagagagaccacgccgagcgagaggaacgga

SEQ ID NO: 26869 - RNA, 74 nt, Homo sapiens
gagaacaagacgaagaacagaaggcgacaaggccaagaccgccagcaaaggaagacgagggcgcgccagaggac

SEQ ID NO: 26870 - RNA, 71 nt, Homo sapiens
acgcagagaaaaggggcgggcggcgacggcggagggcccgcacaaccgaagagccaagcccccccagccca

SEQ ID NO: 26871 - RNA, 43 nt, Homo sapiens
cgcacccagacacaccgcagaaccgaaggcggcaacacagacc

SEQ ID NO: 26872 - RNA, 72 nt, Homo sapiens
ccaccgggaccagcgcggaggaggcggggaccgggaccgggacggaccgggagggcccccgggaaaccgaag

SEQ ID NO: 26873 - RNA, 67 nt, Homo sapiens
ggggccagagcgaggcgccccgcccgcggaccgcggcagcccagagcaggggaaagggagccagcag

SEQ ID NO: 26874 - RNA, 71 nt, Homo sapiens
acacacaacaacaggacaaccccaaacgggcccgcacggagggaggccaggaggagcagccccagaagcac

SEQ ID NO: 26875 - RNA, 71 nt, Homo sapiens
ggaccccaccaggaccccagaggccgggcgcccaggaacccacgggccacagagcccagcgccaggaacag

SEQ ID NO: 26876 - RNA, 45 nt, Homo sapiens
ggaacaccgcacgcgcggaggaggagaagaaacgaggccggaaga

SEQ ID NO: 26877 - RNA, 77 nt, Homo sapiens
cgggcgcgccggcgccgggaccgggcggggccgccgcggcccggccagacaagaagcaccagaagcggagcagagga

SEQ ID NO: 26878 - RNA, 77 nt, Homo sapiens
ccacggggagcaaaaccaacgccggccggagcagcagcccgagacaaaacagaggagaccagaccagaagccccgaa

SEQ ID NO: 26879 - RNA, 76 nt, Homo sapiens
ccccaaaagagcggcggagagaggacaccgcgaccagcaccacccaaacaagaccacaagaccaaaaagcaaggac

SEQ ID NO: 26880 - RNA, 83 nt, Homo sapiens
cccgaaaaagaggcaaaagggaagaggcgacccagccccgggagggaacgaagcccgccggccaccccggagaagaccaagca

SEQ ID NO: 26881 - RNA, 68 nt, Homo sapiens
gaaacgcgaaggcccggagaaccaagaacccaccacccagcagcagggcacaagggggaaaggaagaa

SEQ ID NO: 26882 - RNA, 60 nt, Homo sapiens
cccgggagcccagccaccacagacagccacccacgcccccaagcccccaacagaagacag

SEQ ID NO: 26883 - RNA, 52 nt, Homo sapiens
ccgacagccccagaagcccaaaccccagaaaacaagggaaggagcggagacc

SEQ ID NO: 26884 - RNA, 76 nt, Homo sapiens
cgaggagaggcaacaggaacgaaccagaagagcgcaacaagggaacaagaggacccccaaccaaggaaaaagccag

SEQ ID NO: 26885 - RNA, 81 nt, Homo sapiens
cgaacaagcgcgggcgaggagacgccaaccccagcaaaaagcccgcaacaagaagcaggaaaaagagaagcgcagcgaaaa

SEQ ID NO: 26886 - RNA, 58 nt, Homo sapiens
gccaccggcggaaagcgcagcagcagggacgcaccaaaacggacagccgaagacaggc

SEQ ID NO: 26887 - RNA, 74 nt, Homo sapiens
aaggcggaccgagaacgagggcagggacaggagcgcagcaggccacccaagcggaggcccggcgaacggcggag

SEQ ID NO: 26888 - RNA, 50 nt, Homo sapiens
gcagcgaggcgaaagcaaccacagggcgaacgaccccggccccccaccac

SEQ ID NO: 26889 - RNA, 59 nt, Homo sapiens
cacccgcccccgcgggcgccgggccaggacggccacccaggcccaggaccgagcccgac

SEQ ID NO: 26890 - RNA, 75 nt, Homo sapiens
aaagggaaccgaagcggacaacaggaagcgggaggagcgacccagcaccgcagcggaagcacaaagccagcgaac

SEQ ID NO: 26891 - RNA, 63 nt, Homo sapiens
ggaacggccgagcgcgggaaacggcgggccccgagcccagggaaagacaagggagcaaacaaa

SEQ ID NO: 26892 - RNA, 77 nt, Homo sapiens
gagggggcggccgggcggagagaaccagcgaggacgagacacggcacagcgaggagaacgcacccaaccagagaaag

SEQ ID NO: 26893 - RNA, 73 nt, Homo sapiens
agccggcggccacccccccccaccccgacccacgcccggccccgacacggggacaacaggagaagcggaagga

SEQ ID NO: 26894 - RNA, 60 nt, Homo sapiens
caagcgggaacggcggcccaggccgcaacccaggagcccccggcagcagcgaaagccacc

SEQ ID NO: 26895 - RNA, 51 nt, Homo sapiens
gaggcgcaagcggacaggggacccccacacagaccaggcccgcaagccaag

SEQ ID NO: 26896 - RNA, 75 nt, Homo sapiens
cagaggcaacaagaggagcgccccggggcgcagggagcaggagaagcggagcgaaggggcgggcaggcagaggcg

SEQ ID NO: 26897 - RNA, 71 nt, Homo sapiens
agccgaccgagcccaggagcgccacgcgcggaaggcagcgcccagcagcgcaggcggaggcagggcacgac

SEQ ID NO: 26898 - RNA, 77 nt, Homo sapiens
cccagagaccccaaaggcacccgcgagcgcaacccaagggacgaagccacgacagcagagaggagcacggcagaggg

SEQ ID NO: 26899 - RNA, 71 nt, Homo sapiens
ccccacaggggagcggcagcgcagcgagccaccgcagcacagcaagaagagaaccaggcccagaggaggag

SEQ ID NO: 26900 - RNA, 78 nt, Homo sapiens
gccaaacccaggagaacacaggccgacagaacagaaaggcaaaaagagacacacagggaaggcagagaaaaaaggaaa

SEQ ID NO: 26901 - RNA, 61 nt, Homo sapiens
gcaccgccgggaaccaccggcacgccaagacaggccaaaacagaagaggcaaagcccagcc

SEQ ID NO: 26902 - RNA, 78 nt, Homo sapiens
ccggcgacggcgcagggcggcccacaccacccgaccacccgcgcgcgcgaacgccaaggaagggccccacaccaaacc

SEQ ID NO: 26903 - RNA, 54 nt, Homo sapiens
gcagcagaagcccggacacacacaagccaggggcgaaggagaccgaggggaaac

SEQ ID NO: 26904 - RNA, 67 nt, Homo sapiens
agaaaagacgaagggaaaaaagcagagcccaggagaaaccggacgcgacgggaaacaagacagacga

SEQ ID NO: 26905 - RNA, 73 nt, Homo sapiens
aagacgggccccaacacccagagacgaaaggccaggcgaaccagccgaaaaaggagaaaccaaaaggaaaagc

SEQ ID NO: 26906 - RNA, 69 nt, Homo sapiens
caggggaaacagagacagaaaggagggacgaagacaccgacgggccagaggggacggcaccccaagggg

SEQ ID NO: 26907 - RNA, 52 nt, Homo sapiens
ggaagcacgaaaaccccagccggacacaagagggcaagaaaggcgcgacggg

SEQ ID NO: 26908 - RNA, 79 nt, Homo sapiens
aaaaggccagcccagcaaagacagccgcaaaaacacagaagcaaagaagacaagccaccagcaagccgccggccgcccc

SEQ ID NO: 26909 - RNA, 81 nt, Homo sapiens
ccgcggcgccgagggaccaggccgacccgcggagacagacaagacaagaccggcggggaagcgagcacgcgggagaggaag

SEQ ID NO: 26910 - RNA, 63 nt, Homo sapiens
agaagagccaacgaccaagaaaacaccggaaaggaaggggagaagaagcaccaacagaacaga

SEQ ID NO: 26911 - RNA, 89 nt, Homo sapiens
gcacgaccacaaggacagggcaacaccgaagaaagagccaaacgccaaggcggcaacgaaaaggggaacgaaacaagaagagaaacgca

SEQ ID NO: 26912 - RNA, 77 nt, Homo sapiens
cggaagacaggccacccagcggggagcacggcgagcagccaggccaggagaggggagagcccggaaaaccaaaaggg

SEQ ID NO: 26913 - RNA, 71 nt, Homo sapiens
aagccaggccacggaccgcggagacccccagcccagagcgcaaacacgaccaggcccgccccccacaaggc

SEQ ID NO: 26914 - RNA, 83 nt, Homo sapiens
agcccgccaagaggcggaaggccaaggcaccggcccccacgggcggcgcagggggagaagaacagagcgccgggacaggaaac

SEQ ID NO: 26915 - RNA, 77 nt, Homo sapiens
aaaacagcgaaaaacgaggaaagacagacccaccaaaccagccgaaagggagaggccaaagagaagccaccgaaacg

SEQ ID NO: 26916 - RNA, 59 nt, Homo sapiens
cacccgaggagccgcccccggcaaagagagggggacaagcacccgaggaggccgcgagg

SEQ ID NO: 26917 - RNA, 70 nt, Homo sapiens
cgccgacaacccaggcaggacacccggacaaaaggccaggcaaaaaaggcaggcacagaggacagagaca

SEQ ID NO: 26918 - RNA, 87 nt, Homo sapiens
cccacgaaggaccccacagcccagccgggaagggacagacgggcgcagacccgggccacaaacgaagaaaaaggaaccccaaaggag

SEQ ID NO: 26919 - RNA, 82 nt, Homo sapiens
ggcccgagcgcaccggagggacggcacagggaggccagccggagaagcgagcagcgaaaaagcggggaaaacaaaaaaaaga

SEQ ID NO: 26920 - RNA, 47 nt, Homo sapiens
acgcggccagcgaaaacgcccaggaagacgagcgacaggcgacgagg

SEQ ID NO: 26921 - RNA, 59 nt, Homo sapiens
ccacgacccaggccaaccccggggcacaaggccacagcgcagggaaccaggaggagccg

SEQ ID NO: 26922 - RNA, 48 nt, Homo sapiens
gaacaagcaacggcggaacaaagggcaaaggacacaccgcacaaacgg

SEQ ID NO: 26923 - RNA, 62 nt, Homo sapiens
gccaacgaggaaccaaagggagaggaaaggacggaccggaggacgaggggacgacaccggga

SEQ ID NO: 26924 - RNA, 78 nt, Homo sapiens
cagggcgaggaaccagcccaccccgaccgcccccgcggccccagggaaaggaccgaggcaggaaagaggccagacgca

SEQ ID NO: 26925 - RNA, 75 nt, Homo sapiens
gcaacgcggcgggcgagacgccagggacaggagccagcggcccaggggcgggggaggaaacagagacacagcagg

SEQ ID NO: 26926 - RNA, 61 nt, Homo sapiens
gcaccacggccaagggggacaaggggcgaacccaagagcagaaggccggagccccgggacc

SEQ ID NO: 26927 - RNA, 80 nt, Homo sapiens
agacaaacggcgcggcagcagggacacagcagggcaaggaagaagaagcagcagccagaaaaaaagaaaagaaaaccagc

SEQ ID NO: 26928 - RNA, 82 nt, Homo sapiens
caccccgaggcagggcgacagcggcggcgagaggagaacaacaagcgacgcggagaccaaagaggaaggggaccaacacaga

SEQ ID NO: 26929 - RNA, 89 nt, Homo sapiens
agagacacccagcagcccccaccacggccggaccgaagggcggcggcggaggggagccagggcgccccagcaggcgggcaacacaacaa

SEQ ID NO: 26930 - RNA, 60 nt, Homo sapiens
caccaccgcccagcgacagggaagcagcccaccacaaacggagccgccgcacccaggcgg

SEQ ID NO: 26931 - RNA, 76 nt, Homo sapiens
gcaagggcaaaacgaaaaagccaagcccagaaacagacccagaagggcagagccggaggagagggcacggaaacaa

SEQ ID NO: 26932 - RNA, 75 nt, Homo sapiens
caagcagggcgaagggaacgcaaggcccccgaccacacgcccgcgcgagacaacgaagagaggaaagaagcggaa

SEQ ID NO: 26933 - RNA, 68 nt, Homo sapiens
cagggaaaaccgacgaccggaagaggccagggcggaaagaagaggaaagaaacagaaaaagacccagc

SEQ ID NO: 26934 - RNA, 79 nt, Homo sapiens
cggagcggccggggccggggcgccgccgggcggccgggcgcggcgagcccagacaccacgccacccaagagagagcaaa

SEQ ID NO: 26935 - RNA, 78 nt, Homo sapiens
gccccgcgccgccgcgcccacggccccgccagcaaggcggcgcgcccaggaggagaaaggaggacccgggaagacaga

SEQ ID NO: 26936 - RNA, 81 nt, Homo sapiens
aagaggaccggacagaaagccaaaaaggagaaaggacgaaagagggccccacgcccaaaccaaacgaacaaagagacacgg

SEQ ID NO: 26937 - RNA, 79 nt, Homo sapiens
ccgggcggcggcccaccgcccacgggacacgggggggaaacaagcacgggcgagccaggacacgaccacaacacagccc

SEQ ID NO: 26938 - RNA, 82 nt, Homo sapiens
aacaggaggaagaacccaagccaaagcccaggaaacagaggaacaccgcacccaacaggaaaacagccagcaagagacaaag

SEQ ID NO: 26939 - RNA, 85 nt, Homo sapiens
ggacggacccagcacgaggaggcgcgaggagagggcccgacccaggcaagcgagcaggcgagcaggagcccacagccgagcagcg

SEQ ID NO: 26940 - RNA, 50 nt, Homo sapiens
aaccaggggagagcgacccaaacaaagggacagaaggccaaagacgcgga

SEQ ID NO: 26941 - RNA, 91 nt, Homo sapiens
cgcgccccgggccgcagccccccgccccggcgccgggcacggggcagaggaccggagcgccccgccgaaaaacaaccaccagcgagcaaaa

SEQ ID NO: 26942 - RNA, 81 nt, Homo sapiens
cggaccagcgcagccgggagacagagcgaggcggcggcagaagacgaccccgacgcaggccaggagccgcggacagaagcc

SEQ ID NO: 26943 - RNA, 60 nt, Homo sapiens
aaaagaccaggacggacaagcacagccggaaggcgaacgcagcacaggggaccggaccaa

SEQ ID NO: 26944 - RNA, 73 nt, Homo sapiens
agggagggagagcaacccaggaagccgaggaagcgaagaaccagcgagggaggggcacaggggagagaacgcc

SEQ ID NO: 26945 - RNA, 78 nt, Homo sapiens
gcccccagcggggcggagcgaccccgcggggcgcgggaaaggaaagcaagccaggaggaaacgacaccaaaccggggg

SEQ ID NO: 26946 - RNA, 64 nt, Homo sapiens
cagaacaaaacgaaacgcaagaaagagcagccgagaaagcccgggaacgagagcagaaccccac

SEQ ID NO: 26947 - RNA, 83 nt, Homo sapiens
agcagaaagcagcccaaggggaggagagccacgcaggaccacagcgcagcaaagaacacagagagcggggcccggcgcaccca

SEQ ID NO: 26948 - RNA, 61 nt, Homo sapiens
aaaaaaggagaccggacgaacagcggccgcgagaaccgggcagagcagcccggcgcacccg

SEQ ID NO: 26949 - RNA, 77 nt, Homo sapiens
aggaacaggacggcggagaagccccgacaagggaccgggcgggccccgcaggaaacccccaccggcccacacagacg

SEQ ID NO: 26950 - RNA, 77 nt, Homo sapiens
caccacggaggaggcggccggaggaaacagcgacgagcagacaggacaccaaggaggcggcaggccagcgaccggcg

SEQ ID NO: 26951 - RNA, 75 nt, Homo sapiens
gcgggaaggacagaagacagccgcaaccaaagaacggcggccaaagcgccagacaagggccgagccccggagagc

SEQ ID NO: 26952 - RNA, 75 nt, Homo sapiens
gacaaagacgaacagggccaggccaagcacaaggcagggacaggggggcaccagaagaaaggagagaagccaacg

SEQ ID NO: 26953 - RNA, 69 nt, Homo sapiens
ccagaagaaaggagggcggcgcgccgagcggggacgaagggaacccgccgggcggcccggcacccagcc

SEQ ID NO: 26954 - RNA, 73 nt, Homo sapiens
gcggagcgcaacaccgcggggggagacggcgcggccgcgggcaacaggggcacacacacgagaaagagccacg

SEQ ID NO: 26955 - RNA, 93 nt, Homo sapiens
gcaagcgccagaaaccccgggaaggcccccagacccaaagagaaagacagcaaagaaaaggagaagaaaggaaaaaaacaaccccgggcaccc

SEQ ID NO: 26956 - RNA, 107 nt, Homo sapiens
cggggagcgcccgcgacagaggagggaggaaaacaaccgagggcagacaacagaaacggagacgcacgacccagccacagcgggccacacggcaagcagggccagca

SEQ ID NO: 26957 - RNA, 74 nt, Homo sapiens
gcagggcagccacaaagaggagcacgagggccggacggagaaccaggagggaggggacgacacgaagacacagg

SEQ ID NO: 26958 - RNA, 58 nt, Homo sapiens
acaaaagcgggcgaacaggcagcgggaaacaaccagaagccacacacacaccggaccc

SEQ ID NO: 26959 - RNA, 62 nt, Homo sapiens
caagcacacacaggcgcgaaacggaaaaaggacagggcagaccgccagcagcacagcaagcc

SEQ ID NO: 26960 - RNA, 93 nt, Homo sapiens
ccgacaacgaccccacacaaggaggacaagcagcaaggagaacccaggcagcaccagggccaaaagaagaccagggaacccaaggacagaaaa

SEQ ID NO: 26961 - RNA, 77 nt, Homo sapiens
cgggccggcagaagaccacggaaagcagaacaccaggaagcaaggcggcagcgccaaccggccggagagcaccggca

SEQ ID NO: 26962 - RNA, 74 nt, Homo sapiens
acgagcagagaagaggacagcaacgagccaggagaaaacggggacaccgggagcagacaaaccaagggaaaccg

SEQ ID NO: 26963 - RNA, 87 nt, Homo sapiens
ccacccggcgcgcaccggcagcccgggccgagccccgcccgccgccagccaggcccagggccccggccaggcccagccccgcgggag

SEQ ID NO: 26964 - RNA, 56 nt, Homo sapiens
cggcgaagagaaccagacgcagaagaacccgaacaagggaggggccaacaagaaaa

SEQ ID NO: 26965 - RNA, 60 nt, Homo sapiens
gggacagacgagagaacgagagaagaagcgagagacgcggaggcggccaggagcggagga

SEQ ID NO: 26966 - RNA, 79 nt, Homo sapiens
cagaagagacagaagaacccaaaggggagggaccgcagccacggaagagaaggaggggcagcagcaggacagggaaccc

SEQ ID NO: 26967 - RNA, 69 nt, Homo sapiens
gcaaagaacaggaagaccacgggccaccggaccaaaaaccaccgaagaggccgaaaggcgccagccaag

SEQ ID NO: 26968 - RNA, 69 nt, Homo sapiens
acgcgacgcccgcccgcagaggaggcccccagacacggaacagcaccacaagggaccccagcccggggc

SEQ ID NO: 26969 - RNA, 71 nt, Homo sapiens
ggcaggaaccaccaggacagagaaaaccccacgcgccaggaagaaaggccgccacacacaagcaggcagcc

SEQ ID NO: 26970 - RNA, 71 nt, Homo sapiens
caaaaagaagcaaaaccacgccagaaccgcaaagaagaacaccaagaaccaggcggaagcaagggcagccg

SEQ ID NO: 26971 - RNA, 89 nt, Homo sapiens
aaagaagaggagagaagagaggacccacagacgacacaaaacagccacgagagaagaaagaaaaagaaaccgccagcccagagacacga

SEQ ID NO: 26972 - RNA, 75 nt, Homo sapiens
caaccccaccggccgacagccgcgacggcgagcccgggccgcgcccgaggcacagccacagccgcaagccaagag

SEQ ID NO: 26973 - RNA, 81 nt, Homo sapiens
aagccaaaagaacagcaaagaccagaaccggaaaaacccaaccggcgacccagaacagcaccaggagacaaagccacaaaa

SEQ ID NO: 26974 - RNA, 76 nt, Homo sapiens
gaacgggacagcccacacccggcgcggaggacagcccagaagaagcgggccagcgaggacagaaaccccggggagg

SEQ ID NO: 26975 - RNA, 83 nt, Homo sapiens
agacagaacccgcaccagcacccacaccaaggaggagcaccccgggcaaggcacggggccgaaccaggagacccaaccggggc

SEQ ID NO: 26976 - RNA, 55 nt, Homo sapiens
cggagccgaaccacacgcaccgacgcgacgggcccccagaagcaaaaggagggaa

SEQ ID NO: 26977 - RNA, 75 nt, Homo sapiens
ggccaaaaaggaaaaaaggaacccggacccccagaagaagaggggaacagcaaaaaggcagggagaacgagccgc

SEQ ID NO: 26978 - RNA, 78 nt, Homo sapiens
agaacgagaggagagagggaccacacgcgccaacacagaaaaagcgaggaaaacgccacgacagacacaaccaagcac

SEQ ID NO: 26979 - RNA, 85 nt, Homo sapiens
cgcggaccggggccccggaacccgagcggagcgaagcgcaggcgcggggcgcggagcgggaggacccgggccccacacaacaagg

SEQ ID NO: 26980 - RNA, 77 nt, Homo sapiens
aaccgaaccccgggcaggacccccaacaggaaaagagaaggggcagaaggaaggggaccaagccaacccacagcccg

SEQ ID NO: 26981 - RNA, 78 nt, Homo sapiens
gacaacagcagaaggagccagcagggacaaggaccagaagaaacgcaccggaaaggccaccagcaacgcgacccggag

SEQ ID NO: 26982 - RNA, 71 nt, Homo sapiens
gcccacggaccgaggaagccccgcagcagcagcccaaaggaagacgcgccaggacccacaaccccagcccg

SEQ ID NO: 26983 - RNA, 70 nt, Homo sapiens
aaaaaccacgggcgggagcaaccgaagaacaggaacaaagaagcagcagaagcaccaaaagagaggcagc

SEQ ID NO: 26984 - RNA, 80 nt, Homo sapiens
ccgcggcgcccagccccaggaaggacccaggacacccggaagccggaaaggccaccaagcgaagacgcgcgaccaagaag

SEQ ID NO: 26985 - RNA, 74 nt, Homo sapiens
agcgagcgagggggggcgcgccggaaaccggagcgcgcagcagaccggggcaaaggagaccaagaagaccccaa

SEQ ID NO: 26986 - RNA, 74 nt, Homo sapiens
aacaaagacacaggaaaacggaagaggaagcagaaaggcgagaaagaaccccagaagacaccaaccacagaacc

SEQ ID NO: 26987 - RNA, 82 nt, Homo sapiens
caagacgacaccgccagcaccgaccaccgaggcggagggggagaacacccagcaacaggaaagacccgcaaccacagaagcg

SEQ ID NO: 26988 - RNA, 66 nt, Homo sapiens
caggcggaagaaaaagacgagaccaaaagaacggcacagccagagaacaacacacacacacaggaa

SEQ ID NO: 26989 - RNA, 90 nt, Homo sapiens
caaccgaacccggggcgcaggacccaagaaggcgagcagggagcccaggggagaggagaccagcaggacacagcaggcaggcagcccacc

SEQ ID NO: 26990 - RNA, 69 nt, Homo sapiens
ggaccggggcccagcaaagccaaaggaaggaccagggaaaccggcacagggaagagaaacagagaaacc

SEQ ID NO: 26991 - RNA, 70 nt, Homo sapiens
agcccgggagagggccaccaggcgagcacaggacggcagcaagcgacagaacacgaccgagacccgaacc

SEQ ID NO: 26992 - RNA, 83 nt, Homo sapiens
cccagaacaagcagggcacaacggcaaggaaaagacgagggaagaagaccgacaacaaccaggggaagggaaaaaagaagaag

SEQ ID NO: 26993 - RNA, 73 nt, Homo sapiens
gcgcggcgcggggaccgcggcccggaagaccgaggagcagggagcaaccacaaggaaaggaaaccaccgaacc

SEQ ID NO: 26994 - RNA, 83 nt, Homo sapiens
gaaaagaaacccacagccacggagaaaaagaagaaaagaaaaagaacagaacaaggacaacgccagaagaagagcccgaaaca

SEQ ID NO: 26995 - RNA, 76 nt, Homo sapiens
gacccggaagacacccgcggagaaaaggaagcagccagggccaaaacgaccaggagaagggcccaaagcgcgcccg

SEQ ID NO: 26996 - RNA, 80 nt, Homo sapiens
ccggggggcccaggcagcccgacggggccaccgcggcggcgcccgcaccgcgcccgcaaagccggaggaggcggaggcca

SEQ ID NO: 26997 - RNA, 74 nt, Homo sapiens
ccccgccgcagaacacagaaggagcgggaggacccaggggggggcagccgccccaagaagccaagacaggaaac

SEQ ID NO: 26998 - RNA, 65 nt, Homo sapiens
caagccacgaacccgcgaccaggcggagagcccagaaacaggaaggcggaccccggcagcaagca

SEQ ID NO: 26999 - RNA, 76 nt, Homo sapiens
gcgggccaccaccggaccgggccgagccgcacagaagagcgcgccgaccacgccagcgcgcgggcccggcccaggc

SEQ ID NO: 27000 - RNA, 69 nt, Homo sapiens
aggaccaagaaccaggcgggaggggacggcaaagggcgcggagggaacggaggggggaggaaggccggg

SEQ ID NO: 27001 - RNA, 65 nt, Homo sapiens
cgcagagccggcccggcgccggacgggcggccccaccaggagccgcgaaggcggcgaccaccccg

SEQ ID NO: 27002 - RNA, 60 nt, Homo sapiens
cgcggacgccaggggccagacccaccaaaccgggggaacggggcagagaccccagcaccg

SEQ ID NO: 27003 - RNA, 63 nt, Homo sapiens
acagagacacagaaccacacgcccaagggcagcaagaaagggaaggccaagggaagaagcaga

SEQ ID NO: 27004 - RNA, 39 nt, Homo sapiens
caacaggacgccacagggggggcagaaggggaccaaaga

SEQ ID NO: 27005 - RNA, 77 nt, Homo sapiens
ccggacacgaaagccgggaaaggaggagcgacaagcacaaggggaacacacagcaaccaagcgccagacaagcaagg

SEQ ID NO: 27006 - RNA, 64 nt, Homo sapiens
agaaggccggagacaccagcaggagcaaaggcagaggccaagcccagacccagacggacagcgg

SEQ ID NO: 27007 - RNA, 86 nt, Homo sapiens
ggacccgcgcccgcggcgcagcggggcggcagcgaggcggaggcgacgaggaggcggacccccggcgcagagagacggggcgccgg

SEQ ID NO: 27008 - RNA, 76 nt, Homo sapiens
gaaaggaggccagggcagcaggggggcaccggagaacaggccagccgcagccccaggggaagccccggacagcaga

SEQ ID NO: 27009 - RNA, 71 nt, Homo sapiens
ggcgccaagacccagcacaaacaccgggaagggcacggcccggcacgggcgaagccacccccaacaacccc

SEQ ID NO: 27010 - RNA, 82 nt, Homo sapiens
acaaacacacgcaaaggagaaaggaaccgacagccagcccaagccagcccaggagcccaaggaagcgcaccacgacacagcc

SEQ ID NO: 27011 - RNA, 73 nt, Homo sapiens
gcacaaaggaggaggaggaggacgacgacgaggggaacggacagggacaagcgcacagcggagaaagcagcgc

SEQ ID NO: 27012 - RNA, 77 nt, Homo sapiens
cgggaccggagggaaagaaagagcccggacggaagaggaggagaccaagcgcacagccaggaagccgagggagagac

SEQ ID NO: 27013 - RNA, 55 nt, Homo sapiens
gacgcgcgaaccagcagcaggcccagcaccgaccacgacaccccgggcgaggaag

SEQ ID NO: 27014 - RNA, 92 nt, Homo sapiens
gccagaaggaagaggcggacggaggagcaggcgagaagagaagacgaagggaacgcacgggaaagcgcgcaaaagacgcacacgggccgccg

SEQ ID NO: 27015 - RNA, 76 nt, Homo sapiens
gcagagaccaccgaagacgcacgccaagacagcccaaaggcaggcccggcaccgaggccgaaacccaaggggcgca

SEQ ID NO: 27016 - RNA, 82 nt, Homo sapiens
cagcaccgcagaggcaaggggccaccaggaggccagggggcgccagcgagcaaaagaggaaaaccagcaaagccaccgcagc

SEQ ID NO: 27017 - RNA, 78 nt, Homo sapiens
caaccgcagggacgcgccaaggccacggccgagaaggccgcgggaaaggcaaaaccccaagaggggacgaaggaggag

SEQ ID NO: 27018 - RNA, 79 nt, Homo sapiens
gcacagaaagagaccgcccgcccaacgccccaggaggggagcaacgagaagaagacaacagggcaccggcccaagaccg

SEQ ID NO: 27019 - RNA, 57 nt, Homo sapiens
aggacagcaagccacagaagcgccgcccgcggccgcccccgcaccggcagcgcgccc

SEQ ID NO: 27020 - RNA, 75 nt, Homo sapiens
agaggagccaagccgcaaggccagagcagccagaaggaaacacaggaaacagggaccaagaaaggcccagggacc

SEQ ID NO: 27021 - RNA, 74 nt, Homo sapiens
gccggccacagacggacgacacaagcccacgcgcccgcagcaagacgggacggagggcagaacgcagaaagacg

SEQ ID NO: 27022 - RNA, 42 nt, Homo sapiens
gccccccagccagcagaacgaagccagcagaccgcagaacgg

SEQ ID NO: 27023 - RNA, 58 nt, Homo sapiens
cgggaccagcaaacccagccagacccgaagcaccggaggcccacaccagccccagcgg

SEQ ID NO: 27024 - RNA, 89 nt, Homo sapiens
cagaagggaggagcagagggagaaacaggaccaaggacaaggaccagccacccagcccacaccaccgccccagcagaggcccgcaagca

SEQ ID NO: 27025 - RNA, 72 nt, Homo sapiens
gcccggacacccgaggggggcagggcaagaacccgccacacaaggcgaacagagggcagcaggagcacagac

SEQ ID NO: 27026 - RNA, 102 nt, Homo sapiens
ggagggccgcgcggaacaccggggaaggcagagacgcgggcagcagcagcaggcgcagagcaccggcaacaggaggagaccgaaggcccgggagcggaccca

SEQ ID NO: 27027 - RNA, 72 nt, Homo sapiens
gcagcgccagagagcgagcagagaaccacccgaaggaagccgggaggccccagcacccagcccccacaacac

SEQ ID NO: 27028 - RNA, 57 nt, Homo sapiens
cacaacaccggcaggaaccaccaggacagagggggcaggccccccaggaggacggag

SEQ ID NO: 27029 - RNA, 71 nt, Homo sapiens
caaaccgaacacaccaagagacaagcgggcgacacgagagggaagccccagagcggggccggcgcccagac

SEQ ID NO: 27030 - RNA, 74 nt, Homo sapiens
ggaccccggagaagcagaggaaaaggcagccggcacccgcacaacccagggggccgaacccagaccaacaaaag

SEQ ID NO: 27031 - RNA, 79 nt, Homo sapiens
cagggaagcgcagaaagcaggcgaacccgcggcgcaaaacgaccccaagcaaggaagcagcccaagccaacagagaagc

SEQ ID NO: 27032 - RNA, 90 nt, Homo sapiens
gcccaaggcggcccggcgggcgacggacggccggacagcccaccgggggacggcacggcaggcggacgcccggggccccccggaccacga

SEQ ID NO: 27033 - RNA, 69 nt, Homo sapiens
aaaccagagaccacagaaggacgggagaacaccccacagggaagagggagggaggaagaggcgcggcaa

SEQ ID NO: 27034 - RNA, 75 nt, Homo sapiens
ggcaggcgaggagaaagcggcgcgcggaggcgggcacaaaccgaagaggacaaggagagaagcagacagaaggac

SEQ ID NO: 27035 - RNA, 74 nt, Homo sapiens
aagcaaagaagaaaggagaagaggacggaagagaaaggaaaacaagcgcacgaaagccggacaacgggagccgc

SEQ ID NO: 27036 - RNA, 69 nt, Homo sapiens
gaggagaaacagcagaaacgcaccaggccaaagaaagagaagagcaccacgaagaaacgcccagaggag

SEQ ID NO: 27037 - RNA, 73 nt, Homo sapiens
aaaggaagcaaagagcgaggaagacggaaacgagagacagccccacagacgcaggcgcagaaaagaagcacaa

SEQ ID NO: 27038 - RNA, 82 nt, Homo sapiens
cgagagaagagcaaaggagacgcaccaccgcaggcggacaccgaccgcaggaaggaggaggaggagggagccaggcagaaaa

SEQ ID NO: 27039 - RNA, 85 nt, Homo sapiens
gaagcgaaagacggaaggcgacggggagagcagcaccagcagaagagggcccgaccacggcaacccagaggcgaagcaggacacc

SEQ ID NO: 27040 - RNA, 80 nt, Homo sapiens
ccgcgccccagggcgcggggacgcgcagaacaaaaaaggaaacaaaaaagggccaagacagcaacaaggaccacggacag

SEQ ID NO: 27041 - RNA, 79 nt, Homo sapiens
agccccagcaccagcaccccaggcgagcgggaaagccgaagaaaggagggcgagagcacggagcaggggccgggaagca

SEQ ID NO: 27042 - RNA, 74 nt, Homo sapiens
cccgcggccccagaaagcggcgcccggcggggacccacgagcgcgagacagacccagcacggacccccccccca

SEQ ID NO: 27043 - RNA, 66 nt, Homo sapiens
gacgggagggccagaagacaccgccagagacgccgagcaaaagcccagaagagcaagcaagaaaaa

SEQ ID NO: 27044 - RNA, 72 nt, Homo sapiens
ggaagaccaacagacaaccaccaaaggggaaacagaaacaagggaggacggaggcacaggaggaggagagga

SEQ ID NO: 27045 - RNA, 41 nt, Homo sapiens
gacggaggagagacacacaccggccgaagcaggacacaaag

SEQ ID NO: 27046 - RNA, 69 nt, Homo sapiens
cgccacggaccgcgccggcgcgcgcaggaagaccaacgacaggcgcaagaaaccgaccgacccgaccaa

SEQ ID NO: 27047 - RNA, 72 nt, Homo sapiens
gcaacggccacagcaccgggcggaaccacagaagaagaagaaaacaaaaacgaccccaggaaggccagaaac

SEQ ID NO: 27048 - RNA, 33 nt, Homo sapiens
aagacgcaggccaagggaacaaacaaagccagg

SEQ ID NO: 27049 - RNA, 107 nt, Homo sapiens
ccgagaaaccagccacgcagaagagacaaggaccacagccgagcgagagcaggaagacgggaaccacagacagcgaccccagggcaggacaggaagagaagccacag

SEQ ID NO: 27050 - RNA, 74 nt, Homo sapiens
ggagccggcacagccagcaggggcaccggacggacagcccccggagcagcggacaaagcgcaggccagcaggcg

SEQ ID NO: 27051 - RNA, 72 nt, Homo sapiens
gcgcccgagcaacaccgacgggaagaaaacgccagagaagcagagcagcccggagcgaggggagaccgggga

SEQ ID NO: 27052 - RNA, 82 nt, Homo sapiens
cgggaagacaccgcaaggaaaaccagccaaaacagaggagaccggcgagccacccaggacgaggccaggccgaaacgcaccg

SEQ ID NO: 27053 - RNA, 94 nt, Homo sapiens
agcagaccagcgcccaggaagccaaagaaaaaaaaacggagggacccaaccaaggggcccccgagaacaccgaagaagaacaacgcacaggccg

SEQ ID NO: 27054 - RNA, 60 nt, Homo sapiens
gccggaaaccggagcgcgcagcagagaaggagggggcagagcacggcaggcagaaggggc

SEQ ID NO: 27055 - RNA, 53 nt, Homo sapiens
caagaagagacaggggaaacaacacccagaaccggagagcccagaacgcgggc

SEQ ID NO: 27056 - RNA, 69 nt, Homo sapiens
cccgacgccgcgcgaggggacagaagcagcggaaccgggaacacagacggcagagcagaccagacagcg

SEQ ID NO: 27057 - RNA, 97 nt, Homo sapiens
aaaggggcagacggccagcggaacggcgccccgggcaccgggccgccaggagcgaggggccgcggagcagcggaagggaacgcagaaggcaaaggga

SEQ ID NO: 27058 - RNA, 76 nt, Homo sapiens
gccaccagcaaccagagggccagagggaaggacaggccacaaggcgaacaaccagccccaaccacagaccgacgca

SEQ ID NO: 27059 - RNA, 69 nt, Homo sapiens
aggaggacccaagccgccggacagggggcccaccgggaagacccgggagagggcccaaggcgaagacac

SEQ ID NO: 27060 - RNA, 54 nt, Homo sapiens
gcaaacgaccggagaaagacccgccccgccacgagaacacacccccaggcggag

SEQ ID NO: 27061 - RNA, 66 nt, Homo sapiens
ggaccacgaggcaacgccccagcgccacccgaaagacgacagcagggagcggcaccggcagacaaa

SEQ ID NO: 27062 - RNA, 70 nt, Homo sapiens
acgcggaacacaggcaaaagggaaagagggggaggggccaggaagacaaaaacagagagaacagccaaaa

SEQ ID NO: 27063 - RNA, 72 nt, Homo sapiens
aaaggaggacgcgagaaaaacagggacaagggcaacagccagaaggcagcagaaggcgagaggacaagcaag

SEQ ID NO: 27064 - RNA, 84 nt, Homo sapiens
ggacagcaccgcagcagagcgaaagcacacgcggagacaaagcggccagaagaaaagagaggggcccccgggaacaaaggaaga

SEQ ID NO: 27065 - RNA, 63 nt, Homo sapiens
agccggggccgggcgacaggagcagcaaggcggaggcaagacacacaaagcagagagggaagg

SEQ ID NO: 27066 - RNA, 67 nt, Homo sapiens
ggaaccggaaaccaacaggaaggaacaagacaccaagggaaggaaacacaaaccagcacgaagaaaa

SEQ ID NO: 27067 - RNA, 54 nt, Homo sapiens
gccgagccaagcagagcccggaaagagagacgacggaaacaggaccgaggccgc

SEQ ID NO: 27068 - RNA, 73 nt, Homo sapiens
aacgccacgcagcgccggaaacgccacgacgcgagagcggaaagggcaccgacccacacgacggaggcacccg

SEQ ID NO: 27069 - RNA, 79 nt, Homo sapiens
aaacccgcgcccggcgaccgaggcccccgcaggggccgcagcgcgcccaaggcaccaggaccgcccccaccaagagaac

SEQ ID NO: 27070 - RNA, 74 nt, Homo sapiens
ccggagccgcggcagcgccgagggcccccccccaggcccgggccgagggacgcgagagcccacgaagagcgacg

SEQ ID NO: 27071 - RNA, 76 nt, Homo sapiens
cgggacgcgcgcgggcacccacggagccccggggcggaagggccgggccggggcacgggcccacggccccccaccg

SEQ ID NO: 27072 - RNA, 76 nt, Homo sapiens
gaaaggagcggaagaggccacgaggcgcacaccgccagcccaagaaaaaggggccaaggagaccgcacgccggacg

SEQ ID NO: 27073 - RNA, 76 nt, Homo sapiens
gagcgggcaggacaaccaggggaccagagaggacggcaccagccaggaggagaagcaagggccaggcaggaaggag

SEQ ID NO: 27074 - RNA, 51 nt, Homo sapiens
ggaggaacaggccaggaaccgggacacacagcaacgaagcaggggaggagg

SEQ ID NO: 27075 - RNA, 59 nt, Homo sapiens
gcaacacggccccacggcacaacacacccgcaaggagacggcgcaggaccggggaaccg

SEQ ID NO: 27076 - RNA, 72 nt, Homo sapiens
cgaccaggccccgcagacccaacgggcagcacgaacgagcaccaagcgcccacggaccaccaagccacagcc

SEQ ID NO: 27077 - RNA, 82 nt, Homo sapiens
acaggaggcgcccagcaaggccgcaggcgagaaccacgccgacaacggcggaagaggaacgggaacggggaagaagagcggc

SEQ ID NO: 27078 - RNA, 74 nt, Homo sapiens
agaaccggagagcacccaacagcccgcagcccccggaagccaaagacccccagggacccggccccagcaccgcc

SEQ ID NO: 27079 - RNA, 73 nt, Homo sapiens
cccgcacggcgcgcaacaagacccgcccgggcccaaggaagcgcgccgaacgggagcccggcggccacagcaa

SEQ ID NO: 27080 - RNA, 65 nt, Homo sapiens
cccgaaccacaccccagaggccacgacaaggccgcaaggaagggagccgcagccgccacgggacg

SEQ ID NO: 27081 - RNA, 45 nt, Homo sapiens
ccgcagcgcacacagaagcaggaagacacgacaaggggcagaagc

SEQ ID NO: 27082 - RNA, 73 nt, Homo sapiens
acaagaaacacaggcgagcagggacagccaagaaccaaaaaggaccacgaagccccgacaagggaccgggcgg

SEQ ID NO: 27083 - RNA, 72 nt, Homo sapiens
ccaccgcaccgcaccagacccaggaccccaggcacggacagggcgggagacaccgaggcccggcacgagccg

SEQ ID NO: 27084 - RNA, 52 nt, Homo sapiens
cggcgccccggcgcgaagaggcggaccggacggccgagagcgcaccccggaa

SEQ ID NO: 27085 - RNA, 56 nt, Homo sapiens
acgccagcccaagccgacaggagggagccacaccaaagccggacccccccagccgg

SEQ ID NO: 27086 - RNA, 71 nt, Homo sapiens
ggacaggcgccacgaaccaaagggaggagaggagcacacccaagcagaacggccacagaagagcagagacc

SEQ ID NO: 27087 - RNA, 60 nt, Homo sapiens
agccggcccggagagaggccaggaggacaaggggaaggaggagacgcgaaggaaagaccc

SEQ ID NO: 27088 - RNA, 92 nt, Homo sapiens
cgaggaaccaccggacgaagacagcaaggagacccgccaaagccgccgggcaagggggacaggaaaccacaagcagcagaaagagaaagaga

SEQ ID NO: 27089 - RNA, 76 nt, Homo sapiens
caagcgaaggcgcgcaccggaagcaccagcgaggaaggccaaggaaaaggaacagagagagcagaaccgaaacggg

SEQ ID NO: 27090 - RNA, 88 nt, Homo sapiens
gccgcaccgaaggacggaagcagcaccacgcaaggcgacaagcggcccaggcgagagcgggaagagcacccacaagcagagcggacac

SEQ ID NO: 27091 - RNA, 67 nt, Homo sapiens
ggcgggccggccaggagccggggaaggaagcagccaccccgccaggccccccgcccgccgcccccgg

SEQ ID NO: 27092 - RNA, 83 nt, Homo sapiens
acccacaccaggccagccgggaaccgaacccaaaacgagggacaagaacccaagaaacaggaaaaaacccaaaacaccaaaag

SEQ ID NO: 27093 - RNA, 72 nt, Homo sapiens
gacgagcagacacgcaaagaagcccgaggcgcaagagacaagacgcgccgccaggaggaccccccgcggagg

SEQ ID NO: 27094 - RNA, 79 nt, Homo sapiens
cccagacaccacaacaacccagcagcccacaacgagcccaacagccaggggagcagaccacggcaacaacgcacaaaaa

SEQ ID NO: 27095 - RNA, 71 nt, Homo sapiens
accggcgccagcgggcgagaacagcgcaaaagagaacggcgagagagaaagagcaacaccagaggagggga

SEQ ID NO: 27096 - RNA, 74 nt, Homo sapiens
cgagcagccaggcggcgggccaggggaggcaggaaaaagacacaagacagcaggaccgggaccagcccgaagac

SEQ ID NO: 27097 - RNA, 58 nt, Homo sapiens
gggacaaggcaccgcccaggcccgggaaaaaaaaggagaaacaaccaaaacgaagaaa

SEQ ID NO: 27098 - RNA, 83 nt, Homo sapiens
agggcccggggccgcggggaggccacaccggcaaaaccgacaaggccaggggacccaagggagagagggaacggcgaaagggc

SEQ ID NO: 27099 - RNA, 57 nt, Homo sapiens
gcgggcgggaagaggcggcgggcaagaccaagagagcccccgaggaccgcccccagc

SEQ ID NO: 27100 - RNA, 69 nt, Homo sapiens
cgccagcccccccgggccgggcgccccgacgagagacaagaggggggcacaccggaggagaacccccca

SEQ ID NO: 27101 - RNA, 79 nt, Homo sapiens
aagaaacgacgccaccgcccgccacgcacgccagaaccgaggagagaaggcagccagccggcgaacaagacgaagcgga

SEQ ID NO: 27102 - RNA, 63 nt, Homo sapiens
aagcgaaggggaaggcgccgaagaggacgaagggccaagcagggggcagggaagacggagcac

SEQ ID NO: 27103 - RNA, 73 nt, Homo sapiens
gccgaccgagcccaggagcgccacgcgcggaaggcagcgcccagcagcgcaggaggaggcccaggaggaaacg

SEQ ID NO: 27104 - RNA, 43 nt, Homo sapiens
gcgcaacggccccaacgccaccgcaaggccagcgcacggaaaa

SEQ ID NO: 27105 - RNA, 71 nt, Homo sapiens
aacaagaaacagcaagcaaacaggggcaggaagagagaaggccacgcccgaccccaagcaacaacggggca

SEQ ID NO: 27106 - RNA, 65 nt, Homo sapiens
gagaggagccaacccccaggcccccaagaagcgaccgaacacgacaaccaggaggagcaccaaag

SEQ ID NO: 27107 - RNA, 73 nt, Homo sapiens
acagacaccgggacaagggccagcggcccagcaaaaggaaagccaagcggcaaagggagcggccaggagccaa

SEQ ID NO: 27108 - RNA, 76 nt, Homo sapiens
ccccacccccaagaaccaacccccaaaggcgggacaggacacacagcaacgaagcaggggaggagggaagaccgga

SEQ ID NO: 27109 - RNA, 75 nt, Homo sapiens
ccagccggcacaggaaaaacagccacccagaccagccccaggggaacagggaaggaaggaacagagaagacccgc

SEQ ID NO: 27110 - RNA, 78 nt, Homo sapiens
aaaaaaccaagccgaccccaacaacaggcgaccagacacagaccgcggcagggcgagagaccggaagcgcgcagagac

SEQ ID NO: 27111 - RNA, 86 nt, Homo sapiens
gggcgaggccgccgcgacacccccgcaccggggccgggagacgcggcaggcaagaacgcaccgcaggggccgcacaccaccacgag

SEQ ID NO: 27112 - RNA, 74 nt, Homo sapiens
aaagcagcaggagcgcagcacgaaaacggaaagggaaggaacaccaacaagaccagaagccaacaagagaaaaa

SEQ ID NO: 27113 - RNA, 84 nt, Homo sapiens
gaggccaaccggcccacccggagaaagggcccccgaaggaaagagaggccggggaaagccgggcaccgaaggacagaagaggac

SEQ ID NO: 27114 - RNA, 78 nt, Homo sapiens
ccgcgcgggccaggagggaagggccagaacgagaaagggcggagaacggaaaagcaccaggaagcagagaggaccgca

SEQ ID NO: 27115 - RNA, 75 nt, Homo sapiens
accccagcagccccaggcccacggaggagaggaaaaccagagagcagcaagaaaccagacggagacgggagagcg

SEQ ID NO: 27116 - RNA, 74 nt, Homo sapiens
cgcccccgccccacgaagccagaaagaagccacccagagagaaccaggaggggaaagcgcgaaaaagggcgcaa

SEQ ID NO: 27117 - RNA, 85 nt, Homo sapiens
gcggccaacaagcaggagggaggccacccaccccaccagagccggacaccagagccggacaccagggaggagcgagcgacgcaga

SEQ ID NO: 27118 - RNA, 63 nt, Homo sapiens
cagagcaaacaaaagcagaaacaggcaagagaagaccgcaggaaagcaggaaggcaagaaagc

SEQ ID NO: 27119 - RNA, 81 nt, Homo sapiens
gggggcccgcccagagcgcggcggcaaggacggggacacaagaccagccagcccagccacagagacaggccgcccagagcg

SEQ ID NO: 27120 - RNA, 75 nt, Homo sapiens
acagaaggggaaaagcaccaagagaacacaaggaacgaaaggaagggaagaagcagaaccaagacaaaagaagac

SEQ ID NO: 27121 - RNA, 74 nt, Homo sapiens
agcgagaaccccaagcgaacagcaagcgggcgcgaccaaagaggcagaagaagacaaacagccacacacacaaa

SEQ ID NO: 27122 - RNA, 80 nt, Homo sapiens
ggcggaacgacaaaccccaggcgggccaaggaaggccggagaagcaaggcaggaacggaccaaacagcagcgggcgcaac

SEQ ID NO: 27123 - RNA, 69 nt, Homo sapiens
caggacaaacccaagggggagaccaccgagcagaaaaaccccagaaaagacggggaaagaacccaggac

SEQ ID NO: 27124 - RNA, 81 nt, Homo sapiens
gccagaggcccgccccgcggcggcggaggaccacggccagcaggggcggagcgaggacaagccccgccccgccgagcgcag

SEQ ID NO: 27125 - RNA, 69 nt, Homo sapiens
aggaaaggggacacagaccagccgcacccacgcccccggggaagccgaagagggcggaggaggaggagg

SEQ ID NO: 27126 - RNA, 84 nt, Homo sapiens
agcggcagcggggaaccggggagaacacgggacaccgcggaagccgggaaaggacaccagaggaccagaacccacgagaaacag

SEQ ID NO: 27127 - RNA, 82 nt, Homo sapiens
aggacggaaggggaagaggcccacccggagaaccccacggagaaccagaggacaccaaaaaacacagagagcaacacgagcg

SEQ ID NO: 27128 - RNA, 52 nt, Homo sapiens
ggaacgccacggacgggagaaaaggcggggccagcgccgacagaacccgggc

SEQ ID NO: 27129 - RNA, 82 nt, Homo sapiens
agccaacagagcagcagcagagcagccacgagagacagcaggccgagcccgagcgcgggaagaaaggagggagcgggaccga

SEQ ID NO: 27130 - RNA, 77 nt, Homo sapiens
cggcgacaggggcccggagcgcggcgccgcccgcccacgcagcgccaggcaggaaggcagacagagagaagaacccg

SEQ ID NO: 27131 - RNA, 72 nt, Homo sapiens
cccaaaaaggagcagccggccgggcgggagacccacaagaagaacccgcagacagaaccgaaagggaaagag

SEQ ID NO: 27132 - RNA, 57 nt, Homo sapiens
ggcaggacaccgacaggaacagggaccacggggaaacacgagggcaaaaagacacac

SEQ ID NO: 27133 - RNA, 73 nt, Homo sapiens
accaaccagaagacgaacaaacagcaagaaagaccacaagaccagaaccagaaagagacaagaagggaccggc

SEQ ID NO: 27134 - RNA, 79 nt, Homo sapiens
ggacggcaagcgacaagaacaagccccacgacagaccacgacaagagcacaaccccggaacggcgcgaagacccgggga

SEQ ID NO: 27135 - RNA, 35 nt, Homo sapiens
gaccggagaacgcgacagaaccggagaagcacaag

SEQ ID NO: 27136 - RNA, 82 nt, Homo sapiens
agagcaacagcagggcaacaggaagccgcggaagccgagcaaagaggggaacaagcccaaaggccggaaaacggcacgacca

SEQ ID NO: 27137 - RNA, 40 nt, Homo sapiens
cgaggacccagccgggaggaaggaaggcccgaagccacag

SEQ ID NO: 27138 - RNA, 77 nt, Homo sapiens
gagagaggaaacccaagcagcgccgccagaaggaagcaacagacgggaccgaaagacgcaacgaagcaagagcccca

SEQ ID NO: 27139 - RNA, 76 nt, Homo sapiens
ggcaaccgaaacgaaaggaccgaggagccccgagcccaccagagcagcaacccggaaacggaaaagacaaacacaa

SEQ ID NO: 27140 - RNA, 87 nt, Homo sapiens
ggaagcagagggggggggccagcgacccggggccgagaagacacgagggcagagaaggcggcccgcccgcgggcggggggacgcagg

SEQ ID NO: 27141 - RNA, 91 nt, Homo sapiens
ggaacaaaggcgacgggccgagcggggcgcccgcggagcccacccggcagcgcagcggcggaaaaccccgggaggacggaaaacagcaaca

SEQ ID NO: 27142 - RNA, 74 nt, Homo sapiens
cgggcgcgcgcgcggcgcgcgcgcacgggcggcgcggcgacccggaccacaagccagcaggacgcagaccccag

SEQ ID NO: 27143 - RNA, 74 nt, Homo sapiens
ccaaacgagagcagccaacgaagcgcgcaagacgcaacacaaacgagaaagacagcccgaacggagaaagagac

SEQ ID NO: 27144 - RNA, 71 nt, Homo sapiens
ggagaacacacacaagagaagaaacaaaaccaagggggagccccccagacccgaaaggagacaagaggaca

SEQ ID NO: 27145 - RNA, 82 nt, Homo sapiens
gcggggggaaaggcggagacggccccaccggcaccgagaaagacaagaagaaggaggccgaccaggccgacaaagcagacgc

SEQ ID NO: 27146 - RNA, 71 nt, Homo sapiens
agcggaaagccaagagcgcacgggggaaacaagcgaaaaacaggcaaggacagagagagcaaaacgacgaa

SEQ ID NO: 27147 - RNA, 59 nt, Homo sapiens
cagcgcccgcagggcgccggcggagggaaggcgcgggaggggcaaacgcacggcaagaa

SEQ ID NO: 27148 - RNA, 59 nt, Homo sapiens
gcagacacaggcacaccaaggggccaagcaggggacagcacgagggcagcacacaacac

SEQ ID NO: 27149 - RNA, 73 nt, Homo sapiens
ggcaagaaggcaaaagcccaaccaccaccaggccggagaacgccccaaggagcaagacaaaggaaagggcgcc

SEQ ID NO: 27150 - RNA, 80 nt, Homo sapiens
gaagagagcaggcgaagagaaaacaagaccgcgcccccggagcggccgcgcaccggcacacgacaagaacagaggcggcc

SEQ ID NO: 27151 - RNA, 70 nt, Homo sapiens
gcgggcacgagcagcagccccagcccagcgcaagcaggggcgagacgggacacccccggaacacaggccc

SEQ ID NO: 27152 - RNA, 61 nt, Homo sapiens
acaggagaagaagagaccgacacaaggaaagcgaagcggcagggaggggaaccaggggccg

SEQ ID NO: 27153 - RNA, 36 nt, Homo sapiens
ccaggggaagggagaacaaggaaacacgccgcacca

SEQ ID NO: 27154 - RNA, 82 nt, Homo sapiens
agcgggggggcgcgggagcaacgggaggccggacccagcgagcgggcggcacgcacgcaggcgcgagaaaggaccaacgacc

SEQ ID NO: 27155 - RNA, 70 nt, Homo sapiens
gacccacagaggagaaacagacgcaccccccgagcccaaaaagaccaaagggcgacgccaggagcacacc

SEQ ID NO: 27156 - RNA, 84 nt, Homo sapiens
cgccagagacggcaggcccggccaaaggcaaaggagcgaaccagcagggaaaggaggaggacggaaagaaccagacccccgagg

SEQ ID NO: 27157 - RNA, 77 nt, Homo sapiens
caccaaacgggacgacaccaggaagagagggacaggagacgaggaggagaaccagcaagggacccagggagcccggg

SEQ ID NO: 27158 - RNA, 75 nt, Homo sapiens
acggacggggccaacaacgcagcggaaggcggagagagcagggcccagacgaagaggcgaaacaacaaaagcgaa

SEQ ID NO: 27159 - RNA, 30 nt, Homo sapiens
agagaccagcgaacaccacaccgcgagcaa

SEQ ID NO: 27160 - RNA, 78 nt, Homo sapiens
ggacagggagggcgcgcagcggcgcggaagaggaccggaagcagagagcgaaagcagcaagggacagcaccacgcggc

SEQ ID NO: 27161 - RNA, 80 nt, Homo sapiens
gagggggccccaacccgcgcggcaagaagacggcgcggcaaccggggagcccgccaggcccaccgagccacaccacaagc

SEQ ID NO: 27162 - RNA, 83 nt, Homo sapiens
aaggaacagaacgcggccccagccacaccaagcagggaggaaaaagcagcgaaacagacaaccccccacacaaccggaaaaag

SEQ ID NO: 27163 - RNA, 67 nt, Homo sapiens
ggggaccgccagaagcccagaagagccggcaggaaacgggggagaaggaggaacacaaagaggacca

SEQ ID NO: 27164 - RNA, 82 nt, Homo sapiens
gagacggagcgcagcggcacgcacgcgaagacagcggcagcgcccgggcagccagaagcagaccaggaggacggaaggaggc

SEQ ID NO: 27165 - RNA, 80 nt, Homo sapiens
agaggccaaaggcaggagacagcgcccaaaagaccagcgcccgaaggaacaacccagccagccagcagcagcccgagcca

SEQ ID NO: 27166 - RNA, 79 nt, Homo sapiens
gcgagcagggaacgacaccgacccgaagagccggacccggaacagcaagaacgcaccgaaccagaagagcccacagaga

SEQ ID NO: 27167 - RNA, 53 nt, Homo sapiens
caaagaaccggccaagccgaccaccccccaagacagcggggaagcacagccga

SEQ ID NO: 27168 - RNA, 59 nt, Homo sapiens
aacccagagacccgagcggccgcccgggcaggggagaagccccccgcggggaagaaccg

SEQ ID NO: 27169 - RNA, 57 nt, Homo sapiens
gcaccaagagcccggaaaggaaaaccggaaagcacgagagagaggggccacaggccc

SEQ ID NO: 27170 - RNA, 70 nt, Homo sapiens
cccaccgagggaccaggcccacgacaaagcgacaaccaagcccgagccaccaagcggaggaccccaggga

SEQ ID NO: 27171 - RNA, 81 nt, Homo sapiens
cgccgccgccgccgcgggcgccagaaggaagaggcggacggaggagcaggcgagaagagaaggcacaacaaaaccaagagg

SEQ ID NO: 27172 - RNA, 46 nt, Homo sapiens
gggacaaaaagacgaagcaacaggcagcggggaagacccgggcacc

SEQ ID NO: 27173 - RNA, 78 nt, Homo sapiens
accgcacacagacccacccgccagcaggggcggccccaacaaggccgggggagcgccccgcccaccgcaacagcaagc

SEQ ID NO: 27174 - RNA, 69 nt, Homo sapiens
gggacccgaccagaaagcaacccccagccacaacgcgaaccgggcggacgaaggaggcggcaacaggac

SEQ ID NO: 27175 - RNA, 83 nt, Homo sapiens
agcaacggcggccccaggcccaggccccccaccaccagaggcaagacagccggcaggaaagaagcacgaaggaaaaagcacca

SEQ ID NO: 27176 - RNA, 70 nt, Homo sapiens
ccagcccccagagcgggacacagaggggcgaggaggcgggccaggaaaggagggaaaaccagccaaacag

SEQ ID NO: 27177 - RNA, 67 nt, Homo sapiens
caagcggaaagcacgcgcacagaggggacaggaccggcccaacagggcagccgggccccccgcgccg

SEQ ID NO: 27178 - RNA, 69 nt, Homo sapiens
gggaggagagagggagagccaaagaaggcaggcgggaagaagacaagaagagacggcggaggaaaagga

SEQ ID NO: 27179 - RNA, 83 nt, Homo sapiens
agacaacgggggcgcaggcgaggagggcacggacggggaaggggcccacccccgccagccagacggaaggcacgagggccgac

SEQ ID NO: 27180 - RNA, 73 nt, Homo sapiens
ggaggagcaaagcccacagggaaggaaggaacagagaagacccgcccccagcagggcacagcagacgaggccc

SEQ ID NO: 27181 - RNA, 71 nt, Homo sapiens
gaaagaaggcagcagcaccagcacaacaaggccacaacacagcagcccccaggagagcaggaaaagccgga

SEQ ID NO: 27182 - RNA, 73 nt, Homo sapiens
cggcggaacccggggccgggacgcagcccggcggcagcagaaaaggggaagaaggccaaccgggggccaaggg

SEQ ID NO: 27183 - RNA, 56 nt, Homo sapiens
ggcccccacacagcgaagccggagcgaagaacaccacagggacgccagggcaccac

SEQ ID NO: 27184 - RNA, 72 nt, Homo sapiens
caaaccggggaggggcggcggcagagcccggaccccaaccagggagcaccgcgagcagaagcacacccaaca

SEQ ID NO: 27185 - RNA, 84 nt, Homo sapiens
gggcggcggcgaggccgggaccgggcagggccgcgggaggcagcggcggacgccgagcaagcaacaacaggcacaaagagagaa

SEQ ID NO: 27186 - RNA, 72 nt, Homo sapiens
ggaagccgaaggcagccacagcagagaagaacacaaaggggaagaaagaaaaaagggagccagggcagccgg

SEQ ID NO: 27187 - RNA, 85 nt, Homo sapiens
gggacgcggagcccggagcggggcgacgaggcgagcgggggccgggcaggcccagcggagaacagaagcaagagcagaggccagg

SEQ ID NO: 27188 - RNA, 80 nt, Homo sapiens
aaagggacgaaaaaggacagaccgccggacaagggcagcccggaccggaaagaccaacgccaggaaaaagaagaaaagag

SEQ ID NO: 27189 - RNA, 76 nt, Homo sapiens
agaaaaagcagaaagagagaagagagacagaagagcaaaggcagagggggcgagggaggaaagggggcaaaacgac

SEQ ID NO: 27190 - RNA, 69 nt, Homo sapiens
aagcaggacaaacagcacaagagcggacaagaaagccgaagagacccccagaagccagcagcccgcaga

SEQ ID NO: 27191 - RNA, 88 nt, Homo sapiens
cgaaccgagccggaacgggccagcgcgcaagaggccacggcgggggcaccgagaagccccgaccgacgggcggagggggcagggcaga

SEQ ID NO: 27192 - RNA, 82 nt, Homo sapiens
cagcagacgcagccgagacaccagcccgaaacaccaccaagcagcccccgcgacgagcccccaacgagccaccaacaggaac

SEQ ID NO: 27193 - RNA, 70 nt, Homo sapiens
ggacgagcagccaaagcgacagaggagaacgcaacagcgccaacagagcagccccgccgccaggggaaag

SEQ ID NO: 27194 - RNA, 87 nt, Homo sapiens
cacaggaacagcagggacaggccagcaagaggaaacacaagcggaaaacgagccacagccaaccacaagcacgggaggccgaggcgg

SEQ ID NO: 27195 - RNA, 43 nt, Homo sapiens
cggcacccggcaaaggaagaggacggacaccgcaaagacaccg

SEQ ID NO: 27196 - RNA, 77 nt, Homo sapiens
acagacgcccgacccacaccagcgcaacagagcagccccagacaaggaccaaagggcaaaagagaaacaagcagaaa

SEQ ID NO: 27197 - RNA, 52 nt, Homo sapiens
aaccacacgcaggacagccagcaagcagacaaaacagaggagaccagaccag

SEQ ID NO: 27198 - RNA, 76 nt, Homo sapiens
ccggggcgcggagggccgagggagggccgagccagccgcggccggaggagcccccaggccgacagggacaagcgca

SEQ ID NO: 27199 - RNA, 79 nt, Homo sapiens
acgcgcagaccagaccgccgaccggcgcccgccgaaaaagcggggaaggggggcaaaaaaaagaagcaagcgaagcacc

SEQ ID NO: 27200 - RNA, 73 nt, Homo sapiens
cgcaccgcgcgagcacgggcggagcgaacggcccaggaaaccagagaaaaaccgaggggagacccgccggacc

SEQ ID NO: 27201 - RNA, 53 nt, Homo sapiens
gcgaggcccacccgcaggaccggcgcagggagcaggagaagcggagcgaaggg

SEQ ID NO: 27202 - RNA, 79 nt, Homo sapiens
cgcgccgcgccgcaccccgagcgaccggggaggggcgaccccggggcccggccagcacgaccgaggaggggcggacagc

SEQ ID NO: 27203 - RNA, 73 nt, Homo sapiens
cccacggccggccgcgcgcgaacccggccgcagggacccgcaggagggaacaggcacgccccacccgccagcc

SEQ ID NO: 27204 - RNA, 104 nt, Homo sapiens
gaggaccccgccaagggccccaagagggcacacagcacacaccgacaggcagccagaccggagaagcgcacaggccaccgaaagccaagaaaggagaaaagaaa

SEQ ID NO: 27205 - RNA, 75 nt, Homo sapiens
cacaaccaagcagcagaggagcacgaggacggggagcaagaagagacagagcagggccaccaccagcagcgcacc

SEQ ID NO: 27206 - RNA, 74 nt, Homo sapiens
cagccggagaagcgagcagcgaaaacggggacggacccaggccaggaaagaaagaaccgccacgggcgcgcagc

SEQ ID NO: 27207 - RNA, 82 nt, Homo sapiens
gccaaggcaaaagacgaaaaccaccggaacggcgaagaggcaccaaaaagaaccgcagacaggcagggagacgggcaaggac

SEQ ID NO: 27208 - RNA, 77 nt, Homo sapiens
ccgagcagcacgagggccaccggacgaggcgacagaaacggcgaggaaagagaggagccccggaaagaaaaggacag

SEQ ID NO: 27209 - RNA, 55 nt, Homo sapiens
cgagaaggcagaggcggccaggcaccaacgcggaacaggaggaggaccagaagcc

SEQ ID NO: 27210 - RNA, 78 nt, Homo sapiens
aggggagacacgccaaagccccaaggcaaggaggggcaggagcacacccccacaggaccccccacagaaggcccggca

SEQ ID NO: 27211 - RNA, 82 nt, Homo sapiens
cacacaccccgaccacgcggccgagagggacccggcaaagagagaggcacacgccgccgaaggccaggagcagaggccaacg

SEQ ID NO: 27212 - RNA, 66 nt, Homo sapiens
ccgaaagcggcgcaacgagcagcaggcgagaggcagaacccggaaagaaggaagggaccaccacaa

SEQ ID NO: 27213 - RNA, 83 nt, Homo sapiens
ggcggacgggaaggcgggagacgagaagccgaaaagcgcagcgagcggagccgccggaggggcaaacaaaagccagcaaccca

SEQ ID NO: 27214 - RNA, 81 nt, Homo sapiens
aaccagccacagagacacagcgcaaagaagggacggggaagaacgaaaagcaaaacagaagaaaggagaggcaacgaggga

SEQ ID NO: 27215 - RNA, 69 nt, Homo sapiens
aggggaaacccggagggaaccaagaagcaaaaccacggaccccagcaggcaccaccaagaggcaaagac

SEQ ID NO: 27216 - RNA, 57 nt, Homo sapiens
ggaaagaggaccaccagagcacggagcggcagcaacagccggcagggaaaacgcggc

SEQ ID NO: 27217 - RNA, 77 nt, Homo sapiens
cccgggcagcggcagagcaggaaggcacagaaagaaacaccacaaaacagaacgaacaaaagaaagacagaaggagc

SEQ ID NO: 27218 - RNA, 77 nt, Homo sapiens
cggcccggaggacaagaacgggagggcagaaccggcgcaaggaccgacccgggagggacagaggccaacccccccca

SEQ ID NO: 27219 - RNA, 55 nt, Homo sapiens
aggaggggacaaaaccccgaaaaaggcaaaaaacacaacgcccagacggagaaag

SEQ ID NO: 27220 - RNA, 78 nt, Homo sapiens
gccggccggagaaggccagagcacacacggccaagagcgggcaccaggaagcgaaggcggacccaaagacaggaccac

SEQ ID NO: 27221 - RNA, 79 nt, Homo sapiens
gaagggcggaggaggcagaggccaacgcccgggcgcgcgaggccagagagggggagaaagagacggcgccgaggaagca

SEQ ID NO: 27222 - RNA, 75 nt, Homo sapiens
cgcccacgcacgaaagcccaggccaaaaagagaccaagacacccaggagaaagacagcggggaaaagaaaaagga

SEQ ID NO: 27223 - RNA, 55 nt, Homo sapiens
aaaccaagaaagaacgagggcagaggggaaagcaggggagaaaagaaaagaaaga

SEQ ID NO: 27224 - RNA, 56 nt, Homo sapiens
gcacagaaagaaaaaagcgcgccaagaagcgagaaagagccgccgcgcccaggcgg

SEQ ID NO: 27225 - RNA, 60 nt, Homo sapiens
agacggaccgcgagagcgaggaacgggccacggcagaggcgacaaaccaagaggagccag

SEQ ID NO: 27226 - RNA, 80 nt, Homo sapiens
cgcccgggggaggaaccagggggccgggcagccgcggacccgccaagaagcgcccacgcagcagccggagagggaagcgg

SEQ ID NO: 27227 - RNA, 61 nt, Homo sapiens
gggaagagaacacacggaccgagagaggcgagacccgacagcagacagcgggcccagcgaa

SEQ ID NO: 27228 - RNA, 80 nt, Homo sapiens
agaagcacagccagaagaaaaggcacgccacggagggaggacacaccgggccagacaggcccagagggaggcacaacagc

SEQ ID NO: 27229 - RNA, 38 nt, Homo sapiens
aggaccacgggagaagcaggccgcccaaggacgacgca

SEQ ID NO: 27230 - RNA, 76 nt, Homo sapiens
gacgcagccaaaggagaagccccaggagagaaggacccagggcaaggccagagaaggcgggagaaagacacgaacc

SEQ ID NO: 27231 - RNA, 58 nt, Homo sapiens
gaagcagcccgccgcgccgccccgagcagcccgccagcgagacgacgggaccgaagga

SEQ ID NO: 27232 - RNA, 81 nt, Homo sapiens
gaggccgcccgagcggagcggggcgcaggcgccgccgccggacgcggcaacggagaaggaaaccgccagaagcgcggcgag

SEQ ID NO: 27233 - RNA, 74 nt, Homo sapiens
gaggcggaaaaagaaaacccaaggaacgcacgcccggcggaggcacccaccacgggccaggcgggccagaggca

SEQ ID NO: 27234 - RNA, 54 nt, Homo sapiens
ggagacccaggcgggacagagggagccaggcagagcggggacgagagccccggc

SEQ ID NO: 27235 - RNA, 77 nt, Homo sapiens
ccgggcgccccgcaggacacaagggaagaaaaggacccccagagagcaaaaacaaacaaaccaagcggaccgccccg

SEQ ID NO: 27236 - RNA, 71 nt, Homo sapiens
ccggagcgcgaaaccaggcccgccgcagagaggagaaagcagccaggagccaacccgccccgaaggacccc

SEQ ID NO: 27237 - RNA, 82 nt, Homo sapiens
cggagccagagggaggagccgcggcgggcgccgagcgcaccgcaggaggccgcggaaggagagacaggaagggcacagaaac

SEQ ID NO: 27238 - RNA, 65 nt, Homo sapiens
gcgccccggccaggaagcgccggcagcccgcggcacggagacaggccccgggaccaaggacacgc

SEQ ID NO: 27239 - RNA, 38 nt, Homo sapiens
gccaaggaggccgcagcagaagcagcacacacaaagaa

SEQ ID NO: 27240 - RNA, 58 nt, Homo sapiens
gggaccgaaacagcccaccgccccagaccacgggagcagcaaccgaccacggaaagaa

SEQ ID NO: 27241 - RNA, 84 nt, Homo sapiens
aaccagcagaccacagacccacagcgaaagcaacagagcaaaacggagcggcagggacagacacaagagacgacggaggcccgg

SEQ ID NO: 27242 - RNA, 62 nt, Homo sapiens
cgagcaggagacagcaggaccacagggcgacggccacccaccacacaaagaagaaaacggca

SEQ ID NO: 27243 - RNA, 76 nt, Homo sapiens
acgaagaccaaagcacccagcagcccgcaaggagggaggcgccaaacagagcgaagaaagggaggcaccaggcacg

SEQ ID NO: 27244 - RNA, 72 nt, Homo sapiens
acgaggagggcagccgggcaccgccgagacgccaaacacaccaacgggaggggaccaaaccccgcagagaca

SEQ ID NO: 27245 - RNA, 84 nt, Homo sapiens
ccgggcggagcaagaggaagcgcagcccacccgggcagccccacccggagggccagacaaggggaacacaagaggagagaaggg

SEQ ID NO: 27246 - RNA, 50 nt, Homo sapiens
aaaaccaacgcaaccaccccagggacaaggcccaggaggccaccagcacg

SEQ ID NO: 27247 - RNA, 76 nt, Homo sapiens
cggaagaccaggaaggagccggggcgagaggaccggcacggcgccaccgaggccacacgaccggaggcagagccca

SEQ ID NO: 27248 - RNA, 55 nt, Homo sapiens
cgggcccacacaacccaggcaaccaacagggccaaaggcggagcacacaaaaaac

SEQ ID NO: 27249 - RNA, 46 nt, Homo sapiens
caggcagccgcagcaggacaaaaacagacgcacgccgaaaaaaaac

SEQ ID NO: 27250 - RNA, 83 nt, Homo sapiens
cccggggccgacccggcccgaggggaagcagccagcggcacacggccccaaggccacaaaagacaggaacacaaggacaggca

SEQ ID NO: 27251 - RNA, 57 nt, Homo sapiens
gacaggaaccggacagcacaccagggccgggacacacgagcacagacaggcgagcgg

SEQ ID NO: 27252 - RNA, 78 nt, Homo sapiens
ggccaaacacagcacgacggcaccgagcgagcgagggccgccccccgggcgaggcagagacgccaggggcaaagcgcg

SEQ ID NO: 27253 - RNA, 62 nt, Homo sapiens
ccacacaacagagaacgggcacgaaggaagcacagaagagaaagggagagaaaagagaaaaa

SEQ ID NO: 27254 - RNA, 77 nt, Homo sapiens
gagcagccgccagccccacggacggacgccagccccacaacaagacgagagccgaggcgccggaaacaacagccaac

SEQ ID NO: 27255 - RNA, 70 nt, Homo sapiens
gaaaggcaaaacaggaagggaaacacaaagaagacaccagaagggccagcaccacgacaacacggcgaca

SEQ ID NO: 27256 - RNA, 89 nt, Homo sapiens
cccgaaccagaaaacgaccccccagacaagcccacccccggacacacagcaacgaagcaggggaggagggaagaccggacagcgagcca

SEQ ID NO: 27257 - RNA, 82 nt, Homo sapiens
cggcgccgaggacccccgccaccagaacaagcagaagaaagacaagagcagcagggcgagacagcgaaagcacgaacaggaa

SEQ ID NO: 27258 - RNA, 56 nt, Homo sapiens
caaaaggaaacaagcaacagggccagcgagccaccccccgcacacagcaagcacaa

SEQ ID NO: 27259 - RNA, 87 nt, Homo sapiens
gaacagaaacaccaggaagggagaacggcgaagggagggccgccccaaccgacgcaccagccggaggaggagggacagggccaggaa

SEQ ID NO: 27260 - RNA, 82 nt, Homo sapiens
accgagacccggacagggcaggaaacagggcgcccacacgcggacacagacggccaccccaccggagcggcccccaggccac

SEQ ID NO: 27261 - RNA, 84 nt, Homo sapiens
cgcccccgcgcggcgcagccgggaccggccgacccagcccccaggccagaagagccccacgcgaagagaagaagcaacagacaa

SEQ ID NO: 27262 - RNA, 75 nt, Homo sapiens
ccacagaagacgacggacagagagacacagggccgcaggccacacccacgcaaccagccagccccgccgaacgag

SEQ ID NO: 27263 - RNA, 71 nt, Homo sapiens
gcagggacccacaccgaggaaagacaacccacccgcgggaacccgccgccagggccaccagcgcccaaagc

SEQ ID NO: 27264 - RNA, 80 nt, Homo sapiens
acaacagagagcaaagaagacagcaagaggcaaaaccggacaagaggccaaccaaccggagaggacgagcaacaaagaac

SEQ ID NO: 27265 - RNA, 59 nt, Homo sapiens
gcagcgggcgggccccgagagcagcagcgggggcggacccgggaagcccccggcggggc

SEQ ID NO: 27266 - RNA, 71 nt, Homo sapiens
agaacgggcacagcagcggaaaaacacagagggcacacggcacagaccaggggccccggcgcggagcggcg

SEQ ID NO: 27267 - RNA, 52 nt, Homo sapiens
acgccacacaccaaacggcaaggccccagcccaagcgggccgacgagaggaa

SEQ ID NO: 27268 - RNA, 79 nt, Homo sapiens
aagcgcaaaaacaagacggggcgccccacagaggggcgacggccaagacaaggccgagaccgcgggaagaagaaggagg

SEQ ID NO: 27269 - RNA, 69 nt, Homo sapiens
gaaaaggccaaagagagggcgaacaagcaagaaaagccaaggaaaagaaaaaggagaagagaaagaaca

SEQ ID NO: 27270 - RNA, 71 nt, Homo sapiens
cgaacgggggcccccccgccggacaggagacaggagggaccgggcagaagaacgggggacgaaagccagcc

SEQ ID NO: 27271 - RNA, 71 nt, Homo sapiens
agggcagaacgaacaggaacaaagccagacgggagaccagcacgagccgggcgggacgccggaaggggcac

SEQ ID NO: 27272 - RNA, 76 nt, Homo sapiens
gcacacaggccacccacggccgggcagaccccaagagaaaggagccccccaagggaagagacgagacagaggcacg

SEQ ID NO: 27273 - RNA, 81 nt, Homo sapiens
acagcaggacgaggaagaagaacagccgagagagcaacaagccagcccgggaccgaggcgacagcagcagacgcggcacgc

SEQ ID NO: 27274 - RNA, 71 nt, Homo sapiens
cgcaaagagagcacacaacaggaggcacaagagcaaaacgacaacagagcaccaacaaaaagcaagccggg

SEQ ID NO: 27275 - RNA, 75 nt, Homo sapiens
aggaacgcccagaggaagaagaccaagaagaaaaggaaacacaggggacaaaacccaaaacaaacaaaaaggaga

SEQ ID NO: 27276 - RNA, 65 nt, Homo sapiens
aggaagccgccgaaccaggagaaggagccgggaaaccgaagaaggcagagaaggcaaacaggagg

SEQ ID NO: 27277 - RNA, 79 nt, Homo sapiens
cgggaagagcgagagaagcggcggaggacgagcccgggagcgacccgcgcaaacaaacagaaaacagacgacgaggaga

SEQ ID NO: 27278 - RNA, 68 nt, Homo sapiens
ccccggcacaaacggaccaccagaaagcaccccacaggagggagcaacaacaaggagcaagcacagcg

SEQ ID NO: 27279 - RNA, 57 nt, Homo sapiens
gaaaggagagcaaagggacagccagagaagaggagagaaacccgcgccagagagcca

SEQ ID NO: 27280 - RNA, 74 nt, Homo sapiens
aggcagggaacccgggcccgcaaacgaacacgcgcagcgcagaggcccggcagccccaaggaacgcggccccga

SEQ ID NO: 27281 - RNA, 62 nt, Homo sapiens
gcagcccacgcgcagcgcccgcacaccggcagcaaaagagaaagcaccgggaggaaagagag

SEQ ID NO: 27282 - RNA, 75 nt, Homo sapiens
cgggcgcgccgcaccccagcagcacccaagcaggacacgaggaggggacggcccgccacaggcacagacgaggag

SEQ ID NO: 27283 - RNA, 81 nt, Homo sapiens
cccgcgcccagcgcccggcggacaccgagaagcgaccgcgagaaagacgaagagggcgaccggacaccaccaggcgcgaga

SEQ ID NO: 27284 - RNA, 59 nt, Homo sapiens
cgagcccaggcagcccagcccgcccccagaaaccagcgggcccgaggacgagaagagga

SEQ ID NO: 27285 - RNA, 70 nt, Homo sapiens
ggaacgaaaagaacagggacgaagaaaccccaggaggagccaagcgggaaaaggggcaccgacgcaccag

SEQ ID NO: 27286 - RNA, 84 nt, Homo sapiens
cgccccacgcacgccgcggcagaggcggacacgggacacgccacagcggcaggaagaaggaccggggagacaggaacacgggca

SEQ ID NO: 27287 - RNA, 57 nt, Homo sapiens
gaaagacagaggagccgaaagaggccaaggcgagagggcccggaacaaacggaggcg

SEQ ID NO: 27288 - RNA, 75 nt, Homo sapiens
cagggacgaccccgcgcggccggaccccgacaagggaccgggcgggccccgcaggaaacccccaccggcccacac

SEQ ID NO: 27289 - RNA, 68 nt, Homo sapiens
gacccgggccgcggagcccgccgcccgccgccacgggggccggcaccggagaaacgccaggaccgaga

SEQ ID NO: 27290 - RNA, 75 nt, Homo sapiens
ccgaaccaacacaagggcaaaccccacaggagaaggagccgggagagagcgcgaaccggaaaaagaacgacggaa

SEQ ID NO: 27291 - RNA, 77 nt, Homo sapiens
gccaaaggcaggagacccacaaccgacacagccaaaacacggacgaacagagcagaaccaagccagcgaaggaaaga

SEQ ID NO: 27292 - RNA, 86 nt, Homo sapiens
cgagaacagcaaccagaccccggagacgagaaaccaccggggcccaggagaaggcagaaaaggaggcacgcggaagcaaacagacg

SEQ ID NO: 27293 - RNA, 82 nt, Homo sapiens
ggccaagaggaagaccccaccaggagaccacgcccagggacagaccagccaccacgcccgcccacacagcgccccagagccg

SEQ ID NO: 27294 - RNA, 78 nt, Homo sapiens
cgccacacagaccggggggcggccgcgcggccgggggcgcgggcggcggcgccggcaggaaggacaggagagacaacg

SEQ ID NO: 27295 - RNA, 70 nt, Homo sapiens
gggaaaaggagaaggcaagacagcgccagggacaagaacagcagaagcaacaagagagacaagcccgggg

SEQ ID NO: 27296 - RNA, 56 nt, Homo sapiens
agagaaaaaaccaacaccccggcagccgggaaggggcaaaacaccccgacccagca

SEQ ID NO: 27297 - RNA, 72 nt, Homo sapiens
ccggggcaaggcaacgaagagaggcccgaagaggaaaggaggagacccaccgaaggcagggaccgaaggcag

SEQ ID NO: 27298 - RNA, 72 nt, Homo sapiens
cggaacggagcgggccaggagccgcgccgccccccacgacgccaacgggggcagccagcccacagggacaca

SEQ ID NO: 27299 - RNA, 57 nt, Homo sapiens
aagccgacaaccccagaaacaggagggcgacagaccagagaaagagaagggccaaac

SEQ ID NO: 27300 - RNA, 50 nt, Homo sapiens
acccccaccccgcccaaggaggcccagcggcgcagaacagcgggaaaagg

SEQ ID NO: 27301 - RNA, 81 nt, Homo sapiens
ccacaccccaacccaaggccgggcacccaggcccagcaagaacccagagccacgcgagaccgccagccgcccaggggccag

SEQ ID NO: 27302 - RNA, 63 nt, Homo sapiens
ggcccagcccacagcgcggccccagggacagggaggcggaggaagccggagcaaggaaaagac

SEQ ID NO: 27303 - RNA, 79 nt, Homo sapiens
cgaccccgcgccgacacgcgcgcaccaggccaacaacgccccacgccggcgcggcgggcccggcgggcccgcgacaccc

SEQ ID NO: 27304 - RNA, 56 nt, Homo sapiens
gcggaaggcagcgcccagcagcgcagaccggcacacaaagacagcgcccgaaggga

SEQ ID NO: 27305 - RNA, 57 nt, Homo sapiens
aggaaggcaccgcagagccaagaacgcggcgacagagcagagagccaagcccagccg

SEQ ID NO: 27306 - RNA, 75 nt, Homo sapiens
cccgccccgccgcccgagccggcgccaaggcgacagggggaccgcggcgcgagggacgcaccgccccaggacggg

SEQ ID NO: 27307 - RNA, 64 nt, Homo sapiens
aagggccccaagagggcacacagcacacaccgacaggcccgagagagaaagggaaagaaggagc

SEQ ID NO: 27308 - RNA, 76 nt, Homo sapiens
ccaggccgacagccgcggccgggcccgaggccaagccgacgccagcgggcgccacccaacaggcgcaccgcccacg

SEQ ID NO: 27309 - RNA, 104 nt, Homo sapiens
accagaaccggaccccgcgcgcaggccggggcgcgacaggcagacagagaagaaagcgacagaggcgaccccaaagagaaagcagaaagaaccagagagagcaa

SEQ ID NO: 27310 - RNA, 77 nt, Homo sapiens
cgcggggggaacccgaggaaaaacgccccagaagaagggacacgagaaacgaagcaggagagaagaggaggaagaag

SEQ ID NO: 27311 - RNA, 54 nt, Homo sapiens
gaccccggaacgggcgggcggcccccggccacaggaagagcagacccacacccc

SEQ ID NO: 27312 - RNA, 70 nt, Homo sapiens
cacaacaagagcgacgggacagcgcgcaccagcaaagaagcggcgcagaagggcccaagagcaagagcac

SEQ ID NO: 27313 - RNA, 77 nt, Homo sapiens
gagcgcggcggagcggcccgcagggcccgggacgagcggcccagcgacgagcgaagaggcacaaaaccgccaggagc

SEQ ID NO: 27314 - RNA, 79 nt, Homo sapiens
agggaccgcaggcaagggacacgacaggccggagcgcgaagacgcagggaaagcggcacacgaaaggggcacggcagga

SEQ ID NO: 27315 - RNA, 88 nt, Homo sapiens
caaagaacagaagcaaggaagcgggcaaggcgggccagccaaagaggccagaagaggaaggggagaaaagaccccaacaagaagagaa

SEQ ID NO: 27316 - RNA, 74 nt, Homo sapiens
ggaaaacaggaccagggagagaaagggagaaccaaaggggagaacaccaggcagaacgaaaacaggcccaacag

SEQ ID NO: 27317 - RNA, 75 nt, Homo sapiens
ccccgaaaagggagcgagcgcccgagaaagaggccggacaaccaccagcaggggaccagaagccaggagaggcgc

SEQ ID NO: 27318 - RNA, 70 nt, Homo sapiens
cggcacagcggaccccgcccgaggcaggccgaacaaagccccgaggacggccggaaaaacgaacagacgc

SEQ ID NO: 27319 - RNA, 78 nt, Homo sapiens
ccggaaaggccacacccccggaacagagacagagacacggcacaccgcaggaggaaccccaggcccccagcggggcca

SEQ ID NO: 27320 - RNA, 75 nt, Homo sapiens
cacaaaacaccgaggggcagaaaaacaggcagccaaaggcagggaagaaaaagaagacaccagagaaacacgaga

SEQ ID NO: 27321 - RNA, 78 nt, Homo sapiens
cggcagccgcgcgccaaggccggacccgggagcacagaccagcgcgcgaccggagccccacagcggcacaggccccag

SEQ ID NO: 27322 - RNA, 80 nt, Homo sapiens
agcggccaagcacgccggccgagggcaccaaggcggcaccaagacaccagccgaaaagcacaaggaccgaggaaccacgc

SEQ ID NO: 27323 - RNA, 47 nt, Homo sapiens
agaccagacccggcagagcaagagcacgccacaagcacgcgaagcag

SEQ ID NO: 27324 - RNA, 87 nt, Homo sapiens
cgcaaagcggggacccagacccggagcccagggaagcagccgaccagccgcggagccgggggcagggcggagaacggaaaagcacca

SEQ ID NO: 27325 - RNA, 81 nt, Homo sapiens
ccacgaagaggagcgcaagcaccgccaggagaacgacgccagccagccgcagacagcccagaacggcagcgcggagggggc

SEQ ID NO: 27326 - RNA, 71 nt, Homo sapiens
aacggacaccacagagacacaaaccagacaacccggacagcaaggcgaagggcagagaggagaacaggagc

SEQ ID NO: 27327 - RNA, 72 nt, Homo sapiens
ccgaggccccccagccagcgaacgacagggggacagcagcaccagaaccaaaaagccacaacagggaggggc

SEQ ID NO: 27328 - RNA, 79 nt, Homo sapiens
gccgggagaaccggaggaggaggccacacagaaggacggcccgacggaagcaggcccgcgcgggagcgacacgacaaca

SEQ ID NO: 27329 - RNA, 48 nt, Homo sapiens
accccgggccaggaaacaagcccacagacacacccaaagcagcccaca

SEQ ID NO: 27330 - RNA, 66 nt, Homo sapiens
acgaaggccacaggagaagaaaaaagccaagggggcgaagagagagaaacgaaaaagaggaaggag

SEQ ID NO: 27331 - RNA, 80 nt, Homo sapiens
ccggagcagagaaggcccccggcaggcccaagccaggagagcccgaacggagcccggcagggcccggcccgccccccacc

SEQ ID NO: 27332 - RNA, 78 nt, Homo sapiens
ggccacaaagcgaacaaagaaagggaagagacacaagaccggaagagaagcccggccgggaaaacaagacggccgggg

SEQ ID NO: 27333 - RNA, 71 nt, Homo sapiens
cccaccaagaacccagagcccgaaaaccaccgcgcagagcgcggacagcaagccacagccacaaacaccgg

SEQ ID NO: 27334 - RNA, 61 nt, Homo sapiens
caacgccaccagggcgagacggccagccaaaggaagcacagaggcaccagccaacaaagaa

SEQ ID NO: 27335 - RNA, 77 nt, Homo sapiens
gcgggcccgaggcgcaccaagggcgaaggagccggcccaagcacgagccagggagccgccgggaccggcccgggaga

SEQ ID NO: 27336 - RNA, 93 nt, Homo sapiens
ggaaacaaagagaaacggggacacgccgagagacccaagaaacaggaagaagacggcacgggacccccagcacaggcagcaggccgggagaga

SEQ ID NO: 27337 - RNA, 79 nt, Homo sapiens
cagaagccaggccaggccagccgcgcaacacgcggaccagagaacccagggcaggaccgccagcagcagccgaaaacgc

SEQ ID NO: 27338 - RNA, 84 nt, Homo sapiens
aaagccaaaggcaccccgagcgagggccgcccagaggacagagcaaggagcagggaagcagcacggcaagcggaaacacagggg

SEQ ID NO: 27339 - RNA, 56 nt, Homo sapiens
gcaagagaggcaccccgaagaggcgaggagcaacccagccagcaacagaagaaagc

SEQ ID NO: 27340 - RNA, 65 nt, Homo sapiens
agagagaggaaacgaagggagcgacacacacccaaggcacacagagaaaaaaagggaacaaaaca

SEQ ID NO: 27341 - RNA, 78 nt, Homo sapiens
gaaggcacgagcggagggagaacaagaacgcaggaaggcccgggcaagagcgccggacaccacgaccccacggacgcg

SEQ ID NO: 27342 - RNA, 71 nt, Homo sapiens
aggagcaagggaaagaacccggcggggaaaagggaaggaaaagagacgcaggagcaccagacgaacgggac

SEQ ID NO: 27343 - RNA, 82 nt, Homo sapiens
acaacagaccaaaaccaaagccacaaacgaaaaagggaggaaggaaagagaagagaggcggaagcaccacaacaaacacaaa

SEQ ID NO: 27344 - RNA, 84 nt, Homo sapiens
agcagcccagccagcagcacaaaggaggacggacaagcagaccggaagaccgacggaagaccacaccccgagggagcccaggac

SEQ ID NO: 27345 - RNA, 73 nt, Homo sapiens
gggaaaacaccgcagaaaaggaagagagaaccccaccgagacccgacaaggacagacgggccggccccaggag

SEQ ID NO: 27346 - RNA, 78 nt, Homo sapiens
caaaaaggccagaaagaggagcagagacgccggacaggggagccgccaccaaaagcagacggaaaacccacggggaag

SEQ ID NO: 27347 - RNA, 77 nt, Homo sapiens
aagaaaaccccaacaacagaggacggcaaagagggaagcagacaagagaaagagcacgcaaaagaggcgagaaggag

SEQ ID NO: 27348 - RNA, 87 nt, Homo sapiens
ggagggcgcgcccgggggggcaaggcggcagcccggcgcgcgggcgccccacagacagaccccaacaccaacaagacgaaaaacgga

SEQ ID NO: 27349 - RNA, 78 nt, Homo sapiens
gaccacgggccaaccaggcgcccagggcagacaaaggcaaacaaggacccgaaaggaccagcgaagcgcggcaaacag

SEQ ID NO: 27350 - RNA, 84 nt, Homo sapiens
ccggaccccagcgcccaggagagacgacccagaagagcccggggaagcgagcaaaaggcagaccaggccgcaacccacccagga

SEQ ID NO: 27351 - RNA, 65 nt, Homo sapiens
ccgaggcagaaaaaacgcccagagccgagccacaagcccacgagaggcaggccgcaccagaagag

SEQ ID NO: 27352 - RNA, 37 nt, Homo sapiens
cacagcggagaaagaagagacggggcaccgcgagcca

SEQ ID NO: 27353 - RNA, 78 nt, Homo sapiens
gaaccacggaacacaggccgcagagagacacgagagaagccaaaggaggaggacgagcacgacccagagccaggaggg

SEQ ID NO: 27354 - RNA, 74 nt, Homo sapiens
cgggcccggaggagcgaacaaggcgacaacacagccaagcaggcaccaagcagccaccaagcacagcagccgcc

SEQ ID NO: 27355 - RNA, 83 nt, Homo sapiens
cagaccaggcccaagcgaaaaagcgggaacgcaggacccaaagcgaagccaggagggaagcccagaagacgcacaagagagac

SEQ ID NO: 27356 - RNA, 63 nt, Homo sapiens
gacaagccccagggaagccacagcaccccagcacccagcaggcccccacgggaacgacgccgc

SEQ ID NO: 27357 - RNA, 80 nt, Homo sapiens
cagacagaaggagcaggaaccaaaggaaaaccagacgagagacagaagacgaaagggcaagaaagagagcacggacaaga

SEQ ID NO: 27358 - RNA, 74 nt, Homo sapiens
cagcgcgcaacaccccacaggagaggacagagggaggagggaaggaacagccccgccacgcagacacaacggca

SEQ ID NO: 27359 - RNA, 52 nt, Homo sapiens
acacacaaacccacaggacccccggcggccaagacacagcgaaaaacccagc

SEQ ID NO: 27360 - RNA, 81 nt, Homo sapiens
gcagcgccacacacagcagacagacagcagccagaaccagagcggcccagggaccaagaaaggcccagggaccaaagcccg

SEQ ID NO: 27361 - RNA, 76 nt, Homo sapiens
cgagaagggagacgacgcgcgggccgcgagcggggcgacccgagcacaaacccagaggagggcagcgggggcagag

SEQ ID NO: 27362 - RNA, 34 nt, Homo sapiens
ggaggcagaaccaaaaggaagacgggaagccaag

SEQ ID NO: 27363 - RNA, 66 nt, Homo sapiens
cagagccccggcccccccgcagacccccgcccccgaaaacacaagaaaagcacgcacagacagagc

SEQ ID NO: 27364 - RNA, 75 nt, Homo sapiens
gaaaacaccacaagaggacaaccggaaaggagcgccgcagacgccgcggcccgacaggagccagacggagaaaag

SEQ ID NO: 27365 - RNA, 82 nt, Homo sapiens
ccaacgcagagcaggaaggaaaagacgagggaagaagaccgacaacaaccaggggaagggaaaaaagaagaagaccagaaag

SEQ ID NO: 27366 - RNA, 52 nt, Homo sapiens
cggaacaggccaaaagcaagacacagccagggcaaacaaaaaaagccacacc

SEQ ID NO: 27367 - RNA, 79 nt, Homo sapiens
gaccagcgggccggagccccgagaaaaccacgggcggcggcccaccaccgcccgcgagaacgcaaccgggccggaaaag

SEQ ID NO: 27368 - RNA, 87 nt, Homo sapiens
cacccagaggccggggaccgccaaccccccaagaagcagagaaacacagcaggcggacgcccggcgggagggcagcggcagaagcag

SEQ ID NO: 27369 - RNA, 39 nt, Homo sapiens
cacagaaaagcaacccgcagggcccaagacccgaggagg

SEQ ID NO: 27370 - RNA, 68 nt, Homo sapiens
gccggaaaccggagcgcgcagcagcgggacgcccgaccgccacagccagggacgacacgcacagagaa

SEQ ID NO: 27371 - RNA, 80 nt, Homo sapiens
ccgccccgacgaggacgaccaacaggcagcagcgggccccgccaccggcacaccgaaggaccaaaaagagccaagcgaga

SEQ ID NO: 27372 - RNA, 75 nt, Homo sapiens
gccgccgggagccagaagcacaggcccgggcgaaggggccacgcgaagccaaaaggagaagcgaacaaaaaaaac

SEQ ID NO: 27373 - RNA, 78 nt, Homo sapiens
ggaacagaccagggggagagcagccccagaaacagaacaaaaagcccaagcgcaaaaaaaaggccccaacaaaacaca

SEQ ID NO: 27374 - RNA, 47 nt, Homo sapiens
acgcggaggggaaaacaaaacagaccggagcagagacacgaaaagaa

SEQ ID NO: 27375 - RNA, 62 nt, Homo sapiens
ccgaacgcgagggcggcgcccggggacggagcgcgcgcaaaggacccaaagacaggaccacg

SEQ ID NO: 27376 - RNA, 78 nt, Homo sapiens
gcccgcccaaccccagcggagagcaaggaggacacgcgaccgaacaggaggagccaacccacgagaacgccaaaggca

SEQ ID NO: 27377 - RNA, 76 nt, Homo sapiens
aagcagcacaaggcgagccaggaccggacagccagagccccaaagcaacccccgaaagagccggggccgcgccaca

SEQ ID NO: 27378 - RNA, 66 nt, Homo sapiens
aacgcgagcagcgaggaaaaggcagagggaaccaaaaaaaacagacaagaaggaacacaagggaca

SEQ ID NO: 27379 - RNA, 85 nt, Homo sapiens
ggccgccgggagagccacgggccgcgccgggcacagccggaaagcaggaccgcgacggcagcagagcaccggcacagccacaccg

SEQ ID NO: 27380 - RNA, 66 nt, Homo sapiens
gggagaccacagcaagacgccaggaccccggaagccagaaaggaagcagagcaagccaccaggcca

SEQ ID NO: 27381 - RNA, 74 nt, Homo sapiens
cgcaccaaccgaggcaacggcacaggcccaaaaaaacagaccaccagccgcgaggacaggacccccagaaacac

SEQ ID NO: 27382 - RNA, 68 nt, Homo sapiens
ccagaccaggaaagacagagccgcgagaaggggccagcaaagacggagcgggaagaaggggcgaaaag

SEQ ID NO: 27383 - RNA, 77 nt, Homo sapiens
cccaaagccccaaggcgacaagaccggaccgacccaacagaggaagccgcaagaaacgggacgacaggaaggccaga

SEQ ID NO: 27384 - RNA, 66 nt, Homo sapiens
ggcccgcggcggccccagagggcagagcagccaggcggaagaccaccaaaagcaggaaaacgagac

SEQ ID NO: 27385 - RNA, 78 nt, Homo sapiens
gccggcagcaaagagggaacaggcggaggaagcgcggcggaccacaagcgcgcgcgccggggcgcggaccccaaccgg

SEQ ID NO: 27386 - RNA, 74 nt, Homo sapiens
gaagcgggagccgaaagagaaacacagccaagcagggaggcccagggaaggagcccgcaccaacaacccacaag

SEQ ID NO: 27387 - RNA, 89 nt, Homo sapiens
gcgcggcgagcggagccgcggggaccgcggacgcacgaaaaaaccccaagaagaagcggaagaggagccgcggaaccaagacacaagga

SEQ ID NO: 27388 - RNA, 66 nt, Homo sapiens
gacgggacgaaaacgagaaaaggacgacggaaccaccacgaaaaaaagcacacccaagacacagag

SEQ ID NO: 27389 - RNA, 71 nt, Homo sapiens
cagaaggcaaagccaggcacgcccaccggacccaggcaagagcaacgaaccaaagcaaaggaggccggggg

SEQ ID NO: 27390 - RNA, 80 nt, Homo sapiens
aggaacggcccagcacaagaccgcgacagacccggaggagcgcaccgccaggggaaacggagaagagcgagaaaaaggaa

SEQ ID NO: 27391 - RNA, 80 nt, Homo sapiens
cagaaccggaggccagacaaggaggaccgcacgacagcggcccgcgggacacggcaaagagaccccccaggggacagaag

SEQ ID NO: 27392 - RNA, 82 nt, Homo sapiens
gacgggaacagacaaaaggcgacgggacgagcccgggagggcaaggacccaaggagaagcgggcggagcacccaccaagcca

SEQ ID NO: 27393 - RNA, 73 nt, Homo sapiens
ccgcaggacgaaccaagcaacgaaaaacgcgagcagaaaccacgaagaagcgaaacgggcccacggcagcacc

SEQ ID NO: 27394 - RNA, 79 nt, Homo sapiens
gcagcccccagagcgggaccacagaaagagaaagcgagacacgcagcagcccgcaaaaccaaaaaaacgaagaggacgg

SEQ ID NO: 27395 - RNA, 75 nt, Homo sapiens
agccaaggccggcagcgagaccccggggccaagaagcggggcggagagaagacagagaccaggggccacaacgga

SEQ ID NO: 27396 - RNA, 69 nt, Homo sapiens
gccgccgcgcagcgccaggcacaccacggaaggccccacccccaaccaaccccggggccaacggagcgc

SEQ ID NO: 27397 - RNA, 50 nt, Homo sapiens
gcacgccaacccaaccgagcccgacaaggagcggcagaccgagacagaga

SEQ ID NO: 27398 - RNA, 67 nt, Homo sapiens
gagccggcgaggacaaaaccgaaggagggcaccccgagccccggagcgagagcgaggccgagcaaca

SEQ ID NO: 27399 - RNA, 78 nt, Homo sapiens
aaggagccgcggcagaccgaggggcaccgaccgcacgggccacccaaaacaggcgggagcagcggaagacaccaaggc

SEQ ID NO: 27400 - RNA, 59 nt, Homo sapiens
cagccaccccagcaggaaacacacccaaggacaagcgcaccacaaccacgagacaccgg

SEQ ID NO: 27401 - RNA, 74 nt, Homo sapiens
gacgaagcccacgccgggacccagcgcaggccccgccgcaggaagaccacccgcaggaacaccccagaccgagc

SEQ ID NO: 27402 - RNA, 76 nt, Homo sapiens
agccacccgcgccaacagcaggcaagcgcagccagagacggggcccagaaaagaacccgaagagcccaagcagcca

SEQ ID NO: 27403 - RNA, 76 nt, Homo sapiens
ggaagccaagcaaacgcagaaggacgcccacgagcaaccaagaggacagagaagaggacggagcgaggaggggagc

SEQ ID NO: 27404 - RNA, 64 nt, Homo sapiens
ggagcaggcgcggcagcagcggaacaccccccagcccgcccagagccggaagagggaagaagga

SEQ ID NO: 27405 - RNA, 67 nt, Homo sapiens
acgggcaggaaggcagcgcacgacagcaaaagaccaccacaacccgcaacgccacagcgagaacaga

SEQ ID NO: 27406 - RNA, 66 nt, Homo sapiens
gaaggaccaagaaccaggccaagaagaaaaacacccgggacggccacaggagcaacggcacccagc

SEQ ID NO: 27407 - RNA, 90 nt, Homo sapiens
caggccgggcaccccgagcgcaaggacagcgcgaggccgcgcagcccagcgcagccacacccaggccacagaggaggaaagagaggggaa

SEQ ID NO: 27408 - RNA, 35 nt, Homo sapiens
gacaaccaaggggaaaggggacaccacaggacggc

SEQ ID NO: 27409 - RNA, 53 nt, Homo sapiens
cggcaccacaccaccaaagacaagagagggcggcagaaggaacaccgagaaac

SEQ ID NO: 27410 - RNA, 58 nt, Homo sapiens
caagggcccgcgggacgcgcgcaaaaccaaagggacgcaacaggagagagcgacgcaa

SEQ ID NO: 27411 - RNA, 93 nt, Homo sapiens
gggccggagaagaaggccgacaaggaaggaagaaggcgcacaccccagcgcgcaaagcgcgaggggcgaggaagaagagagggcgaaggaggc

SEQ ID NO: 27412 - RNA, 71 nt, Homo sapiens
cgcgggaagaggcggcgccgccacccccccccagcaggccgacgcaggagaggaaccaagaggacaacaga

SEQ ID NO: 27413 - RNA, 59 nt, Homo sapiens
gaaaacaaccgagggcagagaacagcgacacccagcagaagcagcaggaaacgaaccga

SEQ ID NO: 27414 - RNA, 83 nt, Homo sapiens
ggagcagagagcggagacagaaagccacacccaccgaccagaggacaagacaaagggagcaagacaagccaaagaggaaaagc

SEQ ID NO: 27415 - RNA, 68 nt, Homo sapiens
cacacgaacagcggaggagaagacaagacaacaggaccaggaaccagggaagacagcaagagcaccgc

SEQ ID NO: 27416 - RNA, 37 nt, Homo sapiens
agggagccggcaacacacggacacagacaggcaggag

SEQ ID NO: 27417 - RNA, 71 nt, Homo sapiens
acgcagcggcggccagggaccagggccggggggcagacaccgggcgccccggcgcgcggacacaggacaag

SEQ ID NO: 27418 - RNA, 96 nt, Homo sapiens
aaacccacaagagccggagcgaggcacgaaaaggaaggaagggcgccaggccagacagccaccgaaggggcccagggaccgggaccgcgcaccgcc

SEQ ID NO: 27419 - RNA, 32 nt, Homo sapiens
ccggagagcgggacacagagagggacaccagg

SEQ ID NO: 27420 - RNA, 79 nt, Homo sapiens
aaccaacgaaccaaaagcaaccgcgaagagcaggacaaccagaaaaggcacgagacagagaccagcgaagaacaaaacc

SEQ ID NO: 27421 - RNA, 78 nt, Homo sapiens
cagaacacaggagaaagcgaagccaagcccgaagccaaggggccaagaggagaagaagaaccccgaacaggcccaagg

SEQ ID NO: 27422 - RNA, 58 nt, Homo sapiens
cgagcaagaccgcgacacccgaagcgagaaaggcgcacaagagcagggaccccaggcg

SEQ ID NO: 27423 - RNA, 43 nt, Homo sapiens
gacagagcaccagcaccagcagagaccaaaccagacccaagca

SEQ ID NO: 27424 - RNA, 62 nt, Homo sapiens
gggaaccccccgccggacaagggaggcggaagaaggaaccccgaagaggggcgggaagaagg

SEQ ID NO: 27425 - RNA, 75 nt, Homo sapiens
cgcaccgcaggcagacaaaagggccaaagaagggagagaggacaggagcgaaggaaaaaacagaagacgcagccc

SEQ ID NO: 27426 - RNA, 79 nt, Homo sapiens
gggccgaccgggcgcaccgaccaggccccaaagccccaaggcgacaagaccggaccggggaggggcgaccccggggccc

SEQ ID NO: 27427 - RNA, 71 nt, Homo sapiens
cgaacccagcacggcaaccgcgcggcaggccaggggaccgaacacggaccaggacacggaggagaacaggg

SEQ ID NO: 27428 - RNA, 76 nt, Homo sapiens
gcccccaagggccgaggaggacaaaggccgagccaggccacccggcacaaccagaaagaaacccgaagacaacaca

SEQ ID NO: 27429 - RNA, 74 nt, Homo sapiens
aacaaacacaccgaaccagagagaagaaagggggcccagcgaaggaagaagaacgcagcagcaaacacagaaac

SEQ ID NO: 27430 - RNA, 73 nt, Homo sapiens
gccaggccgacagccgcggccgggcccgaggaaccacagcaaagagccgggaacaacacagagggacaaaaga

SEQ ID NO: 27431 - RNA, 65 nt, Homo sapiens
cagggcagcggcccccgcccgcagcgcacgaccaccacccagaggcccagcagcagacaccaccg

SEQ ID NO: 27432 - RNA, 119 nt, Homo sapiens
gaagacagaacgccggcccagccccagcggcagacggaaacgacagaagcagaggaacgcaagcacaggaccagaaacgaaaggcagcagaagaggaaagccagaaagacgagcaacag

SEQ ID NO: 27433 - RNA, 60 nt, Homo sapiens
cccggggcacgcgcaaccagcgaaccccaagcccgacggggacccaccccccgacaggga

SEQ ID NO: 27434 - RNA, 62 nt, Homo sapiens
aaggagaaggaaagcgaaggggaaggcgccgaagaggacgaaggagcccccaggacaggcac

SEQ ID NO: 27435 - RNA, 60 nt, Homo sapiens
ccccaccacccaccagggccccggagccaagaggacaccagaaaccagaagggacgaggc

SEQ ID NO: 27436 - RNA, 52 nt, Homo sapiens
gcacgaaagaggggcccacacccggacagagacgccaaggccccaaaggaca

SEQ ID NO: 27437 - RNA, 52 nt, Homo sapiens
cggccagaggccgcccccgcaaggccccagccgagcaggggacccacggcgc

SEQ ID NO: 27438 - RNA, 68 nt, Homo sapiens
ccaccacagaaacagaaggaggccggccgacacaaacagagcaggcgccggggcggagagaggggaag

SEQ ID NO: 27439 - RNA, 65 nt, Homo sapiens
gagcaccgcgccggcccagcaccccgagaaccgcaggagccagaggcacacaacaaagaagaaaa

SEQ ID NO: 27440 - RNA, 76 nt, Homo sapiens
aacgagacagcccacagggggagaacaagggacaggaaacagaagagggacaacgaggaaggcgcacagacgagag

SEQ ID NO: 27441 - RNA, 77 nt, Homo sapiens
ggacccgaggccccggagggccaggcgcgggccaggcgggacggcagagccacacgaaagccaaagggacccagggg

SEQ ID NO: 27442 - RNA, 78 nt, Homo sapiens
cacgcagcgccgggcccagcgcaggcacgcagggccaacgggacccggcgccggaaaggaaccaggagcgagcagcca

SEQ ID NO: 27443 - RNA, 87 nt, Homo sapiens
aacacagcggccaagagcaaacagaaccagaggagcacaggaaaagaggcagaggggcaggaccagaagaggggcccaggagggcca

SEQ ID NO: 27444 - RNA, 105 nt, Homo sapiens
cgccgcggggcgcgcggcgccggcggcgcgcgacccccgcgcaggccgcaggagggaagcgcacggaaaccgccccgggaggcacagagcaggagacgccacccg

SEQ ID NO: 27445 - RNA, 82 nt, Homo sapiens
ggcccaggcggggcccggagccaagacgaggggagcagaccccgcccagggaacgccacaccgcccaccaagaagagaggcc

SEQ ID NO: 27446 - RNA, 65 nt, Homo sapiens
gacgcggcgcagggacccgggacagcggagagccacaacacagcagcccccaggagagcaggaaa

SEQ ID NO: 27447 - RNA, 62 nt, Homo sapiens
agcaacccaggggaggacggaaagaccagccagcagcaaagcagacccagccacgggcccgg

SEQ ID NO: 27448 - RNA, 58 nt, Homo sapiens
ccggggcgggcgacagcgaccgacgccacacgccgaggagacgagccaaacaaaggcc

SEQ ID NO: 27449 - RNA, 61 nt, Homo sapiens
cgcggagggagaggcgcagagcgagggcaggagaccggagagaacagaaaaaaagcggccc

SEQ ID NO: 27450 - RNA, 103 nt, Homo sapiens
aagaggaggacaaaaccgccaaagccggccccggcaaggaggaaggggcaaggagacccaacaccccggccagacgggccaccaggccggcgccccacgcccg

SEQ ID NO: 27451 - RNA, 52 nt, Homo sapiens
ccgcagaacacccagccaggccggacacaagagggcaagaaaggcgcgacgg

SEQ ID NO: 27452 - RNA, 74 nt, Homo sapiens
cgagggggggcgcgccggaaaccggagcgcgcagcaggaacgccagacccgggagggagaaacgagaggcaggg

SEQ ID NO: 27453 - RNA, 85 nt, Homo sapiens
agagcgcagaagagccaggaaacacacaacaccgggccaaaaaagaccgaagaggcgccgaagcacagaaaaccagggacaggga

SEQ ID NO: 27454 - RNA, 74 nt, Homo sapiens
ccagggacgggaagagagccccccaacagccaaaggagggccgcccccagggaacaaacccccagccggcccgc

SEQ ID NO: 27455 - RNA, 46 nt, Homo sapiens
acaggaaccagacacgcaaacaggagggacgagacaagaggggggc

SEQ ID NO: 27456 - RNA, 78 nt, Homo sapiens
gcacgaccccacccccgaggcccgaccgaaccagggccgaaaacccagaagaacggccacccagagacacgcagagca

SEQ ID NO: 27457 - RNA, 83 nt, Homo sapiens
ggacgggggcggcccagaagaggcggaggcgggggagcccccaggacaggcacacccgggaaaaccgaacacccagcccagac

SEQ ID NO: 27458 - RNA, 76 nt, Homo sapiens
agcggaccagccagcggacccgaccaggagggagcggaaaacggggcccgggccgggcgcgaagaggccagaaagc

SEQ ID NO: 27459 - RNA, 85 nt, Homo sapiens
agaagcgggcggcgcgggggagaggagaggaaccgcacccaaggacggcggaggcccagcccccgcccggcgcccggagccccac

SEQ ID NO: 27460 - RNA, 75 nt, Homo sapiens
gaaacaaaggaaagaggaccagacaagggaaaggaggacaaaaggaaaaaaaaaaagggaagacagagaggcggg

SEQ ID NO: 27461 - RNA, 74 nt, Homo sapiens
agagggccagaaagagaagaaacaacagaaagcaggcagaggcgcaccgacgcacacacgaccggggcaaccag

SEQ ID NO: 27462 - RNA, 77 nt, Homo sapiens
aaccgaagagcggaagagaaagaggagagaccgccgggcgcaggcacaggaacaagccaccacccagggcaagccca

SEQ ID NO: 27463 - RNA, 81 nt, Homo sapiens
gcgccccaagcccgggcgccaccgcgccaccccgcgaggccgcacgggagagccacggaccacagggcacgagggagggca

SEQ ID NO: 27464 - RNA, 68 nt, Homo sapiens
cacggcaagaccggaacgacagaccccgggcacaggaagaccgaaacaaaaagccaacggaaaaagaa

SEQ ID NO: 27465 - RNA, 70 nt, Homo sapiens
cgaacccggagaagcacgagcccagggacccaaagagcaggaccaagccaacccgccgaaaaagcgacaa

SEQ ID NO: 27466 - RNA, 69 nt, Homo sapiens
ccccagaagaaaaaaagaaagagacagcaacgaacaccacgagacgacgggaccgaaggaccccgccag

SEQ ID NO: 27467 - RNA, 58 nt, Homo sapiens
ggcacggagccagacacaaaacggaaaccccccaggcaagaggcgcaggaccgggaag

SEQ ID NO: 27468 - RNA, 71 nt, Homo sapiens
aaaagggcagggacagcgcaggcagcagaaaaaagacagggccaggcccagcccaggacccccacaaaccc

SEQ ID NO: 27469 - RNA, 43 nt, Homo sapiens
caaggggggcagacaacagccggcgcggaagaggccggcggcg

SEQ ID NO: 27470 - RNA, 82 nt, Homo sapiens
gcgcgggcgggaagaggcggcgggcaaggcagcaggaggggggaagcaggaggcacggaggggaccccagaaccccagccgg

SEQ ID NO: 27471 - RNA, 81 nt, Homo sapiens
ccagcccgagccagggcgagggaggaccacaggccacccagaagggccccaccccaaggggagggccaaggggagcgcgcg

SEQ ID NO: 27472 - RNA, 47 nt, Homo sapiens
cgggaacccccaaagaaggaggagacgagcaacgacaccacacaaag

SEQ ID NO: 27473 - RNA, 61 nt, Homo sapiens
cgacaacccaccgggcgccgccaaagaggcgacccgcggcgagagcccccccagagcgcca

SEQ ID NO: 27474 - RNA, 52 nt, Homo sapiens
acccggagaaaagaaagccacgagaggacacaaaccaccgagcccccggaag

SEQ ID NO: 27475 - RNA, 70 nt, Homo sapiens
ggacaacaacccagccgaaagaagaaaaccagcggcgcccccgccacgaaaagaggacagacccagaaag

SEQ ID NO: 27476 - RNA, 87 nt, Homo sapiens
ccaaagaaccccgacccgccaacagagccaggaagcagcagggacagcagcagaaaaagcaaaggggaaaaccaaaccagacgaaac

SEQ ID NO: 27477 - RNA, 80 nt, Homo sapiens
agaagccagggacccaaacccacaggcgaaaccaaggacagggcgggccgagcggggaggcccgagagacccaggggggc

SEQ ID NO: 27478 - RNA, 63 nt, Homo sapiens
ccgaagacagaaagacaggacaaacagcgcagagaagagaagacaggaccaggagccaaacgg

SEQ ID NO: 27479 - RNA, 72 nt, Homo sapiens
agacggacagacccacaacaccaggcgccagcacacggagagaaacgacaagaaagaaaagaaacagaaaga

SEQ ID NO: 27480 - RNA, 83 nt, Homo sapiens
cggagccccggagggaagcgcccggggccggccgccgcgggaccgaggaaaagccgcaccagccgccgcccgccagcggaccc

SEQ ID NO: 27481 - RNA, 74 nt, Homo sapiens
ggaaaccaagcaggaaagggagaagagagggacagagaccggaaacaaaagagacaagcggcgagccccagggg

SEQ ID NO: 27482 - RNA, 69 nt, Homo sapiens
ggggaccccgaacaggcgcgcccccaggcaggcaggggcagaaggcgacccagcgcagagcaaacagaa

SEQ ID NO: 27483 - RNA, 84 nt, Homo sapiens
ccccccagccagggaacaggaccgaaaaacggcccacccgaggcgcgggagccacagaagcagagaccccacacccaaaaggcc

SEQ ID NO: 27484 - RNA, 76 nt, Homo sapiens
cacgaacagaggcacgggaaaaaacgcagcaaacaccaggagaaacacccggaggagaagaggcgcggaacaagcg

SEQ ID NO: 27485 - RNA, 80 nt, Homo sapiens
gccgaaccgccacgccagcacgccaacccggacggacaacaccggggagcgcgggcacagcgacccgaagaaaccgcagc

SEQ ID NO: 27486 - RNA, 72 nt, Homo sapiens
gaacgggcgcgggccaagcacgccacccggaaggaggaaaggcaccagccaaacgccccgacacaagcccgg

SEQ ID NO: 27487 - RNA, 98 nt, Homo sapiens
gcggacacacggagccagggaggcagcagggcagccacgaggggaccaaaccccacacccagggcaagcgcgcggcaggacccagaccggaagggagg

SEQ ID NO: 27488 - RNA, 81 nt, Homo sapiens
gcgcgcggaggacccgccgccgccggggaggcggcccgccggccccgccgggaagcccgcccagagagccaaggccccccc

SEQ ID NO: 27489 - RNA, 75 nt, Homo sapiens
gcccccaagacaacgaaggacacggacgacaccgagcccaaccgaccaaccacaacaccccaaaggaagcaacac

SEQ ID NO: 27490 - RNA, 79 nt, Homo sapiens
ggcacaccagggccggccaagcacaagaacaaccggaagggcagcgaggcagcccagggaggccaagaagcaaccagga

SEQ ID NO: 27491 - RNA, 81 nt, Homo sapiens
aagaacgagaaagggggcccagaaggccccggccccgaccagcaccccgcccacacagacgccggacaaccacagcccgga

SEQ ID NO: 27492 - RNA, 54 nt, Homo sapiens
agccaagaacaaagacacagagcacacgcagggcagacacccgagagagcgaac

SEQ ID NO: 27493 - RNA, 69 nt, Homo sapiens
ggcagcggggacaccgaaaggacggcaaaagacaccacacacagcccgcagaagggcggggggaaaaga

SEQ ID NO: 27494 - RNA, 78 nt, Homo sapiens
cgccggccggagcgggaggcgggccagcgacaaaaagaggaacgcgcagaaaacaaaggcaaggcgacaaacacaaga

SEQ ID NO: 27495 - RNA, 70 nt, Homo sapiens
aacccccccccccgcgcgccgggccagcagacgaccagaagacgacccgaggcaagaagcggcccacccg

SEQ ID NO: 27496 - RNA, 74 nt, Homo sapiens
cgccgcgcgccaaagcgcgccgccccgggcaaaaggccacaaacgaacagcgaaacggagaacggaagaaagcc

SEQ ID NO: 27497 - RNA, 87 nt, Homo sapiens
ccggcagaagccgcccacaccacagggacccaaggccgaacgaggcggggggcccgagaccacaccacacccaccagggaggaccgg

SEQ ID NO: 27498 - RNA, 74 nt, Homo sapiens
acagacccggggaccgaacgcaagcggacccgcgcaggaagacagggcccgcgccacagccgggcccccacggg

SEQ ID NO: 27499 - RNA, 85 nt, Homo sapiens
cacaccggagcaacaaccggcgggccgaggccgcaggaggagggagaggaaggcacaaccacgaggaagcggcaaccagagcgac

SEQ ID NO: 27500 - RNA, 37 nt, Homo sapiens
cggccaggaaccacccgaaggcccgagaacaccccag

SEQ ID NO: 27501 - RNA, 79 nt, Homo sapiens
gacgccagcggccggccggcagcaccggccacacacaggacaagagcgaagccacacgcgggacgacgccaccggaagc

SEQ ID NO: 27502 - RNA, 88 nt, Homo sapiens
ccggagcgcggcgcccgcggccgggcggcgcggccgcccgggccgggccccaccggacgaaaaaggcacaaacccagcacagagaaga

SEQ ID NO: 27503 - RNA, 80 nt, Homo sapiens
aaaccacaaacagaaaaaaccaaaagaaacgcaccccggcagaaggaagagagaaggccacgcccgaccccaagcaacaa

SEQ ID NO: 27504 - RNA, 88 nt, Homo sapiens
cgcgcagccgacgcgggaagaagcgggcgcgggcaggccaccccagagaagaggacgagagacaagacaaccaaaagggaaacccccc

SEQ ID NO: 27505 - RNA, 70 nt, Homo sapiens
agaagaggaggaaggcacaaaagccgcacaggccggcaccccaaggggggcgccgggcccgcccggagcg

SEQ ID NO: 27506 - RNA, 57 nt, Homo sapiens
cgagagaaagagccagacacggcagcagacgacaggacggcagagccccaagaaagc

SEQ ID NO: 27507 - RNA, 122 nt, Homo sapiens
gcaaggaggaaggcagcgggccgccggacgcgcacggccagcaagcagcagggaccggaccgcagaggggaaacgaggcacggagcggacaggaccagacaccagggaacacggcgagggca

SEQ ID NO: 27508 - RNA, 90 nt, Homo sapiens
gacagaaaccccccgggcacgcaaaacagaaccagcggcggcccccacccagccggcagagacacaacaggaaggagacgggacacagcg

SEQ ID NO: 27509 - RNA, 79 nt, Homo sapiens
gggacagcccacacccggcgcggagggcccggagacaggcagagcccccagacccccaaggacgaccacgcccagaaaa

SEQ ID NO: 27510 - RNA, 82 nt, Homo sapiens
acagacgagcgcgccaggccgacagccgcggccgggcccgagggcccgagaaacagccagagcaaccagccagagagggcgg

SEQ ID NO: 27511 - RNA, 67 nt, Homo sapiens
cgggggacgaccgggacagcaccggcgcaccagagggaaggggaacaggaccggccacagacagccc

SEQ ID NO: 27512 - RNA, 57 nt, Homo sapiens
gacccccgagaaccgcgccaccagagacggaagccagaaagagaaggagacccgccc

SEQ ID NO: 27513 - RNA, 40 nt, Homo sapiens
aggaggagcggcccaccggccagaacaacaaccccccagg

SEQ ID NO: 27514 - RNA, 83 nt, Homo sapiens
cgccgcccggcgccggcccgcccccgcagcagcgccaggcacgggcgagagcgggaagagcacgcacaagcagagcgcacacc

SEQ ID NO: 27515 - RNA, 83 nt, Homo sapiens
aaggcacaacgccacgaggcacaccccagcaagggcaagaaggaacagacaaaaacggccggaaggaaacacaggacaccagg

SEQ ID NO: 27516 - RNA, 69 nt, Homo sapiens
agaaggaccaagaaccagaagaccggagacccgaaagaggaagagcgccgcaacccaaaaaccaaacga

SEQ ID NO: 27517 - RNA, 79 nt, Homo sapiens
ccaccccgagccgcccggcgggaagggcccgccgcacccgagcagacccaagaaggagaagccccgcagccggagcagg

SEQ ID NO: 27518 - RNA, 74 nt, Homo sapiens
ccccggcgcgacccggcgcgggcacgcccaccggcccgcgccgcccaggccccgcagggaacggcgaaaggcaa

SEQ ID NO: 27519 - RNA, 82 nt, Homo sapiens
ggaggcgcgggagggcgagaacgaccccgagacgagcaagcccccaacaccagcaaccccgggggagacaagccggacgggg

SEQ ID NO: 27520 - RNA, 81 nt, Homo sapiens
ggaaggaccgagccgggccgcccacagggggaagaggcgccgcccgggggacggcagagacgagagccgaggcgccggaaa

SEQ ID NO: 27521 - RNA, 98 nt, Homo sapiens
gagaaagacacggcagcgcaggcagaccgcaggcgcaaggccaggcgacccgacgggccaccgccagccagacagggagaagaaggagagaggccaga

SEQ ID NO: 27522 - RNA, 77 nt, Homo sapiens
ggaaaagggcagggacagcgcaggcagcaggggagccgccaccaaaagcagacggaaaacccacggggaagaccaca

SEQ ID NO: 27523 - RNA, 79 nt, Homo sapiens
cgcgacggacaccaaggaccgcccaggaggaagaaggcaccacgacaaaccggagccgaggggagggaggccagccaag

SEQ ID NO: 27524 - RNA, 77 nt, Homo sapiens
aagccacccaaaaagagcaaacaaccggggcagacaacagagccaagaaggacaagaaggggagaagaaaagaaacg

SEQ ID NO: 27525 - RNA, 53 nt, Homo sapiens
gagccggccaggacacacaggagaaaaggacgacggaaccaccacgaaaaaaa

SEQ ID NO: 27526 - RNA, 74 nt, Homo sapiens
ggagacgcggcgcgcggcagggaggaagccgcccgcgcagcaggaagagccaggacaaaaccaggcagaaccaa

SEQ ID NO: 27527 - RNA, 80 nt, Homo sapiens
ggaaaaacggagaccggagaaaaagggaggccacacacgaggggaccgaaagagcgccggagaagggaggaagaaagccc

SEQ ID NO: 27528 - RNA, 82 nt, Homo sapiens
agcgcccggaccggccgagaggaagacgagccgggaggaacggcccggaaacaggaggacggaggcaccgccccaacccccc

SEQ ID NO: 27529 - RNA, 77 nt, Homo sapiens
gcccgccagcccgcaccagacgaggcaaaacagcaggaccgagacgcaacaggaggagcaaccagaacgagaagacc

SEQ ID NO: 27530 - RNA, 72 nt, Homo sapiens
gaccagcagcgaaaacggaaacacaagagaccagagggacaagcaaggggccaaggagccaaggaggaaacc

SEQ ID NO: 27531 - RNA, 72 nt, Homo sapiens
agaaacagaaaagaccaagaccaccaaggcaaagggggggaaaaaaacacaacggacggagaaaggacagag

SEQ ID NO: 27532 - RNA, 77 nt, Homo sapiens
cgggaccgagacaccggacaaagggacccgagaggcaagacaagccacagaggcggggacacgagaccagcgaacaa

SEQ ID NO: 27533 - RNA, 46 nt, Homo sapiens
aaagaaggccgcggcaaagagagagcagagggaagacaaacccgcc

SEQ ID NO: 27534 - RNA, 73 nt, Homo sapiens
gccccgggaagaccaccaaaacggaaccccccgaagcgagggaagggcggacacacccgaacacagaagacgg

SEQ ID NO: 27535 - RNA, 73 nt, Homo sapiens
aggaaaaacggagagccacaaaaaaggaagcgaaagaaaaaggaacccaagagcgaggagacccggagaccac

SEQ ID NO: 27536 - RNA, 42 nt, Homo sapiens
acagggcggaaggcgcgcaagagcagaaaacgaaggaaggag

SEQ ID NO: 27537 - RNA, 74 nt, Homo sapiens
gccaggccagaggcggaaaaccacccaccgccagccgggagcgggcggacaggcaccggcacggaccaccccaa

SEQ ID NO: 27538 - RNA, 78 nt, Homo sapiens
aggacggaggagcgaccaccgcccccagaagggaaacgagggcaggaaggggaacgacccacccgaacaccaaggaag

SEQ ID NO: 27539 - RNA, 76 nt, Homo sapiens
agcaccgcgcacagcaacagaccagcgggacacccggcacacacggaccacggcacgaacaggacaggcgccaacc

SEQ ID NO: 27540 - RNA, 87 nt, Homo sapiens
caccggcggccccaccagcagacgcagccgagacaccagcccgaaacaccaccaagggacgaacagcggggacgccccagcagaccg

SEQ ID NO: 27541 - RNA, 75 nt, Homo sapiens
gaacccgcgagacacaaccacacgggccaaggaaacagggcacaacgacaacaggaacacccagggcccagcaga

SEQ ID NO: 27542 - RNA, 80 nt, Homo sapiens
gcgggagacaaccgaacccaggaagcagacacaagagaacccagcagcggaagaagagcgaccaaggccaggaggggcag

SEQ ID NO: 27543 - RNA, 66 nt, Homo sapiens
agaaggcgcgcagcaccggagcgccaaggcccagagaacagcggggagcgcccgcaggcccccaag

SEQ ID NO: 27544 - RNA, 76 nt, Homo sapiens
agcgaagcgagggcgaagcacgacacagaaggggaggggagggaaaggcccaggaaaaagccccacccaaacacac

SEQ ID NO: 27545 - RNA, 78 nt, Homo sapiens
cccgcagacaacaaaaggcgacggccaaaggaagaagggccaggccacagggcaccacaacacgcccacccaggaggc

SEQ ID NO: 27546 - RNA, 81 nt, Homo sapiens
gaagaacaagcacgagcacgacagagaggaggaggcgcacaccaagcaccagcaagcgcacaagcagaccgacggcagaag

SEQ ID NO: 27547 - RNA, 40 nt, Homo sapiens
gccccaaaagcgggaacaggcgaggcaggagaacgcgaac

SEQ ID NO: 27548 - RNA, 68 nt, Homo sapiens
caggaaaacccgaacccgaagaggggaaagggcgacgggcgcagacacagaagacggcaacgaagaac

SEQ ID NO: 27549 - RNA, 43 nt, Homo sapiens
gccaccgggaaggacagaagggagccccgcgcggaccaccaga

SEQ ID NO: 27550 - RNA, 92 nt, Homo sapiens
cgacagaaccaggaaaaacaccaggacacccggcaacaaggaaagggaggcacaacggacagacaaaggccaaaacaacagcagagaagggg

SEQ ID NO: 27551 - RNA, 64 nt, Homo sapiens
aaccaaaccaacaaaaagaaggaaccaagggacagcaaggacacccccccaaaagaaacaggaa

SEQ ID NO: 27552 - RNA, 55 nt, Homo sapiens
ggcaggaacccgcgaagcgggaagcacggcccaaagaagagcaggccaaggaaca

SEQ ID NO: 27553 - RNA, 79 nt, Homo sapiens
gggcgcccgagagaaaagcacacggaacaagagcgaaacaccagacagaagggcccgccagagaagacacgagggaaaa

SEQ ID NO: 27554 - RNA, 84 nt, Homo sapiens
ggccccacgaaggcaacaggacccaggccaagccaccaagcgacagaagggcccgagaacaccgaacggcaccaaccacaggcc

SEQ ID NO: 27555 - RNA, 59 nt, Homo sapiens
accaggggaagaggaggagccaggagccgccaggccggccgggagaaggcaagcccgcg

SEQ ID NO: 27556 - RNA, 82 nt, Homo sapiens
aaaacagacgcccagccaaacaaaaaggaaaggagacaagcagagacgaaccaggcaaaggaggggaaagcgcgaaaaaggg

SEQ ID NO: 27557 - RNA, 67 nt, Homo sapiens
gaggccaggcaaaggaaccacccaggaaacagcgcaaggcaaaccgacaccagcgacacaagcgcga

SEQ ID NO: 27558 - RNA, 65 nt, Homo sapiens
agcgcaaccgggcagcccgcaccagagcaaaggggcggcggcacggccagaccccaccgcgcgac

SEQ ID NO: 27559 - RNA, 84 nt, Homo sapiens
gagggcaggccgcgcacgcccaccaccagccggaaaaaaggaaagaggcagaaggccagaagggcgaagaagaaggaaaaaagg

SEQ ID NO: 27560 - RNA, 95 nt, Homo sapiens
gccgccaccacgcgcgggcgggcagccccgggccaggccgcggccggggcaggagcgcaggaaggacacagacaaaagaccaggagagagcagca

SEQ ID NO: 27561 - RNA, 74 nt, Homo sapiens
cagacccggcccaggaagaccacaaaggaggccaccccgccccgcaggagcagggcccgacgcacaccagcccc

SEQ ID NO: 27562 - RNA, 66 nt, Homo sapiens
cagggccgcggggacaggaccccggacgagcccggcgagggccccgaccggcgcaagcaggaccgc

SEQ ID NO: 27563 - RNA, 80 nt, Homo sapiens
gggaccaggacagcgcgaggcgagggcagagccgcggggcaagacacgagggaagaaaggaggaccagaaccaaggacca

SEQ ID NO: 27564 - RNA, 54 nt, Homo sapiens
aggaccagcagcaaaagaaggagggccccaggaaagcaccaggacaaaagaagg

SEQ ID NO: 27565 - RNA, 106 nt, Homo sapiens
gcgcggcgcgcgcgggccggcgccggccgcgcgggcacgcgccgcgcggagccgaggaaggacagggcgggaggggccaccgccaggccgcagcggccggagggag

SEQ ID NO: 27566 - RNA, 82 nt, Homo sapiens
caagaccaccccagaacacaccaggacgcccgccacaggccaggagggggaaggaaggaggcggaggagcaagggaacaaga

SEQ ID NO: 27567 - RNA, 44 nt, Homo sapiens
ggaccgggacgccacagccagaaaagggcgaaagggggaaaaga

SEQ ID NO: 27568 - RNA, 77 nt, Homo sapiens
cggagcgccgcggggcccggaccagagaccagcccgagggccagaaccacagagacccacaacaccggaggagcacg

SEQ ID NO: 27569 - RNA, 72 nt, Homo sapiens
acgaagaggcagagagcaaagaacccccaagcaggaaggcacgcaaagaacgcccacaaggcccagaagaag

SEQ ID NO: 27570 - RNA, 54 nt, Homo sapiens
gaaaaaaaaagaaaaggaaggagagaagagagcacccaacaagaggagcccgaa

SEQ ID NO: 27571 - RNA, 72 nt, Homo sapiens
cgacaaagcaacgcacgggaacagccagccagcaggcaacaggcccagaccaggcccaaagagcccaccaac

SEQ ID NO: 27572 - RNA, 71 nt, Homo sapiens
caccacaggcaccacggaacaggccgaaaaacaggggacacgagcacgggccccccaggcccagcagaccg

SEQ ID NO: 27573 - RNA, 35 nt, Homo sapiens
ccgagacgggcccgccgaaagagcacgcccgggac

SEQ ID NO: 27574 - RNA, 77 nt, Homo sapiens
ccccccccgggcgcggcggcggggaggcgagcaaagaagcaaggccgaagagcgagaacgggaccggagaacggacg

SEQ ID NO: 27575 - RNA, 78 nt, Homo sapiens
ggcacgacccagggaggaaggcgcaggagcccggccaccacacccagccggggagcagcagcagggaagcaagcagaa

SEQ ID NO: 27576 - RNA, 74 nt, Homo sapiens
acccgccccccgagaagcccagaggcgcccggggcaacgggccgacagcacagagaaaagacacagacgaccca

SEQ ID NO: 27577 - RNA, 75 nt, Homo sapiens
ggccgcgggcaacccggagcaaccccccaggacgggcggaggcggggggaccggcgggcgggcacacagagaaaa

SEQ ID NO: 27578 - RNA, 88 nt, Homo sapiens
cgcgaccccggccggaagcacacaacagagcgcaccacaacccaggaggaaaagcagacgcggacagagcagagagcaggcaagaggc

SEQ ID NO: 27579 - RNA, 85 nt, Homo sapiens
gggcaggagagcccgcccgccccgagcggccggcccagcgcgggcaccagcgcaagcccccagcgagacggcacgccagccgggc

SEQ ID NO: 27580 - RNA, 90 nt, Homo sapiens
ggagcacacgcccgacgaggagagcacgacggaccaagacgagcccagcgcaaccccaagcgcccaaaggcaagagaagccgagccaggc

SEQ ID NO: 27581 - RNA, 35 nt, Homo sapiens
cccgccccccagccaggaccggccaccgcacaagc

SEQ ID NO: 27582 - RNA, 83 nt, Homo sapiens
cccgggcaagaggcgcaaacaagccaacccaggaggaaaaacgaaacaagggacgaacaaaacaccgaggaaggacacacaca

SEQ ID NO: 27583 - RNA, 35 nt, Homo sapiens
ccgagagcggaaacagaaccagcagagccaccgcg

SEQ ID NO: 27584 - RNA, 76 nt, Homo sapiens
cggccagaagagaccacgcacaggaggcccgaggagcggccacgccacacagagccaagaaggcagcagcagaacc

SEQ ID NO: 27585 - RNA, 73 nt, Homo sapiens
gaagcagccagaccaagaacaaccgcggacacggagaggaagggagaaggaagccaacaccggagccagaaag

SEQ ID NO: 27586 - RNA, 71 nt, Homo sapiens
gcaagcgccccgacccgcaggccagagaaggacggagaagcgaaagccagaccggcaagagcggaagaaag

SEQ ID NO: 27587 - RNA, 64 nt, Homo sapiens
aagcgcgacaggccaggcagaacaaacggaccagcgaccgggcagcccggaggcggagccgcac

SEQ ID NO: 27588 - RNA, 50 nt, Homo sapiens
gaaacacgaaggaacccaaagaacgaagcagagcccaacaggggagccga

SEQ ID NO: 27589 - RNA, 83 nt, Homo sapiens
gcagccgagacaccagcccgaaacaccaccaaggacgggcaggacgagggccggacagggcccagaccccagccagcagcccc

SEQ ID NO: 27590 - RNA, 86 nt, Homo sapiens
gcgcagccccgcgcagcccagcgccaccgggcagcagcggcgccggccgcccagaggcacggagcccacaagaagagacgcaaggg

SEQ ID NO: 27591 - RNA, 77 nt, Homo sapiens
ccccacacggagaggcccggcggcgcgcccaaccggcgacggaaccaagaccgaaaaagaaccagcaggcgaccaaa

SEQ ID NO: 27592 - RNA, 71 nt, Homo sapiens
ccaagacccacaacaaaaggcaaaagaaaaaggcagaaagaagccggcaccacccagccagaggaaccaaa

SEQ ID NO: 27593 - RNA, 73 nt, Homo sapiens
aaggaagaagaaacaggccgaaacaacaaagccaaacccaggcagacaacgaagagaggaaagaagcggaaag

SEQ ID NO: 27594 - RNA, 69 nt, Homo sapiens
cgagaaaacccaccggacgaacaaaacgaagaaagggacacgccagcaggccacgagagacaccgaaca

SEQ ID NO: 27595 - RNA, 81 nt, Homo sapiens
ccagggaaggagcggagaagaaagacacccagacagagagaacaccggaaagaaaacagaccacaaagaaaggcaggaaca

SEQ ID NO: 27596 - RNA, 68 nt, Homo sapiens
gaagccaggcaccccccacagaaagggcgagaagggccacgccgcccccagaaccccgacccaaccaa

SEQ ID NO: 27597 - RNA, 70 nt, Homo sapiens
gaaaggaaaggccacagaaagacagaaccagcacagcaaaaaaggcagcgcaccgaccccaacgaacaca

SEQ ID NO: 27598 - RNA, 73 nt, Homo sapiens
cccgaagcccccaaagagagaaccggagagcacccaacagacacacagcaacgaagcaggggaggagggaaga

SEQ ID NO: 27599 - RNA, 93 nt, Homo sapiens
aaagaaacacaccagacacaggagccaaaccgcacggccccagagaaaccagaaaaggcacacacacccgcaggagagcgccggagaaaggaa

SEQ ID NO: 27600 - RNA, 68 nt, Homo sapiens
gaaagcacccagaggaaagaacaagaaggaggcggcccaaggcacaaggccggagcgcgaagacgcag

SEQ ID NO: 27601 - RNA, 85 nt, Homo sapiens
gcgaagcaagagacgaccgcaacacgggaggacggggaaaaagcggccaaagaaggaagcgcgcaccgagaccccaccggggccc

SEQ ID NO: 27602 - RNA, 79 nt, Homo sapiens
cgcgccccgcacagcacagaggggcagccggagagccgggaaagcaacggggcggcacacaaggagcgaagggcaggga

SEQ ID NO: 27603 - RNA, 73 nt, Homo sapiens
gacaaaacacacgaaccccaaaacaggcacagacggcgacggccacaccaagagacaggcgaagaaacaagga

SEQ ID NO: 27604 - RNA, 83 nt, Homo sapiens
cggcgcaggggaacccggcggcggagagagaaacaaaccgagcagcgggccagcagccaggcagaagccaaagaaagcggagg

SEQ ID NO: 27605 - RNA, 69 nt, Homo sapiens
ggccagaacacccacacacaggcggaaacacccacgaacacaccaaaaccaaaagagcagaaggagcga

SEQ ID NO: 27606 - RNA, 82 nt, Homo sapiens
agccaacgagaccagccaggcccagccccgaagggcacaccggaggaagcagggggaaggagcaggagagagcacacaacca

SEQ ID NO: 27607 - RNA, 82 nt, Homo sapiens
caacacggagaacgacccaaccagggagcgcccccgagggaagcaaggggccgagaacaagaagagaagaccgcaccggacc

SEQ ID NO: 27608 - RNA, 90 nt, Homo sapiens
ccgagcccagccgaaggagaagggggaacccaccaccaaggagcagcaccaaccggaagccaaagggcaggagaagacgccgggaaaccg

SEQ ID NO: 27609 - RNA, 71 nt, Homo sapiens
ggcaaaggcgccaaaacgagacggaaagagacccagggcgccaaaaacagaaaaggagcaacgggagccac

SEQ ID NO: 27610 - RNA, 87 nt, Homo sapiens
gcacgcgggcgcacccgccccggcgccgccggcccgcgggaccgacagccgggcagagaaagaccacacagggaaacgaccagggag

SEQ ID NO: 27611 - RNA, 75 nt, Homo sapiens
ggagagagagcaagagaggaagaagaacgacccgcccggggcagcaggccgacgcagccccgcccaccccggccg

SEQ ID NO: 27612 - RNA, 67 nt, Homo sapiens
caaagaaagaagcaccgaagggccaaaacaccagaccagacccaaccagcggaccggagaaaaacca

SEQ ID NO: 27613 - RNA, 52 nt, Homo sapiens
accccgccagcacccggcgagacgacagaggagccaggaagagacaagcaac

SEQ ID NO: 27614 - RNA, 72 nt, Homo sapiens
cccggagccgggccagcaacagagcgggccggggacgaacagccagcaaagacaagagcagaccagcagccg

SEQ ID NO: 27615 - RNA, 46 nt, Homo sapiens
ggacaccccggaaaagcccaagaaaagacagcaggcagaaacacag

SEQ ID NO: 27616 - RNA, 72 nt, Homo sapiens
gagccaagcggcgcgacacacacaggagacggcgggacgggagaccggcacgaaaacgcccgggcaaggaaa

SEQ ID NO: 27617 - RNA, 82 nt, Homo sapiens
caggagagggcaccgcacccgccaagcagccaaaagaagggaccacagaccagcacgccggcgccacgaaccgagcgacagg

SEQ ID NO: 27618 - RNA, 70 nt, Homo sapiens
agacaagccgagagaaagcaagcaaagaacaggaccccgacaacagagcagccccgccagcaagaaggcg

SEQ ID NO: 27619 - RNA, 74 nt, Homo sapiens
gagcgcggccagcccgccgcagaaaccgccccaggacgcaccaaagaagacagacacgcagaaaaggagccgga

SEQ ID NO: 27620 - RNA, 68 nt, Homo sapiens
gccccccagcagggaacaccccggaccccggacccagagagacagcggaaaccgcgcccccgccaccg

SEQ ID NO: 27621 - RNA, 58 nt, Homo sapiens
ggggaacagggagcgcccggcgcacagcgccaggaaacaacaaggaccaagcacccaa

SEQ ID NO: 27622 - RNA, 87 nt, Homo sapiens
gagagcaccaaccagaggaaagaaggcaagagcaacgcacagagaagaagaaaaaaagagcacaaaaacacagccacgcacagagaa

SEQ ID NO: 27623 - RNA, 83 nt, Homo sapiens
caacacagacacgaaggggaaaaaaccaccaggcaccgagaaacacaagaaaccccagacgaaaggcacgacagggagcagaa

SEQ ID NO: 27624 - RNA, 58 nt, Homo sapiens
cagcccccgagcagcgggaacagggccgcaccacacccgggccccaagaaaagcggaa

SEQ ID NO: 27625 - RNA, 76 nt, Homo sapiens
aagaaacggacgaaaaagcaaggccagaaacgcacaagacgagaagaagccggagaagaaacaaagaggagagaca

SEQ ID NO: 27626 - RNA, 36 nt, Homo sapiens
ccgaagaggcaaagaaacggggcgagaacaagagag

SEQ ID NO: 27627 - RNA, 74 nt, Homo sapiens
ggggggcgaagggaggccagcacccccccccgcagagagaaccccagagggcgcggaagccccagcaaacaaga

SEQ ID NO: 27628 - RNA, 79 nt, Homo sapiens
gaacacacgcggccacggcgcgagccgcaccgacgagaggcggggaaaaaaaggggaccaccggcagagacaaccaaaa

SEQ ID NO: 27629 - RNA, 80 nt, Homo sapiens
aaggacagacaagaaaaaagcacgagagggcaagaggagcagcagcggcggggccaagcgggagagcgagaaggcggaac

SEQ ID NO: 27630 - RNA, 70 nt, Homo sapiens
ggacacagccagggcggacgggaaagcagaggcgaagagagaacacgcacggaaggaaggagaccacgag

SEQ ID NO: 27631 - RNA, 81 nt, Homo sapiens
cagccagagccaaagaagccgcaggagaaggaacagaacagacaccaccgaaacgcgccaagcagacaggcaaggaacaaa

SEQ ID NO: 27632 - RNA, 89 nt, Homo sapiens
gaggggggagaaccagccgacggagcaggcagcagcccaggcagagaccaacagaccagcaacaggccggcagggcacagcagccgcag

SEQ ID NO: 27633 - RNA, 80 nt, Homo sapiens
agcccggggccggagcaggggcgggcagaaggcaacgccgcaggcacaggggaggagaagaggggaggaaccaaggaagg

SEQ ID NO: 27634 - RNA, 62 nt, Homo sapiens
gaagaacagaagaaacaaaaggccaccgaagaggaaacacccgagcccgacccaagaggggg

SEQ ID NO: 27635 - RNA, 71 nt, Homo sapiens
gggcagacacaggcacaccaagggccaaagaagccaaagccccagacaaccacaggcagccaagggagccc

SEQ ID NO: 27636 - RNA, 75 nt, Homo sapiens
cacgcagagggcggagcggcagggaccccgggagggcccagcaaccggccagcgaaccggagacaaacaggcagg

SEQ ID NO: 27637 - RNA, 76 nt, Homo sapiens
ggaccgaaacagaaacggaacaccaagggccccgagacaaggccccggcgccgacccgcagcagaacccacagagc

SEQ ID NO: 27638 - RNA, 62 nt, Homo sapiens
aacaggaaaaagggagcacgagaaacaaaagcaagcccgcgggacagagacgaacaagagag

SEQ ID NO: 27639 - RNA, 76 nt, Homo sapiens
cacaggacacccaggacccacgcacgaggaaaacagaaaagcagaaaaaagaagagaaaagaaacccgagccgcga

SEQ ID NO: 27640 - RNA, 59 nt, Homo sapiens
gcgggaggcagagaccagagaaccaaaagagaccggggacgcccagcaggggcgaagga

SEQ ID NO: 27641 - RNA, 83 nt, Homo sapiens
ggagggagaccacagcaagacgccaggacccacggaagccagaaaggaaacggaacgccaagcgaagaagaacgaaacggaag

SEQ ID NO: 27642 - RNA, 82 nt, Homo sapiens
aggacagcacagcccccccagcacaacccagggagcccggcggggacgaacagcggggacgccccagcagaccgcccaggag

SEQ ID NO: 27643 - RNA, 79 nt, Homo sapiens
gagggcggcgccacccggcggcccgcgcggggggcgggaaccgacggcgggccggaccgaggcaagaagagaaaggaag

SEQ ID NO: 27644 - RNA, 52 nt, Homo sapiens
cgggagagcccgggccacccccccaggcaagggggcgaggaagagacaggcg

SEQ ID NO: 27645 - RNA, 81 nt, Homo sapiens
ggggagccccgggagccgcacggggaccaccacagccgggcgaggagaaagaagggaaggaagccgccaaaacaggaagaa

SEQ ID NO: 27646 - RNA, 70 nt, Homo sapiens
gcagcccaccccggaggcaccccagcccccgggaggcccacagacagccccaagcgagaacaaacaacaa

SEQ ID NO: 27647 - RNA, 73 nt, Homo sapiens
gaccagagagcggcgcaaacacccgagggagagcgcaccaccccacgcgccaggcgagaccccagggcacgag

SEQ ID NO: 27648 - RNA, 80 nt, Homo sapiens
ccacagcaaggacacgaggcaccacccagcacacgaccggcaaggcagagagaagcaccacacacgagccaagacagccc

SEQ ID NO: 27649 - RNA, 83 nt, Homo sapiens
ggcgaagcgggcgagcggggggacgccggcggagacgcgggcgagggacgaacagcggggacgccccagcagaccgcccagga

SEQ ID NO: 27650 - RNA, 82 nt, Homo sapiens
acccagcccaaaagacgacacgccccacaggcgggaggaaaggaggggacagaggggggaagccagccaggacaaagagcaa

SEQ ID NO: 27651 - RNA, 82 nt, Homo sapiens
gaagggacccgcacgccgggcggggaaacccggaccggcaacagaggagaagaggaagaggaaaccagcaagaaggcagggg

SEQ ID NO: 27652 - RNA, 66 nt, Homo sapiens
agagacagcgagaacaaaggagagaggaccacccagaggagcaacagccgcagacaagaagagggg

SEQ ID NO: 27653 - RNA, 58 nt, Homo sapiens
cgcaagaggcgaccccagcacggcaaagcccggagacaagcagccggagaaagcggga

SEQ ID NO: 27654 - RNA, 74 nt, Homo sapiens
gggagggaaacccagaggacggagaccaggacgcaaggaccaaaaaacaaagggcggaaagaagcagaagaaaa

SEQ ID NO: 27655 - RNA, 93 nt, Homo sapiens
gggcagcggagacaccagccaccacgccaacaggcaagaggagcaagaggggggggcccccccgaagaaaggaaccggggagcggcgaaaaaa

SEQ ID NO: 27656 - RNA, 72 nt, Homo sapiens
cgaacccgcgggcggaccaagcaggccaagagcccaagagcgagccaaggcagcaaggagacgacagccgga

SEQ ID NO: 27657 - RNA, 55 nt, Homo sapiens
caacaagaaccaagccacagcccaccagagagggaaggcaggccaaccgacagac

SEQ ID NO: 27658 - RNA, 69 nt, Homo sapiens
gcaagccaagaggagccacagccaagaggcccccaagaagcagagggacccaaacagcgaggcgagacc

SEQ ID NO: 27659 - RNA, 110 nt, Homo sapiens
gcgcgaaggccgggacccggccccggcccacaggggggggcaaacccgagagaacggaaacagcgaggccgcagcaaaggcagccacaggacagaaccggcaggagagac

SEQ ID NO: 27660 - RNA, 73 nt, Homo sapiens
aagagccgacgcgcagggcccgcggcccagccagccaggacagagaagagcccagcagcggcagccagcccca

SEQ ID NO: 27661 - RNA, 59 nt, Homo sapiens
ccacccgcacacgcacccaggggcagccgcaaggggaaagggagcagcaccggccacac

SEQ ID NO: 27662 - RNA, 85 nt, Homo sapiens
acgaaacaggggccgcaggccgaccagcaggaagcgcagcgaagggaggcacccggccccgcagccgacacagaagggggccaag

SEQ ID NO: 27663 - RNA, 82 nt, Homo sapiens
cggggcggcgagcagcgcagcgaccggggaccggagcgacgccacgggacaccggaagaaagcagccaccagacacagaaca

SEQ ID NO: 27664 - RNA, 66 nt, Homo sapiens
acaaggaccgaaacagaaacggaacaccaagggcgagaggagcccaaggacaccgggaacacgccg

SEQ ID NO: 27665 - RNA, 78 nt, Homo sapiens
ggccccagcagggccagagaccacggaagccccgcaagagaaccacccaaaagaccgaagcagaagacaccacggaca

SEQ ID NO: 27666 - RNA, 69 nt, Homo sapiens
ggcagacaaaagggccaaagaagggagagaggacacagcacccaaagcaccaccccaggagcaggagcc

SEQ ID NO: 27667 - RNA, 60 nt, Homo sapiens
agggcaacgacgaccagggcgcagcgggacaggacggaggacgcgaagaaagcaacacgc

SEQ ID NO: 27668 - RNA, 69 nt, Homo sapiens
gaaccccgcccaagagcaggacaaggaacaggcagggccaggaacaacgacaccaggggggaaaaacca

SEQ ID NO: 27669 - RNA, 73 nt, Homo sapiens
gacaacccgccagccagggccaggcggaagccagccgaacagaaggagcggcggacacacagacccccaccaa

SEQ ID NO: 27670 - RNA, 71 nt, Homo sapiens
gaacccaaggaaaaacaggacaaaggaagccaagcaggaggcaggggaaagaggcagagaagccaagacag

SEQ ID NO: 27671 - RNA, 75 nt, Homo sapiens
cggaaaccaccagaccgaggcagggcccccgaagccagaggacggaaccgaggaacaaggggagaagaagcccag

SEQ ID NO: 27672 - RNA, 79 nt, Homo sapiens
aaggcacaccgcggcacggcgaagagccgagaaagaaaggggccccccaccaccacccggccaccgcagcccaccggca

SEQ ID NO: 27673 - RNA, 72 nt, Homo sapiens
cggcgcccggagggacgcaaaagcccagggagcggcggcagcagacagcaaggccggaggaaaaacagcggg

SEQ ID NO: 27674 - RNA, 65 nt, Homo sapiens
accacacaggaagcccagacccagagagggacgggcaccaaaaaaggcaccacgaccaacgccac

SEQ ID NO: 27675 - RNA, 70 nt, Homo sapiens
aaaggagaaaacacccaaacggaaggacacagagccaacccagaagagccaagacccagaagggcagagc

SEQ ID NO: 27676 - RNA, 87 nt, Homo sapiens
ggagccacgcagaggacgccggaacacccggaagccgagaaaggccggacacccaacagcacgcagacaaggcaccaacagaacggc

SEQ ID NO: 27677 - RNA, 79 nt, Homo sapiens
gggagggggagcccacaggagcaggagggccagacaaggggaacacaagaggagagaaggggaccgcagggagaaaagg

SEQ ID NO: 27678 - RNA, 82 nt, Homo sapiens
caggagacacaaaacccagacaccgacgggccgcgaggggaagaggaagcaaagccaaggagagcagccagcgggacagaag

SEQ ID NO: 27679 - RNA, 110 nt, Homo sapiens
cgcgggggggagagccacgacgccgggaccgggaccgccgccgccgccgccaccagggccggaggccacgggcagagccgggccgggggggcgcccccgccagcacggcg

SEQ ID NO: 27680 - RNA, 80 nt, Homo sapiens
ggacccagggccagcggggagagaaccgacccggggaaagagggggcaagccgagcgcgaggagacagcagaagacaccc

SEQ ID NO: 27681 - RNA, 79 nt, Homo sapiens
ggagcccagccaccacagacaggccaacgggaaccgggccgcagaggccagagccgggcccaggggccggagaccccca

SEQ ID NO: 27682 - RNA, 47 nt, Homo sapiens
gaacacgcggggaagaagcaaggagggaagggcaacaacccaccggg

SEQ ID NO: 27683 - RNA, 64 nt, Homo sapiens
aagcacagacaggagaaagaagacagccacagaaagccgaaagaaaaccgggccagacgacaag

SEQ ID NO: 27684 - RNA, 67 nt, Homo sapiens
gacccagggaagagccagaagacaccagaccgcggacagagaacaccgccccaaaacaggaccagca

SEQ ID NO: 27685 - RNA, 76 nt, Homo sapiens
caagcagagggcacccaccggaccgagccagagcccacagcccgcggcagccccggacacaaagcgaccgacgccc

SEQ ID NO: 27686 - RNA, 70 nt, Homo sapiens
caccaggaaagaccgaaacgcaccgagcaccaagccaggacaacaacaaacagggggcgggagaaggcca

SEQ ID NO: 27687 - RNA, 82 nt, Homo sapiens
gcagcgaaaacggggagagccggaccccaggaccagccgcagaagccaggagaaggagccgcacacagagcaggcgacccgg

SEQ ID NO: 27688 - RNA, 82 nt, Homo sapiens
aaccaggcgaacaagacgacaccgccagcaccgaccaccgaggcggagggggagaacacccagagcccaaaaggcagagcga

SEQ ID NO: 27689 - RNA, 75 nt, Homo sapiens
acagagggcccgcagaagccgagaaaacaggaagaagaggccaacaacggccccaaacaggaggaagaggccacc

SEQ ID NO: 27690 - RNA, 85 nt, Homo sapiens
cgggaccgggcgggaacccgcggggagcgggacacgaacgggacgagaacccccgcgaaccagaggaacccagcgagcgagagcg

SEQ ID NO: 27691 - RNA, 75 nt, Homo sapiens
aagaacaccaaaagggccaagaagccaaggcgcgagaaggcaccggggcaaacggcacacgaagcacggaacacc

SEQ ID NO: 27692 - RNA, 101 nt, Homo sapiens
cggaacaaaaagccccagaccagagacagaagcagaggacgccaggaggcgggagcagaggaaaaggcccggcgggacacaaccacagggaggagagagag

SEQ ID NO: 27693 - RNA, 72 nt, Homo sapiens
acgggacaaccagcagaggcccaggccaaggagacagaacagacagaaaaaacaacaagaaacccacaacca

SEQ ID NO: 27694 - RNA, 58 nt, Homo sapiens
acgcccgcgggccaccgcagagccccaaggaagagaaaggcaggaacacacggacaga

SEQ ID NO: 27695 - RNA, 56 nt, Homo sapiens
ccagccaccgcacagggaaaagcaccaaggccaaccaggagggaaccccgaagccg

SEQ ID NO: 27696 - RNA, 79 nt, Homo sapiens
gaaaccgcgggcgggagaggcggcggacgggccggagggaggagaaagccccgcgggacacaaaagcaaccgagaggga

SEQ ID NO: 27697 - RNA, 78 nt, Homo sapiens
cccagcccgcggaggccgcggagcgccagccaagaagaaaagacaggcagggaggcagcggcaagcggaccgggaggc

SEQ ID NO: 27698 - RNA, 85 nt, Homo sapiens
ccacgagcgccccccgagaccgaccagcccccgccagcagcccaggcaaagcacaagcggccgacgaggaaaagccagaaggagg

SEQ ID NO: 27699 - RNA, 86 nt, Homo sapiens
gcggggcggcgagacagcggcggcgacggcgcggaggccccgggcgcggcgcagacgcgaaggaccagccgaggaacgaccaggag

SEQ ID NO: 27700 - RNA, 105 nt, Homo sapiens
gggcaccacggcaccggcgggcccaccgcggcacccggccaccaagaaccgcaggcccccacagggcaggaagccgccgcccagccaggacggggaggagcagca

SEQ ID NO: 27701 - RNA, 71 nt, Homo sapiens
aacacaggaaccgccccgagaggaaacacccccagaagaggagccgagacaggggagagacagagcaccgg

SEQ ID NO: 27702 - RNA, 75 nt, Homo sapiens
acgcagagaaccgagaaagcaacggaaacgaagaaggcccagcccaccaggccggaaaaagggaaagaacaaaac

SEQ ID NO: 27703 - RNA, 78 nt, Homo sapiens
cagggcgaaccagagagaagagacaggaagaagagagcggaacagcagagcgcacaaaaagccaacaggcagaccaga

SEQ ID NO: 27704 - RNA, 77 nt, Homo sapiens
gacaaacggcgggcccgggaagcgggccggcagcgcccggacgaggaggggcggaagaagccaaggagcccgacggc

SEQ ID NO: 27705 - RNA, 80 nt, Homo sapiens
ggcggcagcggcggcggcggcggcccccggcaccagggagagccaggacaacccacggcgcccagaggacaaaaaggggg

SEQ ID NO: 27706 - RNA, 70 nt, Homo sapiens
gacggacaagagcgcggaacaggacgccccgagaacgaaagagaaccagagcaccccaggaagaaacaga

SEQ ID NO: 27707 - RNA, 77 nt, Homo sapiens
cggaaccccaacagagaaaaaacacaaccaaagggcacggaggggggggggagagggcaagaaccaaccacaggcaa

SEQ ID NO: 27708 - RNA, 74 nt, Homo sapiens
aggccagagcacgagcacgggaagaacacaagggaagacaaaacaaagcagggcacaggaaagcagaccggagc

SEQ ID NO: 27709 - RNA, 79 nt, Homo sapiens
gcggccccgcccccgccggcgcgcccgcgcggcgcggggaccgcggcccggacgaccacaccggcggcgagcgcgcccg

SEQ ID NO: 27710 - RNA, 75 nt, Homo sapiens
aacagacagacgcaacaaaagaggaacgaaggaaaagccaagaaagacccaaaagaccccagaccagaaagaggc

SEQ ID NO: 27711 - RNA, 75 nt, Homo sapiens
cgggaggaaagccaagcaggacaacaagggagggcacagccaagacaacaaccaagcaccaggaaaaccgagaag

SEQ ID NO: 27712 - RNA, 85 nt, Homo sapiens
gcagcagaacagaaagaagaaaacaagggaggagaagacaagcaaaaagacgggaaacggcaaagacccacggcagggcaacccc

SEQ ID NO: 27713 - RNA, 44 nt, Homo sapiens
ggccgggccccggggggccagggcgagcccagacaccagaagcg

SEQ ID NO: 27714 - RNA, 73 nt, Homo sapiens
agacaacagggcgcccgcgccaccgcgagaagagagccaggccggggcccccagcccgccccagacccgagca

SEQ ID NO: 27715 - RNA, 76 nt, Homo sapiens
ccaggagaagccgcccaaagaacgggaaagaccaaaccccaaagcaggccaaacccaggaggacaacaagaaggga

SEQ ID NO: 27716 - RNA, 72 nt, Homo sapiens
gccaacgcaccgcacacgggcagggaaagaggcaaaaccgagaaaaggaccaaagagagcgagaaagcccaa

SEQ ID NO: 27717 - RNA, 79 nt, Homo sapiens
agagagccccaggccagaagagagacccgacgacggaccgcacacggagaaggaagcagagacggggaccggagccagg

SEQ ID NO: 27718 - RNA, 84 nt, Homo sapiens
aaggaggagaccgacaacagcacccgcgcccaagaccgcgcaacccgagccaaggagcaccaggaagaggcaacgagacagccc

SEQ ID NO: 27719 - RNA, 84 nt, Homo sapiens
acagagagggccgggagcgcgcagccagggacgaacagcggggacgccccagcagaccgcccaggagaggaaagcaggaggaaa

SEQ ID NO: 27720 - RNA, 68 nt, Homo sapiens
ggaaaccacaaaacaaaaagcggaaaaaccaccagaagccgggagaacgcgagcaggcgacccaaaag

SEQ ID NO: 27721 - RNA, 50 nt, Homo sapiens
gcgcgggcgaacacacaaagccgcaccaggaccgagggcaccgcgcccgc

SEQ ID NO: 27722 - RNA, 73 nt, Homo sapiens
cgaaggagaagccgaaagaaaagaaccaaacggcgagaagacaccggcagagagcagaacacacccgagagcg

SEQ ID NO: 27723 - RNA, 81 nt, Homo sapiens
cagggggagcaccgagcaccacgggcggcgccgaggcgcggcggggaagaaggcgacaaaacagaggagaccagaccagaa

SEQ ID NO: 27724 - RNA, 86 nt, Homo sapiens
ggccgaccacgcagccacggccagcgggcaaggagaagcggcggaacgccgcagaaagaagaaggggcaagaacagccacagcaga

SEQ ID NO: 27725 - RNA, 89 nt, Homo sapiens
cgaaacgcccgaaaacagggccggccgcagagcccaccggaaggagaaggaagaggagcgaacagaaaggccccggagcagcgcgaccc

SEQ ID NO: 27726 - RNA, 79 nt, Homo sapiens
ccggacagacgcgccgccgggcaaaacccggaaaaaagcaccccaacaaccaggaggcagcacaggcacccccaaccac

SEQ ID NO: 27727 - RNA, 80 nt, Homo sapiens
cgcggcgccacagccccgcgcggaaacccaggcaaagagaagacccaaaaacgcccgggaaagaaaacggaaacaaaaac

SEQ ID NO: 27728 - RNA, 75 nt, Homo sapiens
ggacggccaggagcagcggcgcagggcgaggggagccgacaccaaccaaaagcggcaaaagcaggaacgaacagg

SEQ ID NO: 27729 - RNA, 86 nt, Homo sapiens
ggagccgcaccaccaacgcggccgacaacagccggcgccgccacgaacggcggccaaagcgccagacaagggccgagccccggaga

SEQ ID NO: 27730 - RNA, 82 nt, Homo sapiens
accggcaccgcggagcaaaaaaagagcccgcaagaagaacagagacagcagccaaacccccagggaggagccagaacaaacg

SEQ ID NO: 27731 - RNA, 66 nt, Homo sapiens
ccccacgcggaacacaggcaaaagggaaagaacgaggaaccccagagaggacagaagccaaccagg

SEQ ID NO: 27732 - RNA, 77 nt, Homo sapiens
gcgggaacggcccgaggcggcacagcagcggccaagggaggaacccgacacgggcacggagcaaagaagggaaccgg

SEQ ID NO: 27733 - RNA, 79 nt, Homo sapiens
acggggggcccacccaggcaggcgcaccgccccccgcccagacaccagcgcaggcagccgccgcaaagggacgacgaag

SEQ ID NO: 27734 - RNA, 52 nt, Homo sapiens
aacaggaaaacaaaagaggagaaagcgagacgacgggaccgaaggaccccgc

SEQ ID NO: 27735 - RNA, 76 nt, Homo sapiens
aaacacagagagcaacacgagcgcaaagggcccaccccaggaccccaccacccacagagaagccgcacacgccaaa

SEQ ID NO: 27736 - RNA, 86 nt, Homo sapiens
acgggaggcccggccgccccggagggagacgcgcgccgaggagaacccagcggacccaacagaggaagccgcaagaaacgggacga

SEQ ID NO: 27737 - RNA, 86 nt, Homo sapiens
gcccaaaaacgacaccacgaaggacaagaccaaaacccacgccgaagaaaaggagagaggcagaccaaaacgggcccgcggaacca

SEQ ID NO: 27738 - RNA, 74 nt, Homo sapiens
ccgcgcagcccggccgccggcccccaacagcgccgggagggcccagccagggcaacgagggcacagaaaaggcg

SEQ ID NO: 27739 - RNA, 82 nt, Homo sapiens
aagcagcacagcagaccagcccccccaccccacgccccccgcagaaggaggacggccaacccccgacacgaggccgccgaag

SEQ ID NO: 27740 - RNA, 70 nt, Homo sapiens
ccaccaaaggcacgggaccggaccacgaagagggccccgggcgcgggagccagccgaagaaaggaaaaga

SEQ ID NO: 27741 - RNA, 70 nt, Homo sapiens
aaagaagaaaacagaccaacgaaaggcccagacaacacggagacgaagaccaagaagggagagagcaaaa

SEQ ID NO: 27742 - RNA, 77 nt, Homo sapiens
gagcggcgggcgggaggcccggccagccgacgcaggcccaccggcggccaggaggaagggaccgggcccacagaccg

SEQ ID NO: 27743 - RNA, 68 nt, Homo sapiens
caagggaggcgcaggagccggcagaggggagcccagacacccccccagcagccaccggaacaagcgca

SEQ ID NO: 27744 - RNA, 59 nt, Homo sapiens
accagcagggggcacaccaggagggacgcgcaggcccggagacgcagagccccagcggg

SEQ ID NO: 27745 - RNA, 75 nt, Homo sapiens
gcccagaagaagggaaggcgcgaggaggaaaggaggacgagggaaaagggcagaggcaggggggggacggcacac

SEQ ID NO: 27746 - RNA, 79 nt, Homo sapiens
ggcgcgaaaccaagcgcggcccagaaggggcaagaagaacaggagccagaaggccgggggaaagcaacacgagaccccg

SEQ ID NO: 27747 - RNA, 73 nt, Homo sapiens
gagcgaggacgccggcaggcacgaaggcaaaccgagacccaggcaaaggccgggacccaggcccagagcagag

SEQ ID NO: 27748 - RNA, 67 nt, Homo sapiens
acgaagcgaccaaagcgcacggcagcgagaggggaaaagccacggcaggacaaggggcagaccacaa

SEQ ID NO: 27749 - RNA, 78 nt, Homo sapiens
aacccagaggggggaaaccacccacagggggggaaaaaaacacaacggacggagaaaggacagaggagacaaagaccg

SEQ ID NO: 27750 - RNA, 57 nt, Homo sapiens
cagacgagcggaggacacccaacccgggaggccacacgagcaccgagagaaccgagc

SEQ ID NO: 27751 - RNA, 100 nt, Homo sapiens
ggcagggcccccggagggaacccgcccccagggagggaacaaagcccacagcaccgcgaggcacagccaacccccaagagccacagaaaagaacacacag

SEQ ID NO: 27752 - RNA, 79 nt, Homo sapiens
gaaaccaaacccaacaaggggagcccagagagaaccgggagaaacaggcaggccagaaaggagcgcaaaccagcacgga

SEQ ID NO: 27753 - RNA, 67 nt, Homo sapiens
gcgcccaacaggaagacgagacaacggcaagcggagaagagcaaggccgaaccgagaggaagggcaa

SEQ ID NO: 27754 - RNA, 55 nt, Homo sapiens
gaaggaaaacggcccagaaggagacaaaacagaggagaccagaccagaagccccg

SEQ ID NO: 27755 - RNA, 79 nt, Homo sapiens
aggagcagcggaaggagcaaggaaaaggcgggagcacgccaaccaaagaacaggaggaacgaaaaagaaaaggaaggag

SEQ ID NO: 27756 - RNA, 63 nt, Homo sapiens
ggaaacacccaacaaggaagcgacaacgagaacaggagaagcaagcaggcgaacgaagaggcg

SEQ ID NO: 27757 - RNA, 46 nt, Homo sapiens
ccaggaggggagaggaggcaggcccgcggcacacgcagccagaagc

SEQ ID NO: 27758 - RNA, 80 nt, Homo sapiens
caagaaagcgcacgagcccagacgccggcagcggcccccagcggcgcacacaaggagggcacaggaaaagaccccacaag

SEQ ID NO: 27759 - RNA, 69 nt, Homo sapiens
caacacgggacagccccacagagggggcaaggccaaagggcaccgggacgagcaaaccaggaaaacaga

SEQ ID NO: 27760 - RNA, 70 nt, Homo sapiens
cgggcagcgagcccacacagacaacggagggaagcgagcagggcaaacaccagcggaacccagggccaca

SEQ ID NO: 27761 - RNA, 78 nt, Homo sapiens
cccacccacagaacagaaaagggacaggagagcgcgaagagcaaggacgaggaccacagacaccgagggaggagagac

SEQ ID NO: 27762 - RNA, 63 nt, Homo sapiens
cggagaagaggcaggaagaccgccaacaggcggaggggagcgaccgcgagaccacaagagggg

SEQ ID NO: 27763 - RNA, 70 nt, Homo sapiens
ccaacggagcccgagcaccgccgcaccccccccccaagagcccgccaagccccaagcccggccagcgccc

SEQ ID NO: 27764 - RNA, 81 nt, Homo sapiens
ccaagagaggcggggcgcccccgccacgcagccggccaccgccgagacccagcacacgccgaccagaaaacagaaacgccg

SEQ ID NO: 27765 - RNA, 114 nt, Homo sapiens
ggcgagggaagcccgggaagggaccggcccaggccccccgccccgcgcagcagggaggcgccacaccaccaccggggaaccagcgcagcgaaccagcacgccggacaccgccca

SEQ ID NO: 27766 - RNA, 74 nt, Homo sapiens
gcgcggagaccacgacgggggggaggcggcagcgcaaccacgagacggccccaaggggaggccgaagacagcac

SEQ ID NO: 27767 - RNA, 68 nt, Homo sapiens
aaagaaagaagcaccgaaggcgaagggaggaggcagcgaaaacacaccaacgcaggacgagaaaacaa

SEQ ID NO: 27768 - RNA, 73 nt, Homo sapiens
aagcggcagagagccaagccaagccagagcggagaaagccgcagaacccgccccgaaccgagaagaaggaaaa

SEQ ID NO: 27769 - RNA, 62 nt, Homo sapiens
gcggcggagaagaggcaggaagaccgccaacagacccgggaagaaggaaggccacccggcaa

SEQ ID NO: 27770 - RNA, 74 nt, Homo sapiens
ggggcagaagacaaaaagaagacggacagggcacacagaaccgaaaaagagcgggcccacgggcggccgcgcgg

SEQ ID NO: 27771 - RNA, 63 nt, Homo sapiens
gcacagaagcacagccacagagcaggcccgcggagcagaagcacgccccgagaaacggggcga

SEQ ID NO: 27772 - RNA, 51 nt, Homo sapiens
cgaagcaagcacacaacaaacagaacgcaaagcaccacaagccaacaaacc

SEQ ID NO: 27773 - RNA, 73 nt, Homo sapiens
gagggaaaagagcaacgacacgcgcaagaaggaccggaacaacgaacagcgaaaagagccgagagcgccggag

SEQ ID NO: 27774 - RNA, 75 nt, Homo sapiens
aaagaggccgaaaaacggcacacccaccaagcacccaacagaagaagagacgccagaaagcagcgagggacccag

SEQ ID NO: 27775 - RNA, 73 nt, Homo sapiens
aaagcccagaaacagccagaccaaagaaaacgaggagaacgaaacagaccaagaccagacgaggaaccggaaa

SEQ ID NO: 27776 - RNA, 76 nt, Homo sapiens
gcagcgccagaccgcgacaggcccgaaaaaaacccaggcggcccaggagaaagcagggaaggcaaccacagaacca

SEQ ID NO: 27777 - RNA, 74 nt, Homo sapiens
aaacagcacaacagcggagcaacagcgagcaacaggcaacgaaaacagacaaaacaacggaaaagcagggcacc

SEQ ID NO: 27778 - RNA, 78 nt, Homo sapiens
ggagaaggagacaccggaggacgaagagggggaggcagagagacgaagagagaagcagggcagaaagagcggaaacga

SEQ ID NO: 27779 - RNA, 60 nt, Homo sapiens
cccagaggccaggcagacccagccaaaccggaaagagaagggagggcgacgagagccgaa

SEQ ID NO: 27780 - RNA, 63 nt, Homo sapiens
cagacgcagcggacaggcacagcaggaagggcagaagggagagaaggacccaaagggaaaaag

SEQ ID NO: 27781 - RNA, 75 nt, Homo sapiens
ccaagccgccccccaccgcccgggcccgaggaggcagccaagccgggccgcccgcggcaccccaggaagacaccc

SEQ ID NO: 27782 - RNA, 64 nt, Homo sapiens
aaaaagcaaggccaccaacaagagcaacccaggggccacgcgccccacgccgacagcggggcac

SEQ ID NO: 27783 - RNA, 73 nt, Homo sapiens
cgccgcggggaaagggggacccgagcccgacagcccagccagaaggacacggaaacagagccccccacagagc

SEQ ID NO: 27784 - RNA, 74 nt, Homo sapiens
aaacagaaagaggaaaaccagagaaacaagaggaggaggggagaaggcgagcggccagacaaaggaaacaaccg

SEQ ID NO: 27785 - RNA, 76 nt, Homo sapiens
gccgacccgcggagacagacaagacaagaccggcggggaagcgaaaaacagcccgccgggacacaccccaggaaaa

SEQ ID NO: 27786 - RNA, 75 nt, Homo sapiens
accaacgccggccggagcagcagcccgaggaaccaacccgccaccaagaaagccccccagaaagccccgcagccg

SEQ ID NO: 27787 - RNA, 74 nt, Homo sapiens
agaggaacgaaaaaagcaagacagagaaaaggaacagccgaagccaggggcaagcgaaaccacagaagaaagga

SEQ ID NO: 27788 - RNA, 87 nt, Homo sapiens
gccgccggccacacccccaccgccccgcgcagagagaccaaaccagaagggacaaccaagggcagccaagaacgcaaaaccaggaaa

SEQ ID NO: 27789 - RNA, 63 nt, Homo sapiens
gaagagaggagggagaacacagaaaccggccccaggggcacaccccacggccaaggaaaccgg

SEQ ID NO: 27790 - RNA, 41 nt, Homo sapiens
gcccagcggcgggcgagggcgggggaccccacccgaggagc

SEQ ID NO: 27791 - RNA, 82 nt, Homo sapiens
cgaacaccgagcagaaagcccgaagggcgcggacggagcagcggcagagacgaacaaggggggacacgacgagcggacagca

SEQ ID NO: 27792 - RNA, 80 nt, Homo sapiens
ccagccgaagaaggcgagcaggggcgggagagccccgcagaagacgccgacgagcagagcagggaaaggacaagaaagag

SEQ ID NO: 27793 - RNA, 68 nt, Homo sapiens
agggaaaggagcgacacaacggaagggggggaaccaaaaaaggggaacacaacacgcgaaaccgccga

SEQ ID NO: 27794 - RNA, 59 nt, Homo sapiens
gggaggaaagcaccgaggcacaacaggacccaaggccagccagccccaggcaccagcgg

SEQ ID NO: 27795 - RNA, 71 nt, Homo sapiens
aggaacacaacccagcgaagaccagaccggaagaagcagggaaagcagaaaaaaggaccagaccacaagcc

SEQ ID NO: 27796 - RNA, 76 nt, Homo sapiens
aagaccacacaccccacaggaaggcacacagcagcaagagcccaaacgcacagcacccaagaaaacccaggccgcg

SEQ ID NO: 27797 - RNA, 78 nt, Homo sapiens
agcagagggcccccccgcggcagcagggagccaccagcagcggggggcgacccccagaagcggcagacggagaacagg

SEQ ID NO: 27798 - RNA, 75 nt, Homo sapiens
ggcaacaacagacgacccggaagaggcgagcagacagagcaccagccggggacccggaccacacaggagacgaga

SEQ ID NO: 27799 - RNA, 71 nt, Homo sapiens
aggaagggaacaagaggggcagcaagggccaaccggacacaagagggcaagaaaggcgcgacgggccgaaa

SEQ ID NO: 27800 - RNA, 47 nt, Homo sapiens
ggcagcaggccggcgagggggcaggcagaaagcaacagaagcagaag

SEQ ID NO: 27801 - RNA, 75 nt, Homo sapiens
gaaggggagcccagggaagcccgggaccgaaaaaacggaggacgaccggcgagcggcccccagcagacgagacag

SEQ ID NO: 27802 - RNA, 68 nt, Homo sapiens
gggggcaagcaagccaacacccagcagaaaaaaacaacagaagacggacacgggcagacgcagccgcc

SEQ ID NO: 27803 - RNA, 72 nt, Homo sapiens
gacgagccaagaagggcggggcaccaaccccacagcggagcacccagaagcaaacaaggaacgggaaaacac

SEQ ID NO: 27804 - RNA, 52 nt, Homo sapiens
ggggcgcaccgccaagagcgggaccgcagcagagaagcgggggacaaggcag

SEQ ID NO: 27805 - RNA, 78 nt, Homo sapiens
cccacccgccaggccagagaggaaccccacgggggcagaagaaacagcccagagagaaagcacgcagggaaggccaag

SEQ ID NO: 27806 - RNA, 74 nt, Homo sapiens
aaaaaggggaaggggccgacaaaagcgcagcaagacggccgcgcggcccgcagggccaggggaacaaaaagaga

SEQ ID NO: 27807 - RNA, 78 nt, Homo sapiens
gcgccggagcggagcgcgggcgccggggagccagaagaagcacagacgagaaacaaggcaagaaggcagccgagaagc

SEQ ID NO: 27808 - RNA, 51 nt, Homo sapiens
caaaggcggcaggggaccgcggcagcaaacaaggcccagacggaacaaggg

SEQ ID NO: 27809 - RNA, 66 nt, Homo sapiens
gcggaccagacagagaacggcacaagaccggcagggaggaagccaagaaaaagaaacaagaaaaaa

SEQ ID NO: 27810 - RNA, 76 nt, Homo sapiens
ggcacccccccgcgcgcgggaggagacccacaggggacgaggacgccggcagacaccagaccaaccgcccccaaag

SEQ ID NO: 27811 - RNA, 71 nt, Homo sapiens
aacgcagcagacagacaacaggccaaagaaggggagaggcaaacgacgaggcacacccagaagccacagga

SEQ ID NO: 27812 - RNA, 81 nt, Homo sapiens
gaaagcccaccaaggagacgcaggcacccaggggccgccccaggacacgccggacccccccggagccaagcagacaaagcc

SEQ ID NO: 27813 - RNA, 75 nt, Homo sapiens
ggggcagcgccgcaccgaggcagcccgcggcaccgggggacagcggagagaacacccagcgaagacccaaaccgg

SEQ ID NO: 27814 - RNA, 79 nt, Homo sapiens
ccgaagcaacaaggggaaggggcaaaagagcaggccaggggacaccagcaagcgcggaagaggaccggaggccggagga

SEQ ID NO: 27815 - RNA, 102 nt, Homo sapiens
acaacaacagcaacggaggcgggaccggaacaggcacaccccacacaagcacgccaagaggagcacgcgaccagagaaggccggagagacagaacccagcga

SEQ ID NO: 27816 - RNA, 71 nt, Homo sapiens
ggcgcgcagagcgcggaagaggcagcggacgggccaaggagacacagaggaaccccccggggggaacacag

SEQ ID NO: 27817 - RNA, 79 nt, Homo sapiens
agcgcccggcgccgcacagcccggcgaagccgcggagacagccagagaaggcgcggcccaaggagaggccagagggcag

SEQ ID NO: 27818 - RNA, 84 nt, Homo sapiens
caccaccccccagcccaggggggaccagcccccaccacccccaggaacagggcgagacgaacaacgcgcgcaggagaccaccaa

SEQ ID NO: 27819 - RNA, 76 nt, Homo sapiens
acgggcgcgccaacagcccaggcgcccgggggcccacagcccggaaggggccagcggggcgggaggacagccagag

SEQ ID NO: 27820 - RNA, 70 nt, Homo sapiens
gcacgccgggggcgaggagacaaaaaagcccaagagccaaagcagacccccaagcgagcggagcggaagg

SEQ ID NO: 27821 - RNA, 106 nt, Homo sapiens
acagcacagcacacgacacccccgggaccgcggagagaagcagcggacagcagagccagcccccgacaaagggaaagaacgcgcgcagagagagacgagacgaagg

SEQ ID NO: 27822 - RNA, 77 nt, Homo sapiens
gggccgcacccccgaccgggccaaggggggggaagaagcggaaaggaggggccccggcacgcggcacaccacaagca

SEQ ID NO: 27823 - RNA, 71 nt, Homo sapiens
gggggcagggccaaaacaagcaccgccgaaacagacccaaggccaggggcaagcaccacccgagcaagaga

SEQ ID NO: 27824 - RNA, 79 nt, Homo sapiens
gaccggggccgggccacgccgagggcaggacgaaccaccaggagaacgcgccgccggccggggcgcagggacacggggg

SEQ ID NO: 27825 - RNA, 76 nt, Homo sapiens
gaaagggaaggacaggcagagcaaacaagggaaacacaaagaagacaccagaagggccagcaccacgacaacacgg

SEQ ID NO: 27826 - RNA, 65 nt, Homo sapiens
acccggaccgcgaaggcgggggagacgaaaacccacggagagaagaaccaaagacaaaagaagag

SEQ ID NO: 27827 - RNA, 77 nt, Homo sapiens
ggaccgagaccggaccgagagcggaccgagagcgcgaaacgcacgagaaggggaaaagccacggcaggacaaggggc

SEQ ID NO: 27828 - RNA, 88 nt, Homo sapiens
cggggcccccaggcgaggccgggcccacacacagacggaggaaccgaggcccagcacgccgcaccaccaggggggagcgcaccacccg

SEQ ID NO: 27829 - RNA, 92 nt, Homo sapiens
gacaaaagcggggcacgacaaaagaaccagaaaaagagaaggaggcgcgagaggggcaacaagacaccaggagcaggagaaagaagcagcga

SEQ ID NO: 27830 - RNA, 54 nt, Homo sapiens
cggagacagcacgcacgaaacagaaacaggcacccaaggccggcccacagccca

SEQ ID NO: 27831 - RNA, 78 nt, Homo sapiens
ccacaccgcagccgcacaagccggcagaagagcccacagcacaaaaagccgcaacagaccaaagaaagaccccaggaa

SEQ ID NO: 27832 - RNA, 64 nt, Homo sapiens
gcggacacggccgccgggccgcgcccacgggcagcgagcacaggaaagagaggagaggagcgcc

SEQ ID NO: 27833 - RNA, 87 nt, Homo sapiens
ggaacaccccaacgggagacaagaagacgccaacgagcggcgcggacggcgcgcggacaccaggacccccggggacagggggggccc

SEQ ID NO: 27834 - RNA, 81 nt, Homo sapiens
ggccccgggggaagcggcgggaggccacgggagccgagagaaaacgccggcacagagcaagaaagaaagccaacaacaggg

SEQ ID NO: 27835 - RNA, 76 nt, Homo sapiens
gaggagagcagggcccagagcacaggcgcgggaccacagagagcacgagaacaaaccaaggaaacagacgaaccca

SEQ ID NO: 27836 - RNA, 71 nt, Homo sapiens
gaagaggacagcagccgacaggagacgaaccaggccacccaagaaacaaacagaaccgacgacagaagcca

SEQ ID NO: 27837 - RNA, 80 nt, Homo sapiens
aaccggagccccccaggaggaaaacacggagcagggggccgagcaaaccgcccagccccggcggaacacgaggcgcagga

SEQ ID NO: 27838 - RNA, 83 nt, Homo sapiens
gaggccgaggccgggaggccggcccggagggaccaaaagacacagcagggacgaaggagaaacagaggcgcaccgggacggag

SEQ ID NO: 27839 - RNA, 75 nt, Homo sapiens
gaaaccggaaccgaaggacaaagcagccagaccaaagcacagcgccagagacccccggcacccgaggcggggccc

SEQ ID NO: 27840 - RNA, 67 nt, Homo sapiens
acgcccaagccaccgcaggggcaccaaaacacacaccgaaacccacggcgaggaacgaccacccgaa

SEQ ID NO: 27841 - RNA, 83 nt, Homo sapiens
cagcaaaggcgccagcccagcacgccgcgacggccccgggaaggagcccgacacgggagcgcgaggccaggccaacgccggga

SEQ ID NO: 27842 - RNA, 72 nt, Homo sapiens
acgcaacgccacaaagcggcgcggcaccccagaacacccggcccaagagaggacaccggacacagggccacc

SEQ ID NO: 27843 - RNA, 78 nt, Homo sapiens
ccacagaagcccaagaggcagcggacggaaagaaagagaaggacgcggaccagacaggaaaagcacaaccagccaagg

SEQ ID NO: 27844 - RNA, 53 nt, Homo sapiens
cacccaccagagcgaacgcacacccgcaggaaaaccaaggagcccaaaagcaa

SEQ ID NO: 27845 - RNA, 50 nt, Homo sapiens
gagccagaggaccaggccaagccgccacaacagacagggaccggcaacac

SEQ ID NO: 27846 - RNA, 78 nt, Homo sapiens
ccagaggagaagcaaggcgacgccagaggaggaaaggaagacaaggaaaagccaagaaagacccaaaagaccccagac

SEQ ID NO: 27847 - RNA, 95 nt, Homo sapiens
caaagaaaaacccgccccccaacaccggacaccgagaggaaccacaagcaggaaaaagaacgaccaggacacagagcggcccaagagacaaaaag

SEQ ID NO: 27848 - RNA, 81 nt, Homo sapiens
accaggaggagggggcccgcgagcaaccacccccaggcacggcaaaaaccggcagcccgcacagagggagaagagccccag

SEQ ID NO: 27849 - RNA, 59 nt, Homo sapiens
ggacaggcagcccagagggcggagaacggaaaagcaccaggaagcagagaggaccgcag

SEQ ID NO: 27850 - RNA, 75 nt, Homo sapiens
agacggaaaccaaaggcagacagacgggcccccgccaaacccacccggccaaccagagaggaaagccgaggacag

SEQ ID NO: 27851 - RNA, 81 nt, Homo sapiens
gccaccacagagcaaacggacgggccaacgccgggccagcccacgagagaaccccagggaggccaacagacccaacccaga

SEQ ID NO: 27852 - RNA, 79 nt, Homo sapiens
aacgccccggggagaagcgaggagagacagagagaggagaaagcggccaaccccagaagagagaacagaagaagagaga

SEQ ID NO: 27853 - RNA, 73 nt, Homo sapiens
ccaagcaaccgccccaaccccaaccggcggcgcgaccgcccagggagacggaacccacacagaccaacgcagc

SEQ ID NO: 27854 - RNA, 70 nt, Homo sapiens
ccgcagcccaggagcccggaagacccgcaccggagcaaagggaagcacaaggaaacaggagcaccgggag

SEQ ID NO: 27855 - RNA, 83 nt, Homo sapiens
ccagcagggccagagaccacggaagccccggcagaggggaggagacacgaagcgacgcagagccagaagggaggcagggaaca

SEQ ID NO: 27856 - RNA, 73 nt, Homo sapiens
cccccaaagaaggaggagacgagcaaaaacaacggacacccccgggaacccaccaaaaaggacaccgaaagac

SEQ ID NO: 27857 - RNA, 61 nt, Homo sapiens
caaagacgcaacaggagaagccaagcacgcgacgaggcggagagcaagaacacaacagcca

SEQ ID NO: 27858 - RNA, 49 nt, Homo sapiens
aaaaacaggagaccgcggccgaccagagaacagggcccgggacgagcgg

SEQ ID NO: 27859 - RNA, 72 nt, Homo sapiens
caggagcaggacacggcaggggggcgacaggcacagaacaaacacagaagcacaaggaagacacaggacaac

SEQ ID NO: 27860 - RNA, 48 nt, Homo sapiens
caaagagaacacagagaaaccagagggaccaggacacagcaggggcca

SEQ ID NO: 27861 - RNA, 82 nt, Homo sapiens
aggaagcgccaaacggccggcccccagacaaacacaaagacacaaccgggggaaaggaaaccaaaccaggaaagaaggacaa

SEQ ID NO: 27862 - RNA, 62 nt, Homo sapiens
gaaaaacacaaaagagccaagagcaaggagcagggacaagacaggaagcccaagcagcaacc

SEQ ID NO: 27863 - RNA, 81 nt, Homo sapiens
cccagcccccagagcgggacacagacgcgccaggggccagcgacggggaaggcaggggcgaacgcgggggaaggggaggcg

SEQ ID NO: 27864 - RNA, 84 nt, Homo sapiens
ggcacccgggacaaggcagacgggagcgcaaggcgccccaaggccagacaaaacccaggaagaggccgaccagcagccagaccc

SEQ ID NO: 27865 - RNA, 69 nt, Homo sapiens
ggacacaagcaagaaacccacaggggaaaaacggagaaaggcagcacacggacagaagaaagggagccc

SEQ ID NO: 27866 - RNA, 71 nt, Homo sapiens
ccccacagccccgcgccgccgaccccccggcgccgcgccggcggcggcgcaaggaagaagagacgccgcgc

SEQ ID NO: 27867 - RNA, 82 nt, Homo sapiens
cagaaggagcaaaaggcggacaggcagagagccacaggccgcacaccccagagcccgaagggggccccgaccccgacccagc

SEQ ID NO: 27868 - RNA, 68 nt, Homo sapiens
aggagccgcacacaagcggcagaacagacccccgccgacaaggagccccccccccggggacaccagcg

SEQ ID NO: 27869 - RNA, 78 nt, Homo sapiens
cagcccagagagacggaaacaggaacaccaaggaagcaaaagccccagaacgacgccccaggacacgacagcaccacg

SEQ ID NO: 27870 - RNA, 81 nt, Homo sapiens
ccccagcaacgccggcagcgcccacgaccagggggaagaaggaggccggggaggaagagagcaggggggcgccaggcaccc

SEQ ID NO: 27871 - RNA, 57 nt, Homo sapiens
caaaaacccgcaacagcccccgcccaaccgcccaacagcacaagaagcgccaccacg

SEQ ID NO: 27872 - RNA, 80 nt, Homo sapiens
agaaaggagcagccagaaagcggcacgaacagagccgggagcaagaagaacacccagaggcacggggccaaaaaggcacg

SEQ ID NO: 27873 - RNA, 78 nt, Homo sapiens
cgaccaagcaaggcagcacgacaaaaggcaggcgggaaacacagagaacagccagaacagaccacgggagaaaaacaa

SEQ ID NO: 27874 - RNA, 51 nt, Homo sapiens
agagggcagccgggaaagccgcaaagggcggaggcgcgcgccgcgaagggc

SEQ ID NO: 27875 - RNA, 39 nt, Homo sapiens
gcgggccggcgcaagacaacccagagaagaacgacggca

SEQ ID NO: 27876 - RNA, 53 nt, Homo sapiens
agaccaacgaaaggcccagacaacacggaaaaaccagaagagaaaaaacaaag

SEQ ID NO: 27877 - RNA, 82 nt, Homo sapiens
ggcgagaagaagcagaaacacagaccacacaaggcaaagcgagcagcccaggggagggacgagagccaaaaagcgaacaaag

SEQ ID NO: 27878 - RNA, 62 nt, Homo sapiens
gaaggacagggaacgcggaagaaagagccgcagacgcacagcaaccaccggacccgaaggcc

SEQ ID NO: 27879 - RNA, 66 nt, Homo sapiens
gccagcacaacaacccccaccgagccgggagacgccacggccagccagggcagcagcaaggagaac

SEQ ID NO: 27880 - RNA, 45 nt, Homo sapiens
cacagcgccagaaggcccaaaaaggcgaccaacgacgaagagcag

SEQ ID NO: 27881 - RNA, 77 nt, Homo sapiens
ccagagggcacacggaaacaacccgcaaagagaggaccggcacggcgccaccgaggccacacgaccggaggcagagc

SEQ ID NO: 27882 - RNA, 69 nt, Homo sapiens
cgcccgccagaaccgcgcgccacccacaaccaggaaagcacagcagacagaaccacacacggcagaccc

SEQ ID NO: 27883 - RNA, 48 nt, Homo sapiens
ccggaacaggggcagaaaaagagcagaaaacccccgaagacaaggagg

SEQ ID NO: 27884 - RNA, 76 nt, Homo sapiens
ccaccggcgccacgcaagggcgaggcagccccaaacaccgagaaggacggagaagcgaaagccagaccggcaagag

SEQ ID NO: 27885 - RNA, 77 nt, Homo sapiens
caagggacccgggaccagcaggagagacaaaggcaacggaggacaccagaccgagagaagccaaaagcaccgggagg

SEQ ID NO: 27886 - RNA, 107 nt, Homo sapiens
agcccccacagggagaaaccccacccccaagaaccaacccccaaaggcgggacagaggcccacgcggaccggcagcgccaccggaccaccagacaaggacacggccc

SEQ ID NO: 27887 - RNA, 82 nt, Homo sapiens
caaagggcgagggcacaaaaaaccacaccccccaccgaggaagagcgggagaaagggacggcgagggaagaacacccgcccg

SEQ ID NO: 27888 - RNA, 50 nt, Homo sapiens
caagaaaagacaacaacgcaggaagagaacaagcagaggaaagacacgcc

SEQ ID NO: 27889 - RNA, 83 nt, Homo sapiens
agggaagcggcaagcagagaaaaccgccaacaagagagaggcgacacagacacaaaagagacaaagaaagggaaaaccaagac

SEQ ID NO: 27890 - RNA, 66 nt, Homo sapiens
cccaggcgggaggggggggggcgcacgcccccgaggacgcagagccagccgccgcgccaagaaacg

SEQ ID NO: 27891 - RNA, 72 nt, Homo sapiens
agaggagggaacgcggagcgggacaaaccggcgaccacacacggggacgacggggaagccggacagcaagcg

SEQ ID NO: 27892 - RNA, 71 nt, Homo sapiens
cgcccgaaagaagcggacggaggacccaaagacaggaccacgcaccagcagagaaggaaagcaaaccgaag

SEQ ID NO: 27893 - RNA, 89 nt, Homo sapiens
gcgcagcgccggcgcccgggagacccaggaggagcccgcaggacccaaggccagccagccccaggcaccagcggacaggacagggagga

SEQ ID NO: 27894 - RNA, 75 nt, Homo sapiens
gaaaacggaagcgcagggagaaggaagaggggaaaaggaagacaacgaggggcacgcgcccacccaggcgcagac

SEQ ID NO: 27895 - RNA, 71 nt, Homo sapiens
ccagcgcagcagagcgccaagacgggaaacaaaagagcaaagaagccagcacaagacgagaaaaccggaga

SEQ ID NO: 27896 - RNA, 79 nt, Homo sapiens
agaagacccagggaaacccccagaaacacgaccccccgagagcacccgcgcaaaagaaaagaaggacaacgaggaacgg

SEQ ID NO: 27897 - RNA, 88 nt, Homo sapiens
gaaagccgcccgcgcccggaagccagaagcggacccaaagagaaagcacggaccaccaccagccagaagcgggccccgcccagcccag

SEQ ID NO: 27898 - RNA, 118 nt, Homo sapiens
cgagagaggcaccgggacggaccgagaccggaccgagagcggaccgagagcgcgaaacgcacgagaagggcaaggccagagaaggcgggagaaagacacgaaccacagaacgcaacag

SEQ ID NO: 27899 - RNA, 85 nt, Homo sapiens
gaccgacccgaacaaggccaacaccagcagaaggacagaaaacgggccccagacacaagccccaccaagaggacaccccaggaac

SEQ ID NO: 27900 - RNA, 82 nt, Homo sapiens
agcagaagagagggaaagaggccaaaaaacagagccaccgggggccgaggcagccaggcgcccagccggaaggcaggcgaag

SEQ ID NO: 27901 - RNA, 85 nt, Homo sapiens
cgccgccgccgcggggcgaggcgccgccaggcccgcggacccgaccaagaggcagaagacgggggcagcgggaagcccgaaccgg

SEQ ID NO: 27902 - RNA, 71 nt, Homo sapiens
gaaacggaggacccaacccccccaagccaccgcagaaggggacaaagggacaggcaacaacaacaaaacca

SEQ ID NO: 27903 - RNA, 89 nt, Homo sapiens
caagccgccgcccgacccagggcccgcgggccaggagagcgccggcggaagagcgcaggcaaacgacaaaaagcagcaagaaaaaaaac

SEQ ID NO: 27904 - RNA, 74 nt, Homo sapiens
ggaagggggaggaccaggccccaacccagcagcgccaaggggcgaagaccaagacacacagccagcgaccgaac

SEQ ID NO: 27905 - RNA, 81 nt, Homo sapiens
ggaacccaggcgcagacgcagagcaaaaaagcgaacgcaaggggccaagaagagcagagcccgagcaagaagaggacgaaa

SEQ ID NO: 27906 - RNA, 73 nt, Homo sapiens
ggaggccgcggggagacgcgggggacggggcaggaccacaggagcacagaaagcacgagagggccaccaagac

SEQ ID NO: 27907 - RNA, 68 nt, Homo sapiens
gaggcggcggcggggccgaggcgcgaggagagacaccaggcgccgagaaggccagcagagaaacaggc

SEQ ID NO: 27908 - RNA, 61 nt, Homo sapiens
caccagaaaggacacacagggacggcccgccgggaggcccccagccgagccagcggccggg

SEQ ID NO: 27909 - RNA, 58 nt, Homo sapiens
agaagccaacaccggccacgcacacagccgggcgacaggaggaagacggggcccaaag

SEQ ID NO: 27910 - RNA, 77 nt, Homo sapiens
ccgcacgggcacggaggccaaagagacaacaagaaggaccgaggcaggcgaaggggcgccgaaccgagcccgaaggg

SEQ ID NO: 27911 - RNA, 108 nt, Homo sapiens
ccggagcgcgaaggccgggacccggccccggcccacaggggggggcaaacccgagagaacggcaaggcgccaccggaagaaacgggaggggaggagccgggaaagaca

SEQ ID NO: 27912 - RNA, 76 nt, Homo sapiens
cacaccaacaaagcaccacacgacggacaggccgaggacaccaaccacacacaacgccagccaggggagcggccca

SEQ ID NO: 27913 - RNA, 73 nt, Homo sapiens
gaagacaaggccaaggaaggaaaggcgaagcaaaaggagagacagcaacaaggacgcaaagagaaccaggggg

SEQ ID NO: 27914 - RNA, 54 nt, Homo sapiens
cagaccgaggcacccccccaagcaagggcagagccccacaaacaaagggcaaag

SEQ ID NO: 27915 - RNA, 64 nt, Homo sapiens
gcaaagcgccaggccaaccagagacaccagcaggacaggaaaaaaagagggcaacgcggggcga

SEQ ID NO: 27916 - RNA, 76 nt, Homo sapiens
aacagacccacaggcacccacagccgaccagacaagagagaaacgccaccagcacgagacaaagacgaaacgaacg

SEQ ID NO: 27917 - RNA, 83 nt, Homo sapiens
ccaccggccaagcccagcagagcgcagggaagaaacacacgggcagcgagcgcgcgccgaggacgccgggaagccgcccaggc

SEQ ID NO: 27918 - RNA, 68 nt, Homo sapiens
gaaagccgggcgaggaacacaccgggaccgcgaggccacagcaagagggagcgcccaagagaaaagga

SEQ ID NO: 27919 - RNA, 93 nt, Homo sapiens
gaacgccggacgagcgagcaggcggaggccgacaagaaggcggcggaagacaggagcaagcagcggaggaggagcagcaggcccccagaagaa

SEQ ID NO: 27920 - RNA, 86 nt, Homo sapiens
ggaagcgagccggcggcgggaggagcagggcggagcccccagcccccgcgaagggcagaacagagcagcccaaggcacaagagaaa

SEQ ID NO: 27921 - RNA, 73 nt, Homo sapiens
agggcgcgaggccacggacgcggaggagggcccacacccagaacccgggcaccccccccccggcccgaccgcc

SEQ ID NO: 27922 - RNA, 102 nt, Homo sapiens
cgcaccccgcccccggcgccaccccgaccgcgagccgccagaccggcacccacccagagcccgagacagaagggcacagagcgacccgcaggcccgggcagc

SEQ ID NO: 27923 - RNA, 72 nt, Homo sapiens
cgaaacacagagcaaggcaagaacggaagcacgggcggaggaaagcacaagcagagcccccgcagagggaaa

SEQ ID NO: 27924 - RNA, 83 nt, Homo sapiens
ggcagggcaccgcgcgaagcggccaaagccgcccagacggccaccggcgggaggaacaaaaggccagccgccgcagggaagac

SEQ ID NO: 27925 - RNA, 80 nt, Homo sapiens
ggaggacaggcccaggggagaaccgcaggaggcacggaaaccgcagagaccaagaccccagagccccaggagacggacag

SEQ ID NO: 27926 - RNA, 71 nt, Homo sapiens
gggaggagagagggagagccaaagaaggggcggaagcagcagagggaggggcaaacacgcagcgaggcccg

SEQ ID NO: 27927 - RNA, 76 nt, Homo sapiens
cagaagcaccacaaccgcagaggccaaagagcacagggacagaaaaacagcgcagacgagccgcaaggacaagacg

SEQ ID NO: 27928 - RNA, 69 nt, Homo sapiens
cggcccacaggggggggcaaacccgagagaacgggggcaacacccccacaaagagcaagccagccggac

SEQ ID NO: 27929 - RNA, 55 nt, Homo sapiens
gaccaagaaaagggcgccaacacgaaaaggggaagaaggacggaaacgcgcagga

SEQ ID NO: 27930 - RNA, 84 nt, Homo sapiens
ggaacccaggaaaccaaccaaagaagcaagcacagcagaagaggcagaaggaagagaagaggcgagaaacagggagaagaagga

SEQ ID NO: 27931 - RNA, 37 nt, Homo sapiens
caccaacaccaaaaagaacccaccggcacaaccgcac

SEQ ID NO: 27932 - RNA, 56 nt, Homo sapiens
gcgaccgccgcggcgaagagggggcgaggaagagacaggcgggggagaagaagcag

SEQ ID NO: 27933 - RNA, 73 nt, Homo sapiens
ccaccacagccccggaggacagccagaaggagccacgccaccaccgcgcggcccacgcccacagagccagcac

SEQ ID NO: 27934 - RNA, 85 nt, Homo sapiens
ccacggaagccagccaggccaaaacccagcaagaagcagccaggaccccaggagcaagcacaagcaaaaccacacacggaagccc

SEQ ID NO: 27935 - RNA, 94 nt, Homo sapiens
accacaccaagcggaaaaaagacaccagcgacaaggacaggaaaacaaagagggaaaacggagaaaagcccccccaggccagcgcaggaacacg

SEQ ID NO: 27936 - RNA, 78 nt, Homo sapiens
cgcggagcggaagacggcaacccaggaagaaaacaccggagcccaagacaccaaaacagacgcaggcaagaggcagaa

SEQ ID NO: 27937 - RNA, 69 nt, Homo sapiens
accagaaaaccccacaacgggaagcgacaaaaccagcagcccagcggcccccaaagaaaccgacacggc

SEQ ID NO: 27938 - RNA, 75 nt, Homo sapiens
cacaggacggaaccgggagacaccgagaaaccagaggaaggaccccagagaagacagacacgcaacaggccggaa

SEQ ID NO: 27939 - RNA, 70 nt, Homo sapiens
gagccacaagcccacgagaggcgcccacccagagaaaagcagaaaagacaccaggaagaaaaaagaaacc

SEQ ID NO: 27940 - RNA, 70 nt, Homo sapiens
caccacccaccggacagagagccagaaacgaaaaaaaacaccagcagcccagcaaccaaaaagaagaccg

SEQ ID NO: 27941 - RNA, 72 nt, Homo sapiens
cggaggcggcggagcgcgagagccgagcggaccaggagcacacacgaaccgggcccgccagagaagcacagg

SEQ ID NO: 27942 - RNA, 91 nt, Homo sapiens
aggagacagcgaagcggggggaaggagcgaaagagaagagagagaacccgagcgccgcagcggagaaagaaggaacgagcaagcaacccgg

SEQ ID NO: 27943 - RNA, 81 nt, Homo sapiens
cggaccgagagcgcgaaacgcacgagaagacgcagaaaacgcaggacccccgcggacgcgaaggcgaaaaaaggaacggaa

SEQ ID NO: 27944 - RNA, 74 nt, Homo sapiens
caaaaaggccagaaagaggagcagagacgccggacagcgagcaaaagaggaaaaccagcaaagccaccgcagcc

SEQ ID NO: 27945 - RNA, 79 nt, Homo sapiens
caaccagacaagaccagggcgagcaccgccccagacgaccgggacaagacggaaccgccgagacaacacacggcgaacg

SEQ ID NO: 27946 - RNA, 54 nt, Homo sapiens
aaaacgcggaaaaccgacacaacagcggacccggggaagcaagccaccagagac

SEQ ID NO: 27947 - RNA, 85 nt, Homo sapiens
gcgagcccgggcggcaggccaaggacccgaggcaagacagagacacgaagacgagagaagaagaagggaaaacaaaggaaccaca

SEQ ID NO: 27948 - RNA, 83 nt, Homo sapiens
accgggacggaccgagaccggaccgagagcggaccgagagcgcgaaacgcacgagaaggacaaaggccaggaggaggacagca

SEQ ID NO: 27949 - RNA, 81 nt, Homo sapiens
cgagaccggaccgagagcggaccgagagcgcgaaacgcacgagaaggggaaggcagagaccgcagaaggcccaggaaacga

SEQ ID NO: 27950 - RNA, 75 nt, Homo sapiens
cgccgccgccgcgccgcgccgcgccgcaccccgagcgaccgaaaaccgaaaagggagaggagaaagcaaggagac

SEQ ID NO: 27951 - RNA, 55 nt, Homo sapiens
agaaaagggacgggaccaacggggaaccccggccggacacaagagggcaagaaag

SEQ ID NO: 27952 - RNA, 76 nt, Homo sapiens
ccgggagggcacaaagagaacggaagcgacacagaacggggaggggccacccagagcacaacaggacacggacaca

SEQ ID NO: 27953 - RNA, 84 nt, Homo sapiens
cgggccagacccacgcggcgccagcccggcgggaaggaaaaccgcgcagagagagacgccggcccaccagccagcggggagccg

SEQ ID NO: 27954 - RNA, 73 nt, Homo sapiens
aagcggggagcgcccgcgacagaggagggaggaaaacaaccgagggcagagaggacacaaggaacggagagaa

SEQ ID NO: 27955 - RNA, 78 nt, Homo sapiens
ggaaccgcgcgcgcaacccccggccgggggcgagcaccaaagccaaggaagcccagaagaaagagcaccccccggaag

SEQ ID NO: 27956 - RNA, 81 nt, Homo sapiens
caacaccgcacggggagccaagccgcccgggcgcgccaggcacagccaagagcggaccggcagcggccagcgcagcggccg

SEQ ID NO: 27957 - RNA, 69 nt, Homo sapiens
cggccaggaggagccggcgccgcggccgccgcaaggaaacacaacgagaaggcggaggcagggcgcgac

SEQ ID NO: 27958 - RNA, 86 nt, Homo sapiens
agaagagaagaaggcccagaaccgaaagagaagaagagagccagaaagaccccagcaggccccaaggagcggcaagaggaccggcc

SEQ ID NO: 27959 - RNA, 69 nt, Homo sapiens
ggagggggcagaaaacaccgaaagcacaaaacagggagccggcagaacagaggccccagggcaggggcc

SEQ ID NO: 27960 - RNA, 73 nt, Homo sapiens
aagcacgccaacgaccgaaaccacagcgaagggaaaagaagggcggaccagggacgagcgcccccggagaggg

SEQ ID NO: 27961 - RNA, 87 nt, Homo sapiens
ggcgaccggacgcagcgaggacggcgaggcgccaacggcgagccagagcggacccaccagcaagaaacggaggagagaggacaggca

SEQ ID NO: 27962 - RNA, 82 nt, Homo sapiens
ggcacagcgcagcgacgagagggcgccacccgacagagaaaaacaaaagggacagcgcacggagaaaaagacggcgaagagg

SEQ ID NO: 27963 - RNA, 85 nt, Homo sapiens
gagcgcgagacagcgcaccggcggcgcggacgacagcgagacaccgcaccaccaggcaaagggccaagaaacggcagacccgcag

SEQ ID NO: 27964 - RNA, 93 nt, Homo sapiens
ccggggccgcccccgcgcccgggcccgccccggccgcggccgggcccaggagcgaagacaaaacgccggccagacagacaacccccggacacc

SEQ ID NO: 27965 - RNA, 78 nt, Homo sapiens
cggcgcagcggcggggccaggcggggaccgcgccaagaggcgaggccgagacaaacgggagcgcagcaggggccggag

SEQ ID NO: 27966 - RNA, 74 nt, Homo sapiens
agccaccagaaggaagcaaggaagcgaagcacaaaccacaccaaaggagccaagccagcagggagcgcggagag

SEQ ID NO: 27967 - RNA, 69 nt, Homo sapiens
aggccaccgagggaacccgaccggacccagccccagaaggacccacaaaaacacacaagcaccaagccc

SEQ ID NO: 27968 - RNA, 72 nt, Homo sapiens
accaccagaaggacaaaaaccgagcggagaggagaaagagggcggcgagaagaggagcagaaagacagaaca

SEQ ID NO: 27969 - RNA, 73 nt, Homo sapiens
agacacggaacacaaggaagcaaaagcccagaagagggccgcaaacaagaacgacccacacccgcccacaggg

SEQ ID NO: 27970 - RNA, 79 nt, Homo sapiens
cagccacggacgccacagagggaagaccccaagaaccgggcggggcggcccaaggggaagcgggcccggccccgcggga

SEQ ID NO: 27971 - RNA, 67 nt, Homo sapiens
agcaggacacgagcacgggaaggagcccgcagaaaagagacacacaaaggaagcaaagccggaacca

SEQ ID NO: 27972 - RNA, 58 nt, Homo sapiens
ccggcgcggcgcggccaaggcggcagacacgagaggcccacgcaagggacagcggcgc

SEQ ID NO: 27973 - RNA, 71 nt, Homo sapiens
ccacccccacagcacgcgcaacaacagaaggaccagcgaagcgcggcaaacagggaaaaaaagggcgacag

SEQ ID NO: 27974 - RNA, 61 nt, Homo sapiens
ccgcgcgcccgcacccggccgccggggccgcccagaaagggcagcaagacacgaagccgag

SEQ ID NO: 27975 - RNA, 38 nt, Homo sapiens
cccggagcggccgccccagcaaaacccagggaccagcg

SEQ ID NO: 27976 - RNA, 68 nt, Homo sapiens
caggaagaaaacaggaaaagcccccagagaacaacaggaggagagaggaccagaaccagaccggaaag

SEQ ID NO: 27977 - RNA, 53 nt, Homo sapiens
agcgggggaccgaacaaggcaaaaggggggcaacgaggaacaggccaagaaac

SEQ ID NO: 27978 - RNA, 39 nt, Homo sapiens
gacacgcgagccacagcaaagggggcaccaaggcccggc

SEQ ID NO: 27979 - RNA, 62 nt, Homo sapiens
ggccccggcgccaggccacccggccgcagcagcagcaggaagcgaggggaccagaagaagga

SEQ ID NO: 27980 - RNA, 70 nt, Homo sapiens
gagcccagcagcacccgccccccagccaggaccacaggggccggcccgcgggacgcagcaaacaaggacc

SEQ ID NO: 27981 - RNA, 59 nt, Homo sapiens
gcgagcccaaggccaaggacccccgccaccgcccaagagaccccacggaagaaccaaac

SEQ ID NO: 27982 - RNA, 79 nt, Homo sapiens
ccacggcgacacagccaccgccccgcacccgagcgcgggccacccgcccagaagacgaccccgacgcaggccaggagcc

SEQ ID NO: 27983 - RNA, 76 nt, Homo sapiens
aggggcgagggaagcccgggaagggaccggcccaggccccccgccccgcgcagcaggaaacggaggcgaccaggcc

SEQ ID NO: 27984 - RNA, 71 nt, Homo sapiens
aaccaggaccgagaaggcgcagcggaaaggaacccaggacgagaaaaaacagagcggaacaagcggcccaa

SEQ ID NO: 27985 - RNA, 80 nt, Homo sapiens
gacaccggcgaccaagcagcgcccggcgccagacgaaaacaaggccagcgacgacagagacccaggaaaccaaagcaaga

SEQ ID NO: 27986 - RNA, 79 nt, Homo sapiens
ggagcaaagaaaagagcccacaaggaagaacaaagacgagccagacccccaggggcggaaacccccgaaggaagaacaa

SEQ ID NO: 27987 - RNA, 72 nt, Homo sapiens
aacacgaaggaagccggaccccggggaagggccagcgagacagaccgaaacccaaagaaaaggagcgcgccc

SEQ ID NO: 27988 - RNA, 75 nt, Homo sapiens
cgaagcgggaggggcgaaacgaggaggagaaacgcggccgggccgggcgccacaaaggggggagggggccacccc

SEQ ID NO: 27989 - RNA, 53 nt, Homo sapiens
gacgcggaaaaacgcaaagagaacaagcagaggaaagacacgccagagaagaa

SEQ ID NO: 27990 - RNA, 71 nt, Homo sapiens
aacacagaaaccggccccaggagaaccccacaccagaaccgaccgaaccggagcacccgagggaagggaca

SEQ ID NO: 27991 - RNA, 70 nt, Homo sapiens
aggagacagcaaacggggcacaaggacgagcgacaagaagacgaagaagggagacgcgccccgggccaga

SEQ ID NO: 27992 - RNA, 79 nt, Homo sapiens
gagaaaccacaaaacaagaagcacaaaagggcgaaacggaagagagagagcacagggagagaacagggaggcccacacg

SEQ ID NO: 27993 - RNA, 73 nt, Homo sapiens
cgaagagaacacggcaaaccccaaaaacagaaggggaaaagcaccaagcgagcaacagcagaaaagagaagag

SEQ ID NO: 27994 - RNA, 79 nt, Homo sapiens
caacacaagcaagaggccacaaagcaacacggagaccaaacagccagggcagaggacaacagcaaccaagaagacgagc

SEQ ID NO: 27995 - RNA, 57 nt, Homo sapiens
cggaaagaaaccagaagccagagggcgcaagaacccaagggcagaaggggaaagagc

SEQ ID NO: 27996 - RNA, 51 nt, Homo sapiens
cagcgaagcaaaaacacaaccaaacaaggcgcagaagagcaagaccgaaga

SEQ ID NO: 27997 - RNA, 47 nt, Homo sapiens
cccccagcagggaacggccagcaagagggccagccagcaccgcggga

SEQ ID NO: 27998 - RNA, 76 nt, Homo sapiens
ccaaagggaagccaaacacaaaggaagaagcccggagacgaccaagagccaaggagaccgggagagagacgaagga

SEQ ID NO: 27999 - RNA, 75 nt, Homo sapiens
ccagccccaaccgacccagagagaagccagccgcaggcggccagcgggacaaaaccacaaggcaagaagccagca

SEQ ID NO: 28000 - RNA, 62 nt, Homo sapiens
agagaaggcaaaccgagccaaggggaaaacgacccccaggaaaaagaaaaggaccagaaaca

SEQ ID NO: 28001 - RNA, 67 nt, Homo sapiens
cagcagcagcagcagcccccgccccgcgccaaaccccggccagccaagagcccagaacgcccccagc

SEQ ID NO: 28002 - RNA, 58 nt, Homo sapiens
gcaagacgagaccaggagcccaggcccaggagagaggacagaacagaagagagccgac

SEQ ID NO: 28003 - RNA, 77 nt, Homo sapiens
cccacgcagcgccggacaaagcccccgcgcgggggagacccccagcaacggaaggcaccgggagggcggcagggggc

SEQ ID NO: 28004 - RNA, 71 nt, Homo sapiens
gagaagacacaagggaaaagggggaggaagagaagacaacgcacaacaggggcaaagaaaaaggagagaaa

SEQ ID NO: 28005 - RNA, 72 nt, Homo sapiens
aagccacgagacgccgggcgcggcagaggggaaacccagcaccgaggacagggaccaccacacgaaaccaag

SEQ ID NO: 28006 - RNA, 69 nt, Homo sapiens
gacgcagggcgcccccgggaaaacacacgaccagaaggccagagcccaaaacagagcgcgcgggcagca

SEQ ID NO: 28007 - RNA, 79 nt, Homo sapiens
acccccaggagaagagcccaagcagcgccagacaaagagcaaggaaaaggggaaggaacaaaccaaagagcagaccccc

SEQ ID NO: 28008 - RNA, 76 nt, Homo sapiens
ggagaagcggcacggccaaagggcccaagaacgaagggagaagcgccgccggccccgcccagcgggcagcgcccgg

SEQ ID NO: 28009 - RNA, 54 nt, Homo sapiens
agaggaaagcggaaagccaaggaaagaccagcacaggcaagaaacggaaaacac

SEQ ID NO: 28010 - RNA, 91 nt, Homo sapiens
gccacccagacgagcggagaaggcgcgcgcaggcaggcggaggagccaaaacagagggagacgagaaaagggccgagcacaagccaagaag

SEQ ID NO: 28011 - RNA, 71 nt, Homo sapiens
accgccgagaccagcccaacaggaccaggagcgggagagggccagaccaggggagccggacaggaaaggga

SEQ ID NO: 28012 - RNA, 91 nt, Homo sapiens
cggacgaccaggggcacaacgaacacaaagagaacaccagccagacaaacaaggccaagcaacaggagacacaagcagccacagcaagcaa

SEQ ID NO: 28013 - RNA, 72 nt, Homo sapiens
cacaacaggcaggcacaaaacccacgccgggaccaaaccggagccaggcaacccaccagaaaaggccaagag

SEQ ID NO: 28014 - RNA, 37 nt, Homo sapiens
ccgggacgcacgcggagaagcagccgccgcgccaggc

SEQ ID NO: 28015 - RNA, 70 nt, Homo sapiens
cgaggcaccagggaggcaacccaaaaacaggacgccccagggaccaaacaaacaacaccgaaacgagaac

SEQ ID NO: 28016 - RNA, 56 nt, Homo sapiens
ggagacgaaaggggcgaggcaagagagcaaaaaccgaccaggaccccaaggccgca

SEQ ID NO: 28017 - RNA, 73 nt, Homo sapiens
ggagcaagcggggagaaaccgcaaaccaacacagcgggaaagaaagcagccacgagaagacgaaaaaaaagaa

SEQ ID NO: 28018 - RNA, 75 nt, Homo sapiens
gacaaaagggccaaagaagggagagagggcacgaaggcgggaacaccgagccagaagggagcaaagcgacgccac

SEQ ID NO: 28019 - RNA, 108 nt, Homo sapiens
caacccgccgcgcaccgacccgacgcgccggcccacgcgcggccaagaggccggagaggacggaaccaaaaggcccccaggaggaccaccgcgcagcccaagccgcca

SEQ ID NO: 28020 - RNA, 91 nt, Homo sapiens
ccgcggcccccggacagcagaaaccaagcagacaacgcagagggcgacgccaacaaggaggaagcccgacagaaaagggaaggagccgaga

SEQ ID NO: 28021 - RNA, 77 nt, Homo sapiens
ggaaacgcgaggcccagcccaagccagcccgccgccaaggacccagagagaaaaggaacagccgaagccaggggcaa

SEQ ID NO: 28022 - RNA, 51 nt, Homo sapiens
aagacagcccaaacgccccacgaccagaaagccagaggaagaacgcagccc

SEQ ID NO: 28023 - RNA, 86 nt, Homo sapiens
cgggaggagcggcagccgcgaggaggcgcgggagggcgagaacgaccccgagacggccggacaagacgcagagagccgacagaccc

SEQ ID NO: 28024 - RNA, 38 nt, Homo sapiens
gagcagaggaggggcaccagccaggagcaggaacaaga

SEQ ID NO: 28025 - RNA, 56 nt, Homo sapiens
cgaaagaaccggccaacaagagccccagccaccagaacccgaaaccaaacaccgag

SEQ ID NO: 28026 - RNA, 63 nt, Homo sapiens
gcaggagaaggcaggaaaccgacgagaggacccagcccaaggcaaaagcagaccggaaaaccc

SEQ ID NO: 28027 - RNA, 88 nt, Homo sapiens
ccgcgcaccgcagcgccggggcacgacacaaaaacagggcaccgagagggcgcgagggcgcgcacaaccggcccagcaggcacccgag

SEQ ID NO: 28028 - RNA, 78 nt, Homo sapiens
gagcagccgagagacacagcgcgagaagccaaacaagggacagccccagcgccccaggagaccaacaccccacagcca

SEQ ID NO: 28029 - RNA, 73 nt, Homo sapiens
gacgaccgggagacgggagaaaagcgagagaaggcagaaacaaaaaagggagagaaaaagcccggcggggagg

SEQ ID NO: 28030 - RNA, 55 nt, Homo sapiens
ggaacaaaaccagcacccaaggcagccggaaacgagcccaccacaaaccaaacga

SEQ ID NO: 28031 - RNA, 85 nt, Homo sapiens
ggagaacgcgcgcaacaggaaccgggccgcggcgcccccgggcagcaagggggaggcccccaagggacgccagacgggacacgca

SEQ ID NO: 28032 - RNA, 53 nt, Homo sapiens
aacagacgggacccccagccaaaggcaaaggcggagaaccgacgggaaccagc

SEQ ID NO: 28033 - RNA, 69 nt, Homo sapiens
aaagcagacgcaaggggcgaaggagggaaaacggaggaaaaacaaggggcccgggcgagggccccggcc

SEQ ID NO: 28034 - RNA, 84 nt, Homo sapiens
gaacagggggccgcggccaggacggaaacccaggacagccagcaacgcccaggacagcaagacaaaaaagaagcaacgaagcag

SEQ ID NO: 28035 - RNA, 71 nt, Homo sapiens
agggcggaagcccgccccagagcagccccaccagcgcaaagaaccggagcgggccaagaagcggaaacaga

SEQ ID NO: 28036 - RNA, 59 nt, Homo sapiens
ggggcgagaaggcgggaagccgaaggcagccacagaggcaccgaaagcgaaggaagccc

SEQ ID NO: 28037 - RNA, 67 nt, Homo sapiens
gggccacagaccaagcccgcccaggcaaggaaaaggaagggaaaacaagaggaaaaaaccagcaacc

SEQ ID NO: 28038 - RNA, 66 nt, Homo sapiens
ccaagccggaaccaagacggaagcccaagccgcccaaggcagaagcggaggacgcgaaagaggacg

SEQ ID NO: 28039 - RNA, 85 nt, Homo sapiens
agggcgccgccacgccgcaggaggcggaggcaccgccagggaggagagcggggcacgcgcccaacgcgcaagaagcccaccacgg

SEQ ID NO: 28040 - RNA, 67 nt, Homo sapiens
cccaccgccggccacagcgcagaaggagaaaagaagcccccaccgcgaggaagcccccgccccaggc

SEQ ID NO: 28041 - RNA, 71 nt, Homo sapiens
agaaaggcagaagggaagcaaccaaggacaggaaaccaaccgaacaaaggacacaagggcaaaagaaacag

SEQ ID NO: 28042 - RNA, 81 nt, Homo sapiens
gagacagccaagcagcgggaagccagcccaccagagaggggagcccccgagcgcccgcgacgcagcacggacccacaacga

SEQ ID NO: 28043 - RNA, 85 nt, Homo sapiens
aagaaccaaagaaaacaaaaggggacagccaaacagaggaaagagcggagcccgccagaaacagacaccacggggcggacagcca

SEQ ID NO: 28044 - RNA, 74 nt, Homo sapiens
gagacaaaggcaccaggccaccacagaaacaaaagcaacaaagaggggaagggacgcgaagaaccccaaggaca

SEQ ID NO: 28045 - RNA, 76 nt, Homo sapiens
gcccccgaaaagcaaggcggcaagccagaagcaccgaggacagaacaacaggccgcgaacacaaagagcagacaac

SEQ ID NO: 28046 - RNA, 75 nt, Homo sapiens
ccgccaaggcggcgcagcgaccaaaaaaccaaggacgacgggaaaccggacccgcaaagaggaaacaaaagaaaa

SEQ ID NO: 28047 - RNA, 59 nt, Homo sapiens
accccaagccagcccgaacacaccacgcagcacgcaacaggaaaacaccacacacggag

SEQ ID NO: 28048 - RNA, 81 nt, Homo sapiens
gcaggcaaaaggaaaacaaaggcacaggagccacaagaaaccacaaccccagaacgaacaaagacaacagccggaacgccc

SEQ ID NO: 28049 - RNA, 72 nt, Homo sapiens
ccgccgcgcgccacgcgggagcgagaccggagcgccagggccacggcccaccacccggccaggcagcgcgac

SEQ ID NO: 28050 - RNA, 77 nt, Homo sapiens
agaaaagagagcccgggaccgagccaaaaccacagacaaaccaaggagaaacgaaagacggacagagcgggggcgac

SEQ ID NO: 28051 - RNA, 37 nt, Homo sapiens
gaaggacacgcagaaaagagaccggccagccacagag

SEQ ID NO: 28052 - RNA, 76 nt, Homo sapiens
cagaacacggcggagccggcccaggcacacacagagacaccgaaaccgggagagggccaggcgccaaagggggaac

SEQ ID NO: 28053 - RNA, 75 nt, Homo sapiens
aggaaggagggaacgccgcccacccgcagcagcgcagcccggggaggaaccaggagcaacacagagccagcagcg

SEQ ID NO: 28054 - RNA, 81 nt, Homo sapiens
cagaacccgacaagaagcacgaacagcaggccaaagaccagaggggccaccacagagcccgcagggacacagcagaacaag

SEQ ID NO: 28055 - RNA, 93 nt, Homo sapiens
gcggcggggccggcccggagaacaggcccggcccccgggggccggcccccccgggacagagcgaagaaccccccaagaagacgaaacccccgg

SEQ ID NO: 28056 - RNA, 71 nt, Homo sapiens
acccagcacaaacccgaaaaacgagcccaaaaacccagaacagaagacaaagagaggagccgaaggagaag

SEQ ID NO: 28057 - RNA, 50 nt, Homo sapiens
gcgaacaccgaggcccgggcaggccacaccgaaggacacgcagggaccga

SEQ ID NO: 28058 - RNA, 69 nt, Homo sapiens
aacaagcagacccgagacacggggcgagaaggcggcgcacaagggaggaggagccgacaccggcggaca

SEQ ID NO: 28059 - RNA, 70 nt, Homo sapiens
cacccccggcgggcccgaggcggcgagagaggcaggcggagccgaccgggccaggggcacggacagcaga

SEQ ID NO: 28060 - RNA, 88 nt, Homo sapiens
ggccgggaagccaacgaccacacgcaggagcaccgcggacgccccagggcacaccgcgcaccagcgagaggaggagaaccggccaacc

SEQ ID NO: 28061 - RNA, 80 nt, Homo sapiens
ccgccgccaccccgcggccgcacccccgccccagaaaaaaggcagcggaaagaagaaaagaaacggcccacaagacccag

SEQ ID NO: 28062 - RNA, 80 nt, Homo sapiens
ccgcccagagacgcgagcccgccgccgccgccaccacccacccggacacagccgccgccagaccgcggagggaacaaccg

SEQ ID NO: 28063 - RNA, 70 nt, Homo sapiens
gaaaaggaagcggaaggaagcggaaacacaaccgccacgaccaaagacaccaaagaaaggaagaagcaga

SEQ ID NO: 28064 - RNA, 81 nt, Homo sapiens
gacggccgccgacaggagccgggcaggccccgaagcggccaggggcccccagggagagaggaaagggcaggagaacaaaga

SEQ ID NO: 28065 - RNA, 66 nt, Homo sapiens
gagaagcaggcagaagagcacacacgcgccgggccgcaagacagcccgggacaacaccgaggggga

SEQ ID NO: 28066 - RNA, 73 nt, Homo sapiens
gaccgccagcgccgcaagcagcaagagcagcgggaaaggaacggaaaacagaccgaaacaggagaagccccca

SEQ ID NO: 28067 - RNA, 90 nt, Homo sapiens
cggcgcgcggacccaggcgcggaggcgaggccagcaggagacgcagagccccagcggggaggcgcaacacgaggcgccgcagcacccgcg

SEQ ID NO: 28068 - RNA, 78 nt, Homo sapiens
cggcgacagccgacaggcgcggcacgggaggcggaggcgccccgccaggagggcaagcaggcggaccgcccccggcga

SEQ ID NO: 28069 - RNA, 55 nt, Homo sapiens
accccagaagaccggccccgcaaccacgaaaagagcccaccacaaaccaaacgag

SEQ ID NO: 28070 - RNA, 77 nt, Homo sapiens
ggagggcggggcagagcaggggccggaagcaccaggacagggaggagggagcgccaccgccaggccccgaccgaagg

SEQ ID NO: 28071 - RNA, 79 nt, Homo sapiens
gaggaggcagcggagacagaggcggaagcgcagcccagagacaccgagaacagcagcaggaagcgcccagccaccagaa

SEQ ID NO: 28072 - RNA, 80 nt, Homo sapiens
ggagccggcgaggggaagaccaagacaggccggaacccgaaaggacaagggccacagaccgccccacgaccaggaggagc

SEQ ID NO: 28073 - RNA, 67 nt, Homo sapiens
accgagcccaggagcgccacgcgcggaaggcagcgcccagcagcgcaggcccagaccgggggacgca

SEQ ID NO: 28074 - RNA, 77 nt, Homo sapiens
agggaaggccagcagcgcgcggagaagaacggggagccagggcggagaacggaaaagcaccaggaagcagagaggac

SEQ ID NO: 28075 - RNA, 63 nt, Homo sapiens
ccagcgccgagggaaggcgccgcgccaggccggggggcgaacagccgaggcacgcaagccaaa

SEQ ID NO: 28076 - RNA, 83 nt, Homo sapiens
gagagacccgcggacagccaagcgcccaagcacgagcacggaggagcgccagaaaggaggagcaaggaagcccaggaacgaga

SEQ ID NO: 28077 - RNA, 67 nt, Homo sapiens
cgcccgcagagcaagcgcggggaaccaaggagacgcccggcacgcagggcggagaacggaaaagcac

SEQ ID NO: 28078 - RNA, 65 nt, Homo sapiens
gaccaagaaccagagaaccacgagcaacccaaaaggcggggagaaggccaagaagcaccagaaga

SEQ ID NO: 28079 - RNA, 76 nt, Homo sapiens
gggagcccgggcaccaggagcacgcgacagcgaggaagcgcaccacagcacaaaagggggccggaagcccccggcc

SEQ ID NO: 28080 - RNA, 72 nt, Homo sapiens
gggcacggccggaggacaacccagaaaagaaaaggccaggggcgccgaaaaacccgggaacaaacagggggg

SEQ ID NO: 28081 - RNA, 78 nt, Homo sapiens
cgcggccaagacccgccgcaaggaacggaaggaaagaaaaaaaggaggcgacacaggaagaaaggacagaaaacaaaa

SEQ ID NO: 28082 - RNA, 76 nt, Homo sapiens
gacccagaagccaacacacagagaccacacaaaggccgaccaaggaaccaaagcgaggccccagcccccagcacca

SEQ ID NO: 28083 - RNA, 71 nt, Homo sapiens
ccgcgcccgccgcgggagagaggacccccccccccccccaagaggacggaagcaaagggcagccaccgaag

SEQ ID NO: 28084 - RNA, 69 nt, Homo sapiens
accaagcccgggagcagccaacagcagaagggcaggacccgaggcgccagcagcagcaagaccggggga

SEQ ID NO: 28085 - RNA, 73 nt, Homo sapiens
cagccaagggaggaaaaggaagcaaaaggcacacgaaaggaaaggacgagaccgaagagaaggaaggacagcg

SEQ ID NO: 28086 - RNA, 63 nt, Homo sapiens
caccaaagggggccaaggcgcagaaggcccgacaaagggaaccgacagaacggagaagcagaa

SEQ ID NO: 28087 - RNA, 74 nt, Homo sapiens
ccgggacacaccccaggaaaaagacagcccgcagcacgaccagcaggaacgaggccccacagacaaaaccgccg

SEQ ID NO: 28088 - RNA, 70 nt, Homo sapiens
gggagcccgcgcccgccgcgggagagaggacccccccccccccccaagacgacacaagcccacacaagga

SEQ ID NO: 28089 - RNA, 57 nt, Homo sapiens
aacagcaggccaaagaccagaggcacccacccgcgagacccccaagagacaaaagaa

SEQ ID NO: 28090 - RNA, 71 nt, Homo sapiens
cggccggaggcaccagcgacgaacgcaaccccaagcagaaaaggcaacgccgaagagcccgcgccggaccc

SEQ ID NO: 28091 - RNA, 80 nt, Homo sapiens
gaaccagggccgagacaccccggaccccggggaacaccgaggccagggggagccgaccggagcggaaccccggggcgagg

SEQ ID NO: 28092 - RNA, 53 nt, Homo sapiens
acagaaaccggcggacacacacccacgggaaggaagaaagcagagccacagaa

SEQ ID NO: 28093 - RNA, 76 nt, Homo sapiens
agcaaaaagaaaaggaaagacgccgcaccaggacccaaggaaccagaaggcagaaacccccaggacgacgaacaac

SEQ ID NO: 28094 - RNA, 77 nt, Homo sapiens
ccagggcagaggagaaaaaccagcggcagcagaagcagcggccaagaacccaggcacgcaagaaaggggcccgggag

SEQ ID NO: 28095 - RNA, 69 nt, Homo sapiens
cagaaccccggccaaggaggggcaaaaacccggccaggaggacccccaaaaagggcacccgcgccagac

SEQ ID NO: 28096 - RNA, 76 nt, Homo sapiens
ggaacaacggcgccggaaaaacgggagaaacggcccagagccgcagaagccaggaggaaggaacagggggagagag

SEQ ID NO: 28097 - RNA, 84 nt, Homo sapiens
gggggccaaccggacccgcaagcagcccaccacgccacaaacgccgcaccaggcgagcagcgcccccgagacaggaggcagggg

SEQ ID NO: 28098 - RNA, 79 nt, Homo sapiens
ccgacgcaaaccaaggacggggaccgcacacccaagggcggagaacggaaaagcaccaggaagcagagaggaccgcaga

SEQ ID NO: 28099 - RNA, 68 nt, Homo sapiens
aaagcacggaaacgcgcaacggcggaagacccaccacaagaaggagagacgcagagccagacaagacc

SEQ ID NO: 28100 - RNA, 77 nt, Homo sapiens
cacgcgcacgccaccacgagcacacacaagacaagggcgcgcgaggaccaaggggcagagcgccacgggaggcacag

SEQ ID NO: 28101 - RNA, 74 nt, Homo sapiens
aagccagagcgagcaccaggagcacgagcgaagacagcaggaggggacaagaacccaagaaacaggaaaaaacc

SEQ ID NO: 28102 - RNA, 52 nt, Homo sapiens
cacgccagaaagaggagaaaaaaaccgccagagggacacaggcaaaacggac

SEQ ID NO: 28103 - RNA, 71 nt, Homo sapiens
ccaaaggcgggaacagggaacggaggggaaaggaggaccaggcaaagaggccgcaaagggcagaccgacga

SEQ ID NO: 28104 - RNA, 78 nt, Homo sapiens
cgagcgagggggggcgcgccggaaaccggagcgcgcagcaggcgccccccacaacacagcggcggagacaaggggcaa

SEQ ID NO: 28105 - RNA, 72 nt, Homo sapiens
aaggaacgaagcaggcccaggagaaagcacaggacagagggccgcgggagggaggggcaagaaaagacggca

SEQ ID NO: 28106 - RNA, 84 nt, Homo sapiens
ccaagaaaccaggaaaaggggcagcaaaggaaacaccgaagcaaaaagaagcccggcagaagacagagggagaacgagaggaac

SEQ ID NO: 28107 - RNA, 79 nt, Homo sapiens
agcggcgcagggcacgggggcgccaccggcaaacaacaggccgacacccacacgcggaacgcagagaccagagagaaac

SEQ ID NO: 28108 - RNA, 74 nt, Homo sapiens
aaggccccaacaagaagagacaggggaaacaagaccgagagaaacaggccagaggaggaaaggccagcaccacc

SEQ ID NO: 28109 - RNA, 75 nt, Homo sapiens
gaaacccgcgcccggcgaccgaggcccccgcaggggccgcagcgcgagagggggggacaccggcggcacccaccc

SEQ ID NO: 28110 - RNA, 77 nt, Homo sapiens
agaccggcgacccgcgacgccgagcacccaggcgacgcccaccaagacaagcagaccggaagaccgacggaagacca

SEQ ID NO: 28111 - RNA, 70 nt, Homo sapiens
gggcacaagcgggcacccacgcaaaccaggaacaggaaaagggaggcaaagacaaccagaaacccgccac

SEQ ID NO: 28112 - RNA, 60 nt, Homo sapiens
caaaggaaagcagcgaacaccccagcggagaggccaaggcgcagccagacgacccaggag

SEQ ID NO: 28113 - RNA, 77 nt, Homo sapiens
ggaggcggcccagcgacagcccgcggcaacaggcgggggagcgggaggagccagagcacaccgcaccacggccacag

SEQ ID NO: 28114 - RNA, 72 nt, Homo sapiens
agaagagcagggggccgaaaggaacccagcagaagccagccgccacgccgagccagccagcaccaaccaacg

SEQ ID NO: 28115 - RNA, 81 nt, Homo sapiens
acagagcagacggaagcggccaagaccaggcaagaacggcgcacgacaaggacagacaagcagacggggccgccacacgcc

SEQ ID NO: 28116 - RNA, 75 nt, Homo sapiens
aaaaaaggcacggcacccccacgcaccaaacgacagccaagaacgagccaacgccccagcagcagagcagcgagc

SEQ ID NO: 28117 - RNA, 81 nt, Homo sapiens
agacgcaaaaccccaccaggagggcacaggaagacacaccccgagacgccaaggcaggaaacagagcaaagcagcgacaac

SEQ ID NO: 28118 - RNA, 74 nt, Homo sapiens
cgccgccgccccgccagcgccagacggacgaggcggcggagaacaagcggcagggccggccaacaaaagcccgg

SEQ ID NO: 28119 - RNA, 63 nt, Homo sapiens
aacaagcacccgccgggccgaaccggaagggcaaggcccggccagaccggagggccgggagga

SEQ ID NO: 28120 - RNA, 43 nt, Homo sapiens
gccggcccggacgaaggggaggagcacagaacgccaggaccaa

SEQ ID NO: 28121 - RNA, 81 nt, Homo sapiens
cccccccccgggagcgaggaacaggacgcagggaggacgggaccacccaggaggagggcagcagcggagccgcccagaagg

SEQ ID NO: 28122 - RNA, 80 nt, Homo sapiens
cgggagcgcgagcggccaggccggcgccggccggcgccccggggcccaagaacagaccacgggagaaaaacaagaaacag

SEQ ID NO: 28123 - RNA, 78 nt, Homo sapiens
cggcaggcaggaaaacgggagaacacgacaccggcgaggaacggcagccaagaagaggaaaccagaacacggcaagag

SEQ ID NO: 28124 - RNA, 102 nt, Homo sapiens
cgccgcccgagcgccgagaaagccccgggagaagcagcgccgcccggggcagaccaggcagaccagagacaaggccccgagggaggagcccgaaggcgcacg

SEQ ID NO: 28125 - RNA, 73 nt, Homo sapiens
cgcgggggccgacaacccaaggaccagcagcagaggaaaaaagagaccgagagaaagcagcagaaagggggga

SEQ ID NO: 28126 - RNA, 41 nt, Homo sapiens
ccggcgccggagacgagccgggggcccaggcaggcacagga

SEQ ID NO: 28127 - RNA, 55 nt, Homo sapiens
aggacagccaaagccacaacaacggcagccaagggcagggcaacgccagaccggg

SEQ ID NO: 28128 - RNA, 52 nt, Homo sapiens
ccggaccgaccagggcagacccaggcaccaagaaacgaaagccgaaggccga

SEQ ID NO: 28129 - RNA, 70 nt, Homo sapiens
ccagggaagacccgcgaaggaagggacaaccggaagcaaaaccgagaggacaggccggcgaggagagaca

SEQ ID NO: 28130 - RNA, 40 nt, Homo sapiens
agccaacgaggacgagggagagacggggcgccggagccag

SEQ ID NO: 28131 - RNA, 58 nt, Homo sapiens
cagacaaggggcacacaagagcagaaggcggagggaaagaaaccccagccgaacaaag

SEQ ID NO: 28132 - RNA, 82 nt, Homo sapiens
caaccaccaaaggggaaacagaaacaagccccggaacagagacagagacacggcacaccgcaggaggaaccccaggccccca

SEQ ID NO: 28133 - RNA, 81 nt, Homo sapiens
gcgccgagggggcggaaacagacccggcgcccagcggagcccccgcgccccgacccaggacgcccgccccagggagagccg

SEQ ID NO: 28134 - RNA, 53 nt, Homo sapiens
ggcgcacccaaacaacgcacacaggccgaagacaagcaaccaacccgaacgga

SEQ ID NO: 28135 - RNA, 74 nt, Homo sapiens
ccacagagacccaagagaagaggccagggcagcagagcacggagggcaggagccaacacagggacgagacccgc

SEQ ID NO: 28136 - RNA, 64 nt, Homo sapiens
gccggaggagccagagcgcagaaagcccaggagccagcagagaagggcagcggacgacccgcgc

SEQ ID NO: 28137 - RNA, 70 nt, Homo sapiens
gaggagcggagaaccaggaaccgcgcagggaagcaggggcaaaagaaaagggccgcggagacaagagaag

SEQ ID NO: 28138 - RNA, 67 nt, Homo sapiens
aggccgcaggaggcagcagccccgaagagaaacacacggacaacaaacggcggaggcaaggcgcgac

SEQ ID NO: 28139 - RNA, 75 nt, Homo sapiens
gggcaaccacggggcggcgccggccccaaggagaggggcaaagaccgcggcacggccaggcgaacacacacaaaa

SEQ ID NO: 28140 - RNA, 72 nt, Homo sapiens
ggaaaaggacaccaaagacagaggacagacccgagacagccacgcagagccgccccggccacagcggcaacc

SEQ ID NO: 28141 - RNA, 79 nt, Homo sapiens
ggggacacgggccgcgcgaaaaagcaggagagagccaaaacgacaggccagggaagaaaacaagaaggccaaagaaggg

SEQ ID NO: 28142 - RNA, 73 nt, Homo sapiens
ggacaggcagggaagcaacgcagagggaaggcccaaaaccacacacccccgacaccgcgaggaaggcaaaaac

SEQ ID NO: 28143 - RNA, 73 nt, Homo sapiens
gagaaggcagggcaaaccagaaagacgggaagcgagacaacagagggagacgccaaagcacccaaagacgcca

SEQ ID NO: 28144 - RNA, 53 nt, Homo sapiens
ccagccgcccggccagcgcgcgccggcacccgcacaacccagggggccgaacc

SEQ ID NO: 28145 - RNA, 105 nt, Homo sapiens
gccaggccgcccccaggagaaggagcgagcgcaacagccggcgagagaggaggaagacccccaagagcagagcccacaaaagaagagaggaaacaacccgacgag

SEQ ID NO: 28146 - RNA, 78 nt, Homo sapiens
cgggcaggacaaccaggggaccagagaggacggcaccagccaggaggcgaaccccggcccccagcccggaggcgccgc

SEQ ID NO: 28147 - RNA, 77 nt, Homo sapiens
agagagggaccggaaggcacgaacccacaggagggccagaggacaaagcacggcggaagagaagccagccgccggcg

SEQ ID NO: 28148 - RNA, 77 nt, Homo sapiens
cagggaacccggcaccgccccagcccgccgacacagccaccaagaaggcacaagcagaacgggaaaaggggcggaaa

SEQ ID NO: 28149 - RNA, 83 nt, Homo sapiens
ggcggacgggaaggcgggagacgagaagccgaaaagcgcagcgagcggagccgccggagacacgccaaaggaaggcagcaccg

SEQ ID NO: 28150 - RNA, 80 nt, Homo sapiens
aagagggagcagggaaagaagaggagccgcagccaacaagcccaggacaaagcagcgacgcggcagggggcccagaagcg

SEQ ID NO: 28151 - RNA, 49 nt, Homo sapiens
gccccacgacacaagcagagaacaaagaaggcccccacaacccaagcac

SEQ ID NO: 28152 - RNA, 83 nt, Homo sapiens
agcagcgacgggagacagccgggcgcgcaagcacggggaccaacagcggccgaggccagggaagagacggcgcccagcaaagg

SEQ ID NO: 28153 - RNA, 81 nt, Homo sapiens
ggccacccgagaagggagacgacgcgcgggccgcgagcggggcgacccgaggggagcgaacgaagaaaggccaagagggag

SEQ ID NO: 28154 - RNA, 69 nt, Homo sapiens
ccccccgcgcgggcgcaagggacgagagacaaagaggcacgaggcggagaaacgcagaagaaaggcaag

SEQ ID NO: 28155 - RNA, 62 nt, Homo sapiens
gagcccaaacaccaccaccaaggggagcaccaggcacaagccaaaaaggggaaagccgaaaa

SEQ ID NO: 28156 - RNA, 75 nt, Homo sapiens
gcacaaacaggaaggagagaaaccaagcaaaagaaggacagccgggagaaggacaagcaggcaggagcacagggc

SEQ ID NO: 28157 - RNA, 80 nt, Homo sapiens
aagccggaaaaagggaagaaggcaaagccgcaaagagccagccggggggcacgaacaacaagacaagcaaccaagaaagc

SEQ ID NO: 28158 - RNA, 80 nt, Homo sapiens
gcaagcggcccacagcaggacggaagcgagggcacgggcggcagcccgagaccgcagcaggaaggccagaacacccgacc

SEQ ID NO: 28159 - RNA, 71 nt, Homo sapiens
cacgcccagcagccaccaacacccaaagacagaaccgcaaggccacaaaccagacggaagcagccacagag

SEQ ID NO: 28160 - RNA, 68 nt, Homo sapiens
gcacggcagcagcacaggaagaacgaagcgcgcagaaaacacagaaggcaaaagcgcaaaaacaaaac

SEQ ID NO: 28161 - RNA, 79 nt, Homo sapiens
cgggcccggccgccacccgggaaagacaggccgacagcggcacggaaacagaagagacaaacaccgcacagaaagaaca

SEQ ID NO: 28162 - RNA, 76 nt, Homo sapiens
agagcaagcccccgacagccagccagacccccaggcagaggaaacgccaagagcgagcggacgaggagcccggaag

SEQ ID NO: 28163 - RNA, 58 nt, Homo sapiens
gccggggaccgccaaccccccaagaagcagagaaagaggaagagaacaggaaagaaac

SEQ ID NO: 28164 - RNA, 64 nt, Homo sapiens
gggcagagaaaggccagaggagaaacaagaagacagggagagagcccgcccagaaccaccccca

SEQ ID NO: 28165 - RNA, 78 nt, Homo sapiens
caagcccggggccggccgggggcacacagggcggaggacccggggccccgcccccaagcgggacggccagcagaagca

SEQ ID NO: 28166 - RNA, 68 nt, Homo sapiens
ggaccagcaaggcggcagagcaaggggcacgcagaaggaccggccacgacagcccgccagccagccca

SEQ ID NO: 28167 - RNA, 77 nt, Homo sapiens
ccccgccacgccgcccgcgccgaggacgcggagcccagcaaggccaaaacagaagaggcaaagcccagccacagcag

SEQ ID NO: 28168 - RNA, 55 nt, Homo sapiens
gccggggacgggagcgagcgggaggcccagccccgacggacagaccaacgggaca

SEQ ID NO: 28169 - RNA, 81 nt, Homo sapiens
cacgagcgggcaccagaggggaaggggcccggcaccgcggccagagcgagagacacgaacacccagccaacaacgggaaac

SEQ ID NO: 28170 - RNA, 70 nt, Homo sapiens
gcccccgcgccgggcgcagcgaggagaggaagacaccccccccaccgaaagaacccgaacgggagcaagg

SEQ ID NO: 28171 - RNA, 75 nt, Homo sapiens
gcgcgggacaacaacccccaggggacggaaggacggaagacggcccagcgaaacaggaacaggggacggacccag

SEQ ID NO: 28172 - RNA, 68 nt, Homo sapiens
accgagggaccagcagcagccgcccaaaacacaaaccaaagaagaaacccgaaggaccacagagaacc

SEQ ID NO: 28173 - RNA, 88 nt, Homo sapiens
gccagccacccaaagccccaaggagaagaacggagacgaagagaagaaggagagggccacggacagccaagcaccccaggaggccccc

SEQ ID NO: 28174 - RNA, 83 nt, Homo sapiens
agaagggaagaagacggcaaaagcaacagaggcccaagaacaggcacagaacgaaagggaggggggaagacagggcccagcac

SEQ ID NO: 28175 - RNA, 81 nt, Homo sapiens
cagacccacaacgaagaagaacagccacgcagggcaacagcaggcgggacacggggcgacccacccaaaagccccacgggg

SEQ ID NO: 28176 - RNA, 69 nt, Homo sapiens
aacagcaggaaagcacagaaccaccgaccagagaacaaagcgcaaaagaagcaccgcgaggagaccaac

SEQ ID NO: 28177 - RNA, 85 nt, Homo sapiens
agccgccccccaccgcccgggcccgaggaggcagccaagccgggccgcccgcggcacagagaagcagccaggccacacggagcag

SEQ ID NO: 28178 - RNA, 67 nt, Homo sapiens
aaacaccaccacaacaaaagccaaaaacagacggagaagagcaaagaggagagacaccggagaggag

SEQ ID NO: 28179 - RNA, 69 nt, Homo sapiens
gaaagggcaaaagcggcaaagggaaaaaggcgagcaaggacccagggagagaggaacccaacaagaaga

SEQ ID NO: 28180 - RNA, 57 nt, Homo sapiens
cggacggcgggccaggggacacggaaaagaaggaggccagcgggacacacaaagaaa

SEQ ID NO: 28181 - RNA, 61 nt, Homo sapiens
cccccccaacaccgcgacacgcagaacccccagaccgacccggaggagcggaggagcggag

SEQ ID NO: 28182 - RNA, 70 nt, Homo sapiens
aggaaagaccggaaaaggccgcccaagagaggccccacagaaccaggggaccacaaaccaaacgggacac

SEQ ID NO: 28183 - RNA, 77 nt, Homo sapiens
gccgccacccggcgcgaccgcccggcaccgggagaaccaccgccaccgccaccaggagacgacccagcgcggggacc

SEQ ID NO: 28184 - RNA, 76 nt, Homo sapiens
aagaggggccagcagagcaggaaaacgaagaaggcaaaaccaagaggaaaagagacacaaggaacacaacaggaaa

SEQ ID NO: 28185 - RNA, 69 nt, Homo sapiens
aggagggagaggagggacgggacgggagcgcggccgcggaggaccgcccgcgcagagacaacaccgcca

SEQ ID NO: 28186 - RNA, 58 nt, Homo sapiens
caaccgcgacccaaacacccaacgagacgggcaagaaaaccccaaagaaggcccccgc

SEQ ID NO: 28187 - RNA, 75 nt, Homo sapiens
ccacggccaggcaaaccggacagggagacggcccggcggcccggaggacaggacccaggcccaggcggaagaacc

SEQ ID NO: 28188 - RNA, 68 nt, Homo sapiens
ggaccaagaaccagcggaccagcagacaacaggacaggcaacaaggaagaccaacggagaagccagac

SEQ ID NO: 28189 - RNA, 81 nt, Homo sapiens
cggaaaccggaccggaacaaggggaggagccagccagagggcaaagcggcgaccaggcaaaagacgaccaggagacacaac

SEQ ID NO: 28190 - RNA, 64 nt, Homo sapiens
ggaaaacccagaaaacagcggaccagaaccgggccgacgccaggggaaagcggggcagcaaggc

SEQ ID NO: 28191 - RNA, 87 nt, Homo sapiens
cgaggcgcagcagcaggaggaggaccgcagcaagcagaaaaagccaccggagcgaagcgaaggaagcgaggacaacaccgggagagc

SEQ ID NO: 28192 - RNA, 69 nt, Homo sapiens
aaaagggccaaagaagggagagagaaaacagccaacgcccggaaccgcaaagcgacggaccagaggaag

SEQ ID NO: 28193 - RNA, 84 nt, Homo sapiens
aggaaaacaagaggccccagagggaaaagaagcccaaagaaagcccgccgacacagccaccaagaaggcacaagcagaacggga

SEQ ID NO: 28194 - RNA, 65 nt, Homo sapiens
gccgccgcgcgccgacgcgggaaaccccccccaccccaccagggcgccaaagggggaacaaacga

SEQ ID NO: 28195 - RNA, 64 nt, Homo sapiens
ggcgcgggcaggagccggcgaggagcaccccccgccggaaaggagcagcaagcagagacagaga

SEQ ID NO: 28196 - RNA, 64 nt, Homo sapiens
ggaaggcaaggaagcgcacgaaggagaaagaagaaagaaacacaaagggagcagccacgcgaac

SEQ ID NO: 28197 - RNA, 77 nt, Homo sapiens
gaaaccacggagcaccgaaggcccgggggcacgggaggaggacgacccaggaccggggacaggagcacagcgggccc

SEQ ID NO: 28198 - RNA, 74 nt, Homo sapiens
gaccgaacgccgccggaccccgggaggcgaggacggccgccagaaaagcaggacgggaagcaaggaccagaagc

SEQ ID NO: 28199 - RNA, 73 nt, Homo sapiens
cacagcacaaaagaacaggacaagaaaaacaggaggacccaacagacaacgaagagaggaaagaagcggaaag

SEQ ID NO: 28200 - RNA, 85 nt, Homo sapiens
cggggggacagcccgggaccggccgaaaggcgaggaaccggggacccaacaagccccaggacagaaggaaagcccgcacaaaggg

SEQ ID NO: 28201 - RNA, 67 nt, Homo sapiens
ccagccgccgcgcccgcccgacccgccaccgccaggccagaaacccacaaaccccagagcaagccaa

SEQ ID NO: 28202 - RNA, 37 nt, Homo sapiens
cagacccccaccaagcagggaaggcaagaagaagaac

SEQ ID NO: 28203 - RNA, 126 nt, Homo sapiens
agagcgagaccacaggagccagggcggagagaaaacccgcgaggaaagggaaggagcaagccggaggaagcaccaaccgcccccaggggcagcggggagcgggggccgcaggcaaggccgaaccga

SEQ ID NO: 28204 - RNA, 68 nt, Homo sapiens
agaaaggcgcgagagcacgcaccgaagcaaaaccaacgcaaccaccccaggcgcccagacgagcccac

SEQ ID NO: 28205 - RNA, 90 nt, Homo sapiens
cgaacgaggcgagaacgcgcagaccggggagggaaagaaagaggcaggggaagcacaaaagcgcacccgcgccagcgaggaccggaacgg

SEQ ID NO: 28206 - RNA, 79 nt, Homo sapiens
gcgcaggcagaccgcaggcgcaaggccaggcgacccgacgggccaccgggggaccgaggacacgacgaaaaaagcaaga

SEQ ID NO: 28207 - RNA, 80 nt, Homo sapiens
gcccccagcaccggcccaaggccacaccggacacgaggacgcacagaagggagcgcagcagggcgaggccagcgcgcccc

SEQ ID NO: 28208 - RNA, 79 nt, Homo sapiens
agcgcccacagaacccgaagaagccgagggccccgaaggaggacgaggaagggagaccaggaaagacagagcagagaag

SEQ ID NO: 28209 - RNA, 74 nt, Homo sapiens
gcagcgggcaaacagcgggggcgccgaccgcaggaaccccgagcccccggggcaaggccacccagcaggagcgc

SEQ ID NO: 28210 - RNA, 78 nt, Homo sapiens
acagccagcccagcccgccccggcgccccaaccccggcagccccaggccccggagcagacacagcccaccggccgagc

SEQ ID NO: 28211 - RNA, 75 nt, Homo sapiens
gaaaggagaggcacagcaaggcaaggaagacacaaggagcgcgaaaagaacgccccaggagagagaaccgccaac

SEQ ID NO: 28212 - RNA, 53 nt, Homo sapiens
cgaccgggggggcggcacgggcagcggagggaggcgcccggccaccccaagcc

SEQ ID NO: 28213 - RNA, 72 nt, Homo sapiens
agacaccaagcccacgaaagcaccggcaaagggcgaaaggcaaaccaaaagggacccgaagacgaaaacggg

SEQ ID NO: 28214 - RNA, 76 nt, Homo sapiens
cgccgcccaggacgcacagagagagcgcccgaagacgaaagcccaagcgcaaaaaaaaggccccaacaaaacacag

SEQ ID NO: 28215 - RNA, 63 nt, Homo sapiens
gcagaaaagacgagacaggaaagccaggccagaagaaggaaggccggggaggggacaggaaag

SEQ ID NO: 28216 - RNA, 73 nt, Homo sapiens
cggagagaggacaaaaggaaagaaaaccaggagaacaacaccggaagaagacaagccagcgccagggagcaca

SEQ ID NO: 28217 - RNA, 62 nt, Homo sapiens
agggcggggaggagccgccgcgcccagcccgaggacagcccaaggcggaaaagcgaaggaag

SEQ ID NO: 28218 - RNA, 71 nt, Homo sapiens
aggaaaccgcaccgcccggagggaaaagcgagacacagcagaacaccggaggggcggaccagaacaacccc

SEQ ID NO: 28219 - RNA, 73 nt, Homo sapiens
ggaggagccagggagcccagcacaggagcaccagaccgcaacaggagcagacggagaaagagaccacgagccc

SEQ ID NO: 28220 - RNA, 103 nt, Homo sapiens
ccaccaacacaaggaaacaaacaacaaaaacaaaagccagaaaaccccaaagcaaacggcaccaacggacaaccaggcacgggacaaccagcacggagcagag

SEQ ID NO: 28221 - RNA, 73 nt, Homo sapiens
gggggaggcgcacacaaacggcagcgcccggagaggaagaggcaagccggagaccgggacgagcagggccacc

SEQ ID NO: 28222 - RNA, 74 nt, Homo sapiens
agccgccagcacagccaaggaacagaaagaagaaaaggaacccggccgagcccaaaaacaggcccggcaccgag

SEQ ID NO: 28223 - RNA, 87 nt, Homo sapiens
agaccagcccgcagaggccaagagaaagcccgaagcagaagggcacaccggaagcagaagagagacgccggcccaccagccagcggg

SEQ ID NO: 28224 - RNA, 75 nt, Homo sapiens
aaagcagaaaaagacgaccagagaagcaggggagccagacaaccgaaagggaccgcccgagccgagccaccaccc

SEQ ID NO: 28225 - RNA, 88 nt, Homo sapiens
acagccgcgacagacccgcccagagggccagagacccagaccgcaacccaccaaggagcacaggacgaagaggaaggaaaaaacaggc

SEQ ID NO: 28226 - RNA, 77 nt, Homo sapiens
ccacccgcgccagagaccagaaaagaccgacagcacgaggaggagagaagaaaagcggcccgagacaacaagggcag

SEQ ID NO: 28227 - RNA, 73 nt, Homo sapiens
gcaagcaggaaaacgcagagaaaaaacagaccaggggaacccagggggacccagaacaagaagaacaagagga

SEQ ID NO: 28228 - RNA, 94 nt, Homo sapiens
gggagggaaaggcgaccgggggagccgcccccgacacggcccacgagccccagcccccagcagccgacaggaggcccgcaagagcaggcaggca

SEQ ID NO: 28229 - RNA, 73 nt, Homo sapiens
gcaggagcccagcaaagccacagcgcggcccgggcaggaagaaaccggaaaacaggggagcggcgacagacac

SEQ ID NO: 28230 - RNA, 71 nt, Homo sapiens
caagaaaccagaaagagaacgggacaacaaaagagccacccaaggggggccaaaggaaaaggagaacaaca

SEQ ID NO: 28231 - RNA, 84 nt, Homo sapiens
acggcccgcgcgcccagggagaagggcccccgaccccaagccgccacgaagggccaccgggcacggagcgagcagaggaggagg

SEQ ID NO: 28232 - RNA, 62 nt, Homo sapiens
cgggcacacggggaagggacacaggacacaggacagaacgggccgggcaacgcggggcgagc

SEQ ID NO: 28233 - RNA, 77 nt, Homo sapiens
aaaaacaagaagggaggagaaggcccagagggaacccaccagaaaacgacacacaaacgcagccaacccaaaaagag

SEQ ID NO: 28234 - RNA, 71 nt, Homo sapiens
cgaaaaacaaaggagaaaagcgcaccagaaccacccagcagaggaggaaggagcacgcacaggccacacac

SEQ ID NO: 28235 - RNA, 68 nt, Homo sapiens
aggcaccaaggaccaagggcccacagggcaaaagaccgaggaggaaaagaaagcagagagaagaccac

SEQ ID NO: 28236 - RNA, 74 nt, Homo sapiens
agcacccacaaagcaacgggaacaaagagcagaggccagcagccaccgacagcccgcggcgaggaaaagcccag

SEQ ID NO: 28237 - RNA, 79 nt, Homo sapiens
aggcccccaccggggcaggaaaggaggaaaggccccagccccaagggccgcagcgagcgggcccgccggacaccaacca

SEQ ID NO: 28238 - RNA, 81 nt, Homo sapiens
ccaggcccgggggcggcggccacgccaaggacggaacccaggagaaacgagagggacagcaaggaagacgccagagagcgg

SEQ ID NO: 28239 - RNA, 82 nt, Homo sapiens
aacagggcaaaggagagcacaaccacgcagggaagcccaggggcaggaccagcccaacggggacccagcaggaccaagccag

SEQ ID NO: 28240 - RNA, 71 nt, Homo sapiens
cgccgcggggccgcggcgcgggccggcggagcgaagcgccggcggcaaggacgggcggaacgcgacaaaca

SEQ ID NO: 28241 - RNA, 76 nt, Homo sapiens
gggagcggccgcgaccccggcccgcgggaaaaagccaccccgaacagcgcagacaacacccgcgagccccgagcga

SEQ ID NO: 28242 - RNA, 40 nt, Homo sapiens
gggaggaggccacaccaagccaggaggacgggaaagaccc

SEQ ID NO: 28243 - RNA, 74 nt, Homo sapiens
caaccacgacgaagcggaaggcagaagcagaccagagcaaaaaagacacaggcagagagggaaaaggcaacagg

SEQ ID NO: 28244 - RNA, 37 nt, Homo sapiens
gaccagaggagcagaagcagacagagaagaagcaggc

SEQ ID NO: 28245 - RNA, 77 nt, Homo sapiens
caaggaacaagggcaaggggcgacagcaagaaggagccagcacagaggcaaaagaaccaacaaaggccaaaagagga

SEQ ID NO: 28246 - RNA, 72 nt, Homo sapiens
aacaccaacaaaagcacacaaaaaacagcacaaagcaagccagaagaacacacacacagcacaggaagaaag

SEQ ID NO: 28247 - RNA, 76 nt, Homo sapiens
cgccgccacccacaaggcacaacaggaagagaccaggggagcccagcccccgcccggagcgcagagggaaacggcc

SEQ ID NO: 28248 - RNA, 75 nt, Homo sapiens
cggaaagggggggcacgggcccagaagggggagagcaaggaccgcgacgacagcgaagacaagccgcaccggaga

SEQ ID NO: 28249 - RNA, 73 nt, Homo sapiens
ggccgggcccggcagccccgacgcagccgggaaggcaaacgaacacgcgcagcgcagaggcccggcagcccca

SEQ ID NO: 28250 - RNA, 38 nt, Homo sapiens
caccggacacccgcggcccgaaggaggcgccaagggag

SEQ ID NO: 28251 - RNA, 38 nt, Homo sapiens
aacagacagacaggcccagagaccgacagaaaggacaa

SEQ ID NO: 28252 - RNA, 71 nt, Homo sapiens
aggagaacaagcccacgcaccgaggccagagaggagcccacccccaacagaagagagaggaaaccgaaaaa

SEQ ID NO: 28253 - RNA, 74 nt, Homo sapiens
gcggcaggagcgggaggccagcacggccgcggcggggcccccccgcgaccccacgagcccagagaggaccagga

SEQ ID NO: 28254 - RNA, 87 nt, Homo sapiens
acccagggagagcagggcagggaaaagcgccgggcggaccagcagccaacagcgggaacaagaggcgggagaagacgggaagccacc

SEQ ID NO: 28255 - RNA, 72 nt, Homo sapiens
ggacggagaggagcgcggccagccaggcgccgggggccaggcagcgccacgccgcgccccccgacaaaagcc

SEQ ID NO: 28256 - RNA, 54 nt, Homo sapiens
gagaagcaccaaggaccagcccaggcccccacgggaacgacgccgcgagagcca

SEQ ID NO: 28257 - RNA, 71 nt, Homo sapiens
caaaagagcccgaaccgccagcagaagaaacggcacaagcgggccaaaggagaaacaagaaggagacaaca

SEQ ID NO: 28258 - RNA, 85 nt, Homo sapiens
gccccgggcccggccggcgcgggcgacgcacgaggcacacaggaaggaggggagcagggacgcgcggcggcggggccgggaggga

SEQ ID NO: 28259 - RNA, 79 nt, Homo sapiens
accccaaaacccccagcgcgacgggcgcggcccaggagacaccagcgggggcgccgcgcagggaaagggaccgccaccc

SEQ ID NO: 28260 - RNA, 65 nt, Homo sapiens
cggacgccagcggacacgcgggcgagcgggagggacaggagaacaggcacgaccccaccggcacc

SEQ ID NO: 28261 - RNA, 61 nt, Homo sapiens
gccaaggcagaaaagcccacccaaaacggagccaggaggggggaagacagggcccagcacc

SEQ ID NO: 28262 - RNA, 55 nt, Homo sapiens
gcacccaagagcggcaccaggagcaagaaagcaccgggaggaaagagagccacac

SEQ ID NO: 28263 - RNA, 73 nt, Homo sapiens
cagcccccagcgggaacaggcaccaacccgaaacaagagagacccaaaagggccagagcagggagacaaaaga

SEQ ID NO: 28264 - RNA, 82 nt, Homo sapiens
accaccacacgacccagggagacaccgaaaagaagagaaaccagcgcggggaagaaggcagccagacagcaagagcggcaag

SEQ ID NO: 28265 - RNA, 77 nt, Homo sapiens
aggcaaaaagcacagaagagagaggagaggacgaaggcccgaggccaagaacagaaaccgacagggagccaaggcgg

SEQ ID NO: 28266 - RNA, 83 nt, Homo sapiens
aagagcagaaaaaagaggagcggccaggcacggagagaacgggcccgagggaccgccaacaagcggcccgcaccgggccagac

SEQ ID NO: 28267 - RNA, 64 nt, Homo sapiens
ggcgcagcgcccgccgcggcccgggcccccccgccggaaacaggaaggagggccccggagcagc

SEQ ID NO: 28268 - RNA, 59 nt, Homo sapiens
cgagggggaaaaggaagaaccagagaaagggagcaggaacgaaaacaaacggaagagag

SEQ ID NO: 28269 - RNA, 78 nt, Homo sapiens
ggccgcccggccgggcgcgccgcaccccagcagcacccaagcagcgggcacagaaagcgagagagccaaagacgagag

SEQ ID NO: 28270 - RNA, 71 nt, Homo sapiens
ccaggccaaagaccagaaccggaggagccagagagcaaacagagaggaagcagaaagagaagaaggcgaaa

SEQ ID NO: 28271 - RNA, 84 nt, Homo sapiens
ccagaggcaggccaaggagaggacagcagaggagcagccagcaaggacaacacaggaaggaaagaagcaaaaaaaacgggaacg

SEQ ID NO: 28272 - RNA, 70 nt, Homo sapiens
acagaccaggcgccccgccccggcgcccaaggagaaaacgggccggaggaaaagggcggcaggggaccac

SEQ ID NO: 28273 - RNA, 43 nt, Homo sapiens
ggcagcagcagcaccaccggacgggaggaaagagaaaggacga

SEQ ID NO: 28274 - RNA, 74 nt, Homo sapiens
gcagagccggcaggggcgcccccaggaccgagcaggaaccggagcaggccagcaacagaagaaagcaagcaccg

SEQ ID NO: 28275 - RNA, 85 nt, Homo sapiens
gcgaggggaagccgcgcggccggccggccgacaggagcccgaggcagcagagggccagggcagggaaaaacccccggacacaaag

SEQ ID NO: 28276 - RNA, 65 nt, Homo sapiens
aaaaaaacaggacagagaagcacgccacaagcgccaaccgcaacacggcgggcgccaacaaacac

SEQ ID NO: 28277 - RNA, 64 nt, Homo sapiens
ccccaccgcccacaccggggcgcaagcagccccagacaagccaaaaacagcaaaaacccgcggc

SEQ ID NO: 28278 - RNA, 72 nt, Homo sapiens
cgggacccagcccaggccgcacggacggggggggaccagaagaaagagcaccggcaagaggaacgaaaagga

SEQ ID NO: 28279 - RNA, 74 nt, Homo sapiens
ccagaagaaagcagcagacgaccagggaaaacaaggcaagaacaagccccaacaaagggagaagaggcaggagg

SEQ ID NO: 28280 - RNA, 75 nt, Homo sapiens
cagcgaccgggagaacaagacgggcggagaacggaaaagcaccaggaagcagagaggaccgcagaagggaaggag

SEQ ID NO: 28281 - RNA, 72 nt, Homo sapiens
gggaaaaaagagcgggaggcaccgggcgagccccgcggccagcgccccaccgggagccagcccaaaccgggg

SEQ ID NO: 28282 - RNA, 60 nt, Homo sapiens
cggaaagagaaggggaccgccaaccagcggaggaggagaggagccaaccgccgaaaaaag

SEQ ID NO: 28283 - RNA, 58 nt, Homo sapiens
acccggaccccaggcaaaggaccaggaaaacaggccccgggaccaaggacacgcagac

SEQ ID NO: 28284 - RNA, 72 nt, Homo sapiens
aagcccaggaggcccaaccacagcgagaaaacccaaagggaaaagagagaagcccggaagcaaaaggagcgg

SEQ ID NO: 28285 - RNA, 61 nt, Homo sapiens
ccgcccccccggcggcagcccccggggaaaccccccaggcaagaggcgcaggaccgggaag

SEQ ID NO: 28286 - RNA, 81 nt, Homo sapiens
cgacccggcggcgggaagccaagccagggagacaagaagagccccaccaggaacacgaggacccaaagaacaaacccggag

SEQ ID NO: 28287 - RNA, 63 nt, Homo sapiens
acagcaggggcgacgaaaccgcagaccagaacagcacccgaaagagcgaaagcccagacagga

SEQ ID NO: 28288 - RNA, 72 nt, Homo sapiens
ccgccacgcagggacaagaacggcggagccgcggcacaacggggaggacaagaaaaccccaggacacagagc

SEQ ID NO: 28289 - RNA, 70 nt, Homo sapiens
gcgccccacacaacaagagcgaaacaaaacacaccaggccaaaggagcagagccaacagcaggggggagc

SEQ ID NO: 28290 - RNA, 76 nt, Homo sapiens
gcaagcggagaacggccccggaggacaccagaggagcagccaagaagccccccaggggcccgcagaccaacaacaa

SEQ ID NO: 28291 - RNA, 98 nt, Homo sapiens
gagcgccgagcgcgccgccgccgccgccagaacaaccgggcgccgacgagacgggcgaggaccggcccagccaggcccggggcagcggcgaccagagc

SEQ ID NO: 28292 - RNA, 82 nt, Homo sapiens
cgccgccgccgaggagaaaggcgcagacaggcccaaaccgccaggaacacacagcgggaaacgcaggggaagagggcaccag

SEQ ID NO: 28293 - RNA, 60 nt, Homo sapiens
aacggagagccgggaacgacaggggagagacccagcggggggcaggaccacgagaccagg

SEQ ID NO: 28294 - RNA, 72 nt, Homo sapiens
gaagggaaggaaaaaccgagggaaccaccggaaccgagagacacaggggcacaagacgggacaggcaaaaaa

SEQ ID NO: 28295 - RNA, 60 nt, Homo sapiens
gaggaggaggaggggaacacccagccccagaaacagcgggaaaacaaagaaccgaacaac

SEQ ID NO: 28296 - RNA, 76 nt, Homo sapiens
ggacgcggcggaggcccagggggccgaagggaggcccccacgcagggggccgacgacgagccccgcgaggagcgca

SEQ ID NO: 28297 - RNA, 38 nt, Homo sapiens
ccaacacagagccaagcgccaacggaccagcagacaac

SEQ ID NO: 28298 - RNA, 80 nt, Homo sapiens
aacccaggcagagcgcagccagaacagccgcggaccgggggggggccaccgaggagaaaggaaacaccccccagaggagc

SEQ ID NO: 28299 - RNA, 77 nt, Homo sapiens
ccccgaaccagcaccccaccacaacaggagaacaagaccacggggccacgaacgacgcacggaggccacaacaccac

SEQ ID NO: 28300 - RNA, 81 nt, Homo sapiens
agagaaaaggccaaagagagggcgaacaagcaagaaagaagaggaagagccaaagcgaggggcccaaaaaagccaaaagca

SEQ ID NO: 28301 - RNA, 73 nt, Homo sapiens
ccgaggcaccaagccggccagcaagacccgagcccagggaaaaagaaaagggcgaagacccgaagcagcgcag

SEQ ID NO: 28302 - RNA, 73 nt, Homo sapiens
gggcaaacaagccaggccgggaaaggccaacagaacaagagagaccagggggcaacggacaaaggagaaaaag

SEQ ID NO: 28303 - RNA, 55 nt, Homo sapiens
ccccccgccggccgcgcccgcgaccagccagcaaacccacaaacagcaaaagagg

SEQ ID NO: 28304 - RNA, 54 nt, Homo sapiens
agaaggacggggggcagacaggagcccaaggggacccccaaaagacaagggcaa

SEQ ID NO: 28305 - RNA, 67 nt, Homo sapiens
ggcccagcaggcaaaaaagcaaagccagagccagaaaacagcgaaggaggaaggaagaaaccaaacg

SEQ ID NO: 28306 - RNA, 74 nt, Homo sapiens
cgaaacgcagcgcgcccccaggaggcgagcccgcggaaccgcagccaggaaagcgaagccaacaaagaaaggac

SEQ ID NO: 28307 - RNA, 56 nt, Homo sapiens
gggaaacaggcacaaccagccggaagcaaagagcccagacggaaaaggcgaaccag

SEQ ID NO: 28308 - RNA, 81 nt, Homo sapiens
agggcggccagacacaaagacccagccggacaccagaaggccagaaggaacgaccaaagagaacgagacaaaagaaaaagc

SEQ ID NO: 28309 - RNA, 58 nt, Homo sapiens
cgcacgcagcgacgccccgcacgacgacagaggcccaccagcccggccgggcgaggac

SEQ ID NO: 28310 - RNA, 58 nt, Homo sapiens
ggagagagcgcgggcccaggaaggcaaagccagacacaggcaaagccgcaccggaagc

SEQ ID NO: 28311 - RNA, 84 nt, Homo sapiens
cgccgaccccccggcgccgcgccggcggcgaagacgaccccgacgcaggccaggagccgcggacagaagccgagcacggccgag

SEQ ID NO: 28312 - RNA, 82 nt, Homo sapiens
ccgcgggagagaggacccccccccccccccaagcagaagaggcggccacccacgagccgacggcaaacgccagggagccacc

SEQ ID NO: 28313 - RNA, 62 nt, Homo sapiens
caccacccgaggagagcaaggccaaaaagaagacggaggggggaggagcaggcccccaccgc

SEQ ID NO: 28314 - RNA, 77 nt, Homo sapiens
ccacacccccccggggggggcgagcagacaccgcaggaaagggcaaaggacgcggcccggcagaccgagggcaaagg

SEQ ID NO: 28315 - RNA, 80 nt, Homo sapiens
aggaaaggccgaggggccggagccacaggaaaagagagacaggcaagcacagcccaggagaacaagaaggggcagaaaag

SEQ ID NO: 28316 - RNA, 90 nt, Homo sapiens
caaaggagaaggggcagagcggccacaagggagccagcaacggggcggcacacaaggagcgaagggcagggagaacgccaggcacagcac

SEQ ID NO: 28317 - RNA, 70 nt, Homo sapiens
cggaaccgagagcggaggccaccgacgccagaggaggaacccaggaaagcaggaaaacggcgcaaacgga

SEQ ID NO: 28318 - RNA, 77 nt, Homo sapiens
cgggagagcgaaccccgggacacgcaggaacggcccagcacaagaccgcgacagaagggagaagagccagggaggac

SEQ ID NO: 28319 - RNA, 61 nt, Homo sapiens
cgggaagggcgacagcgcaaggagacgaagaggagaaggcagagcccccccaggcagaagc

SEQ ID NO: 28320 - RNA, 65 nt, Homo sapiens
gcccaaaacccggaagagcgccccaggagaaacaagggaaccgcccaaaagcccgccagaagaag

SEQ ID NO: 28321 - RNA, 66 nt, Homo sapiens
cgaaaggagcaagagcaagacaccggacaccgagggcccccaaaagggggggccgcccgcccaagg

SEQ ID NO: 28322 - RNA, 80 nt, Homo sapiens
ggaccgggagaggcaccaaacggccgggggcccgagaagcccccaggaaaaccaacggcccggaggaccacagcccaggg

SEQ ID NO: 28323 - RNA, 74 nt, Homo sapiens
acccaacagaaaaacccagcaaaggcgagcaagggagagaccggagagagaaggcccaaaagccaggggccgac

SEQ ID NO: 28324 - RNA, 84 nt, Homo sapiens
cccgagagccccagacggggaggagaaccacaccgaggagcagaacagcggagagcaccaggagggcaagacgagccccgacaa

SEQ ID NO: 28325 - RNA, 69 nt, Homo sapiens
cgcgcgcccagaagaggccagagcggaagccaaaggcaacgacgacccaagaagaacagaaggaagaca

SEQ ID NO: 28326 - RNA, 77 nt, Homo sapiens
cacaaccgggccggccccagagcccaccgggaggagaaggaggaggaacgagacagaagagcagcacaggggaagag

SEQ ID NO: 28327 - RNA, 70 nt, Homo sapiens
gaagaacggccgcccagggcagggagcgggacaagaggagagagaggacacgaaagcaggacgacaggaa

SEQ ID NO: 28328 - RNA, 60 nt, Homo sapiens
cggccccccccgggggaggagaaggaaagggaaagggagcagcaccggccacacccacag

SEQ ID NO: 28329 - RNA, 72 nt, Homo sapiens
gaaacagaaccgccaggagcggcagacggcaggccagcgcgggcgccgacagcgagagcgcaccgcggcccg

SEQ ID NO: 28330 - RNA, 85 nt, Homo sapiens
gcggagcagagcgacgggagcgaccgagcgggccgccgccgccgccagaaccccgaaagcagcccccagggccggaaggagggga

SEQ ID NO: 28331 - RNA, 66 nt, Homo sapiens
ggcagagcgacccaggcacagcgaagaaaagccacacggggagcaaaccaagagaacgaaagccac

SEQ ID NO: 28332 - RNA, 80 nt, Homo sapiens
ccgggcagcccgcgcgaccggaggcacacgacgaggacggggcccagcagacgccaggccagcccagacaccgccagcca

SEQ ID NO: 28333 - RNA, 81 nt, Homo sapiens
caaaaaggccaacaagaaacaggagaacgggaagccccgccgagaaaagccaccacgcgacgcggccggagcccccccaga

SEQ ID NO: 28334 - RNA, 54 nt, Homo sapiens
gaagaggaagcaaagccaagagaccgaagacaaccgaaaaggggcggaccccga

SEQ ID NO: 28335 - RNA, 74 nt, Homo sapiens
cgaaaccaagcgccgacagaaaagaaaaccccggcgagcaagagcagcacaaggaaaacgagagaaacgaaggc

SEQ ID NO: 28336 - RNA, 71 nt, Homo sapiens
gagcaagaccccggaacccgaagcgggaaagaaccccagcacccagccaaggggcagagcagacccacggg

SEQ ID NO: 28337 - RNA, 34 nt, Homo sapiens
cggccagaggaccccaagggaaaccaaaaccaga

SEQ ID NO: 28338 - RNA, 49 nt, Homo sapiens
gcgcccggcgccggccgagaaggcagaggcggaccgggcgaggccaccc

SEQ ID NO: 28339 - RNA, 74 nt, Homo sapiens
gaagaggcggccggcaagagcggcggagcgcaggggagaaccggaagggaagaacgaagaagaaaacaaaccga

SEQ ID NO: 28340 - RNA, 40 nt, Homo sapiens
caggagaaccgaaaccccaggcgcacccggggaaaggggg

SEQ ID NO: 28341 - RNA, 80 nt, Homo sapiens
cggaggccccggggccggcccccgcaaccccacggagaaccgcagccaggaggacagcgggccgcccgccagccggagca

SEQ ID NO: 28342 - RNA, 54 nt, Homo sapiens
ccgcagccggcagacaaagacagcgcccaaagcgaagcgcccaggggagaaccc

SEQ ID NO: 28343 - RNA, 70 nt, Homo sapiens
gcagaaaccggaccaacaacgcaaagacgagaagaggcgaacggaagcaacacccgggaaaagcagcgag

SEQ ID NO: 28344 - RNA, 71 nt, Homo sapiens
ccgcaccgccccccgggccccgcgaccaacaacagaagaaggcccgagacagagcagaggagcggaagagg

SEQ ID NO: 28345 - RNA, 55 nt, Homo sapiens
ccgacacagggacaaggcaaggcacaggaaaaacgaggcaaagaggaacgggaaa

SEQ ID NO: 28346 - RNA, 84 nt, Homo sapiens
cggcgcagcggggaccggcggcggcgcccaggcacccggcccggaggaaccgcgcgcggccgaaccaagcccgggcgcccccac

SEQ ID NO: 28347 - RNA, 82 nt, Homo sapiens
cgcggccgaggaggcagcgcgaccccgcacgccagggccaaaaggccagaggggcccaggccaaccccgaggaaccacagca

SEQ ID NO: 28348 - RNA, 59 nt, Homo sapiens
cgccaaagagcacgcagagagcccggcaggaaaacgaggacaagaaaaaacccggagga

SEQ ID NO: 28349 - RNA, 87 nt, Homo sapiens
ccagcagcccccagagcgggaccacaggggaggcggagccccaggcaaggggcgcagcccaccacacgacaacaaagacggcaccgg

SEQ ID NO: 28350 - RNA, 79 nt, Homo sapiens
gcggcagccccacacccaggcaagcacacccaggaccaccaccacagccacagcaggcgacccgcggcgagagcccccc

SEQ ID NO: 28351 - RNA, 76 nt, Homo sapiens
ggaagcggggcgcacaccaccggacaaccgacaaaaggagaagaaaaagcagaaaggaacagaaaacaaaagaaca

SEQ ID NO: 28352 - RNA, 53 nt, Homo sapiens
aagaagcccacgcagaaacccaccagacgggaggagcgcacagcacagccaaa

SEQ ID NO: 28353 - RNA, 84 nt, Homo sapiens
gggcgcgggccgcaggcgggggccacgcgcagggcccacagagcagcgggagccggacagcagcaacccagcaaaccaccaaaa

SEQ ID NO: 28354 - RNA, 100 nt, Homo sapiens
cgaacccagagcgagggggggaccaccgccggccaggggcggaaacgagggcacgccacgcacagcggcagcccaccaaccggccaagaccagcaccaca

SEQ ID NO: 28355 - RNA, 75 nt, Homo sapiens
ggaaagaagccgcggcgccagcgacgcccaacaccgccaaacagggcaacagaaagccacaaccggacaagaaaa

SEQ ID NO: 28356 - RNA, 78 nt, Homo sapiens
ccaggacccacggaagccagaaagccgagcaaccaagaaggggccagcaacgaagaaaggagcagcaacagaacgcaa

SEQ ID NO: 28357 - RNA, 89 nt, Homo sapiens
cccgccagcagccgccggagccagccaacgagcgcggccacgcccggcaccgagcacagcaaacgcccggcgcgcccaccagccagccg

SEQ ID NO: 28358 - RNA, 83 nt, Homo sapiens
ccagcaaaggcaggggaggaagccacccgaggaagcagaagcagaaacccagcccaccagaggacccagaaaggagccagaac

SEQ ID NO: 28359 - RNA, 73 nt, Homo sapiens
ccccgagggcgggacacaggcagagaccgggcacaaccagccagcaacccgcccgggccaagcaccgcccacc

SEQ ID NO: 28360 - RNA, 68 nt, Homo sapiens
ccggaaaggaggcaaggcacccggaaacaagccacgaaggagagaaaaccagcagcagcgcagcagag

SEQ ID NO: 28361 - RNA, 54 nt, Homo sapiens
cccggagacccggccaaacagccaagaacaaaagaggaccgaacccacaacacc

SEQ ID NO: 28362 - RNA, 53 nt, Homo sapiens
aaaacaggcgacggaacgaggaggacaggccgccagggggacagaaggagcag

SEQ ID NO: 28363 - RNA, 69 nt, Homo sapiens
agagaagacaggagacaagaggaaggacaacggggccgcacgcccaaagcggaaacgcggaagagaccg

SEQ ID NO: 28364 - RNA, 67 nt, Homo sapiens
ccggagcgcagagaccggaagcacagccccgaggggcgaagccaccaaaccaagcagcaacgcaggg

SEQ ID NO: 28365 - RNA, 75 nt, Homo sapiens
gaaagaagcccagcccaccggagacacaggaacaaacgagcacgcaacaaacaaaggcacaccaacggcaacgga

SEQ ID NO: 28366 - RNA, 63 nt, Homo sapiens
agcaacaccccaaacagcggcgcacggggcacaacaggagaggccaggaagagaggagacaaa

SEQ ID NO: 28367 - RNA, 57 nt, Homo sapiens
ggccgcccgccgcagcggaggcccacacagcccagaggaggggggaagcccagggga

SEQ ID NO: 28368 - RNA, 64 nt, Homo sapiens
ccagaagcgagagaggcggaacaccccccccaagccagacgcggcaacgcgcagacggggcaga

SEQ ID NO: 28369 - RNA, 69 nt, Homo sapiens
ccgggcggggcagagcagcccccagccagccgcgagacaacggcaagcggagaagagcaaggccgaacc

SEQ ID NO: 28370 - RNA, 121 nt, Homo sapiens
ccgcagcgaccaccgccagcgcgacggcggaggccccgcaccaccaggcgcagagacagagagcccggcagggaaccaacccagccacaaccaccccagggcgaccacagagcgccggccg

SEQ ID NO: 28371 - RNA, 88 nt, Homo sapiens
ggccaagcacgccggccgagggcaccaaggcggcaccaagacaccagccgaagagaaaaaggagaagcggcaagcaaggaagaagcaa

SEQ ID NO: 28372 - RNA, 75 nt, Homo sapiens
gcaaaccggaccaccccgaagaaagcacagagacagagggaagaaacagacgcggagagaagagagacccggcaa

SEQ ID NO: 28373 - RNA, 70 nt, Homo sapiens
gacgcggcgaggcgggcaccgggcgccaggcgaccgcacccaaggaccgcagaaaccgagagcaccccgc

SEQ ID NO: 28374 - RNA, 77 nt, Homo sapiens
agaaacgcggacccaagcggcaaaaaaagaaaaagaagaaccccagcccccaagccacaaaacggggaaggaaaaga

SEQ ID NO: 28375 - RNA, 82 nt, Homo sapiens
caccgggacacccgcgaggccggaaaagagcaaccgagggacgagacaagccgcggacaacagagagcggagcagagaggag

SEQ ID NO: 28376 - RNA, 81 nt, Homo sapiens
gacggagaaaagaagaacacgcccaaaacgaaaggagaagaagcaccagccgacgcgaacggaacacccgggaaacccccc

SEQ ID NO: 28377 - RNA, 66 nt, Homo sapiens
ggaccgggggcgccagggaagcgggaggcaggcagccagggccaaaggaaccgcgccacagcgggg

SEQ ID NO: 28378 - RNA, 84 nt, Homo sapiens
ggagacaccccgggggccccgagcaaaccaggagagagagcgagagccgccagacccacggacgcgcacgacacgaccccaggc

SEQ ID NO: 28379 - RNA, 54 nt, Homo sapiens
gcccagggagcagacaaccacaacgaagagaggaaagaagcggaaaggagggag

SEQ ID NO: 28380 - RNA, 58 nt, Homo sapiens
acaaccaacagcgggcggcccacggcaacagagacccgagcggaagagaagccaagga

SEQ ID NO: 28381 - RNA, 79 nt, Homo sapiens
agcaaaaggaacacagagaaagacagcaaagaaaaggagaagaaaggaaaaaaacaaccccgggcaccccgccagccag

SEQ ID NO: 28382 - RNA, 74 nt, Homo sapiens
gcgcaagagaaaacgacgaacagaacgaacagaaagagaagcgaggacaaaagagccgcaagaccggggccaac

SEQ ID NO: 28383 - RNA, 92 nt, Homo sapiens
ccaggaagcacagagcgaccagacacggcccacggccagccaagggacggaaagaagagaagacggaaggaaacacccggaaaacacgacac

SEQ ID NO: 28384 - RNA, 79 nt, Homo sapiens
cggaccgcagcagcagacgaccgcagggccagcccacgaggaagacaccaccggacaccgaccaggccgcccgagcagc

SEQ ID NO: 28385 - RNA, 55 nt, Homo sapiens
caagaacccgaggaacaccgaaagcgaggaggccgggcgcaccccggaggcggcc

SEQ ID NO: 28386 - RNA, 90 nt, Homo sapiens
cccccgaccgggcggcgcggcggccagaggaaccccgagccggaaccaaaaagaagccccagagccggggccaggagccccaagcgcccc

SEQ ID NO: 28387 - RNA, 82 nt, Homo sapiens
gaagaagccagaagaggaggaagaggaaagaaaaggagcaggaagcccagacaaccagggccgaacggccagccccgaccgc

SEQ ID NO: 28388 - RNA, 69 nt, Homo sapiens
aaaaggaaggccgccggacagcgcagagccaagacggagaaacaaacacaggcagaccagagagaggaa

SEQ ID NO: 28389 - RNA, 54 nt, Homo sapiens
ccagggaaaggagcagagagagagagcagaaggcgcccgcagacgcagaagacc

SEQ ID NO: 28390 - RNA, 54 nt, Homo sapiens
ggaagagcagcaccggaccagcggagcggccgcccagaaagcagggggccgaga

SEQ ID NO: 28391 - RNA, 59 nt, Homo sapiens
ccccgccagagaccgaacccaagaaaggagaacccagacccccccaagacacacggacc

SEQ ID NO: 28392 - RNA, 66 nt, Homo sapiens
gagggcacacaaaacagagagcagaggcgcggcccgggcaagaaggagagacacagcgccggaacc

SEQ ID NO: 28393 - RNA, 79 nt, Homo sapiens
acccgaacgggcaggcggagggggagcggaagggcagcgccaacagaaaaaacaccagcagcccagcaaccaaaaagaa

SEQ ID NO: 28394 - RNA, 73 nt, Homo sapiens
cgcccgaccaccaccacagagacccacaagcgggaaggcagaagccaagaccggcccgaggcggccgccacac

SEQ ID NO: 28395 - RNA, 77 nt, Homo sapiens
cgcggggccaggcaggacccaacgacaggcgccccggcccaacgggccggcacccgcgcaaggggccgagaacgcca

SEQ ID NO: 28396 - RNA, 55 nt, Homo sapiens
ggagaacaagcaacggcggggcaaggaaaggaggaaaacaagcgaagcggcaaca

SEQ ID NO: 28397 - RNA, 100 nt, Homo sapiens
aacaggacagcacaggcacagaaggccaaaaaggcaaccacagagagagagagggaggggagcagagcgaggcagggccccagagacacaagacaaccag

SEQ ID NO: 28398 - RNA, 81 nt, Homo sapiens
cgacgaaacgacagcaacgcgaccaaggcaaaggagcgaaacagccaagccacggagcagccagaacaggagcaacgacaa

SEQ ID NO: 28399 - RNA, 78 nt, Homo sapiens
cggcgccgaggagcgggacaacccaggagcagacagagaagcgcgcagcaggcgaagaggagaggaaggcaccaaaga

SEQ ID NO: 28400 - RNA, 64 nt, Homo sapiens
gccagaaccgcgcgccacccacaaccagccgggccccgaggaccgagacaggagcacccgggcc

SEQ ID NO: 28401 - RNA, 56 nt, Homo sapiens
acacagggggaagccaagcagaacaaccaacacaaccaggacaagccgaggaaagg

SEQ ID NO: 28402 - RNA, 80 nt, Homo sapiens
ccccccacggagccccgaaagcagcaggaccgaagggaagcacgcgagacgccaggcggaagacccggaacgaagcacgc

SEQ ID NO: 28403 - RNA, 74 nt, Homo sapiens
aaccgagaggaccaacaccgcagacgaagcggccgaagcgaggccacgcgcagggccgaccgcggaaccccgcc

SEQ ID NO: 28404 - RNA, 84 nt, Homo sapiens
gcggcggagcgcgagagccgagcggaccagacaggggcaaggccgaggggaacagcacacagagaggaggcggaagcacgccag

SEQ ID NO: 28405 - RNA, 72 nt, Homo sapiens
aacagaaagaagccacgacgaagcaccacagagaaaagagcacgaggaagaaccaccagcagaaaacgcagg

SEQ ID NO: 28406 - RNA, 82 nt, Homo sapiens
gcagccaccgcggcccccgcgggagaaagacagcaaagaaaaggagaagaaaggaaaaaaacaaccccgggcaccccgccag

SEQ ID NO: 28407 - RNA, 61 nt, Homo sapiens
ccaagcccaggacaccgcgcaggaaacgagggggcagcccagaaaagaagcaaaaaacggg

SEQ ID NO: 28408 - RNA, 57 nt, Homo sapiens
agaagcccaacacagcaccagcaggggcccgccgccccggggcacgccaggcaacca

SEQ ID NO: 28409 - RNA, 93 nt, Homo sapiens
cagcccaaagggggaaccagcgaccgagcacaccacccagcaacggagagaggaaggggaccaggagacgaaaagagaaagggagcaaacacg

SEQ ID NO: 28410 - RNA, 71 nt, Homo sapiens
gaggacacaaggacaagaaaaggcccgccgagaaaaacagaaaaggagagggcgcgggcgaaagcgggagc

SEQ ID NO: 28411 - RNA, 74 nt, Homo sapiens
caggaggcaacagcgaacacccacccccggacgccgcacaaaaggaaggaaggaaagaaggggggaaagaaacc

SEQ ID NO: 28412 - RNA, 73 nt, Homo sapiens
cagaccacgccgacccaggggaaaccccaacaaggccggccgcgccaaagaggcccccgacaggacacaaaac

SEQ ID NO: 28413 - RNA, 65 nt, Homo sapiens
cacaggagcggaagaagacagggccacccagggaaacaccacagagggagggcgggcagccgcaa

SEQ ID NO: 28414 - RNA, 67 nt, Homo sapiens
ccacacggggacacgccccgacgccgagggcccgcaaggccacagcacgggcgcaacaggagacgaa

SEQ ID NO: 28415 - RNA, 79 nt, Homo sapiens
cggagacgcgcccgcgcgcaggggaagcgggcaggcaaagacggacaacacccagcagacagaggagcagggaggcggg

SEQ ID NO: 28416 - RNA, 60 nt, Homo sapiens
ccggacaaccagaggcagccagcagggggagacacagcaggagccaagcccccccagaca

SEQ ID NO: 28417 - RNA, 80 nt, Homo sapiens
gaaccggcaccgggcgggaaggccggaaagagccccgggggccacgcaaggccggccccgagagccaaagccgcgggaag

SEQ ID NO: 28418 - RNA, 54 nt, Homo sapiens
agccacgcaaggagcaacacccccgcccccacaagcgacagaaaggcaggaagg

SEQ ID NO: 28419 - RNA, 75 nt, Homo sapiens
ccggggcaccaaaagggcaagcgaagaagggggccgagacaacaagaaggggaggaacaaaagcgcaaaccggag

SEQ ID NO: 28420 - RNA, 84 nt, Homo sapiens
agcccccaagagcgggaacagcaaaagagccggaagaaccaggaagcacagcagaaaaagaagagcgaggcaaagaggaagaag

SEQ ID NO: 28421 - RNA, 67 nt, Homo sapiens
acagacaccgccccgagacgaggacgaaaaacggaaacgccggaccaaaagcaagccagagagaacc

SEQ ID NO: 28422 - RNA, 99 nt, Homo sapiens
acgaagaagcgacaggaccgacgaaacagacccaggaagccagggaccaaaccaaaacaaacaaagcaccccggaaccccccaccgggagacgcccaaa

SEQ ID NO: 28423 - RNA, 79 nt, Homo sapiens
gaggaggacccagagcaggacagcggcccggaggaccgccccgcaggggaaaaagaaaagggcgaagacccgaagcagc

SEQ ID NO: 28424 - RNA, 75 nt, Homo sapiens
agcagacgaaagaaaaaaaaaaccggagaggaagagaagaggcacaaacaaacagaggcgagaacagcagggagg

SEQ ID NO: 28425 - RNA, 69 nt, Homo sapiens
agcaacaaaggaccaagacagacccccagggggcagagcggaaggacagccggaaaaacacagcgcacg

SEQ ID NO: 28426 - RNA, 74 nt, Homo sapiens
aggaggaagacgaacgaacagccagaagaaaagggcaggagcgaagcagcaggggacgagaggcaccagaaacg

SEQ ID NO: 28427 - RNA, 66 nt, Homo sapiens
ggggccaggaccacgaaaggcaggaagcggcggcaaaacacaggaaagaagaaacagaagcaaaag

SEQ ID NO: 28428 - RNA, 81 nt, Homo sapiens
gcggaggaggaagagggggcacccagcacacccaagacgcggcaacagggcaagaaggaacagacaaaaacggccggaagg

SEQ ID NO: 28429 - RNA, 79 nt, Homo sapiens
ccggccccggcggcacggcgccgaccagcaccaggggaagcgggacaacgggggagagcacgccaaccggcagcggagc

SEQ ID NO: 28430 - RNA, 65 nt, Homo sapiens
aaggaccaagaaccagcgcaacaggagacgaacccagaccagcaaaacggagcacaggcgagagc

SEQ ID NO: 28431 - RNA, 85 nt, Homo sapiens
ccggaggaccacaggcccagacgagcggaggaggcacagggcgcggaccgcacgagcgcgaccagagccacgcgcccaggcgcag

SEQ ID NO: 28432 - RNA, 82 nt, Homo sapiens
cgccgcgcgaggaaaggccgaggagccggagccgcaggcgaggcccgggcagcgggccagcgggaggggccccggcccgccc

SEQ ID NO: 28433 - RNA, 55 nt, Homo sapiens
aaaagacagcccgcagcacgaccagcaggaacggagcagcggcaaaccagaaaag

SEQ ID NO: 28434 - RNA, 85 nt, Homo sapiens
ccgacgcccacggggcagagaggacgcacaagaacgagcgacaggagaacgaacacacgcacccaaacggagcgcaggaggcagg

SEQ ID NO: 28435 - RNA, 63 nt, Homo sapiens
acagcacggggcagacaccgcccgaacacacaccgacgagaaggacggaagaggggccggaga

SEQ ID NO: 28436 - RNA, 64 nt, Homo sapiens
ccgggcccagaggagacaccgcccaccaccagcagcgaccgagccgggcagcgacgacagcccg

SEQ ID NO: 28437 - RNA, 81 nt, Homo sapiens
gaagcagcggcccaggcgccagcagcccaagagcccaaaggcagcagcccagccaaagccggaaaaggacccagagccacg

SEQ ID NO: 28438 - RNA, 75 nt, Homo sapiens
ggacggccggagacggagccgcagagggcccacggggaagcgagagaggaggagaagcagaacagacaaacagcg

SEQ ID NO: 28439 - RNA, 87 nt, Homo sapiens
gagaggaccggggggacagcccgggaccggccgaaaggcgaggaaccgggaaagaacgccggacaacagcggcgaagaaggcaaacc

SEQ ID NO: 28440 - RNA, 58 nt, Homo sapiens
acagacaggcaaaaagaaagcgcagaccaggccggaaaaaccccgaaggacgaccaaa

SEQ ID NO: 28441 - RNA, 70 nt, Homo sapiens
aaaaaacaagagaaccaagcgcaagggaaaggaggagaagaacaagaggccaacagcagacgggagggca

SEQ ID NO: 28442 - RNA, 81 nt, Homo sapiens
acagaggaaccagaaaagaacgaggccaggagaggaaaccagaaccgggcaaggaaaggagccaagaaaagaaccaaaccg

SEQ ID NO: 28443 - RNA, 80 nt, Homo sapiens
cacacagccagaacagcggacgccacacccaagagaagcccggggacaccacgccagcgcaaggccgaagggaaggcacc

SEQ ID NO: 28444 - RNA, 79 nt, Homo sapiens
caagacaaaagaagacgccacaaacacaggcccaggaagagcggagcccaaacacgcgccgcaccagagcggcgggacc

SEQ ID NO: 28445 - RNA, 64 nt, Homo sapiens
agacagaaagagccgaaagaagggcgagacccgggcagccagccaggaggggccggccagccac

SEQ ID NO: 28446 - RNA, 72 nt, Homo sapiens
aaaagggagagcccccacacccagggccgggcagccacaacaggacacggccaagcccggacaccaccacac

SEQ ID NO: 28447 - RNA, 43 nt, Homo sapiens
acgccccgggcggcacggagggccgggcacgcccccgagggaa

SEQ ID NO: 28448 - RNA, 73 nt, Homo sapiens
accccccaacggccacgggaacaagggaaaaacagcaagaaagacacggggaccagaccccacaagaaaacac

SEQ ID NO: 28449 - RNA, 58 nt, Homo sapiens
caaaagaccaagaccaggggcagagcacaaccccaagggcgggccgagggcggcacgg

SEQ ID NO: 28450 - RNA, 75 nt, Homo sapiens
ggggcagaaacagagaaggaacaggccaggcgcgggccaccccacggggcaacaagggccaccagcagggacggc

SEQ ID NO: 28451 - RNA, 72 nt, Homo sapiens
agcagggaagaaagcacaggccaagccacggaaaggcagaccagagggaccaccgagcggaggacagaaaac

SEQ ID NO: 28452 - RNA, 68 nt, Homo sapiens
gcacagagagcgaaggaccaagggaaacacagcagaaagaccagaacagagaagaaagcaggagaaac

SEQ ID NO: 28453 - RNA, 78 nt, Homo sapiens
acaagcagagagacagccaagcagcgggaagccagcccaccagagaggccgaggccccagcagcggagggggagccca

SEQ ID NO: 28454 - RNA, 57 nt, Homo sapiens
caggcgacgaagacgagggacccacgcccgcacgggaaagaaaagaggcccggaaga

SEQ ID NO: 28455 - RNA, 67 nt, Homo sapiens
ccggcacacacacagaggagaaaacgggaaacggaaaaagagcgcagaggaaggccagcaaggccag

SEQ ID NO: 28456 - RNA, 77 nt, Homo sapiens
caggaagccaggagaccacccggcaagaggcagcgagaggaagaaaggacacaaagcagaagaaaagccacaaacag

SEQ ID NO: 28457 - RNA, 72 nt, Homo sapiens
gcgcgcgaacgccaccgcaacgagcaaggagaggccgcgagggggaagcgagaccggccgggacacaaaaga

SEQ ID NO: 28458 - RNA, 77 nt, Homo sapiens
aaggggaaaaaaaagggagaaacagaccaagggggacaggcccagaggcacaccacaggagcacaaagagagagaga

SEQ ID NO: 28459 - RNA, 71 nt, Homo sapiens
ccgggaaaggagccggccggcggcaaaggcgagggccaggcccaacccccaagaggccggagcaggaggaa

SEQ ID NO: 28460 - RNA, 91 nt, Homo sapiens
ccccccacaggggagagcagcgagcccgaagcaaaagccccacacaagcggcaccgagcacgacacggccccgggacccggcaggaggaag

SEQ ID NO: 28461 - RNA, 82 nt, Homo sapiens
cccggcccgcgagggcgccgggggcggggagcagcggggaccagccaccgcgaccggagacagaaggcagacgacggagcac

SEQ ID NO: 28462 - RNA, 68 nt, Homo sapiens
aggaggaagggacgacggaccgaaaagagaggaaagaacccaagggaacagggaggcaaggagccgag

SEQ ID NO: 28463 - RNA, 77 nt, Homo sapiens
accggccgcgcacagagcgagacacagggcaccccccccaggagaccagccgggccaaagggcaggccaagaacgaa

SEQ ID NO: 28464 - RNA, 71 nt, Homo sapiens
gaagagagggagacgcaggagagagccgagccaagagccagagaaccacagaaccagggccaccagccacg

SEQ ID NO: 28465 - RNA, 67 nt, Homo sapiens
gccaaacgagaccaagaaaagggcgccaacacgaaaaggacggaggggggaggagcaggcccccacc

SEQ ID NO: 28466 - RNA, 72 nt, Homo sapiens
accagccaagagccaccggaacaaggacaaaaccaagcagggacgagagccccaggaaccaagagggccaca

SEQ ID NO: 28467 - RNA, 69 nt, Homo sapiens
caacaggaagaagaacccacaggggccaacagaggaaggccccacggggccagggcaaccgcgcccggg

SEQ ID NO: 28468 - RNA, 66 nt, Homo sapiens
agcaggaaagaagggggaacaacgagggcacaaacaaagaacacaagacccagaccaccaagcaac

SEQ ID NO: 28469 - RNA, 73 nt, Homo sapiens
cgccgccgccaccacgcccacgcaacacacggcccagcacgacagagacccggaaagcgagcagcaaagaccc

SEQ ID NO: 28470 - RNA, 126 nt, Homo sapiens
cgacaccgcggagcaaggaaaagacccggaaagaagagacacagaggagccacacccccagggaccaagaaaggcccagggaccaaagcccggacaaggcccgagcaccaggaccgcagaaggccc

SEQ ID NO: 28471 - RNA, 78 nt, Homo sapiens
accgggccccccagcgaagcgccaccggacgacagcaaacccaaggcccgccaagagagcggaggcaaggcgcaaccg

SEQ ID NO: 28472 - RNA, 74 nt, Homo sapiens
acccgaagacgagggccggaggaaacagcacccccggcgaggaaaagcgcaacaccggcagaacacgacaaaaa

SEQ ID NO: 28473 - RNA, 80 nt, Homo sapiens
caagccacagccccaggaagagaagaggagaagaagaggagcacaagggcaaagagagccagcaagacggcagccacgaa

SEQ ID NO: 28474 - RNA, 86 nt, Homo sapiens
cgccaacgcggcaccgcagaacgccacaaccagccaggaggagcaagcacaacaggccgaagaggccggagaaggacacgcgaaga

SEQ ID NO: 28475 - RNA, 69 nt, Homo sapiens
gaagacacacaacccaacagagcgcgaggagggaaacgcgagggccaccagggagcaaaaggacggaag

SEQ ID NO: 28476 - RNA, 72 nt, Homo sapiens
agcgacgcaccgagaaaggaaggaaaaccgacgaaaagagcagaagcagagccccagcgggggcacacccgg

SEQ ID NO: 28477 - RNA, 54 nt, Homo sapiens
gagaaacgcgcagcccagacacgagagccgccacaaggacaaggcaaaacagga

SEQ ID NO: 28478 - RNA, 113 nt, Homo sapiens
aaaaaccaaggcgggcaaaagcaagggccggaaaacccgagaggacggaagccccaaagcggcccacaccagagacgggaagaagagggaggaggccaccacccacagcccag

SEQ ID NO: 28479 - RNA, 69 nt, Homo sapiens
acgagggaagccacaccacaccaggcgaacaagccagaccaagacagaaaagggggaaagagaagagca

SEQ ID NO: 28480 - RNA, 54 nt, Homo sapiens
gcagacccggacggaacaggcaaaagaacagaaggagaccggagccgccccgcc

SEQ ID NO: 28481 - RNA, 68 nt, Homo sapiens
gcgaggcccgaggggcggcccaggaccgagggcagcgggggcagagacggggaacagggccacccaca

SEQ ID NO: 28482 - RNA, 66 nt, Homo sapiens
aaaaagggcaccaggggaacaaggcaagggggggcacaaaagcaacacggcggcgagccagggagc

SEQ ID NO: 28483 - RNA, 82 nt, Homo sapiens
aagcagaagcgggcccgggcggaccgggcgccgaagcccgaggcagaggaaccggccccagaaaagggcagacgaagagaca

SEQ ID NO: 28484 - RNA, 82 nt, Homo sapiens
agcccccaagagcggacacaggaggccggcaaccggcccagacagggccaacaaggagcacaccgcacgcaggagggcccac

SEQ ID NO: 28485 - RNA, 89 nt, Homo sapiens
ggcggaggccccagggaagcgcagaaagcaggcgaacccgcggcgcaaaacgggagaagagggacaacgggagaaaacgaggacaaaag

SEQ ID NO: 28486 - RNA, 66 nt, Homo sapiens
ggcaacccggccccaagccggaagaaccgcagccgagcggggccggccacagaggagccaccgcgc

SEQ ID NO: 28487 - RNA, 81 nt, Homo sapiens
aaaggcgaggagagagcgcgacgagcaagcccccaacaccagcaaccccgggggagacaagccggacggggcagcgggcag

SEQ ID NO: 28488 - RNA, 72 nt, Homo sapiens
cggggccagcgccggcaggcggagccagacggaggcgagcagaccgcgaaggacgcgggcgcggacggcagg

SEQ ID NO: 28489 - RNA, 84 nt, Homo sapiens
agggaaagaagaaggaaaaacaagacaaaacaccaggcgggccagcagaaaagaggcgagaacgggaagcgcacaaggaaaccc

SEQ ID NO: 28490 - RNA, 75 nt, Homo sapiens
gaaagaaccccagggaacccggccaagaagaagcacagaacgggaagcagaggcgcgagaaacagggaaacgaga

SEQ ID NO: 28491 - RNA, 77 nt, Homo sapiens
agggcgccgccacgccgcaggaggcggaggacaaaaacgcggaggggaccagagaccaaaaaaaaaacgcgaacacc

SEQ ID NO: 28492 - RNA, 79 nt, Homo sapiens
aggaccgccaaacccaaaccaccacagccgccgccaggaggaccgcgccagcagcgaacccagaagaggaaccccagga

SEQ ID NO: 28493 - RNA, 79 nt, Homo sapiens
acagacaagggcagacccgaagcaaagggacaggagaccggagaaagcaaacaacacaagccagcaaggccgcggcccc

SEQ ID NO: 28494 - RNA, 82 nt, Homo sapiens
cagcccgaacggagaaagagacagaagccgggagcgccgccaacggaccgcgccggcagacaaaaacggaggaaaaggagac

SEQ ID NO: 28495 - RNA, 70 nt, Homo sapiens
aaaagaacacagggagcgagaacgggccaggcaggaagggcccacggccaaggcggaggagaggcacaca

SEQ ID NO: 28496 - RNA, 79 nt, Homo sapiens
ccgcacgcggccagcgcgagggacccggccagcccagacaaagaggcagcgaacgccaaaaacagagagaagcagcgac

SEQ ID NO: 28497 - RNA, 76 nt, Homo sapiens
ccaagagaaaaggagaaagggagcgcaagaggagaccagggagcccaggcaggggaccaaaggaccccacaaagaa

SEQ ID NO: 28498 - RNA, 64 nt, Homo sapiens
caggacgcgaggagcgggcaagggggcaccagccgaagccaggcaagcaagaaccaacaagaag

SEQ ID NO: 28499 - RNA, 99 nt, Homo sapiens
ggaccaagcgcagggacgcgcccaggccaaaaggagccacacccccgcagccaggaccgcacaggcgcaggcgcaaggggccaggggaccaggcacccg

SEQ ID NO: 28500 - RNA, 73 nt, Homo sapiens
caagcagcacgcgggaagaggagacggaaggggaggcggaagccacaaacggacggccgacaagaaggagaag

SEQ ID NO: 28501 - RNA, 71 nt, Homo sapiens
gaacacgggacacccaaaccagaagccgacacaagagagggccgaggcagacaagggaaaggccgcgcagg

SEQ ID NO: 28502 - RNA, 78 nt, Homo sapiens
cggcccgcggagagcaagaccgcaacccgccagagccggccccacgggcacgcaggccgggaaagcggagagaggcgg

SEQ ID NO: 28503 - RNA, 85 nt, Homo sapiens
gagacagagcagcacagaaagagaagggccagaaggagcgaagagcgcggcggcccacagcagcggccgaggaacggagccagcc

SEQ ID NO: 28504 - RNA, 84 nt, Homo sapiens
caccggagagcgaggacgacgggaggcggagggcgcccggcgaggagcgccaggcgagagggacggaaacagacgacgacacgg

SEQ ID NO: 28505 - RNA, 58 nt, Homo sapiens
ggagagacgcgaagaagaagagggaaggacggagcaggggagaagcagaccgcaccag

SEQ ID NO: 28506 - RNA, 72 nt, Homo sapiens
aaagcggagcgaccgaccaggcaaccacgggagaagccaccgcaggaagggaggccagccgcgaggacaacg

SEQ ID NO: 28507 - RNA, 81 nt, Homo sapiens
gggacccggcgaagacgcgaccgcggcgcgagcaccaggaaggacaacccgggggacgccgccacgaagaagagacgccac

SEQ ID NO: 28508 - RNA, 82 nt, Homo sapiens
ggcagagccagggaccaacaacgcccgccggggaacgagccgcaaagcaaaagggaagaaagcaaccccaaaggccccgcac

SEQ ID NO: 28509 - RNA, 73 nt, Homo sapiens
gcaaagggaaacaaaaacaacgggaggcggaacacgcaccggacaagccaacggcacacggcacggacagggc

SEQ ID NO: 28510 - RNA, 60 nt, Homo sapiens
gcagcagcaggacggcaggagacagaggacagggaacgggaaagaagaagggggaaaaaa

SEQ ID NO: 28511 - RNA, 69 nt, Homo sapiens
gagcgccgccaaggacgaaagaagacagagaagcaaagaagcagggaacaaacagcagccagacgacag

SEQ ID NO: 28512 - RNA, 59 nt, Homo sapiens
cagcaccccaccggaggcccgcggccagcaacccccagacccccggcacacgggacccc

SEQ ID NO: 28513 - RNA, 70 nt, Homo sapiens
cacaggggcagagagcagacccaacccaacacacaggaagaacaaaacaggacaccgggcagccgcagaa

SEQ ID NO: 28514 - RNA, 59 nt, Homo sapiens
agcagaaaacacagacaggccaaggaggaagaacgagacgccaaacaagaagaaggaac

SEQ ID NO: 28515 - RNA, 71 nt, Homo sapiens
cccgacacgcagcgcagcaacccccccaacaagcggccaaagaaggaagaccaaggcgaaggcgcagaaca

SEQ ID NO: 28516 - RNA, 75 nt, Homo sapiens
gcccgccgccgccgcccgccccgccgcccgccgccggccggcgcgcgccccacagacccacgggaacagcacaga

SEQ ID NO: 28517 - RNA, 88 nt, Homo sapiens
ccccaaagcgcagcacaagcccgaccgagcccaccacgcagagagaaaacgccggcacagagcaagaaagaaagccaacaacagggag

SEQ ID NO: 28518 - RNA, 69 nt, Homo sapiens
aacgggcaaaccagcggagggaacagccaaggccacagacaacgcacaaaaggcgaggacaacgggagg

SEQ ID NO: 28519 - RNA, 72 nt, Homo sapiens
gcccaagagagcaagaccgggcccacgagaaacaacgaacgagcaaggaagggccaaggcagaccccacacc

SEQ ID NO: 28520 - RNA, 72 nt, Homo sapiens
gcaaaaaccaagcagaaaaacagaaaaaaagagggccaacaacggaaaacagacagagcgccagaggccacc

SEQ ID NO: 28521 - RNA, 84 nt, Homo sapiens
agcgcagcgccaagcaacgcagaagcccggcgccgggaagcccagccgccgaaggcccccagaaccaccacacggaacccacac

SEQ ID NO: 28522 - RNA, 77 nt, Homo sapiens
cccaccgcgcccagcggcacacaacaccaaggccggcccaggagggccagacaaggggaacacaagaggagagaagg

SEQ ID NO: 28523 - RNA, 73 nt, Homo sapiens
acacgaaagaaggcaaaaacacacgggagggaggaagcagggccccgaagggagggccacggcgcgcccgcaa

SEQ ID NO: 28524 - RNA, 63 nt, Homo sapiens
agggacaacacggcgaggcaccccaacagcagagaaacaaggggggcccggcgagcgaccgcc

SEQ ID NO: 28525 - RNA, 75 nt, Homo sapiens
gcccgggcggggccggcagcaccgcggccgcaggcgcggagcgggaaagacacggagcaggccggaggagaccgg

SEQ ID NO: 28526 - RNA, 85 nt, Homo sapiens
acaagagacgggacaagacagggcaaaggacagaccagacgaggagacggagagccgaggcggccaagcagcgacagccgaagcg

SEQ ID NO: 28527 - RNA, 53 nt, Homo sapiens
accaacccgcaaagggggcagcaccggagaagggcccaccacacacgcagggc

SEQ ID NO: 28528 - RNA, 103 nt, Homo sapiens
accagggaaggacggacacaaagagcaaccgacccacaggacagacaagggaggcgaggacggacaaaaggaaacggacgggaggccagccagcagaaggagg

SEQ ID NO: 28529 - RNA, 69 nt, Homo sapiens
aacaagcaagagcgagaaaggagccaggcgccacaggagccgcagaagcaaaggcaccgccaaaccgaa

SEQ ID NO: 28530 - RNA, 80 nt, Homo sapiens
gagccgggaaggggcagaacaggcagggacaacccaaagacggccaccgcgcaggaccagcaccacggcggacagccaaa

SEQ ID NO: 28531 - RNA, 69 nt, Homo sapiens
gaaaggcacagaccgaagagcacagaaagccgcgcgagaagaagcaacgcccagggaagagaacggacc

SEQ ID NO: 28532 - RNA, 73 nt, Homo sapiens
ggacgccccacggagaaagagaagaagacggaacaagaaaggaccaggagccccgggcaacagacagagggac

SEQ ID NO: 28533 - RNA, 73 nt, Homo sapiens
ggaaagacgagacggaagcaccaccaccaggcaaagccggcaccacacggcaacaggcgacgggcggccaaca

SEQ ID NO: 28534 - RNA, 83 nt, Homo sapiens
ggacacagccccaaacaggacgaaggcggcgaagacaagcagaccggaagaccgacggaagaccacaccccgagggagcccag

SEQ ID NO: 28535 - RNA, 79 nt, Homo sapiens
ggcggcgcccagacaggccggagcacaaccccacaaggacaacgaggcaacgcagacccagcccaaaagaaaccaggga

SEQ ID NO: 28536 - RNA, 67 nt, Homo sapiens
ggacgcgcgcggggcagccaaaagcaggccggcaccggaggcagaacccaaggggcaggaagaggca

SEQ ID NO: 28537 - RNA, 88 nt, Homo sapiens
gcagccccagggcagcagcagcagacagcagacagacagccaggcgcccagaggggccccggagccagcaggacaggcaaaaagacag

SEQ ID NO: 28538 - RNA, 80 nt, Homo sapiens
gcagggagaagaccagcaagcgggcggcaagacacggggcgacgccacagagaaagcgccgaagcaccaagcgcaagaga

SEQ ID NO: 28539 - RNA, 73 nt, Homo sapiens
caaggcaaagaaccggccaagccgaccaccccccaagaacgaagacccccaggggacaagaaccagcagaaca

SEQ ID NO: 28540 - RNA, 72 nt, Homo sapiens
agaggaaaaacacaggccgccaggagaagaacagagcagaccaacgccacgggagccgaagcgggagaaagc

SEQ ID NO: 28541 - RNA, 76 nt, Homo sapiens
agggagaccacagcaagacgccaggacccacggaagccagaaagggggaaagcaggggagaaaagaaaagaaagac

SEQ ID NO: 28542 - RNA, 77 nt, Homo sapiens
gagcacaagcagaaaaaggaaaagaccacagaagcagaaagggacggcgggcaaaaaaaggaaaaagcgcgacacag

SEQ ID NO: 28543 - RNA, 85 nt, Homo sapiens
agaaacgggccgcgaaccgcagacagcggccaagaagacacaaaggacggaggcacgaacaccagaggaagacaaaagaagagag

SEQ ID NO: 28544 - RNA, 42 nt, Homo sapiens
gggacggagagaacacgagcccacagcccacagaggccccag

SEQ ID NO: 28545 - RNA, 91 nt, Homo sapiens
gacggcggccggacgccgaccggagggggccggggagcccgaccggaccgcggagaacaagcacaagcccggcggagcccaccaccacggc

SEQ ID NO: 28546 - RNA, 30 nt, Homo sapiens
aagaggacaacaggagcccgcggccagaga

SEQ ID NO: 28547 - RNA, 77 nt, Homo sapiens
gcacccaaaaaacggcagggaaaccagcaacaagagaaaacccggagacccggccaaacagggccggggcggaccag

SEQ ID NO: 28548 - RNA, 77 nt, Homo sapiens
gcaaaacacggagcccagcagggcccggaggccccggaagcagcaccaaccaggcaggaccaagagaaaggaaaacc

SEQ ID NO: 28549 - RNA, 86 nt, Homo sapiens
ccggaccccgcggcgcccccggcccggagcaacgagcgcagcgccggacagcccagagcaagcacacggaggcccgggagccagac

SEQ ID NO: 28550 - RNA, 78 nt, Homo sapiens
acgcgacgcgagagaaggacccacggcgcgcgaagccgcagcgccagcgaggggcccggagaccagccaaccggaccg

SEQ ID NO: 28551 - RNA, 89 nt, Homo sapiens
acagacccccaagccggagggaacgcagccagcgccacgacaaagccccccgaaaagggcaaagaaaaaggcacaaacccagcacagag

SEQ ID NO: 28552 - RNA, 76 nt, Homo sapiens
acagcaagggacagacgggaaaaaagagcaccaaaaccggagcaggcaagggccaagcccacaggagcggacccga

SEQ ID NO: 28553 - RNA, 82 nt, Homo sapiens
gcgagcaagccggaccgagacggcagcagagcagcagaggaggggcagcagcaggacagggaacccgggagacagcaacaga

SEQ ID NO: 28554 - RNA, 83 nt, Homo sapiens
gaggggccgccgccccccaaagcagcacagcagaccagcccccccaccccacgccccccgcagagggaagaagccgggcgacc

SEQ ID NO: 28555 - RNA, 83 nt, Homo sapiens
caaccgccggcccccacgcaagcgacggccccaaccacggagcaacgcaccggaacacaacacaccgggagcggagaacagga

SEQ ID NO: 28556 - RNA, 83 nt, Homo sapiens
acccgggaggggcggagggcaagagcgccgaccgggcggcgaggaaggcgccccggagcccacgcaggagacgggaggagcga

SEQ ID NO: 28557 - RNA, 54 nt, Homo sapiens
ccgggaaggggagccaccagccccccgaacggccgagcgaccaggagaggagcc

SEQ ID NO: 28558 - RNA, 78 nt, Homo sapiens
cgcccaagcaacagaggagcccagagcaggggggccgaggagagagacaccaggccgcaaaaggcagcaaagaacacg

SEQ ID NO: 28559 - RNA, 73 nt, Homo sapiens
cgcaggaacgggaacgcaggagcgaccaggagcggcagcccacaagcaggaagaccagccccaggagggaaac

SEQ ID NO: 28560 - RNA, 66 nt, Homo sapiens
accagcagagggccgacggcgccaacggccgacaagcccgacgaagaccggcggccacagcagcaa

SEQ ID NO: 28561 - RNA, 99 nt, Homo sapiens
ccagggaccccacgacagaaaaacaacaagaccccagccaacagaggacgaaagagaggaacgaaccccgcgcaacaacaccaaacgccggacaaccgg

SEQ ID NO: 28562 - RNA, 86 nt, Homo sapiens
gggagcgccggggagccggccgagcggaggccgaggcacccgcgcaggggcaaagaaaaaggagagaaaaagaggcaaaacaacaa

SEQ ID NO: 28563 - RNA, 47 nt, Homo sapiens
cccaaaggcgggaaaggggaaggcacggagacacaacgaagcccaag

SEQ ID NO: 28564 - RNA, 64 nt, Homo sapiens
ccgaccaccagaagagccaaacacaagaggaaccaaacgaggacgccaggaaagcaggcagagc

SEQ ID NO: 28565 - RNA, 70 nt, Homo sapiens
gagccaacgaaagcgaggggagagcaaaaagcaagccagaaaccagaacagagaaaaggaggccggacaa

SEQ ID NO: 28566 - RNA, 80 nt, Homo sapiens
cgcggggcgcagcgggggaggcgcgaggcggcgcaccgacggcgacggagcagcggaaacaacggggagaaacccgaggc

SEQ ID NO: 28567 - RNA, 72 nt, Homo sapiens
cgacgcgccccgaggggaggaccaaggacacgccccaggaagcagaagcgccaaggagggaccccaagaaag

SEQ ID NO: 28568 - RNA, 55 nt, Homo sapiens
gcagaagcgacgcccccccggccagcagggcacacggcaggccaggaagcaggca

SEQ ID NO: 28569 - RNA, 63 nt, Homo sapiens
caccaggccgcgaaaaagacccggccgaagcaggacacaaagaaaagacgaaggaagcaacac

SEQ ID NO: 28570 - RNA, 84 nt, Homo sapiens
ccgcagaggacagcgaccacggaccacaggaagcggacccccccccaggagggccggggacgagggcgcccggaaggcgcgccg

SEQ ID NO: 28571 - RNA, 84 nt, Homo sapiens
gggaccccgcagccgcagaggaggagcgcagcccggcccggcgggaacacaagcggacggaagcggacgacgaggccaccgccg

SEQ ID NO: 28572 - RNA, 75 nt, Homo sapiens
aggcccggccgggccaaaacgcggaacgggccgcaaagccagcgagacagcagggcgcaaacgcgcgaacgggcc

SEQ ID NO: 28573 - RNA, 61 nt, Homo sapiens
agggggccgagaacaagcacagaggcacacccagaagccacaggagaagcaagaggcggcc

SEQ ID NO: 28574 - RNA, 82 nt, Homo sapiens
agcgggcccgagccaggccggagcgaggagaacgacgggcgccgcccagcaaagcgaagagagccaccggcagaagagccaa

SEQ ID NO: 28575 - RNA, 69 nt, Homo sapiens
ccccgacagcagaagacagcagagggacgcacacagccaggccaagagcagagggaagcgacaaggacg

SEQ ID NO: 28576 - RNA, 68 nt, Homo sapiens
caaaacacacgaaacaccgaacggaaaaacaaaggaggaaacggaaggaggagcgcgccgccgcaaca

SEQ ID NO: 28577 - RNA, 45 nt, Homo sapiens
agccacgggcaaggacgccccaaaagcagaagcggacaggacggc

SEQ ID NO: 28578 - RNA, 72 nt, Homo sapiens
gcagcccgcacccggggccccggggcccgacaagagaggcggagccacccccacaacggaccaggagaaggg

SEQ ID NO: 28579 - RNA, 78 nt, Homo sapiens
cgggcagccaggcccccacagcccgcagacagaccaaacagcggcgcacgaaaacagagcgaagacgacccaggccag

SEQ ID NO: 28580 - RNA, 70 nt, Homo sapiens
ggccaagacggagcagaaccgagagcagaagccagcggaaaagagaaggggggacggcggcccccccccg

SEQ ID NO: 28581 - RNA, 73 nt, Homo sapiens
gagcgagggccggccccgacaggacgggagagccggaaaacagcacagaaacgggccggagaaacagacagga

SEQ ID NO: 28582 - RNA, 41 nt, Homo sapiens
gcgaagcgagcccgagccccggggacagcccagaccaaacc

SEQ ID NO: 28583 - RNA, 73 nt, Homo sapiens
aaaacggggggcccacaggccccgggagcgcggcccagcggaagggacgcgaagaaccccaaggacaagaagg

SEQ ID NO: 28584 - RNA, 65 nt, Homo sapiens
agacaggcacgaaacccgaaaagcagaaaacgcccaaaccagaggacaggaaaagccagagagcg

SEQ ID NO: 28585 - RNA, 54 nt, Homo sapiens
cagcaacagcgaagcgccgggaagagaaagcaggaccggcacgcgccggcaggg

SEQ ID NO: 28586 - RNA, 80 nt, Homo sapiens
ggccacccacggccgggcagaccccaagagaaaggagccccccaagagaaaaggaagcggcaaacaagaccagagcggca

SEQ ID NO: 28587 - RNA, 68 nt, Homo sapiens
gagaagaccacgcacacgcagccagcgcgaccaccgagacaagccggccaccggaaccagacaccgcg

SEQ ID NO: 28588 - RNA, 82 nt, Homo sapiens
aagagaacaaaaaacaccacagacacgcacaggagaagggcccggagagcaaggaaccggagcaaacgacccgaccagcgcg

SEQ ID NO: 28589 - RNA, 73 nt, Homo sapiens
aggcaaggacaggcacacaaagaaggagacgggggcacgggagcaggaaggacagagagccgagcggggcagg

SEQ ID NO: 28590 - RNA, 74 nt, Homo sapiens
gccgccggcggggaagggaccagggcgccgggccggcccgggcccagcccccgaaacaaagagacgcacggcgg

SEQ ID NO: 28591 - RNA, 57 nt, Homo sapiens
ggcgacgccccaggggaaaacccccgggaccagagaccaagcgaccaagcaagcagc

SEQ ID NO: 28592 - RNA, 73 nt, Homo sapiens
gcgccgcgaggagacagaaggcaaagccgcagcgcaaaaccagcacagcacacaaggcggaccccaaacaacg

SEQ ID NO: 28593 - RNA, 77 nt, Homo sapiens
acaacggaaaagcaaggacaaggccaggagcaccagcgaaagcagccagcgagaagacacacagaaaaaacgacagc

SEQ ID NO: 28594 - RNA, 72 nt, Homo sapiens
caggccccgacgccccgaggcgcagagccagaaggcaaacacaaccgcagcggcagagaacaacaagagcag

SEQ ID NO: 28595 - RNA, 81 nt, Homo sapiens
gcagcgcacggaggagcggcgggccagacaggggaaaagagacgcaaaccacgaggacagagaagagagaagccaccagca

SEQ ID NO: 28596 - RNA, 64 nt, Homo sapiens
agccccgaagcgacaccagcccaaccccccagggcgacgggacaaacacaggaaggaacacccg

SEQ ID NO: 28597 - RNA, 78 nt, Homo sapiens
cccccgagacggaggagagggccggggcagagagaagagcacacagaaggccaggagcgacagagcggggaacacgag

SEQ ID NO: 28598 - RNA, 67 nt, Homo sapiens
cacgaagggaggaaaagggcagggacagcgcaggcagcaggaacaagccgcaagaccgaaaacccgg

SEQ ID NO: 28599 - RNA, 99 nt, Homo sapiens
aaacgccccgggcccacgacccagcggccccggaaaagacagagcagagagagcagccacaaaaagaaagcaggcaagccacggacaaagggccacacc

SEQ ID NO: 28600 - RNA, 77 nt, Homo sapiens
agcgaaaaacccgaccccccaagcagcacagagcggcgcgcaagcgcgcaggaacggggacgccagcaggaaacaga

SEQ ID NO: 28601 - RNA, 70 nt, Homo sapiens
gagggcaagacagcgagggacgaaggagaccgcgcagcgcagcaggggccacaaagacaggcaaaagggg

SEQ ID NO: 28602 - RNA, 68 nt, Homo sapiens
aggacccagcagggcaccagcgaaccagaaaaggaaaacgggaccaacggggaaagggaaacgccaag

SEQ ID NO: 28603 - RNA, 72 nt, Homo sapiens
cgcagggcgcccccgccgcgcagacaaggcaggaaccgacgcccagggcacgcccccccaagagcaaaagca

SEQ ID NO: 28604 - RNA, 84 nt, Homo sapiens
aagaagccagcccggcaagagcaccagaagcggccgaggcggcaaagaaacgaggccgaagaaggagcacgcccccgcccccgg

SEQ ID NO: 28605 - RNA, 71 nt, Homo sapiens
cggggaggccccagcgcagcagagcgccaagacgcgaaggagaggaaaagaggacaaggcaagggaagcac

SEQ ID NO: 28606 - RNA, 73 nt, Homo sapiens
ggagagcaaccgggcaaaaccggaaaagggagaccagaaacgcagaaggcaaaggagacgaccaagaagagag

SEQ ID NO: 28607 - RNA, 65 nt, Homo sapiens
ccaaaaccagggcggcaaaacgagcgggccagagaggaagaaaggaggcccggaagaggagggag

SEQ ID NO: 28608 - RNA, 71 nt, Homo sapiens
agaaggcccagagaggggcaacaagggcgcaagggccgaaccccgcggggcacagccacccggccacgaca

SEQ ID NO: 28609 - RNA, 38 nt, Homo sapiens
cccccggaccgaccagggcagacccaggccgccagaag

SEQ ID NO: 28610 - RNA, 37 nt, Homo sapiens
cccagaaagccaagccgggccgacacgaacggacaac

SEQ ID NO: 28611 - RNA, 86 nt, Homo sapiens
ccgcagcccaccagccgccgcaagcaaggcaaaccccagcacaagcaaacgggaaccgcggccgggggcaagacggagagaacggc

SEQ ID NO: 28612 - RNA, 79 nt, Homo sapiens
gcaccccagagccgacccccaccgcaaggccgggcccaagaagcacgaagcgggggcagcccaaagcaggagcggaaaa

SEQ ID NO: 28613 - RNA, 72 nt, Homo sapiens
gaggcacaacgaaacccaggacagcagaccacagcccggcaggcccaaaaacccaaagggacagaagcaccc

SEQ ID NO: 28614 - RNA, 92 nt, Homo sapiens
cggggcaggcccccggaggcgcagggcgacggccccaccccggccacgggacggcggcgcggagaaggcagaccgagaacaggaagaacgga

SEQ ID NO: 28615 - RNA, 59 nt, Homo sapiens
ccaaaggcggagcacacaaaaaacagcgccgcccggagcaagagaggccacggcgccca

SEQ ID NO: 28616 - RNA, 73 nt, Homo sapiens
ccggaggagaagcaagaaggcccggacacagcaaaccgggccacagggcccaacaacagagccgcagcggaaa

SEQ ID NO: 28617 - RNA, 79 nt, Homo sapiens
caacgccgaccagcgacacgcggccgcggagaccaccgcggcgcggcagcgcgcccgaggaaacccaagaagaaacaga

SEQ ID NO: 28618 - RNA, 83 nt, Homo sapiens
cggccacaacccgcaggacccaaggcacgggagaaagccccagcgaggaagaaaggacccggcaggagcgcggccagccggcc

SEQ ID NO: 28619 - RNA, 41 nt, Homo sapiens
aacccaccacgggaggccgagccaccggccgagccccgaag

SEQ ID NO: 28620 - RNA, 75 nt, Homo sapiens
agcaaggaaagagcgcccaagacagcccagcgcaagacgccacacacagaacgacaccacagcgacaaccggcga

SEQ ID NO: 28621 - RNA, 65 nt, Homo sapiens
aaagcgagcgagcccaggccgcgcgccaaaacgaggcaaggcaggcacccccgacagacaaaccc

SEQ ID NO: 28622 - RNA, 85 nt, Homo sapiens
gcggccagcaggaggcgagaaggagccgcccgcagcgaggagccggagcgcacagagaagaggggacaagaggaccaagagaaga

SEQ ID NO: 28623 - RNA, 65 nt, Homo sapiens
gacacacaaccgcccagccggcgagggacgccgcaggacgcccaaacggaacagcgagacacggg

SEQ ID NO: 28624 - RNA, 75 nt, Homo sapiens
cgcggccgcggcacgaagaccaaggggcaaggaggccaggaaaaaacacggagaagccagaccgacaggagcaaa

SEQ ID NO: 28625 - RNA, 88 nt, Homo sapiens
cggcggcggagcggccggccacggaggagaaacgaaggaggcccaaccacaaaaggagccgacggaacccagacggagaacaaaagga

SEQ ID NO: 28626 - RNA, 75 nt, Homo sapiens
gaacgcccgccgggccccagaaagacccgccgaaaaagcgagacagaggaaagaagggaacgagccaccaccaga

SEQ ID NO: 28627 - RNA, 69 nt, Homo sapiens
ccacgaagaaagaacaaacccagcagagcagacaacggcaagcggagaagagcaaggccgaaccgagag

SEQ ID NO: 28628 - RNA, 53 nt, Homo sapiens
gggagaccccaaccgcagagcgcccgggcgggaagcggggaaaggaaaacacc

SEQ ID NO: 28629 - RNA, 84 nt, Homo sapiens
ggagcgggaggccagcacggccgcggcggggcccccccgcgaccccacgagaaacggcgaggaaagagaggagccccggaaaga

SEQ ID NO: 28630 - RNA, 79 nt, Homo sapiens
gccgagacaccagcccgaaacaccaccaagaaccggggagaccacgacgcgccccgggcgccagagccgcagcccagcg

SEQ ID NO: 28631 - RNA, 78 nt, Homo sapiens
gacacacgcaacccaaggcacaggcaggaaggagaagcagaagcccgcacagagcagggaccccaaccgccgggggag

SEQ ID NO: 28632 - RNA, 85 nt, Homo sapiens
agaagaagccacgaaacagcccaagaagcaggccaaggagaggacgagaccggaccggacgcccaccgcccaggggacaagaaac

SEQ ID NO: 28633 - RNA, 88 nt, Homo sapiens
aaccccgggacaccccgagaccagccaccacacaggcccaggaggccagagccacgaagcggcggcggccccgggggccagggggccg

SEQ ID NO: 28634 - RNA, 77 nt, Homo sapiens
aaggaccaagaaccaggggccaagcgacagagaagcgacggaacagaaggagggagaagaaaaggacccaaagcaga

SEQ ID NO: 28635 - RNA, 81 nt, Homo sapiens
acccgcccccccaccccgggccagcacgacgacccacaaaaaggcgcgccagcgaaaagggcacacaggcccgagcacaaa

SEQ ID NO: 28636 - RNA, 75 nt, Homo sapiens
gccgaggaagcggaagcgcagccacaaggccgcaggggagccgagagccacaggaaaaaccagaagagaaaaaac

SEQ ID NO: 28637 - RNA, 72 nt, Homo sapiens
gaagagaagaaagcgaaccacaaacacagacagcaggcaaagcccccgacaggggacaggccgcgcaagccg

SEQ ID NO: 28638 - RNA, 58 nt, Homo sapiens
ggacacagacaaaacaaacagaggaaaagccagggaggggccccaggcaagcacgaag

SEQ ID NO: 28639 - RNA, 73 nt, Homo sapiens
aaacggaagcaaggaaaacaagagaccggccagccacagagcagagaaagccggaccagcagggagccggggc

SEQ ID NO: 28640 - RNA, 61 nt, Homo sapiens
gaaacaggacagaacaacaaaagaacagcagagaagggaacggcaagagggagaagacagc

SEQ ID NO: 28641 - RNA, 78 nt, Homo sapiens
gggaaaggaaacgcagaagagcagaaaacaacacgacagccaggcagacacacgaagaaggagcaagcaagaggaaag

SEQ ID NO: 28642 - RNA, 77 nt, Homo sapiens
ggaaacagcgcaggaaccaaagcaccagcacagaggaaggcgacgccgaaaacaccgggaggaggaagaacacccag

SEQ ID NO: 28643 - RNA, 70 nt, Homo sapiens
caaagcagcgaccccagcagcagcgacagaccggacagggcaggacgacacacagacccacaccacacac

SEQ ID NO: 28644 - RNA, 72 nt, Homo sapiens
cggacaagaggcgccagagacaaggccacaagcccggcagaaggcggcagggagcacgcaccaggagcccac

SEQ ID NO: 28645 - RNA, 53 nt, Homo sapiens
aacaaagcccagcgagagaccgacacagacaacgacgaacgacaaacgacgaa

SEQ ID NO: 28646 - RNA, 76 nt, Homo sapiens
cagccgcggacgccgcgccagcgacaaacaagagaaggcccgcagcaccaaaaaagacaaaacacaaaaaaacaca

SEQ ID NO: 28647 - RNA, 75 nt, Homo sapiens
aaccgacgggagacgacggcgagaaacacgccacgagaggacacaaaccaccgagcccccggaagcacagcccca

SEQ ID NO: 28648 - RNA, 65 nt, Homo sapiens
gccgcgcagaaggccggggccggccagaagcgggcggcgcgggggagagaacgaaaacaaacgga

SEQ ID NO: 28649 - RNA, 68 nt, Homo sapiens
gcccaaaacaagcgaaggacccaacaggcgcccagaacaacgccaagggaagggggagcaggagccgc

SEQ ID NO: 28650 - RNA, 70 nt, Homo sapiens
gaagaagaggcccaacccccaccccgcccaaggaggcccagcgggaccagaccaccacagcgccccgaga

SEQ ID NO: 28651 - RNA, 70 nt, Homo sapiens
caacccacaccaggccagccgggaaccgaacccaaaacgagagcccaaaaggcagagcgaggagagaaga

SEQ ID NO: 28652 - RNA, 35 nt, Homo sapiens
ggggaccgagcgcagagaccagcgaaccagaagaa

SEQ ID NO: 28653 - RNA, 42 nt, Homo sapiens
ccgacagccgcagaacggaggaagaggcagagaggacggacc

SEQ ID NO: 28654 - RNA, 79 nt, Homo sapiens
agaccaccccggacaagaagaagaaacagacccaagcgaacgcagagcaagggcgcaggccgggcaccgccccacgggg

SEQ ID NO: 28655 - RNA, 86 nt, Homo sapiens
caccgaaaggagaaacagccggcaagacaacagcgagagcagaagaagcacggaagggcgaagcagaagagaaaacagccccgcgg

SEQ ID NO: 28656 - RNA, 71 nt, Homo sapiens
ggcgaaaaggacgggcccccaagaaaccaagaaaaagacgcgaaaaagggcaccggacgagacggaaccgc

SEQ ID NO: 28657 - RNA, 55 nt, Homo sapiens
cccgagagcgggagcagcagaagagaggaaacagaggaagagaaaacaagaacaa

SEQ ID NO: 28658 - RNA, 77 nt, Homo sapiens
cccccccacccccggcccgggagcccccgcccggacaaacgagaaggagacccaaccagccagacagcccgcggaga

SEQ ID NO: 28659 - RNA, 77 nt, Homo sapiens
ggagaaggcagccaagccaggaaccagaggagacaggccgagaccgagggccccgcaccccggagaagagccccgcc

SEQ ID NO: 28660 - RNA, 52 nt, Homo sapiens
cggcgccaccgcccagcacggagcccaagaacggaccgagggaagcagagca

SEQ ID NO: 28661 - RNA, 86 nt, Homo sapiens
caaggccaccaagagacaaaagaagagaaagccccaagcgacaggggagggacccaggccacagaccccaccagcacgaagggaca

SEQ ID NO: 28662 - RNA, 71 nt, Homo sapiens
caacgcacaaaagggggggagcaggacaacggccaaaagcggaacgagcagggccgcggaggcagcgagcc

SEQ ID NO: 28663 - RNA, 56 nt, Homo sapiens
cacagcgggggagaggggccgggggcaacccagggaagaaggcgcagaccggaggg

SEQ ID NO: 28664 - RNA, 41 nt, Homo sapiens
accacgaggcaacgccccagggcggagcgagggcacgcaca

SEQ ID NO: 28665 - RNA, 57 nt, Homo sapiens
agccgcaaaaacacagaagcagggcggacggcagacaggcagcaaccggccccgccc

SEQ ID NO: 28666 - RNA, 72 nt, Homo sapiens
accaagaaccagggacagccaaagaccggagcggagagagaagaaacaggccacagagaacaggccggagca

SEQ ID NO: 28667 - RNA, 67 nt, Homo sapiens
ccggaagccaggcacaccgcaaggacccaaaggggagacccagccccgggccggcggggagacccac

SEQ ID NO: 28668 - RNA, 79 nt, Homo sapiens
cggcggcacccgcacccggggacaagcgcgggaacggcgcggaagggaaagaacgccggacaacagcggcgaagaaggc

SEQ ID NO: 28669 - RNA, 70 nt, Homo sapiens
ggacacgggccgacccggcgccaagaccaacaagaaaaacccaggagagaccaaacaaaccaaggcacgg

SEQ ID NO: 28670 - RNA, 72 nt, Homo sapiens
aagaaggaaggaaagaaccggggaaaacacaaagcaaagaggaagaccaggaacgggacaggcgcacgagag

SEQ ID NO: 28671 - RNA, 78 nt, Homo sapiens
ggccccagcgcacggaccgccggccgggcggccccgccacccacaggacccagcagccagcgaagccccaaggaagcc

SEQ ID NO: 28672 - RNA, 76 nt, Homo sapiens
aaccaaccccccccaaaaggaccaagaaaaggagaaaagacagccaaacacgaaagcccaggccagaggcagcggc

SEQ ID NO: 28673 - RNA, 60 nt, Homo sapiens
ccaacccggacggacaacaccggggagcgcggagcagagaaagggggaggcggacccggc

SEQ ID NO: 28674 - RNA, 75 nt, Homo sapiens
cgccgcacaacgcagaagacgaccccgacgcaggccaggagccgcggacagaagccgagcacggccgagacaaaa

SEQ ID NO: 28675 - RNA, 75 nt, Homo sapiens
gccggggcccagccggaggcggagcagaaaaccacagaggaggggacggacaaagaggccaaagagaaccagcac

SEQ ID NO: 28676 - RNA, 66 nt, Homo sapiens
gaagcaggagaaccagagaaagaggcccacaaaaccaaacaggcacacgggcgaggggggggccaa

SEQ ID NO: 28677 - RNA, 84 nt, Homo sapiens
ccccgagccgccgaagagccccggcgcagcgcgacaggaccaggccaaccggagcgcacccacgccacaagccggacggcggca

SEQ ID NO: 28678 - RNA, 75 nt, Homo sapiens
caacagggcaaaggccccgacaggaaacagaacgacagcccgcaccgacgccggcggccagccagagagcacgcc

SEQ ID NO: 28679 - RNA, 77 nt, Homo sapiens
cggaaaaccaaccagaagacgaacaaacagcaagaaagaccacaagaccaggacaaaggccagaagcaggagagcac

SEQ ID NO: 28680 - RNA, 81 nt, Homo sapiens
acgcgggccggggagaaagcaccagcacggaaggcaccaaaaaacgacagaagaaccgagaaaaagaaaggcagaagcgaa

SEQ ID NO: 28681 - RNA, 70 nt, Homo sapiens
agaaaggaacagcggaaaacggaccgaaggccgccgaaagcagagaaaggcgagaacgcggacaagcaaa

SEQ ID NO: 28682 - RNA, 83 nt, Homo sapiens
acagccggcgcggagcgccgcaggcggcggccgagggcgcgcggaccccccgcgagagccgcagaagcggccagcccgaagcc

SEQ ID NO: 28683 - RNA, 72 nt, Homo sapiens
gaagcacaggaccaaggagccaacgggggcgaccggcccgcgcaacgccgcgacccgaccgaccggcgcacg

SEQ ID NO: 28684 - RNA, 97 nt, Homo sapiens
gacaccggcacaacagccaccccaaggaaaggcaagagacggccagcccccaggaaagagaaaacagcaggaggaagaaccagagggggaagccaaa

SEQ ID NO: 28685 - RNA, 86 nt, Homo sapiens
gcaccgaaccacaaggaggacgagggaagaagcccagcggaggcgaacggcccccgccaacacgaggaccccacggagaggcccgc

SEQ ID NO: 28686 - RNA, 78 nt, Homo sapiens
agaggagggagaacaagacgaggaacaaaaaccaaaccaggcgagacagcaggagcaccaaaccccaccaaaacggcc

SEQ ID NO: 28687 - RNA, 88 nt, Homo sapiens
ggcggccggcggccagggggagaggcggaggccaggcagcgaggaaacgggggaaaggaaaggccgccaggagaagggccacagcagg

SEQ ID NO: 28688 - RNA, 72 nt, Homo sapiens
gaaaaacacagagggcacacggcacagaccagccgcaccccccgaagaaggggccacgcagagaaaaagggc

SEQ ID NO: 28689 - RNA, 118 nt, Homo sapiens
aagggaccagcagccaaagcccacagccggggaggcgagagaaacccagccgaagcaaaaagaaaaacagagcggggaaagaccaacaaagcaccgagaaagccaaaagaagaaaagg

SEQ ID NO: 28690 - RNA, 37 nt, Homo sapiens
agaaacgggaggacccgaggcgaaggggcgccgaacc

SEQ ID NO: 28691 - RNA, 73 nt, Homo sapiens
agaccagcagacaggagagcacagcaggaaagaggaacaaacagcaagaaggaacgacaaggcgcccagacaa

SEQ ID NO: 28692 - RNA, 89 nt, Homo sapiens
acggaaaaggaacagagccaaaccagaagaggagggcccagaagaaaaagcgaagcacagcaaacaaggcaaggcagagccaccagaaa

SEQ ID NO: 28693 - RNA, 80 nt, Homo sapiens
ggcaggaaggcagcgcacgacagcaaaaggcaaaaaaccagggaaaaaaacaacaagaaaccgcgagaaaaaggaccaaa

SEQ ID NO: 28694 - RNA, 74 nt, Homo sapiens
accaccaaaaccagaagaagagagaacagaggccagcaggaccaacaccagggcggagaacggaaaagcaccag

SEQ ID NO: 28695 - RNA, 38 nt, Homo sapiens
cccaggaccaccagaacggcacgcagcacgggggcagg

SEQ ID NO: 28696 - RNA, 66 nt, Homo sapiens
ccaacacagagccaagcgccaagcacgacggcaaagagagggaggcgaagcggcccaggggcaggc

SEQ ID NO: 28697 - RNA, 79 nt, Homo sapiens
gcaagcaggcaaagacggcaaaagcacaaggaccgcggacagagacaacaccgagagagaagcgacgccggaccgcgaa

SEQ ID NO: 28698 - RNA, 74 nt, Homo sapiens
ccaccagaagaaggaagcggcaagagcggaagcacgaaaaccccagagaagaaagggcgaaggaaaagagaaga

SEQ ID NO: 28699 - RNA, 72 nt, Homo sapiens
gcggagcggagcggcaggacacacagaggccagggaaggacacaccgcggaaagaacaagaagcaaaagggg

SEQ ID NO: 28700 - RNA, 59 nt, Homo sapiens
ccgggagcggcgaagaggcaccggaggaggaccacgagaggagaagagcagaggaggga

SEQ ID NO: 28701 - RNA, 87 nt, Homo sapiens
ccggcgccggagcaggcggacccccagagcggccacggcgagcgaggggcagcaaggaagaaacgcaccagaagaagagaagaccca

SEQ ID NO: 28702 - RNA, 72 nt, Homo sapiens
ggccaggaaacaagacgaagccggagacaggcaggcaaaccacgaaggacacgcaacaccaaagaaaggacc

SEQ ID NO: 28703 - RNA, 75 nt, Homo sapiens
acaggaccacccaaaccacgggccaaaaaagcaggagaacacgagcaaggggaggaagcaaacaagaaacaggaa

SEQ ID NO: 28704 - RNA, 76 nt, Homo sapiens
ccacggcggcggcagacagccgagccccccaaccacaggacaggaagacccagagagaagacagacgccacaaaga

SEQ ID NO: 28705 - RNA, 58 nt, Homo sapiens
cgagggccgggccgcgaggcacccacaacagaaggggcaggcacaggagacacagggc

SEQ ID NO: 28706 - RNA, 70 nt, Homo sapiens
acccacaccagcaaaaggacagggagaggcgccaagcccacgggcgcaccaacggagagccagagcaagg

SEQ ID NO: 28707 - RNA, 70 nt, Homo sapiens
gggaacagcagcggcaggacggaaagacagggacagagagaggcagaagaaaaagcacccccaagcgaga

SEQ ID NO: 28708 - RNA, 58 nt, Homo sapiens
ggcgcgggccacaccagaggagccggaaggggcgagaaccagcgacggagcacgcgac

SEQ ID NO: 28709 - RNA, 74 nt, Homo sapiens
agaaccccaggacgcgcccccgggagcgggcgcccagagaggcaggaaccgcagaacgaagccacaaagggacg

SEQ ID NO: 28710 - RNA, 56 nt, Homo sapiens
aagccaagggaacaccggcaaggacaggagaagaggggccgaaagggagacaagca

SEQ ID NO: 28711 - RNA, 80 nt, Homo sapiens
gccaagaaaaaggacaaggacgccaggaaaccaagacaaggcgaaaagccaggagcaaaagacgagcgcgacgccaccag

SEQ ID NO: 28712 - RNA, 66 nt, Homo sapiens
gcggaggggcacgagcgccacaaccccagggggggccccagcccggccgaacgggcgcacgacaca

SEQ ID NO: 28713 - RNA, 74 nt, Homo sapiens
ccgcaacccagcgagagaaagcaacggggcggcacacaaggagcgaagggcagggagaacgccaggcacagcac

SEQ ID NO: 28714 - RNA, 77 nt, Homo sapiens
acgggacaagagaacagccgcgcggcgagcggcccgcacaaggccggcagaacgccagaacaaacagcgagaaaacc

SEQ ID NO: 28715 - RNA, 68 nt, Homo sapiens
ggggaggagccgcgggccacaagaagacagcggacacacaggaaaacacagcaaggcaggaacaagaa

SEQ ID NO: 28716 - RNA, 63 nt, Homo sapiens
ggggcccggggggaggaggggcaggcccggcggggggagaagaacacgacaagcgcaagcagc

SEQ ID NO: 28717 - RNA, 73 nt, Homo sapiens
cggaggccacagccacaacaacccaggccccagaggaccagaagaagaagaagggacagagaagcaaaggcag

SEQ ID NO: 28718 - RNA, 79 nt, Homo sapiens
ccaaggggaagcagacccagagcacccacccccgagcacgccgcaacacccgcggaacccagcccagaggcgaagccgg

SEQ ID NO: 28719 - RNA, 73 nt, Homo sapiens
gaaccacagcagcccggcaacggggcccaaacacacagcccacccgagacgagaaaagaccaccacaacccgc

SEQ ID NO: 28720 - RNA, 65 nt, Homo sapiens
ggcagcgcgagccgggaagccggaaccaaaaagaagccccagagccggggccaggagccccaagc

SEQ ID NO: 28721 - RNA, 37 nt, Homo sapiens
gcgccgcgggccggccgggaaagacaaggagccgggc

SEQ ID NO: 28722 - RNA, 63 nt, Homo sapiens
cggggcgcgggggccgcgcgaagacaggaccagggcacggagggggggccccagcccggccga

SEQ ID NO: 28723 - RNA, 74 nt, Homo sapiens
gaggaaaggagacggcacccgagagcagaggcgagcgggggcaccagacgcccgagagaaccaagcgcgcagca

SEQ ID NO: 28724 - RNA, 74 nt, Homo sapiens
cggaaccaaacccaagacacggccagacgcacagcaagccgagcaacaagcaaacgaaaaggcagaagaggaag

SEQ ID NO: 28725 - RNA, 76 nt, Homo sapiens
agagcagacccaggaaacaagagaggcggaacgaagaaggacagaacggacaaggcagagcaaggaaaagacggcc

SEQ ID NO: 28726 - RNA, 84 nt, Homo sapiens
cccgaagaggggcggccgcgcggaggaggaagaggaagaagaggagaagagggacggcccaggcaaaagcagaccggaaaaccc

SEQ ID NO: 28727 - RNA, 79 nt, Homo sapiens
gcgacgccagcacgacccaccgcacgcagaagcggagaagggccacgccgcccccagaaccccgacccaaccaacagaa

SEQ ID NO: 28728 - RNA, 104 nt, Homo sapiens
agcagaagaaaagggacgcaagaaacccaggacgagaacagcaacaggccaagaggcaacagcgaaaaccaaccaaacccagacagaggagcccacagagcgca

SEQ ID NO: 28729 - RNA, 79 nt, Homo sapiens
ggaagggcaggcaagacccaccccgggaagaaagcaaacaaggagcaagaggggggggcccccccgaagaaaggaaccg

SEQ ID NO: 28730 - RNA, 69 nt, Homo sapiens
aggaaggcacagaagaaggcccagccagcaccgcgcacccagcagcacccaaagggacagccggcaagg

SEQ ID NO: 28731 - RNA, 88 nt, Homo sapiens
gaaaaccacaagcaggccaaagagagaaggagaaggcagagcccccccaggcagaagcccgagcgggaaccagcgaagccagggcgca

SEQ ID NO: 28732 - RNA, 75 nt, Homo sapiens
cagcacaagagcggacaaagaagggaccgacgacacaagacccagacggacagcagcgaacacaccccaggcccg

SEQ ID NO: 28733 - RNA, 64 nt, Homo sapiens
ccccaacgccccagcggaaggaccgggggccaaaaaggggacaacaccccgccagccgcccgcc

SEQ ID NO: 28734 - RNA, 75 nt, Homo sapiens
gccaaggaccccgcccggcccccagaggcgggaaacagagaacagcccaccaccacccgagcgcagcccagagac

SEQ ID NO: 28735 - RNA, 69 nt, Homo sapiens
caccgcccacaaccaacccagcacggagcccaccgcgggcacaggcgggaacacccaccagccggacac

SEQ ID NO: 28736 - RNA, 88 nt, Homo sapiens
ggacaagaccaacaaacacaaggagccacaaggacgggaagcaccaaagcgcgccaagagccccccagccagcgcagggcagaaggcc

SEQ ID NO: 28737 - RNA, 74 nt, Homo sapiens
ccggagacaagccaggaggcaccaaccagcggacacacggaaaagggacgggaaaagccgagaaagagaagaag

SEQ ID NO: 28738 - RNA, 38 nt, Homo sapiens
accaaccgaaagagcccaaaacgccgccccccccacac

SEQ ID NO: 28739 - RNA, 74 nt, Homo sapiens
gaaggcagcgcaaaaggaaagagagaagcaagacacagcagaagacaggccggacacagcagagaagaaccaag

SEQ ID NO: 28740 - RNA, 78 nt, Homo sapiens
ggcccggacaggggccccagagcaaagcagacaaaggagagacagcacaaccaggggcgcaacccagcaagagaagga

SEQ ID NO: 28741 - RNA, 71 nt, Homo sapiens
cggaaccgggacccgggcgcccgcgcccgccccaacccagccacagaaccgacagagaagcaggagacaaa

SEQ ID NO: 28742 - RNA, 78 nt, Homo sapiens
gcgcggcgacccagcgcagcgccaccgccgggggcgggacccagagagggaccagggccaaagaagagccggggggca

SEQ ID NO: 28743 - RNA, 67 nt, Homo sapiens
caagcgcgcaaacccagaagacagaaagcgggacacaagcaggagcacagaccccgaaaagggagac

SEQ ID NO: 28744 - RNA, 79 nt, Homo sapiens
cagccaccgccgcccccaacgccagccgaaggaagaagccaagccaagagacagcgcccccacagcgaaacacagcaca

SEQ ID NO: 28745 - RNA, 99 nt, Homo sapiens
gcccccgggggcacagacgcgccagcacgccgccgccagagcccccgaacagcagcgcagcagccaggccccgcccggggcccgccagggccacgcggc

SEQ ID NO: 28746 - RNA, 124 nt, Homo sapiens
gaaacacacggaggacaaggccgggaaccacagccgcacaaacagaggaaccgccaagagcggcccagccccagccagggggcccagaagcccaaccccgaggccggaggagaggaaagacccg

SEQ ID NO: 28747 - RNA, 81 nt, Homo sapiens
aggcgccgcagcgcggagcaagcaaggcaagccggccacaagaacggaagcagaagcacgcaagcagagacagagaggaag

SEQ ID NO: 28748 - RNA, 83 nt, Homo sapiens
aaaagcgcaaaccggagccagaaacaaccgcaaccacccaacaaggcgaagagccaccagcggcgacgcaggccaaaaccagg

SEQ ID NO: 28749 - RNA, 74 nt, Homo sapiens
gacgccgaaacacgccagccaccacaggccccaggaaggcaaaaagcagccaaccgcaaagagagcaaacgccg

SEQ ID NO: 28750 - RNA, 76 nt, Homo sapiens
cccgacacggggcagagggcgcggggccagggaaacacaaagaagacaccagaagggccagcaccacgacaacacg

SEQ ID NO: 28751 - RNA, 78 nt, Homo sapiens
gggaaggagccggaggcggcgaggagcgccgccgaggagagcaggccccccgggccgggcacgggcgccagcggcacg

SEQ ID NO: 28752 - RNA, 75 nt, Homo sapiens
gggaaggaagacaaaacaaggccgaaacagagagggcaccaggccaccggaacccaaagaccgcacaagcagcca

SEQ ID NO: 28753 - RNA, 71 nt, Homo sapiens
gaggaagcacgaaagcaccaacgagacccgccacacgagaggagcaagcgaacaaaaaaccgaaaaacaca

SEQ ID NO: 28754 - RNA, 74 nt, Homo sapiens
cgaagccggcaggaagaaccagaagaggcccagagcggagacgccaccaccccccagagggaccagaggagcgg

SEQ ID NO: 28755 - RNA, 72 nt, Homo sapiens
accgccgggccagagcaagccgaccccccagacagcaaaggcggagagagcagagccgcggaaaagagagac

SEQ ID NO: 28756 - RNA, 77 nt, Homo sapiens
gacaagcagaccgaagagacagacaaggcaaagcgaaaggcaccgcaacaacgcccagcgagacacccggcccagcg

SEQ ID NO: 28757 - RNA, 72 nt, Homo sapiens
ggggggccccgcgccagcaaccagccgggcacccgggaccaggcggagagaggacggggacgggccccagga

SEQ ID NO: 28758 - RNA, 80 nt, Homo sapiens
cgagaaagccccgggagaagcagcgccgcccggggcagaccaggcagggggaccccacccgaggagcagagagcgaggac

SEQ ID NO: 28759 - RNA, 70 nt, Homo sapiens
agcaagacaaaggccagcagacaggcaggaggacggcccgccaagaaagaggccgacgcaggagaggaac

SEQ ID NO: 28760 - RNA, 84 nt, Homo sapiens
gccccggcacgccggcgcccgcaccccggggcccaggaagggcggcccaggccgggggaccccacgccggagacagggcgcagc

SEQ ID NO: 28761 - RNA, 74 nt, Homo sapiens
gccaagcaggaggcaaaaaacaccagcagcccagcaaccaaaaagaagaccgcacccaaacaagggaaccagca

SEQ ID NO: 28762 - RNA, 75 nt, Homo sapiens
gccagcggagcagaggcgccacccagcaagccaggaacaagcagaaagcacgaacaacgagaacaagacacgagc

SEQ ID NO: 28763 - RNA, 78 nt, Homo sapiens
aaccaaaccgaaagccagaagggggcgacagacagcggaaagccccaggaggggcgggggcccaccaaagcagcgggc

SEQ ID NO: 28764 - RNA, 80 nt, Homo sapiens
cgacccagcagccgccaggccgcccgagcccgacccgcccgcccggacggcagcgccgcccaccaggcccgagagccgga

SEQ ID NO: 28765 - RNA, 78 nt, Homo sapiens
cagcagggcggaagcgggggcaccagcaccccgcaccacagccagaccggaaacaccaagcagaaagaaaaccagcca

SEQ ID NO: 28766 - RNA, 31 nt, Homo sapiens
cagaacaggaaaaagggcccgggaaaaaaaa

SEQ ID NO: 28767 - RNA, 85 nt, Homo sapiens
gggagaggagcccaccaggacgaccgcgccgcccagcacgccaggaacacaacagcgagcaacagcacagcaaggagagaaaaaa

SEQ ID NO: 28768 - RNA, 47 nt, Homo sapiens
ccgacgccaggcagcgcccccaaacggagaaaacgggaaacggaaaa

SEQ ID NO: 28769 - RNA, 101 nt, Homo sapiens
gcaagcagggagggaacagagagagaaaaacacaaaagagccaagagggagcaccgcacagaagcaacggccggaccagccaggaaagaccgggcaagggc

SEQ ID NO: 28770 - RNA, 86 nt, Homo sapiens
gaccagcaaggcggcagagcaaggggcacgcagaaggaccggccacgacagcacccaagaaaacccaggccgcgaaggagaagacc

SEQ ID NO: 28771 - RNA, 76 nt, Homo sapiens
cgaggaaggaaacaggaaccaggcagaaacgagaggaggcacccgggaagcggaaaagcagccagaggaaggaaaa

SEQ ID NO: 28772 - RNA, 72 nt, Homo sapiens
gggacggccccagcaccccggcggcaggagggaaagcaaggaaacgcccccccagaggcccagacggccaaa

SEQ ID NO: 28773 - RNA, 71 nt, Homo sapiens
gaaaccaaagcacaaaccaggaaaagacagagaagccgaagaacgcaaacagagcccgcgggaggacaggc

SEQ ID NO: 28774 - RNA, 58 nt, Homo sapiens
caagaaggaaaaaccaaacgggaacacgggcccccgggaaaccgaagccgaccagggg

SEQ ID NO: 28775 - RNA, 76 nt, Homo sapiens
agcagcccaccaagcacagacaagcacaaaggagccccggaaaaacggcgagcgaacgccggcagcgggaaggaac

SEQ ID NO: 28776 - RNA, 39 nt, Homo sapiens
agaagagcacagaagaccagagagggaccaggaggagaa

SEQ ID NO: 28777 - RNA, 77 nt, Homo sapiens
ggcgaggccccagaccacacggacaaacacaaggcgccgcaaaaaaaaacgacaaagaagaggaggcaaaaagggac

SEQ ID NO: 28778 - RNA, 37 nt, Homo sapiens
accggcacaccgaggacgacaagcccgacacccagcg

SEQ ID NO: 28779 - RNA, 42 nt, Homo sapiens
acgagcgcccacacgcgcagcccggaccgacaggaaagaagg

SEQ ID NO: 28780 - RNA, 48 nt, Homo sapiens
cggagcggcaacgcccacaaagagggaccgcagagccagagcagccag

SEQ ID NO: 28781 - RNA, 72 nt, Homo sapiens
ggagccagggacagggaaaaggaacccagggcagggaggccaccagggcggaggcacccgccaaaggacccc

SEQ ID NO: 28782 - RNA, 81 nt, Homo sapiens
ccacaacagccccccccaccccgagcaccaccagagccaccacccaccaccccagccagggggcccccaaagggaagccaa

SEQ ID NO: 28783 - RNA, 87 nt, Homo sapiens
cagacgccagcgggacgaggaccgagaccgcggccgggaccgaggacagaagcgaaggggacagggggagaaccgccagggaaaccc

SEQ ID NO: 28784 - RNA, 73 nt, Homo sapiens
aagcagggaccgcagaaagacgaaggcgaacaggaacaaagagagagaagggcgggcggcacccagagaccac

SEQ ID NO: 28785 - RNA, 76 nt, Homo sapiens
gagcagcggacgccggccgccgcaggaggcgggcaacacaacaaggcgcggacacccagacaagcgcgccaccggc

SEQ ID NO: 28786 - RNA, 38 nt, Homo sapiens
ccgcgaaagcagcgggaggccccacacaggacgagaag

SEQ ID NO: 28787 - RNA, 78 nt, Homo sapiens
gggagaggaagcggcggcggcggcgccgggcccggggggggacagcaggcgagcacagcgcggcacaggacgcgaccc

SEQ ID NO: 28788 - RNA, 78 nt, Homo sapiens
cgcagccgaccccgggccaaggacccccacccagccagcagccgcccaaaacacaaaccaaagaagaaacccgaagga

SEQ ID NO: 28789 - RNA, 71 nt, Homo sapiens
ggggacacccagaagcggcgccgccggcaggcagagcagcgcaggaggagagacccgccaccggaaccaga

SEQ ID NO: 28790 - RNA, 69 nt, Homo sapiens
acccaggaagcagacacaagagggccccaaggcccggcggaccccaacccgaacggccagagacccgcc

SEQ ID NO: 28791 - RNA, 38 nt, Homo sapiens
gaccaggggagcggacgcaggcggaagcagggcgcgac

SEQ ID NO: 28792 - RNA, 74 nt, Homo sapiens
acaacccgaaaagacagaacagaagaaagcaaacaagcaggaaaaaaccgccagaccccaaaagaaccggcccc

SEQ ID NO: 28793 - RNA, 82 nt, Homo sapiens
agcacgccaggacggaggacaggaagggaacgggaaagcgcaacaggacccaaacagacaaacagagaggaggcagcaacac

SEQ ID NO: 28794 - RNA, 80 nt, Homo sapiens
gagcaaaaggagagaacccaccagccaccagaccacacaacagggcccagaagggaaacagagcggaggcggcagaagcc

SEQ ID NO: 28795 - RNA, 56 nt, Homo sapiens
cagaccagcacaaacaaagcccgcgagggaacccagcagcgcagaaagcaaaccag

SEQ ID NO: 28796 - RNA, 76 nt, Homo sapiens
aaacgcgaacaccgacggagccagaacacaccgccggggagccagaagaggaggaagcgaccggccaacggccacc

SEQ ID NO: 28797 - RNA, 53 nt, Homo sapiens
cagacgcagggcgcccccggcagccgccgccccaggagaccggaaggacagaa

SEQ ID NO: 28798 - RNA, 69 nt, Homo sapiens
acccaaaagaaggcgaaaagacaccaaaacaaggaagaaaacaggacagaaagaaaccaggcaccaaag

SEQ ID NO: 28799 - RNA, 109 nt, Homo sapiens
acgcggccgagacaaaggcaccaggccaccacagaaacaaaagcaacaaagagggaaggagggccccggagcagccacaccaccgaggccccacccagcacgagcacag

SEQ ID NO: 28800 - RNA, 102 nt, Homo sapiens
caaaaacaacaaaagagacagcccaggaaccacagccgggaggaacagggccagccaaagaggagaacacgccccgacccagcccccaggaaggcagcccgg

SEQ ID NO: 28801 - RNA, 74 nt, Homo sapiens
gggcacgcgcaccaggcggagggcacggaagaagcaaacaggagcacaagcaccgaaaaggcccaagggaacaa

SEQ ID NO: 28802 - RNA, 75 nt, Homo sapiens
gaagaaaaaaaaaaggcagaacccgagacaaccaccgggggccaccaccgaggagagggcgacagcgggggagcc

SEQ ID NO: 28803 - RNA, 78 nt, Homo sapiens
cggccacgaccaagaagaagccgggaccccacgggagggcaagagccaggggagaccaccagacacaaccacagccgg

SEQ ID NO: 28804 - RNA, 86 nt, Homo sapiens
gcagaagccgaaaccgccaaagccacagaagaggagccccgccgaggcagagggccggcccccccagaggaagggaggccggccga

SEQ ID NO: 28805 - RNA, 88 nt, Homo sapiens
ggcggcggcgacagccaggcccggaagcgagggcggccgcgccggcccagggacgaacagcggggacgccccagcagaccgcccagga

SEQ ID NO: 28806 - RNA, 67 nt, Homo sapiens
gccacaggccccagcacaagacggggcagcagccagcaagcagacacgcagaaagcaaacaaaggca

SEQ ID NO: 28807 - RNA, 75 nt, Homo sapiens
ccaagcgccagcgcggacccacagcggcgaacagccaggaagaagaggagaacgaacggagaccaagaggagagg

SEQ ID NO: 28808 - RNA, 57 nt, Homo sapiens
cgaggaagagcccgccgaaggagcgagaccacagaccaaccaaaggcgcaaaaagaa

SEQ ID NO: 28809 - RNA, 69 nt, Homo sapiens
acagccagaacagggacgccagccgcagaggaagacccggaggcgccgcccgggggacccacagcggac

SEQ ID NO: 28810 - RNA, 74 nt, Homo sapiens
cagaaaccccggacaaggcacgccagacgggcgcgggaaaaaaaaaggagacaccaccacagagagggaaccca

SEQ ID NO: 28811 - RNA, 42 nt, Homo sapiens
gaggaaggagagagaccgaccggagaagccgcgggagcggaa

SEQ ID NO: 28812 - RNA, 76 nt, Homo sapiens
cacaaagagccaacggagcgccggccagaacacgacaacaaggaaaggccgcgacagccaccaaagcagcgcggac

SEQ ID NO: 28813 - RNA, 78 nt, Homo sapiens
agcaaccccccacgagaacagaacccccggcccagacagcaagaggcacagaaaacgcagaaaggaccgaaccaagac

SEQ ID NO: 28814 - RNA, 94 nt, Homo sapiens
ggaggccggagcccccggagacgagcgccccgcgcagccgccgcgccgcgggagccaccccaagaagaagcggaagaggagccgcggaaccaag

SEQ ID NO: 28815 - RNA, 74 nt, Homo sapiens
gccgggagggcccgccagccgcgcccgcccaccagccggacacccgaagcagaagcgcggccaaaagaggggaa

SEQ ID NO: 28816 - RNA, 86 nt, Homo sapiens
agcggccaccgcacccaggaccgcacgccccgaagcccccagcgaccagacccgacaggacaaagacccgacgaccagacaagcca

SEQ ID NO: 28817 - RNA, 106 nt, Homo sapiens
caaaccgagcgacaccccaaggaaaagacagaccccaggaaaccaggaggccacccagccaaaacaaccccaaggcccccacgaaggaaagcagagcggggcagcc

SEQ ID NO: 28818 - RNA, 42 nt, Homo sapiens
gcagacgcggggccaggggccaaggccaggggcccccccgaa

SEQ ID NO: 28819 - RNA, 57 nt, Homo sapiens
gcgcaggagaagaggcggcccacaggcgacagacacagcaccggccccggcagcggg

SEQ ID NO: 28820 - RNA, 75 nt, Homo sapiens
aagccgggccccgagggcggaccgaggacacgagcgagggcgaccagggaacgggaagcacgaagcagcaggaca

SEQ ID NO: 28821 - RNA, 71 nt, Homo sapiens
agaccggaaaggccacacagggaaggagagaaggagagagacccagcccaccaaaggaagcagcaaaaaaa

SEQ ID NO: 28822 - RNA, 56 nt, Homo sapiens
agcagcccaaagcgaagacagacgcaaggcccggaggaggaagcaaacggggacga

SEQ ID NO: 28823 - RNA, 75 nt, Homo sapiens
agggaaagggcccagcagcacaaccagcccagccgaccccggaacaggggggcagcaagacgacccagcagccgg

SEQ ID NO: 28824 - RNA, 57 nt, Homo sapiens
ggcgcagaggggcgcgagccgcgccgcgccaaggcagaaagcaacagaagcagaaga

SEQ ID NO: 28825 - RNA, 78 nt, Homo sapiens
ggccgagacggcggcagcagcggcacagaaaaggagcgccccacagcaaggcgggcaggagggcgcacgcccacagac

SEQ ID NO: 28826 - RNA, 79 nt, Homo sapiens
ggccacccagcggggagcacggcgagcagccaggccaggagaggcagagaacagcagaccacagcagggagcgggcgca

SEQ ID NO: 28827 - RNA, 77 nt, Homo sapiens
gaggcaaccaagaagaggaaaagaacagagccacacaagaaggccagggcagacgcgccccgccaccaagaccccca

SEQ ID NO: 28828 - RNA, 80 nt, Homo sapiens
cgaaccaggaccaggccccaagcccgaggcccagaggaggaggcgggagaccgcaggacggccacggagccggacagaca

SEQ ID NO: 28829 - RNA, 70 nt, Homo sapiens
cagccgacccgcaacgcggacacagccgcggaaggcgaggaccagaggacgcaccagaagacagggcaac

SEQ ID NO: 28830 - RNA, 80 nt, Homo sapiens
agagccgcgaggggagaagcgcggcacgaccccggacaacaaccgcacacgaacgagagacagggcgccacggccaggcg

SEQ ID NO: 28831 - RNA, 79 nt, Homo sapiens
ccaaccgcaccaggaggagcgccggacccggagcagcagcaggagagcccacagccagccgggcggacccccggccgaa

SEQ ID NO: 28832 - RNA, 75 nt, Homo sapiens
ggccccaaggcgaccgggccgggccccgcggggagcggagacccagacgggaacggggcgggccaggacgcaaaa

SEQ ID NO: 28833 - RNA, 81 nt, Homo sapiens
acgcaccgggcccaaccagcgcccagcccccgcagacccgcgagaaccccgcaggcggacaccggacccccgccggccaac

SEQ ID NO: 28834 - RNA, 79 nt, Homo sapiens
gaccaggcacagcaggcaacgaagcgggaaggaaagcgggggcgagaacgacagcaaccagccaagggaccgcagggag

SEQ ID NO: 28835 - RNA, 73 nt, Homo sapiens
ggagaaagcagccagggaagagaaaccgagcaacagacaaagcccgggaaggccgcgcaaaggaacgggggaa

SEQ ID NO: 28836 - RNA, 65 nt, Homo sapiens
gagaggagcacggcccagagacaccacacaccaccgaccaagccccgacaagggaccgggcgggc

SEQ ID NO: 28837 - RNA, 78 nt, Homo sapiens
gaaacccaaaccgaaaaccaggacgccacaggcacaaaaggggacagagaaagaccagggcagaggaagaacgcaggg

SEQ ID NO: 28838 - RNA, 76 nt, Homo sapiens
aagacagagggcgagaaacagcagaaagggaacgcaggaaggaaacggcaacagacaacaaggaaagacagaccag

SEQ ID NO: 28839 - RNA, 74 nt, Homo sapiens
aaaggaagggccaggacaccagcccccacacggggagaaagaaagaaaacaagacaaaacccaaagaaaccaag

SEQ ID NO: 28840 - RNA, 65 nt, Homo sapiens
acacacccaagcacggaccaaagagcagcaaaggaccaggaaggggacagggaacagcggaagca

SEQ ID NO: 28841 - RNA, 77 nt, Homo sapiens
gcaaggcaagaccgaacagaaggaacgacgcggaccagaagccagagcgaggacgccggcagacaggagcggggcaa

SEQ ID NO: 28842 - RNA, 58 nt, Homo sapiens
gcagcgcgccccagggggagagaagacggcccagcagagcacccaaccagcgggaaca

SEQ ID NO: 28843 - RNA, 79 nt, Homo sapiens
aaacggcaccgaggagcgaaccagaagcacagagcagcaaacacccagagcagagccggaagcaacgaggccgaaaaag

SEQ ID NO: 28844 - RNA, 34 nt, Homo sapiens
acaccgccccgagacgaggaagcgcagggcaaac

SEQ ID NO: 28845 - RNA, 42 nt, Homo sapiens
caagaccggccaacacagaccaaacaccccacgcccaggcca

SEQ ID NO: 28846 - RNA, 72 nt, Homo sapiens
gggggccgggcccagacaaaaaacaggagccacccacgagaaagcagcaccagagagcaggcggccacccga

SEQ ID NO: 28847 - RNA, 68 nt, Homo sapiens
gagcaaagacagcaaaaaaaaggaagcacaccagagacaacacacacgcacaagcgaaaccaagagag

SEQ ID NO: 28848 - RNA, 71 nt, Homo sapiens
aagggggggccacaaagccagcagcccaggcaaacaccacagagcacaggaaaaagaaccgacagagcggc

SEQ ID NO: 28849 - RNA, 69 nt, Homo sapiens
aaacagagaccccccagaaaacagagacaagcaggagcgagggcccacaagaccccccaagcacagagg

SEQ ID NO: 28850 - RNA, 71 nt, Homo sapiens
cgagccggaaggacacgacacagcccgccgccggcagaacaagacaccccgccaacagcagaagccaaagc

SEQ ID NO: 28851 - RNA, 73 nt, Homo sapiens
gagggaggaaaacaaccgagggcagacgaaccggacggcccaccacgacgggcgcgcccggagaggaggaagg

SEQ ID NO: 28852 - RNA, 77 nt, Homo sapiens
gaaggcgcagacaaagagcaggccggagaacaacaccgcccccgcgcccgcgagaccccacgcagggcaggggcagc

SEQ ID NO: 28853 - RNA, 70 nt, Homo sapiens
ggcggaacgccaaaacaaggcaacgacaggggaaccccagggaccagcggacaggacagggggccgggcg

SEQ ID NO: 28854 - RNA, 69 nt, Homo sapiens
gcaaagagggcagaaagaaggaggaagagccccgagccgagggggcagcgcacgcgggcagacccccga

SEQ ID NO: 28855 - RNA, 86 nt, Homo sapiens
cggcgccccggcccccgccccagcccgccggcggcggcgggccagcggaagccagaaagccacgcaggacccagagggccacagag

SEQ ID NO: 28856 - RNA, 70 nt, Homo sapiens
gcaccgccgcggcccggcccggccccgaggccggcaacggagacccaaggaccacaggcaaacaaagaac

SEQ ID NO: 28857 - RNA, 81 nt, Homo sapiens
gaccacggcaccaaccccggcagagagcaggaaaggaagccgggggaccaacaacaaagcacacggacacaggacacgcgg

SEQ ID NO: 28858 - RNA, 43 nt, Homo sapiens
ggcaggccgccgccgagcggaagaaggagaaagacaaagcccc

SEQ ID NO: 28859 - RNA, 74 nt, Homo sapiens
gccagcacccaaaggagcaacagacagcccccagaacagcaccagggcgccccgcccccggccccccaccagcg

SEQ ID NO: 28860 - RNA, 56 nt, Homo sapiens
gggaccgggacacggggaagacaccccacaaaacgagacccgaggaggccgcacca

SEQ ID NO: 28861 - RNA, 73 nt, Homo sapiens
accgcacaaggaaaagaagcccaacccagaaacagaacaacagcgaccccaaggaagacaaggagaaccgcac

SEQ ID NO: 28862 - RNA, 78 nt, Homo sapiens
aaccaaggggaaacaaggacggccaccaggagaagaagagaagagccccaggggggcaagccggggcacaggaccgag

SEQ ID NO: 28863 - RNA, 58 nt, Homo sapiens
caagaagcacgaacagcaggccaaagaccagaggcccagcgaaccgccagggagccag

SEQ ID NO: 28864 - RNA, 83 nt, Homo sapiens
aagagcgccaggcgccgcggggggaggcaccgccccaacccccccccgcccggagaaccccgcggaacgagcagcgggccggg

SEQ ID NO: 28865 - RNA, 77 nt, Homo sapiens
cgaagcaaccaggaggccaaagaggaccgagacaaaccacggggcgaagaaaccacggagggccggaagaggaaaag

SEQ ID NO: 28866 - RNA, 71 nt, Homo sapiens
ggagccggaagccggcgacagcccagcagcgaggccaaaacaggcgacggcgccgaggcgcggggggaaga

SEQ ID NO: 28867 - RNA, 75 nt, Homo sapiens
gcccccagaggggggcccgcgcccaggacaggcccaggggaaagccggggccccggggacccgcggcacggacag

SEQ ID NO: 28868 - RNA, 76 nt, Homo sapiens
cgcaagcccggaagcagaagcgcgcccacccgggcagaaaacgcagaagcccacaggccacagagacaaggaggac

SEQ ID NO: 28869 - RNA, 78 nt, Homo sapiens
gcaaccagaagcagacaacaggcaacgaaagcaaaccgagagcaggcgaaggccgggacccaggcccaccaccgccca

SEQ ID NO: 28870 - RNA, 82 nt, Homo sapiens
gccgggcccgcgcgcccggccaagaggcaaaggggaggacgcagcaaaccaccagaagaacaacggcccaagagcacagaga

SEQ ID NO: 28871 - RNA, 53 nt, Homo sapiens
ccagggaccaaggccgcgcacaaagacaccaaacgcgggagagaaagaacaaa

SEQ ID NO: 28872 - RNA, 80 nt, Homo sapiens
aggccggggcccacacggagaaagccccccaggcacaggaaaaggcacccacaggaaaaaaaaggggaaaagcggaccaa

SEQ ID NO: 28873 - RNA, 75 nt, Homo sapiens
aaggcggaaagacgagccaaagaggggcgcgccaggaagcacccaaagccccggaggccagccccgcacaccgga

SEQ ID NO: 28874 - RNA, 77 nt, Homo sapiens
aggagcccggccccacaccggcacacagcacccaggggcgccagcaaagggaagaaaccccaacaggacccacacga

SEQ ID NO: 28875 - RNA, 80 nt, Homo sapiens
gacggagcaagacagacacacgcccacaaagcccagaagaagggcaccagcgaagaaggaagccgccagagcggccggaa

SEQ ID NO: 28876 - RNA, 67 nt, Homo sapiens
acgggccaggggagagagaagaaccgagcaggacgaaaggaacccggagacagaaccagccgacagg

SEQ ID NO: 28877 - RNA, 76 nt, Homo sapiens
aaaaacgaaggcggcggaccgaggacaccagaacaaccgaggagcgcaagaaccgaggaaaggaaaaacaggccaa

SEQ ID NO: 28878 - RNA, 62 nt, Homo sapiens
caaggacagcagcccaccaagcacagacaagcacaaacccacagcagccccccccacaaccc

SEQ ID NO: 28879 - RNA, 77 nt, Homo sapiens
agccccgccgccccgcaaccggcagccgccgccgggaagacaagcaaacaacggaaaggagggggaagcaacggcca

SEQ ID NO: 28880 - RNA, 75 nt, Homo sapiens
aagcgccgccaccgaggcgcagaagaagcaagaggcggagccgcgaaacgacgacgcacagagggaggcacgggg

SEQ ID NO: 28881 - RNA, 61 nt, Homo sapiens
aacagagcggaacgaacaagggacccacagccaccgggacaagccaacaccgcacagagac

SEQ ID NO: 28882 - RNA, 66 nt, Homo sapiens
aaagcggacaccgggcgagacgacgggaccgaaggaccccgccagagacaaccgagcgccaggaga

SEQ ID NO: 28883 - RNA, 71 nt, Homo sapiens
gaacaaagcagccggaaaggagccaagaggggccagccgagccggccaggaccagggggaacccgcagcag

SEQ ID NO: 28884 - RNA, 78 nt, Homo sapiens
ggaagccccgcagcagcagcccaaaggaagggaccagaccccacaagaaaacacacaaccacaggcccaagcaaacac

SEQ ID NO: 28885 - RNA, 85 nt, Homo sapiens
gaccgcgagagacgagagcacgacacggccgcacgggcccacgccaggcgagaaccgaagggaggagacgagcaggcgagcgggc

SEQ ID NO: 28886 - RNA, 91 nt, Homo sapiens
aagccagacagcgggccggagcagccgcgggcgcccgaggggccgagcgagagcggagaaagagggagacgcaccccacacaccccgagag

SEQ ID NO: 28887 - RNA, 82 nt, Homo sapiens
caagccaaaaaagcccaggaagaagacgaggaggccgggaggcccagcccccgcgcggccggaggccggagccccgagcagg

SEQ ID NO: 28888 - RNA, 108 nt, Homo sapiens
ccgccacagaaacagagagcccacaggaaaacaagccggcagaaaccaccaaacagcaaaggccagcaccacaaagagcaacgagaaagaacgagaaaagacgaaccg

SEQ ID NO: 28889 - RNA, 44 nt, Homo sapiens
ccgccccccccgagacaggaaaagcaccgaagcaacgaccacac

SEQ ID NO: 28890 - RNA, 71 nt, Homo sapiens
ggacggaccacgggaccaagcagacaaaccaaggcggcccgacgaccacggagcaagcagccggcggcaga

SEQ ID NO: 28891 - RNA, 79 nt, Homo sapiens
gcgaaaagacaggagggaggaacagacaccgagccagcaagcccccaacgggcggagaacggaaaagcaccaggaagca

SEQ ID NO: 28892 - RNA, 71 nt, Homo sapiens
ccggcccgcggcccggggacccacacccaggggaagcaggcgggaaggcccaggccccggggacaagagcg

SEQ ID NO: 28893 - RNA, 79 nt, Homo sapiens
gccaggccgccaaaagaaaagaggacagacacggacccagcaccagaaacagcggacagagcaccagccaccaggcgga

SEQ ID NO: 28894 - RNA, 41 nt, Homo sapiens
gaagaggcaaagaaacaccaaaccacaagacggcacccagc

SEQ ID NO: 28895 - RNA, 120 nt, Homo sapiens
ggaagaggcaaacagcgcgcaagaaaccgaaggggacccagcccggggacacaagcccccaagggcggaccgccgggggccgaagggcaacacagcagaccggccagcgcggcgcccgcc

SEQ ID NO: 28896 - RNA, 72 nt, Homo sapiens
gggcgcccccaggacgacgggggagccggaccgcccccagccgacaggcgggaacaaagaccggaagacagc

SEQ ID NO: 28897 - RNA, 75 nt, Homo sapiens
aaaaagcacaggaggaagggggcggaaggagaacaaagggagaagaggaagcccgacaacgaagcaacggggcgg

SEQ ID NO: 28898 - RNA, 52 nt, Homo sapiens
cagcaggcagggaacgggagaccaccgaaagcgggcagcgcagccacaccgc

SEQ ID NO: 28899 - RNA, 82 nt, Homo sapiens
aggagggacccaacagggacagggcgagaaggcggcgcgcgcccacaacagggaccggaagagcccacggacacacaggaac

SEQ ID NO: 28900 - RNA, 76 nt, Homo sapiens
gggccacgggggaagaggacagaggcagccccggccaccacaaagagaaggacggagaagcgaaagccagaccggc

SEQ ID NO: 28901 - RNA, 71 nt, Homo sapiens
cacacccagaggagaggaggcaaagcaagaggaccaaaccacagcaaaaacaccaggaaagacaacgaaac

SEQ ID NO: 28902 - RNA, 59 nt, Homo sapiens
caaacagggaacccaagccggcaagaacggaagcacgggcggaggaaagcacaagcaga

SEQ ID NO: 28903 - RNA, 71 nt, Homo sapiens
aacgcaccaggccaaagaaagagaacaaggaccagaaggacccaaggacgaaggcaggggaaaggacccca

SEQ ID NO: 28904 - RNA, 101 nt, Homo sapiens
ggacgagcggagaaggccacaccacgcagaacgcaacaccaaggcacaccaccccagcgccggggaggcagaaggggccgggagcggcccggcccggcacg

SEQ ID NO: 28905 - RNA, 85 nt, Homo sapiens
gaaccaggagcagcagaacagaaacaccgaaaagaagaacggaaacgagcagaggacggaaaaggacacagcaacacagagaagg

SEQ ID NO: 28906 - RNA, 71 nt, Homo sapiens
cagaggccaggaaggacaaaggcccaaccaggaaggagacgccaggaggccagggcagcaccgggcagcga

SEQ ID NO: 28907 - RNA, 76 nt, Homo sapiens
gcagaaacacaggaccccccccaacgagccaagcaagcgcaagcaggaggaagaacaaagaccaaggaacaaaagg

SEQ ID NO: 28908 - RNA, 87 nt, Homo sapiens
aggccgaagaaccgagcgacagagacaagcgagcgccgcacaaaaagcagagagcacaacggcagaaacgccagaagggcccacggc

SEQ ID NO: 28909 - RNA, 70 nt, Homo sapiens
cagaaaagaaagcagggaaaaaagcagcaaacacgggacaaaaaccagaccaggcgagagcgagacaaaa

SEQ ID NO: 28910 - RNA, 90 nt, Homo sapiens
cggacgggaaggcgggagacgagaagccgaaaagcgcagcgagcggagccgccggaggacgaacgcaaccccaagcagaaaaggcaacgc

SEQ ID NO: 28911 - RNA, 84 nt, Homo sapiens
ggcggcgcggcagcaagggcggcggggcggcggcggcagcgcaggacagccagcagaacccgaaaaggagcgccgcgcccaggc

SEQ ID NO: 28912 - RNA, 72 nt, Homo sapiens
agggagccggagggaacagcagggcaaagcaacagccaaaaaacagacaggacagcaccagaaaaagcacag

SEQ ID NO: 28913 - RNA, 71 nt, Homo sapiens
cgccacggcgggccgcgggaggacaccacccacagagacggcaggcaaggagcacaacacccgaacagaac

SEQ ID NO: 28914 - RNA, 52 nt, Homo sapiens
caccgcgcggagccgcagagcgggcaccaggacagcagaccacagcccggca

SEQ ID NO: 28915 - RNA, 58 nt, Homo sapiens
cggagccgcggcgggacgcgcgagccggccggggggaagaacagcagcaaacggaggc

SEQ ID NO: 28916 - RNA, 80 nt, Homo sapiens
gggggcgccggcggacgcacccggacgcaaagcgcacggaaggacaccagcagccgcaacggcacacacgcccgccacca

SEQ ID NO: 28917 - RNA, 80 nt, Homo sapiens
ggaaagcaagagaaaagcggcgagaacagcgaaaaccagcaaaagacagcagcgcgccagcaggagaaagcagcgccaga

SEQ ID NO: 28918 - RNA, 81 nt, Homo sapiens
ccgggcaagagaccgacggcggagcaccgccccggcagaagcggcagcaaacacaagagggccagggaccaggggacgccc

SEQ ID NO: 28919 - RNA, 81 nt, Homo sapiens
aggaagcgcgaacagcagcgcagggcgcgggagagcagccggacccagaccagggagcccaggaggaggaaggaacccgag

SEQ ID NO: 28920 - RNA, 39 nt, Homo sapiens
agcgaaggacaaacacggcagcgcagggacccaacagcc

SEQ ID NO: 28921 - RNA, 52 nt, Homo sapiens
ccaaaacaaagagccggcccaagacaagcccgccgggacccaccaagggccc

SEQ ID NO: 28922 - RNA, 73 nt, Homo sapiens
ccgagagccgcccgggccagcggccgcgcacccccggccggaggcaccagcggggaaagcaggggagaaaaga

SEQ ID NO: 28923 - RNA, 80 nt, Homo sapiens
gcggccggggggagcagagccggaaccccccccaccaccaccaccagagggggagggaaagggccccaagagccgggcgg

SEQ ID NO: 28924 - RNA, 78 nt, Homo sapiens
cgcagcgaggccagccaaaagccaagagcagaagacagagggaggagggccacggacaaacacgggcccggcccagca

SEQ ID NO: 28925 - RNA, 76 nt, Homo sapiens
gaaaagcgaaaagaaacagaggcgcaaggaaagcagagggaagacaccccagaacagccaaccaaacccccccaag

SEQ ID NO: 28926 - RNA, 74 nt, Homo sapiens
cccaaagccagggcccccgagccaggaagccaccagagccaggcagccaccgggggggaccgcggggccaaaaa

SEQ ID NO: 28927 - RNA, 78 nt, Homo sapiens
cggaacagccggagagagagagagcccgcagcggaaagagcgggcagagaaacggggcaccggagccaggaggccgac

SEQ ID NO: 28928 - RNA, 77 nt, Homo sapiens
caaccgccagccccggccaccaccaggaaagccacccacgaggccggagagaagccagccagccagcagaaaagacg

SEQ ID NO: 28929 - RNA, 77 nt, Homo sapiens
aaggggcggcggcgcgggaggcggggcggcggcgcccggggccaacagaccaggaagcgccgcaagagaggagggcc

SEQ ID NO: 28930 - RNA, 72 nt, Homo sapiens
aaaaccgaccagggcaacaccaaaaacaaaacgaaccaggacggcaagagccccggcacaaaggaagaagaa

SEQ ID NO: 28931 - RNA, 60 nt, Homo sapiens
ggacggcaccagaccgaaaaaccaagccaggagaccgaggagcccaggaggaggaaccca

SEQ ID NO: 28932 - RNA, 65 nt, Homo sapiens
acagaggaccaaagcggaccagagacagagcagaagcggacaggacggcagacaccgggacggag

SEQ ID NO: 28933 - RNA, 80 nt, Homo sapiens
ccccacacaacgcagacgggcgccggcagccccccaggggagacacggcagacaaagcgggcaagaaaaagggccaagga

SEQ ID NO: 28934 - RNA, 68 nt, Homo sapiens
ccacaagagcagcacaaaaccagaggacaacagcagagccaggagaagcgggagcaccgaaaccacgc

SEQ ID NO: 28935 - RNA, 61 nt, Homo sapiens
agccacggccccaccgcaggcaccaccacaagggggacacgcgcccaccagggggagccag

SEQ ID NO: 28936 - RNA, 82 nt, Homo sapiens
cccccggcaggagagggggcgcaccgggcaagggggagcgagaggaaaagaagcggcagaagggcccgagggcaggacagca

SEQ ID NO: 28937 - RNA, 78 nt, Homo sapiens
ccagcacagccagcaccgcacgcccgcaagggagagaaaaaccggaagggaaacccgcgacaccgcgagggacaaaga

SEQ ID NO: 28938 - RNA, 78 nt, Homo sapiens
gaaacgacacaacaagcacgacagaaaaaaacggaagcacgcgagaacaaagaacaaaaaagcgaaagcaaaaccaaa

SEQ ID NO: 28939 - RNA, 71 nt, Homo sapiens
cgggaggacgaagacacaaggggagggaacaagaagagaaacgcgggccaaaagcagagaaccaaagaaca

SEQ ID NO: 28940 - RNA, 77 nt, Homo sapiens
cggcccgcggcggcgcgaaggcggcggcccgcccccgccccccgcgccggcgcagggcggagaacggaaaagcacca

SEQ ID NO: 28941 - RNA, 70 nt, Homo sapiens
acaacccacaaaccaaagaagagaagggaaggagaacaccacccggagggccaaaagacggggcgccagg

SEQ ID NO: 28942 - RNA, 72 nt, Homo sapiens
ccaaaagggacggacaaaggaacaggaccagcacagcaaggccgaaggcggaaacacgccaagcgccggcca

SEQ ID NO: 28943 - RNA, 77 nt, Homo sapiens
ccccagcagcccggaggaagggcagcggccacacaccaaaaaggagaaagaccaacgcgaaagggaaacacacagaa

SEQ ID NO: 28944 - RNA, 53 nt, Homo sapiens
ccgcacacgaagagacgccgggcaccccaacacgcgccacaggagccgcagaa

SEQ ID NO: 28945 - RNA, 68 nt, Homo sapiens
gaggagcgaagaggaaagggagcaagcagggaggcgggcaaggagacaggaaggcacgcccgggcaac

SEQ ID NO: 28946 - RNA, 77 nt, Homo sapiens
acaagacacggagcaaggaggaaaacacacggcgaagggagggccgccccaaccgacgcaccagccggaggaggagg

SEQ ID NO: 28947 - RNA, 77 nt, Homo sapiens
ggccaccaccagagccaagagcaaaccaacaaaaccccaaagaaaagaccagagccaaaaggaaaccagcgacaaaa

SEQ ID NO: 28948 - RNA, 59 nt, Homo sapiens
cggaccgcgccgccccgccgcggcggggacgcagggacagccgaggagagggggaccag

SEQ ID NO: 28949 - RNA, 71 nt, Homo sapiens
cgccgccgccccgccagcgccagacggacgaggcggcggagaacaagcggcagaacaagccccgcagagcg

SEQ ID NO: 28950 - RNA, 86 nt, Homo sapiens
gccccaccagcggaagcgcgcgcgggggaaggaccgaaggagaagaaggagaaggggaggagaaggcaagccggaaagagcgaaag

SEQ ID NO: 28951 - RNA, 56 nt, Homo sapiens
gcgggccagcgacaaaaagagggccggagcgagggagagcaggaacacagagagga

SEQ ID NO: 28952 - RNA, 66 nt, Homo sapiens
gccagagagagacgaaaagcccgcgagcagcgccacgggccacacgcccgccacaccacagaagag

SEQ ID NO: 28953 - RNA, 82 nt, Homo sapiens
aagagggcggcgacgggggggacgagcggagcccgggacaggagaccccgccccccgaggcgcagcccgaacccagcagcca

SEQ ID NO: 28954 - RNA, 66 nt, Homo sapiens
cggaaagcaagaaagcgaagaccgacaaaaacgcgggcgaagagagaacacgcacggaaggaagga

SEQ ID NO: 28955 - RNA, 59 nt, Homo sapiens
ggccggcccgaggaaggcaagacccggacggaaggccagcgccgccaccaagggaccgc

SEQ ID NO: 28956 - RNA, 57 nt, Homo sapiens
accaccaccggcaggcgcaccaaggccgcgccggacaagagaaggcacagaaaccca

SEQ ID NO: 28957 - RNA, 60 nt, Homo sapiens
gcaaccccaaagcagcaaccaagaaaacgggagccgagagcggcccaggaggaacaacca

SEQ ID NO: 28958 - RNA, 84 nt, Homo sapiens
gcgcaggacagccggcggcggagcggccggccacggaggaggagagggcacagcgaaggacccccagccgcccagaaaggagga

SEQ ID NO: 28959 - RNA, 78 nt, Homo sapiens
gcccccaggcaccacagcccacccaaggccaagcaaggcgcaggccaaagggacccaggcaagagccgcagagaaagc

SEQ ID NO: 28960 - RNA, 74 nt, Homo sapiens
gcccacaaccaagccacaaaagacacgccacaaccgaggggagcagaccagcaccccagcggggcacaaccaca

SEQ ID NO: 28961 - RNA, 67 nt, Homo sapiens
gcaccaagccgggggagcgccaggggagaaaccaaagaccgaagcgccggccagaccaggcgagccg

SEQ ID NO: 28962 - RNA, 76 nt, Homo sapiens
cagacggagcaaacccccaggacaggaagggaaacgaaaaaggccaggcgacagaaaaagaaagagcagaagaagc

SEQ ID NO: 28963 - RNA, 79 nt, Homo sapiens
ggaacgccagccgcacaggagacaaaagaggagggacacgaggccacacggcggagcccagcagcagaaaacacccagc

SEQ ID NO: 28964 - RNA, 76 nt, Homo sapiens
ggagcaccccacccgagggcgacagcacaggccggaagagcgggagcgggagccaggcagaaggccaaccaacccc

SEQ ID NO: 28965 - RNA, 74 nt, Homo sapiens
ccaggcaggacacccggacaaaaggccaggcaaaaaaggcagcacgccccgaaaggcaggcagacggagggaag

SEQ ID NO: 28966 - RNA, 55 nt, Homo sapiens
caagaaaggggaaccccggagaaaaggccaagaaggcagagcaaacggagaccgg

SEQ ID NO: 28967 - RNA, 87 nt, Homo sapiens
ccgagagccgcccgggccagcggccgcgcacccccggccggaggcaccagcccaccaggagagaacgccgcgccgcgcgacaacggc

SEQ ID NO: 28968 - RNA, 69 nt, Homo sapiens
cccagaacgccggaaacgcagcgagcccacagaaacgcgcaggcaggaaggacgagaagggcggcgcga

SEQ ID NO: 28969 - RNA, 68 nt, Homo sapiens
accaagaaccagggaggcaggcgacaacagaggagaaggcgaagaaaacagccaagcaccagaaggag

SEQ ID NO: 28970 - RNA, 68 nt, Homo sapiens
acgccaggcccagcgagccagaagcccccccagcaggggaaacaacgaaagggggaccaaaaacaccg

SEQ ID NO: 28971 - RNA, 86 nt, Homo sapiens
gccggcccggagcaccgagccgcggcacggaggaggcccagcccccggacacgggcggccggaaggcgaggccccgccagcccgcc

SEQ ID NO: 28972 - RNA, 71 nt, Homo sapiens
gcagcgggaacccaaaaacccaagaaacacacacccaacgacagcacaccgggaagagaccagcaacggcc

SEQ ID NO: 28973 - RNA, 75 nt, Homo sapiens
ccgacccaggagggcgcgacacaagaccggaccacaaacgaaccggaaacaccggaggcagacacaaggaacagc

SEQ ID NO: 28974 - RNA, 86 nt, Homo sapiens
cgacggggcggcccggagccggcgcgaaccggcccccgcagcgggacccggccaggagacgacaaggcgggcagggggagcggcgc

SEQ ID NO: 28975 - RNA, 76 nt, Homo sapiens
acagccgcaaaaagacgggaggaggccgaggaagggcccaagacaaaaccgggaaaggaagccagaaccgaaaacc

SEQ ID NO: 28976 - RNA, 79 nt, Homo sapiens
gccagaggcgggagaaagaaaagaccacaagaaaaccaaagcgaggaacaagaaacaggaagaagacggcacgggaccc

SEQ ID NO: 28977 - RNA, 81 nt, Homo sapiens
cgccaggaggaaaagggccaaagggagcgcccgggagggaaccaacggaagccaagcggacaagccgacaggggcacaccc

SEQ ID NO: 28978 - RNA, 88 nt, Homo sapiens
cacggaggagaggaccagagggagggaccaaaacaggaccggcgcagccagcaagcgagcaagcgaagaagcgaccgaaccaacaagc

SEQ ID NO: 28979 - RNA, 71 nt, Homo sapiens
cggaccccgagaaaaggacaccgcaccagccagacagcccagaggcgaaaaaaccagccaggaggagagac

SEQ ID NO: 28980 - RNA, 72 nt, Homo sapiens
ccccggcagcaaggagaagacccgggaggggagaaagacagcgggcccccagcgggaaaaagccaaagcagg

SEQ ID NO: 28981 - RNA, 80 nt, Homo sapiens
aagaagaacaaaacgacaggagcacccaggaaggggcccagaagcagaaccaagaggggggcagcgccccagaggacagg

SEQ ID NO: 28982 - RNA, 59 nt, Homo sapiens
cccagcacggggaggcgaggggagagagagaacacgcccaaccaaagaacagccaagag

SEQ ID NO: 28983 - RNA, 72 nt, Homo sapiens
gcaagggacccggccagcgacgcaccgagaaaggaaggaaaaccgacgaggagaagaaaagcaacacagcga

SEQ ID NO: 28984 - RNA, 75 nt, Homo sapiens
gaaaccgcccgaaaacggagaagcagagacaggggaaacgaacaagaaagaagagcaacaggccacaaaggaccc

SEQ ID NO: 28985 - RNA, 79 nt, Homo sapiens
agcaccccccaggaaagccaccacgccacacaccaaacggcaaaagcagaccggaaaacccaccggcaagaccacaccc

SEQ ID NO: 28986 - RNA, 72 nt, Homo sapiens
cagacccaagaagacagcgaaccaggcagagaaagcaagagacgcaaccgaacgcagagcggagaacggcgg

SEQ ID NO: 28987 - RNA, 82 nt, Homo sapiens
ggagcaaaaaaagagcccgcaagaagaacagagacagcagccaaacccccagggaagggaaccggcagcgaacgaggaaggg

SEQ ID NO: 28988 - RNA, 51 nt, Homo sapiens
gaacgcgagggagaccggcccccaggcggggagccaggaacgggggacaag

SEQ ID NO: 28989 - RNA, 59 nt, Homo sapiens
acccacggaaagcagccagcagcacccaggcccgggcgggaaggacaccccaaaaccag

SEQ ID NO: 28990 - RNA, 73 nt, Homo sapiens
acggggaccccggagcccagaagacagagggcgagggagagcacgcgcggcagcgagcaccccaccccaccca

SEQ ID NO: 28991 - RNA, 75 nt, Homo sapiens
ccaccccccgagaaaggagaccacaagagcgcacccggccggcaggacgcacgggccagacacacagagcaccgg

SEQ ID NO: 28992 - RNA, 76 nt, Homo sapiens
gaggggcagccaaaagaagaaaggagaaggaaagcgaggggaaggaggacacagcaccagagaaccgggaaagaag

SEQ ID NO: 28993 - RNA, 75 nt, Homo sapiens
aacgaaaaacacacacaagagcaaacaagagcggaagcgagggcaccaaccaggagaggagacaaacgaacccgg

SEQ ID NO: 28994 - RNA, 64 nt, Homo sapiens
cagcccgccgaacccgaaaggagaaagaagagaaagcaaccacaaacacagaaaggacagaaag

SEQ ID NO: 28995 - RNA, 57 nt, Homo sapiens
gagaaacccaagagggaaccacccccaacaaccagggcaagacgcaaggaccaaaaa

SEQ ID NO: 28996 - RNA, 76 nt, Homo sapiens
ccagggccgccagacgggaacaaaggagcaacggggccgggcggccaaagggcgagcaacggcccaaccaaccccc

SEQ ID NO: 28997 - RNA, 84 nt, Homo sapiens
gggccgccagcggggacaggcagcggccgggcaaaacccccgagccaccagaaaagggaagcaggaagaccaagaaggacgaag

SEQ ID NO: 28998 - RNA, 72 nt, Homo sapiens
gaaaaccgaacgaaggaaggaacacagcagaggaaggcccgaccaccgccacaccagcagggaaaaggagcc

SEQ ID NO: 28999 - RNA, 68 nt, Homo sapiens
ggcgacggcggcaaacaagaaagggcggaaagaaacaagaaagacgcaccgaggcagcaacaacaagg

SEQ ID NO: 29000 - RNA, 96 nt, Homo sapiens
cggcaccagggggggcgagccccagccggccgggaggcaccacggccgagcccgagaacacgaggcgccaggaaggcagacagacaacacaccgag

SEQ ID NO: 29001 - RNA, 69 nt, Homo sapiens
aagagggaggccgagccaaggggcgacacggcggacggcgacagcaagcccccccagaggccaaggaag

SEQ ID NO: 29002 - RNA, 64 nt, Homo sapiens
ccgaccgaacgcgccagcgcggggcaacaggggccagacccacgagaagcgccgaacaaggcaa

SEQ ID NO: 29003 - RNA, 68 nt, Homo sapiens
ggagcaccccaagcggccagggccagaaccggggcggcacagccaggggccggggacgccaaacgcaa

SEQ ID NO: 29004 - RNA, 52 nt, Homo sapiens
gcgcgaggccgccgggccccggagccgagacaggggagagacagagcaccgg

SEQ ID NO: 29005 - RNA, 80 nt, Homo sapiens
cccgccacggagaccgccggagcccgcaacgggggcacaggaggggcggagaacggaaaagcaccaggaagcagagagga

SEQ ID NO: 29006 - RNA, 55 nt, Homo sapiens
gaaggaccaagaaccaggaagaagacggcacgggacccccagcacaggcagcagg

SEQ ID NO: 29007 - RNA, 74 nt, Homo sapiens
cggagcggagcggagcccggaggaccaaagagaacccgacagaagaaaagggggacccacagaacaccagcagc

SEQ ID NO: 29008 - RNA, 79 nt, Homo sapiens
gccaaacaagaaaaacaaagccaaggaaaccccaacacagagccaagcgccaagaacgcaaggcggggaaaaaaaggca

SEQ ID NO: 29009 - RNA, 58 nt, Homo sapiens
ccgaggagaggcgccccgagccccgcagagggagaagaaaaagcagaaaggaacagaa

SEQ ID NO: 29010 - RNA, 78 nt, Homo sapiens
gacagccaggcccggaagcgagggcggccgcgccggcccagggagaccagcacgagccgggcgggacgccggaagggg

SEQ ID NO: 29011 - RNA, 68 nt, Homo sapiens
ccgccccccgggccgaccgcaagacaggaaaggaagggacccacgcggggcaacgcgaacccagagga

SEQ ID NO: 29012 - RNA, 67 nt, Homo sapiens
caccccacaaaaaaaggggacccgggaccgagcccgaaaccccgggcgcaaaaaccacagcgggaca

SEQ ID NO: 29013 - RNA, 67 nt, Homo sapiens
gaagggacccaaaaagacggacagcccacgggaacaagaggggacagaaagcgcaccccccggaggc

SEQ ID NO: 29014 - RNA, 74 nt, Homo sapiens
ggcgcggcggccgccaccaggcacccggaagagcgcggccgaagacacagaccagcgcgagagaacaccaagga

SEQ ID NO: 29015 - RNA, 56 nt, Homo sapiens
cccgaggcggaacggggagggaaggcgcgcccccacccggggccgagaaccacacc

SEQ ID NO: 29016 - RNA, 69 nt, Homo sapiens
aaggaaccaggagagagcagccagaggacaggagccggcacggagcacccgccgccgaccaacacgaca

SEQ ID NO: 29017 - RNA, 63 nt, Homo sapiens
ccgcacccgcagcggcccccgcccaggccccggcggcgccccagcccccggacagcgggcccc

SEQ ID NO: 29018 - RNA, 72 nt, Homo sapiens
gacgcccgcgccccccagaggaggccccccagccacgggaacaaagaaagccaagcacacacgaagacgccc

SEQ ID NO: 29019 - RNA, 86 nt, Homo sapiens
cgccggacgcggcaacggagaaggccaaaacagaagaggcaaagcccagccacagcagcagcccagcagcaaacaaccaaagagaa

SEQ ID NO: 29020 - RNA, 73 nt, Homo sapiens
cagacgaaaaagccagcaacagcaacggggcggcacacaaggagcgaagggcagggagaacgccaggcacagc

SEQ ID NO: 29021 - RNA, 70 nt, Homo sapiens
ggccgccccacccccgccggccagggccaaaaggccagaggggcccaggccaaccccgaggaaccacagc

SEQ ID NO: 29022 - RNA, 74 nt, Homo sapiens
gccggacacaaggcgccacggcagcgagaggacagagacgaggcgggcccaagggcaccaccggcacccacaaa

SEQ ID NO: 29023 - RNA, 56 nt, Homo sapiens
ggaacccaccccgcagagacgaggacgcgcacaggaaaggacgcggaacaagcagg

SEQ ID NO: 29024 - RNA, 78 nt, Homo sapiens
gaaacgaaacagcgcagccaggaacaggacgaagaccagcgccagggaaagaagaggcgaggggacggcggggagcgc

SEQ ID NO: 29025 - RNA, 61 nt, Homo sapiens
acggagaaagccagggaacacaaaggacagggaacaccaccgcacgcgacgccacaggcac

SEQ ID NO: 29026 - RNA, 57 nt, Homo sapiens
cgcaggccgcgagcagcggacgccggccgccgcaggagggaacccagggccagggga

SEQ ID NO: 29027 - RNA, 77 nt, Homo sapiens
gcccaagcgcggcggcgcgccgagaagccccaggccacccccgacgcagccggaggccggggaccggagaaggacga

SEQ ID NO: 29028 - RNA, 82 nt, Homo sapiens
gagaacagccgcgcggcgagcggcccgcacaaggccggcagcgagcccacagcccgggccccccgagcggacggaccggagc

SEQ ID NO: 29029 - RNA, 87 nt, Homo sapiens
ccagaccaggcgcggagaaggacgaagaggaagccggaggggaggccggaaaggcgcaccaagagagaagcgcgccaacaccaaccg

SEQ ID NO: 29030 - RNA, 73 nt, Homo sapiens
ggagaaggaaaaacaagcgaagaaaggcacagggaccaggaggagaagcaaccagagaggaagcgagacccaa

SEQ ID NO: 29031 - RNA, 76 nt, Homo sapiens
gaaggagaaaggaggaaaaacagccagggcgccgcccacgagccaccacacacgagacaaccgcaacgacacaaag

SEQ ID NO: 29032 - RNA, 41 nt, Homo sapiens
acccgagggcgaagcagccaaggagacccccaggcccaggc

SEQ ID NO: 29033 - RNA, 77 nt, Homo sapiens
aacccggcaccgccccagagccaggacaaaaccaggcagaaccaacacgaacccaagcacaaacaagaaaacgagca

SEQ ID NO: 29034 - RNA, 75 nt, Homo sapiens
cgccaggagaggggagcggagacaaagccgccaggagccagcgggcgacagagcacacacacgaggccagaggag

SEQ ID NO: 29035 - RNA, 76 nt, Homo sapiens
accagcgggaaggcagacagcgagggcgacgacggcacagccagggaccagacacagaggggggccagcgggagaa

SEQ ID NO: 29036 - RNA, 56 nt, Homo sapiens
gagcccaaggccgcaacacggagaccagaggcccacggccaacagcccagaccaca

SEQ ID NO: 29037 - RNA, 85 nt, Homo sapiens
cccgagacccggacagaggcaagcaggggcgccgggggccagagaggcggaagaggaggccgagggaagcaacccaggcaccccc

SEQ ID NO: 29038 - RNA, 79 nt, Homo sapiens
cagcaggcaagaggcggaaggagcaaccaaaacaggacaagaaacaccaaacaagcaacagccaagaaaaaacggcaag

SEQ ID NO: 29039 - RNA, 72 nt, Homo sapiens
ccacccaccacacaacaaagaaaacaaggcaagcagagaagagaagaggcagacacagagccaaaccagaac

SEQ ID NO: 29040 - RNA, 85 nt, Homo sapiens
ccgcaccgaccaggaccacagcggcaaggcccaagcccagccaaggcccagaaggggaagacccccagcgaacagagacccaaaa

SEQ ID NO: 29041 - RNA, 67 nt, Homo sapiens
aaaaagcgagcaaccggaggaaggagggaagcagagccccgggccgggaaggggaaacggccacgca

SEQ ID NO: 29042 - RNA, 73 nt, Homo sapiens
cagcaggacaggaaaaaaagagcagcagcagaggaaaaaagagaccgagagaaagcagcagaaaggggggaga

SEQ ID NO: 29043 - RNA, 71 nt, Homo sapiens
ggacccaaaaagacggacagcccacgggaacaagaggggacagaaaggacgggaaggaggaaaacacgaaa

SEQ ID NO: 29044 - RNA, 35 nt, Homo sapiens
gcaggagggcggaaaacccaccaaggagaccggga

SEQ ID NO: 29045 - RNA, 60 nt, Homo sapiens
ggaaagaggcgggcagaacacggagggggggaccagaccaggccaggagaagcccccgca

SEQ ID NO: 29046 - RNA, 79 nt, Homo sapiens
cccaccagcaaagaaagggaagcagcgggagaggaggaagagggaggaacagcagcggaaacaagcacggacggcggga

SEQ ID NO: 29047 - RNA, 70 nt, Homo sapiens
ggagacacaagggcacgaagggacagggcagaccgccagcagcacagcaagccacagagagggccggcag

SEQ ID NO: 29048 - RNA, 81 nt, Homo sapiens
ggaggagccccaagaacagaggcccgaaaagaaagcgaacacacaaaacaagaaaaggcacgcaaacccacaagaacggaa

SEQ ID NO: 29049 - RNA, 65 nt, Homo sapiens
ccccagaagagacccagaaagggaaacggcgaggaaagagaggagccccggaaagaaaaggacag

SEQ ID NO: 29050 - RNA, 39 nt, Homo sapiens
gcagccccagcgggaacaggcaacccagaaaggcagcac

SEQ ID NO: 29051 - RNA, 55 nt, Homo sapiens
agacagcgcaaggcaggggcagacacaaggagagccaagaacccaggaggaggga

SEQ ID NO: 29052 - RNA, 71 nt, Homo sapiens
ggccacgacccaccccgaagagcaacggaaccagcgccgaggaaccaaacaagacaaaggaggcagcaaac

SEQ ID NO: 29053 - RNA, 44 nt, Homo sapiens
caggcagcgccaccaagcccaggcgagcaggcagacgggccggg

SEQ ID NO: 29054 - RNA, 104 nt, Homo sapiens
gagaggcacgggcgcagccgcccgcgagcgcggagcgcggcgccagaaagaggagaaggagaaacggaggacgcccccacacaagccaacacgggcgccggaga

SEQ ID NO: 29055 - RNA, 67 nt, Homo sapiens
ccggggccggcgcagggcggaaggacaacagcccgacaaccaggggcacgagggagaggccgagaag

SEQ ID NO: 29056 - RNA, 75 nt, Homo sapiens
cgagagcaccaccagccacggggccaccaggacaagcgggcagaacagcgcggcaggaacgaaaaagcggccgac

SEQ ID NO: 29057 - RNA, 70 nt, Homo sapiens
cacgggggcaagcacaccaacccccagcacaaagagacaccacacagacaaaggaaggagggccccggag

SEQ ID NO: 29058 - RNA, 78 nt, Homo sapiens
aaacgagaaagcaacccaagcaagaccagcagagaggaaaaacacaacccaagaaacggggacagaggacgcagaaaa

SEQ ID NO: 29059 - RNA, 79 nt, Homo sapiens
acgggaggccgaggcgggcgaacacgagaaacccacagacaaagggaagaacaaacccagaacccacacgaacgcagac

SEQ ID NO: 29060 - RNA, 82 nt, Homo sapiens
gaggaagagcgagccagcgcccggagcaagcggagccccccaagagccggaaaggcacgggaccccaaccaggacgcaggcg

SEQ ID NO: 29061 - RNA, 76 nt, Homo sapiens
ggaccagaacggccagagccgcacaaccacaggggcccgacaaggcgcggggaggcccagcccgccgcagggccac

SEQ ID NO: 29062 - RNA, 76 nt, Homo sapiens
ccccaagccggaagaaccgcagccgagcggggccggccacagaccggccgcagagagaacagcccagaaaagaaag

SEQ ID NO: 29063 - RNA, 71 nt, Homo sapiens
agaagagaaccccagaaacacaaaacaccgaggggcagaaaaacaggcaagaacggcagaaggggaaaaga

SEQ ID NO: 29064 - RNA, 81 nt, Homo sapiens
acacagggagccagcaccgagcccccgggccagcagcagggacgagaaaggcccgcagaggagaggagagaggaggcggca

SEQ ID NO: 29065 - RNA, 66 nt, Homo sapiens
accaccaccaccgaaaaaaaaagaaaaggaaggagagaagagagacgagaacagacccgcggccac

SEQ ID NO: 29066 - RNA, 75 nt, Homo sapiens
cccaaagaaggccacccccacagcacgcacccaaccccgacacggaaaagaggcgcagggagcaagaaaaaaaaa

SEQ ID NO: 29067 - RNA, 61 nt, Homo sapiens
gcccacggcggcgaccagaagaaagcagcggggcagcagggggaccggggacgacaggaca

SEQ ID NO: 29068 - RNA, 80 nt, Homo sapiens
cgcggggcccgcgcccggagcggcgccagagcagcaggccaacggacgagaagagaaagagacggagccagacgcaaaga

SEQ ID NO: 29069 - RNA, 77 nt, Homo sapiens
ggacgggaccccccaggggaacagcgagcagacaaaggacacacagcaacgaagcaggggaggagggaagaccggac

SEQ ID NO: 29070 - RNA, 99 nt, Homo sapiens
gacgccagcgggacgaggaccgagaccgcggccgggaccgagggaacaagcagaaagcacgaacaacgagaacaagacacgagcaaaccccaccgaggg

SEQ ID NO: 29071 - RNA, 71 nt, Homo sapiens
gagccccccccccaccgcgggggcgcagagcgggcaagggggccgagacaacaagaaggggaggaacaaaa

SEQ ID NO: 29072 - RNA, 73 nt, Homo sapiens
ccaggaaggagacacggccccccaaggaaaacaggggagaacaaaacgcggagccgagggcagaccagcgagg

SEQ ID NO: 29073 - RNA, 61 nt, Homo sapiens
gacgccggagcagcccaacccagggcacacaggcccgagcacaaacacaagaaacgcacgc

SEQ ID NO: 29074 - RNA, 79 nt, Homo sapiens
gcccaacggccccagcagagcccgcgaccaggaaaacggacgagaacaagcggaaaacaggggcgaggggacaaggaga

SEQ ID NO: 29075 - RNA, 73 nt, Homo sapiens
gaaaaccggaacagcagcacagcaaaggaaccgggcaaccagcagagaccgccccaaccgagggccaggggag

SEQ ID NO: 29076 - RNA, 73 nt, Homo sapiens
cagggcgcgcaccggacgcgccgccacgcccgcgcgcgcagggcaaaaacagcaaaagaaaagaaaaaacaag

SEQ ID NO: 29077 - RNA, 83 nt, Homo sapiens
gagcgcgaccaggaacacagagagcgacgggcggagagggaagaagaaccagcaaccaaaagggagcggaggagcccacaggc

SEQ ID NO: 29078 - RNA, 67 nt, Homo sapiens
gcagaaaacgaaggaagaggagaaacgagcaagcagaaccgcaaaggcagaagaggcaacagaaaaa

SEQ ID NO: 29079 - RNA, 78 nt, Homo sapiens
gaccgcacccgcaccgccaaccacgggcgaggaggcgccgcgcagagcccagaaccgccccagacaaggcccggcccg

SEQ ID NO: 29080 - RNA, 78 nt, Homo sapiens
acggggagcaaaaccaacgccggccggagcagcagcccgaggaggaggaagccaagaacgggagcgaagccacgcagc

SEQ ID NO: 29081 - RNA, 82 nt, Homo sapiens
cggcgcgaagacgcgggggccgccccccgaagacaaaggaccagggaagaaccggggagaaacgaagaaggcccagaagaga

SEQ ID NO: 29082 - RNA, 66 nt, Homo sapiens
caggcggcgcggacggggcggcaccacgccacggaccccaccaaacacagccgaggagcggaggga

SEQ ID NO: 29083 - RNA, 57 nt, Homo sapiens
gcacaggcagaaggggcccggaccagcgcacggcgggaagagagaagggagaccgag

SEQ ID NO: 29084 - RNA, 53 nt, Homo sapiens
gccacgggggggacgcagccaaaagaaacagcagaagaggcggccacccacga

SEQ ID NO: 29085 - RNA, 57 nt, Homo sapiens
gaacccgggaggaggaagggacaccgagggaccaaagggcgcaaaccagcggcgcga

SEQ ID NO: 29086 - RNA, 76 nt, Homo sapiens
cgcccagccccaagagcgggacacaggaaccacaagcagcaaggcgccaagacgagagcccaaacacagggcccca

SEQ ID NO: 29087 - RNA, 71 nt, Homo sapiens
aaagaaacgggccacaggaccgcagcaacagaagcaacaaggaaacagaaaaagaaaagaagaaaaaaaag

SEQ ID NO: 29088 - RNA, 75 nt, Homo sapiens
ggccgcaagaggcggagccgaccaggccgacgagaaaggaccaaaccaccacggagcagagaaaggaagcaagcg

SEQ ID NO: 29089 - RNA, 77 nt, Homo sapiens
aaggaggacccaggagacgagagagcgaacgccagggacccggcaggccgcccccggcaagacaaaacagaggagac

SEQ ID NO: 29090 - RNA, 78 nt, Homo sapiens
aagcagcgaagaagaggcccaacccccaccccgcccaaggaggcccagcgggcaggagaaacccagcgggcccagaga

SEQ ID NO: 29091 - RNA, 57 nt, Homo sapiens
acccgaaaaacaaccacacgccgaccggacaggagcaggcagagaacagagacagac

SEQ ID NO: 29092 - RNA, 78 nt, Homo sapiens
gagaccccgagccggagcggaaaaacccgggaaaaaccgagagcagccgagggaagcaggaagaaacaaggcccgaca

SEQ ID NO: 29093 - RNA, 76 nt, Homo sapiens
cgggaagcaggacgcgccgcgccccaagagcggggcccggcgcacccaccaccgccgcccacggcagcccagggac

SEQ ID NO: 29094 - RNA, 74 nt, Homo sapiens
agcaacaggagagaaaggagaaaagaggcgcggaccaggggaaggcaaaaggcccgggaaaccgaagaacccgc

SEQ ID NO: 29095 - RNA, 67 nt, Homo sapiens
cggggaacacggggggaagccacggcgaggagccagcaccgagaaggcagggaacagggcagcaacc

SEQ ID NO: 29096 - RNA, 84 nt, Homo sapiens
gcagaccccgcgcaagaggcgcgggagccaagcgcgggaacaccacgggccaccaaaggcacgacgcagcagacgggccaagaa

SEQ ID NO: 29097 - RNA, 84 nt, Homo sapiens
agcccccgccgacaaacacaaaccagaagccaggcgggcaccacggcaggggcgagcaccccaggaagggagaggaccgaccgg

SEQ ID NO: 29098 - RNA, 74 nt, Homo sapiens
ggcgccaccagcaaccagagggccagagggaaggacaggacaccgagccaggggggcaagacccaggagaacag

SEQ ID NO: 29099 - RNA, 67 nt, Homo sapiens
gccgcagcaacagggacaggaaagggcacaaggaagggcgagaggagcccaaggacaccgggaacac

SEQ ID NO: 29100 - RNA, 73 nt, Homo sapiens
cgggccccagcggccccggggcgcgcgagcccgagagagacgcagcgcaaggccgggggaggccacaaaacaa

SEQ ID NO: 29101 - RNA, 74 nt, Homo sapiens
gaagcagaagaaaggcggaccacaaggaaaagaaaaacagaagcacagaaaacaggcagcagacaccacgaacc

SEQ ID NO: 29102 - RNA, 79 nt, Homo sapiens
cggggggagagaacccaaccagggggaaacacagaacgcaggacacgagaggcgagggacgacagagcaagcggcagag

SEQ ID NO: 29103 - RNA, 81 nt, Homo sapiens
gggaagcaaggagcgcagaagggaagaccaaaagccccaacagcggcaagaccagcacacagaggccagagcacccagcgc

SEQ ID NO: 29104 - RNA, 77 nt, Homo sapiens
aacaaaacaccacgagaaaagaaaaccggagcccggagcaaaagcacacagcgaaggagacacaggaaaagacagag

SEQ ID NO: 29105 - RNA, 67 nt, Homo sapiens
cgaccgccggcacagaacacaaaggccagacagcaaccacccaagcggcggagaaaccaccacaaac

SEQ ID NO: 29106 - RNA, 61 nt, Homo sapiens
acgccaggcgaaaggaacgccaggaagcggcaccacccagccacagccaaagcggacgccg

SEQ ID NO: 29107 - RNA, 82 nt, Homo sapiens
caaccgcagccaacaaggagccagaacacagcggacagaggggaaagagcaggcaacagcgcgaaccaggccaccagaacaa

SEQ ID NO: 29108 - RNA, 91 nt, Homo sapiens
gcccccgccccggaggcgaccccccgccggcccggccgcggggaaggagggggaagacagagaagaccacacaaccgaaggggccgggcag

SEQ ID NO: 29109 - RNA, 76 nt, Homo sapiens
gcggcgagggccgacaccaccgcgcgaccgcaaccggccagggcggaacccaccagggcaaaccgacacaaagcga

SEQ ID NO: 29110 - RNA, 72 nt, Homo sapiens
ggagaaggaccaagaaccaggggaggggaaacacagagaacggaacagaagcgagcccgacggaggccaggg

SEQ ID NO: 29111 - RNA, 71 nt, Homo sapiens
gacaagacgccggcaagaggcaagacgaggcaaggagaccgaacagcccagcgagagacaacaccggagcg

SEQ ID NO: 29112 - RNA, 75 nt, Homo sapiens
gacggccaccggcgggaggaacaaaaggacaggagagacaacggaggcaagaaagacggagaagcgagaagagac

SEQ ID NO: 29113 - RNA, 78 nt, Homo sapiens
caacggagccggagcgacgaccccggaggcggggaagcgcggcgacgcagcccgggacacgaagggccgaccaggcag

SEQ ID NO: 29114 - RNA, 97 nt, Homo sapiens
cgccgccgccgccgcgccgcgccgcgccgcaccccgagcgaccgcacacggcggcggcgaagccaagacacgggcccgccgagggcgggacccgcgc

SEQ ID NO: 29115 - RNA, 88 nt, Homo sapiens
gcagcacacacgaaagagaagccccggaggacaaggaagaggggagccaaagaccaagcaccagagaagaggaggaagaaggcgagaa

SEQ ID NO: 29116 - RNA, 70 nt, Homo sapiens
ccgcccgcagagaggccggccgcgcggagcacgcggagccgcccaggcagcacggaagagccagggcaaa

SEQ ID NO: 29117 - RNA, 75 nt, Homo sapiens
ccggccgcagcgcagcgccagccagacccaacagaggaagccgcaagaaacgggacgacaggaaggccagagaag

SEQ ID NO: 29118 - RNA, 63 nt, Homo sapiens
agccagaccagggacaaagagcaaacagacagggccgcagagagacaagagagacaccccaac

SEQ ID NO: 29119 - RNA, 70 nt, Homo sapiens
gaggagacccgaccccagaagccagccagcaggcaacaggcccagaccaggcccaaagagcccaccaaca

SEQ ID NO: 29120 - RNA, 77 nt, Homo sapiens
cccgcggggacagggaaaaaccagaaccagagaacagcagaggcccaggaaacagccaccaccccggcccccagagc

SEQ ID NO: 29121 - RNA, 57 nt, Homo sapiens
ggggcaaaaacagaacgcgcagaggcgagacaaccccaagcgcaagccccggggcag

SEQ ID NO: 29122 - RNA, 77 nt, Homo sapiens
acaacagacaaccgacccaagcagcgagaccaggcgagcccagggaaagacaaacgaagaagagcaaagaacaagcc

SEQ ID NO: 29123 - RNA, 78 nt, Homo sapiens
acacaaggacaagaaagccaccaggacgagaaaaaccaccggacagaacagcagagaccacaagaaccaggagagacc

SEQ ID NO: 29124 - RNA, 71 nt, Homo sapiens
agacaaaagggccaaagaagggagagaggcacagcggagcaaagcggcaccgaggcagcgcgaaggagcga

SEQ ID NO: 29125 - RNA, 79 nt, Homo sapiens
gagagggaacgcagcgaaagcggaacgggcagacagaagagccggcaacgcccagaggccacgcggcagacaccaggac

SEQ ID NO: 29126 - RNA, 85 nt, Homo sapiens
cccgaccagaaaaggccacagcagaccgcccagacagacaggaggagacagcgccggggagccgccaccaaaagcagacggaaaa

SEQ ID NO: 29127 - RNA, 62 nt, Homo sapiens
gcgggacgcaacacgcgggaaaaacggggggcggaacacggaaggaaacaagaggcaaaaac

SEQ ID NO: 29128 - RNA, 57 nt, Homo sapiens
gcaagcaccaggacgcgaaggggccggccgccaagacacccccggcccggcacagaa

SEQ ID NO: 29129 - RNA, 75 nt, Homo sapiens
cagacacacacacgcccacggcaagagaaacaagcgaaaacaaaaggagaagacaaaagagagaaaagaaaggag

SEQ ID NO: 29130 - RNA, 60 nt, Homo sapiens
acagaccaagggaacaccagacagcggagcgccacagcaaaacaccaaacggggggacaa

SEQ ID NO: 29131 - RNA, 81 nt, Homo sapiens
ccagcagcccggaggaagggcagcggccacacaccaaaaaggcccacacacgaggaaggcgcccccgacgacgcccgcagc

SEQ ID NO: 29132 - RNA, 73 nt, Homo sapiens
caaagcgcgggacgccaaacaagagcgcagaaaacgcaagcaagggaagcaccaccggcccagaaacaaccag

SEQ ID NO: 29133 - RNA, 78 nt, Homo sapiens
cgagagaggccacgaccaggaaaaacggcgccaaagcgggcagagggacccgaagacagaaaaagacagcgagacaga

SEQ ID NO: 29134 - RNA, 74 nt, Homo sapiens
gaaaaaaaagacaaggaaacgcccgcgggacacgagccaggacaaaaccaggcagaaccaacacgaacccaagc

SEQ ID NO: 29135 - RNA, 71 nt, Homo sapiens
aaacaacaagcaaaagagggcacacaagcaacagaagaaaaggagggaagagggaacagaagggcacaccc

SEQ ID NO: 29136 - RNA, 75 nt, Homo sapiens
ggaacccccaaacaggagcaccgcggcgcaaaagagggggccaggaaccagaagacgaggaagagaaggagcccc

SEQ ID NO: 29137 - RNA, 83 nt, Homo sapiens
gccaagcgaagaggagcgccagaggggaggaaacacaagaacaggacaagggaaaaggagaaccccagcgggaaccgcaccgc

SEQ ID NO: 29138 - RNA, 74 nt, Homo sapiens
ccaccagcacccgagccccaccccgcccagccacagaggggcacgacaacaccagaagggaagccgagagaaac

SEQ ID NO: 29139 - RNA, 78 nt, Homo sapiens
caaaggcacgcaacaagcgaacggccagaagacaaaaagggccaaggagacggaagaagccaagaagaagcaagaaaa

SEQ ID NO: 29140 - RNA, 58 nt, Homo sapiens
cgcacaccgccaaccccgcaccggcaccagagcagcacaaccaggcgacggacaaggc

SEQ ID NO: 29141 - RNA, 78 nt, Homo sapiens
cgcagcagagaaagacaaaagccacccaggccggccagcacccaccgagaaggccagcaggggacacaggcaaaacgg

SEQ ID NO: 29142 - RNA, 80 nt, Homo sapiens
acaacgggagaagaacgaaagaacaggcgcaaaaagaaaccacgacgagcgagaacgcaaggcggggaaaaaaaggcagc

SEQ ID NO: 29143 - RNA, 54 nt, Homo sapiens
ccccgcggcccgcacgccacgggccagcacgcgaaaagcagccaccaccagggc

SEQ ID NO: 29144 - RNA, 78 nt, Homo sapiens
gagaagaaaaaagaaccagcaaaggcggagaagccagggcgacaacaaggggcacaagaacgaacagggcaacaacgg

SEQ ID NO: 29145 - RNA, 61 nt, Homo sapiens
ggagaaaaggcccagaagacgcagaaggggccgccgccacgaggaagcccgcgccacgaag

SEQ ID NO: 29146 - RNA, 75 nt, Homo sapiens
cggccccccgcgcgcccgggaacgagaccagaggaggggccccggagggccgcgcccggacaaaccaggaccgcg

SEQ ID NO: 29147 - RNA, 70 nt, Homo sapiens
cggagaagcgcggaggaagaccgcaggaaagcaggaaggcaagaaagccaaggacgaaacccacacggag

SEQ ID NO: 29148 - RNA, 76 nt, Homo sapiens
ggaaaaaccacaggaggagacacgaggaaacaggaacacgaaagaggaaaaacgcacaagaaaccgaagccaagga

SEQ ID NO: 29149 - RNA, 75 nt, Homo sapiens
caaaccaccaaaaacaacacccagaaagagcgcaccgggggggaccccagcagacgcacaagcagggagagcacg

SEQ ID NO: 29150 - RNA, 88 nt, Homo sapiens
caacagagcagggaaaggcccgcagccaggcgcggaaggaggcccgggaaccaggggcgaagggcgagcggggccagacaagaggccc

SEQ ID NO: 29151 - RNA, 67 nt, Homo sapiens
cacccaagagacaagcagggcacgaagaaaggagagacccccgcagaaacggccaaaaccaccaccg

SEQ ID NO: 29152 - RNA, 59 nt, Homo sapiens
ggcagaggcaacagacagggcagcacgccaaaggcaaagaagaaaaaagccaaacaaaa

SEQ ID NO: 29153 - RNA, 71 nt, Homo sapiens
agggcagaagccacaagccaaggaaccacccacaacgcagcgacccaaacgccacaacacccgaaggaagc

SEQ ID NO: 29154 - RNA, 65 nt, Homo sapiens
ccacgcacgggggaccaggaggagcggcaggacaacaaccggagagacccacaccgggggcacgg

SEQ ID NO: 29155 - RNA, 71 nt, Homo sapiens
agcccacccccaacgcgacggaaaggcacgaaagccagggcccccggaagccgggcccaaccgacagggca

SEQ ID NO: 29156 - RNA, 68 nt, Homo sapiens
agacaacagaggaagaggcgccagacggagaagaaacaccccccacaggagacagggaaacgaaaacc

SEQ ID NO: 29157 - RNA, 79 nt, Homo sapiens
aagccaggccagacgacgccggccacccagaagccggagcacaagaaccgagcgaagcgccaggaacacaagaaaaaag

SEQ ID NO: 29158 - RNA, 79 nt, Homo sapiens
gaaacaaccgcaaccacccaacaaggccaagaacccaaagcaaggcgagacaaggggccaaccagccagggccaacaaa

SEQ ID NO: 29159 - RNA, 81 nt, Homo sapiens
cggcgcccggcggccccggcgccggcaaggggacccaggcgcccgcacgcgaggaacgaggaggaaaaagaaacacaccag

SEQ ID NO: 29160 - RNA, 61 nt, Homo sapiens
gagaggggcgagaacgccacgcgggccggcgaaagcggacccaaggccagccagccccagg

SEQ ID NO: 29161 - RNA, 75 nt, Homo sapiens
cggccggccggacaagcccaggagccgaccagagagcaggcgcccagacgagcccaccacggaccacccgcagcc

SEQ ID NO: 29162 - RNA, 87 nt, Homo sapiens
cgggacggccacagacccacagaggcaccccagacacaaacaccagcaggaaaaaagagcggcagaaggccaaacggccgagcaggc

SEQ ID NO: 29163 - RNA, 82 nt, Homo sapiens
gagggaagaaaaaagaagaaaagaagcaaacaagaaaaaggcaggaacaaccacaagagcagcccgacggccaggaggcgaa

SEQ ID NO: 29164 - RNA, 75 nt, Homo sapiens
accagagcgccacccaggaggcggagcggcaaaaaccggggacacgccagcggcgcagccgacggaagaccggga

SEQ ID NO: 29165 - RNA, 66 nt, Homo sapiens
cgccacgcccggcccagccgcggggccaaacgaccaagaaagcgggacgcggaaaacgggacccgc

SEQ ID NO: 29166 - RNA, 85 nt, Homo sapiens
ggccgagcccagagcgcaggacgccggaagagaccaagccgcgccgcccccaggcccaagcccgcgggcagcgccccccacccgc

SEQ ID NO: 29167 - RNA, 69 nt, Homo sapiens
aaacaggaaccgcacgaaccaaacaaaaggcggggccggggagcccgggccagaccccccagacccagc

SEQ ID NO: 29168 - RNA, 63 nt, Homo sapiens
agggggaagaccgcgcccgcggagagcccaaacaccaccaccaagacaagggaggcgaggacg

SEQ ID NO: 29169 - RNA, 71 nt, Homo sapiens
cccggggaagggagagaccacaaggacgcgcgcacgagaacccggagagcgaagacgggggcgacaaagcc

SEQ ID NO: 29170 - RNA, 58 nt, Homo sapiens
gagcccggaaccaccggccgcagccgcaggacagggcagaccgccagcagcacagcaa

SEQ ID NO: 29171 - RNA, 66 nt, Homo sapiens
gggcgcccggcgccggccgagaaggcagaggcgggccggagcgagggagagcaggaacacagagag

SEQ ID NO: 29172 - RNA, 61 nt, Homo sapiens
gggaccaggcgaagcggccgagcaggcgagcgaacgacgagaggaacaccgggccaggcgg

SEQ ID NO: 29173 - RNA, 73 nt, Homo sapiens
gaccagccgaaagacaccgggcccccgagagaaaggaggaagaagaagaacagcgccagcgccgggaccgcca

SEQ ID NO: 29174 - RNA, 50 nt, Homo sapiens
cgagagggcacggggcccccaccacagcgccacgccaaggagacaccagc

SEQ ID NO: 29175 - RNA, 38 nt, Homo sapiens
gcacgcgcaggagggaagacgggccgggcgacccccca

SEQ ID NO: 29176 - RNA, 60 nt, Homo sapiens
aaaaacacagccgacagacgccaccaaaagcaccagggcagaccacggccccggagaccg

SEQ ID NO: 29177 - RNA, 67 nt, Homo sapiens
acacccgaacagggaagaaagggaagggcaagggggccgaagcaaccaggccccaggggcgccacag

SEQ ID NO: 29178 - RNA, 73 nt, Homo sapiens
aagaccacaaaaaagagacccacagccagcaacaccgggcagccagggggggcgaggaaccgcggggcggcag

SEQ ID NO: 29179 - RNA, 76 nt, Homo sapiens
caagcgcggaggaccacggacacccaggcaacgcccccggaaggacaacccccaggaaagacaacccgggcaagga

SEQ ID NO: 29180 - RNA, 73 nt, Homo sapiens
aaacaaggacccgaaagaacgggaaagaaggacacccaaaccaaaagagaagcaacgcacaaacaacaagaga

SEQ ID NO: 29181 - RNA, 81 nt, Homo sapiens
gacccccgcaaggaaaggcccagaaagggcaaaagcagaccggaaaacccaccggcaagaccacacccgaggggagcccag

SEQ ID NO: 29182 - RNA, 48 nt, Homo sapiens
gcgcggaaacggagggggaagaagaaaagaagcaaagccagggaggga

SEQ ID NO: 29183 - RNA, 85 nt, Homo sapiens
aggcacaaaccagcagggaggccagagaaaaagaaaagacaccgcacgaaagaaccagaggaccggcaacaacccgaggacgaac

SEQ ID NO: 29184 - RNA, 59 nt, Homo sapiens
cgacaccacaagcaagccaaaagagggcagcccagaaggcaggcccacgggagccgaga

SEQ ID NO: 29185 - RNA, 63 nt, Homo sapiens
ccagggaccaggcggaggcgcgcgggagccggggcaccacagagagcggcaaagcgccaccgg

SEQ ID NO: 29186 - RNA, 78 nt, Homo sapiens
aaggaacgaacacggacacaggacggggaagacggacagcaggagaagggaggcccaagcagccccaaaaaacagaca

SEQ ID NO: 29187 - RNA, 68 nt, Homo sapiens
gggcgcacccccgccagccgacacaaccagaaagacaacagagcaccaacaaaaagcaagccggggaa

SEQ ID NO: 29188 - RNA, 76 nt, Homo sapiens
gacgcggggccaggcaggacccaacgacaggcgccccggcccaacggagacgaggcccgcggcgcgcgccagcacg

SEQ ID NO: 29189 - RNA, 78 nt, Homo sapiens
gaaaaagacggaacacgaaaggaccaagaacacagccacaagagaccagcaccagacagcgaaaaagaggacccaaaa

SEQ ID NO: 29190 - RNA, 35 nt, Homo sapiens
accaaacaccgcagccaccaaggcgagaagaggcc

SEQ ID NO: 29191 - RNA, 77 nt, Homo sapiens
gcgcagaagcccgaagaaaacagcgggaagagacagccaaggccacccaaccggcaacgacccagagacgacacagg

SEQ ID NO: 29192 - RNA, 76 nt, Homo sapiens
gaaagcaaccaggaggcagaaaccagcgccggacagagaagcccccaaggagcgcagggacgcagaggcaggaaca

SEQ ID NO: 29193 - RNA, 49 nt, Homo sapiens
caaacgaacgacagcccggcccgggagcacggacgcagggcagcgcgga

SEQ ID NO: 29194 - RNA, 83 nt, Homo sapiens
ggagagaggaacccgaagaagaaaggacgacagccagagagcacacccacccccagccgacgccccgcagaggcgcggacgcc

SEQ ID NO: 29195 - RNA, 87 nt, Homo sapiens
gcacagaagcgggcggcggcgcgccgccccgggcggccgcgggcggacccaagcaccagccgccgccacacccccccccggcccccc

SEQ ID NO: 29196 - RNA, 71 nt, Homo sapiens
aaggaccaagaaccaggaaaagaaggaggccagcgggacacacaaagaaagacgaaggacacccaaaggga

SEQ ID NO: 29197 - RNA, 36 nt, Homo sapiens
ccgacagccgcagaacgacaaggcgaaggaaaacaa

SEQ ID NO: 29198 - RNA, 75 nt, Homo sapiens
ccggccgccccccccccacggcacccccaccagaaggggggccccggaggacaaacccccaaggacaccaaaagg

SEQ ID NO: 29199 - RNA, 78 nt, Homo sapiens
cgacgcaagacgcccggcccggcccgcacaggcagacaaccccggggacaggaaacaaagcaggaggaggaggcccac

SEQ ID NO: 29200 - RNA, 107 nt, Homo sapiens
gccaaagcagcgaagaagaggcccaacccccaccccgcccaaggaggcccagcgcacccaggccacagaggaggaaagagaggggaaagaagcagccaagccccaag

SEQ ID NO: 29201 - RNA, 31 nt, Homo sapiens
accaggaagcaagggcgagaggccagcgaac

SEQ ID NO: 29202 - RNA, 75 nt, Homo sapiens
aggcagcagcggaaggcagcgggagccgaaaacggaagaagcaccagcaccaagaccagccagggagacgacccg

SEQ ID NO: 29203 - RNA, 74 nt, Homo sapiens
ggcacccggacaggaggagccagggcccggcccgaaaggagagccacgggcgcagacacagaagacggcaacga

SEQ ID NO: 29204 - RNA, 81 nt, Homo sapiens
aacagaccgcccggggccccaggacggggacagggccgaaggccccaggccagccagagagcgggaggcggacccaaaccc

SEQ ID NO: 29205 - RNA, 57 nt, Homo sapiens
cgcagcaaagacggagacagccaaacccaagagcgagggcgcccccaccgaggaccc

SEQ ID NO: 29206 - RNA, 68 nt, Homo sapiens
gccaaggaagcgacagccaggaccaggcacccgggaagaggcgcaccaaaaagccaacccagcagagc

SEQ ID NO: 29207 - RNA, 62 nt, Homo sapiens
accaggccaccacagaaacaaaagcaacaaagaggaacgaaaacaaacggaagagagggcag

SEQ ID NO: 29208 - RNA, 74 nt, Homo sapiens
gccccgcggggcgaaaacgcaagaagggggaaggacaggaggggaagagaggcggacgggccccaagagacaga

SEQ ID NO: 29209 - RNA, 85 nt, Homo sapiens
ccggccccgcccgcgccggaagagccacgccggggcccgcgccggagggaggccccagggcggagaagcggcgcagcaccagcac

SEQ ID NO: 29210 - RNA, 54 nt, Homo sapiens
gcccggagcgcagacgcgggaaggacggcagcccgaccccgcagaagacaggcc

SEQ ID NO: 29211 - RNA, 68 nt, Homo sapiens
cgccgagccgccaggcagcaggacggagggagcaccccccagacggcgccagccgacccccgccgcca

SEQ ID NO: 29212 - RNA, 72 nt, Homo sapiens
ccacaaagccaacaggagacagaccaaggccggaagcgcagcagggccgagcaccacagacagcgcgccccc

SEQ ID NO: 29213 - RNA, 67 nt, Homo sapiens
cagaaacgcaccaggccaaagaaagagaaggaaaggacagcaggaaaccagagcacagagcagcacg

SEQ ID NO: 29214 - RNA, 93 nt, Homo sapiens
cggagccccgagcagcccgggggcggcggccgcgaggcgagcggcgagccacaaagggcggaaggcgaccgaccggaagcggaggacacaggg

SEQ ID NO: 29215 - RNA, 60 nt, Homo sapiens
agaaaacaaggaagacaagagcgaaaagccagaaggaagccaccagaagaggaggcggag

SEQ ID NO: 29216 - RNA, 58 nt, Homo sapiens
cagccaaagagcgcaagggcggcccagcagggggagacaggaggccaccccaccgagg

SEQ ID NO: 29217 - RNA, 68 nt, Homo sapiens
ggaaagggaacccgacaagaccaagacacccaaggaaagacgcagaggagcgggggcccgcgaaaaac

SEQ ID NO: 29218 - RNA, 57 nt, Homo sapiens
cacgcacaaggagcgagcagaacacacagagccaccagaggccagggaaggacacac

SEQ ID NO: 29219 - RNA, 69 nt, Homo sapiens
aggagggagaaaagcggacgccggggaggccaaaaagggacacacaggaagacgaacacggaacgggcg

SEQ ID NO: 29220 - RNA, 80 nt, Homo sapiens
caagagacacagaaaaaaaaacaggagaaagaggagaaaagcgaaaaaacccccaggagccgggaaagcagcaaaggggg

SEQ ID NO: 29221 - RNA, 76 nt, Homo sapiens
gagcgagagcgaggccgagcaacaccgcgagccgcgcggcgcggggccccgcggcggaggcgggaaaaccgccaca

SEQ ID NO: 29222 - RNA, 84 nt, Homo sapiens
ccagagaccgaacagagagaacaagagacgcagccgcacagagacaggaagcaccaaccccgcgaaacccaggacacacagggc

SEQ ID NO: 29223 - RNA, 77 nt, Homo sapiens
ggcgcccccgagccgccgccgcgccggagccccacagagaacagaaagccaaagggaggacaccagagagaaacacc

SEQ ID NO: 29224 - RNA, 72 nt, Homo sapiens
gcacgacagaagccgccagcgagccccacacaggaaccgaaagaaggaccaccacaaggaaccacacaacag

SEQ ID NO: 29225 - RNA, 80 nt, Homo sapiens
cagcgcggcgcgcggaagcaccagaagccacgggacggaggaccgggcgaggccaccccgaggcaaggccccagaggagg

SEQ ID NO: 29226 - RNA, 60 nt, Homo sapiens
gagcgaacgggacagcccacacccggcgcggaggcaggacccaggcccaaaaggaaaagc

SEQ ID NO: 29227 - RNA, 79 nt, Homo sapiens
cggcagcgccaacgccgcacgcgcacccgacaacacgcaaacagcagacggaagaccccacggcaaaaccacacccgag

SEQ ID NO: 29228 - RNA, 72 nt, Homo sapiens
aaggaaccggccccggggacacagaccagggagggcaagaccggaggagggaaagccgaacccgcacagagg

SEQ ID NO: 29229 - RNA, 74 nt, Homo sapiens
aacgaaccacgggggcagaccaggaccacccgaggaaggaggggccagggacgaagaacaaagaaaaagggcaa

SEQ ID NO: 29230 - RNA, 75 nt, Homo sapiens
gacacgacgaccagcaggggcaaccaccccaggcccccaacagacagccagaagacacacaccagagggagcacc

SEQ ID NO: 29231 - RNA, 78 nt, Homo sapiens
caagcaggaccacccaccagccaccagaacagggggacacagaagagcagcagacacacagcagcagagcagagcaaa

SEQ ID NO: 29232 - RNA, 75 nt, Homo sapiens
gaccaggaggcaaaagacagaacagggaaaagggaagagagcaagggaccccgacggagagacaaagaagacgga

SEQ ID NO: 29233 - RNA, 77 nt, Homo sapiens
ccggccaagaaaagacaagaaacaggaaaagaaaccgaaagaacgcaccacaagaagaaacaaccgaccgaacaacg

SEQ ID NO: 29234 - RNA, 86 nt, Homo sapiens
ccaggccggagcgcgacacggagacaggggcaggcgccgcgaggccgcggccaggccgagcccgccaccaggccaggcagaccgcc

SEQ ID NO: 29235 - RNA, 41 nt, Homo sapiens
acagaagcagcagaagcagcaggacaaaggccacagcggag

SEQ ID NO: 29236 - RNA, 84 nt, Homo sapiens
gaacaggggaccgaggaaaaagaccagaaaacggcaaaacgggaggaaaccagccaagcaaccggaaagaggcagaacaccaag

SEQ ID NO: 29237 - RNA, 63 nt, Homo sapiens
accagcgcggcacaaagaagggagacaaagcaaggcgccacccccgcgaaaaggcgaggaaaa

SEQ ID NO: 29238 - RNA, 82 nt, Homo sapiens
gcgcgccaagcgcagacgagcgggcaaggcaaggcggaacacgaccagcgccccaaaaacaccagggggacgcccaccacgg

SEQ ID NO: 29239 - RNA, 76 nt, Homo sapiens
cgacaggcaacccagccgcacgcccaggacgcggcagggaagaaaaaaaggagaaacaggcgccaaacgacagaga

SEQ ID NO: 29240 - RNA, 84 nt, Homo sapiens
gccacggagaaagccgcaggccagcagcccagaccgggaccaacagggacaaccgaagaacaccaagaggaaagcagagccaac

SEQ ID NO: 29241 - RNA, 82 nt, Homo sapiens
gacacgccaccccaccaggcaggcacgaccccgacccgcaccgccaaccggaaggaggacgaccgaagacacaagagcacgg

SEQ ID NO: 29242 - RNA, 45 nt, Homo sapiens
aacacggggcaccacccggaagcgaacggccagcaggggcagccg

SEQ ID NO: 29243 - RNA, 77 nt, Homo sapiens
aaggcacgagcccaaccagcgagaagcgccagcccaccggagaaggcagaggaagaaagaacagacccgggaaagag

SEQ ID NO: 29244 - RNA, 73 nt, Homo sapiens
gcaaaaagaacacaaaggacagacagagagaggcgaccggaacgcacaccaccgagggaacagagagcagaca

SEQ ID NO: 29245 - RNA, 79 nt, Homo sapiens
ccacgcaaccggaaccccagccaagagaccccagcccagcccccgggagcaacagcgagcaacaggcaacgaaaacaga

SEQ ID NO: 29246 - RNA, 57 nt, Homo sapiens
gacggcccaccgccgaccacacgcagggaccccgacggagagacaaagaagacggag

SEQ ID NO: 29247 - RNA, 56 nt, Homo sapiens
gagaggaaccccaagccaagcccaagacaaaaaccccaaaggggcaggacaagaca

SEQ ID NO: 29248 - RNA, 57 nt, Homo sapiens
ccgaccgagaaccaccagcgaaagaccaaaaaaccaaggacgacgggaaaccggacc

SEQ ID NO: 29249 - RNA, 76 nt, Homo sapiens
cgagaggaagacgacgaggaagagcccgccgaagcggagcagggagagcaggaccacacacggagggaggcaccag

SEQ ID NO: 29250 - RNA, 75 nt, Homo sapiens
ggaaaaggcgcagcaaaagaaacgggggcccagaagggcggccccggagcggacagcgcaaggcgggcccgggca

SEQ ID NO: 29251 - RNA, 73 nt, Homo sapiens
ggcacgggagaagaggaggagcggccgggggaggcaggggcgcggcagcccaggaacacagaccaccaggagc

SEQ ID NO: 29252 - RNA, 84 nt, Homo sapiens
cgaagagggacgcccgcaccgcccccgggaccgcaggcccacacggcccgggcaagaaaacaggggcacagacgacagaagcca

SEQ ID NO: 29253 - RNA, 71 nt, Homo sapiens
aagcaccgagcccgaagcacgggcagccagcccaagagggcgggcccgggcccaggggccagccggggcac

SEQ ID NO: 29254 - RNA, 70 nt, Homo sapiens
ccgacagccgcaaaacgaggcgggaccaccaaaaccaacaacccaaggagaaaggagcccgacccaaaac

SEQ ID NO: 29255 - RNA, 55 nt, Homo sapiens
gcccggcccggccccgacacgcagcagccgacacaaaccacccgccaccgcaacc

SEQ ID NO: 29256 - RNA, 33 nt, Homo sapiens
agagaccaggcgcaacaggcgggcgcggacggc

SEQ ID NO: 29257 - RNA, 55 nt, Homo sapiens
caccaccagccgaaacagggagcaaagcaagccagcgagaagaccgagaggccgc

SEQ ID NO: 29258 - RNA, 86 nt, Homo sapiens
gcccacccaaacacccagggagagggagagccacacagacagcccacgaaagaacgagacaaccaaaagaggaagcagaaggggac

SEQ ID NO: 29259 - RNA, 76 nt, Homo sapiens
aaccgagccacggacccagggccaagaggagagccagccgggcaccccaccgaacaggagccaaaaaccgaacacc

SEQ ID NO: 29260 - RNA, 36 nt, Homo sapiens
cccccgaaggcgggaacagacagaaggacagcaaga

SEQ ID NO: 29261 - RNA, 58 nt, Homo sapiens
cacgaaccgggggcagaacagaaaggggaaggggaggggagaccaagacgcaacgggc

SEQ ID NO: 29262 - RNA, 80 nt, Homo sapiens
cgacgggccacaacagagcaaaggcggaaggcaaccgcaacgcaaacaagcggaaaaagcccagaaaggaggaaacaaag

SEQ ID NO: 29263 - RNA, 75 nt, Homo sapiens
cgccgccagggcacaggcaggcggaagaagcaagaaccagcacagaagggagacacagaaacaccaagaaaaccc

SEQ ID NO: 29264 - RNA, 76 nt, Homo sapiens
gcccgggggaaccgggccggccggagggcgcccgaaggagccagcaagagcacgacggcggggacgaagcagaaac

SEQ ID NO: 29265 - RNA, 42 nt, Homo sapiens
gcgggacaccccggaagcgggaaagagaaaggacagggacag

SEQ ID NO: 29266 - RNA, 68 nt, Homo sapiens
gcagagagaccccaagaacccgaggccggcagagcaagacggcaaggagaaaacggaacgagccaaaa

SEQ ID NO: 29267 - RNA, 90 nt, Homo sapiens
cgagaggaaccagaaaaagggagcacaaggaagacaaaagggcagaaaagcagggcaagcagggaaaagagaaagaaaccggcagcagga

SEQ ID NO: 29268 - RNA, 72 nt, Homo sapiens
aagcagagcccaggagaaaccggacgcgacggggcaagaaaaggagaagaaagaagaaaaaaaagagcaaaa

SEQ ID NO: 29269 - RNA, 69 nt, Homo sapiens
gcgcccggaaggcgcgcccaaaagcagaagcccccggggagagacagacagagggacacagagaggaag

SEQ ID NO: 29270 - RNA, 76 nt, Homo sapiens
cagccgcccagccacccccaggacgcccgcaacccgacacgaagcaaggccgcggacccggcggaggcagggcaca

SEQ ID NO: 29271 - RNA, 75 nt, Homo sapiens
caccagccagacaacacaagaagaagacggacaaaagaggagaaggaagagccgaaaaccaaacgggacaggcag

SEQ ID NO: 29272 - RNA, 78 nt, Homo sapiens
gcagaagaagagaggagggagaacacagaaaccggccccagagacaaagcaggaggacacaagaagggaggaaaggcg

SEQ ID NO: 29273 - RNA, 88 nt, Homo sapiens
gcccgcccggccgagaccccgcgggaggaaaccagggccgggaagcacacaggaggcgccacgggagcagcggaaggggcccagcaga

SEQ ID NO: 29274 - RNA, 47 nt, Homo sapiens
gggggaagccaggcaccccccacagaaagggcgcgacaggcgccacc

SEQ ID NO: 29275 - RNA, 67 nt, Homo sapiens
cgcggcggggcgcaggacacaaccaaggccgacaaagggaccagaggcagaccgaagaacggcaaag

SEQ ID NO: 29276 - RNA, 84 nt, Homo sapiens
gggcccccagccgccgaccggacccaagacgagaggaagggagacggcagagacacccggcccgaaaccccaagccaagaagaa

SEQ ID NO: 29277 - RNA, 78 nt, Homo sapiens
cgcaaaagagcacaaacacaaaaggccagaagcggacccagaagaggggagcagcaaggaggaagacagccggggccg

SEQ ID NO: 29278 - RNA, 79 nt, Homo sapiens
cagcgcgacaggacacgagggcgagcccccacggcgcggggacacccgacggccgaaggaaaacagggaagcaaggcga

SEQ ID NO: 29279 - RNA, 71 nt, Homo sapiens
gcacacaagacaaaggcgccgcagcaccccccggacccagccccgggacaggcagaaaggccagggaaggg

SEQ ID NO: 29280 - RNA, 77 nt, Homo sapiens
gggaccggaacggcggcgacaaggggcccgaacagagggacgaggcgaggaaccaaaggccaccccgccgagcccac

SEQ ID NO: 29281 - RNA, 67 nt, Homo sapiens
agcgacggggaggcgcggccaacggggccacaagagaaaagcaaaggacacgaaccaaaggaaggac

SEQ ID NO: 29282 - RNA, 122 nt, Homo sapiens
gggccggaggcgccccgccccgccgcacagcccgcgggccagcgccgcgcccgagccccggcgggagaagccgcaaggcgaaaagggaaagaaaagaggcgcccggaggccaaaacgcacaa

SEQ ID NO: 29283 - RNA, 84 nt, Homo sapiens
ccgccacccgcgcgccgccgccgaggagaaaggcggaacaaaaagaagcaaagaaaaaggaagaagccagaccaagcccccaag

SEQ ID NO: 29284 - RNA, 75 nt, Homo sapiens
gaacgcagcgggagagcaccaggaaggcagagagaagggcacaggccgggagaagccgcaaaaccgcacggagac

SEQ ID NO: 29285 - RNA, 84 nt, Homo sapiens
cgcgccgcccggcagcccggcaggaagcggggagagggggagagagaccccggaggacagggcgccacaggccgccaggcacag

SEQ ID NO: 29286 - RNA, 46 nt, Homo sapiens
gagacagcagccaaacccccaggcccaggcgcaagcacaaaggaag

SEQ ID NO: 29287 - RNA, 76 nt, Homo sapiens
caaggcccaaaaagagccagagagcacgccagaagcacgagaaagagacggcgccgaggaagcacaggcaacacca

SEQ ID NO: 29288 - RNA, 78 nt, Homo sapiens
gagagcgcagcagcgcccggggggcacagcaggcagggcaaaacaacagagggccagcccccgcccggccagcggacc

SEQ ID NO: 29289 - RNA, 56 nt, Homo sapiens
acaaccagagccccagagccccaaagccacagaccacagagaagcaggcgaccagg

SEQ ID NO: 29290 - RNA, 84 nt, Homo sapiens
cgaaagacgggccagagacgacaacccgggccccgaggcaaagcgaaaaagaccgcagggaaggccgccacgagacagaaagga

SEQ ID NO: 29291 - RNA, 35 nt, Homo sapiens
gcggagacacgaaaacagggaccaggagcgcaaca

SEQ ID NO: 29292 - RNA, 80 nt, Homo sapiens
aggacacggcacaccgaccgacgaacccagcggggccgccccacccgaggcccaccccaacgagccagccaggcgcagga

SEQ ID NO: 29293 - RNA, 78 nt, Homo sapiens
aagccgaagaaaagaggcacaaggccaagacggccaagggagccacagggcccagagcacggaaccggccaggccccg

SEQ ID NO: 29294 - RNA, 57 nt, Homo sapiens
gccgccgcgggcccgccgccccgccggagagaaggacgcaaaccgccgcccacgacc

SEQ ID NO: 29295 - RNA, 77 nt, Homo sapiens
ggagacggcaaggaggagccagaggcaacaaggcggacaagagaagccgccaggcacgcagcacgggggcaggggcc

SEQ ID NO: 29296 - RNA, 82 nt, Homo sapiens
ccccgcaccccaacaagaggaaagacacaccaccaagaagccagcaagcggccaggacccgcagcccagagaggggggcgca

SEQ ID NO: 29297 - RNA, 42 nt, Homo sapiens
ccgaaacggcggggaagccgcgaagaaccagcagggagagcc

SEQ ID NO: 29298 - RNA, 58 nt, Homo sapiens
cgacagaaggagggaccggccggggcaaggagaaaaagcgccaaacggaggcccgaag

SEQ ID NO: 29299 - RNA, 60 nt, Homo sapiens
cgccgcccagcaacccggggagcccccagcacccggcaccacagccgccgcccaagaggc

SEQ ID NO: 29300 - RNA, 111 nt, Homo sapiens
cggaacacgggaagaaaccaacaaagacgagccgcagacaagaaacacgagagaggcgcaaaaaccagacaccccacaccaccacccagacgaccaaaagggcaccccaac

SEQ ID NO: 29301 - RNA, 87 nt, Homo sapiens
caacaaagcgcaaccaagggcagcagcgggccaaaacgggaccagcccccggaggagcagagcaagcagcagccaacgagcaccgcg

SEQ ID NO: 29302 - RNA, 79 nt, Homo sapiens
ccgggaggggccggccccgcgccgcgcgcgggcccccccccgcgccggcgagaggggacgaagggaacccgccgggcgg

SEQ ID NO: 29303 - RNA, 67 nt, Homo sapiens
gagcgagggggggcgcgccggaaaccggagcgcgcagcagggagcagggagcgcaggcaaggaggcg

SEQ ID NO: 29304 - RNA, 52 nt, Homo sapiens
acaacagaccaggggaccaagaacaggagagagaaggcccaaaagccagggg

SEQ ID NO: 29305 - RNA, 77 nt, Homo sapiens
cgcagcgcagccccgcacggaaagccaggccaaggaaggggaaccacaaagaagagaaggcgggccaagaccgacaa

SEQ ID NO: 29306 - RNA, 81 nt, Homo sapiens
accgagcagagcgaccgcagcaccaggagcagcgaggcaccaccgcacgccggcgaggccagcgcaccaggagcagcgagc

SEQ ID NO: 29307 - RNA, 85 nt, Homo sapiens
ggaaaccagacggggaagaccgccccaccggagagcacgggccgaggagcccagcacgcgcagggcgaggggccccgccgggcca

SEQ ID NO: 29308 - RNA, 82 nt, Homo sapiens
ccaagaagagcaaaggaggaggacaaagacacgacaccaaagagcccggagaccccccaagagaagacgacccagggcaagg

SEQ ID NO: 29309 - RNA, 82 nt, Homo sapiens
gagggacacggacgcacggaaacagaggccagaaaagagaccccgaaaagcaaaggcccacccaggcacagggagaaacagg

SEQ ID NO: 29310 - RNA, 78 nt, Homo sapiens
agagaggaccccggacacgaaagccgggaaagcaagcccgagaagcaagaccgccccaaaaagcaagaaaagaccgga

SEQ ID NO: 29311 - RNA, 73 nt, Homo sapiens
cgcgagcgcgggaagacgccgcgaaagcagcgggaggaacagcagagaacaaaggaccgcaaacgaagacggc

SEQ ID NO: 29312 - RNA, 61 nt, Homo sapiens
gaggaagcccccagggccaggacgcccggaccaccagacaaagacggagccaggcggagaa

SEQ ID NO: 29313 - RNA, 70 nt, Homo sapiens
cccggcgggaccagcaccagcaccggcccaggggccggcagaagacccgagcggcccgagacaaggggac

SEQ ID NO: 29314 - RNA, 74 nt, Homo sapiens
gcagaagacacaagaggcgccggcgggaaaacaacagccgggcagaacgaggcagagaggaccagcgaggccga

SEQ ID NO: 29315 - RNA, 77 nt, Homo sapiens
gacacacagggcaccagaccggacccagccgagcccacgggaggcagaaagcaccggcaccggagaacacgagcgcg

SEQ ID NO: 29316 - RNA, 75 nt, Homo sapiens
cggcgagaagacaagcgccagaggagcgcaaaccacggaccccaggccccgccgacggccagacgagcccacaca

SEQ ID NO: 29317 - RNA, 76 nt, Homo sapiens
cccgcacaacaccgggacgccaaaaagagcaagaccgccaaggaagaacagaaaggggcgcagagcgggccacgcc

SEQ ID NO: 29318 - RNA, 70 nt, Homo sapiens
acacagaacaggaaagccacaggacacaacgaacagacggaaacaggagagggaaaagcccagccaacca

SEQ ID NO: 29319 - RNA, 77 nt, Homo sapiens
agacgcaaagcagcagcagcaaacccacaaaggaaggagaaaagacagcaaaacaaaagaaggaacgggaccagcgg

SEQ ID NO: 29320 - RNA, 73 nt, Homo sapiens
gagaaagaaggcagcaaacgccccacaaggagcccgccggaggggaccacccaacacacagcgcacagagaac

SEQ ID NO: 29321 - RNA, 74 nt, Homo sapiens
cacagacgaaaccagagaagaaccaagacgaggacagagaggggcaaggaaagacgccaagaagggaaccacag

SEQ ID NO: 29322 - RNA, 52 nt, Homo sapiens
cgcacaagaggcacgggacaggcgcgcggccgcaagaaaaggacagacgcaa

SEQ ID NO: 29323 - RNA, 71 nt, Homo sapiens
gcagagccggccggccccgaagcagagcgaaggaaaacacggggaagagacagaaggagaagaggaccaag

SEQ ID NO: 29324 - RNA, 54 nt, Homo sapiens
acgagcaaaacgggcgcaacgaccaaaggaacagaggagcgccgcgcccaggcg

SEQ ID NO: 29325 - RNA, 75 nt, Homo sapiens
acggaaggcgacccaccagggagagagaggaggcacaaagaaccccaggccccccgaaaaagccgaggaggagag

SEQ ID NO: 29326 - RNA, 80 nt, Homo sapiens
cagacgcggcacagagagggccgggagcgcgcagccagccgcccaccggccccggagcgggccgaggacggggaccaggc

SEQ ID NO: 29327 - RNA, 80 nt, Homo sapiens
cccaacacgcccacagcccaccagcagccgcgccgagcagagaagcgcaggaggaaggacagcagaccacagcccggcag

SEQ ID NO: 29328 - RNA, 73 nt, Homo sapiens
cgacaccaggcgggaaggaaaaacagaacagcgcccgcgaaagggcacaaggcccacaaagaaaaaaacacac

SEQ ID NO: 29329 - RNA, 82 nt, Homo sapiens
cgcgccggcccccggccgccggcgcgggagggcccaagaggagaagacggcggcggcgagggggggcgaacggccgagcgac

SEQ ID NO: 29330 - RNA, 65 nt, Homo sapiens
caggagccgcgcaggcaaccagagaagccgaacgccagcaagaagccgaaacaaaaccacaaaaa

SEQ ID NO: 29331 - RNA, 77 nt, Homo sapiens
gaagacaagcagagccgcagcccgaacagcccacagaacgacagccccggcggagcacaaaacccacaccgggaagc

SEQ ID NO: 29332 - RNA, 80 nt, Homo sapiens
aggaggaagaagcaacaggaaagacggcgagaccacaaacagagagcggggacgggaaagagggcagaagcagcaagaaa

SEQ ID NO: 29333 - RNA, 77 nt, Homo sapiens
acggcccaagaagaccaacacagaccgcagcccccggcgccaccagcagccaaaggaccaccggccaggcggaaggg

SEQ ID NO: 29334 - RNA, 117 nt, Homo sapiens
acgggacacaccccaccccacaggacgccccagagaaagcccgccgcaccagcaagcgcggggaggggggagcccagagaggaccagaaggggcacaggaaggcgcggcgcaggggc

SEQ ID NO: 29335 - RNA, 35 nt, Homo sapiens
gcccagcacccaccagcgggcgccggccgagcccg

SEQ ID NO: 29336 - RNA, 116 nt, Homo sapiens
ggcggcaggcggcgccggccggggacccggcccgggaccggcggcgcgcggcggccgaggccagggcggagaacggaaaagcaccaggaagcagagaggaccgcagaagggaagga

SEQ ID NO: 29337 - RNA, 59 nt, Homo sapiens
agggagaagacacggcggacgcgggaccagaccccacaagaaaacacacaaccacaggc

SEQ ID NO: 29338 - RNA, 58 nt, Homo sapiens
cagcgcccgcccccgccccgcacaaagccccccaagagaacccagggggagccacgcc

SEQ ID NO: 29339 - RNA, 53 nt, Homo sapiens
ccggcggcccggggcgcgcccccccgggggagagcacaaggcgaacaagcccc

SEQ ID NO: 29340 - RNA, 71 nt, Homo sapiens
caaagacacccaggaggaaggcgccggggggggacaaggccaggaccgcgcagacgcgcaggacggagcgg

SEQ ID NO: 29341 - RNA, 93 nt, Homo sapiens
cccccacacaccgcagaaaaccccagaggccaccaaccaccagcgccacccagaacgccgcgcccaggcggagacaggaggacggcacgcaac

SEQ ID NO: 29342 - RNA, 55 nt, Homo sapiens
cggcagaggagaaacagacggccccgaggggacggacaagggagggccaagaacc

SEQ ID NO: 29343 - RNA, 77 nt, Homo sapiens
aggaggcagaagccaggaggcaggcaggggagagcgggagccacaccaacgcccaccacacggacgcgcagacgcca

SEQ ID NO: 29344 - RNA, 75 nt, Homo sapiens
caaaagcgcagaccacagacagaggagaaggcggcccaccccagagcaccggcaaggccgggggggcaaagcggg

SEQ ID NO: 29345 - RNA, 68 nt, Homo sapiens
acgcagggcgcccccggaaaacgcaaaaccagaagcgcgccgacacggcccgggcagccaggaggcgg

SEQ ID NO: 29346 - RNA, 36 nt, Homo sapiens
ggacccagccccagaaggacaggcaggggccaccac

SEQ ID NO: 29347 - RNA, 39 nt, Homo sapiens
caccggaggaagacccacacgccagccggaggccccggg

SEQ ID NO: 29348 - RNA, 75 nt, Homo sapiens
gggggaacggcaaaggcggaggcccacggcgcacggacagaagggcccgaagggcccccgaaaggccgaggccgg

SEQ ID NO: 29349 - RNA, 81 nt, Homo sapiens
gggccacacacacccaaaacaaacccgggagccaaaagaacgagaacgccccccaccaagagaagacgccagacgccaagg

SEQ ID NO: 29350 - RNA, 67 nt, Homo sapiens
ggcccgaagaacacagggggacagaaaggggacccagggcccaccaggaaaggcccacgaggggcaa

SEQ ID NO: 29351 - RNA, 61 nt, Homo sapiens
gcccacgcagcagaaacgcggaggcgcgccagccagacggggcagaagggcgcaaaacgcg

SEQ ID NO: 29352 - RNA, 65 nt, Homo sapiens
gcccccaggccccacagaaccggagacggccaggaaagccgccgggcggcaaccggcgggaaccc

SEQ ID NO: 29353 - RNA, 69 nt, Homo sapiens
aaggaccaagaaccagcgagacgacgggaccgaaggaccccgccagagacaaccgagcgccaggagaga

SEQ ID NO: 29354 - RNA, 69 nt, Homo sapiens
aagaaaagaggcggcgacgagaccagaccgggaaaaacgacaaagggcacaagcccccgaagacaagag

SEQ ID NO: 29355 - RNA, 60 nt, Homo sapiens
agcagccaccaggagcccgagagagaagggcagccgccgcaaagggacgacgaagggaca

SEQ ID NO: 29356 - RNA, 54 nt, Homo sapiens
ccggcggccaggggcgcgaccccccggcggcgcccagcggccacacgccccaag

SEQ ID NO: 29357 - RNA, 70 nt, Homo sapiens
aacagaccaaacagaacgggcgggagcagacccggagcaaggcaaaccgacaccagcgacacaagcgcga

SEQ ID NO: 29358 - RNA, 72 nt, Homo sapiens
aagcaaacgagcagggcaagcggaaaagccagggcggaaaccggcaagaggaagagaaagaaaaaaaaccca

SEQ ID NO: 29359 - RNA, 68 nt, Homo sapiens
gaccaggcggcggaagagagccgggcccgccgggcgaagccgaacaggacaaagggaggaaaaaggcc

SEQ ID NO: 29360 - RNA, 79 nt, Homo sapiens
aaggaagcaagggccaccgcccagccaaccacaggaaaaagagagccacacccggcacacagggagaagcccgagggaa

SEQ ID NO: 29361 - RNA, 91 nt, Homo sapiens
agggggacgcaaaggccaaggggcggcaaaaagaagcggcaaggagagcagaagacacacaaggaaagccaagacaaacccggcaagcgca

SEQ ID NO: 29362 - RNA, 52 nt, Homo sapiens
aaaaaggccgaaggaaccagcaaagaggaccagaggacgcaccagaagacag

SEQ ID NO: 29363 - RNA, 84 nt, Homo sapiens
ggcgcggacggagcagaaccccaggacgcgcccccgggagcgggcgcccagagcacacaggacagcccaaggaacgacaaaaga

SEQ ID NO: 29364 - RNA, 61 nt, Homo sapiens
ggaaccaaggaagagaagaaggaacggaaacaaagagccggaagcgaaagggggcagacag

SEQ ID NO: 29365 - RNA, 91 nt, Homo sapiens
cgcggagcgcccccgcgccccgcaccagagcggggcaccgagccggagccaggacaaaaccaggcagaaccaacacgaacccaagcacaaa

SEQ ID NO: 29366 - RNA, 73 nt, Homo sapiens
agcaagccgagggaagagaacagaaaccacccggcccgggacaagagggcacgaaaggcacgaagcacagaag

SEQ ID NO: 29367 - RNA, 58 nt, Homo sapiens
gacaaaagggccaaagaagggagagaggaggaagaagccagacgacagcaggagccag

SEQ ID NO: 29368 - RNA, 74 nt, Homo sapiens
gcagcaaggcgagaggaggccgcggagaaccgaggcagcagcggggggccagacacacaccacgccaagaaccg

SEQ ID NO: 29369 - RNA, 86 nt, Homo sapiens
gcccgcaggcccacagagaaggagaaggagaagggaacagcccaaggagcaggcacggcggaccggagagggcacccacaagcccc

SEQ ID NO: 29370 - RNA, 71 nt, Homo sapiens
gaaggaacaaagccacgaaaaccaaagggacacagagccacaaaagaggaaacaaacaggaacgacaaccg

SEQ ID NO: 29371 - RNA, 74 nt, Homo sapiens
gaccgggcggcggagcggcggaagaagaggcccacgcggaccggcagcgccaccggaccaccagacaaggacac

SEQ ID NO: 29372 - RNA, 53 nt, Homo sapiens
ccaaaggagcagcagcgaagcgacggagcggcagggagccagcgacagcgaga

SEQ ID NO: 29373 - RNA, 77 nt, Homo sapiens
gggcgcagagcgggcaagcaaagcgggccagacacgaagaggccggcgaaggaagaaggaccagccagaggaacaga

SEQ ID NO: 29374 - RNA, 70 nt, Homo sapiens
cccacgcagcaccaagcccagacggcggacaggcaagacaggccaccacgggcacgcggaagccgggcca

SEQ ID NO: 29375 - RNA, 41 nt, Homo sapiens
cccggacccaagccggagaccgacgaagcggagcagggggg

SEQ ID NO: 29376 - RNA, 54 nt, Homo sapiens
aacaaacgcgccggaacggaaccaaaggccgcgccagaagggaagaaaggcgga

SEQ ID NO: 29377 - RNA, 77 nt, Homo sapiens
aggcccacccgcccacagcaggacagccgaacggaacggagagcagccaagcagagacagcaaaaaggaggacccgc

SEQ ID NO: 29378 - RNA, 66 nt, Homo sapiens
ccgggagagaaggccagcgacagccgggaggcgacaaaagaagacgacccggggcaacaccagaga

SEQ ID NO: 29379 - RNA, 73 nt, Homo sapiens
aaaaaaccacgaaggaaaaaggggcgagagagagaccaggagaggcaaaaaccaagggaaagaggagaggggc

SEQ ID NO: 29380 - RNA, 66 nt, Homo sapiens
caggaacggaaaagggcagccgcacggagaggaacgccccaaaggaggagcaaaaagaacagaaag

SEQ ID NO: 29381 - RNA, 74 nt, Homo sapiens
cccagcccgagcaggccaacccaggccagcggagcaggacagaagaaacccccagaacaagaacacagaagaaa

SEQ ID NO: 29382 - RNA, 68 nt, Homo sapiens
ccaaccgaccggacacagggcaacggggcggcacacaaggagcgaagggcagggagaacgccaggcac

SEQ ID NO: 29383 - RNA, 74 nt, Homo sapiens
gccaagccaaccagccagcaggccgggcgggggacgaaggagacgcaggagggagagcagccagaggaagaaga

SEQ ID NO: 29384 - RNA, 73 nt, Homo sapiens
agccgcaaagagccagaggggagacacgccaaagccccaaggacagaaaaccagagacgggcgcccagacggg

SEQ ID NO: 29385 - RNA, 82 nt, Homo sapiens
agagacgcaccgaggaccaccagcaggaagcaaaagggaaagcaaggggaagggcccaagaagacaccccaccagaaaccga

SEQ ID NO: 29386 - RNA, 77 nt, Homo sapiens
gaagaaagccggggggaagaaaccaggaacaacggcagcagcagccccccaaggaacggaaaacacaccgggaccca

SEQ ID NO: 29387 - RNA, 79 nt, Homo sapiens
ggcaccggcgcccagcgcgcccgggccgcgccgccccgccccagacccccaggcaaaccgccccgcagcaccacccggc

SEQ ID NO: 29388 - RNA, 35 nt, Homo sapiens
cccaagagcgagaacagaggaacgccggcccaggc

SEQ ID NO: 29389 - RNA, 70 nt, Homo sapiens
gaaggagcacaacaggcagacagacaagcgacacgcgggggaccgagcagccccccagaaacacccggag

SEQ ID NO: 29390 - RNA, 117 nt, Homo sapiens
agccaaggaaaccagccagaacaacggccccagccccaacccccagcaccgagaaagagccacgcgcgcaaggaccgccgaaccgcggcaccgggagaaccagggcccggggaagcg

SEQ ID NO: 29391 - RNA, 74 nt, Homo sapiens
gcccaggaagaaaaacaaggcgaaagcgcccgcaaacgcagggccggagcgagggagagcaggaacacagagag

SEQ ID NO: 29392 - RNA, 66 nt, Homo sapiens
cccacaccacgggccaaaggagccacgggcaccggggagaaaaaggggaaaagagacgcaaaccac

SEQ ID NO: 29393 - RNA, 88 nt, Homo sapiens
ggagcggacacgagccgagggaggggaaaggcgcagggccaccagcccccgggccaagagcagcacggagacagagccacacaccggg

SEQ ID NO: 29394 - RNA, 80 nt, Homo sapiens
cagagccaggacagggcgaggaaccagcccaccccgaccgcccccgcgggccagaagcccccaggaggagaacgagcaac

SEQ ID NO: 29395 - RNA, 82 nt, Homo sapiens
acgcggagccgcgggcgccagcggccccgccgagagccggaggcaaggagaacagagcgggaggaaaaccaacagagacaac

SEQ ID NO: 29396 - RNA, 69 nt, Homo sapiens
gggcacccacgcaaaccaggccccccacccggcgccccgggccagcgggacaccagcaagcaggggaca

SEQ ID NO: 29397 - RNA, 74 nt, Homo sapiens
aacaagagagacacggccgaaggcgaacgccgcggccaaggagccgccaaagccagacgaacaaagaagccaca

SEQ ID NO: 29398 - RNA, 55 nt, Homo sapiens
acagaacaggaaaaaggggcaccacacaccacaaaccgagggaagaaaggacaac

SEQ ID NO: 29399 - RNA, 74 nt, Homo sapiens
aaaagaaagcagcacacacgcaggaaaagggcaagccagacagaaaagaccacaggaaaccagcaggccagcgg

SEQ ID NO: 29400 - RNA, 84 nt, Homo sapiens
agaagccgagcaacaccccggccaccgacccacaaggaccaagaacgcccagcccgcgggcaccggcagaaaggaggaggaaaa

SEQ ID NO: 29401 - RNA, 51 nt, Homo sapiens
aagggacccccgggaagaagacacagaaaacagggaggaccacaggccacc

SEQ ID NO: 29402 - RNA, 36 nt, Homo sapiens
caggaagcggcgcaagcgcgggggaccaagaggacc

SEQ ID NO: 29403 - RNA, 81 nt, Homo sapiens
gcacggcccggggggagacagccacgggaagagcgccagcgcacgccccacggaacaccccgcgccgccaacccgccccca

SEQ ID NO: 29404 - RNA, 52 nt, Homo sapiens
aagccaagcgaaaccgcaaacagaaggggggccaaaacccaaggcccgggcg

SEQ ID NO: 29405 - RNA, 60 nt, Homo sapiens
gccagcccaggaaaaggagagagaagccccagaggggaagaaaccgaaaagagaaagaaa

SEQ ID NO: 29406 - RNA, 45 nt, Homo sapiens
caagaagggccaccccacagacggccaaaaaccacaggagaaaag

SEQ ID NO: 29407 - RNA, 57 nt, Homo sapiens
gggaggaggaaaacacacagacgaaggcaaaagagccagaacgggaagaagagaaga

SEQ ID NO: 29408 - RNA, 87 nt, Homo sapiens
caagaggggaggcgcgcgcggaggccgcgacggacgcaagaggcgacggcgaccaagcccgcacaagagagagggcacaggacagag

SEQ ID NO: 29409 - RNA, 75 nt, Homo sapiens
aacaagcccaggaagaaaaacaaggcgaaagcgcccgcaaacgcaggccggacgagaagaaccgaggcgcggccg

SEQ ID NO: 29410 - RNA, 53 nt, Homo sapiens
acgggaaaagaaccggaaagacaaggaaggcacggcagacacaccgaccagag

SEQ ID NO: 29411 - RNA, 67 nt, Homo sapiens
aaaacggacccagcagaagcccaaccccagcaggcagaaagacacaaaggcccagaaggaaagacca

SEQ ID NO: 29412 - RNA, 63 nt, Homo sapiens
gccgacagagcggcaccgaccagccagagaacccgccacaagaaagcagcgagaacaaccaga

SEQ ID NO: 29413 - RNA, 91 nt, Homo sapiens
ggccccgcgcagcccccggccgcagcgcaggcagcccagcaggcgcggacaagaagacagcagacggacgaagagagggaaggggcggcgg

SEQ ID NO: 29414 - RNA, 37 nt, Homo sapiens
cgaggcgcaagagacaaaaaccagagacacacagacc

SEQ ID NO: 29415 - RNA, 75 nt, Homo sapiens
aaaaaaaaagaaccaaagaagcgaagaacacagaggcaaacacgagcccaagacccgagccccaaagacagaaaa

SEQ ID NO: 29416 - RNA, 76 nt, Homo sapiens
aggcaaggggagggaagaagggaagacggccgcccgggcacaaaggcacagcagcggccaagggaggaacccgaca

SEQ ID NO: 29417 - RNA, 82 nt, Homo sapiens
aacaaccgggcaaccacaacagggaaaagccacgggaaagccagacacacagcggaacagaaacccaaggcaacgcaagccc

SEQ ID NO: 29418 - RNA, 93 nt, Homo sapiens
cggacacgaggagaaacagcagaaacgcaccaggccaaagaaagagaagggaaaagagacgcaaaccacgaggacagagaagagagaagccac

SEQ ID NO: 29419 - RNA, 70 nt, Homo sapiens
ggaagagaaagcaaacgagcagggcaagggacacgagacgagaacagacccgcccgcaagccggggaagc

SEQ ID NO: 29420 - RNA, 84 nt, Homo sapiens
gcggagcgggcagccgccgccaccccgcggccgcacccccgccccagccacccgaagggccccccaagcccagggaccgcagag

SEQ ID NO: 29421 - RNA, 80 nt, Homo sapiens
agaaggagacaggccccggcaccaggggagcgcggccacagacgcacaggcagagacacaaggggagaagcccaagacca

SEQ ID NO: 29422 - RNA, 75 nt, Homo sapiens
agaagaggagcaacaaggggaaaacagcaacaggaccagagcccgcagggaggaagagagaagaaggagaggccg

SEQ ID NO: 29423 - RNA, 34 nt, Homo sapiens
acagaaggagcgcagagagcgagcacagaccaac

SEQ ID NO: 29424 - RNA, 79 nt, Homo sapiens
gcggcgacgcaagcccaagcagcgcacacagcgggagcaggagcggagccaaaagaagcaagggaaagaccaggagcca

SEQ ID NO: 29425 - RNA, 70 nt, Homo sapiens
aggaggagcaggaggaacgaaaagaacagggacgaagaaaccccagaaacgccgaagggaccaggcagac

SEQ ID NO: 29426 - RNA, 108 nt, Homo sapiens
cagcgggacgccggagaggcaggcgcggcccgcggggcgccaggcacgcgaggcccccaggcggggggaccagcccaaacccaacacgcgaggcgaggcaggacgagg

SEQ ID NO: 29427 - RNA, 78 nt, Homo sapiens
cgccgcgcgggcccgcagggagcgccgccagcaggagagaagggcgcaggcaccgcaaccaccacaaagaacaacaga

SEQ ID NO: 29428 - RNA, 63 nt, Homo sapiens
gcgcgggcgaggccgggcggcgccgccccaccggacccgcaggcagagagggcagcgcccgag

SEQ ID NO: 29429 - RNA, 81 nt, Homo sapiens
agaaacaggcgggcaaaacacaacgaacacagaaaacgcacaaccaccgcgcaccaaggagcagacgccccgccagaccga

SEQ ID NO: 29430 - RNA, 74 nt, Homo sapiens
ccgaaaccagaacaccccaacgaagcacgcaaaacaagcaaaaaaggaaacaaaaagggaaacggcaaagacac

SEQ ID NO: 29431 - RNA, 77 nt, Homo sapiens
cccgcgagagcgcaaacacccccagacaaaggacggcgagaagcaaccgggcagggaaggggagaaagaggcccgga

SEQ ID NO: 29432 - RNA, 80 nt, Homo sapiens
cgcgccgcaagaggaggggccgccggcgggaccgcagcacggggaaacgaccgccccaaaacgcgacaaaagaagcgaag

SEQ ID NO: 29433 - RNA, 83 nt, Homo sapiens
acgaacggccaggacgccgccgcgacggccacaggaacccgcccacgccagcgaagccgacaggaccaacgacaggcgccccc

SEQ ID NO: 29434 - RNA, 54 nt, Homo sapiens
ggaaaaaacacaggacacgcggcagagaggccggaaggggggcgacgcggaagg

SEQ ID NO: 29435 - RNA, 36 nt, Homo sapiens
gaagaagacagcaggggagagagaaggagagaagag

SEQ ID NO: 29436 - RNA, 44 nt, Homo sapiens
gcgaggaaacaccacaaaacgggaaggagccagaacggaagacc

SEQ ID NO: 29437 - RNA, 75 nt, Homo sapiens
accgaagcgaagaccagcacaaggcaaaggacccgacaagaacaggacaagccgccgcaagaaaaggagacagga

SEQ ID NO: 29438 - RNA, 71 nt, Homo sapiens
agggcgggccaacgagccgcgcccaccagaacgcggcacacgaaccggaaggagaggggccaaggcccgca

SEQ ID NO: 29439 - RNA, 91 nt, Homo sapiens
gcacgcagcccggcgggaggaaaagaccaccacggcccccacagggcaggaagccgccgcccagccaggacggggaggagcagcagccacc

SEQ ID NO: 29440 - RNA, 74 nt, Homo sapiens
ccacaaggcgagccaagccgcgggcaacaggaccgcggaagaggagcacggggcgaaaccagaccggaaggaaa

SEQ ID NO: 29441 - RNA, 60 nt, Homo sapiens
ccagaccgcccaggaaacgaggcaggaggggcggcaaagggaggcaaagcaagaaaggaa

SEQ ID NO: 29442 - RNA, 75 nt, Homo sapiens
aaccacaagcggcacgggcaaaagacagaccagaagaagaaggccgggacagcagaaaacagccagcagaaaaag

SEQ ID NO: 29443 - RNA, 85 nt, Homo sapiens
gaaggcgaggggcagcggcaggagagccggccgcgacaggacggacccaaggccagccagccccaggcaccagcggacaggacag

SEQ ID NO: 29444 - RNA, 84 nt, Homo sapiens
acagagcggcgggacagcccaagggccagcaccgcgcccaggcagagccagaccgacaggcagcagagacagaagaggcgaaga

SEQ ID NO: 29445 - RNA, 94 nt, Homo sapiens
gcgcacggaccccgccccccaggcacgaccagagccggagccgcgcacgggcccaggggaggaagcccggggcggcgacggagcacgacccaag

SEQ ID NO: 29446 - RNA, 75 nt, Homo sapiens
ggaggcaacgcccgggccccgacccggagagcggcaaccgcgcaccaaaggaacgcagcaccagcccacgagacc

SEQ ID NO: 29447 - RNA, 87 nt, Homo sapiens
gcccaagagaagcgggcagcggaaacgcacggggagacggcggaagaggagaaggggggcaaagacacacggcgcagcccggcacgg

SEQ ID NO: 29448 - RNA, 45 nt, Homo sapiens
cgccgcacagccccgcgcccgaggaccaggccaaccggagcgcac

SEQ ID NO: 29449 - RNA, 82 nt, Homo sapiens
gcgcccgcaagaacggccaagaaagcccgaaaaccaaggacgaacagcggggacgccccagcagaccgcccaggagaggaaa

SEQ ID NO: 29450 - RNA, 48 nt, Homo sapiens
gaagaggcacgccgcacacacacaggcaagaggaggaacgacgagaag

SEQ ID NO: 29451 - RNA, 75 nt, Homo sapiens
ccgacaccacccaggcacaggagaccgccggaccggagaacaagcaggaaacagcaagggcccaccccgcgcccc

SEQ ID NO: 29452 - RNA, 76 nt, Homo sapiens
aaccaaaacagccagccgcagagaccccaaaccccggcccgacaggagcacagcggaaaagccagggcggaaaccg

SEQ ID NO: 29453 - RNA, 74 nt, Homo sapiens
gcagcaggaaccccgacaaggcaaaccggaagcaagggagagcgcaacacagcagcccccgcgccgaaaacagg

SEQ ID NO: 29454 - RNA, 70 nt, Homo sapiens
gaccacacagccagaacagcggacgccacacccaagagaagcccggccaagcaggaagcacgccgggaac

SEQ ID NO: 29455 - RNA, 80 nt, Homo sapiens
cgacccggagacagcccaaaacccggaagagcgccccaggagaaacaagggaagccaccaaaaccggcggggacagaagg

SEQ ID NO: 29456 - RNA, 68 nt, Homo sapiens
agccagcagcacgagccgcaccacagaacggaaaacaagccgacagaagaaagcagacagagagaggg

SEQ ID NO: 29457 - RNA, 83 nt, Homo sapiens
accgaaaaagaacagacaccacagcagaccagcaccagacagcgaaaaagaggacccaaaaaagagagaaaaggccaaagaga

SEQ ID NO: 29458 - RNA, 76 nt, Homo sapiens
ggccgagaaggaccgccgacccgcccaccacgccagcagcgcgacggcagagcgaagagcggcagaagggcggaag

SEQ ID NO: 29459 - RNA, 93 nt, Homo sapiens
caaaggaagaacgcggcaaaggaggaaaaaccaaacaccaagagaaggacacggacaaggaagggcgaggggccgcaaggccaggcgcgcaga

SEQ ID NO: 29460 - RNA, 70 nt, Homo sapiens
gcacagagcagccggacgccccgaccaagaacagccagacaccagaaccgcagggcgaagcaaagaaaaa

SEQ ID NO: 29461 - RNA, 68 nt, Homo sapiens
agaagaaggagggaaagccaaacaacggacaaagaccagggaagcgcaggacccagcacccgagaggc

SEQ ID NO: 29462 - RNA, 54 nt, Homo sapiens
agccccgcggccacagcgcaagaccaggcaaaagaaaccaccgacgaagcccga

SEQ ID NO: 29463 - RNA, 44 nt, Homo sapiens
agacgggaggaacgccgccgacccagcggaacaagaggaaacca

SEQ ID NO: 29464 - RNA, 80 nt, Homo sapiens
acagccccacagggaccgaagcgcgcacagggacgaacagcggggacgccccagcagaccgcccaggagaggaaagcagg

SEQ ID NO: 29465 - RNA, 65 nt, Homo sapiens
gaacgggcccaggccaggacggggaagagccgcaggaggagaaccaaacgcgcgcaaagaagcaa

SEQ ID NO: 29466 - RNA, 74 nt, Homo sapiens
aggccagagcacgagcacgggaaggaggaggaccagacaagcggaggagagaaagcgagaacaaaaccagcgag

SEQ ID NO: 29467 - RNA, 83 nt, Homo sapiens
gggggggaccacgaaaggagcaagagcaagacaccggacaccgagggcccccaaaagaggcacagcaacgaggggacaggagg

SEQ ID NO: 29468 - RNA, 83 nt, Homo sapiens
ggggcaaccagaggggccaacggacgacaggcaagaacgcgcaacacagcgaccgacgggaccggcgcaagcagcggagggga

SEQ ID NO: 29469 - RNA, 60 nt, Homo sapiens
aacaccgcggaggaggacaggaggagggccggagcgagggagagcaggaacacagagagg

SEQ ID NO: 29470 - RNA, 39 nt, Homo sapiens
cccaacaccgcgacacgcagacgcacccccccccccggc

SEQ ID NO: 29471 - RNA, 71 nt, Homo sapiens
caacacaagaacagaggagcgaaacaaggaggagaaagagggcgaaccaaagaaggaaggcgacccaaaac

SEQ ID NO: 29472 - RNA, 75 nt, Homo sapiens
gcgggcaaaggaaggccaggacaccaagaggacaagccgagacccagggagcaggccaaggccaccgagccacaa

SEQ ID NO: 29473 - RNA, 82 nt, Homo sapiens
cccaggcgcgggggcgacgacagggaagagacagcgagcagagaccaggagaagagaagagaacagggaaaacaaaagaaag

SEQ ID NO: 29474 - RNA, 82 nt, Homo sapiens
ggcgagcggagcgcaacaccgcggggggagacggcgcggccgagagaggaggaggacgcaggacaagagaggcggccgcacc

SEQ ID NO: 29475 - RNA, 83 nt, Homo sapiens
aggggaagcgcgggccggggggccggaggagaagccggcccacgcgcagcgcagcaaaagaagagcccaaaccaggaggcaca

SEQ ID NO: 29476 - RNA, 80 nt, Homo sapiens
gcccgcgggggccccgggcggcgccgcgcccggaacgaacagccagcgcccggggcccgccacgcaccaccgcaagaccg

SEQ ID NO: 29477 - RNA, 85 nt, Homo sapiens
gacagccgcgcgcgagggccggggcgggcgccgcgggacccccgggccaggcgaccccccagaaaaggacagcaaagacccaagc

SEQ ID NO: 29478 - RNA, 79 nt, Homo sapiens
acaacagcacacgcacccaagcgagagccaagaaggaacagcagcagagcccggagagaccgaaaaggcaaggcgagcc

SEQ ID NO: 29479 - RNA, 64 nt, Homo sapiens
aagcccaccacaaaaacgaaggcggcggcgcggcccgagccccaggagagccgaggacccaccc

SEQ ID NO: 29480 - RNA, 53 nt, Homo sapiens
gacgcaaccaagcaccgaaacagcaggaggccaaaggaagaccaggaaagaac

SEQ ID NO: 29481 - RNA, 76 nt, Homo sapiens
gaggacgaaagaaagggggcgaacaagggacacgagcacgcgacggagacccacgagaacccacaagaagaaaccc

SEQ ID NO: 29482 - RNA, 83 nt, Homo sapiens
gcagaaacccgccccgagaagcccacaaacaaggaaacggaacgccaagcgaagaagaacgaaacggaagcacaaagcagcgc

SEQ ID NO: 29483 - RNA, 81 nt, Homo sapiens
ggggcacagacaaggagccaggaccccggaccagcagaaaaggagaacaaccccgccacgcccaagcacccggaagcccgc

SEQ ID NO: 29484 - RNA, 78 nt, Homo sapiens
aggaaaaagcagaaagccagaggaaggggcagccagggggggcgaggaaccgcggggcggcaggcccgggggaggccg

SEQ ID NO: 29485 - RNA, 68 nt, Homo sapiens
aaggggcccgaacagaggggaggagccaggaggagagaacaagaaaagcgcggaaacgcaacaaaaga

SEQ ID NO: 29486 - RNA, 88 nt, Homo sapiens
gaggagacccggcgccgccaggccgacgaaaagcccaaggacccagggggaaggaccacggaccaagccaccgccaggcccagggccg

SEQ ID NO: 29487 - RNA, 59 nt, Homo sapiens
aggcgacgccccgaccggaacaggagacccccgcaggacaacaacaggcggagggccca

SEQ ID NO: 29488 - RNA, 67 nt, Homo sapiens
caggaccgagaagaacaaaagaacagaaaggccgcaccacaacccgcacagagacggaaacagcgcg

SEQ ID NO: 29489 - RNA, 91 nt, Homo sapiens
caggacagagagaaagaagcagcaccggccagaacaagccaaggagccaagacgagagggacacacggacaaacaacagacagaagacgac

SEQ ID NO: 29490 - RNA, 72 nt, Homo sapiens
caaacagagaggcaaagaagacgaaaggggaaccgccgcagaggcccagaagacccaccaaaaggggagcgg

SEQ ID NO: 29491 - RNA, 59 nt, Homo sapiens
gacggaaacaaggcaacagaaagagcaacagcagggcaacaggcccggcagcgggcccc

SEQ ID NO: 29492 - RNA, 40 nt, Homo sapiens
acaggcgcgaaacggaaaaagcccagaagaggaaagggaa

SEQ ID NO: 29493 - RNA, 78 nt, Homo sapiens
cccagagggcccccaaacagaaccgaaggggaagcgcccggcgcccgcacgaaacgagccaacggagaacaacaaaaa

SEQ ID NO: 29494 - RNA, 79 nt, Homo sapiens
caccagacaccaggaggaccagcagcaaaagaaggagggccccaggaaaggcaagaaccgcaccaagaccgccccaggc

SEQ ID NO: 29495 - RNA, 38 nt, Homo sapiens
ccacggcaccacaccgcggcacacccaccagaagggag

SEQ ID NO: 29496 - RNA, 75 nt, Homo sapiens
gcggaaccgaaaaacaagaaggaaaaacgccacgcaccggagagagcacagccaaaccagcagaccacagcacag

SEQ ID NO: 29497 - RNA, 55 nt, Homo sapiens
ccaccgcaccggcccccacccaaggagaggccaagccggaacgcgcgccacccgg

SEQ ID NO: 29498 - RNA, 71 nt, Homo sapiens
aaagagaaaaccgacagaagcagcagcaccacagaggcgggacagaccaaagacgggaaagacgaagggcg

SEQ ID NO: 29499 - RNA, 76 nt, Homo sapiens
gagagaccacggaagcagacccggcggggccacgcaggggccggcggggcgcgaagaagcagggaacggagcgcag

SEQ ID NO: 29500 - RNA, 133 nt, Homo sapiens
caccgggaagaaccagcaaacgggcccgggggcagaggccaaccccagagcgccgagcaaggagccgagagccacccagacacagccggaggaggaggagaagaccccggagacacgagaggggcacagcaca

SEQ ID NO: 29501 - RNA, 64 nt, Homo sapiens
aaagccggagccgagacaggccaaggacacggacaagaacacagaaaaacagcaagggagcgga

SEQ ID NO: 29502 - RNA, 49 nt, Homo sapiens
aaacagaacaccaacagcaacaagaagaacagacggcaacaagcggacc

SEQ ID NO: 29503 - RNA, 89 nt, Homo sapiens
cagcaccaagccaaccaagcgcggggccgcccaggcagccgcggccgcggccacagcagggcaggcgcccgcaggacccacgacggcga

SEQ ID NO: 29504 - RNA, 55 nt, Homo sapiens
agcgaaccagaccaaaaacgcaacaacagacgccgagcaaccaagaaggggccag

SEQ ID NO: 29505 - RNA, 84 nt, Homo sapiens
acgggcacgggcgaccggcccgcgaggcgcgccccagaccaccggcagggaacagccgagcagaccgaggaggcccaccagcag

SEQ ID NO: 29506 - RNA, 75 nt, Homo sapiens
agacaggagcaagcgacagcgaggagcaaaaagacacagcagaggggccgcaaggccaggcgcgcagaggcaccc

SEQ ID NO: 29507 - RNA, 88 nt, Homo sapiens
agaaaagaagagaagcagcaaaaaaaaagaagagacagaagcaggggaaccaacagaagggaagagacccccaacacagcaggcgcag

SEQ ID NO: 29508 - RNA, 84 nt, Homo sapiens
cgacacaacaccgagacaacagggaaaacgggaacacaagccaggacagcccagcaagcggagggcagccaagggagccacgga

SEQ ID NO: 29509 - RNA, 73 nt, Homo sapiens
ccgaccgcggagccccggccgcgcagaggaaccagagaaggagaaacagcagggccaaaggcaagaacccggg

SEQ ID NO: 29510 - RNA, 62 nt, Homo sapiens
cggggaggcgcacacacaccaaagggaccggggaggagcaggcccaccgagcccccggagca

SEQ ID NO: 29511 - RNA, 68 nt, Homo sapiens
caggccgagacgaaaggcagcagggacgcaccaaaacggacagccgaagacaggcgacccaccaccag

SEQ ID NO: 29512 - RNA, 49 nt, Homo sapiens
aagcggaaggccagacgcggacagggggccagagcaaggaaagcggaag

SEQ ID NO: 29513 - RNA, 79 nt, Homo sapiens
gccccccgcccgcggcccggcagcccccagaaacccacaaagccccgaggggcagggagcccagagggaacccccccac

SEQ ID NO: 29514 - RNA, 108 nt, Homo sapiens
gcgccacgcgagaacagagaagggagccaagcggagggagaacgcaagcaaaagcgagaagcagaaagccaaagaaagaaagaggaagaagcaaagagaagaaaggag

SEQ ID NO: 29515 - RNA, 75 nt, Homo sapiens
agaccaaaaccaagcaccaaaccggacaagacggggaaaggaaccgcaaaggcgaacaaagagaaaagagagagc

SEQ ID NO: 29516 - RNA, 82 nt, Homo sapiens
gcagcgaccgagccgaaacaccggcggcggcgaccaccgggccccaaacaagagcgcgcggaccgagacaagcccacccgcc

SEQ ID NO: 29517 - RNA, 68 nt, Homo sapiens
aaagcaacaaggaaggaaacggaccccaccaccaggcagagaagcggacgagccggggagccgggacg

SEQ ID NO: 29518 - RNA, 68 nt, Homo sapiens
cggccggcacagaacacggaccccagccaccaggcgcaaagaggccagccaccggggaaagaacagcc

SEQ ID NO: 29519 - RNA, 65 nt, Homo sapiens
cgaggccccagcccagagaccaggaccaaagaagccaaccgacacaacagcaagacgcaaggggg

SEQ ID NO: 29520 - RNA, 77 nt, Homo sapiens
agagaggcccccgccgagcacggaagaacgccggccagcgaaggacgggacgcaggccgcaccaggcccccgcaggg

SEQ ID NO: 29521 - RNA, 36 nt, Homo sapiens
acacggagcaggaggcagcaggaacaccggcagcac

SEQ ID NO: 29522 - RNA, 73 nt, Homo sapiens
gaacgcgccagaacaaccaggcgcaagacacggaaagcacccgaggagaaagggaacgaaaaagacgagcagg

SEQ ID NO: 29523 - RNA, 79 nt, Homo sapiens
cccacccaacgcgaagacggaacccgggacgacggacccgcagcacgagccaccagcacagaagaagacagaagcggaa

SEQ ID NO: 29524 - RNA, 42 nt, Homo sapiens
caccaggggccgaggccaagaaggaaagaacaggccgggcag

SEQ ID NO: 29525 - RNA, 81 nt, Homo sapiens
cacaggcccagacgagcggaggaggcacagggcgcggaccgcacgagcgcgacagaagcgaaggggacagggggagaaccg

SEQ ID NO: 29526 - RNA, 83 nt, Homo sapiens
gagacggagcagagccgcgggcgccggagccgaggcgagcgccgcgcgcaccacgagaagaagagacaggaagaaggcggccc

SEQ ID NO: 29527 - RNA, 55 nt, Homo sapiens
gggccaagaggagaagaagggccacccgcacggcagcaagaggaaagccgccggg

SEQ ID NO: 29528 - RNA, 101 nt, Homo sapiens
cgggaggggagggcagaagccaacaccggccacgcacacagccgggcgacagggccagaagcggacccagaagaggggagcagcaaggaggaagacagccg

SEQ ID NO: 29529 - RNA, 76 nt, Homo sapiens
gaaacccggacagaggcccaggccgagaggacccggggcaaggggaaagggcccagcggcccgcggcccacggagc

SEQ ID NO: 29530 - RNA, 83 nt, Homo sapiens
ggaccgagcagcccgacccccaacggaccccgccccggaggagcgcgcaccgaagccggcgagcaaggggaagcccagccgca

SEQ ID NO: 29531 - RNA, 78 nt, Homo sapiens
acggcccaagcgaggacacccggaaaggaaagcaggaggagcagccgcgaacgcggccgggaggcagagcgaggcacc

SEQ ID NO: 29532 - RNA, 73 nt, Homo sapiens
aaacaaggacagccgagagagggccacaggacaagagcaacagaaccgcagccagaagcaaagcagacagacg

SEQ ID NO: 29533 - RNA, 91 nt, Homo sapiens
ggagcccagggaagcagccgaccagccgcggagccgggggcaggaaacagaacgacagcccgcaccgacgccggcggccagccagagagca

SEQ ID NO: 29534 - RNA, 83 nt, Homo sapiens
cgaagccgcagacacccgcggagaccccaggcaaaagcagaccggaaaacccaccggcaagaccacacccgaggggagcccag

SEQ ID NO: 29535 - RNA, 46 nt, Homo sapiens
accaagaaccagggccgcaagagacaccacaaaaggacacccgagc

SEQ ID NO: 29536 - RNA, 72 nt, Homo sapiens
gaaggaggccgccgccagcggaagacgcgccaccggagcggaggcgggcgcggacggcaggggcgccgggga

SEQ ID NO: 29537 - RNA, 76 nt, Homo sapiens
ggcagacgccaagagaagaacaacaaacggcaaagaacacgacgaggagaagccccggggaaagaggaggaaaaca

SEQ ID NO: 29538 - RNA, 81 nt, Homo sapiens
agaaacacagccgaaagacagcaaccgcccggaggacgcaccggaagacacagggcaagaaggaacagacaaaaacggccg

SEQ ID NO: 29539 - RNA, 75 nt, Homo sapiens
aggaggaggagaccgcccaccgagacagccggagaagagcgaccagccacaagaacagaaaagagcacgccacgc

SEQ ID NO: 29540 - RNA, 77 nt, Homo sapiens
caccaaaaagccgcaggggacagaacacaccggaccaacacacaaagaccacccaacccaacgacccggacaagcca

SEQ ID NO: 29541 - RNA, 77 nt, Homo sapiens
gcgccgacaacccggcgccagagccggaccgacagcccccaggaaggaggcggcggccgcgagagcccagccgccgg

SEQ ID NO: 29542 - RNA, 52 nt, Homo sapiens
cgaaacgcacgagaaggggcgcgcgagaagagaaacagaaggaacggaggaa

SEQ ID NO: 29543 - RNA, 39 nt, Homo sapiens
acaggaaggaaagcgaaagagaaagcaaggaaacagggc

SEQ ID NO: 29544 - RNA, 82 nt, Homo sapiens
ccgacacgacacccaccaccacacgagacacaccgcaccaccagcgggagcaagacaggcggaagccgaagcggcgggccag

SEQ ID NO: 29545 - RNA, 79 nt, Homo sapiens
aggagcgccgcggcgggccccgggaggcagaagagaagcccgcggacagaagccgagaggagacccccccaccgacgga

SEQ ID NO: 29546 - RNA, 80 nt, Homo sapiens
accacccagagcaggagcggagaccaccagccgaccagagaggagacccaccagcagccaggagaccccgaagacagaca

SEQ ID NO: 29547 - RNA, 56 nt, Homo sapiens
gcacagccccgaaagcgagaccacagcgcccacagcagggcagcacaaggagaagg

SEQ ID NO: 29548 - RNA, 72 nt, Homo sapiens
ggacacgcagcaaacccaggacagccccaagacccagaaaagcaccggagcgggcagggcacacaaccgggc

SEQ ID NO: 29549 - RNA, 89 nt, Homo sapiens
cgcgcgcgagaagccacccaacaaccccaccacggagccggacaagcccgcgggccggcgggaggcgggaggcggcagaagcagccaga

SEQ ID NO: 29550 - RNA, 67 nt, Homo sapiens
aggaggaccagacaagcggaggagagaaagcgagaacaaaaccagcgagagggggaggagagggaac

SEQ ID NO: 29551 - RNA, 69 nt, Homo sapiens
acccaggcaaacgcccccggcggaaacagcagagccgcgagaaggggccagcaaagacggagcgggaag

SEQ ID NO: 29552 - RNA, 84 nt, Homo sapiens
ggcggcgcgcgcggcgcgggacgcgcgcgggcacccacggagccccggggcgacgccaggaacccgccaccgccaccggcccca

SEQ ID NO: 29553 - RNA, 60 nt, Homo sapiens
cgacaccaggcgaaccggccacgcacccccgaagccggcaagaacggaagcacgggcgga

SEQ ID NO: 29554 - RNA, 73 nt, Homo sapiens
ccggcgcagggcggaaggacaacagcccgacaaccagcgcccaagacagagcagcacagggagccaggaaaca

SEQ ID NO: 29555 - RNA, 69 nt, Homo sapiens
gacagagaggagggagaacaagcaacggcggaaagcaccgggaggaaagagagccacacgaagaacacg

SEQ ID NO: 29556 - RNA, 71 nt, Homo sapiens
acaacgccagccagcagcaaggaaggcaggccaaagacccccggcggagcggggcggcgggagccccaggc

SEQ ID NO: 29557 - RNA, 59 nt, Homo sapiens
cgaaccaggaccggacccggacccaaaggccagcaagcgaccaggccgcgggaagcgcg

SEQ ID NO: 29558 - RNA, 82 nt, Homo sapiens
aaaggcggccgccgcccgcgcaggcccacgcaccgccggcgccaccgcccacgcaaggagcacagaaggcccaaaagaagaa

SEQ ID NO: 29559 - RNA, 73 nt, Homo sapiens
ccccccagaagacggcaggcggaagccaagcaaagggaccggagccccgaaacagacagcgcccacaggcagc

SEQ ID NO: 29560 - RNA, 82 nt, Homo sapiens
aggagcagcaaaacacacaaagagggcagcacggggagaacgggaacaccgcagcaggagacgcgccgaaaaagcaaagcaa

SEQ ID NO: 29561 - RNA, 55 nt, Homo sapiens
gggagaggaaccggcccagagcacagaagggggaagagcccccccaacaaaggac

SEQ ID NO: 29562 - RNA, 75 nt, Homo sapiens
gaagaagcaggaggcaagaaaggggaaccccggagaaaaggccaagaaggcaggagcgccaaaaaagagggggcg

SEQ ID NO: 29563 - RNA, 67 nt, Homo sapiens
cccggcagcagaggaccacgaggacgagagaaggccggagagcacaggcggacccagaacgccggag

SEQ ID NO: 29564 - RNA, 60 nt, Homo sapiens
cgggaaggccggaaaggaccagaccgcccaggaaacgcaaggaggaacaacgggaccggc

SEQ ID NO: 29565 - RNA, 76 nt, Homo sapiens
gagacgagcgggggacggcacgggccgcagaagacagggcggcgggccggacgacaagggcaagacggaagcaagg

SEQ ID NO: 29566 - RNA, 77 nt, Homo sapiens
acagacagcgcggaaaagaagaacccagagaccccccccgcagacccccaagggaaaggcggaggcaaggcgcaacc

SEQ ID NO: 29567 - RNA, 76 nt, Homo sapiens
caagggagcccccccaccacccccgagccggggggggcacagagccccggaagacagcccccagcgaccagaccca

SEQ ID NO: 29568 - RNA, 53 nt, Homo sapiens
acgaggagcgcggccaccccccggaggagaaccagaggaaggaaacggggacg

SEQ ID NO: 29569 - RNA, 82 nt, Homo sapiens
cccgcccacggcgggcacggacccaggacccccgcgggcgacgcgagcccaggcgcaaagggaaaaccccccaagagggaca

SEQ ID NO: 29570 - RNA, 72 nt, Homo sapiens
aaaaccacaaggggccacgacagaggagcaaccagaggaagcagccacaggcagccggccagaaccacagca

SEQ ID NO: 29571 - RNA, 78 nt, Homo sapiens
gggacagggaccgaccaggggagggaagcccagaacagacaaaccggcacgcagaaaaaaagaaaacagcacacggac

SEQ ID NO: 29572 - RNA, 61 nt, Homo sapiens
acgcccccaggccacaggccgaacagccaagaacgagcaagccgaggaacagacagaggcg

SEQ ID NO: 29573 - RNA, 78 nt, Homo sapiens
cgacgcgagccgccggagcgaacgggcgggacccgagagaacgcaagacccacccccccacacaaaaacgcagcggag

SEQ ID NO: 29574 - RNA, 66 nt, Homo sapiens
gacaaaaaaaacgccgaaagaaccagccggcaaaagaaggagaagagggggagggcaacgaaaaac

SEQ ID NO: 29575 - RNA, 39 nt, Homo sapiens
gcaacggagcggccggaagaaggagaagaggaaaacggc

SEQ ID NO: 29576 - RNA, 97 nt, Homo sapiens
cacccggagaacgggacgcaagaacaaccggccgacgaaaacacaaaggaaacagaagacgaagcacggcaaaccaccagccaaaacaccgacagac

SEQ ID NO: 29577 - RNA, 58 nt, Homo sapiens
cgccaccaaggaagaagagcagacaaggagaacaccgaaggagaagccaagccaggcc

SEQ ID NO: 29578 - RNA, 79 nt, Homo sapiens
caggaccggggaaccgccaaagcccgggcgcggaagaagccaagaggacagggcaccccggggagcagggggcggcagg

SEQ ID NO: 29579 - RNA, 104 nt, Homo sapiens
cgggagacagccgccaaccgcagaccggaaaccgaacgaaggaaggacccaaaaaggacagaaaacgggccccagacacaagccccaccaagaggacaccccag

SEQ ID NO: 29580 - RNA, 62 nt, Homo sapiens
ccgcgaccgcgcccccccgccggcccaacgagagaaccccagagggcgcggaagccccagca

SEQ ID NO: 29581 - RNA, 67 nt, Homo sapiens
aacacaaccagaagcggaaacaagcggaaaggacacagggcccacgagcagcgagcgcccccggccc

SEQ ID NO: 29582 - RNA, 59 nt, Homo sapiens
ccggaggaggaggccacacagaaggacggcccgacggaagccgagcgggcccgccgggc

SEQ ID NO: 29583 - RNA, 69 nt, Homo sapiens
aaggaccaagaaccaggcagacggcgagacagagagcaacaaaaacagaaaagggcccccagcagacgg

SEQ ID NO: 29584 - RNA, 70 nt, Homo sapiens
caccagcggagccccaccagaccaggggaggaacacaaccggcagacggacaggcaaagaggcccccaag

SEQ ID NO: 29585 - RNA, 33 nt, Homo sapiens
gaccaagaaacagcaaagcccccaaggaaaaga

SEQ ID NO: 29586 - RNA, 74 nt, Homo sapiens
agaaacaaaagcaacaaagaggaagaaaaacagagcccgacgaaacagacaaaggaggcacaaggacaggaccc

SEQ ID NO: 29587 - RNA, 72 nt, Homo sapiens
agcggccgggaacgcgccagaagaggcaggggcagaacaacggcggcgcaaaacccaggccgggcgaggggg

SEQ ID NO: 29588 - RNA, 75 nt, Homo sapiens
cgggaccgaaaggaaagagccggagaccccgcagcagaagaggggcccaaaccaggcccgcaacaggcgcggcag

SEQ ID NO: 29589 - RNA, 68 nt, Homo sapiens
gcggagcagaagagcgcccccggcacgcaggaaagacagggaagacaaggaacggaggaaacagccag

SEQ ID NO: 29590 - RNA, 71 nt, Homo sapiens
gaggcacacaaacggaaccgcacaaagcagacaacaaaaagcagccaccagcaggggaaacgagcaacacc

SEQ ID NO: 29591 - RNA, 64 nt, Homo sapiens
gcggcaaggcaagagcggcggcgccaaggaggaagacaaggggcacccggacaccgcccccaga

SEQ ID NO: 29592 - RNA, 76 nt, Homo sapiens
aaccgacccccaagcccgcgacccagaccaggagaggaggcccacggcgccagcgcaccacccccgggcccaccca

SEQ ID NO: 29593 - RNA, 65 nt, Homo sapiens
gaaacggggcgccgaacaaaccaacgaacagaagagcaggaacagagagaggggcgccagggcca

SEQ ID NO: 29594 - RNA, 88 nt, Homo sapiens
gcgcgggcccgggccaggccgccgccgagccgagcagaaagcgccagcggagagagaaggcaaagcacaaaaccacgaagagacgaac

SEQ ID NO: 29595 - RNA, 81 nt, Homo sapiens
agaaagggagcagccaacaggccagcagcggcggaaacaccagacacaacacacagggacgagaacgcgcagcgccccacc

SEQ ID NO: 29596 - RNA, 66 nt, Homo sapiens
aaagccaaagcggaaccaaccgccgcgaagagaagcacacagaaaaagagaggaacaagagcgcca

SEQ ID NO: 29597 - RNA, 79 nt, Homo sapiens
cggcgccgcgcgccacccccgaccaacaggcagaccacagaaacgaagccgggagaacgcccggggccgccaccggaga

SEQ ID NO: 29598 - RNA, 72 nt, Homo sapiens
aagaccggacacgcagaaaggacaagcaaaggaaagcaccaaaggccagaacccacaggcagcacaggagca

SEQ ID NO: 29599 - RNA, 78 nt, Homo sapiens
cgccggcaggcccgcgcaccaggaacagaggagcggaaacgcaggaggagagagacggacccacgccaaaagaaggga

SEQ ID NO: 29600 - RNA, 57 nt, Homo sapiens
gcaggaaagggcaaaagcggcaaagggaaaaaggcggccggaagggacggaaagaca

SEQ ID NO: 29601 - RNA, 75 nt, Homo sapiens
cagcaccgcacgcccgcaagggagaaaggaagcacgcgcgcggacaagaccagaaagaaaagaaccaaggagcgg

SEQ ID NO: 29602 - RNA, 78 nt, Homo sapiens
ccgagcgcgggaccgaaccagcaggggagcggaaggggacaaaccgcgacccagcagcaggcacccccaggagaagac

SEQ ID NO: 29603 - RNA, 65 nt, Homo sapiens
cccggggacccccgacgccaggcagcgcccccaaacggaccaccgaagaaaggagcagacgcaca

SEQ ID NO: 29604 - RNA, 77 nt, Homo sapiens
cgccgccacccggcgcgaccgcccggcaccgggagaaccaccgccaccgccaccagccagggccccccacgcgagaa

SEQ ID NO: 29605 - RNA, 62 nt, Homo sapiens
aggacggacaggaacacaccggcagggagacggccacagccagcaggagaccagagacagac

SEQ ID NO: 29606 - RNA, 82 nt, Homo sapiens
ccggaccggccaccgcagagagggagaagcacagacggaagaggaacaaagaggaccaaagcgaacagacaggaaaccagaa

SEQ ID NO: 29607 - RNA, 94 nt, Homo sapiens
cgggaacgcgacgcgagagaaggacccacggcgcgcgaaggacgcggggcaggcggagacggcgccaagacgggggcccgaaggcggcgagcgg

SEQ ID NO: 29608 - RNA, 58 nt, Homo sapiens
cgccagcgggacgaggaccgagaccgcggccgggaccgagggaccgacggacgaggcg

SEQ ID NO: 29609 - RNA, 74 nt, Homo sapiens
gacaaccgcgcgggacccaaacggaaggaacggaggcgaggggagcaagggcggaaaaaggcaaggcccggaca

SEQ ID NO: 29610 - RNA, 70 nt, Homo sapiens
gaaagagagaggggggaacaacagggaaacgaacagaagaaaaggcacacacacccgcaggagagcgccg

SEQ ID NO: 29611 - RNA, 59 nt, Homo sapiens
ggcacgagcggagggagaacaagaacgcaggagccggggggggccccaagcgagccgac

SEQ ID NO: 29612 - RNA, 73 nt, Homo sapiens
aaaaccgagacaccagcagaaggaaaacccacaagagcccagggggacagcaagcaggcccggaaagaaaaaa

SEQ ID NO: 29613 - RNA, 96 nt, Homo sapiens
cgggcggaagacaggccacccagcggggagcacggcgagcagccaggccaggagagggaaaggggggacccaccccagaacagagggaaaaaacgg

SEQ ID NO: 29614 - RNA, 80 nt, Homo sapiens
ggaggggcccaccagcagggcacacaggaaggaacaggaggaaaccacagagggaagccagaaaagcagcccgcccggca

SEQ ID NO: 29615 - RNA, 72 nt, Homo sapiens
ggggaggccccaggaggagacccccccgccccgaggccgagcgaggagcaagagaacccagaacgaggagcc

SEQ ID NO: 29616 - RNA, 54 nt, Homo sapiens
gggaacccggggcgagaggaaccggagaccagaaaagcggccagaccaccaagc

SEQ ID NO: 29617 - RNA, 82 nt, Homo sapiens
agggaaggagcgcgcagaaggcacagaaaccaggcgcccaagaggagggcaggaaacacgggcccccacccccggagccagg

SEQ ID NO: 29618 - RNA, 57 nt, Homo sapiens
ccggcaagaacggacgggcgccacaagccacacggaggaagaaggaccggggagaca

SEQ ID NO: 29619 - RNA, 75 nt, Homo sapiens
cccacgcggcagccgggccggagcccgggccggacccagggggggaccaggccgaggaggaaccaaccgaccccg

SEQ ID NO: 29620 - RNA, 83 nt, Homo sapiens
cggcgccaagcggccccagcggccgcgaccgagcaggcgagaccacgagaccacaccgcgccagaccccccaggagagccgcc

SEQ ID NO: 29621 - RNA, 89 nt, Homo sapiens
cgaggagcagcagagacgacaaaaggaagcccagcgggcacaggagagaaagaccccggggcacagaagccaaggcagccccggaagcc

SEQ ID NO: 29622 - RNA, 77 nt, Homo sapiens
gaaccgccagacccccagcgcagcaggcaacaggaagaagaacccacaggggccaacagaggaaggaacaaaggaac

SEQ ID NO: 29623 - RNA, 87 nt, Homo sapiens
caagcacaaccggagaagcagacgccacccccagcccaggggcaggcccggacccaggggcgcaaacccggagccacccaccccccc

SEQ ID NO: 29624 - RNA, 84 nt, Homo sapiens
gagacgaggcgcagccaccaacgcgcacgggcgccacgcgcggcgcacacgggcgcgggccggacccaggaagccacccgcaga

SEQ ID NO: 29625 - RNA, 57 nt, Homo sapiens
cacaccacacccaaccgccacggaagggaacagcggcccagacacacgacaaagaca

SEQ ID NO: 29626 - RNA, 72 nt, Homo sapiens
gccaaaggaccgggaccccaggccacgacagagagggcacggaagaagcaaacaggagcacaagcaccgaaa

SEQ ID NO: 29627 - RNA, 79 nt, Homo sapiens
ccggaagacccgcaccggagcaaaggccacagcaaacacaggggcaggaaccggcaggaagccagggagccgggaggcc

SEQ ID NO: 29628 - RNA, 85 nt, Homo sapiens
cgccggagccccgcgcccgcggcccgcccccggggaccgggccggcgccaggaccgaggccaggaagaagcagagggaaccggag

SEQ ID NO: 29629 - RNA, 72 nt, Homo sapiens
ccgcgcaccacgggccgacaaacgccccgcccaagaccagggagcaccccgggcgccccaggagacaccgcg

SEQ ID NO: 29630 - RNA, 76 nt, Homo sapiens
ccacagcaggaaaaaggaaaaagcgcaaaccagccaaagaccacgggggccaaacaccaggagaagggcgagccaa

SEQ ID NO: 29631 - RNA, 65 nt, Homo sapiens
caccaccagcgcggcagagcccagcagggacgacaggcaaccaggacaggacacccagcaacaga

SEQ ID NO: 29632 - RNA, 68 nt, Homo sapiens
gccacaaagaccagccaccaagagacaagcgaagaaaaccgaaaccagcaagcggagacaggggcgac

SEQ ID NO: 29633 - RNA, 71 nt, Homo sapiens
cgccgacgaacaaaagcggcagcccaacccagaggaacgacccagggagaagagcaaccggacacagaagg

SEQ ID NO: 29634 - RNA, 84 nt, Homo sapiens
acaggagaacagcgaggagacggagagaacgaggcggaggaggcggagacaaggagcaccgcccagggcaaccccaaacacgac

SEQ ID NO: 29635 - RNA, 56 nt, Homo sapiens
ccccacacacggaaacgggagccaagcaggaacgaagcaggaagggaacgagcggc

SEQ ID NO: 29636 - RNA, 72 nt, Homo sapiens
aggaggccagagggaagcaaagcagccaacaccagaagaagggacaaaaggcaaaagcagaccggaaaaccc

SEQ ID NO: 29637 - RNA, 66 nt, Homo sapiens
cgagcggcaaccgaaagccagcagcggagagcggaaccgcaggggaagccccagaagccgacagca

SEQ ID NO: 29638 - RNA, 75 nt, Homo sapiens
acagacccacaagcaagcacagaaacagcgaggccgcagcaaaggcagccacaggacagaaccggcaggagagac

SEQ ID NO: 29639 - RNA, 68 nt, Homo sapiens
gcacaggcaggagcacgcgaaaaaccagaccaaacgaaacgcccgcacagcagcccggcacagccaca

SEQ ID NO: 29640 - RNA, 75 nt, Homo sapiens
gacaaaggaaagagggaaagggaaacgcagcacagagaaacacacaggaaagaccccaagacggaacacgcgaac

SEQ ID NO: 29641 - RNA, 76 nt, Homo sapiens
ggggacggcaagaggagcaaaaacgacacaaagaggccacgcaagcccccccgggagagcaggaagacagcaggga

SEQ ID NO: 29642 - RNA, 80 nt, Homo sapiens
gccaggcaacgggaagagcgacagccccaggcccgggggggcgggggcagacccaaaggaaacgcacgaaagaaacagga

SEQ ID NO: 29643 - RNA, 74 nt, Homo sapiens
agcggcgagcgcgaaggcacgagcggagggagaacaagaacgcagggggacggaagcggcagcgggcagccggc

SEQ ID NO: 29644 - RNA, 79 nt, Homo sapiens
agaaaaggagaaaagaagccaaagggacacgaaaggcacggcgacgagcccgaaggaccgacgggaccagagcagaccc

SEQ ID NO: 29645 - RNA, 73 nt, Homo sapiens
ggaggaagaccggaagacagacggaaggaccagaaaaagcgaagaggacagaagaagcgggagccgcagccag

SEQ ID NO: 29646 - RNA, 76 nt, Homo sapiens
agggacaagaagggcaaagccgaagaccaccaggaagggccaacccacgcgacagcaggacccgagacccaagcaa

SEQ ID NO: 29647 - RNA, 64 nt, Homo sapiens
gaaggaacggaggcgggccgaacaaacgcaagaaaccggccccagaacaacaagacgccaggaa

SEQ ID NO: 29648 - RNA, 82 nt, Homo sapiens
gccagccgccgcggggagccagcagcccaaccgcagagagcccagccacagagcgagaaggaaaaaacagggaagagaaaaa

SEQ ID NO: 29649 - RNA, 77 nt, Homo sapiens
aggcccccagccagaccggggccccaccgggcacagcaccacaacaaacaggacaggagcgaaggaaaaaacagaag

SEQ ID NO: 29650 - RNA, 74 nt, Homo sapiens
cggcccccacccccaggagcacgccgcacaggccgcgaacggggcaaaggcccagcccccgagacggggaccag

SEQ ID NO: 29651 - RNA, 71 nt, Homo sapiens
aacaaggaaacccaccgaggaacgaagcagagcccaacaggggagccgagaagccgaagcagaaggaaacc

SEQ ID NO: 29652 - RNA, 54 nt, Homo sapiens
ccaccagagcaccgcccacccgccaggcccagcgaaccgccagggagccagaag

SEQ ID NO: 29653 - RNA, 55 nt, Homo sapiens
gaacaccagcaagaaggcaacaggagcacggggccaaccccggccgggcggaaga

SEQ ID NO: 29654 - RNA, 84 nt, Homo sapiens
gcgcggcgagagcccacaggcccccacagggagaagaaaggggaccggggacacacccacgaacacaaagggcccggacggagc

SEQ ID NO: 29655 - RNA, 122 nt, Homo sapiens
aaccacacccagaagacgacggcacagcgcacaagaaacccaagcgcgaggaacaagacgccaaggagacgccgcagagacccccgggagcggagccgcagccccacgagcgcgcgggcccc

SEQ ID NO: 29656 - RNA, 77 nt, Homo sapiens
ggagaggagccagagccccacgggaaggagagcagccagcaggagacccggacagacaccagggagagaagaagcca

SEQ ID NO: 29657 - RNA, 58 nt, Homo sapiens
gagcacggcgagccgcggcacaccaagggcaccacagaacagccgaagcaggccacca

SEQ ID NO: 29658 - RNA, 54 nt, Homo sapiens
cgcagcccagcacagcaccgccgcgggccggacggaccaccaaggaaccagaag

SEQ ID NO: 29659 - RNA, 75 nt, Homo sapiens
caaccagaaaacggggagggaccagaagaagccgaaggaagccaagaccacccaagaagaccaaggcccaaaagg

SEQ ID NO: 29660 - RNA, 108 nt, Homo sapiens
gaaacaccagagggccaggccagaagagccgaccacaaggggaggacaaccgcccgggaccaggaaaaagaacgaccaggacacagagcggcccaagagacaaaaagc

SEQ ID NO: 29661 - RNA, 117 nt, Homo sapiens
aaccaagaggagcgagggccgaccagcgggaagagagagcagccgaacacacggaaaagccaaaagaaagccagaggccgcaaaggcaaagaagccgggccaccaagacgcacagac

SEQ ID NO: 29662 - RNA, 39 nt, Homo sapiens
ccagcagccgccccgcgagaaccgcagaaagcaacaaag

SEQ ID NO: 29663 - RNA, 69 nt, Homo sapiens
aagacgaagaaacggaagccaccaccagcccgggcccgagggcaggacagcaggcaccggcgaagcaca

SEQ ID NO: 29664 - RNA, 81 nt, Homo sapiens
gaaggaccaagaaccagccaaaacagagggagacgagaaaagggccgagcacaagccaagaaggcgccccaaagcagcgac

SEQ ID NO: 29665 - RNA, 71 nt, Homo sapiens
cagaacaaacgccggcagcagaagggaaacacaaagaagacaccagaagggccagcaccacgacaacacgg

SEQ ID NO: 29666 - RNA, 81 nt, Homo sapiens
cgggccgcgcgaagcccgagaggagccacaaggagacgccgccgcgcccccgcggaagcgcgagaaacaccacgcaacggc

SEQ ID NO: 29667 - RNA, 78 nt, Homo sapiens
gaaccaccagaagccagcccccaggcggaacgcccgccccgcagagagacagaagcgaaggggacagggggagaaccg

SEQ ID NO: 29668 - RNA, 72 nt, Homo sapiens
cggaagccacacccagccaacgagggaaggaagccgaggcgagcccacacaaggggaaggacaagaaaacga

SEQ ID NO: 29669 - RNA, 62 nt, Homo sapiens
cagggaacccggcaccgccccaggcccgggaggagcggggacacgaggaccccccaaaggcc

SEQ ID NO: 29670 - RNA, 51 nt, Homo sapiens
caagggaaacggggcggagaacggaaaagcaccaggaagcagagaggaccg

SEQ ID NO: 29671 - RNA, 66 nt, Homo sapiens
ggcgcagagcagagcagccagcccgaaagcgacgacaggacaccccagggagagaccgagaccaga

SEQ ID NO: 29672 - RNA, 73 nt, Homo sapiens
ccggagcggggacccaggagccggccagcgcgccggagccgccgagggagaacacccagcagaggcgcaggaa

SEQ ID NO: 29673 - RNA, 59 nt, Homo sapiens
cagaacagaggagcaagaaggagaaaaggagcacaaaggacagagacccgaagagcagg

SEQ ID NO: 29674 - RNA, 71 nt, Homo sapiens
gagggaaggagagaagaagagaagaaaggacagagccaaacagccaaacacaggcccgaccccgacccccc

SEQ ID NO: 29675 - RNA, 63 nt, Homo sapiens
ccacacggcaagcccgggagagcagccagacagcccccgggaccgggccgccgcccacagacc

SEQ ID NO: 29676 - RNA, 77 nt, Homo sapiens
agggcaaggcgccagaccaagacacagaaaagcccacgaggaaaaacggccaacaaaaacacagcgcagacggacag

SEQ ID NO: 29677 - RNA, 92 nt, Homo sapiens
gcgggacagccgaaggacagagagaagcagggagagacccagagcagcgggaagagaaaccacgaggagggaagccagcacccgggccagcc

SEQ ID NO: 29678 - RNA, 84 nt, Homo sapiens
cccagccccgcgccgccgcccccgccgcgccccgccagccgccacccggcaaaagcagaccggaaaacccaccggcaagaccac

SEQ ID NO: 29679 - RNA, 83 nt, Homo sapiens
agggccacggaggagggcgccagcaccacgaaacaggacgcaaacccagaaagagcacagcagggcaaggcagcaggagggag

SEQ ID NO: 29680 - RNA, 79 nt, Homo sapiens
aaagcagaacaggccaccgggccaacgaaagggacacggaacccaaggagacgaagcgaagcaggagaaggaggggaaa

SEQ ID NO: 29681 - RNA, 76 nt, Homo sapiens
cgaggagaaacagcagaaacgcaccaggccaaagaaagagaagacaaccaccaccagcgagcaaaagaacaaagac

SEQ ID NO: 29682 - RNA, 81 nt, Homo sapiens
cgggagcgaagaaacaacagacaagacaagcggagcaggaggcagccaccaggcaggcaaccagcgggaccagaggagacc

SEQ ID NO: 29683 - RNA, 120 nt, Homo sapiens
ggcgccggcgggaaggcggggcgacccggggggcgcgcccagagccccgcgcagcccagggaagcaaggcgccaccggaagaaacgggaggggaggagccgggaaagacagcgccaagcc

SEQ ID NO: 29684 - RNA, 81 nt, Homo sapiens
gagcccggaccccaggcagccccacacagcgaagggggcgcaacgcgaacaaggcagaagggcgcccagccacccccgacg

SEQ ID NO: 29685 - RNA, 61 nt, Homo sapiens
gcggcgcgggcaccggaagcccggggggcgggcccccggaccgaggaccggaagaagcaga

SEQ ID NO: 29686 - RNA, 83 nt, Homo sapiens
gaacagggggcagaaacacgagcacagcaagggcgcacggaggaagcggcccaggcaggggccacaccagccccaagaaacga

SEQ ID NO: 29687 - RNA, 65 nt, Homo sapiens
cacaaaaacaaagaggcgccgacggagacgcgcgcaacacagagaaagcccccgcagggggagcc

SEQ ID NO: 29688 - RNA, 73 nt, Homo sapiens
accgccaagccaagccaacccaaacagacgagggaaacggaccagccaccaacacagcgggagaaagcaagaa

SEQ ID NO: 29689 - RNA, 71 nt, Homo sapiens
cggccaggagaacaaggcacacagagacagacaaagcagccgaggaaaaggaaaaagaggcaggaggcgac

SEQ ID NO: 29690 - RNA, 72 nt, Homo sapiens
ggggggcggaggcgccaggggcgaggcagcggcacccgagcgcccagacaacggcaagcggagaagagcaag

SEQ ID NO: 29691 - RNA, 76 nt, Homo sapiens
gacccgcccgccagaaccgcgcgccacccacaaccaggccgcccaaagaccaacagggcagcagacccccccagcc

SEQ ID NO: 29692 - RNA, 82 nt, Homo sapiens
cccccccagccaagagcaggcagggagaaggaaggcaggcagcaggcagcgccagaggacccggcgccgacgcaaggaacga

SEQ ID NO: 29693 - RNA, 72 nt, Homo sapiens
ggcggccggcgcggcgcccgaaacgcaggccaacaaaacgagcaaaagggaccggggcaaacaaaaaaacca

SEQ ID NO: 29694 - RNA, 79 nt, Homo sapiens
ccaagaaaaacgggggccgccgccaaggggcgaagcgaaccgcgaccgcggcagcgcacaagagagcgagaagacgccg

SEQ ID NO: 29695 - RNA, 84 nt, Homo sapiens
agccggaggagccgccagcacagccaaggaacagaaagaagaaaaggaacccggccgagacagggaaagcggaaccaccaaaag

SEQ ID NO: 29696 - RNA, 73 nt, Homo sapiens
ggcaacgaacaacaacagaagagggccaagaaagagccgcaggccagaaggaacccaaccgaagaagaacaga

SEQ ID NO: 29697 - RNA, 38 nt, Homo sapiens
ccccggacgcgagcccgcccccgaaggagccgccggcc

SEQ ID NO: 29698 - RNA, 76 nt, Homo sapiens
ggggaagaaacagaggaaagaagggaaaggacaaccagagcggcccgcgagagacagagcagcggcggcgggacgc

SEQ ID NO: 29699 - RNA, 73 nt, Homo sapiens
gagagaggaccacccagaggagcaacgggcaaaagcagcgagagcaagcagaacggaacgcgaggaagaaagc

SEQ ID NO: 29700 - RNA, 48 nt, Homo sapiens
cggacacgcggggaacgggggaggaaccaccggacaaacaccggaaac

SEQ ID NO: 29701 - RNA, 74 nt, Homo sapiens
cccagcccacagaacccagcaccccagcgccggcggcaccgaagaaggagagaaccgaggggcgaagccgggga

SEQ ID NO: 29702 - RNA, 74 nt, Homo sapiens
cagccgcccaaggaagaacgaagggagccgcgaagaaaagcaaaggaacacagagcaagcccaagaacacaacg

SEQ ID NO: 29703 - RNA, 80 nt, Homo sapiens
caggaacacacgacgggacaaaagacccaagcaggacacggccggaccaggaacacagacagaggccagcaaggacagca

SEQ ID NO: 29704 - RNA, 55 nt, Homo sapiens
cagcgacggaagagccagggaacacacagcacaagacagcagaacaccgaacagg

SEQ ID NO: 29705 - RNA, 78 nt, Homo sapiens
agagggggaccagagagcccaacgccgggccaagaccccgagggcgaaccgaccaagaacaacacccagagggccagg

SEQ ID NO: 29706 - RNA, 77 nt, Homo sapiens
cggagcgcgcagcccgcgccccccgcccccccaccgacacagcccagccgggggcacccgaggaggaagagggcagg

SEQ ID NO: 29707 - RNA, 61 nt, Homo sapiens
ggcccgcccaggaccacaaggcgagcggggccaggacacacgagcaagaagaccccaagag

SEQ ID NO: 29708 - RNA, 60 nt, Homo sapiens
acacaggcaccagacgggacagaaaaccagagggcgagggaggcggccggagccaaaccg

SEQ ID NO: 29709 - RNA, 71 nt, Homo sapiens
agcagaagcccaccccccggcacgcagaagccagcggacgcccgcaacggggaccggccagagaccgccgg

SEQ ID NO: 29710 - RNA, 87 nt, Homo sapiens
gcccaacagaaaaagagaggagggagaacacagaaacccgccccgggaagagagcgagcggaaaacggccgaaggcaaagcgaccag

SEQ ID NO: 29711 - RNA, 78 nt, Homo sapiens
aagggacggaccacgcccgcaccagaacaacaagaaccagccaccaggaccaccagggcgggccgaacagaagagcag

SEQ ID NO: 29712 - RNA, 73 nt, Homo sapiens
gccccacgccggaggaaccgagaagagcagagcggagggagccccagacacgggcgagaaaaagcggagaaaa

SEQ ID NO: 29713 - RNA, 76 nt, Homo sapiens
aagcaggcaaaaagaaacggagccaccacaagcgcaagccaaagaacccagcagaaagaggaagaagcaagccgga

SEQ ID NO: 29714 - RNA, 76 nt, Homo sapiens
gccgacccaacaggcgggcgccaggcaccaggaggacagcacaaaaacacaccaagagagcgcgacagacgcaaca

SEQ ID NO: 29715 - RNA, 81 nt, Homo sapiens
cacagcaagagcaccggcgaccgcaccacaagggacgagaccaaacggaagaggccaggcaccaacgcggaacaggaggag

SEQ ID NO: 29716 - RNA, 72 nt, Homo sapiens
ccagcagcccaggggacggaaaggacagcagaccacagcccggcaggcccaaaaacccaaagggacagaagc

SEQ ID NO: 29717 - RNA, 80 nt, Homo sapiens
aaaaaaacacgcgaaaacgaaacaggccaacagagcacaggcaaggcaccgagggggggcaacaccaaaacaaaccagcc

SEQ ID NO: 29718 - RNA, 66 nt, Homo sapiens
cgcggaccccggcccacaacgccacgcaagagaccaagcgaagagcgcagaagacacgagccagcc

SEQ ID NO: 29719 - RNA, 87 nt, Homo sapiens
ggcggacacggccaccgcccagcgggagaggagcccaccaggacgaccgcgccgcccagcacgccaggccacggaaaggagaaagac

SEQ ID NO: 29720 - RNA, 77 nt, Homo sapiens
gccggcccgaaggaggagaagaaccgggaggcaagcaggggggcaaaggaaagaaggcagaaagggaggccaggagc

SEQ ID NO: 29721 - RNA, 67 nt, Homo sapiens
cccagagcgggacacaggaaggccaaaacacgcaagccaaacaaagggccaaaaccgagccgagaga

SEQ ID NO: 29722 - RNA, 67 nt, Homo sapiens
agcgaggccggaaaaaccgagccacacgaagccccaagggaaaaccgcaagaagcacacaaccacac

SEQ ID NO: 29723 - RNA, 55 nt, Homo sapiens
gaacgggacgcagaaagggcagacacaggcacaccaagggggacacagacacaga

SEQ ID NO: 29724 - RNA, 66 nt, Homo sapiens
gacgaagacaaagaagacagagaagccacagggaaaacaccgaagaaagaaggcgccaccccaagc

SEQ ID NO: 29725 - RNA, 72 nt, Homo sapiens
cacacacgaccaccaggaccgcgggacaagggcaaaaggcacaaaaaacaagcaaaacccggcccaaagaca

SEQ ID NO: 29726 - RNA, 82 nt, Homo sapiens
gaaaacaccaggaaagacaggagaccaaaaagccgaccggaggccacgagaaccacaacccgcagacacgggccaagacacg

SEQ ID NO: 29727 - RNA, 73 nt, Homo sapiens
acaggccccgcagcgaaaacccaacgagaccaaagaggcaagccggcacaagacaacaggaccccccagaaac

SEQ ID NO: 29728 - RNA, 83 nt, Homo sapiens
aaaaggaggcaagaaaaaggccccgacagacgccgaagggcaagagggcacagaagacggcgccccacacacggcccacacgg

SEQ ID NO: 29729 - RNA, 75 nt, Homo sapiens
ccccgacgccaggcagcgcccccaaacgaaaacacggggaagagaaagccaaaaagaagccaacaagccgcggag

SEQ ID NO: 29730 - RNA, 89 nt, Homo sapiens
ccaacagccccaacccagaaagcagaggccagagcggagacagacgggaaacgaaaggcgacacgaaaccacggaagcccggggccaga

SEQ ID NO: 29731 - RNA, 69 nt, Homo sapiens
cggcacgacaccgccccaacccacgagaggacagcccaggcgaccaggcaccggccagggccggccaca

SEQ ID NO: 29732 - RNA, 77 nt, Homo sapiens
aagaagaggcagaccccgccagaccaacaagcggaggagcagagaagccaaagacagcaaagggacaccacacagag

SEQ ID NO: 29733 - RNA, 119 nt, Homo sapiens
ccacgacaccaggggacagagaccggcaaggccaagaagggcccaagacccacccagcagggaagagacccccgacgacagagaagagccgcagggacagagcggacacagcaaccgga

SEQ ID NO: 29734 - RNA, 84 nt, Homo sapiens
accggcacgcgccgggacacagacggggggagcccaggaacggccggaggacaggcagccgccgcaaagggacgacgaagggac

SEQ ID NO: 29735 - RNA, 62 nt, Homo sapiens
cagcgcccagcagcgcaggagccgcccggcaaagcgaaagcgcaggaccgaggagaaggagc

SEQ ID NO: 29736 - RNA, 77 nt, Homo sapiens
cgcgcgcagaaccggcgcaggaccgggcaggagcgaaggcccagcaggcgcagcagcaagagggaaaaaggcaacgg

SEQ ID NO: 29737 - RNA, 73 nt, Homo sapiens
aaaaccgagggaaccaccacccaccaaaaggggagcgggagcacagacccaggagaagaagaccgacagcaag

SEQ ID NO: 29738 - RNA, 59 nt, Homo sapiens
gaggaggcagccaagccgagccgccacccggcgaagagaaggacccgaaacccggccca

SEQ ID NO: 29739 - RNA, 67 nt, Homo sapiens
aggacggacagcccaggaggacggcacacggccacgaggccagggcagagacaggcaacagacggca

SEQ ID NO: 29740 - RNA, 52 nt, Homo sapiens
gccggagacagcagccaaggaaagaaggacccgaggaaaaaagaacacccga

SEQ ID NO: 29741 - RNA, 83 nt, Homo sapiens
ggcgcgcccgaagcaggaagaccggagggagcgcagcacagcggggggaggagggggaggcacagcacaagggggggaaaaga

SEQ ID NO: 29742 - RNA, 73 nt, Homo sapiens
gccacggagaagaagcgcggcccacacacccagccgggacgcaggaggaccaaaacagggaaggaagaaccag

SEQ ID NO: 29743 - RNA, 100 nt, Homo sapiens
gagaaaaacaacaccaggacacagaaggcgaaacagaaggcggaggcagaacgaaagaggagcacacaacaaaccggagggaggaccagccgcaagccgc

SEQ ID NO: 29744 - RNA, 65 nt, Homo sapiens
ggccacaggaacaagaaccagggagaagccgcccgaacaccagacagcgaacccacccaacacgg

SEQ ID NO: 29745 - RNA, 73 nt, Homo sapiens
ccgagcaaccagcaaccaccaggaaaacgcgggcaacacaacaaggcgcggacacccagacaagcgcgccacc

SEQ ID NO: 29746 - RNA, 82 nt, Homo sapiens
gaaagggggagaggcggcacaggagcccagaggcacagaggacagacaggcgcggcaaacacagggacccgagaccccggcc

SEQ ID NO: 29747 - RNA, 78 nt, Homo sapiens
agcaacccgcagcagaagaggacgacagaagaaagggagcccccaagaacagcgagcacaggaaggaaaccggaccgg

SEQ ID NO: 29748 - RNA, 69 nt, Homo sapiens
agccaaggaacgggacaaccgaaagggaggcgcgaaaaaggaagaaaggcgggccaaagaacggcgacc

SEQ ID NO: 29749 - RNA, 66 nt, Homo sapiens
gaaccagacaagcaaagaaccaggacaaaaaggaagcagggccaaggaaggagggcggagcaggag

SEQ ID NO: 29750 - RNA, 79 nt, Homo sapiens
caggaggaacggcagccaagcccccacgccagggaggcgaggacaacaaagcgcgcagaaacccaagggaaagaagcag

SEQ ID NO: 29751 - RNA, 68 nt, Homo sapiens
acaccaccaccaagcccccgccccgacaaagaagacaccaggagccacagcccggaggcccaccccac

SEQ ID NO: 29752 - RNA, 80 nt, Homo sapiens
gccgcgcgcgacgcccagagccgcgaaccccgcccgagcccgccggaccccccgacccagacccggacccccacaccgga

SEQ ID NO: 29753 - RNA, 80 nt, Homo sapiens
ggggggcgaaccccccacagacccggaagaaagccccccacacagccagacggacgacggggaaccccgccaagacaaga

SEQ ID NO: 29754 - RNA, 80 nt, Homo sapiens
cggaaacaaggcaacagaaagagcaacagcagggcaacaggaggcgacgagacggagacagcaaacagaaagcaccccca

SEQ ID NO: 29755 - RNA, 73 nt, Homo sapiens
ggccccggcccacaggggggggcaaacccgagagaacggaagccgggcaaggagaacaacacaaaccgagggg

SEQ ID NO: 29756 - RNA, 79 nt, Homo sapiens
cggaaacaaggcgaccccagaaagaagcgaaaccacaacacccaaaagcaaggaagaccacggacgaccgacggcacgc

SEQ ID NO: 29757 - RNA, 58 nt, Homo sapiens
acagaccaccccacaggccagcaaggacagcagcaggcccaagagaaacaggcacgcc

SEQ ID NO: 29758 - RNA, 40 nt, Homo sapiens
gaccgcccgcccccaggaaaccaagcagggaagacacacc

SEQ ID NO: 29759 - RNA, 82 nt, Homo sapiens
acaaacacaaggagccacaaggacgggaagcaccaaagcgcgccaagaggcggagaacggaaaagcaccaggaagcagagag

SEQ ID NO: 29760 - RNA, 97 nt, Homo sapiens
gagaaacagacagaacaaaacacaaaacccgagcacagaaaagaaaaggaccggaggaccacaccacggagccaggaggaagccaggacacggaagg

SEQ ID NO: 29761 - RNA, 68 nt, Homo sapiens
ccgcggaaccagcagaagaacagacccaggacccggccccgccgccggggcgccacggcaagagggaa

SEQ ID NO: 29762 - RNA, 70 nt, Homo sapiens
aaaagaaaacacagcaagaggcacgcccagagcaagaaggggagacgagcagcaggaaaggaacacccga

SEQ ID NO: 29763 - RNA, 76 nt, Homo sapiens
cggcccgacggggaggagacccgggcagaagaacaccggcggcggccagcccgacacaggcagcgggagagaggag

SEQ ID NO: 29764 - RNA, 64 nt, Homo sapiens
agagccaagcccagccggcccaggaccaccaagagagacaagaagccaaacagcaccagggagc

SEQ ID NO: 29765 - RNA, 68 nt, Homo sapiens
ccggcccgacgccgcgcgaggggacagaagcagcggaaccggggggcagggcccagggaccggaaagc

SEQ ID NO: 29766 - RNA, 51 nt, Homo sapiens
aagaaagacagagcaccaggagaacggccgagcgaccaggagaggagcccc

SEQ ID NO: 29767 - RNA, 42 nt, Homo sapiens
ggggagaaaccaggcagggcaaacagagagacggggcaccag

SEQ ID NO: 29768 - RNA, 74 nt, Homo sapiens
ccaaggaagcagcaggagcagaaagaacggccagacacccgaaagaccgaaggagacagggaaacgaaaaccac

SEQ ID NO: 29769 - RNA, 78 nt, Homo sapiens
cgggggaccacggccacaacaacccccggcccagagaaagaggaggagcgccggcgcggcccaggaggccgccaacag

SEQ ID NO: 29770 - RNA, 85 nt, Homo sapiens
gggggaggcgaggaggcccgagggcccagacaagcccaaggaggagcggagaaggaccaccccagaccgcacccaccagaaccgg

SEQ ID NO: 29771 - RNA, 56 nt, Homo sapiens
ggacgcccaacaccacccacccaccacggaacccaaccccggaaccaagaccccgc

SEQ ID NO: 29772 - RNA, 31 nt, Homo sapiens
caggggaaaggcagaggagggacccacccga

SEQ ID NO: 29773 - RNA, 72 nt, Homo sapiens
acaaggaagggacaacacgaccacccaaaacaggcgggcaggggcacggccaggcagcccgacccgggacca

SEQ ID NO: 29774 - RNA, 73 nt, Homo sapiens
gacaaaaacaaacggcaggcgaaggaaaaccagcacaagaagcaagggaccgggagggaaacccagaggacgg

SEQ ID NO: 29775 - RNA, 55 nt, Homo sapiens
agaacccggaagaaagaaaacagaagcgggcaaggccagagaaggcgggagaaag

SEQ ID NO: 29776 - RNA, 57 nt, Homo sapiens
ggaaggggcaggccacacgggcaggggccgcaaggccaggcgcgcagaggcacccaa

SEQ ID NO: 29777 - RNA, 77 nt, Homo sapiens
agaacggcaagccacagaacccaacacagagccaaaggggccaggaaagaaacacgaacacgggaaggcgagcaaaa

SEQ ID NO: 29778 - RNA, 67 nt, Homo sapiens
gagaagacaacgcacaacagaaaaggagcaacgggagccacccacccgaaagagcggcggaaacaag

SEQ ID NO: 29779 - RNA, 93 nt, Homo sapiens
caggccccgggcccggcgccgccgcccgcaggcgcacgccccgcccggggcaggagccccggccaggaggggccaggagggccccagaaagaa

SEQ ID NO: 29780 - RNA, 87 nt, Homo sapiens
cgcggacagcgccgacgccggggcacggccacgcacggcccaggaggcgacgccacaccggaggaggagccacagaggcgggaaagg

SEQ ID NO: 29781 - RNA, 72 nt, Homo sapiens
caaggccggcgcggaggaggggagcagcgcgcaagccagaacaccaacgccacacacgggaccaccacacgc

SEQ ID NO: 29782 - RNA, 76 nt, Homo sapiens
cagccccccggaacccgcacaaagaaggagccaccgccaagcgaagggcggacgccagcaacccagagggggaaag

SEQ ID NO: 29783 - RNA, 83 nt, Homo sapiens
acccgcgcgcgcccgggaggaaggaacgaggcaaggagcaaagcagcggcgcagcccggggccaaaacgagcggagagaaaaa

SEQ ID NO: 29784 - RNA, 71 nt, Homo sapiens
gggcagccgaccggcgcgggggacggccgccagagggcagccacaaggagggagccgcagaagcacacacg

SEQ ID NO: 29785 - RNA, 79 nt, Homo sapiens
gacccagagcagggaagcagaggaggccaccagaaacggccagcgagacccggaggagcggacgggcggaccagcagag

SEQ ID NO: 29786 - RNA, 84 nt, Homo sapiens
gacgagcgacaggagcacacccggagaagcaggagcccaccggcagacagacgcgaagcaaagcgccacccagaagacgacagc

SEQ ID NO: 29787 - RNA, 78 nt, Homo sapiens
cccgccacgagcgccccccgagcggggggacgcgccaggcacagcagcagacaggggcaaggccgaggggaacagcac

SEQ ID NO: 29788 - RNA, 64 nt, Homo sapiens
cgccaggacaaagaagagggaacaacagaagcaccagggcaggggcggccccggcgaggcagga

SEQ ID NO: 29789 - RNA, 58 nt, Homo sapiens
cgcgaccaccggcaacacccgcccagccagcaaagacccaaaacgcaagccaagagga

SEQ ID NO: 29790 - RNA, 47 nt, Homo sapiens
gaaggaccaagaaccaggagaaccggggcaagagacggcagacaaac

SEQ ID NO: 29791 - RNA, 59 nt, Homo sapiens
gcccggaccccgaaagacgggaagaagaggacggcaaaccagaaagaagaaaggagccc

SEQ ID NO: 29792 - RNA, 75 nt, Homo sapiens
accggaccaccccacacacagaccaaagcaccccaggcgagaacgcggacaagcaaacaaagaggaaaaagaggg

SEQ ID NO: 29793 - RNA, 79 nt, Homo sapiens
gacacgaaacagagacccggaagcggcagcggggaggacaggaaccgcgggagagcagagcgacacgaaaagacagacc

SEQ ID NO: 29794 - RNA, 59 nt, Homo sapiens
aagaagaagaacccacaagagccccagaaaagagcagacaagcaagcgacaagaaggca

SEQ ID NO: 29795 - RNA, 79 nt, Homo sapiens
ccgagccagccccacgccgcggcgcgcccgggccccgcgacccagggacaccggggcggcgcgggaagcagaagggacg

SEQ ID NO: 29796 - RNA, 79 nt, Homo sapiens
aaccgccgggaacccgccagcaccaccgcccaaccccagacaggacacagaacagagaagaagcagacgagacagaaaa

SEQ ID NO: 29797 - RNA, 87 nt, Homo sapiens
aggcaagagccaacccaaaaccaaaacccacaggagggccagaggacaaagcacggcggaagagaagccagccgccggcgacagagg

SEQ ID NO: 29798 - RNA, 73 nt, Homo sapiens
acccaagacgccccaaaggaagagaccccagccacccccagggccaggcaagaaagagcgcgacgaggaaaga

SEQ ID NO: 29799 - RNA, 74 nt, Homo sapiens
cgggaagaggaccccaccaggaaccacacgccagcaccgacgaacccagccccagaacgaggagcgcccggccc

SEQ ID NO: 29800 - RNA, 76 nt, Homo sapiens
gaaaggcagcagcacagaccaccgccaggaagggaggagcaagaagacacagcaacaagacagaaaccgacggcag

SEQ ID NO: 29801 - RNA, 81 nt, Homo sapiens
agggaccggggcgaggcgcccaggccaaacccccgccagacagccgaggcagggggaaacaaggacaagcccgcggccagc

SEQ ID NO: 29802 - RNA, 36 nt, Homo sapiens
cacggacaggagcacaacagggaacagagacagacc

SEQ ID NO: 29803 - RNA, 94 nt, Homo sapiens
aggcgacagcagaaggaaaaccacagggaggcacaaggcgggacagccaagccaccagaagggggggaggggccacacaccgcaaaccagaaag

SEQ ID NO: 29804 - RNA, 74 nt, Homo sapiens
gggaacagcacacgagagcggcgcgcgcgcgaggacggaggccgcaggacagaaacggaagccagcaagcgcaa

SEQ ID NO: 29805 - RNA, 75 nt, Homo sapiens
aaaaggaccagggaccacgccaaaggaaaaccggcagaggacaaggaaaggccccccgggcaagccagcaccgag

SEQ ID NO: 29806 - RNA, 75 nt, Homo sapiens
ccagccagaagaaacaaccgacaaccccagccaacgcaaacgccaaggcgccggggagcaggagaagaaggcacc

SEQ ID NO: 29807 - RNA, 53 nt, Homo sapiens
gcagaaagccacgcaaaaggaaagaacaacggcagaaagaagcgagaaaaaga

SEQ ID NO: 29808 - RNA, 37 nt, Homo sapiens
cgcagcacacagagggggggagacgcagcagaccaaa

SEQ ID NO: 29809 - RNA, 67 nt, Homo sapiens
cgagggagaagagcagaaaaggggaacgggacccgaacaacgaaaaacaagcgaacagagaaaagag

SEQ ID NO: 29810 - RNA, 73 nt, Homo sapiens
caccccaaaagaagagacagcccgcagagagaaccgacaggaaccagacacgcaaacaggaacgaagagaacg

SEQ ID NO: 29811 - RNA, 67 nt, Homo sapiens
aagcggggaaaaagggagcggggcggaagacggggagagccaggacaggacccgaccaagcagccag

SEQ ID NO: 29812 - RNA, 70 nt, Homo sapiens
cgcagcgccgaaaccgaaacggaagaacacagaaggggggggcaaaaagcgcagaaacacaaaagaagga

SEQ ID NO: 29813 - RNA, 90 nt, Homo sapiens
gccagaaaccggggaccaacaaccaccaagaaacagagcaaagcagcccgaggaggcacgcaaaacaacagggggcaaacaagaccaggg

SEQ ID NO: 29814 - RNA, 87 nt, Homo sapiens
gcgggacgggacggcggcccagcgagggcggcccggggcacccgcacgggaagcaggcccgccacagaacacacaccacagccgccg

SEQ ID NO: 29815 - RNA, 81 nt, Homo sapiens
agagcccagccccagaccaaagaagccaaccgcaagggaccccccagggggcccgagcccaccccagggaaggagaccgcc

SEQ ID NO: 29816 - RNA, 73 nt, Homo sapiens
ccacccggagaaccccacggagaaccagaggaccagggcgaggaggcggagccagccaggaggaggggccgcg

SEQ ID NO: 29817 - RNA, 42 nt, Homo sapiens
caaggccggcaacagcggccccaggcacggccggaaggacag

SEQ ID NO: 29818 - RNA, 78 nt, Homo sapiens
acgaaggcaaagggaaggggggaccgcggcgcaggacgccgacacgggccgcgccaggagaaagaagacaggagggag

SEQ ID NO: 29819 - RNA, 75 nt, Homo sapiens
aagagccaaccgcaccgcgcaggggggaggcaaagaaagaagcccggaaacgggcggaagccagccaaaagacga

SEQ ID NO: 29820 - RNA, 84 nt, Homo sapiens
gccgggacgcggagcccggagcggggcgacgaggcgagcgggggccgggcaggagaacaaccgcaacgaacaaacaggagacag

SEQ ID NO: 29821 - RNA, 72 nt, Homo sapiens
cccgaggcgagacggaaaggacgagcagggggaggaacaaagcgaggaagggaagggaaggcgacaggcagc

SEQ ID NO: 29822 - RNA, 77 nt, Homo sapiens
cccggagcagcagcccgccggcacgcgagccccagcaagccccacccagaaagacaagcagggagaaagagaacaca

SEQ ID NO: 29823 - RNA, 67 nt, Homo sapiens
gggaccccaggagcgcggaagagagcggcggggaagagcagaagaagggccgggccggggcggggcc

SEQ ID NO: 29824 - RNA, 55 nt, Homo sapiens
ccacgccacacagggaaggcacacagcagagcccaaaaggcagagcgaggagaga

SEQ ID NO: 29825 - RNA, 105 nt, Homo sapiens
gagcccgcgcccgccgcgggagagaggacccccccccccccccaagaaagacgcgccagcaggcaacaaaaccaaggggaccaaaagcagagacaggaccggcag

SEQ ID NO: 29826 - RNA, 43 nt, Homo sapiens
agcggacgcgcgggcgcgcccgaagcagaccccacgagcgaaa

SEQ ID NO: 29827 - RNA, 42 nt, Homo sapiens
gacggacccggcaaaagccaggagggacagaggcgcgcaggg

SEQ ID NO: 29828 - RNA, 75 nt, Homo sapiens
caaccggaaaaggagaccaagaaacagcagagggagagccaggaaggagaccccggagaagcacacagacaacag

SEQ ID NO: 29829 - RNA, 86 nt, Homo sapiens
gggagaacaaagcgaggccagagaaagagaagcggcacccccaggaagcgcggcgaaaacaggccaaaagaaagccgagaaggaac

SEQ ID NO: 29830 - RNA, 61 nt, Homo sapiens
aacccaaaagccgacaaccccagaaacagcgccgggccgcaagacagcccgggacaacacc

SEQ ID NO: 29831 - RNA, 74 nt, Homo sapiens
caggggccgggcccagcgcgaccacgccaccgacgcgccccccggggcggcgccgcacccccaccgccaacacc

SEQ ID NO: 29832 - RNA, 80 nt, Homo sapiens
aggaagaaccaggcgcaggagacacagcaaacaacacccaacagcccaaagcaaaggagcaacagcccaggagaaaacgg

SEQ ID NO: 29833 - RNA, 79 nt, Homo sapiens
gcgccagaggcggcacggccagcggcaccacccccagcaccaccccagccccgcgcccgcagaggggaagacacacgaa

SEQ ID NO: 29834 - RNA, 77 nt, Homo sapiens
ggagcgaaggaacgccccaaacaggacaggggggggccggaaaacagaccccaagaaaaaacgagggagagagagga

SEQ ID NO: 29835 - RNA, 77 nt, Homo sapiens
agcgccaaacgcccgaaagaagcggacggaggagaaagaagaaacaaagagggacccagccaccaaaaggaggcgaa

SEQ ID NO: 29836 - RNA, 83 nt, Homo sapiens
gaagcagcggacgcgcccccaagaaagggccggcggcagagaccacgcccagcaggagcggcgcaggccacgcaggagccgcc

SEQ ID NO: 29837 - RNA, 75 nt, Homo sapiens
ccacaaaacgaagacggagccaaaccaagaaaggcaaacccaagacggaaaaggggggaaagaaagaagcacagg

SEQ ID NO: 29838 - RNA, 38 nt, Homo sapiens
acgacaccggacggaaaagcagcccacaagagagggaa

SEQ ID NO: 29839 - RNA, 72 nt, Homo sapiens
cggaagagcgcggccagcaccccaacgggccaaagccgggagacaaggaaaacacacagaaaacaacagggg

SEQ ID NO: 29840 - RNA, 41 nt, Homo sapiens
cggggcagccccgcaggcacaggaaggggcccggacccgaa

SEQ ID NO: 29841 - RNA, 74 nt, Homo sapiens
ccgccgaaagcagagaaaggccagagacccagcaggagccaggaagagaagaaaagaagaaacaacagaaaaaa

SEQ ID NO: 29842 - RNA, 109 nt, Homo sapiens
gcacagagcccgccgccgaccgccgcccgccacacccgccgccaggaagggaaaaggccgaggcacagcgggaagaccgcaaagacgacccgagacagggaacagcagc

SEQ ID NO: 29843 - RNA, 85 nt, Homo sapiens
gaagaggcacgcgagggggcgcgaggggaacggaggccagagcgcgaacacaggcacagaagcggcaggaaagccccgggcagcc

SEQ ID NO: 29844 - RNA, 81 nt, Homo sapiens
gaagacgacccacggcgcccgcaaccccaggggcccgcgacgggcaggcagcagacccgggcaacaacgcagcacagccgg

SEQ ID NO: 29845 - RNA, 76 nt, Homo sapiens
gaaaaccccagcgaaacaccaagagggagaccagaaagcgggcaacaccaaccgagacgcgagagcacaaaacaca

SEQ ID NO: 29846 - RNA, 68 nt, Homo sapiens
agcgacaccccagaccacggaaagacggacagccaagcaacgaagagaggaagaagacacggaccgac

SEQ ID NO: 29847 - RNA, 39 nt, Homo sapiens
cccgagagcgggacacagggcaccgagcaccgagaaaaa

SEQ ID NO: 29848 - RNA, 75 nt, Homo sapiens
aagaggcaaaaccggacaagaggccaaccaaccggaggaccagagaagacacacaacaaccccacggagccccac

SEQ ID NO: 29849 - RNA, 85 nt, Homo sapiens
cccccccacgcccacgcaggagacccccaacggcgccggacgacaggccagggacaagaggcgggaggcggcagaagcagccaga

SEQ ID NO: 29850 - RNA, 83 nt, Homo sapiens
gaggaaaggggagcgcagcggcgggcggcggcggcggcggcagcggcagcgcggcggggccggcagcaggcgagaggcagaac

SEQ ID NO: 29851 - RNA, 65 nt, Homo sapiens
acaggcggcgccccggaacgggagcgcaggagggaggcagcacagacaggaggacgaagaagagg

SEQ ID NO: 29852 - RNA, 88 nt, Homo sapiens
ccgggaagggaccggcccaggccccccgccccgcgcagcaggaaaggagaaaagaagaacaggcacaacaaagaaacggagaagaaaa

SEQ ID NO: 29853 - RNA, 76 nt, Homo sapiens
gggagggagaggagccagccacagaaacagcagcagcgagcgcacaacaccagccacaaacccagaaaagcgccag

SEQ ID NO: 29854 - RNA, 68 nt, Homo sapiens
aacgccgccagcacggcaggcacaccaggagggcggacagaggccacgggaggccacacgggaacaaa

SEQ ID NO: 29855 - RNA, 83 nt, Homo sapiens
gcccagcggccggggacagccgcggggcggagaccggagcagcggagcagcggaaaagcaaaggacaaagaggccaggagaca

SEQ ID NO: 29856 - RNA, 78 nt, Homo sapiens
cggggcgcaggggcgccccccccggaccaccgcgcgccggggaaaggcaacaagaggccagagcccagagcaagaagg

SEQ ID NO: 29857 - RNA, 74 nt, Homo sapiens
ggaaaaacgggagggaggaccggccagcccccccaaaaaggaaagacaccggcggcaaggcaacggggcccgcc

SEQ ID NO: 29858 - RNA, 78 nt, Homo sapiens
agccaaggaggcgaggacaagcacagccacaagaaaacccggcccaagaaaacccaaggcaaggcaggccgagaacaa

SEQ ID NO: 29859 - RNA, 40 nt, Homo sapiens
aagcgacgagccgcgaggagggggaagggggcgggaagac

SEQ ID NO: 29860 - RNA, 52 nt, Homo sapiens
gcgacggcgcccgggagcggccggaggggaaagaaaaggcacccaaaagccc

SEQ ID NO: 29861 - RNA, 82 nt, Homo sapiens
ccgccgccgccgccaccacccacccggacacagagaaggagggggcagagcacggcaggcagaaggggccaacccgggggaa

SEQ ID NO: 29862 - RNA, 80 nt, Homo sapiens
gccgcagaaccgaagacgccacggaccccccagcaaccccgagacgagacaagagaccaacgaagaaccccccaagaagg

SEQ ID NO: 29863 - RNA, 80 nt, Homo sapiens
aagcagagcagcagcggagcggagcccggaagaccgcagaaggagcggcgggagcggaaaggacgaagaaaggagggcag

SEQ ID NO: 29864 - RNA, 79 nt, Homo sapiens
gggccgcagcccaccacagcccccaggccagcccgcgggagcgccacacagagcggaagaaccgaccgggacgagggca

SEQ ID NO: 29865 - RNA, 73 nt, Homo sapiens
ccagcgacaagaggaccacgcaaacaggcggcggccccacccaaagcagaacaagaaccaaacaaacgcaacg

SEQ ID NO: 29866 - RNA, 85 nt, Homo sapiens
gaggcgcggcaagacacacgacggccagggccgacccacagagcaccccagccacgcgagccgggcgccaaagccaggagaagcc

SEQ ID NO: 29867 - RNA, 64 nt, Homo sapiens
agacacccaaaacccgggaaaccgccggcccgagggcaggacagcaggcaccggcgaagcacag

SEQ ID NO: 29868 - RNA, 55 nt, Homo sapiens
gagcgaaagcgaaaaacagcgaccagaggaagcccagaggcacggggcagaacac

SEQ ID NO: 29869 - RNA, 80 nt, Homo sapiens
gaaagggcaaaagcggcaaagggaaaaaggcgccagagacgcgcacgaaacgacgaagaggcccgaggacagaggagcaa

SEQ ID NO: 29870 - RNA, 82 nt, Homo sapiens
aaccccacggagaaccagagcccccgcagccaccgccacccaggaaggccaacaggggaccgcaaggccgagccgggagggc

SEQ ID NO: 29871 - RNA, 76 nt, Homo sapiens
aggcagaccacaagagccacgaacagaagagagaagggcacagaccaagacaacgaaccccggccaggacaggccc

SEQ ID NO: 29872 - RNA, 74 nt, Homo sapiens
ggggaggggagcccgcgcccgccgcgggagagagcaccaggacaaaagaagggcagcacaaaggaaagccccaa

SEQ ID NO: 29873 - RNA, 80 nt, Homo sapiens
cgcccgccccagccacccaggccccgccgcccgggggcgccgcccaccgcgcccgccgcaagaagaacgcgaaagaaccc

SEQ ID NO: 29874 - RNA, 78 nt, Homo sapiens
gcgcggaccgcacgagcgcgaggaacagcgcccccgggcccccacgacaggggcccagcgaaggggggagaaggcacg

SEQ ID NO: 29875 - RNA, 71 nt, Homo sapiens
aaaaaaagggcaggaaccacgaaggacagaagacaccacagagagggaaaagaggacgaggcgcgaaaagg

SEQ ID NO: 29876 - RNA, 85 nt, Homo sapiens
gccgccgccgccgccgccgccgccaccaccaccgccgcgccccggcgcccccccgaggggcgaagaccacaacgcaccccggagg

SEQ ID NO: 29877 - RNA, 53 nt, Homo sapiens
ccagggccggaaaagccaacgccggcgaagccacgggccccgccagcagagcg

SEQ ID NO: 29878 - RNA, 61 nt, Homo sapiens
ccgggcccagcacagccagcaccgcacgcccgcaagggaggcagcaggggaagaggggcgc

SEQ ID NO: 29879 - RNA, 74 nt, Homo sapiens
cccacagagaacccagacaacaggacgccgccaagggagagcccgaccagagaaaaggcggaagaccgccaaaa

SEQ ID NO: 29880 - RNA, 79 nt, Homo sapiens
cgccgcgcgcggccaagccagccggccccagcagaccggaaggccccaagaggaccaaaggcaccccccagagaaccca

SEQ ID NO: 29881 - RNA, 71 nt, Homo sapiens
acagggccagcaccgcaagcgaggaaacaaaaagccaacggaaaaagaaacggcagagcacaggaccgaag

SEQ ID NO: 29882 - RNA, 79 nt, Homo sapiens
gcgagacggcccggcgcagcgagcgcggacggagaggaaagcggaaggagaagagcagccagcaagcggaggacagcag

SEQ ID NO: 29883 - RNA, 82 nt, Homo sapiens
aacccaccgaacgaacacacgggacaaccagcgacgccggagcagcccaacccaggcgcaaggaagaagagacgccgcgcgg

SEQ ID NO: 29884 - RNA, 72 nt, Homo sapiens
caggagcgggaaaagaaaacacgcacacaaaggaaagggcacacggcccgaacaagggaacaccagcacagc

SEQ ID NO: 29885 - RNA, 73 nt, Homo sapiens
ggaccaggcgaccagcaccagcccgaccaggcacccccagcaggacagcacacccaaccagacacaccacccc

SEQ ID NO: 29886 - RNA, 84 nt, Homo sapiens
ggaaccgaaaagccccaacagcaaggcggggaagagcgggcgaccaagcaagcccggagaaaacaggacccggaaggaaacggc

SEQ ID NO: 29887 - RNA, 73 nt, Homo sapiens
acagcaaagccaagccaacaggcgccggcgaaagcaacgaagggacgccagaacaagagaaggagagcagaaa

SEQ ID NO: 29888 - RNA, 78 nt, Homo sapiens
ggaccaccacaaccgcgcagccagcccgggcccagggagaggccgggcagccaggggaccaagaaacaaccagaaaca

SEQ ID NO: 29889 - RNA, 75 nt, Homo sapiens
gaaaacccagaaagcaacacagagaccggagagcacacggcaaccagacacacaaccaccagaaggagagaagaa

SEQ ID NO: 29890 - RNA, 65 nt, Homo sapiens
aaccagggcagaagccgaacacgacagaaagaaaggccaaagcagcagaccccacgcgagccgga

SEQ ID NO: 29891 - RNA, 77 nt, Homo sapiens
agacggaccaagaaacagaagaaacgcaaagaggacaagaccaggcccaaaaaagcaaaacagagagaacccaccaa

SEQ ID NO: 29892 - RNA, 78 nt, Homo sapiens
cgggcagcgaacaagcgggagcaaggagggcgaagagcgaggaggcccccccagccggcgaccagccaccccacgcac

SEQ ID NO: 29893 - RNA, 83 nt, Homo sapiens
agcccacaagaaccgcgaggacagaggcaacagaggagaagaggaagaggaaaccagcaagaaggcagggggacagaagcgaa

SEQ ID NO: 29894 - RNA, 59 nt, Homo sapiens
gagcacacaaacgggaccccaccacacagcagaagaggaaagcggacagaagaagccaa

SEQ ID NO: 29895 - RNA, 78 nt, Homo sapiens
gccggcagaggacgagcaaaccaggacggcggagacagcgcagaccccaaggacaggggaacccaccagccggaccca

SEQ ID NO: 29896 - RNA, 48 nt, Homo sapiens
cggggcgaaaagcccgccgacacagaggaaaaagacaaaccagccccg

SEQ ID NO: 29897 - RNA, 76 nt, Homo sapiens
agaagcacaaaacagcagacccaagagcagcggaaaagaccagcacaggaggagcagccggggaaagaggcaagag

SEQ ID NO: 29898 - RNA, 75 nt, Homo sapiens
aggcccccccgccccccaggcacccagcgcggaccagaacaaccggagcacgccagacgccccggccgaccaagc

SEQ ID NO: 29899 - RNA, 75 nt, Homo sapiens
ggagcgcaacaagccagccacggcgcgcaaagcaagcccaaaaaagacgaaacggaggagcccaggaggaagaag

SEQ ID NO: 29900 - RNA, 60 nt, Homo sapiens
cggacacaggcagcccggaaagaggggcaaagaaaaaggagagaaaaagaggcaaaacaa

SEQ ID NO: 29901 - RNA, 71 nt, Homo sapiens
aggggcggcgggcggcacacaggggaggccggccgccgccacgacggcggcacccggcaccacagccgccg

SEQ ID NO: 29902 - RNA, 72 nt, Homo sapiens
gagcccggccgccagaccacagcacagccgggaaggggagccaccagcccccgcccacaccagaccagaaag

SEQ ID NO: 29903 - RNA, 74 nt, Homo sapiens
gggcgaccaaaggaccagagaagaccaaccacccaagaacgaagagcaggcaccagacgcagaacgaaaaagga

SEQ ID NO: 29904 - RNA, 86 nt, Homo sapiens
agcaccaacagcaggagcgcagcgggaaagaggagacaagagccccagcccacacagacccaagaaaagaaccggaaccggcaaac

SEQ ID NO: 29905 - RNA, 77 nt, Homo sapiens
ggggaaaacccccgggaccaggccccagccccagccaaaccccccacacgaaccagcaagggaggggcgagggcagc

SEQ ID NO: 29906 - RNA, 68 nt, Homo sapiens
gcaacggcccaggagagccggaggaacaccaggccaccaaaaacgaggagcaacagcgccagcgccaa

SEQ ID NO: 29907 - RNA, 66 nt, Homo sapiens
agggccgacggcgacagagccccccgggccgggcacgggcgccagcggcacggcagccccgaacga

SEQ ID NO: 29908 - RNA, 61 nt, Homo sapiens
acgcgggagagcccgggccacccccccaggcaaggccacagcacagcaaagccacaacacc

SEQ ID NO: 29909 - RNA, 56 nt, Homo sapiens
aaggacagcggagacacggagccaggacaaggacaagccgaagcccggacaaaacg

SEQ ID NO: 29910 - RNA, 54 nt, Homo sapiens
gcccaaaaggagacaccagaaggcaaggaagaggagaagacccgccgcaagcaa

SEQ ID NO: 29911 - RNA, 78 nt, Homo sapiens
ggacagcacccgccaccccgcagccccgccaggcgaagcaaacaagcaacccacaggcaaggcccagcagcacacaag

SEQ ID NO: 29912 - RNA, 55 nt, Homo sapiens
gcggggaagccagcgaacgcagggcaaggcgagaggaggagacgacagaaacaag

SEQ ID NO: 29913 - RNA, 72 nt, Homo sapiens
gacgcagggcgcccccgacagccaggggccgggccccacccccaggacacaggcccggccacgggcggccca

SEQ ID NO: 29914 - RNA, 78 nt, Homo sapiens
cagagcaaggaggccccagcggaccgaacagggcggagaacggaaaagcaccaggaagcagagaggaccgcagaaggg

SEQ ID NO: 29915 - RNA, 55 nt, Homo sapiens
aaggaccaagaaccagaaccaggagaggaaacaggaacaaaaccgaaagccggag

SEQ ID NO: 29916 - RNA, 81 nt, Homo sapiens
cgagggcccccaaaagagaacagccccagcccagggggaaggaggcagaaaccggcagccggggaccgggcggggggcgca

SEQ ID NO: 29917 - RNA, 89 nt, Homo sapiens
gcaggaggaggcggcggggacaccggcgagccccagcagggccccgggccccggaaggagcagaaaaccacagaggaggggacggacaa

SEQ ID NO: 29918 - RNA, 68 nt, Homo sapiens
gagccggaagaccaggaaggagccggggcgagcccaaggaaccaaacggccggaagaagagagagggg

SEQ ID NO: 29919 - RNA, 78 nt, Homo sapiens
ggaaagggaagccaagagggaacacgacggaagagagaccgaaaaagaaccagcaggcgaccaaaagccgaacacggg

SEQ ID NO: 29920 - RNA, 77 nt, Homo sapiens
cgcgacagaggagggaggaaaacaaccgagggcagagaaagcggggcagcaaggcaaggaaaaaacgaagagcaggg

SEQ ID NO: 29921 - RNA, 76 nt, Homo sapiens
gccccagaacgcagacagaggagcggacccccgcggcgcgcagcccagcaggaacaagcagaaagcacgaacaacg

SEQ ID NO: 29922 - RNA, 67 nt, Homo sapiens
gaggaaggaaaggcgcaacaacacaaaaaaagcagcaagggaccgcagcgaagcacagcagaagggg

SEQ ID NO: 29923 - RNA, 71 nt, Homo sapiens
ggcgggcgaggcaccggagacccgagcaccccaacgggcaggaaaggcccgagccaaaagacccagagaaa

SEQ ID NO: 29924 - RNA, 72 nt, Homo sapiens
ggccgccagaccacagcacagccgggaaggggagccaccagcccccgcccaggggcacgggcacagcccaga

SEQ ID NO: 29925 - RNA, 60 nt, Homo sapiens
cagcgggccggacggggcggggggaacgccccgcagacaagcagagggcaccagagcagg

SEQ ID NO: 29926 - RNA, 75 nt, Homo sapiens
aggcagagacagacacagaccagccaccaggacaggaagacccagagccccggaaggagcgcacagcagaaggac

SEQ ID NO: 29927 - RNA, 80 nt, Homo sapiens
caacaagagcaaggcagaacgccaagccccgcgagcgcacgccaacgacgaggaccgacgcaggaacccaaccgaagaag

SEQ ID NO: 29928 - RNA, 87 nt, Homo sapiens
aaagaaaacgagcgcgagagggggaaaagcgagcgacgagcgagcgcgcgcgcgaaaacccgggcagcccagaccccggggcagaag

SEQ ID NO: 29929 - RNA, 64 nt, Homo sapiens
gcccccagaaccgcccaaccgcacggcaccccacacgacagacaacaacaggcaggaccccagg

SEQ ID NO: 29930 - RNA, 77 nt, Homo sapiens
cgcccagaacggcccagcaccccagcggccaccgcgggagaacacaaggccagcaccggaaagaaacccacccagcc

SEQ ID NO: 29931 - RNA, 107 nt, Homo sapiens
gccaacagcacagaggggggcggcccaccccggccggcccagcccccgcagcgggaacagagccgcccgagggcacagaagaaaggaaagagccacaaggacccgga

SEQ ID NO: 29932 - RNA, 88 nt, Homo sapiens
gagaggaaggaggcagaggaaagcgagaagaaggccaaacacagcacgacggcaccgagcgagcgaggaccgggcaagcggaaagccg

SEQ ID NO: 29933 - RNA, 77 nt, Homo sapiens
agaagagaaagcagcagcacccaaaccggggagaaggacggggcgaggacgcaaccaccaccgacccgagccagccc

SEQ ID NO: 29934 - RNA, 82 nt, Homo sapiens
gacgaagagggaagacaagggggaagacccagaaggacacacacagcaaggagcaggaggagaagaaaccccaagaccagag

SEQ ID NO: 29935 - RNA, 80 nt, Homo sapiens
aagaaacacgcaggagacgaggcaagcaccagcaagaggaggaacgacgagaagagaggaagagagagacgcaacggaga

SEQ ID NO: 29936 - RNA, 76 nt, Homo sapiens
ccccgccagcagccgccggagccagccaacgagcgaccaggggagcaacccaccaacaaacagcggggaagcggac

SEQ ID NO: 29937 - RNA, 70 nt, Homo sapiens
agcaaaagaaagggcacacaccagaccacagaagaaagggccggaaaaagaaccaagagggagacaaggg

SEQ ID NO: 29938 - RNA, 71 nt, Homo sapiens
gacacgggccaagggagcgaaaagaacccccaaaagggaacgccacacagaccagaccccaacagcagaca

SEQ ID NO: 29939 - RNA, 71 nt, Homo sapiens
agcagcgagccgcagcagccacccacgagcccggcaaaagcgcacaaacgcccaagggcgggggaaagagg

SEQ ID NO: 29940 - RNA, 76 nt, Homo sapiens
accaggaagagaaagagaaaggacaagcaggaacccccaggaccaaccggagaagaagcggaggaaggcaagcaaa

SEQ ID NO: 29941 - RNA, 57 nt, Homo sapiens
gggccggaaaagccaacgccggcgaaggaaacaggaacacgaaagaggaaaaacgca

SEQ ID NO: 29942 - RNA, 85 nt, Homo sapiens
gcaccagagaagaggaggaagaaggcgagaagcacagggggcaggcccaaaggaaagccacaaagaacacgagagacaggaagcc

SEQ ID NO: 29943 - RNA, 105 nt, Homo sapiens
gcgcagccaggccgagaaccccagcggagaaccaccgcacaagagccaagaacaagggccgcgagggaaacgaccaaagcaaaaaaaaggccagaggacaggccg

SEQ ID NO: 29944 - RNA, 80 nt, Homo sapiens
ccgcacgcccgggaagcgcgcaccgccaagcaggccgaaaacagaagagcggagaagcaggcaaaacagcgggggaagaa

SEQ ID NO: 29945 - RNA, 73 nt, Homo sapiens
cccagcgcccaagaaaagacagaagagaaagggggggcgacgcgacaaagacagggcgaaggagcgggcgcgc

SEQ ID NO: 29946 - RNA, 75 nt, Homo sapiens
agagaccaggacgcaggacagcgggaaaagcaaccgagggaaagagagagcgccgggaagagaggccggccaacc

SEQ ID NO: 29947 - RNA, 76 nt, Homo sapiens
agcagaagaggcagcacaagccaacgaggaacaaccacacccggacgaacaccacgacgaaaggaaaagaagagac

SEQ ID NO: 29948 - RNA, 71 nt, Homo sapiens
gcgccgggaccaacaggggcaagacaagccagaacgagaagcgcaccacagacgggcggacaaaaaaaaaa

SEQ ID NO: 29949 - RNA, 72 nt, Homo sapiens
gagcgagggaggagagagggagagccaaagaagggcgaaaagccccaagaaagcccaggacgggccaagaga

SEQ ID NO: 29950 - RNA, 82 nt, Homo sapiens
aaccaagaagaagaaaggcaaaccagacggggacccgccacggaaacgacgagaggacagaaaggccaccacagccagaagg

SEQ ID NO: 29951 - RNA, 48 nt, Homo sapiens
cacaggagaaccccgcccaggaggcaaaaagggagggaacgacaaccc

SEQ ID NO: 29952 - RNA, 78 nt, Homo sapiens
cgcaccccaaggcagcagccggacccagcacggcagcggacgggcagccggggcagaccccccccacggcacccccgc

SEQ ID NO: 29953 - RNA, 64 nt, Homo sapiens
gagcgaggacgccggcagacggagccaccaccaccccgagagacggaccggaccacccccaggc

SEQ ID NO: 29954 - RNA, 76 nt, Homo sapiens
ggaaaggcgccacaaagaagaggagagaagagaggacccacagacgacacaaaacagacagaccaggcaggacagg

SEQ ID NO: 29955 - RNA, 68 nt, Homo sapiens
caaggagagaacgcgagggaagaagacaaacagaccccagaaagaagaagaggaaagcccgacaagga

SEQ ID NO: 29956 - RNA, 78 nt, Homo sapiens
agggggaaaggccggacggcccaaagaggagggcgcacagcgcccgaggacaggggaacaaacagagcaccaagaaag

SEQ ID NO: 29957 - RNA, 71 nt, Homo sapiens
cacaaaccccagaagaccccaggacagaagccacgacaagggacccgaggcggaggagggcgcgagcgcag

SEQ ID NO: 29958 - RNA, 54 nt, Homo sapiens
gaaaggagggaaaaaggaagcccgccaaagaaacagcaaggaaaaaaaccccaa

SEQ ID NO: 29959 - RNA, 71 nt, Homo sapiens
gaccgggaaagaggagacaaaccccagacgcgccggagggccaggaaccgggaaaacagaagcacaaaaaa

SEQ ID NO: 29960 - RNA, 67 nt, Homo sapiens
aagaagacaggcacgaaacccgaaaagcagaaaacgcccaaaccagagaaacccgcaaagaagcgag

SEQ ID NO: 29961 - RNA, 67 nt, Homo sapiens
aggaaacagaacaggggagagcggagcgaagcgaacaaaaagcagcaaaccggaccaccccgaagaa

SEQ ID NO: 29962 - RNA, 86 nt, Homo sapiens
ggccgggcgggccgcgggagccgcacgcggcgaaggaagaggagggcaagaagggcaagaaggaaaagcgcacgaggagcaggaac

SEQ ID NO: 29963 - RNA, 60 nt, Homo sapiens
gagcacgaggacaggccccgacgaggacaagggacggaaacagacgacgacacggacagg

SEQ ID NO: 29964 - RNA, 80 nt, Homo sapiens
ggcaggaaagccagccggcgagagcaggaacaagcagaaagcacgaacaacgagaacaagacacgagcaaaccccaccga

SEQ ID NO: 29965 - RNA, 84 nt, Homo sapiens
cgcgggccgaccccagagcggcgcggacaggaacacagcacccacccacacccacacccgcgacgggagggaggagccggccag

SEQ ID NO: 29966 - RNA, 80 nt, Homo sapiens
gggacagcggaagaaacgcacacgaagaacaagaaaaagcacaagagcaccaacgaggagcagcccgacggccaggaggc

SEQ ID NO: 29967 - RNA, 76 nt, Homo sapiens
ccacgggccgagacacgcagcggcggccagggaccagcacccgaagagagacccagagaaggccgcaggcgccgcg

SEQ ID NO: 29968 - RNA, 77 nt, Homo sapiens
ggcccagcaagagaaaagagcagacgccacggggccgcgccaagccagagggaagcaaaaaaagccaacggacccca

SEQ ID NO: 29969 - RNA, 74 nt, Homo sapiens
cgcacgaggcggcacaagggcccgcgcgcgggggcgggacccacaccagaagggagggcaggggcaccacggag

SEQ ID NO: 29970 - RNA, 94 nt, Homo sapiens
cgagacccagggaggcaggaaaggggagaacggagggggacaccagaccgggggcccacaaaccaacaacgaaaaaaggggacaacaccccagc

SEQ ID NO: 29971 - RNA, 78 nt, Homo sapiens
cgcaaaaaaaccacccccagagaggggcggaaaacaaaaggggggagcaaacaggaggaagaaaaaaacagggcacgg

SEQ ID NO: 29972 - RNA, 57 nt, Homo sapiens
cccacgccggcaaaccggaaacagggcgaagcccaaggagccacagagccccaagcc

SEQ ID NO: 29973 - RNA, 65 nt, Homo sapiens
gggagaaggcgcaacgcggcgcggacccccggacagccaacaccaaagccgcgggcacagcggcc

SEQ ID NO: 29974 - RNA, 76 nt, Homo sapiens
acggaaggacacagagccaacccagaagagccaaggacaagaggacccgccggggagaggagggaagaggaagcgg

SEQ ID NO: 29975 - RNA, 81 nt, Homo sapiens
acggcagaggcacccgagagggggacgagacagagcggggcaggcccagagaggcggacccacggggagacaccgggccag

SEQ ID NO: 29976 - RNA, 80 nt, Homo sapiens
gggaaaccaggaagaccgggagcccacgcgcagagagcccggagaggacgacaggggacgggggaggacaggagacagga

SEQ ID NO: 29977 - RNA, 80 nt, Homo sapiens
caaagcgccaaagaaaagccagaaggggggagaacgaggagagcagacagaagaaaaacaccgacagcaaaaaacaacga

SEQ ID NO: 29978 - RNA, 59 nt, Homo sapiens
gcgacaagaaaacgaaacacgcgaaaccaaggggaaagaccaggagcaggccaagggcg

SEQ ID NO: 29979 - RNA, 73 nt, Homo sapiens
ccagcccccgggggggcccgagacacagggaaaggaggcgcaccgaggaaggaggaacagaagaaacagggcg

SEQ ID NO: 29980 - RNA, 54 nt, Homo sapiens
cgggacaccagggcagcaaagaggaaaagcagccaagcaccacaggacgggcgc

SEQ ID NO: 29981 - RNA, 83 nt, Homo sapiens
acacgaagcgggaacaggcaggcacagaaaggcggaccaggcaggaagaagaggaggggcagaagacgaagcaaggaagccag

SEQ ID NO: 29982 - RNA, 82 nt, Homo sapiens
caggaacgggacaggaagagaggccccccaaagcaccgcgcagaacagcgccgagaaaggaaagccgccaagccagcggccc

SEQ ID NO: 29983 - RNA, 68 nt, Homo sapiens
ggccaccagggacaccagagcgacgcacacaacaccaaggccacaaacaacccccaccacgccaagag

SEQ ID NO: 29984 - RNA, 75 nt, Homo sapiens
acggggcaggccaagcccgggagacggaccaggaggcaaggaaaaccaacggcccggaggaccacagcccagggg

SEQ ID NO: 29985 - RNA, 80 nt, Homo sapiens
cacggcaacgaaaagcgacagccaacgagccggcagcgcccgagggagcaaggagaagagcggaacccagaccgcgcccg

SEQ ID NO: 29986 - RNA, 80 nt, Homo sapiens
cgcagggcgccaaagcgagagagggaagcgcccggcccaaagcagcccgaggaggcacgcaaaacaacagggggcaaaca

SEQ ID NO: 29987 - RNA, 65 nt, Homo sapiens
acaacaagagggcacgcaccgaggacgccgccagccaccggcgcgaagccagaccagaccagcag

SEQ ID NO: 29988 - RNA, 87 nt, Homo sapiens
aaaaggggcccgggaggggaaaaaccagagacccccgaagacgaaccaaaggcaagaaccggagcaggagaaaagccggaaagaaaa

SEQ ID NO: 29989 - RNA, 98 nt, Homo sapiens
ggaccacagggagaggggccccaaacggcgggcggcagggggacaccgcggagcccaggacacagaggcgaacagccgccccgcacgggaaaagcgcg

SEQ ID NO: 29990 - RNA, 78 nt, Homo sapiens
ggaaggcagacaagcagcgcaagcgacgacagacccacaagcgccgccagggcgcgggagccacgcagccacagcccc

SEQ ID NO: 29991 - RNA, 72 nt, Homo sapiens
ccaggcagcgggcggcgccagcggagaacagcccgaccacgaagagcaaagacaggaccgagagagagccgc

SEQ ID NO: 29992 - RNA, 87 nt, Homo sapiens
cgcacaaagcagccaacagaagaggaagcagcgaccacgccacaccacagcagcagaagaaagaaaggagaagggccaagccacacc

SEQ ID NO: 29993 - RNA, 75 nt, Homo sapiens
ccccgagagcgggaacaggcacccgccaccacgcccaggaaaaacggaaggggaggcaaaaaagcgaaagaaggc

SEQ ID NO: 29994 - RNA, 76 nt, Homo sapiens
ggagacaaacgcacccaccaagcccacgggcaacaagcgacaggagccaagaaccagaggcaggaagaagaaaaac

SEQ ID NO: 29995 - RNA, 81 nt, Homo sapiens
ggccggccacgcacagcaagcagccaacaccccacccaggaacggcccggagacaaaagaccagaagcagcaaggcagcaa

SEQ ID NO: 29996 - RNA, 66 nt, Homo sapiens
agccgaggaaaacaggggcccaggagggaaggcagcccggaggcggggcggggaggaggaccagga

SEQ ID NO: 29997 - RNA, 73 nt, Homo sapiens
cagacaccaagagcggacaccagcaccagacgcagcaggagacagggggcccccccccgagcccagaagacgc

SEQ ID NO: 29998 - RNA, 71 nt, Homo sapiens
gcccgcaccagccacccacggcagacggcacgcagccgcagaacaccaaggaaccagggcggggaggggcg

SEQ ID NO: 29999 - RNA, 83 nt, Homo sapiens
agcccagcccaggcacgggcacaagcggggggcagcccccgccggcaccaggggacaagacacgaagccggagcggcagaaag

SEQ ID NO: 30000 - RNA, 75 nt, Homo sapiens
cagagagaagaaaacaggagccccagcgccaccgccgaccgaagccgcaaaagacgccaggaaagcaggcagagc

SEQ ID NO: 30001 - RNA, 68 nt, Homo sapiens
gcgagcaaaacagagagagaacgacgagaagcaccacgcaggccgcacaccagaggacgggaacccag

SEQ ID NO: 30002 - RNA, 74 nt, Homo sapiens
gaacacgcaggagggacggcggaaaacccgaagcagaagcccgacacaggcacaagaccgagcaggcacagagc

SEQ ID NO: 30003 - RNA, 70 nt, Homo sapiens
agcgaacaccacagggggaacaggccaccgcaggagccacagaagcaaaggcacagcaaaaccgaaaaag

SEQ ID NO: 30004 - RNA, 72 nt, Homo sapiens
cagcagcacgagagaacaaaaaaacaacaccgcgaaagcaccaggacaaaagaagggcagcacaaaggaaag

SEQ ID NO: 30005 - RNA, 59 nt, Homo sapiens
aaaagggagcgccccccaagggcaccagagaccagcaggccaagagacgaagcccgaac

SEQ ID NO: 30006 - RNA, 62 nt, Homo sapiens
acagaagccccaggaggccccggccacgccacagaccacaggaaaggaacagaggacgacac

SEQ ID NO: 30007 - RNA, 39 nt, Homo sapiens
cccaaaccggcaaggcggaggaccagggcccgaggcaag

SEQ ID NO: 30008 - RNA, 79 nt, Homo sapiens
cgcgggggaagacgcgcgggcgcgcacgcgagaacaagaacgacaagcacacaccaccgcagagcggcacaccacacac

SEQ ID NO: 30009 - RNA, 68 nt, Homo sapiens
acccacagagcaaaagcaagaagacggcaagcccaaaagagccgacaggggagccggggagggcagga

SEQ ID NO: 30010 - RNA, 71 nt, Homo sapiens
cagggccggggaagcaccaaaggccggaggcaccacaacacggagaccaaagaggaaggggaccaacacag

SEQ ID NO: 30011 - RNA, 76 nt, Homo sapiens
gcccccccccccccacccccggcccgggagcccccgcccggaggaaacaaggacaagcccgcggccagcaaccagg

SEQ ID NO: 30012 - RNA, 53 nt, Homo sapiens
gcgacgccaaccacgacgaagcggaaggcagaagacagggcgggaccaccagg

SEQ ID NO: 30013 - RNA, 85 nt, Homo sapiens
gagaggagagaacgagcggagacagagaggcaagagaaagccgggcaccgacaaccgggccagaggcagcggaggcacagaccaa

SEQ ID NO: 30014 - RNA, 66 nt, Homo sapiens
ggaagggagaagaccaaagggaagagaaacgcaaccgcgggaccagcaccgccgaagggaacagcc

SEQ ID NO: 30015 - RNA, 70 nt, Homo sapiens
gcggggcagcccagaccagcccaaacccacggaacagccacacacagagagacccagagaccaacggaga

SEQ ID NO: 30016 - RNA, 72 nt, Homo sapiens
ggggaggggggggagagccagcggcggagaaaccaccacaaacacgaggccagcaacgaccaacaagacaga

SEQ ID NO: 30017 - RNA, 76 nt, Homo sapiens
gacaacggggagaggccggggcgcaccgcgccacgaaggaagacccggagcaggcacaacaccgggaaaagccgcc

SEQ ID NO: 30018 - RNA, 73 nt, Homo sapiens
aggagcaggacgcagaaccaccaaaagccaagaaacggcacccggaaacaagccacgaaggagagaaaaccag

SEQ ID NO: 30019 - RNA, 61 nt, Homo sapiens
aaaaacggagcagaaaggaggccagcaagaacacgagaaccaagcagaaggaagaagcgaa

SEQ ID NO: 30020 - RNA, 75 nt, Homo sapiens
cagaaggaggccaccggggacaacaccgggcccgcgggagagcaagggaaagggcccaacgcgcaggccacgggc

SEQ ID NO: 30021 - RNA, 59 nt, Homo sapiens
cgcaaggagaaacccaagagcagcggcaggccccgacaagcccaccaggcccccgcgag

SEQ ID NO: 30022 - RNA, 38 nt, Homo sapiens
ggaaacgggaccagaggagcgcccacagaggaggggca

SEQ ID NO: 30023 - RNA, 62 nt, Homo sapiens
aggagcaagagcaagacaccggacaccgagggcccccaaaaggaagaggagacccagaacgg

SEQ ID NO: 30024 - RNA, 63 nt, Homo sapiens
aacgaagacaccacaggaaacaaaggcgacaggcagagcggaaacaccccccaccccgaaccc

SEQ ID NO: 30025 - RNA, 74 nt, Homo sapiens
gcaacgcgagcgggacgcgggcagcagcaggccggcgcaagacgcgagcaaaaagagaaaacaaagaagcaaag

SEQ ID NO: 30026 - RNA, 77 nt, Homo sapiens
gggacgcggaccccagaggggccccgcaggggcagacacggcccagaaccgaccggaccccagaggccgcgggcggg

SEQ ID NO: 30027 - RNA, 74 nt, Homo sapiens
gccaaacgggagccccgaaccaagggaccgaaagacaacaacgcagagaagaacgccggccaacggaagcggag

SEQ ID NO: 30028 - RNA, 61 nt, Homo sapiens
aggaagagggcgggaaggcaggaaagcaggaccggcacgcgccggcagggcgaaggcaggc

SEQ ID NO: 30029 - RNA, 70 nt, Homo sapiens
ggaaaacggcgggaaaccgggacggacgccgcccgaacacacccgagcccaccgccgcagcacaccccca

SEQ ID NO: 30030 - RNA, 73 nt, Homo sapiens
agcccccacacaaaaaaagggccaggaacaggcgcccaaagcgacccaaaggaccaagaagagaagcagaaag

SEQ ID NO: 30031 - RNA, 57 nt, Homo sapiens
gggcgggcaggcccacacaggagccgggcgcgagcagcgcgagaagacccccaggac

SEQ ID NO: 30032 - RNA, 90 nt, Homo sapiens
accggaggaggaggccacacagaaggacggcccgacggaaggaccgaaggagaagaaggagaaggggaggagaaggcaagccggaaagag

SEQ ID NO: 30033 - RNA, 77 nt, Homo sapiens
aagacccaagggcaagccaagaaaaggagaaggagacaccagagggcagaagcagcgcagcaggcggagaggcgggc

SEQ ID NO: 30034 - RNA, 85 nt, Homo sapiens
gcgaccccagcgggcccggggaggcaccgacgaggagccggccccaaagacgggaaagcacgccaccaaagccacggcacaggga

SEQ ID NO: 30035 - RNA, 72 nt, Homo sapiens
cgcggcccgcacagcggcgcgcgccacgccgcgccacccgccaggcacgcccgaagcgccagagccggggcc

SEQ ID NO: 30036 - RNA, 78 nt, Homo sapiens
acgaccccgaaggagagaccgccaagcccaagagaagcaagaacacacacccggacaagaggaaaagaaaggaaacaa

SEQ ID NO: 30037 - RNA, 66 nt, Homo sapiens
cccaaggaggcccagcgcgagacgacgggaccgaaggaccccgccagagacaaccgagcgccagga

SEQ ID NO: 30038 - RNA, 77 nt, Homo sapiens
agagacaggagcgacccaaccgaggagaggaggaagggaagcggagaccgcaagcagagcgacaagcaacgcaaaaa

SEQ ID NO: 30039 - RNA, 42 nt, Homo sapiens
ggcgcgcgacccccgcgcagcccaaccacgaagaagaagcga

SEQ ID NO: 30040 - RNA, 75 nt, Homo sapiens
gggcgcggcaaaagcgacgggagcagccggacgaaggaagagacccgaagcgaaaccccgaccgacacccaagga

SEQ ID NO: 30041 - RNA, 105 nt, Homo sapiens
gacaggccacccagcggggagcacggcgagcagccaggccaggagagcacgcaccccgcgccgccgccccccaccaaggaagcccaagccccaccagacccgacg

SEQ ID NO: 30042 - RNA, 110 nt, Homo sapiens
agcgagacaacgagaagagaccaaaacaaaaaggagccagcagcgcgggaacagccaaaaaccagcggccaaagcgccccagggccgccggaccgaagcacgcaaaaggg

SEQ ID NO: 30043 - RNA, 65 nt, Homo sapiens
ccccgcccccaccagacgagccccgccggaacggacccacaggcagagccagaaaccacaaagga

SEQ ID NO: 30044 - RNA, 71 nt, Homo sapiens
aaagaagaacaacgggcacccacaacagaagacagccggcaaccaagaagaaaagagggacacgcgaagag

SEQ ID NO: 30045 - RNA, 86 nt, Homo sapiens
ggcggccgcggcgcggcgggaccaggagccagagcgcagccccggcgccggcggcgggaccgcggaccgaagaagagccgaaacgc

SEQ ID NO: 30046 - RNA, 82 nt, Homo sapiens
ggaccggaggccacagcaggacaccccgggcacgccacgccccaagacaaagcagagcccacagacaaggccaaaggcaaag

SEQ ID NO: 30047 - RNA, 76 nt, Homo sapiens
gcggacacggggcaacgcgcaaagaaggcaaagaaccaaaggaacagagagcggcacagaagaacagcagccaagg

SEQ ID NO: 30048 - RNA, 55 nt, Homo sapiens
cacggccaacaggaagaaaggaaaaccaaggagaggacacgccagcagggggaag

SEQ ID NO: 30049 - RNA, 73 nt, Homo sapiens
cgaagccgcccagcggggagaggccccgcaacacggcccccgacccaacaggaggcgagcagggcacaagaca

SEQ ID NO: 30050 - RNA, 78 nt, Homo sapiens
aagacaacaaaagaagaagaggggagaagacgaggagccagagggccaaggaaaaggaacagagagagcagaaccgaa

SEQ ID NO: 30051 - RNA, 53 nt, Homo sapiens
ccggcccagcaccccgagaaccgcaggagccagaggcccgccgcgcgaggcgc

SEQ ID NO: 30052 - RNA, 79 nt, Homo sapiens
cacaccacagcagcgaagcagggggaggacaagcggcccacgaagaaacaggacgagaagaggccccccaaaggacaca

SEQ ID NO: 30053 - RNA, 74 nt, Homo sapiens
gagcccccggcgcagcggggggaggaaggcaccaaacggacacaaaaacaccagaggccgaaaaaaaggaagag

SEQ ID NO: 30054 - RNA, 75 nt, Homo sapiens
cagagccacgggggcagcgccgaaccaggaccggacccggacccaaaggccagcaagcacaggagggcagaccaa

SEQ ID NO: 30055 - RNA, 75 nt, Homo sapiens
gaacccaggacgggggccacagcaacgggggggggaggggcgaccccggggcccggccagcacgaccgaggaggg

SEQ ID NO: 30056 - RNA, 121 nt, Homo sapiens
gggaggggggcgcggggccacggcggccgaggagaggcagggcgcgagggcgggggcagcggcagcccagaaaggaccggaggaacagcacccaaaacacggaccgcggggggcccaacag

SEQ ID NO: 30057 - RNA, 80 nt, Homo sapiens
aaccagccccaacacgcgggcaccgaggcgggccggcaacaggagaaccgaaagcaggggagcagacaaggggcccaagc

SEQ ID NO: 30058 - RNA, 53 nt, Homo sapiens
gcggccgccccgcgggggacggaccacagaaacggacaacggacagaaccaaa

SEQ ID NO: 30059 - RNA, 74 nt, Homo sapiens
gaggcaaacaagcccaacggagaagcggaggagaccaaggaggccaccaccacagaaggagcggcacggagcgg

SEQ ID NO: 30060 - RNA, 75 nt, Homo sapiens
aaagggccaaagaagggagagagaaagaccacacagggaaacgaccagggagagaccaacaggaaccacagcggc

SEQ ID NO: 30061 - RNA, 56 nt, Homo sapiens
aaggagcagacaacggacagagaagccgaacgggaaccagcagaaaacaagcggac

SEQ ID NO: 30062 - RNA, 65 nt, Homo sapiens
gccgaacccgaaaggagggaacggaagcaaccagaccccgcaagggaccaaagaaagcccgccgg

SEQ ID NO: 30063 - RNA, 75 nt, Homo sapiens
gccgccgcgaccgagagcgcgggccgcagacgggggaccgccgccgcccagagaacccccggcccagacagcaag

SEQ ID NO: 30064 - RNA, 79 nt, Homo sapiens
gcgagggggggagggccggcggggaccgccgggagcgcgcggagcgggccggggccagggacacagagccacaaaagag

SEQ ID NO: 30065 - RNA, 65 nt, Homo sapiens
gccagggcgcaggggagaaacaaggcgccggagcagagacaccaggcgccgagaaggccagcaga

SEQ ID NO: 30066 - RNA, 82 nt, Homo sapiens
cgccgggcggcggcgccgcgcggcacacaaagagggggcagagagccaaacgacaacccagaagccagggccacgggcaccc

SEQ ID NO: 30067 - RNA, 77 nt, Homo sapiens
aggccaggcgacacacagcgagccagccccagcgccgggcgcaggagaaggggagcgagaccagccccacaccaagc

SEQ ID NO: 30068 - RNA, 64 nt, Homo sapiens
caccacaacacgcccgaaccgagcggggggaacgaggcagaagccccagaggagcccgaaaccc

SEQ ID NO: 30069 - RNA, 75 nt, Homo sapiens
gaggaggccgccagcagaggcggagcccgcagaccgcagaaggccggagacaccagcaggaaaagggggccagga

SEQ ID NO: 30070 - RNA, 76 nt, Homo sapiens
gcggaccgcgggcgcccacgaccaggccgggaaacgaacaagggcggagggaggaccagcgcgagcgaaggaaaag

SEQ ID NO: 30071 - RNA, 70 nt, Homo sapiens
ccaacagaggagcagaggaaacgagaccagaccgcaaagccggacacagagccacaaaagaggaaacaaa

SEQ ID NO: 30072 - RNA, 80 nt, Homo sapiens
aggagcggaaaacacgggccaacacggcgcgaaagccagggaaggaagaaaacaccggagcccaagacaccaaaacagac

SEQ ID NO: 30073 - RNA, 79 nt, Homo sapiens
cgccgccagacccacgcggccggaagccggcccaaagacaacaggcccccccgccccccgcggagccccgcccagcacc

SEQ ID NO: 30074 - RNA, 64 nt, Homo sapiens
cgaacaaaccaaagaggcgacacggcaagagagcccaaggccgcaacaggcgcacaaaagagca

SEQ ID NO: 30075 - RNA, 73 nt, Homo sapiens
ggacacggacaaggaagggcgaggaaaggaagggcaaagcaccgcaccccaggagacgccggggaggcaagac

SEQ ID NO: 30076 - RNA, 74 nt, Homo sapiens
aggaaagggcacaaggaaggcaagaaaccaggaacgagacaaaagaagcgcacgagaaacgagggcgaagccaa

SEQ ID NO: 30077 - RNA, 81 nt, Homo sapiens
gcaccccgacgccgaggaacgagagcgcgaagcaaggaacggaaaacagccccaaagcagcagaccgaagaaagaagaccc

SEQ ID NO: 30078 - RNA, 52 nt, Homo sapiens
cgaccgagcaacccacagcaccgcagcacaaggaaaacgagagaaacgaagg

SEQ ID NO: 30079 - RNA, 69 nt, Homo sapiens
cgcacgccaaaacggaagcccgccggcgccgaaagagcggcgccaccccgggagaaggcgaccgagacg

SEQ ID NO: 30080 - RNA, 72 nt, Homo sapiens
gcgggggcaggcggagaaggagacaccggaggacgaagagggggagaacgcgcaaagagggcgccaggacaa

SEQ ID NO: 30081 - RNA, 80 nt, Homo sapiens
aggcggcgggaggcgcgaggcccgaggggcggcccaggaccgaggggaaagaggcacaaaacacaacacacaagaagagc

SEQ ID NO: 30082 - RNA, 67 nt, Homo sapiens
agcaacgcggcgcgaacaaggaacgaaacgcggccacgaaggacgaccggcccgcgcaacgccgcga

SEQ ID NO: 30083 - RNA, 54 nt, Homo sapiens
cggggaacgcacaacggcaaaagagcgagccacacgaaaaacaaaaacgcaagg

SEQ ID NO: 30084 - RNA, 75 nt, Homo sapiens
cgccccaccgccccaggacagcaccagcgggccggaggagccagagcgcagaaaggagccgggcagagaaaagaa

SEQ ID NO: 30085 - RNA, 104 nt, Homo sapiens
gcgccccaacggggcggccgcgacccccggcaacccggagaaggcacagagcggccgcgccagcgacaaacagcgacggaagacaagacaccgggagggacccc

SEQ ID NO: 30086 - RNA, 70 nt, Homo sapiens
gaaaccccagaggaggcgggcccggagcaggcaagggcccgacccgaaaagcgcagccaaccagacgcgc

SEQ ID NO: 30087 - RNA, 73 nt, Homo sapiens
gacggaccgccaccagaaccacacggaaagagccagccccaagacgcgaagacggggggaccaggagaagaag

SEQ ID NO: 30088 - RNA, 103 nt, Homo sapiens
aagaacccaagaaaacaaaggcaccggggacgccaccggagaagggaggaaaaccaacaaggccgagaaacagacaacccacagaacaaagcggaccaaggca

SEQ ID NO: 30089 - RNA, 65 nt, Homo sapiens
aaagcagagagcaggaccaggcaggaccacgaaagcaaggcaagagagcaagaccccagaggaaa

SEQ ID NO: 30090 - RNA, 73 nt, Homo sapiens
gaggcggcccggggggaagaggccaccaacacggacggcagacagaaaaagcacagaaacgcggaacagagag

SEQ ID NO: 30091 - RNA, 89 nt, Homo sapiens
ggagcgggagccgccgccgccgccgccgccgccggagcaacccggggaccgagagcaggaccgaagagcaggcggggcggggaaggaga

SEQ ID NO: 30092 - RNA, 51 nt, Homo sapiens
gggagacaacccccgaaggaggggggaagaggagccggagggcaaagcaag

SEQ ID NO: 30093 - RNA, 75 nt, Homo sapiens
cgacacagccacaagaaggcagcaaaccaagcaaccagcaaagagaaaccaaccggaaaggagaaaacaaaccga

SEQ ID NO: 30094 - RNA, 69 nt, Homo sapiens
ccaagcaaaagcacagccaaacaaccaaggaaaagaagaaaaggaagcacagccaacaaaaacgagaaa

SEQ ID NO: 30095 - RNA, 72 nt, Homo sapiens
aacaggagagcgcgaaacaggcggaccacacgaagggaggcaagcaggggggcaaaggaaagaaggcagaaa

SEQ ID NO: 30096 - RNA, 67 nt, Homo sapiens
ccagcaaggccagcacagccccgcgacaaccagaccgggagaagacaggaagaccggaaggccagag

SEQ ID NO: 30097 - RNA, 79 nt, Homo sapiens
gccgcgaccccagccggcgccgagggcggaaccgagcgggaaaagggcaagaagaaaccagggacccagccaccggaaa

SEQ ID NO: 30098 - RNA, 73 nt, Homo sapiens
cggcgggcgggaccccagggcaaagcagacggaggaggaagcgcgggaaggaagaaagaggaaagcgggcagc

SEQ ID NO: 30099 - RNA, 81 nt, Homo sapiens
cgaagcccagggaggccaccaggaaaacggacgagaacaagcggaaaacaggggcgaggggacaaggagaagaaagggagc

SEQ ID NO: 30100 - RNA, 72 nt, Homo sapiens
gccgcggacagagaagaggacgcggagacaagagggaggccaggggggggcgccggaagcccccgccaggga

SEQ ID NO: 30101 - RNA, 73 nt, Homo sapiens
aaaaccaaaccgggcccaccccagagcacaaaagacacaggaggcagagaagcggagaagaccacagaaaaac

SEQ ID NO: 30102 - RNA, 83 nt, Homo sapiens
aaggaaaaacgaaaacaccaccaggcacccagccacaaaagaagacccaaagcaccaacaaaaagcaacgagaacaaggacaa

SEQ ID NO: 30103 - RNA, 77 nt, Homo sapiens
ggcggggcggacacgggcggcgcggaagggagcgccagcaggccgggcgcaggaaccgagaggagggaggacaggca

SEQ ID NO: 30104 - RNA, 95 nt, Homo sapiens
agaggcgggagagggaggagcccagaccgggcgacccgccggaaggggaccagcgccccaggacacacagcagcaaagaaaccgaagacaggacc

SEQ ID NO: 30105 - RNA, 68 nt, Homo sapiens
acagagaaccaagcggcaaagcaccgaacgccaagagccggccaagacagagcggcagggccggaggc

SEQ ID NO: 30106 - RNA, 53 nt, Homo sapiens
accaagagagggggaggagcgggcaggaagcgcacggggaggccaggacggac

SEQ ID NO: 30107 - RNA, 53 nt, Homo sapiens
gccggcgagcgcagcgcgaccgggaggcccagaaaggaacaggaagcagaagc

SEQ ID NO: 30108 - RNA, 80 nt, Homo sapiens
agaaacaagaggaagcagggggccagagggaaagcagaggggagcgaaagccacaccagacaaacaaccacccagcagag

SEQ ID NO: 30109 - RNA, 72 nt, Homo sapiens
ggcaccaggagcacgcgacagcgaggaagcgcaccacagcacaaaagggaagggaccacagaccagcacgcc

SEQ ID NO: 30110 - RNA, 104 nt, Homo sapiens
aagaggaaacaagcgggagaggcaaccggaagagaccgccacagaaacgaaaaagacgggaggaaacaacagccagagaaccaagcaccagccaccagcccaaa

SEQ ID NO: 30111 - RNA, 70 nt, Homo sapiens
caaccaaagacagacacggaccaccagagaggaggagcaagacagagagagacgacccggagacgcggag

SEQ ID NO: 30112 - RNA, 74 nt, Homo sapiens
ggaagggagcgccagcaggccgggcgcagccccagagaaagaaagcccaagaggagaaggagaggagaagagaa

SEQ ID NO: 30113 - RNA, 78 nt, Homo sapiens
cgcggaggccccccggccccaccccaaggaccccagccaccagccccggcagggcggcagcaaaaccaaaccgcagac

SEQ ID NO: 30114 - RNA, 85 nt, Homo sapiens
ggcgcgaaggagcgaccgcgccggcagcgccgcgaaggcgggccgggccagcccccgccgcccgggagcgagggcagaaagggcc

SEQ ID NO: 30115 - RNA, 76 nt, Homo sapiens
ccagaacgaaaagcgccagaaagagcgggaacagcccacggcgaccagggccaggccaaggagggcgcccaagacc

SEQ ID NO: 30116 - RNA, 72 nt, Homo sapiens
agcacgaaaccaagacagggagcccacacccaaagcgaaaggacaagggacgacagcaacaggcacaaagac

SEQ ID NO: 30117 - RNA, 77 nt, Homo sapiens
gccggggcagcggggccggaggaaagagccacccacggaaccaaccggacaccccccaggcacagccacaccccagc

SEQ ID NO: 30118 - RNA, 76 nt, Homo sapiens
gggacggcacagggaggccagccggagaagcgagcagcggcgacacaaggccaacggacacacgggcagcgcccga

SEQ ID NO: 30119 - RNA, 70 nt, Homo sapiens
caacccaggcaggccgggaccagcagaacaagagccagcaaagaacagcagcagacagagcgcccggccc

SEQ ID NO: 30120 - RNA, 76 nt, Homo sapiens
cggagcggagaacaggaaacgaggaaaggaaaccacaaacaccgggcagaagcggaaccaccaggagacaaggagg

SEQ ID NO: 30121 - RNA, 71 nt, Homo sapiens
gacaggcaggaaacccaaacccaggaggacaaacaggaagaccggacacagcgacccaagccagggaaaaa

SEQ ID NO: 30122 - RNA, 84 nt, Homo sapiens
cgacggggcggcccggagccggcgcgaaccggcccccgcagcgggacccgggaaggaagaccgggaggaacagagaaaagaacc

SEQ ID NO: 30123 - RNA, 83 nt, Homo sapiens
gcgcagcgccgaaacgggccggccagcagcaccagggcccagacagaccgaagcaaccaaccagggcacccagccggaggggg

SEQ ID NO: 30124 - RNA, 82 nt, Homo sapiens
agccccaaagcgagcgaagcagggcgccgccacgccgcaggaggcggagaggggaaagaaaaagagcccaccaaaaggaaca

SEQ ID NO: 30125 - RNA, 60 nt, Homo sapiens
cgggagaaggaccacgcaggccaccgggagggcagaggccagcacaaccacgagaagggc

SEQ ID NO: 30126 - RNA, 77 nt, Homo sapiens
gggaagcaccgagaccagaagaaagcccccgggcacaggaaaggcggcgagaagaggaggaacaagagccagagacc

SEQ ID NO: 30127 - RNA, 71 nt, Homo sapiens
gcccggggcccagcagcaggacgcacagcagacgcaaaccaaagagccagaaggaaaagccaaccgaaggg

SEQ ID NO: 30128 - RNA, 82 nt, Homo sapiens
cgcacagccccgacaaaaaaaagcagaaagcagaagaaaacgaggccaaaacagaaaaccaagagaggcccaagcaacagcc

SEQ ID NO: 30129 - RNA, 73 nt, Homo sapiens
gcaagcaaaacacgagcggcacaaaggcagcggcccaccagagagcgcccagcaagacagcaggggccgagac

SEQ ID NO: 30130 - RNA, 82 nt, Homo sapiens
acagagacccagagcgaggaacccgaggacccaaggagagggcccgcgcacagagccaccgcagaccgacagccaaggagcg

SEQ ID NO: 30131 - RNA, 76 nt, Homo sapiens
gggccgaaacacagagcaagcaggagagaaaccaagagaaaagggggaaaagaaacagcccagagaaccgcccgga

SEQ ID NO: 30132 - RNA, 77 nt, Homo sapiens
gaaaggagagcaccacacaagccaaaccaggccgaagggcgaagagaaaaaaggacaagaagaaaggaagagacgga

SEQ ID NO: 30133 - RNA, 53 nt, Homo sapiens
gcgaccgaggggagcggagcgggacggggaagccagaacaagcccaaccaaac

SEQ ID NO: 30134 - RNA, 74 nt, Homo sapiens
aaaaagaaagagagggacagcaaacagagaaacaagaggaacagaaaagaaccagggacaacagagaagacaac

SEQ ID NO: 30135 - RNA, 49 nt, Homo sapiens
aagcgggggggggaacagacagacccagacagacggcacgcccacagag

SEQ ID NO: 30136 - RNA, 80 nt, Homo sapiens
gagggaaccagcaacaagccaggaaacggaacgccaagcgaagaagaacgaaacggaagcacaaagcagcgcgagaaagc

SEQ ID NO: 30137 - RNA, 81 nt, Homo sapiens
gagggccgggccccacgacgcgggacgaagagccgaggagacaagaaggagaccggcgcacccacccgcgagacccccaag

SEQ ID NO: 30138 - RNA, 58 nt, Homo sapiens
aaaaccacaggagcagaggaaggagacaagaggagagaccgcacgcagggccacagca

SEQ ID NO: 30139 - RNA, 57 nt, Homo sapiens
gacagcgcaccccaagcccgggagcccaggagacggaagcggaagcacacgccagac

SEQ ID NO: 30140 - RNA, 78 nt, Homo sapiens
cggacccagggcccggcgaaggacccggccgaggcgggcgcaagagaaggcaccaagagccgccacaggaccaggcac

SEQ ID NO: 30141 - RNA, 73 nt, Homo sapiens
aaaaaagagcccgcaagaagaacagagacagcagccaaacccccaggggaaaacgacccccaggaaaaagaaa

SEQ ID NO: 30142 - RNA, 75 nt, Homo sapiens
agaaggacaacacgcggcagaggaacagaggagcggaaacgcaggaggagagagacggacccacgccaaaagaag

SEQ ID NO: 30143 - RNA, 39 nt, Homo sapiens
cccgcaccgcacagccgggagccgcacgcagaggggcgg

SEQ ID NO: 30144 - RNA, 52 nt, Homo sapiens
ggccggcaaccgcggcggaggcggacaagcccccaccgcgcacggcaccgga

SEQ ID NO: 30145 - RNA, 83 nt, Homo sapiens
aacccccaccaaaagccccaagaaccaccggaaccacaagaaggaaacggaacgccaagcgaagaagaacgaaacggaagcac

SEQ ID NO: 30146 - RNA, 100 nt, Homo sapiens
gagggggcagggaaggggggaccacagcgcggccgccagggaaaagagcaaacgagacccagggcaggccaggaacgcaagcgccgagacagccaagcaa

SEQ ID NO: 30147 - RNA, 59 nt, Homo sapiens
aagagcaagcgggggaccgaacaaggcaaaagggggcggagaacggaaaagcaccagga

SEQ ID NO: 30148 - RNA, 73 nt, Homo sapiens
ccagccgcgccaccacgcacgcacacgccggcgcgcgaccgcgcaaaacggccacggaaccgcccagccccaa

SEQ ID NO: 30149 - RNA, 77 nt, Homo sapiens
acggggaccaccgccccagcagacgcggaaggagcccacgaaagggccagcagcccccagaagaagccagaaagcca

SEQ ID NO: 30150 - RNA, 75 nt, Homo sapiens
cgccggcccccaacagcgccgaaggaaaagaacgcgcgagaaggggaagcaggagagacggcaaccggacaaaga

SEQ ID NO: 30151 - RNA, 58 nt, Homo sapiens
cacccagaggccagcacaacacgggcacagagagacccagcgacgagcaaaaggccaa

SEQ ID NO: 30152 - RNA, 73 nt, Homo sapiens
gcggccacccggggagacgcagacagcgggccggacggcccgcagaagcccccagaggccccgagcggagaag

SEQ ID NO: 30153 - RNA, 86 nt, Homo sapiens
cgcgcggcgcagcgacccggcgaagggagccgaccgggcccgggcggaggaaaaccccacgggcaagcgacggaagaaggggagcc

SEQ ID NO: 30154 - RNA, 32 nt, Homo sapiens
cgggaagccgcaaccagcaagacagagcccaa

SEQ ID NO: 30155 - RNA, 68 nt, Homo sapiens
gcacggccgaaacaagccgaccgagcagaacggccagccgcaggggagacgagcagcaggaaaggaac

SEQ ID NO: 30156 - RNA, 79 nt, Homo sapiens
cccgcgcccgccaggcgacaggggaacagacagaaggagcaggaaccaaaggaggggaacgagaagccacacgcagcca

SEQ ID NO: 30157 - RNA, 83 nt, Homo sapiens
gagccgaggagccagagcaaggggaacgccacggacggggaggaagaggaggagaacgggaaacaaaacaggaagaaagggga

SEQ ID NO: 30158 - RNA, 37 nt, Homo sapiens
gccaaacccaaaccggagccgaggccagagcagaaac

SEQ ID NO: 30159 - RNA, 75 nt, Homo sapiens
agcgaccggccggggccggccgggcgggcagggggaaagggaagaagacagcggcaccgaacaagacaaggcaac

SEQ ID NO: 30160 - RNA, 67 nt, Homo sapiens
gcaggcacccagagagcccagccccgagggaggcagggccaccgggacaccccgggagacgcagggc

SEQ ID NO: 30161 - RNA, 76 nt, Homo sapiens
cgccccgggcggccacgccccgcccccacagcccggcccgcgcggaaccccgccagcagaccgaaggaaaagaagc

SEQ ID NO: 30162 - RNA, 50 nt, Homo sapiens
aaggggaagaccaagaaggggcagaacaagcggcaaaggccccgcaagaa

SEQ ID NO: 30163 - RNA, 74 nt, Homo sapiens
gagaagaacaccgaaaccagaagggggacgcggcgcggcagccagccccccaccgaagaagaaaccggccgagc

SEQ ID NO: 30164 - RNA, 75 nt, Homo sapiens
ggcggacacccacccaaaacgggcccacaggacacacaagagagcacaagagccggaagaagcgaagacgcaccc

SEQ ID NO: 30165 - RNA, 74 nt, Homo sapiens
acccagcagacacggccaacccccacaaacgagccaagcacgaggcagaacacagacccggaaaacagaacgga

SEQ ID NO: 30166 - RNA, 77 nt, Homo sapiens
gaccaggcgggacgcagggaaggagcgaggaagacggacggcagacacaagaggaccagggcacgcgcgacgccccc

SEQ ID NO: 30167 - RNA, 74 nt, Homo sapiens
ccacgacgggccgagccgccacggagaaagaagagagaccagaaacgagaggagaagaaaccagccagacagag

SEQ ID NO: 30168 - RNA, 78 nt, Homo sapiens
ccgaaacagcgggaggacaacagaggcaccgagagagcaccagcacaaggggcgggccacgaggcgggaagaggcaca

SEQ ID NO: 30169 - RNA, 62 nt, Homo sapiens
cggagacccgcgcgccaggcgcgcccgggggagcccccgagcgcccgcgacgcagcacggac

SEQ ID NO: 30170 - RNA, 55 nt, Homo sapiens
cggcaggccagggcagccgcgggagaacggaaaaaacaaagcgaaacagcggggc

SEQ ID NO: 30171 - RNA, 79 nt, Homo sapiens
gaaaaaaacaaggcacgggccgcaaaccaacgggacacaaaggacggcaacgagggagaaggacagaagaaagccaaag

SEQ ID NO: 30172 - RNA, 78 nt, Homo sapiens
cagcaacgggcaggaagagacacacccgggccagcacacccacccacaggaaacagcgagacagacagcgaacccacc

SEQ ID NO: 30173 - RNA, 83 nt, Homo sapiens
gaccaggcgcaacaaggagaagagccaggaaacaggaggaagaacccaagccaaagcccagaccgagacaacacggaccagca

SEQ ID NO: 30174 - RNA, 65 nt, Homo sapiens
gaggaagacgagccgggaggaacggcccggaaacaggaggacccgggccgagccagggcccccag

SEQ ID NO: 30175 - RNA, 82 nt, Homo sapiens
cgacaccgaggagcacacaccacgaaggggagccgccaccaaaagcagacggaaaacccacggggaagaccacaccccgagg

SEQ ID NO: 30176 - RNA, 67 nt, Homo sapiens
ccagaaggggagaaggcaggcaccacaaaaaggacagcgacagaccaaagccgcgcccagcaggcgc

SEQ ID NO: 30177 - RNA, 78 nt, Homo sapiens
acgaggccgccccaggcgcccgacgcggaccccagaccaagggcgccagggaaggaccgcacacaagccgcaccggac

SEQ ID NO: 30178 - RNA, 81 nt, Homo sapiens
aacgggagaaaaggaaggaaaaggggccggccgcggcaccaaggaggaacaagccgagaagccaggccccggcagcaagga

SEQ ID NO: 30179 - RNA, 80 nt, Homo sapiens
agggcggaagaaaaccaaaaagcagggaagaagccccaggccacccccgacgcagccggaggccggggaccggagaagga

SEQ ID NO: 30180 - RNA, 66 nt, Homo sapiens
cggcgcgacggcccaggagcgcgccggcgggagcccagggcagcgggggcagagacggggaacagg

SEQ ID NO: 30181 - RNA, 57 nt, Homo sapiens
agacaccccgcccggaagcccaggcagccggcacccgcacaacccagggggccgaac

SEQ ID NO: 30182 - RNA, 67 nt, Homo sapiens
ggacccacaccgcaggagggcgaacgagcggaacgggcacaaagaaggcgcaggcaagacgcagaga

SEQ ID NO: 30183 - RNA, 48 nt, Homo sapiens
agcacagcagcaccacagagcaaaaaagggcacgaaggcaaagacccc

SEQ ID NO: 30184 - RNA, 73 nt, Homo sapiens
ggacaaaagaagaagcagcaaggagacggacaagggagggccaagaacccggaggaggggaagccgaacccgc

SEQ ID NO: 30185 - RNA, 82 nt, Homo sapiens
cccgcccgccgccggcagcgcccgaacccaaaggggggacgcggccccagagccagccgccgcgccaagaaacgcgcggccg

SEQ ID NO: 30186 - RNA, 62 nt, Homo sapiens
cgggcgggagcgcccaagggggcggagagcggggggggcgcgccccagaccaccggcaggga

SEQ ID NO: 30187 - RNA, 75 nt, Homo sapiens
gcacacggaagaaagggaaccggagaagagagagaaagaccaaggaggagccaggaggagagaacaagaaaagcg

SEQ ID NO: 30188 - RNA, 55 nt, Homo sapiens
cgcccgcggggacccgcagccggaccgggagcgcacccccgccggggacgacagc

SEQ ID NO: 30189 - RNA, 51 nt, Homo sapiens
gcccgggcgaaggggccacgcgagacacgagcgcagcaacaaacagccggc

SEQ ID NO: 30190 - RNA, 80 nt, Homo sapiens
aagaaaccaggcgggaaacaggggacagaaagcagcccggaaccaacagccaagaaggcgaacacaagggcgcagaggag

SEQ ID NO: 30191 - RNA, 38 nt, Homo sapiens
gacagagcccggggggcaagaggccccggaaggccagg

SEQ ID NO: 30192 - RNA, 80 nt, Homo sapiens
aggcgagcccagcgggagaaaacaaggaggagagacagagagaggagaaagcggccaaccccagaagagagaacagaaga

SEQ ID NO: 30193 - RNA, 79 nt, Homo sapiens
agaaagacaacaccacgaagccgcaaacccagggcacagaacggcacccacgaacccgccgagagagaagcaaaaaaac

SEQ ID NO: 30194 - RNA, 74 nt, Homo sapiens
gaccggaccgagagcggaccgagagcgcgaaacgcacgagaaggcgaaacccaaggcaacgggagggcaggccc

SEQ ID NO: 30195 - RNA, 68 nt, Homo sapiens
aggaaaccgcccgcccccaggaaagggagcgggagcgagagagagagaacagacagcgcgagcgcgag

SEQ ID NO: 30196 - RNA, 77 nt, Homo sapiens
gggggaccacagcccaagccagaaggacaggacgcaacgaaaccggcacggccgcccgaaaccagggaggggacacg

SEQ ID NO: 30197 - RNA, 87 nt, Homo sapiens
gaggagcagcagaggggcgagcaggagcgaccgcgccaaacaggggagagaccacaacacaggaccgccagacaggcccgagaaagg

SEQ ID NO: 30198 - RNA, 40 nt, Homo sapiens
cacggaggaacggcagagcggaagggccgccggcccaggc

SEQ ID NO: 30199 - RNA, 55 nt, Homo sapiens
caacccggcggaccaagccgcgggagggacccagggccggcacgggcagcgagca

SEQ ID NO: 30200 - RNA, 80 nt, Homo sapiens
accgacggccgcgaccgggagagcacgccgcgccaggcgaagcagggcaccaccggccacacaacccgcccccaggcaag

SEQ ID NO: 30201 - RNA, 63 nt, Homo sapiens
acaggggaagaccgggaggcaacgaggcaccaggacccagcagccagcgaagccccaaggaag

SEQ ID NO: 30202 - RNA, 73 nt, Homo sapiens
caacgggacccggcgccggaaaggaaccaggagcgagcagccagggggccaccaaaaacgaggagcaacagcg

SEQ ID NO: 30203 - RNA, 76 nt, Homo sapiens
ggagccagacacggaacacgaggcgcgaacagggcccacccgccacgacacaggggaagaagaccaccgcacagac

SEQ ID NO: 30204 - RNA, 108 nt, Homo sapiens
gcccgcacgcgacgacgccacagcagaagggcaaccagcgggaaaaccgcaaagaaggcaccaaacggacacaaaaacaccagaggccgaaaaaaaggaagaggaaga

SEQ ID NO: 30205 - RNA, 67 nt, Homo sapiens
caaaaaaagaacaaaagaacaaaaagcaggaccccaaaagaaccggccccggggcaaaagcgcagga

SEQ ID NO: 30206 - RNA, 51 nt, Homo sapiens
ccagaggcccacgaaaaggcgaaaggcgaagaacccagcggacggggaaaa

SEQ ID NO: 30207 - RNA, 79 nt, Homo sapiens
gaaacaccgaagcgccgcccaaaggagaaccgcaggaaagggaggccccgaaggagcaaggaaacgcgaaccaagggcc

SEQ ID NO: 30208 - RNA, 58 nt, Homo sapiens
acaccagccagaacaggcaccccacccaggcgcggaagcccgacccacggggccaagc

SEQ ID NO: 30209 - RNA, 67 nt, Homo sapiens
acaggcgaaggagcggggccggagaggcaaaaaccaagggaaagaggagaggggccccgagaaggcc

SEQ ID NO: 30210 - RNA, 67 nt, Homo sapiens
ccacggccgccaccgcgcaggaggcaaagaagcgaggagcaggcaacaccagagaggacaaccaaaa

SEQ ID NO: 30211 - RNA, 58 nt, Homo sapiens
gcggcgccccccgcaagccaacgcgggcaacgccccaacaggcgcagggagcaggaga

SEQ ID NO: 30212 - RNA, 83 nt, Homo sapiens
gcaggcacgggagccgaaggcaccagacccggaggagcagcaccccggcaggcagaccagccggcccccaccagccagaccgc

SEQ ID NO: 30213 - RNA, 71 nt, Homo sapiens
gcagaggcggggaaggagcacggggcgcgcacgccggggaagacacaaggcacagccagagaacaacacac

SEQ ID NO: 30214 - RNA, 74 nt, Homo sapiens
gcaacggacagaagcggcgggaaaagaggaagggagcacagcgaaagcaacaaagcaaaccaacccaaacccac

SEQ ID NO: 30215 - RNA, 65 nt, Homo sapiens
cacaccccgggcccgcggcggcgggcacccggaggcgcccgagcgccaccccacgggaaggaggc

SEQ ID NO: 30216 - RNA, 80 nt, Homo sapiens
cgagaagcgggcagccgagaagggccgaggcccgcaaaaagcccacaaggccaggcccacgcccggagacaaaccggcac

SEQ ID NO: 30217 - RNA, 78 nt, Homo sapiens
gcggagaaccaccagagcccgggagaacgagaggaggagacaaggagcacccaggcgacacgaccagcggaggcagag

SEQ ID NO: 30218 - RNA, 75 nt, Homo sapiens
accacaagaacaaagaaaggccaacacgcgcacaaagacccgcccgccgagcgccagacaggcacagacccggga

SEQ ID NO: 30219 - RNA, 78 nt, Homo sapiens
cgaccaccagaagacaaggagaagagagcggacccacaccagggaagacaggggagagggggcaccagcgggccacaa

SEQ ID NO: 30220 - RNA, 75 nt, Homo sapiens
aagagggagcaccacggaccccaaggaagccacggcagacacacaacccgacccgacgagggagggaccggggcg

SEQ ID NO: 30221 - RNA, 66 nt, Homo sapiens
cgcaaaacccgagaaagggcaaccggacggggacaccagacgggaaaacacccgaagacgcaccga

SEQ ID NO: 30222 - RNA, 71 nt, Homo sapiens
acgaccgaccgccggccggaccgcgaagagaaaagccccagccggcgcgccagcaccgggcaccgccgcgg

SEQ ID NO: 30223 - RNA, 61 nt, Homo sapiens
cgagggaggagagagggagagccaaagaaggcaaggaagcgccgagaacaggcgaaaaggg

SEQ ID NO: 30224 - RNA, 75 nt, Homo sapiens
cccagcgggggaagaaggacaagaggccagggcagggaagcggcccccgcccgaaccgcccaccagaaaaggacg

SEQ ID NO: 30225 - RNA, 69 nt, Homo sapiens
accggcccggccccaaaggcgggacgcaggcacgacaaggagcgagacgacgggaccgaaggaccccgc

SEQ ID NO: 30226 - RNA, 72 nt, Homo sapiens
aaaccccacaccagagccgccccagaggcggcagaacccccagccaacggcagaaaagcgccaggcaggcag

SEQ ID NO: 30227 - RNA, 91 nt, Homo sapiens
ggccgggcggcgcggccgcccgggccgggccccaccggacggcccgagcagccccgcccaacaggacccagacccccaggcgggcggcagg

SEQ ID NO: 30228 - RNA, 82 nt, Homo sapiens
caagccagaagcagagagcccgcggcagcccccggcccccagggccccagggccccagcaccaaggcggaggcagggcggac

SEQ ID NO: 30229 - RNA, 114 nt, Homo sapiens
gaagacgacgcaccgcaggcagacaaaagggccaaagaagggagagagaacagcccaaggaggaagcggagcccacgaggggaggggccggccacccaggagacaccccaccac

SEQ ID NO: 30230 - RNA, 67 nt, Homo sapiens
accccgcccaaggaggcccagcgaggggagccagggcaagaacgcgcgcgaggagagggaaagccga

SEQ ID NO: 30231 - RNA, 85 nt, Homo sapiens
gccagcacgcggacgcgagacggcccggcgcagcgagcgcggacggagaggaaagcggcccccacagagagcacacaaacaaagc

SEQ ID NO: 30232 - RNA, 75 nt, Homo sapiens
cagggagaggagcgggaaacgggagggaaccagcaacaagccggaagggaccacagaccagcacgccggcgccac

SEQ ID NO: 30233 - RNA, 76 nt, Homo sapiens
cggaaacccgcagggaaaccgacggagaaaccaccggcggaccgcacaagcagacaagcagaccggaagaccgacg

SEQ ID NO: 30234 - RNA, 69 nt, Homo sapiens
agcacggaaagaaagacagcacaagcagcaccaggcggcgcaagagacaaagggcacgagggagaggcc

SEQ ID NO: 30235 - RNA, 57 nt, Homo sapiens
cagcagaagcccggagaacaggcaaggcgcaccacgagggcacgcagacaacagcag

SEQ ID NO: 30236 - RNA, 79 nt, Homo sapiens
gacgaggggggagaaccagccgacggagcaggcagcagcccagaacggagacacagcgggcccccaccacgagcggcaa

SEQ ID NO: 30237 - RNA, 79 nt, Homo sapiens
cggacgccaccagacccagaagaagcccggcccacacgcagcccggccagcccaacagcgcgcaaccccggacacagcg

SEQ ID NO: 30238 - RNA, 80 nt, Homo sapiens
ggagacaggaccgcggcgagcaagggaagcccgcggccgagaggggggccagagggaggaggcggcaccgggcgaccccc

SEQ ID NO: 30239 - RNA, 73 nt, Homo sapiens
cacccagcggggagcacggcgagcagccaggccaggagaggccagccagcacgagaaagaaaagagaggagaa

SEQ ID NO: 30240 - RNA, 80 nt, Homo sapiens
ccggcccgcgggggagccccgggagccgcacggaaggaggcagaaagggagccccaagagagagggccaagccaaccggc

SEQ ID NO: 30241 - RNA, 61 nt, Homo sapiens
cggacaccaggccacagccgggaagcagagggagaaagccggccacacacggcacaaggga

SEQ ID NO: 30242 - RNA, 77 nt, Homo sapiens
cagaaggacaagcgcccgggcaccgcagaaaggaccacaaccagaaaaaacaagcagaacgcaggggaaagacagga

SEQ ID NO: 30243 - RNA, 66 nt, Homo sapiens
aagaccaaaagaacaggaacgggacaagcagcacacacacagacagagggaaagaaaagaaccgaa

SEQ ID NO: 30244 - RNA, 69 nt, Homo sapiens
cggggagagcccaagcccaggacaccgcgcaggaaacgagaagacacaccaaaagaccgcaaagaaacc

SEQ ID NO: 30245 - RNA, 78 nt, Homo sapiens
ggagaggaacaggcggcgggcgagccgccccagggaaaggaccgaggcaggaaagaggccagacgcagggaccggcac

SEQ ID NO: 30246 - RNA, 71 nt, Homo sapiens
gaagaaggaagggccacccaggacaggggcacccaggcagcccagagcacaaccaaagcccgaaacacaca

SEQ ID NO: 30247 - RNA, 53 nt, Homo sapiens
aacgaacaacccacaggccacgcccagaccaccgcgccccgagggcagcccac

SEQ ID NO: 30248 - RNA, 79 nt, Homo sapiens
ggcggcggcggccaggcccgcgaacacacgccgccaccgggaggcccagggaagaggacaagagcaagccaaaggagac

SEQ ID NO: 30249 - RNA, 65 nt, Homo sapiens
acccaggccggccagcacccaccgagaaggccagcagggaccgagggcggcaccacgcccaacac

SEQ ID NO: 30250 - RNA, 76 nt, Homo sapiens
ccagggcaaacagcgaaaaccgaaacagaccaaagagaggcacaacacagaaaagggcccaaggaagaaagacaag

SEQ ID NO: 30251 - RNA, 73 nt, Homo sapiens
agggcaccagacagccacgcagacacagccagacgaggggcccacaacaaaccaaggagacaaaacaaaagga

SEQ ID NO: 30252 - RNA, 64 nt, Homo sapiens
gcgcgcacaagggcagagggccagagcccagaaaagaggacacacaggaagacgaacacggaac

SEQ ID NO: 30253 - RNA, 85 nt, Homo sapiens
cagcagcagaccacccagcgaaggagcagaaccgaccccacccagaggaagaggaggccgagagacccagacgcacagggcgcgc

SEQ ID NO: 30254 - RNA, 58 nt, Homo sapiens
agacgaagaagggccacccacagaggaggaacaacagaaaaaacaagagaggaagccc

SEQ ID NO: 30255 - RNA, 78 nt, Homo sapiens
agccgcacagccgcggcggcagcagcaggagaggacagggcagaccgccagcagcacagcaagccacagagagggccg

SEQ ID NO: 30256 - RNA, 77 nt, Homo sapiens
aggggggagcacaggccggcggggggcggacaccagccaagcagcggaacgacagaggggaacggcgagggaaccca

SEQ ID NO: 30257 - RNA, 83 nt, Homo sapiens
gcggccggccgggcgcaaggccccgaacaacaggcagaacaacggggaacgcacgcggaggaagaaaccggagagcggggcca

SEQ ID NO: 30258 - RNA, 81 nt, Homo sapiens
caggaagggaagccacccacaagacaacacgagagcccggagccgagcccgggaaggcgggcagacgggagcgggccgaga

SEQ ID NO: 30259 - RNA, 65 nt, Homo sapiens
acggaccaagaacggaaaagaacgacagacccggcgaggaacacagcacaaaacgacaacccgag

SEQ ID NO: 30260 - RNA, 57 nt, Homo sapiens
gaaagcgcacaagaacgaaaagccggaaagcgaacgcgaaaagaaaagccgagagca

SEQ ID NO: 30261 - RNA, 66 nt, Homo sapiens
ccccaaccggggaggaaaaccgacgaaggcaccgagcccagcagacccgaggaaggccaccgaagg

SEQ ID NO: 30262 - RNA, 78 nt, Homo sapiens
agcaagggaaaaagaagggagcggccgaaggagccaccaggccgggaagcccacggggcagaccagaaacgggggcag

SEQ ID NO: 30263 - RNA, 79 nt, Homo sapiens
acgagaagacacaagggaaaagggggaggaagagaagacaacgcacaacaggcccagaaccggaaccaagagccagcac

SEQ ID NO: 30264 - RNA, 64 nt, Homo sapiens
ccgcggaggccggggagcagccgaccaggagccccagaggcacgacaccaggacagacggggaa

SEQ ID NO: 30265 - RNA, 66 nt, Homo sapiens
ggggggggggcccgccaacgaaccacaggcgagaccgagacaaggccggagccccagaccaggacc

SEQ ID NO: 30266 - RNA, 97 nt, Homo sapiens
cacccgggaagggaacagagcagacccggacggaacaggcaaaagagcgggaaaaccgccacaaagcccccaagccacaagcaacgcgcaggccgga

SEQ ID NO: 30267 - RNA, 60 nt, Homo sapiens
ccgcggagggagaggcgcagagcgagggcaggagagggcggaagccaccaaaaccaggga

SEQ ID NO: 30268 - RNA, 74 nt, Homo sapiens
gaacagaggaagacacacggcccccagccaggaacagagacacacaaaagggaagaagaagaaacaggcagaag

SEQ ID NO: 30269 - RNA, 86 nt, Homo sapiens
cgggggcggccgggacggaggacgcgcaggcgagaaccacgccgacaacggcggaagaggaacgggaacggggaagaagagcggcg

SEQ ID NO: 30270 - RNA, 47 nt, Homo sapiens
accacccacaaccaaggaaagccacagggcagaagacccgagaacag

SEQ ID NO: 30271 - RNA, 74 nt, Homo sapiens
ggggacccagaagaaagaaggggcaggcgggcaggcaagccagaagacagaaagagccagggacaaacagacac

SEQ ID NO: 30272 - RNA, 84 nt, Homo sapiens
acacgcaaggccgccaccaggcgaccccgcacacacacccaccagccacggcagcccagcggggacccagccgccccgcccgcg

SEQ ID NO: 30273 - RNA, 101 nt, Homo sapiens
agggggacgagccagacacggggagcacccgcaggaccccaccaccccgaccaaggcccagcagcaggagcagcgaaggggccaaaaacgcccagaagacg

SEQ ID NO: 30274 - RNA, 75 nt, Homo sapiens
ggggcagaacaccgcaccgcacaagaaccacagggaccaagcacccaagggccgcaaggccaggcgcgcagaggc

SEQ ID NO: 30275 - RNA, 81 nt, Homo sapiens
agcagcaaaaacggagcagaaaggaggccagcaaggcagcgagagcccagagaagggaagaaagcggaaaagaaaagaaga

SEQ ID NO: 30276 - RNA, 54 nt, Homo sapiens
ccaccaccaaagaagcgagcggcgagagacgacagggagggcagaacaacagca

SEQ ID NO: 30277 - RNA, 79 nt, Homo sapiens
gaagaacacagggggaagccaagcagaacaagagcccgagagaagagaaccaagcaagagaacaagaagagaaggaaac

SEQ ID NO: 30278 - RNA, 83 nt, Homo sapiens
ccgcggcagccggggagcgcaggaaccagacgggggcgagcgagcaccgagcaacacacgcagaaacgcgaagacgacgagcg

SEQ ID NO: 30279 - RNA, 80 nt, Homo sapiens
cccgaggcgcggcggcgagggaggaccacaggccacccagaagggccccaccccaaggggagggccaaggggagcgcgcg

SEQ ID NO: 30280 - RNA, 75 nt, Homo sapiens
gaaaacgaaacggggaaagcaacaaccaaaggccagggcacaaaaaaggagaggagccaagcccaacgggacggg

SEQ ID NO: 30281 - RNA, 72 nt, Homo sapiens
gaaagaccacaaaccagagaaagcccagcagcaggaacaagacaacagagcccggaaacgagccgaaaggga

SEQ ID NO: 30282 - RNA, 66 nt, Homo sapiens
agcggccgcgcacccccggccggaggcaccagcgagaagacagaggagccagaccaagagacagca

SEQ ID NO: 30283 - RNA, 38 nt, Homo sapiens
agcccccaaaggaggaacagggcagggccacaccgaac

SEQ ID NO: 30284 - RNA, 79 nt, Homo sapiens
ccgaccgcccacagacccaaacaaagggaggaaaaagcagcgaaacagacaaccccccacacaaccggaaaaagacgag

SEQ ID NO: 30285 - RNA, 70 nt, Homo sapiens
acaagggaaaccacaagaagggaccaagcccaagaggagcgagaaaccggccgggagccaaggaaaagga

SEQ ID NO: 30286 - RNA, 67 nt, Homo sapiens
caccaacaacgcagaaaagcgcaacagacccaagaccaaaagagaaagggcaacacagagacaaaaa

SEQ ID NO: 30287 - RNA, 68 nt, Homo sapiens
aggaagcgcaacccgcggagaagaagcaggcacagaccccaagaagacccagcggacggggaggggcg

SEQ ID NO: 30288 - RNA, 74 nt, Homo sapiens
gaaaagaaaagggggaaggaaacccgcgaccacacaaagaggggagcgaccaaacagaacaacaccagcgacaa

SEQ ID NO: 30289 - RNA, 74 nt, Homo sapiens
cgacccggacagcgaccgcaagaacagagagagcaaaacgacgaaggagccaagaggaccgggacccaaacagg

SEQ ID NO: 30290 - RNA, 70 nt, Homo sapiens
acaccacgggcggccccagaagcagacggcccaaccagagaaaggaaaacccagcgaagcaagagaacag

SEQ ID NO: 30291 - RNA, 77 nt, Homo sapiens
ccgggcaggacccggacccggaagagaagagggggcaagaaaggggaaaggggcggaaaaacagggcgccaaaaaca

SEQ ID NO: 30292 - RNA, 74 nt, Homo sapiens
aacgcacccggggcagcgcggggagcccccacggacgaaaaacggaaacgccggaccaaaagcaagccagagag

SEQ ID NO: 30293 - RNA, 43 nt, Homo sapiens
agggcaaggaaacggccacaagcccagcgcccgaggcggggag

SEQ ID NO: 30294 - RNA, 50 nt, Homo sapiens
cacggcccgagcgggggcagccgcagaggcgcgaaccagggggaaggccc

SEQ ID NO: 30295 - RNA, 83 nt, Homo sapiens
gaccgcagaggaagagaaaaagcaaacgaccagacggcagggaggcacaaaggggaacacaggccgggccgaggccacgggca

SEQ ID NO: 30296 - RNA, 77 nt, Homo sapiens
ggacggaaggaggaaggcaggacgaagaccccaggaaggaagggaacacggacgacgagacacgaccaacacaggcg

SEQ ID NO: 30297 - RNA, 70 nt, Homo sapiens
aagagaaaaacccggaccaaaagcgaagaagcgagaaggagcaagcagacagagccacggcacggcaagg

SEQ ID NO: 30298 - RNA, 86 nt, Homo sapiens
aggcagccacggccggagaggagccagcccacggccggcggccaggggcaccaagacacgaaaccaggagggcggaggagacggac

SEQ ID NO: 30299 - RNA, 87 nt, Homo sapiens
cccgccgcgccgcgcgccacggcggccggacggggagaacagaggaagaaggaccggggagacaggaacacgggcaagacagcgcgg

SEQ ID NO: 30300 - RNA, 79 nt, Homo sapiens
gacagcaaggagccaacggcccaacccaagagcgcacaaggagggggggaccacggcggggacccgccgggcaggagga

SEQ ID NO: 30301 - RNA, 84 nt, Homo sapiens
ggcccaccccgcgcccgacaggaagccacggaggccagcgggacaacccccacgggccgccgcgggcacgcccaccccaccggc

SEQ ID NO: 30302 - RNA, 77 nt, Homo sapiens
cacgaagccaaagcggaccggcagcgacaagggcggaagaagagcccggaaggggcgccaggcacgagacagacgac

SEQ ID NO: 30303 - RNA, 70 nt, Homo sapiens
gaccagagaaaaggcggaagaccgccaaaaaggacacggagccagcaccaagccaccgcagcgaagcagc

SEQ ID NO: 30304 - RNA, 82 nt, Homo sapiens
gccaggcgcacaggaaacgagagcgcagaacccgagcaagagaaaggagagaggggaccccacaagacccaagccaggggga

SEQ ID NO: 30305 - RNA, 66 nt, Homo sapiens
aacggggcccggaccgggccgcaagggaggacaagcgaaccaacaccaagggagggagcccaccag

SEQ ID NO: 30306 - RNA, 71 nt, Homo sapiens
cagggcacagcagagggcccgccccagcccgggccgccacccgcagcggaagccaaaagaagaacccggac

SEQ ID NO: 30307 - RNA, 77 nt, Homo sapiens
ggcgcgaccgaggccccccgaaccccaaggccaacagagagaagagaccagccgggcagacgcccgaaccggcagaa

SEQ ID NO: 30308 - RNA, 50 nt, Homo sapiens
agagaccacgagcccgaacaggggaagaaggacggaaacgcgcaggacgg

SEQ ID NO: 30309 - RNA, 100 nt, Homo sapiens
ggggaggagcccgaaggaggaccagccaaggcccagaaggaagaggaacacagggcacaccgacgagcaggcgacccacaacggggacccaacggcgaac

SEQ ID NO: 30310 - RNA, 67 nt, Homo sapiens
cagcgccggaaaccaacaaagcacaggcccggcaacccaccagcaacagaacaggggaaccagcagg

SEQ ID NO: 30311 - RNA, 76 nt, Homo sapiens
caagaggcagccaccacgggccggggcacagaacacccccagcccaacaaggcaaacccagaagaaacgccaagca

SEQ ID NO: 30312 - RNA, 34 nt, Homo sapiens
gagaaacacagggaaaaagagaagggagggccac

SEQ ID NO: 30313 - RNA, 77 nt, Homo sapiens
cgcggggcaccggacggcggaaagaagaaggcaggaaaaagaggggcccagcgaaacagggaacacaaaagacgccc

SEQ ID NO: 30314 - RNA, 70 nt, Homo sapiens
cagccagacccgcgcgccaaagaagcagccacccacgcacccgcggccaaaacacgacaggggccaggac

SEQ ID NO: 30315 - RNA, 73 nt, Homo sapiens
cgcccaaccaaccccgacaaaaggcaaaccgacaccagcgacacaagcgcgagggaaccacagaggacaggcg

SEQ ID NO: 30316 - RNA, 77 nt, Homo sapiens
cacagaaacccaaaccaagggaaccccaaaccaccacacggaaaggagacccccaccccaggagcaacccagcccca

SEQ ID NO: 30317 - RNA, 78 nt, Homo sapiens
aaggaacagcggagcgacgcgggccgccggggcacagccaaaacaaggcgccaccggaagaaacgggaggggaggagc

SEQ ID NO: 30318 - RNA, 82 nt, Homo sapiens
cggcggcggacaaacaggcaccgcaggagccaagccgccaggccaccacagcccggggagcccacagcgccacgccggaaca

SEQ ID NO: 30319 - RNA, 79 nt, Homo sapiens
cgcaaacaagagaacgggcccacacaacccaggcaaccaacagaacagcgcgagccacaaggcaaggaagcaggcggca

SEQ ID NO: 30320 - RNA, 66 nt, Homo sapiens
aaaaaaccaggcaaaggcccagaccaggacaaaccggcgaccacacacggggacgacggggaagcc

SEQ ID NO: 30321 - RNA, 76 nt, Homo sapiens
ccggagaaacaacaaaggagaggcaacggaggacacagacagcggagaacaacagaacggccgagcgaccaggaga

SEQ ID NO: 30322 - RNA, 79 nt, Homo sapiens
gcacgaccagcaggaacggccgggggaccccacgccggagacagggcgcagccagaaaacccacagagggaagccgccc

SEQ ID NO: 30323 - RNA, 64 nt, Homo sapiens
cggaagcagaggaagaacacaaaggagaggcagacaacacacacgcagaaaccccgaaccaaac

SEQ ID NO: 30324 - RNA, 76 nt, Homo sapiens
aaaacacaccggagacggggggaaacaggcgaggcggcggcgcccggagggcagcgagggggaaacagcagcacag

SEQ ID NO: 30325 - RNA, 68 nt, Homo sapiens
caaggaagacgggcaggccgaaggacgagggagagcggaggagcccgcggaaaaagccgcaaccccgg

SEQ ID NO: 30326 - RNA, 71 nt, Homo sapiens
gcgggcgcgagagcgaggaggcaaaaaggcggcaaacgccaaggcagaacaagaagggcaaccagggggga

SEQ ID NO: 30327 - RNA, 87 nt, Homo sapiens
cccaccggaaggccaccccgcaggcgagaagaggcacgcgcggcacaggccggccccgccccgggaagacggcgcacccggcccggg

SEQ ID NO: 30328 - RNA, 82 nt, Homo sapiens
aagaacaagcacacaagcccagccagccagacacaggcagagcaagcgcacagggcaaccagaacgccaggccaaagaagag

SEQ ID NO: 30329 - RNA, 77 nt, Homo sapiens
gagcagaaaggagggggcgagaaggcgggaagccgaaggcagccacaggaaagacaacccgggcaaggagagcggaa

SEQ ID NO: 30330 - RNA, 62 nt, Homo sapiens
cgaacaggcaaaaaacaaaagaaaaacggaacaggaacaaaagggcaccacaagccgaacag

SEQ ID NO: 30331 - RNA, 72 nt, Homo sapiens
gaagacgccaagaccacgaagggggaaccaagcagcccacaagcgcccaaagccaccgacgcgcagaaagga

SEQ ID NO: 30332 - RNA, 75 nt, Homo sapiens
cgcaccaaaaacaaaagagagcgcacgaccgcggcacgacccagaccgagacagcagaagaccgaggaggaggag

SEQ ID NO: 30333 - RNA, 81 nt, Homo sapiens
ccccaacccgcgcggcaagaagacggcgcggcaaccggggagcccgccagaacacccaggacaccagcaggcgaaacgagg

SEQ ID NO: 30334 - RNA, 76 nt, Homo sapiens
gacagcaaacacagcaccagcaccaaacagagaaagccaaggaagggaggaaggacagccacgcagagaagacaga

SEQ ID NO: 30335 - RNA, 62 nt, Homo sapiens
gaagagccagcacccaacgaacaagccgggaagacaagcagaccccccagaggggcgaggaa

SEQ ID NO: 30336 - RNA, 36 nt, Homo sapiens
cccaagagcgggaccacaggagcgagccaagccaaa

SEQ ID NO: 30337 - RNA, 71 nt, Homo sapiens
cagggacccggcaggccgcccccggcaagccccgaggcgcgccagacacgagccagaccacagaggcaggg

SEQ ID NO: 30338 - RNA, 90 nt, Homo sapiens
cgagccaaagaggagccggccgcgcgggccgggaggggacggccgccggagccgcgaggccaaagacgacaacccccccggcggaagccc

SEQ ID NO: 30339 - RNA, 75 nt, Homo sapiens
gaccccacccccgaggcccgaccggacaagaaaccacagagccgagaacagaaagggagccagacagaccagcga

SEQ ID NO: 30340 - RNA, 58 nt, Homo sapiens
aggcgcggcccggcggccggaaaggcgacccccgaccggcgggggcccacaaccgggg

SEQ ID NO: 30341 - RNA, 70 nt, Homo sapiens
gagggacggacagggaaaaggcagaggacgaccacgagcagagcgagaaaagaccagaagacacaagaca

SEQ ID NO: 30342 - RNA, 78 nt, Homo sapiens
cgcgacacaacaagccagccaaagagcccgccccaggagagccacgaaggaccaggagcggacaggacacgaccgacc

SEQ ID NO: 30343 - RNA, 76 nt, Homo sapiens
accacagaggccacaccccccgcacaggagagaagcaggacagcccacgcccggaaggccggaagagaaccgccga

SEQ ID NO: 30344 - RNA, 83 nt, Homo sapiens
agaggaacaggcccagaaggccaagaacccccaggagcagaagccccgccaaaacacaggagaagcgcccggcggcgaccacc

SEQ ID NO: 30345 - RNA, 81 nt, Homo sapiens
gacacaccacggagaaccagaccggcgacccgcgacgccgagcacccaggcgacgcccaccaagggaaacccagacgacaa

SEQ ID NO: 30346 - RNA, 86 nt, Homo sapiens
agagaaacaaaagacggccaccgaaagccagggcgaagaggccaacagagcacaggcaaggcaccgagggggggcaacaccaaaac

SEQ ID NO: 30347 - RNA, 85 nt, Homo sapiens
aggagagcaacacagggcccagcaggcagggccggccaaagcaagacaggcgccggaccgaaggcgcgaccacgacgagaagcgg

SEQ ID NO: 30348 - RNA, 73 nt, Homo sapiens
gagacgccacgaacagccacaaccagagggcccccagaccaaaaaaggacacgaaccgaaaacagcggaagga

SEQ ID NO: 30349 - RNA, 74 nt, Homo sapiens
ccacacgcgacgggggagccgcgggcaggaaaaggcggagaggcgcggggcccagccccaccagaaaagcaccc

SEQ ID NO: 30350 - RNA, 50 nt, Homo sapiens
aacgacaaaggaaaaggcggaaagcccgaaacccagagccaaacggggac

SEQ ID NO: 30351 - RNA, 60 nt, Homo sapiens
ccgaggggcggaagccagagaccaacgagaccgcacagcgggagccggagggggaccagc

SEQ ID NO: 30352 - RNA, 66 nt, Homo sapiens
ggcggcgggcggaggaacagcggcagccacaggagccagaagacaaacagaccccagaaagaagaa

SEQ ID NO: 30353 - RNA, 74 nt, Homo sapiens
ggcacgagggcaaagaagaaggcacaagaaagcagcgggccccacgaaggacggccagcgcggcagggaggaga

SEQ ID NO: 30354 - RNA, 76 nt, Homo sapiens
aaagaaaccgcaaaaccaaaaccagacccaaagcccagcacgaaagggcaaacgaccgccaacagaaaaacggacc

SEQ ID NO: 30355 - RNA, 71 nt, Homo sapiens
aagggcggaaggacaccagggaaaccaagcgcgaagagagccaacaggcgccgacgacgcgcacccaacgg

SEQ ID NO: 30356 - RNA, 67 nt, Homo sapiens
ggggagcaagagccaaggacggaaaacggcaccgcgagcgcaggggaagggcaggcgcccagccaaa

SEQ ID NO: 30357 - RNA, 58 nt, Homo sapiens
aaagaagcccaaggaagcacaaccccgagcacgggaggcaagcacgcaaggcgaagcc

SEQ ID NO: 30358 - RNA, 83 nt, Homo sapiens
acaccgccccaacacaccgggcgacggacgaccaggagggagcggggggccgcagaacgggcagccccagcagagaccaagaa

SEQ ID NO: 30359 - RNA, 66 nt, Homo sapiens
gcacacacaggagaccccaaagaaggcccgcagaccgaagaaacggaccagccaccaacacagcgg

SEQ ID NO: 30360 - RNA, 72 nt, Homo sapiens
cgcagcgcacagggaagccccggcaaaccaggccggagaaggcgacggccgaaccacaaagcaaaccagaca

SEQ ID NO: 30361 - RNA, 116 nt, Homo sapiens
ccaccaccacgccagccgcaccagccgcccaagccgcacagccgcggcggcagcagcaggagaggcggcggccggggcagcgccgcgagccagcaacgggggaaggccacaacacc

SEQ ID NO: 30362 - RNA, 64 nt, Homo sapiens
gcccggaagcccgcggccggaggagccgcaggggcccggacaaggagaagagacaacagccaca

SEQ ID NO: 30363 - RNA, 75 nt, Homo sapiens
gcacaggaaaaccggagcacagggaaacccggcgaccccagaccgacagagagaagacaggacgcaaaacagaac

SEQ ID NO: 30364 - RNA, 82 nt, Homo sapiens
ccaggcacggaggagggaaagacaaagcaggacccaaaggaaacaccccagcaccaggaacagaccaacaaagaacgggaac

SEQ ID NO: 30365 - RNA, 84 nt, Homo sapiens
aggacggagcgccgccgccgggaccccgcccagcagaacaacggcccaagagcacagagaagaccaagggccgccagcggggcc

SEQ ID NO: 30366 - RNA, 66 nt, Homo sapiens
agccgcacccacggcacgaaagggcggcgacggcggcgcgaggaccgaccgggcccgcggacgaag

SEQ ID NO: 30367 - RNA, 69 nt, Homo sapiens
ggccagaggcgaggcagggaggacccacccccgggggaaaagaacgagggcccagggagggaggggaaa

SEQ ID NO: 30368 - RNA, 77 nt, Homo sapiens
ggagacaagagaggccgcaggaaaccgggaaggaggaagagaaccaaaggcaagaaccggagcaggagaaaagccgg

SEQ ID NO: 30369 - RNA, 80 nt, Homo sapiens
ggaacgagccagcagcggacaggccaccgacgggagagagcaccccaacagggcagcaggccagcccgaaaagccaagcc

SEQ ID NO: 30370 - RNA, 40 nt, Homo sapiens
gcccccgaaagcgggaacaggacgggagggcggccaggga

SEQ ID NO: 30371 - RNA, 39 nt, Homo sapiens
agacagggaggaagcggggaaaacagagacagaccacaa

SEQ ID NO: 30372 - RNA, 72 nt, Homo sapiens
gcacagcaccacaaccgcggagaaaaggacgacggaaccaccacgaaaaaaagcacacccaagacacagagg

SEQ ID NO: 30373 - RNA, 66 nt, Homo sapiens
cgaggcgagagcgggacaggcgagcgaccgaggggaagaagaggagaaggcagagcccccccaggc

SEQ ID NO: 30374 - RNA, 78 nt, Homo sapiens
aggcagagacgggggaagcagcacgggacccagcccaggccgcacggacgggggggggcgcaaaaaccagacacccca

SEQ ID NO: 30375 - RNA, 85 nt, Homo sapiens
cccaaggccgcggccccgccgcccacccggacgccgacgaaagccagcgagccccagcccagcaggcccccacgggaacgacgcc

SEQ ID NO: 30376 - RNA, 78 nt, Homo sapiens
cgaagagcaaaagccaacacgcaccgcaggcacaggagaaagacagcaaagaaaaggagaagaaaggaaaaaaacaac

SEQ ID NO: 30377 - RNA, 34 nt, Homo sapiens
cccccaaccaggacccagagcgaggaaaacgcca

SEQ ID NO: 30378 - RNA, 58 nt, Homo sapiens
ggcggagcccgcagaccgcagaaggccggagacaccagcaggcacggggccaaaaagg

SEQ ID NO: 30379 - RNA, 83 nt, Homo sapiens
acgcggggcccaggccaggaccaccagccagcggaagcggggagagggggagagagaccccggaggacagggcgccacaggcc

SEQ ID NO: 30380 - RNA, 75 nt, Homo sapiens
aggggcgcaagacagaggcggggaaaaaggagaagccagaacaaagagaagaaacccgaagccaagaagggagcg

SEQ ID NO: 30381 - RNA, 64 nt, Homo sapiens
gcgaagggcggggagcgcggcgggcgcgcgccagccccggagaagaaaggccgaacacgcggca

SEQ ID NO: 30382 - RNA, 52 nt, Homo sapiens
ggaagcccgccccagagcagggaccccgacggagagacaaagaagacggagg

SEQ ID NO: 30383 - RNA, 59 nt, Homo sapiens
gcagaccgcagaaggccggagacaccagcaggagggacaggcaagaaggaagaaggcag

SEQ ID NO: 30384 - RNA, 85 nt, Homo sapiens
gaggaggggccccagcagcccccgaaggcccacaggacaggagagaaagacgcccgagccaggcgccacaccaagaaggacagaa

SEQ ID NO: 30385 - RNA, 83 nt, Homo sapiens
aaagcccccgcccccagcacccacccgggggcagggggcccgggacagggagggcagagagggccagggagaagagcgccagc

SEQ ID NO: 30386 - RNA, 86 nt, Homo sapiens
ccccggcccacgagcagaccgggccgggcaccaggccacggcacaggccccgaagaacgccagacgggccccaggacgacaaccag

SEQ ID NO: 30387 - RNA, 78 nt, Homo sapiens
gccacgagcgagaacagccggggccgggagacagcgagaccgcgggcgcgcagggcgggcggaccgaaccggcgaagg

SEQ ID NO: 30388 - RNA, 76 nt, Homo sapiens
agcacagccaccagccagcaagcccaagccaggaacggccagggggagccagcagaccagacacgaacacaccaca

SEQ ID NO: 30389 - RNA, 106 nt, Homo sapiens
ggccgcggggacccagcgccaccacaacagcagcaacccgggcagcgccaagccagggcccggaccaccccgccaccgccaaacaacacagaagcagacgagggga

SEQ ID NO: 30390 - RNA, 60 nt, Homo sapiens
ggcggagcccgcagaccgcagaaggccggagacaccagcagggagcgcagggagaaagcg

SEQ ID NO: 30391 - RNA, 76 nt, Homo sapiens
gggccgacgggcgggaaagaggaagcaaaaaaaaggcagcacagagcacacgaggcgcaccagggcagcagccggc

SEQ ID NO: 30392 - RNA, 77 nt, Homo sapiens
aaagggaacagcaagacccaaggccaagacaggggacagccggccgaacggcagccccgggacccaaacagacccag

SEQ ID NO: 30393 - RNA, 82 nt, Homo sapiens
gggaacgaggaagcgcccaagagccggcagcgcccgagggagcaaggagaagagcggaacccagaccgcgcccggagccacc

SEQ ID NO: 30394 - RNA, 55 nt, Homo sapiens
ggagacgaaccgaccgggcgacccagaagcccgagaggcgcagcgggaagaggca

SEQ ID NO: 30395 - RNA, 77 nt, Homo sapiens
gacaccaggcgggaaggaaaaacagaacagcgcccgcgaaagacaaggaaagacggcaggacacccacacgacaggc

SEQ ID NO: 30396 - RNA, 65 nt, Homo sapiens
ccacagcccccgacagggcagacgggaccacccggggcgcgccgggggcccggccggccagcaaa

SEQ ID NO: 30397 - RNA, 64 nt, Homo sapiens
cgacccggcgccagccacggacgccacagagggaagaccccaagggagagagcccaccaaggaa

SEQ ID NO: 30398 - RNA, 34 nt, Homo sapiens
cagcgcacccccaggcacggacgccgacacaaag

SEQ ID NO: 30399 - RNA, 80 nt, Homo sapiens
gaagacaacgcacaacaggggacacggaaaacgacagaacgaagcagaagaacgcccaggcaggcagggaagcggcagac

SEQ ID NO: 30400 - RNA, 84 nt, Homo sapiens
ggcgaggcgcgcggggcacggagggcggggcggcgggcccgcgagaagcaagcggaacccgaggaggaagacgcacgccggacc

SEQ ID NO: 30401 - RNA, 50 nt, Homo sapiens
cgcagggcgcccccgaccaacacaaacaacgacacaggcacagacccgag

SEQ ID NO: 30402 - RNA, 80 nt, Homo sapiens
ggcggcagcgcggccgggaccgacgcaaaaggcgcccggagcgggccggccgcaaaagcagaccggaaaacccaccggca

SEQ ID NO: 30403 - RNA, 79 nt, Homo sapiens
cgggacggaccgagaccggaccgagagcggaccgagagcgcgaaacgcacgagaaggggaaaacgacccccaggaaaaa

SEQ ID NO: 30404 - RNA, 74 nt, Homo sapiens
agacagccaaggggagaagaggcacaaaagccagcccagagcccccgagaacagccggaccccccccggacaaa

SEQ ID NO: 30405 - RNA, 67 nt, Homo sapiens
agaaggagcgaagaagaggccgggaacgggaaacgcgcgccgagaagccacccgccgagagggagcg

SEQ ID NO: 30406 - RNA, 69 nt, Homo sapiens
agaagccgcacgcacgcaacccccaggaggaaaaggccaggcccagccggcccgccccggacagcgaaa

SEQ ID NO: 30407 - RNA, 71 nt, Homo sapiens
ggaaaccccagcagaccagagcagggaagaaagcaagaccgaggaagaagaggaccaccaggaggaacaga

SEQ ID NO: 30408 - RNA, 67 nt, Homo sapiens
ccgcagcccccaccggccccgccaaagaagacagccgaaggagagccgccgggacacagaccccccc

SEQ ID NO: 30409 - RNA, 69 nt, Homo sapiens
ccgaggcaccggcagggcacaaggaaaacgcggggacgagagccccggcacaaacggaccaccagaaag

SEQ ID NO: 30410 - RNA, 73 nt, Homo sapiens
gcccagaccagagggagaaaaaaaaaacccagaggcaagaggaaaggagcagggcccgggaagccaccaacgc

SEQ ID NO: 30411 - RNA, 62 nt, Homo sapiens
aaggaaacggggcccacgggaacgcacaggggagaccacacccaaaacgaaacgggaggcag

SEQ ID NO: 30412 - RNA, 87 nt, Homo sapiens
ggcaagagcagcgggagcggcgcggggaagggggcgggccgcagagcagaggggaccaggaaaaggccgaagaccccagcaaccagc

SEQ ID NO: 30413 - RNA, 77 nt, Homo sapiens
gccccgggcgcagacagagcaccagcaccagcagagggccaagggcagggagaagggacaacacagaacacagacca

SEQ ID NO: 30414 - RNA, 95 nt, Homo sapiens
gccgcccaagccgcacagccgcggcggcagcagcaggagaggagaagacagaggagccagaccaagagacagcacaggcgagcgagcagagacac

SEQ ID NO: 30415 - RNA, 74 nt, Homo sapiens
gcaaacacgggacaaaaaccagaccagggaagaaaacgccagagaagcagagcagcccggagcgaggggagacc

SEQ ID NO: 30416 - RNA, 73 nt, Homo sapiens
agcggcgccagcaagaaagacagagcaccaggagagcccggaagcaggaagaggagggcaggcacgcagccag

SEQ ID NO: 30417 - RNA, 63 nt, Homo sapiens
ggaagcagccgaccagccgcggagccgggggcagcccccggggcgaagcgaggcagacagggg

SEQ ID NO: 30418 - RNA, 70 nt, Homo sapiens
gaaacggaaagaagcaccggagagacagcacagcacccacaaagcaacgaaccagggccaaagaggagcc

SEQ ID NO: 30419 - RNA, 63 nt, Homo sapiens
gccgggacccggagcaagcaaagcgccaaaccaaggagggcgaagggaagaagcagaaaccag

SEQ ID NO: 30420 - RNA, 75 nt, Homo sapiens
cagagcagccaccagccccaccaggcaccaggcagggacagcagcaacagaggcgaaggaagcgacccggaaccg

SEQ ID NO: 30421 - RNA, 78 nt, Homo sapiens
cggcagaggagaagcacaccccgagccgcagaggcagcaccaggagccaaggaacagaagggcccggccagggagaac

SEQ ID NO: 30422 - RNA, 80 nt, Homo sapiens
gccggggggggcggcccgcagcgaaggaccgacaagcagaccggaagaccgacggaagaccacaccccgagggagcccag

SEQ ID NO: 30423 - RNA, 54 nt, Homo sapiens
caggccaccacagaaacaaaagcaacaaagagggcccaccaagccgagaacacc

SEQ ID NO: 30424 - RNA, 38 nt, Homo sapiens
gagcccgggcacccgcggaccagaccccagggccaaaa

SEQ ID NO: 30425 - RNA, 64 nt, Homo sapiens
gggcgccgcagagaaagcagaccacaccaggaccgcagaggaagagaggccgccagcgcggcac

SEQ ID NO: 30426 - RNA, 71 nt, Homo sapiens
gccacacccaagagaagcccggaaaaaggcgcaggcacacaggacggcccacccccacgacagggaaagag

SEQ ID NO: 30427 - RNA, 69 nt, Homo sapiens
cccaccacggccggagacccgccgcgaggcgcagggccacggcgagcggccaacagggacgaacggaca

SEQ ID NO: 30428 - RNA, 80 nt, Homo sapiens
cggggccgggcgacaggagcaggaaaaccagagacccagacacgcgaaggaacgaaaggccaaaaggcaaaagacgacgg

SEQ ID NO: 30429 - RNA, 77 nt, Homo sapiens
gcacccaagacagcaggggggaaagggagcacggcagccagcaggaaggaaaagagagggcaggcacacaacgccgg

SEQ ID NO: 30430 - RNA, 95 nt, Homo sapiens
gcaaacagccagaacagcagcccggcagcaggccggcgagggggcagccacgacagggaagcgggagacacaacgaacgagccagcgcaggcgac

SEQ ID NO: 30431 - RNA, 73 nt, Homo sapiens
acaggcgcggggacgcagaagccacgcaccaaaggccggggcagcagaagaggacaagcagacagcaccaacg

SEQ ID NO: 30432 - RNA, 76 nt, Homo sapiens
ggggccccgcgggagcagcacgggcggacgcggaagcaccccgaagaagaaacagcagacggacggaaacgaggaa

SEQ ID NO: 30433 - RNA, 75 nt, Homo sapiens
gccggcaaggccacgggcacgggcggggacacacccagaggagggccaaaaacaaacaaaaaagaacccacccag

SEQ ID NO: 30434 - RNA, 68 nt, Homo sapiens
cagcaaccaagacaagcaaaaaccagcgcaacaggaccagacgaaccaccagccgcgaaaagcaacaa

SEQ ID NO: 30435 - RNA, 77 nt, Homo sapiens
cacggccccggccgccccaacgggggcacgaagggggacacaggcgagagcagcgagagcccagagaagggaagaaa

SEQ ID NO: 30436 - RNA, 72 nt, Homo sapiens
ccgacaaccccgccacggccccgccaggccccgggaggaagcaccaaccgcccccaggggcagcggggagcg

SEQ ID NO: 30437 - RNA, 71 nt, Homo sapiens
ggccagaacacaaaaacaaaaaaggaacggagaagagggccaaaaccaggcgagaaccaggagaagcgggg

SEQ ID NO: 30438 - RNA, 77 nt, Homo sapiens
ccgccccccccccgcccgccccccccccagcgcccgcgccgcagggccggagcgagggagagcaggaacacagagag

SEQ ID NO: 30439 - RNA, 50 nt, Homo sapiens
agagcacagaaggaggcggccgggagaggagggacagcagcgggagaaca

SEQ ID NO: 30440 - RNA, 72 nt, Homo sapiens
ggagggagcagcccgggggacacgcaaaaacggacacagacaggcaggagaagaaggagcggcagaaggggc

SEQ ID NO: 30441 - RNA, 51 nt, Homo sapiens
cgcgggccccgggacaagaggcacacccagaagccacaggagaagcaagag

SEQ ID NO: 30442 - RNA, 73 nt, Homo sapiens
aaacaaaacaaaacggacaggcaagcggaaggacagccgagcagaacccagaaaacacgaggcacaggccagc

SEQ ID NO: 30443 - RNA, 90 nt, Homo sapiens
caaagacgaacaaagacggcaacgcgcacagcgcagagaaaacacggagagccggccggacggagggaccaacccgggcggggaaagaac

SEQ ID NO: 30444 - RNA, 84 nt, Homo sapiens
cgcgaaggccgggacccggccccggcccacaggggggggcaaacccgagagaacgggcgggggagcgggaggagccagagcaca

SEQ ID NO: 30445 - RNA, 68 nt, Homo sapiens
ggacaggccgcagccgccggggcaggagcagccgcaacagcgcaccgacacaagcccagaagccccac

SEQ ID NO: 30446 - RNA, 92 nt, Homo sapiens
cacccccgccagcagccgccggagccagccaacgagcgggaggcggaaccaacccccggccagggaggggccgggggacgagggccccacag

SEQ ID NO: 30447 - RNA, 84 nt, Homo sapiens
cagacagcagaggcccccgaaccgcccccgaagaggcaaccccccagggcccaggcgcgcagccgagagcaccaggggacccgc

SEQ ID NO: 30448 - RNA, 43 nt, Homo sapiens
aagagcggaaacaccgcggaagaagaaaggcgcaagaaaacaa

SEQ ID NO: 30449 - RNA, 75 nt, Homo sapiens
aaaaccgaccgaggcagagcgcagccacgggcgcgcaggaagaccgcaggaaagcaggaaggcaagaaagccaag

SEQ ID NO: 30450 - RNA, 79 nt, Homo sapiens
acgggcgcaccgcgacagcgggagcacaggcccgggagggagagaaacccaggagggagaacgagaggaaccaagagag

SEQ ID NO: 30451 - RNA, 94 nt, Homo sapiens
cagccccccggaggggggaccaacccggcagaccaaacgagagcggaggagggccaagaaagcgcagcgacaccggaggagcgccccgggccac

SEQ ID NO: 30452 - RNA, 82 nt, Homo sapiens
aagcgcgcaggcgacccccggcagccaggcgcaccagcccggacaagacgacggacaagcaggcgacaggccgagcgacagg

SEQ ID NO: 30453 - RNA, 75 nt, Homo sapiens
gccaccagccagcgggcaccagccgggcacagggagcgccgccgccagccgccagggcaaacagaacagcaagcg

SEQ ID NO: 30454 - RNA, 136 nt, Homo sapiens
gaagcgacccaaggagccgagcggcccgacggggagccgacggacccacgacggggccaagagggccagcgagaaggcacaccgaaccggacaccgaagacggagcgggccggggaacaggacacacgagacccca

SEQ ID NO: 30455 - RNA, 73 nt, Homo sapiens
ccgagaagcggggcaccacgaaggaccgaagagcgcccacagcagggcagcacaaggagaagggcgcagacga

SEQ ID NO: 30456 - RNA, 71 nt, Homo sapiens
cccgccacaagcaacgcgggaagagaagaggcaagcaccagcacccagagagaagacgcaaccaacaaaca

SEQ ID NO: 30457 - RNA, 54 nt, Homo sapiens
cggcaagagccagaagcccggcggaaggagaagagaggcagcaaagggacccca

SEQ ID NO: 30458 - RNA, 69 nt, Homo sapiens
cgcgaaaacaccgagcgaggacacccccagaccgaagaaaaggagagaggcagaccaaaacgggcccgc

SEQ ID NO: 30459 - RNA, 74 nt, Homo sapiens
ggacgcgcggccgccagcggcagaacaccgcgagggagaggagagacgggcaggcgcaaagcggaaaacagccg

SEQ ID NO: 30460 - RNA, 75 nt, Homo sapiens
ggcagaggaggaaggcagcaagaagggacgaccaccacagccacaggaagcccacaaccaaagagaggccggaga

SEQ ID NO: 30461 - RNA, 83 nt, Homo sapiens
ccaagcagggaacggcaccagaaccgaaaggaccgcaaaaaggccaagggccggcggcagagaccacgcccagcaggagcggc

SEQ ID NO: 30462 - RNA, 65 nt, Homo sapiens
gcaggaaccccaggaaacggccagaaggagagaaccaggagaccgaagcaaccaacaagcgagga

SEQ ID NO: 30463 - RNA, 53 nt, Homo sapiens
gaagagaaggaaccgggggaaacaaaccaaggcgagacaaagacacgaagaaa

SEQ ID NO: 30464 - RNA, 74 nt, Homo sapiens
agcggcccacagcaggacggaagcgagggcacgggcggcagcccgagaccgcagcagcggaggagcggacaacc

SEQ ID NO: 30465 - RNA, 73 nt, Homo sapiens
ggggaggacaagcggcccacgggaggggacaccaaacgggaaaacaccagaagacgcaccgaccacaggccca

SEQ ID NO: 30466 - RNA, 81 nt, Homo sapiens
cccagaccacacccgagccgagcccgacaaccgaggaggggaggacaaaaccaacaacaagccacccacacgagaggaagg

SEQ ID NO: 30467 - RNA, 64 nt, Homo sapiens
ggaggagaccggagagaaacgaagagagaaaggcagggcaccccaccacagcgacaaagacccg

SEQ ID NO: 30468 - RNA, 30 nt, Homo sapiens
gaaagggcccagcaggcgcggaggacggca

SEQ ID NO: 30469 - RNA, 79 nt, Homo sapiens
ggggcggggccggggaacacacaggccccgccaagacagccacacgaacacggacccccccaggcagagcagacagcag

SEQ ID NO: 30470 - RNA, 59 nt, Homo sapiens
cgaggcgcagaaaccccggacaaggcacgccagacgaacaccgcccagccaagggggag

SEQ ID NO: 30471 - RNA, 81 nt, Homo sapiens
aaccagcagaaagaccacgccaagcaacggccacagaaagcacaacagagcacggagaagggagaaccgaccacaggcaag

SEQ ID NO: 30472 - RNA, 83 nt, Homo sapiens
ccgcccggcagaagcagacccaagagcgggcgcgcagaacgcacaaaccagaggaccaagaacagcagcacgcaacccccgcc

SEQ ID NO: 30473 - RNA, 77 nt, Homo sapiens
gggagccgcgcaaaggccccggcaagaaggagcgacaggacccaaacccgggccgcccggagcgccagcagcccgcc

SEQ ID NO: 30474 - RNA, 70 nt, Homo sapiens
agcaggaaacgcccagaagggaaagacaaggagccgggccgagaaaccgaaccagagaccagagaagaaa

SEQ ID NO: 30475 - RNA, 76 nt, Homo sapiens
agagagcgggcgggcggccgggagacccacagagaagagcgcccgcacccagagaaaaccggacgccacggagcca

SEQ ID NO: 30476 - RNA, 67 nt, Homo sapiens
gccagcccacagcagaaggacagacgggaaacgaaagaccggcgagaagcgcaaaaggcggaaacga

SEQ ID NO: 30477 - RNA, 32 nt, Homo sapiens
gaccggggaccgagaggacagaaagcgggaca

SEQ ID NO: 30478 - RNA, 54 nt, Homo sapiens
cagaaaaccaagcaaaaccaagcaaaaagggcccccacagagacagcagaccac

SEQ ID NO: 30479 - RNA, 70 nt, Homo sapiens
ccacaggaccccaagcagaaggaggggacaagaaggccccgacgccgcgcggaaccgccagagcagccgc

SEQ ID NO: 30480 - RNA, 61 nt, Homo sapiens
agcagaccggcccgaccgcccacagacccaaacaaagggggcaaaagcccagccagaaagg

SEQ ID NO: 30481 - RNA, 77 nt, Homo sapiens
caaaggcaccaggccaccacagaaacaaaagcaacaaagagggacaaaaccgaccacaggcccgcaggagagagaag

SEQ ID NO: 30482 - RNA, 76 nt, Homo sapiens
ggacaagcacacaggacaagcaaagccaacagccagccccgacgccacaccgcggggggcacgcggcgggcggggg

SEQ ID NO: 30483 - RNA, 48 nt, Homo sapiens
ccaagcgaacggagagccagccgggagaccccacaaacaaacgcgacc

SEQ ID NO: 30484 - RNA, 69 nt, Homo sapiens
gcgaaacgagcagaaaggggaaggaacaaagcagagaaaccaaaaggccagacgaacacgagagggagc

SEQ ID NO: 30485 - RNA, 75 nt, Homo sapiens
aagacagaccgcgaaaccaggaagagaggaggaaaacaagaagacgggccggggaagagaaaggaaaagggaaca

SEQ ID NO: 30486 - RNA, 74 nt, Homo sapiens
gaagccagcaagacggagcccgaggaaagcagaaagagggcccagaccgaagccaaccccgcccacagaagcca

SEQ ID NO: 30487 - RNA, 61 nt, Homo sapiens
gcggaaaggaaagcccgacagaagcaccgagacccaagaaagggggagaggcaccagcaac

SEQ ID NO: 30488 - RNA, 83 nt, Homo sapiens
gccccccggggcgccaaaacgcccccaacccagcgcaaaggaagaggaaggcaaccacgagaaaacggaaccgaaagcaagag

SEQ ID NO: 30489 - RNA, 61 nt, Homo sapiens
aaggccccgagagcaaccgccgcagcacaaaacggaccaggcccaggagccagaggagcag

SEQ ID NO: 30490 - RNA, 79 nt, Homo sapiens
ggagacaccccgggggccccgagcaaaccaggggcagagcggcgggaaaccaccaacaacacccccaaaccaaaacagc

SEQ ID NO: 30491 - RNA, 60 nt, Homo sapiens
cggcggcggcagcgcaggacagccagcagaacccgaaacccacagaggaacacaaaaaac

SEQ ID NO: 30492 - RNA, 35 nt, Homo sapiens
cacaagacgccaaaggcccccacccaagagccgcc

SEQ ID NO: 30493 - RNA, 78 nt, Homo sapiens
cccacagacacagcaacgggccagaaaccagcaccagaaaggaacaacaacagccaaaaaaagacaacacgaggagaa

SEQ ID NO: 30494 - RNA, 84 nt, Homo sapiens
gcgcgcgcccagggcccggccgacccgcggcccggcgccgcgaggccgcggccaggccgagcccgccaccaggccaggcagacc

SEQ ID NO: 30495 - RNA, 64 nt, Homo sapiens
gcggcgcccgcgccacagccaccagagccggcagcaaagagggaacagaacccagagggaaaca

SEQ ID NO: 30496 - RNA, 58 nt, Homo sapiens
aggcgggaggggccgggaggcagaggggcagggagccggagaaagcgggaacagcaca

SEQ ID NO: 30497 - RNA, 84 nt, Homo sapiens
cggcccgagcgcaccggagggacggcacagggaggccagccggagaagcgagcagcgccccacaccaggagaagcacagcaccg

SEQ ID NO: 30498 - RNA, 66 nt, Homo sapiens
cggaaaggcacccaccagcacagagagcccccggggcagacgacaaggagaaaaagaagcagaagc

SEQ ID NO: 30499 - RNA, 81 nt, Homo sapiens
agcgaggcccacagaaaagccacaacccagcaccccccgagagccacaggacccagcagggcgcaccccaagacccggccg

SEQ ID NO: 30500 - RNA, 67 nt, Homo sapiens
acagcccacgggaaagaggggcacgcgaaaaaagcccaggacccacccggcagagaggacccagcag

SEQ ID NO: 30501 - RNA, 80 nt, Homo sapiens
aagaggggcgaggcagaccgccccgggccgcggccgccgagcgagcgggcggacaccagaacgaggaaagggaaagccaa

SEQ ID NO: 30502 - RNA, 54 nt, Homo sapiens
cgagaggaaaggcgagggaagcgccggaaacccaacagcgagggaacgcacagg

SEQ ID NO: 30503 - RNA, 66 nt, Homo sapiens
acaggagaacgggaggcgcagaaagaggccggacagacacgggcggacgaacaagaaagaaacagc

SEQ ID NO: 30504 - RNA, 59 nt, Homo sapiens
gccgcagccagcggcaggagagaaagggaggagccccaggacaacaggccggccaaacg

SEQ ID NO: 30505 - RNA, 81 nt, Homo sapiens
ggagaacaggccgcgggaaagaagagagggacaacaggagaagcggaaggagaccacccaccaggcgcaggcccagcagga

SEQ ID NO: 30506 - RNA, 84 nt, Homo sapiens
cgagcccagcagccgcccacccagccagcacacacgaaagacaggcagaagaaaccagacaagagcggagaaaaaagaaacgcc

SEQ ID NO: 30507 - RNA, 75 nt, Homo sapiens
cgcggggcgagcccggaaaaccagaccagaaacggaggagcccgccgaagcaggaccggagacaaagagagaaga

SEQ ID NO: 30508 - RNA, 80 nt, Homo sapiens
gacgccagcgggacgaggaccgagaccgcggccgggaccgagggggagaaccgccagcgacgggaaggcaggacccacgc

SEQ ID NO: 30509 - RNA, 52 nt, Homo sapiens
aggccaggcgacccgacgggccaccgcgccaggagccgagccggccaccaaa

SEQ ID NO: 30510 - RNA, 94 nt, Homo sapiens
gggcccaccggaggccggagacgagagccaagaggaaaaacgcaagaagcgcacagccgcaccagaaagagagagaagacccagacaagcgcag

SEQ ID NO: 30511 - RNA, 74 nt, Homo sapiens
gccgcccgacccagcccacccgaagggagcgggccgccgaccacccacacaggcgaccccgcacacacacccac

SEQ ID NO: 30512 - RNA, 64 nt, Homo sapiens
caagaggcagccaccacgggccggggccaacgggccaacgccggcaggggacggcccacgcgac

SEQ ID NO: 30513 - RNA, 57 nt, Homo sapiens
acgccaccgcaaggcgcaacagggcgaaccgaccaagaacaacacccagagggccag

SEQ ID NO: 30514 - RNA, 82 nt, Homo sapiens
cacgggcccggcccgcggggacagagcgggagccaccagcgccaaagggaagccaggagcccgggggcacggggagaagacg

SEQ ID NO: 30515 - RNA, 67 nt, Homo sapiens
gagaagaagaacagagcaccgcagagaaaccaaaaggccggacgaaacggacgcccacagacaagcc

SEQ ID NO: 30516 - RNA, 88 nt, Homo sapiens
gcgcggggcggcgggagagcccggcggcggagcgaacccgcgcccagagccgccccccgagagagggggcccgggagaccaggaacac

SEQ ID NO: 30517 - RNA, 73 nt, Homo sapiens
ggacacccgacgcacagaacccaggagaggaagaggagagaagcccacccaaagaaacaggacccggagggac

SEQ ID NO: 30518 - RNA, 74 nt, Homo sapiens
aggcacaccccacacaagcacgccaaggacccgaaggcaccaagcaccgcccaaacccggcaccgcacaccggc

SEQ ID NO: 30519 - RNA, 77 nt, Homo sapiens
agaaagcaggcgaacccgcggcgcaaaacgagaggagccagccacacggaaagaagaaaagaaaagagagagcagaa

SEQ ID NO: 30520 - RNA, 47 nt, Homo sapiens
gccacaagcccgcacagaaagcaagaaaagaaccgcgaaccagcaag

SEQ ID NO: 30521 - RNA, 51 nt, Homo sapiens
gacagcgcaggcagcagggggcccagagagggccgaaccggaggacaagcc

SEQ ID NO: 30522 - RNA, 84 nt, Homo sapiens
cagcccccagagcgggaccacagccaggcaagacaggccaacaccgccaccagagaaccacacaaaggaaaggggacaagacca

SEQ ID NO: 30523 - RNA, 91 nt, Homo sapiens
aggcgacaggcgcgacggcagccacaggggcagcgggggggcgaaggccaggaggggaggagggagggccacggcaagggaagcacaaaaa

SEQ ID NO: 30524 - RNA, 79 nt, Homo sapiens
cgcaaccgcgacgaagaaaaaaagagcgacgaggcaaggcccgaaggaggaaacaggacagaccggagacgcagccacc

SEQ ID NO: 30525 - RNA, 81 nt, Homo sapiens
cggaggacacaccaaacagggaacccaagccgaggcagacgccagcagacacacagccgggcacagcgccccaccccaggg

SEQ ID NO: 30526 - RNA, 72 nt, Homo sapiens
aaaaaaggaagcccacaagcggcaaacgaacaaccagaaacgccaagcaggaaaaccggaacggagaacgca

SEQ ID NO: 30527 - RNA, 75 nt, Homo sapiens
gaaaagggacgggaccaacggggaaccccggccgcaggggaagcccagccagggggagacagcgggagagccaaa

SEQ ID NO: 30528 - RNA, 72 nt, Homo sapiens
gccacaaaggaaaaggaggcaccgcggaggaggacggccaccgccccaccacgcagccaaaacgggaacgga

SEQ ID NO: 30529 - RNA, 70 nt, Homo sapiens
gaggagacagcagaccaccacgaggggaccaccaggaacagaggggcacaaacgacgaagacacgcaagc

SEQ ID NO: 30530 - RNA, 51 nt, Homo sapiens
ccaggaagacaggggaacacccccagagagaggacaccagccaacccgccc

SEQ ID NO: 30531 - RNA, 98 nt, Homo sapiens
gcgcgccgcgcggcgggcgccccgggagagcggcgccaccggaaccggcaccaccaagcgaagacggcgcgcgaagaaacaagaaccggacccagaca

SEQ ID NO: 30532 - RNA, 74 nt, Homo sapiens
accaacccgaccggagagcaccgaacggacaggccgaggggaaccaaagaacaaagaagggggcaggcgcacaa

SEQ ID NO: 30533 - RNA, 78 nt, Homo sapiens
cgaaaaagaacgacagagcaaccaggaaagaagaggcgacgagagaccgaggagcaccaaccacacgcaaaccgacag

SEQ ID NO: 30534 - RNA, 54 nt, Homo sapiens
gcgggcgccgggccaggacggcaccacgcgcgcccgagcggacaagagcagcgg

SEQ ID NO: 30535 - RNA, 66 nt, Homo sapiens
aaggaaaaaggagccgcgcccccggagacagacgcagggcgcccccggcaacggggaagacagaaa

SEQ ID NO: 30536 - RNA, 66 nt, Homo sapiens
gggggaggcccaggccaaaagaggagacaacaaggacaaagccaaagccgagaaacgacgcccaca

SEQ ID NO: 30537 - RNA, 67 nt, Homo sapiens
ggagaccacccacaaaaccaaagagaggccagccccacgacgcaggccgggcgaggcgaggccaccc

SEQ ID NO: 30538 - RNA, 68 nt, Homo sapiens
caggagcacgcgaaaaaccagaccaaacgaaacgcccgcacagaacgcaaggagggacaggacggaag

SEQ ID NO: 30539 - RNA, 78 nt, Homo sapiens
ggcgcggcacggggacgacgcggccgggcccggcaccgccgcggacggccggacaagccacacaagaaggagaaaaaa

SEQ ID NO: 30540 - RNA, 87 nt, Homo sapiens
gacggaggcaagcaaaaacaagccgacaaggaaacaaaaaacaaccaggaaaccagccaccggacaaagaggccggaaaacccgcac

SEQ ID NO: 30541 - RNA, 86 nt, Homo sapiens
ggacgggcacagcagagaccaaaggcagggcaaggaaacggccacaagagggcaaaaaaggagaaagccacaaggacaaaagacac

SEQ ID NO: 30542 - RNA, 75 nt, Homo sapiens
aaacgaaaccagggcaaaacaccacccccccacaggaaacagaagccaagggcacggccgccggggaagaccggg

SEQ ID NO: 30543 - RNA, 70 nt, Homo sapiens
acgaacaggaagccccacaccagagcaaccagagaaaggcagagaaaacaaagcgcccagcagccgaaaa

SEQ ID NO: 30544 - RNA, 79 nt, Homo sapiens
gccggagacccgggcaaaggcaccacgggaagggaagaaggcgcgggagagccggggcgccggggccgcaaggccaggc

SEQ ID NO: 30545 - RNA, 73 nt, Homo sapiens
aagacaggccacccagcggggagcacggcgagcagccaggccaggagaggcaaagcgaacaccccgcgaaaac

SEQ ID NO: 30546 - RNA, 82 nt, Homo sapiens
ggaagggagcgccagcaggccgggcgcagcacgcaaaagcacccccccggaaagcagagcaagcgcaagacggcgggaagaa

SEQ ID NO: 30547 - RNA, 75 nt, Homo sapiens
gacaccagagggccacgcagaggcggcgggcaccggaacgccaacaaaccgccagggccacgccccacgagcgcc

SEQ ID NO: 30548 - RNA, 73 nt, Homo sapiens
gcccgaaccgacggcggaccccggacaaagaaaaagcgccccgggaggagccaccaagggcgaccaacaccca

SEQ ID NO: 30549 - RNA, 81 nt, Homo sapiens
agagcaagcgggggaccgaacaaggcaaaaggggacccaaagacaggaccacgcaccagcagagaaggaaagcaaaccgaa

SEQ ID NO: 30550 - RNA, 76 nt, Homo sapiens
gaagggacgaaaaccgagagcacgaagaacaccagccagccggccgccccgccaagaggccgcgaggaaaggccaa

SEQ ID NO: 30551 - RNA, 79 nt, Homo sapiens
caacccgacggcggaaggccccaacacccggagcagcgccacaagggacaggcaagggccgcaaggccaggcgcgcaga

SEQ ID NO: 30552 - RNA, 50 nt, Homo sapiens
ggcccgacaaacaaagcgaggggggagaaaaggccaagggcaggagacac

SEQ ID NO: 30553 - RNA, 73 nt, Homo sapiens
cccgggccagcgaagcggaggcggccgcgccgaggaagcaagccagaaagccagggacgcagaacgcagggca

SEQ ID NO: 30554 - RNA, 84 nt, Homo sapiens
agacgaccccggagacaccgaagaccacaccagagggacaagggagaagaagccacaccaaaccaggccccagaccaacacaga

SEQ ID NO: 30555 - RNA, 67 nt, Homo sapiens
agagcggagccggcgggcggggaacccaggccccgccgaggcggccagaccgcccggccgacacggc

SEQ ID NO: 30556 - RNA, 74 nt, Homo sapiens
gaggaccggcaacagggcggcggggaaaagagagaacacaagaagaaagacagcacgggccgagccgcgcaacg

SEQ ID NO: 30557 - RNA, 72 nt, Homo sapiens
cccggaccgggagacacggccagacgcccccacgggacggggacggagaaaccacacacccaccaccacgga

SEQ ID NO: 30558 - RNA, 52 nt, Homo sapiens
cgcacaggccagccggcaaaaaccgcaacggggaagcagaggccagggcgca

SEQ ID NO: 30559 - RNA, 54 nt, Homo sapiens
cacagcggaccccgcccgagggggagaaggaacaagccgcccaaacagcggagg

SEQ ID NO: 30560 - RNA, 78 nt, Homo sapiens
aaagcaggagaaacaagggccaaaggaggaacggggcccgaaggcaccgcagaacggggcgggacgacaggagccaag

SEQ ID NO: 30561 - RNA, 79 nt, Homo sapiens
gccacaccggccgggccaccaccacagcacaccaagcagccaggcgccaggaacccgagagccggcgcccagaaagaag

SEQ ID NO: 30562 - RNA, 82 nt, Homo sapiens
gcgcccgggccggggagcaagcgccagcaccggcccccgggcagagccaccagcgccccgccccagcccccacgcaccgacg

SEQ ID NO: 30563 - RNA, 91 nt, Homo sapiens
ccgggaagacgcggggaagaggaggcggaaaaggacgcaaagcccggcgagaaagggcagcaagacacgaagccgagaaagagcagcgaca

SEQ ID NO: 30564 - RNA, 84 nt, Homo sapiens
gaacaacaacgagacccaggcacgccgagaggagcgaagcccaacgcaggagcgaccggccgggcggaacacccacgcgaccgc

SEQ ID NO: 30565 - RNA, 65 nt, Homo sapiens
aggggccgcaagccaggaaaagaccacaggagccacggagcgacaagcagcagagaccaaggaac

SEQ ID NO: 30566 - RNA, 87 nt, Homo sapiens
gcgagaggacaggcggaggccccagggaagcgcagaaagcaggcgaacccgcggcgcaaaacggaagcccggggcggcgacggagca

SEQ ID NO: 30567 - RNA, 77 nt, Homo sapiens
gaaggggccggagggcagggggcagggcggcagaggccaccagcccccgggccaagagcagcacggagacagagcca

SEQ ID NO: 30568 - RNA, 57 nt, Homo sapiens
cagcggcacagagggccgccagcagagcagggaaaggacaagaaagaggacgcgcaa

SEQ ID NO: 30569 - RNA, 77 nt, Homo sapiens
caaaggggcaaggacccaacccaggagaaaaagcgccgggagcgccgccaggacaggcccgacgacccagaccaaga

SEQ ID NO: 30570 - RNA, 71 nt, Homo sapiens
gacgcagcgcgccccagaagaagacacaaacagaaacacgaggacgaaaagaccggaccccaagagacaca

SEQ ID NO: 30571 - RNA, 68 nt, Homo sapiens
ccccggcgccgcgccggcggcggccccgggggcgccgagggcacaagggcaacgacagaagggcgaag

SEQ ID NO: 30572 - RNA, 42 nt, Homo sapiens
ccagccccggagagcgggaacagggacagccacgccccagag

SEQ ID NO: 30573 - RNA, 76 nt, Homo sapiens
cacaccccccgccgaggcgagaaggccggcgcggaagaggccggcggcgggacggccccacgggacccgccccgac

SEQ ID NO: 30574 - RNA, 76 nt, Homo sapiens
gagacagccaggcacagaagaacgaaacaagaaggcccaaacaggccaacacaggaagggagcaagaggaccagcg

SEQ ID NO: 30575 - RNA, 63 nt, Homo sapiens
ccggcgacaacgaacacacccagaaccaacagcacggggcaaagacgcaaaggaaaggcaagg

SEQ ID NO: 30576 - RNA, 108 nt, Homo sapiens
aaagaaggaccacgaacaaagagagagcagcacccggaaagagaaaccccaagccaaagggagaacagccagggcaggacggagacccggaggagggaaagacagaag

SEQ ID NO: 30577 - RNA, 40 nt, Homo sapiens
ccacagagaacacgaacagcaaggcccgaagaaggacaag

SEQ ID NO: 30578 - RNA, 77 nt, Homo sapiens
gcacgccccgcaggcaaaaaaaaagccggagaagcaaaaacgccagacccagccgcgaagccggaggccaaggagcg

SEQ ID NO: 30579 - RNA, 86 nt, Homo sapiens
aggaaccagacgggggcgagcgagcaccgagcaacacacgcaggaagaggcagaaaccaggcagaacgaacgggaaagagcagaaa

SEQ ID NO: 30580 - RNA, 79 nt, Homo sapiens
aaacagcggcagcccaccagaaaaccccaacaaggcgggccagagaaagaaaacggagcagcagaggagggagaagaaa

SEQ ID NO: 30581 - RNA, 72 nt, Homo sapiens
caggcgccagcgacggcgaaggccacgcacccgaacccaggacgagaaaaaacagagcggaacaagcggccc

SEQ ID NO: 30582 - RNA, 80 nt, Homo sapiens
gaccacaaagaagacaacagacaggaggcaaaggccccccgaaaaacggagagaccaaggaccgagcgaaaaaaaacgaa

SEQ ID NO: 30583 - RNA, 57 nt, Homo sapiens
gacagcacaaagcgccaagggcggccgaccacccggaaagggaacgaagcccaaaag

SEQ ID NO: 30584 - RNA, 57 nt, Homo sapiens
caacaccaccaaaagacgggagaaccaggggaaccggaagacgcgaagacgggggca

SEQ ID NO: 30585 - RNA, 82 nt, Homo sapiens
aagacagaaaaggaagacacagacagaacaacaggagaagagaacgagccccccccagcgccgaaggcccgacccagcagcc

SEQ ID NO: 30586 - RNA, 72 nt, Homo sapiens
gagaacagccgcgcggcgagcggcccgcacaaggccggcagaagaagagccgaaacgcgcggccaggggaga

SEQ ID NO: 30587 - RNA, 81 nt, Homo sapiens
cagaagaagcgagaaagcccacaaccaaagcccaggacagaagagcagaagacagagaaggaaaagaaaggaacagaaaca

SEQ ID NO: 30588 - RNA, 74 nt, Homo sapiens
ccccagcaggacgcacgcacgagccggcccagccgaagggagagcagggccccgggcgcgggagccagccgaag

SEQ ID NO: 30589 - RNA, 35 nt, Homo sapiens
gcccacacagagcaagcaaacgcaacaaggaggaa

SEQ ID NO: 30590 - RNA, 75 nt, Homo sapiens
aagaagcgcgcgagggccgcgcagggcgcgccgcaggcggcgcgcgagcggagggaggcggccacgaacacagac

SEQ ID NO: 30591 - RNA, 42 nt, Homo sapiens
cccgagagccgggaacagacgccgacaccccaggccacgagc

SEQ ID NO: 30592 - RNA, 62 nt, Homo sapiens
agagcgacaagcgcaacggggaaaccagaacacgaagaggccagaacagagagaccccaagc

SEQ ID NO: 30593 - RNA, 82 nt, Homo sapiens
ggccacaagccaagccggaagaaaacaaggccggaggaccccaccagcccaccgccggcccgcaaccccccgaagccgcggg

SEQ ID NO: 30594 - RNA, 78 nt, Homo sapiens
cagcgccggcggcgcaccccaccgccaacccacggcgagcccccgacaaggcgggcgcagcggcccagcgggcccgcc

SEQ ID NO: 30595 - RNA, 53 nt, Homo sapiens
ggggaaagcaggagagaagaccagaagggaggagaacgcgggagacagagcaa

SEQ ID NO: 30596 - RNA, 84 nt, Homo sapiens
gcacaggcgaagcgaggcggccaccaggagacagcgcgaccagcccgcgccccgcccacacagaacggccaaagaccgaccaag

SEQ ID NO: 30597 - RNA, 84 nt, Homo sapiens
acacaacacaacagacccacgaacgcgggaccgacgagaacccaggcagaggagaaggcgaagcccgaagagagcacagggaaa

SEQ ID NO: 30598 - RNA, 71 nt, Homo sapiens
gcggaccgcgccgccccgccgcggcggggacgcagggcccgccgcaggccgaggcagagacgggaagcggc

SEQ ID NO: 30599 - RNA, 80 nt, Homo sapiens
aagcgaggacacacccaggaaaagaccaggacggacaagcacagccggaaggggagggcagaacaacagcagcagaacgg

SEQ ID NO: 30600 - RNA, 66 nt, Homo sapiens
ccagcccggcccggcagcgacaggaagaaccccccggacccaacgggcccagccagcgccccaggg

SEQ ID NO: 30601 - RNA, 75 nt, Homo sapiens
aaaaggcagcccgagggcgagacgaagagacaaaagaccaggaaacaggccgacagcggaaaagaacgaccgaaa

SEQ ID NO: 30602 - RNA, 70 nt, Homo sapiens
ccgagagccgcccgggccagcggccgcgcacccccggccggaggcaccagcggagcaaaaggacggaagc

SEQ ID NO: 30603 - RNA, 77 nt, Homo sapiens
cacccccgacgaacagggcccagagaccagagcagcacaagaacagagaggacacaaacagcacaacggagaaaagc

SEQ ID NO: 30604 - RNA, 85 nt, Homo sapiens
ggggacaaggccgccgaggaacagggaacgcaacaccagaggcacaggaaacagacaaccaccccaaggggcccaagagagcgga

SEQ ID NO: 30605 - RNA, 68 nt, Homo sapiens
ggggcgcaaggccagccccagggaggcacaggacagggagcagaaggccccagaaacagcagggagaa

SEQ ID NO: 30606 - RNA, 65 nt, Homo sapiens
gcaggacaccgacaggaacagggaccacggggcccgaaggagggacccagacacccccgcagcac

SEQ ID NO: 30607 - RNA, 74 nt, Homo sapiens
ccccacccccaccagccggaaagacgagcggccagccggaggggggcaagccgagcggcaacgaaacaggagcc

SEQ ID NO: 30608 - RNA, 77 nt, Homo sapiens
agaggaaccagcaaaaaagagaggcaggaacagaaccggagcaggccgagagcggaaaagaccaaagcagaaaagaa

SEQ ID NO: 30609 - RNA, 58 nt, Homo sapiens
gagccgagagcgggcccgagcaggggggaagcacaagagggaaacaacaacagccaaa

SEQ ID NO: 30610 - RNA, 69 nt, Homo sapiens
cgagaacgggacccggccagaggaaagaacccgaggagccagcaacggaccacgcgccaccacccccag

SEQ ID NO: 30611 - RNA, 68 nt, Homo sapiens
cggcccggcgcggcgagcacacacagggccgagccggccagaacacacagaaaagggccaaaggaaga

SEQ ID NO: 30612 - RNA, 70 nt, Homo sapiens
cgccagccaggaaaaaccaccacaggcacgacgcccgagacgagaagaggcgaacggaagcaacacccgg

SEQ ID NO: 30613 - RNA, 80 nt, Homo sapiens
ggggcgacccagggcagagccacgccgccaccagggagcgccgaccacccggagcgaggcaaccgcagagcgcgacgggg

SEQ ID NO: 30614 - RNA, 73 nt, Homo sapiens
cagggagcgggacgcggggagaggcaggggcaaaaaagcgccccccaggaaacaaaacagcccaccgcgcagc

SEQ ID NO: 30615 - RNA, 80 nt, Homo sapiens
agcacggggcacggaccaacgggaacaaaacacacacccgcagacaagaacggagagggaaggggcacgaagaccaaccg

SEQ ID NO: 30616 - RNA, 35 nt, Homo sapiens
cacacccaacccaaaccaaggaagcgagaacgggg

SEQ ID NO: 30617 - RNA, 83 nt, Homo sapiens
cccgcgccacccggggccgccgcgcaggagcccccggagcgaacacagaggacagggaaaagacaacaaaagaaggaacaaaa

SEQ ID NO: 30618 - RNA, 71 nt, Homo sapiens
aacaaagaaggagcggaaaaccaggaacggccaggacaacaggcacaaagagagaaggaacacccacaggg

SEQ ID NO: 30619 - RNA, 77 nt, Homo sapiens
ccacgacaaccgggcagagagaaggaaacacagaggaagcggagagaacaaaacgggaacagcggagaagaaggaac

SEQ ID NO: 30620 - RNA, 58 nt, Homo sapiens
caaacacccagggacacggagagagaaccagaccccgaggaacagcacagccccagag

SEQ ID NO: 30621 - RNA, 69 nt, Homo sapiens
acccgaaacccaagccaggaccaagcaagagccaagggcaggcgccaggggagaggaggcagaaggaga

SEQ ID NO: 30622 - RNA, 76 nt, Homo sapiens
accccaggcagccccgcacgagcggcaaccgaaagccagcagcggggaagaaaacgccagagaagcagagcagccc

SEQ ID NO: 30623 - RNA, 61 nt, Homo sapiens
gccggagaaaagcgagacggaagaacaggggggcgcacacgcagaaagaacagcgaaaaag

SEQ ID NO: 30624 - RNA, 85 nt, Homo sapiens
ggaaccagcaacgcagggaccgcggcggaacgggcagggaaaccggagcggcagagcagaacccaagaaggcagaagccagcccc

SEQ ID NO: 30625 - RNA, 84 nt, Homo sapiens
ggaccgagagcggaccgagagcgcgaaacgcacgagaagcgaggcagcccagggaggccaagaagcaaccaggagagagcgcgg

SEQ ID NO: 30626 - RNA, 71 nt, Homo sapiens
agcacacgagaaggccggcaggcccccacagaggcacccgacacagcccgagggcagcagaccgggacaac

SEQ ID NO: 30627 - RNA, 82 nt, Homo sapiens
acgagcccagcggagcgccgcagcacagcgccaggacaaacgggcgaaaaaacgagaaagaaagcaggagaccaagaaggaa

SEQ ID NO: 30628 - RNA, 39 nt, Homo sapiens
cagcacaggcacaccacacagaaagcaacagcagaaaac

SEQ ID NO: 30629 - RNA, 54 nt, Homo sapiens
gagcacgaaggacccagcagggcaccagccaccggccacgggccaagccccacc

SEQ ID NO: 30630 - RNA, 60 nt, Homo sapiens
gggggacccagcgccccccgagcaccccagccgagcccagagccggggccccgagcacag

SEQ ID NO: 30631 - RNA, 77 nt, Homo sapiens
gggcccagaaacacaggcgaaaagcagacgaccaaacaggcacgagaaaggaaaaagaagagcacaagaccagcaga

SEQ ID NO: 30632 - RNA, 78 nt, Homo sapiens
ggggccggaaggcgcggccggaggacaccccacggcagcccacagaggaacacaaaaaacaggcgacggggaaacacc

SEQ ID NO: 30633 - RNA, 70 nt, Homo sapiens
cggccaccggcgggaggaacaaaagcacccaacgagaggacagaaaacccagagcaaagaaggcacagcc

SEQ ID NO: 30634 - RNA, 108 nt, Homo sapiens
cccaaaaagacggacagcccacgggaacaagaggggacagaaagcccgccgacacagccaccaagaaggcacaagcagaacgggaaaaggggcggaaagacgagaaaa

SEQ ID NO: 30635 - RNA, 82 nt, Homo sapiens
cccagacagacgccggggaggcagcgcgggacccagcccaggcggcgcggacggggcggaaccgagggcaccggagggaagc

SEQ ID NO: 30636 - RNA, 108 nt, Homo sapiens
ccaggcacccgcgggagcggccgcaagaacaagacccggcaggagccccaggcaggagaccaccgcccacccggcccggcagagcccccccgacacacccagggggac

SEQ ID NO: 30637 - RNA, 83 nt, Homo sapiens
caccgggaccccgccccgacggagagagcggaccccacaggcccacagagacaggggggccgagcgcacgcggccgacccaag

SEQ ID NO: 30638 - RNA, 115 nt, Homo sapiens
cccaccaccccaagggcacgagaaggagggcgcggggagcccgcacgagcagcgaacagaggaagcaccaaccgcccccaggggcagcggggagcgggggccgcaggcaaggccg

SEQ ID NO: 30639 - RNA, 80 nt, Homo sapiens
aacccagcagggaggccgaggaaagcggaaggcaagggcaaacagacaccagagagccgaccacaccagcagcagagccc

SEQ ID NO: 30640 - RNA, 52 nt, Homo sapiens
gcgcacacaaaagaggagaaaaccgggcgcagcccccggacaaacaagggaa

SEQ ID NO: 30641 - RNA, 77 nt, Homo sapiens
ggagaaggcgcggcccagcgccggcccgacacgcaggaaccgacagccagcaagacacgaccggagcgggagccaga

SEQ ID NO: 30642 - RNA, 51 nt, Homo sapiens
gcagcacacacgaaagagaagccccggaggaggcaacccacacacgaccac

SEQ ID NO: 30643 - RNA, 73 nt, Homo sapiens
ggcaaaacagcagaagaaaggagaagaaagcaaggacagaacgacccaacccaacacgaggcaccggggacgc

SEQ ID NO: 30644 - RNA, 84 nt, Homo sapiens
cagggaggggcgcgcgccgcccagcgcagcccccgaacgcggcccgcacagagacagcagcccccagggacccaaggacgacca

SEQ ID NO: 30645 - RNA, 79 nt, Homo sapiens
agccagccgacaagggcagaacgaacaggaacaaagccagacggggacccgaagaggaacccgaaggcagcaaagaaaa

SEQ ID NO: 30646 - RNA, 72 nt, Homo sapiens
gagggagaccacagcaagacccaggaccccggaagccagaaagaaccgacaccgggaaggcaccaacgaaaa

SEQ ID NO: 30647 - RNA, 83 nt, Homo sapiens
ggagggcccggccagcccaggcagccggccagggacgggcgacccccgcggcgccgggaggcgggagagcgccggggccgaca

SEQ ID NO: 30648 - RNA, 84 nt, Homo sapiens
gagcaccaggcggagcaggagcggcggcgacggccacaggggcggcgacggcgcaggcgaagcgaaacagacggaaccaaagcc

SEQ ID NO: 30649 - RNA, 79 nt, Homo sapiens
ccagaggaaagccagaaggcaccagagagaggccgaacggagcagacaaagcgagcccacagcccgggccccccgagcg

SEQ ID NO: 30650 - RNA, 55 nt, Homo sapiens
cccaagcaggacacggccggaccagggacgccagaaagagggcaacggccgacga

SEQ ID NO: 30651 - RNA, 80 nt, Homo sapiens
caaagccaccgacccaccgcgcccgggccgccggcaggcggccgcagcaacccgccgggaggagcggccgcagaagggcg

SEQ ID NO: 30652 - RNA, 63 nt, Homo sapiens
gagagggagaggacagcagcgccgaacaccccgaagccaggcccaccgccaccacacgccggc

SEQ ID NO: 30653 - RNA, 82 nt, Homo sapiens
ggaccccagccggagcagccggcccgaaccagcgccacgcaggcagccggccggaaccccgcaggcaagaggcgggcaggac

SEQ ID NO: 30654 - RNA, 76 nt, Homo sapiens
agcccacaaccgccaccacccaccgagaaagaacgggaaggaagaaacggcagaaaagacccaaaaacgaaccaag

SEQ ID NO: 30655 - RNA, 76 nt, Homo sapiens
ggcgacaaaagaaaacgacggaccagaggcccacgaaaacgaagagcaaagcaaagaaccagcagaacacagcggc

SEQ ID NO: 30656 - RNA, 88 nt, Homo sapiens
cagcaagcgcgccgcgccgcagcggcgccgcggacaagcacgagggcgcgccgagacgcccgaggggcaggggaggcaggaccaggcc

SEQ ID NO: 30657 - RNA, 82 nt, Homo sapiens
gcggcgcggcagcaggggacagcggagagaagccgggacacgcccgcacaccaaagagcgaaggagcgcggagcagaaggag

SEQ ID NO: 30658 - RNA, 71 nt, Homo sapiens
accgcccgccacccgcgcgccgccgccgaggagaaaggaacccggcaccaagagcaacaaccgagaagaac

SEQ ID NO: 30659 - RNA, 79 nt, Homo sapiens
aggaagggcagcggcagagcccaggaagagggaggaacagcagcggaaacaagcacggacggcgggagggcggccaacg

SEQ ID NO: 30660 - RNA, 73 nt, Homo sapiens
ggccggggcccaagggaggacccacccagggaacccccccaccccccgacggggcgaggcccaggcgcccccc

SEQ ID NO: 30661 - RNA, 83 nt, Homo sapiens
cgaagaccacacccggagccggaccccggagcaggcagccccgccccccccgacgggcaccacagggaggggcagcagaccca

SEQ ID NO: 30662 - RNA, 79 nt, Homo sapiens
ccgggagcgaagcccgagcgcgaggaagcacgccaaggaggaaaccaacaggaaacaggaggaaagaaaaagcagcaaa

SEQ ID NO: 30663 - RNA, 73 nt, Homo sapiens
accccaccagcgcccagcccccaggcgaggagaagggggccgagggcgaggcaggcacaggaagggcacagcc

SEQ ID NO: 30664 - RNA, 67 nt, Homo sapiens
agacagggaccgagaccgaaggcaccaaacagagaggccagggaggaaggaaagaagaagcacccac

SEQ ID NO: 30665 - RNA, 39 nt, Homo sapiens
gccccaagacgggaacaggcgaggcaggagaacgcgaac

SEQ ID NO: 30666 - RNA, 73 nt, Homo sapiens
caggcagacgggcacagcgagagcccgccacgccacaccgggccggcccagggagaacgcaaaaccaccaccc

SEQ ID NO: 30667 - RNA, 83 nt, Homo sapiens
ggaacggcccggaaacaggaggacgacagcggccgaagccagagccggggcggcgccaggccccacacgggcgcggcgcggca

SEQ ID NO: 30668 - RNA, 82 nt, Homo sapiens
gggcagcacggaaccacacagggccgccaccaacagagaagacagagcaccaacgaggaaaaccagagacccagacacgcga

SEQ ID NO: 30669 - RNA, 59 nt, Homo sapiens
accccaaccgaacaaaagacaaccagagggaaaaaacaaaggcagcacggccgagacag

SEQ ID NO: 30670 - RNA, 78 nt, Homo sapiens
gggcccccagcaaacggccgcacaacaggccaaagcacgaggagcgggaagggaagaagagccacacccagaagaccc

SEQ ID NO: 30671 - RNA, 81 nt, Homo sapiens
gcccgaagaaggagaaacgaaagaaacgcggcaggaacgccgacgagagaccaggcagcaggagaaacgagaagaaacaga

SEQ ID NO: 30672 - RNA, 49 nt, Homo sapiens
caccaaggaaagcagaagacaaacagagccaccccacgcccagacgagg

SEQ ID NO: 30673 - RNA, 77 nt, Homo sapiens
gcgcacggcgcagccgcggggcgcaggaggcgggcacagcgccaagaaccggcccggggacaccccaaaccaagaaa

SEQ ID NO: 30674 - RNA, 68 nt, Homo sapiens
aagaaggccgacacggagggggccagacacggccagccagaccgaaacccaggcaggaaacaggcagg

SEQ ID NO: 30675 - RNA, 80 nt, Homo sapiens
cagggcggaaaggaagaggagacagagggccgagaaggacaggacagcccccccggcggggaacaccgaagaacccccag

SEQ ID NO: 30676 - RNA, 64 nt, Homo sapiens
aacagccccaagccgacggcggcagcaacagaagacagcggccagcgagggcgcgacgcgggcc

SEQ ID NO: 30677 - RNA, 72 nt, Homo sapiens
gcagcagagaaagaagagagagcaggccgaggcacagaagaaagcccaggaccgacgagcgcaagcaacggg

SEQ ID NO: 30678 - RNA, 62 nt, Homo sapiens
gggggcaccagcaccccgcaccacagccaggcgcgaccagaagaagaacaaacagcagaaag

SEQ ID NO: 30679 - RNA, 75 nt, Homo sapiens
cgaaccagaagagaaagacagggaaaccaagagcagagagagcaccaggaaccagacgaacacaacagaagccga

SEQ ID NO: 30680 - RNA, 63 nt, Homo sapiens
agaagagagaccgcaacgagaacaaagggccgggagcgaggacccagcagccagcgaagcccc

SEQ ID NO: 30681 - RNA, 71 nt, Homo sapiens
aaaggaaggagcagcagaacgaaaagggacaagagacaaaaggccacgcaagagagagcgcagcacacaga

SEQ ID NO: 30682 - RNA, 88 nt, Homo sapiens
cgcccagcacgaccccgggcagcccaacgagaaccggagggcaccggaggagagaagacagccggcaaagggagacaaaacaccagac

SEQ ID NO: 30683 - RNA, 81 nt, Homo sapiens
ggccaccgcaccggcgcgaggagcagggagccccaaagagccaggaacggacaggacagaggaaaaacgcacgaagcgcga

SEQ ID NO: 30684 - RNA, 81 nt, Homo sapiens
gacacgagggcgagcccccacggcggcggggacacccgacaaaccaccacagggcgggcccaagaccccaaagaacccaag

SEQ ID NO: 30685 - RNA, 74 nt, Homo sapiens
cgggccccggcccagcaaccgacaacgcggcccggaacaaaccgaaggcaacggcacaaaacagaagcaggcca

SEQ ID NO: 30686 - RNA, 59 nt, Homo sapiens
gaacagcgggaaagaaggcaaaacacgggacgagagcacagcccccaggagaggcaggc

SEQ ID NO: 30687 - RNA, 54 nt, Homo sapiens
agccgggccggggggaacaaggaaaagagcagcagacgccgggaagcgcaccca

SEQ ID NO: 30688 - RNA, 66 nt, Homo sapiens
cgacagaggcaccccaacaaagaagcaccaaacaaagcaccagggaccaaaagaggagggaaaaaa

SEQ ID NO: 30689 - RNA, 68 nt, Homo sapiens
ggagcaagcgccaccgaaagacggaggagcggacaacccagagagaaacgccagaccacagcggagag

SEQ ID NO: 30690 - RNA, 82 nt, Homo sapiens
agaacagagagccaccgagaaaagagggggaaagaaaagagagaaagacagcaaagaaaaggagaagaaaggaaaaaaacaa

SEQ ID NO: 30691 - RNA, 78 nt, Homo sapiens
cccacaagagggacaaggacaagagcaagagggagagagacaagaaaagcgcccaggaagcggaaaaacaaaagagcc

SEQ ID NO: 30692 - RNA, 53 nt, Homo sapiens
gccagaggaggccccccagccacggaaacggcacagagagcgcgaaggacccc

SEQ ID NO: 30693 - RNA, 93 nt, Homo sapiens
cgcagccggagggacccacacgggagcggcgggccacacgcagaggacccacaagaccaccggccaggcggaagggggcagacacagccacgc

SEQ ID NO: 30694 - RNA, 99 nt, Homo sapiens
cgccgacaaggaggaggcggagcagacggagcagggagggcccagaagaaggagacccagaaggggaagaagacggacagaagcaacaaaggaaaaacg

SEQ ID NO: 30695 - RNA, 81 nt, Homo sapiens
ccgggcccgcgggggcaaccgggcgcagacgaggaaaggcagcaacaggggaagcggagggaggcaaagaagccaaaaaaa

SEQ ID NO: 30696 - RNA, 93 nt, Homo sapiens
cgagagcggggcgcagcggcgccgcgcccaggagggagggacacagccccaaacaggacgaaggcggcgaagaacgacgccgcggccggaaga

SEQ ID NO: 30697 - RNA, 79 nt, Homo sapiens
aagccggcgcaccccacaccgacaccacggaggaggcggccggagggagcgaagaagaagcgcaaacgccggcggggga

SEQ ID NO: 30698 - RNA, 71 nt, Homo sapiens
acagaggagcacccaccgaggagcggacggccaaggaggaggagcgcagcacccagggaaggcagagacgg

SEQ ID NO: 30699 - RNA, 68 nt, Homo sapiens
acggcaccgcaccgaggcgccgcgcacagcaagaagggccaagaacggcggcagaaagcaaaggcaga

SEQ ID NO: 30700 - RNA, 72 nt, Homo sapiens
aacacaaagcacgcggcagggcggaacagaagaaagaggagaaagaaacgcaacaaaggaagaagaaagaac

SEQ ID NO: 30701 - RNA, 78 nt, Homo sapiens
aaggacagcgcgaggccgcgcagcccagcgcagccaccacacgcgcccggccaccggacaagaagcaaccacggacgg

SEQ ID NO: 30702 - RNA, 80 nt, Homo sapiens
cagcgcgcggcgggcgaggcagacgcaacaccggggccacgggggggggggcgcccacacggcaggaccgaggcccaggg

SEQ ID NO: 30703 - RNA, 75 nt, Homo sapiens
ccggcgggccccgggcacaccaacaagccacgaccggggagcagaagagagaagaagcaaaccgggaccggaagc

SEQ ID NO: 30704 - RNA, 78 nt, Homo sapiens
gcaacaaaagaaacggaagcaaacgcagacaaagaacaaggccgggagaaggggcaaggcgagacacagcccgggcca

SEQ ID NO: 30705 - RNA, 78 nt, Homo sapiens
ggagcccgccgccccgaaaccaccgcgagcggccacaagaacggaagcagaagcacgcaagcagagacagagaggaag

SEQ ID NO: 30706 - RNA, 75 nt, Homo sapiens
ccgggcccacgcggaacgacggggcgagggacgcgagagcccacgaagagcgacggagcgaacccggacgaagaa

SEQ ID NO: 30707 - RNA, 73 nt, Homo sapiens
caaaagcaacaaagaggaggagcaagccggagccaggcccaaccgcgcaagggaggccacgaaaccagagcgc

SEQ ID NO: 30708 - RNA, 75 nt, Homo sapiens
cagaaacagaaagagaggaccgcggcaaggaaaacgaccagaaagggaagggaaaaacaaaaggcacaaaaagca

SEQ ID NO: 30709 - RNA, 70 nt, Homo sapiens
aacggcagcagaaccaaacgaagcaaaaaccgaagcaagagacagcaaaaagaagcacagaaaagcgaac

SEQ ID NO: 30710 - RNA, 68 nt, Homo sapiens
gaaggaccaagaaccagggaagcgagaaacagagagacaggccaaagccccaaggccagagaagcggg

SEQ ID NO: 30711 - RNA, 66 nt, Homo sapiens
aaagaagaagagaagcgaagaagggaaaggaagcggggagaggagagccccgaaggggacaaaaga

SEQ ID NO: 30712 - RNA, 75 nt, Homo sapiens
ggaaagcaccgaggcacaacagccgccgggagcggagaggagcagcgagccgacagccccccgaagcacaaaacc

SEQ ID NO: 30713 - RNA, 67 nt, Homo sapiens
cacaccccccgaacaagcgggagcggcagcccacaagcaggaagaccagccccaggagggaaacaga

SEQ ID NO: 30714 - RNA, 72 nt, Homo sapiens
cgaagaggcagagagcaaagaacccccaagcaggaaggccgcaggagcccgacccaggggcagagacgccac

SEQ ID NO: 30715 - RNA, 79 nt, Homo sapiens
cggagcagccagccaggcccgcgagccgccaggcgcaagggccaagcacgcgccagaaaacaggacaggagaagaacac

SEQ ID NO: 30716 - RNA, 88 nt, Homo sapiens
cgccggggaggcagcgcgggacccagcccaggcggcgcggacggggcgggacagcagggcccggggagccaggaggcggcggaggcgg

SEQ ID NO: 30717 - RNA, 78 nt, Homo sapiens
gcagaggcaccaaacgcggccaaccgccggaaacgaaacagcgcagccaggaacaggacgaagaccagcgccagggaa

SEQ ID NO: 30718 - RNA, 67 nt, Homo sapiens
gcaaacacccggggcacaaagaagagcggaagagaagagcgccgcaggccgccgaccagccacgcgc

SEQ ID NO: 30719 - RNA, 69 nt, Homo sapiens
gcacacgggcagcaacggccaggcgaaccagccgaaaaaggagaaaccaaaaggaaaagcgaaccagac

SEQ ID NO: 30720 - RNA, 82 nt, Homo sapiens
gaggggacaccagcgaaggagcgggcaaacagaaggaagccaccgccccaccaacggggccaaccaaaaggagcaggccagc

SEQ ID NO: 30721 - RNA, 98 nt, Homo sapiens
aaacaagaaggggccggaaagggggagcggaaaacacacagcagaggaaaaacagggaaaaacaagagcagggaagaacgagagagaaaagagaggca

SEQ ID NO: 30722 - RNA, 79 nt, Homo sapiens
cgcccagaggcccaccggcggggaagaccagggcaaaggcggggcacacacacaacaggacacaggccgacaccaccgg

SEQ ID NO: 30723 - RNA, 94 nt, Homo sapiens
gaagagccaggcgggagcgggaagcgcaccggagcagggaggcagagggaaaagaggacgaggcgcgaaaaggcaaaggcaagaaagagaaagg

SEQ ID NO: 30724 - RNA, 73 nt, Homo sapiens
gaagagaggagggagaacacagaaaccggccccagccagcccggacaccagaaaaggcggccaacaagacgag

SEQ ID NO: 30725 - RNA, 76 nt, Homo sapiens
aaaccccacgcgcccgcaccggcgccgcgcgacgacagaccacgccgaggccccacaggggcccacggcggggagg

SEQ ID NO: 30726 - RNA, 59 nt, Homo sapiens
gcaggaagaagcgaagagggcagggcggaggcgcacggaggccgagagaggaggaggcc

SEQ ID NO: 30727 - RNA, 80 nt, Homo sapiens
gggggccacacgcaaggggaacagacaccaacaaggaaagaacggaacgaccgagaaaaacaaggaccacaagcaagaca

SEQ ID NO: 30728 - RNA, 84 nt, Homo sapiens
cgaccggcggggcgcgccaaggacacggcacaccgaccgacgcaggaggcaaagggaccccaagaaaccaaagggcaagagccg

SEQ ID NO: 30729 - RNA, 83 nt, Homo sapiens
gaaggagccaaggaggaggaaaacagggaagacccgggacacaccaacgcaccccccaagacagacaccaggaaacccacgca

SEQ ID NO: 30730 - RNA, 69 nt, Homo sapiens
acacgcccaagggcagcaagaaagggaaggaggggaaagaaaaagagcccaccaaaaggaacagacggc

SEQ ID NO: 30731 - RNA, 76 nt, Homo sapiens
acaccagaacgaggagacgagacgaggccggcaacccacagacgacgcagccagagcagcaagaggccaaggggac

SEQ ID NO: 30732 - RNA, 61 nt, Homo sapiens
gcacccgcagcccggaaccacgcaccagacaacacagggggcaaaggaaaggggcaggcac

SEQ ID NO: 30733 - RNA, 80 nt, Homo sapiens
gggaccgagcagccgaggcggcggcacagagcccggcccgccagcggaggggggggaacagcgggaccggagaggacagc

SEQ ID NO: 30734 - RNA, 55 nt, Homo sapiens
cgggaagagagcacaaggaggccaggccagagggaccaacgaaggcaaacaccac

SEQ ID NO: 30735 - RNA, 61 nt, Homo sapiens
acaccgcggggccgaaaacaacgacaacgagcacagaaacgcggagcgaacccggccaggc

SEQ ID NO: 30736 - RNA, 84 nt, Homo sapiens
ggaggcccagagcacgacgagcgcggaggaccgggaggccccgggcgcgggggagcgggaaacgcacaacagagaacagaaaag

SEQ ID NO: 30737 - RNA, 75 nt, Homo sapiens
cagcgcgacaaggccggaagagcagcaccggaccagcggagcggccgccgcagcacaaaacggaccaggcccagg

SEQ ID NO: 30738 - RNA, 80 nt, Homo sapiens
ccgacacgcggcccgaggcaacggccacagaaggagacccaacaccccggccagacgggccaccaggccggcgccccacg

SEQ ID NO: 30739 - RNA, 68 nt, Homo sapiens
ccgagacccgccgcggggggcaccaggccgggcaggcacggggacacaaggccacgcggcggggaagg

SEQ ID NO: 30740 - RNA, 70 nt, Homo sapiens
aaaaaggaagaacaacaagagcccaaaggacaagcccccacgaggaaaacccccccaccgaaggagggcc

SEQ ID NO: 30741 - RNA, 77 nt, Homo sapiens
gcaaagccaaagcgaagacagccagaaagaaaaggcaccgccaaagagggcgacgagcgcgagcggcagaagaaaga

SEQ ID NO: 30742 - RNA, 74 nt, Homo sapiens
caagaacgaccgagaaggcgggcggcagaaaccaaacacaacgaacgaggaagggagcgggccagagacaaaca

SEQ ID NO: 30743 - RNA, 74 nt, Homo sapiens
cggggcgcccggcgccggccgagaaggcagaggcggccagcggagacgccaacagagaagaagaggacacccac

SEQ ID NO: 30744 - RNA, 72 nt, Homo sapiens
gaaggaaaagaaaagcgggaacgaccggggggaagaaggacagaacaagaggagccgccgccccaggcggag

SEQ ID NO: 30745 - RNA, 81 nt, Homo sapiens
ggaaaacacgggccaacacggcgcgaaagccagggaaggaaagggccagggaaaacacaccaaacaggccaccaagcacgg

SEQ ID NO: 30746 - RNA, 70 nt, Homo sapiens
gcacaacaggcagacagacaagaaagcacggacaccccccaaggaaaagacgaaaagaaacaagacagac

SEQ ID NO: 30747 - RNA, 57 nt, Homo sapiens
aacgccgccaccagccaccaccaaggccaagaaagccggacagggccagcaaacaag

SEQ ID NO: 30748 - RNA, 59 nt, Homo sapiens
gacacaaccaacaacagcggacagcagcagcacagcaaagaacccaggcccaaagaaag

SEQ ID NO: 30749 - RNA, 76 nt, Homo sapiens
acagaaccgaacaaggaaaggaaagacgccaaagaaagcagcaacgaccaaggaggcgccggccggggaaagcccg

SEQ ID NO: 30750 - RNA, 80 nt, Homo sapiens
gccgcgagccgcgcggagccgcgcagccccggagcacgggcagcagcaggaacaggaacagccaggagcacaaacaaaag

SEQ ID NO: 30751 - RNA, 78 nt, Homo sapiens
cgggcgcgcaccgccgcccccccagacaagaggacaccgcggaggaaggaaacaacgggaagacacggagaaaaacgg

SEQ ID NO: 30752 - RNA, 79 nt, Homo sapiens
accagaaaaaacagcacaccaggaagcaagggaaacagaacgacagcccgcaccgacgccggcggccagccagagagca

SEQ ID NO: 30753 - RNA, 54 nt, Homo sapiens
cccaagaaagagcgcagcgggagaagaaaccccacagcggagaaaaaggagaaa

SEQ ID NO: 30754 - RNA, 79 nt, Homo sapiens
ccccaaacaggacgaaggcggcgaagggagaagaaaggggaccggggacacacccacgaacacaaagggcccggacgga

SEQ ID NO: 30755 - RNA, 76 nt, Homo sapiens
ccgggcagagcagcagaggagaacaccagcaggaaaaaagagcggcagaaggccaaacggccgagcaggcgagcga

SEQ ID NO: 30756 - RNA, 84 nt, Homo sapiens
cgcggccgagccccgacggccacccggcgggagagaccggaagaagggaaggaaggaccccaggacaggaagggaggcccgccc

SEQ ID NO: 30757 - RNA, 74 nt, Homo sapiens
acagaagccgaaaagaaagaaagaacaaggccgcccagagaagcgaaaaggcgaaacgaaaacgaaggaaggag

SEQ ID NO: 30758 - RNA, 73 nt, Homo sapiens
cgggcgccgcaccaggagcgaagagcgccgacaaggcagaaaaaaccagcaggccaggaacacaacccaccga

SEQ ID NO: 30759 - RNA, 52 nt, Homo sapiens
ccagcaacggcacagccgcacacgggggagcaacacgcagaagggagaaacc

SEQ ID NO: 30760 - RNA, 67 nt, Homo sapiens
gccaagccaggcgagacacggcaaacccagcaacacggagacacagggaacagcaagccaaagagcg

SEQ ID NO: 30761 - RNA, 76 nt, Homo sapiens
ccgggagcagcagagaggagcagcggaagccgggcgcgcccccccgcgggcgccgcccaggaaccgggccgaagac

SEQ ID NO: 30762 - RNA, 86 nt, Homo sapiens
aggcgacagcggcggcgggagcggcgccgagaggccggcgggacgcgggcgccaggaccggccgaacgcagaggcgggaaaacggc

SEQ ID NO: 30763 - RNA, 70 nt, Homo sapiens
agagagaacacagaacaagccagaaacagccgggacagggccagaagcgagcaccaaagcaaagaccacc

SEQ ID NO: 30764 - RNA, 76 nt, Homo sapiens
acccacacccaccaacaacaccacaaaaccacagccaagaaccagaggaccggcaacaacccgaggacgaaccacc

SEQ ID NO: 30765 - RNA, 71 nt, Homo sapiens
cgccgcggccacccaaccggagccagacaccacacgaaggagcaagggcaacacccggagagaagagccgc

SEQ ID NO: 30766 - RNA, 83 nt, Homo sapiens
agggcacgccagcggcgcgagaggaccaccggggcggcccggcggagcaccgacccccgaagagcagaagaaacagagcgcaa

SEQ ID NO: 30767 - RNA, 85 nt, Homo sapiens
cggcgcgcggccgggcggcgaggaagaggaaggaaggagcgcagcgaaacagggaggggaggacacgccagccgcccaagaggac

SEQ ID NO: 30768 - RNA, 73 nt, Homo sapiens
aacagacagcccaaagaagcgcaggggaaacaaaaccgaggaaacaggcgccacaaaggaagggggcgacagg

SEQ ID NO: 30769 - RNA, 50 nt, Homo sapiens
aaggacaaaaccagaagcagggaccgaagcgccggccagaccaggcgagc

SEQ ID NO: 30770 - RNA, 54 nt, Homo sapiens
gcagacgaggccgaggcggcggcgcgaggcagacacaagcgggacggaagaggc

SEQ ID NO: 30771 - RNA, 81 nt, Homo sapiens
gacagagaccgcagaggcagagccaaagggaccgggacaggggaagaaaagaagaagaagagagaagaagacacaagaagc

SEQ ID NO: 30772 - RNA, 76 nt, Homo sapiens
gaacaggagcacaccgagagaaagcaggggacacgcacccgacccaagagaagaaaggccggccacacacggcaca

SEQ ID NO: 30773 - RNA, 76 nt, Homo sapiens
ccacgcgcggaaggcagcgcccagcagcgcagagagcgggacgggcagaagaaaacccaccaaggggcaacaagca

SEQ ID NO: 30774 - RNA, 73 nt, Homo sapiens
ccccgcgcaggcgccaacgccccggggagaagcgagcgacgcacaaggaaaaacagagagaaaggccgagcaa

SEQ ID NO: 30775 - RNA, 82 nt, Homo sapiens
cagccggaacgagccggccggagcccccgcccaaggagaagcgcccaagcggacgagcgagcccagccccgcggaaccaagg

SEQ ID NO: 30776 - RNA, 72 nt, Homo sapiens
gacccggaagcagaacccaagaaccgggaaacgaagaccgagcgagagcagccagagcgagagaagaggagg

SEQ ID NO: 30777 - RNA, 73 nt, Homo sapiens
agggaagaacgcgaagcgaggagaggacggggagggaaggggcgagcccggggaggcccaccgccacccacca

SEQ ID NO: 30778 - RNA, 72 nt, Homo sapiens
acaaacgagcacgcaaagaagacagaacagaagaggaagaaaaaaaaaaccagggacaagagacacacagaa

SEQ ID NO: 30779 - RNA, 73 nt, Homo sapiens
gaaaaggaggccgcaagaggaagaaccagccaggggaccacagaaaaccaggggcaagaaacagaaccaaggc

SEQ ID NO: 30780 - RNA, 83 nt, Homo sapiens
ccgcccggacacaaccccgcagcagcgggggcggagccaccaacacacgccacccacagcgaggagaaggcagagccccccca

SEQ ID NO: 30781 - RNA, 83 nt, Homo sapiens
acccgcgggagaggcgcagcggaggcggaagcaggaccggggcacgggaccagagcccgcagggaggaagagagaagaaggag

SEQ ID NO: 30782 - RNA, 73 nt, Homo sapiens
cacggcgccccgcaaggcaaaagcagaccggaaaacccaccggcaagaccacacccgaggggagcccaggaca

SEQ ID NO: 30783 - RNA, 85 nt, Homo sapiens
cccggcgccggccgcggcgcaggaggagccggagagcagccaaggggaagaaaggggggacaacaccacgggcccggggggccgg

SEQ ID NO: 30784 - RNA, 69 nt, Homo sapiens
gcacacaaggaaccgggaggaaaagaaaaacagccagccaacgaccgaggaacaggacacccaaccgcg

SEQ ID NO: 30785 - RNA, 52 nt, Homo sapiens
cccggacaaccagaggcagccagcagggggaggacccaggaagcacggacca

SEQ ID NO: 30786 - RNA, 65 nt, Homo sapiens
ggagggaaggcaagagccaacccaaaaccaagccaaggaagcacgggaagaacagaaaagagaag

SEQ ID NO: 30787 - RNA, 77 nt, Homo sapiens
ccaggggcgagccacagcgaaaggaacaggccaagacaaccccagagagggggggcagggggcggaggcaacaagac

SEQ ID NO: 30788 - RNA, 81 nt, Homo sapiens
cacacaaaagggagcaagacgccgcgcgcgacaaggccccaacaccaaacacagaagcaacagccacacagaggcagcaag

SEQ ID NO: 30789 - RNA, 76 nt, Homo sapiens
ccaacaagcggaaaaccgaagggccgacgacggacgccgagccgagaggcgggcagaggaaggggaagacacagaa

SEQ ID NO: 30790 - RNA, 68 nt, Homo sapiens
aacgcacaccagaggaaggggaccaaaagaggcccggaaaaagagggacgcggacagagacgggacgc

SEQ ID NO: 30791 - RNA, 88 nt, Homo sapiens
gccggaccaccgccgccgccgccgcgggaccgaggcgggcgcgggcgcgggcgccccggcgagccacgagaaacggagaggagaagca

SEQ ID NO: 30792 - RNA, 99 nt, Homo sapiens
ggaaccacacgaccggaccagcccgacgcccgaggagaaggaggagggaaaggcaaagccgacgcccgccgcggccggggaacaggccacagccaggag

SEQ ID NO: 30793 - RNA, 70 nt, Homo sapiens
ccgcccagccccagagagcgggaacagccaagagagaacacgaaggaccaaccaaggggagcagcaagca

SEQ ID NO: 30794 - RNA, 91 nt, Homo sapiens
gaggaggaggaggagggcgcgcggaggggaaaggcgccgaaaacaagccggaagagcgaagaagcaggggagaggccgagcgaagaaccag

SEQ ID NO: 30795 - RNA, 49 nt, Homo sapiens
acccccgacgccaggcagcgcccccaaacgggcacacaccccaggaggg

SEQ ID NO: 30796 - RNA, 72 nt, Homo sapiens
caagaaaaagagcgaaaaagacacgccgggaacaaaccaggggagggaaacgagaaaaacgacgccagcggc

SEQ ID NO: 30797 - RNA, 82 nt, Homo sapiens
cggggggcagccgccgcccggacccccagcgaagaaacaggggagaaaccccgcggggaagccgaggaaagcaacgcgccag

SEQ ID NO: 30798 - RNA, 75 nt, Homo sapiens
cccccccccccgacagagacggcggagaccccgaaggcgcaaacgacaccacccgaccgaacagaagcagagaca

SEQ ID NO: 30799 - RNA, 70 nt, Homo sapiens
aaaacaaacggaaaaaaagaacagagaaaaaaccaacaccccggcagccgggaaaaccggggaacagacc

SEQ ID NO: 30800 - RNA, 65 nt, Homo sapiens
cggccagaagaccccgggaaaggcgacgcccacgcgcccgcaacagaggcgggaggcggcagaag

SEQ ID NO: 30801 - RNA, 37 nt, Homo sapiens
cccagaagaagggcaccagcgaagcagacagccgaga

SEQ ID NO: 30802 - RNA, 75 nt, Homo sapiens
acaagcggcagccgccccagccagcggacacaggagcccgacagcaccagcaggaccaacgagaccgaaaagcac

SEQ ID NO: 30803 - RNA, 37 nt, Homo sapiens
gcaccacgccgggaacggcgccgccagcgaggaacaa

SEQ ID NO: 30804 - RNA, 75 nt, Homo sapiens
gacagacgggcccagccggagagcaccagggaaaaagcgcggcaaagcgcggcccacacaggagccaaggaaagc

SEQ ID NO: 30805 - RNA, 79 nt, Homo sapiens
gacaccaggaccgaaacccgaaaaggaggaaaaagaccacggaagcgacagcagccaggcgagcggcagggagacagcg

SEQ ID NO: 30806 - RNA, 70 nt, Homo sapiens
ccagccgccacacgaggccggaggagaggccagcacagggggccacaccaaggcaaaagcagaccggaaa

SEQ ID NO: 30807 - RNA, 80 nt, Homo sapiens
caagcacacccaaggacagcagcccaccaagcacagacaagcagcacaacgaaacgaaggagccaaaaccagcacaaggg

SEQ ID NO: 30808 - RNA, 81 nt, Homo sapiens
agccacccagacacgggagcagggcgcacagggaaggggaagacggcagcgggccggaggcccaaaagaaacaagaaacca

SEQ ID NO: 30809 - RNA, 38 nt, Homo sapiens
gagacagccccccaagcgccgccaaaagaagaacccgg

SEQ ID NO: 30810 - RNA, 79 nt, Homo sapiens
cccgcgggcccggccacggcggagccaagggggcacccgaggaggaagagggcagggcccacggaaagaagggaaaccc

SEQ ID NO: 30811 - RNA, 75 nt, Homo sapiens
ggggaacaagagacccggcaacccgccgcacaacaagcgcggaccgcccgaagaacgaccagcggcagacgacaa

SEQ ID NO: 30812 - RNA, 75 nt, Homo sapiens
cacacgagccaaacaaagaaacaggcaacacggggaacgccagcaaagagaagggaaggcaccaccaaaggcaaa

SEQ ID NO: 30813 - RNA, 77 nt, Homo sapiens
agagccaggcccccacaccggaacagagagcgcgccacgacaaacagcacggaggaggcggcaggagaagcagagaa

SEQ ID NO: 30814 - RNA, 71 nt, Homo sapiens
agaggaaggaacgaaccccacacagagacagcccaaaggcaggcccggcaccgaggccgaaacccaagggg

SEQ ID NO: 30815 - RNA, 77 nt, Homo sapiens
ggcgcgcgcggcgcgggacgcgcgcgggcacccacggagccccggggcgggcggagaacggaaaagcaccaggaagc

SEQ ID NO: 30816 - RNA, 81 nt, Homo sapiens
gaaaccccaaaaaagacaggggagaaaagcaacgagagcgccgaccgaggcaggacaaagagcaccaccccgggacaccaa

SEQ ID NO: 30817 - RNA, 78 nt, Homo sapiens
cggagaccagaggcaccgacgggaggcgaggccagaggacaggccgagcgccggccggaacacgggcagagaggccag

SEQ ID NO: 30818 - RNA, 86 nt, Homo sapiens
cagccaggggaacgcccgacgcaagcgcgcggaaaaggaacagaagaggaaccgaaacccaagaaaaaccacccagcaaagaagca

SEQ ID NO: 30819 - RNA, 74 nt, Homo sapiens
cccagcaaaggagagcaggagaaaaacggcagcaggaaccccaaacccaccagaaaagccccagcgagcggcac

SEQ ID NO: 30820 - RNA, 84 nt, Homo sapiens
gaaaggagcgccccaaaaggaaacagcggacgaaagaaagaaggagcaccaacgcaaagaaaaagaccaagaagaccagggacg

SEQ ID NO: 30821 - RNA, 69 nt, Homo sapiens
gcaggggcggcaccaggaggggccaccaggccccccccgcgagggaagaggaaagcacaaagacaccca

SEQ ID NO: 30822 - RNA, 52 nt, Homo sapiens
ccccaaaaggcgggaacagagggcacaccggaagacacagacggagggaaaa

SEQ ID NO: 30823 - RNA, 75 nt, Homo sapiens
ggacggaccccccgaacagaaacaggcgggagggacaagaagaaaggggaccgagagccgggaaggccgacaggg

SEQ ID NO: 30824 - RNA, 61 nt, Homo sapiens
gagaaggccgccgggcccgggcaggggcggggcaacgcggaagggccagaacgcggagacg

SEQ ID NO: 30825 - RNA, 96 nt, Homo sapiens
gaccgggaccgcccggacccggccgggagaagcagcagagaaagggcccccagaaaaccagaagcgaccacaggcagaaccaaggggaggcgccgg

SEQ ID NO: 30826 - RNA, 76 nt, Homo sapiens
cggcacgcgcccacggcgggcccggcggggaggcgaggagaagcaggaaggaaaaaaaccagaagaggaccagcac

SEQ ID NO: 30827 - RNA, 71 nt, Homo sapiens
gggcaacgaaggcccacaacggcagcacaggaggaaggaaggaagacccacaagagaccacgcagagacag

SEQ ID NO: 30828 - RNA, 75 nt, Homo sapiens
agccaccagccaagaccaagcgcgaaagcgccaaaaggacagcagagacaaaggagaagcaagacagaaaagaca

SEQ ID NO: 30829 - RNA, 76 nt, Homo sapiens
acagccgcagggagaacccgaggcggggccggcccagggagaacgcaaaaccaccacccccacaaaaaacgcaggg

SEQ ID NO: 30830 - RNA, 41 nt, Homo sapiens
aggcaccaccggccccggaagcgagcagcgagcagcgacag

SEQ ID NO: 30831 - RNA, 73 nt, Homo sapiens
aaacgccggaaggagcgcaaagaaggagggaacccagaccaggccaaagcaaacaacagaaggaaaagagccg

SEQ ID NO: 30832 - RNA, 81 nt, Homo sapiens
gaagggaacaagaggggcagcaagggccaaaccaagacacccaggagaaagacagcggggaaaagaaaaaggagggggcaa

SEQ ID NO: 30833 - RNA, 73 nt, Homo sapiens
gcacgggaaccgaagagagccgggcaggacgaaccaaagcaaaccacgggacgggggacccggaagacccgga

SEQ ID NO: 30834 - RNA, 66 nt, Homo sapiens
gcgcgcggaggcaggccagcagcaagaaacaggaaaggcaagggagggagaaaacaacacaaggag

SEQ ID NO: 30835 - RNA, 82 nt, Homo sapiens
agcgcaccggagcagccgggagcgcggaggccgcggcgccggcgccagcgagcagcgaggagcaaaagagccaacacccagg

SEQ ID NO: 30836 - RNA, 79 nt, Homo sapiens
cgaggagcggaccacgccccaagacagacccagacaaaacccgaagcagaaagccccccaaaaaagcgagaggaaaaag

SEQ ID NO: 30837 - RNA, 59 nt, Homo sapiens
agccgggggcccccacggacgcgcgagacaagaggaggagaaggggacagggaggagag

SEQ ID NO: 30838 - RNA, 87 nt, Homo sapiens
caggagagaacgagcgggagagcacgacaacacggcaggacgagccgaggagcagaagacagagggaggagggccacggacaaacac

SEQ ID NO: 30839 - RNA, 72 nt, Homo sapiens
cgaggcaccagcaacgaggcacacggaaggaaacagagaaagccggcaaacaaaggaaggacccaggcgaag

SEQ ID NO: 30840 - RNA, 75 nt, Homo sapiens
gcggcgcagcgcgacggcgccggcagggaggcaagcgccccgacccgcaggccagcacaccgacagagaacccag

SEQ ID NO: 30841 - RNA, 84 nt, Homo sapiens
agccaccggcacggggcgggcagcggcgccgggcacaggagggaagagcaagaaccagcgagagggaagcacgagaccgagaac

SEQ ID NO: 30842 - RNA, 75 nt, Homo sapiens
gagaacagcaggcagaacacggaggccaaacccagacgcaaccacccccagagggaacaggacccaacagaggaa

SEQ ID NO: 30843 - RNA, 48 nt, Homo sapiens
gcgaagcaacagagaacaaggacggcacaaaccagggaccccgggagg

SEQ ID NO: 30844 - RNA, 72 nt, Homo sapiens
agggcagaggaccaggacgcgccccgaccagcacagcagccaggcccagaaacccacccaccacgacccaca

SEQ ID NO: 30845 - RNA, 74 nt, Homo sapiens
accaagaaacagcgagcagcaggcaaacggaccagcagacaacaggacaggcaacaaggaagaccaacggagaa

SEQ ID NO: 30846 - RNA, 80 nt, Homo sapiens
ggagaaacgagaggggaaaagacggaagacagacggagaaggaacccggccgggcggagcagcgggaagaaggcaggaca

SEQ ID NO: 30847 - RNA, 76 nt, Homo sapiens
gagcagggccaagcgaaggccccagcaggaccccgccccccccggcgccagggggcaccaaagcggggggagggcg

SEQ ID NO: 30848 - RNA, 66 nt, Homo sapiens
agagaggagggagaacaagcaacggcgggggcaacagaaagccacaaccggacaagaaaaaaaaga

SEQ ID NO: 30849 - RNA, 67 nt, Homo sapiens
gcccggagagaaagcgcccaaccacggagaaacaacgcagacgaggaggaggcagagagagacacgc

SEQ ID NO: 30850 - RNA, 53 nt, Homo sapiens
gaccacagaaggacgggagaacaccccacagggaagaggcgcgcagaagaaag

SEQ ID NO: 30851 - RNA, 68 nt, Homo sapiens
gaagacccggacgcaccagcagaaagagcacaacacagaagaaacggcaagcaaggacgaacacacaa

SEQ ID NO: 30852 - RNA, 81 nt, Homo sapiens
ccgacccacaacgggaggggccaccggaccccccaacaccccacgaaggcggcaccaaggaaccagaaagagacaagaagg

SEQ ID NO: 30853 - RNA, 83 nt, Homo sapiens
agacagagccgggccagcccagagacaggagaggcacaacccaccaggacccgaaaagccagcaagcgagaccaacaccaaca

SEQ ID NO: 30854 - RNA, 67 nt, Homo sapiens
aaaaacgcgcccgcaggggaaagaacgagagccaggccgcaggaacagcgccgaagccaagaagcgc

SEQ ID NO: 30855 - RNA, 76 nt, Homo sapiens
ccagacacagacgagcaggggaagcacaggagacgggggcgcggagggcaacgggggggcgcacacacgcacacgg

SEQ ID NO: 30856 - RNA, 82 nt, Homo sapiens
cagacagaaggggagacagcccggaacagagagcagggggcgcggccggcaggcgcggagccccagcaggaccgcgcccacc

SEQ ID NO: 30857 - RNA, 79 nt, Homo sapiens
cagggcggcaacaagaggagaaaaggaacccaaacagagccacccccacccaagaggccggccgcggagaaccgaaaaa

SEQ ID NO: 30858 - RNA, 87 nt, Homo sapiens
ccgccccgccgcggcgcacccgccccgcgccgcagaccccaagaagaagcggaagaggagccgcggaaccaagacacaaggaacaga

SEQ ID NO: 30859 - RNA, 73 nt, Homo sapiens
cacaggcccgcagcccggggcgaacacggacaccaacgagcgaagcaggcagaccagggccagagcaccagac

SEQ ID NO: 30860 - RNA, 54 nt, Homo sapiens
agaaaccgcagaagcaaaagaagccccagcgacaagcccccaacaaagggagaa

SEQ ID NO: 30861 - RNA, 73 nt, Homo sapiens
gaagaggcagggcaaaacgaggcgaccaacgaggacaggcgccaaaacaaaacagagagacacgaaaggccag

SEQ ID NO: 30862 - RNA, 83 nt, Homo sapiens
gagaccggaccgagagcggaccgagagcgcgaaacgcacgagaaggagagaacaaggagcaggccaacggccagaagaacgag

SEQ ID NO: 30863 - RNA, 79 nt, Homo sapiens
agagaggcgcccggagccccggcccgcgggacggggaaaaggccccgggccccggcgcccggcaccaggcccaccggcc

SEQ ID NO: 30864 - RNA, 68 nt, Homo sapiens
ggagcccgcgcccgccgcgggagagaggacccccccccccccccaagaggcaaacggagaggcaagac

SEQ ID NO: 30865 - RNA, 85 nt, Homo sapiens
aaagaagacaagcgaggacaaagagaggccccagaaacaaacggagacaagcgcaagcagccagagcccgggcgcaaagaaccag

SEQ ID NO: 30866 - RNA, 85 nt, Homo sapiens
agcgagccaaacagacgccccggaagcaaggcagaggggaggagacacgaagcgacgcagagccagaagggaggcagggaacacg

SEQ ID NO: 30867 - RNA, 80 nt, Homo sapiens
caacagcagcgccagagagagggcacggggcgccgcaggcccagcgccggcgcaaggcgaccggcccgaggaccgccgca

SEQ ID NO: 30868 - RNA, 74 nt, Homo sapiens
ggggaccaccgccggccaggggcggaaacccggaccgccgcgccccccaacgaccaggccccaacaacacgcgc

SEQ ID NO: 30869 - RNA, 40 nt, Homo sapiens
agacaacaccgagagagaaggccggcaccccaaggggggc

SEQ ID NO: 30870 - RNA, 40 nt, Homo sapiens
gggaaagaaggcaaaacacgggcaggacggcggcaaaacc

SEQ ID NO: 30871 - RNA, 93 nt, Homo sapiens
ccccgacaacgagacaacaagccaacccaagaagcggagcgaagcgcgggaggcccccagccccagcccccgaggaaagcacgcacaacgagg

SEQ ID NO: 30872 - RNA, 56 nt, Homo sapiens
gcagaggaaagccggagaaagaagaaggcaccagccacagccgcacgccaagagca

SEQ ID NO: 30873 - RNA, 52 nt, Homo sapiens
caacaaagaaacaccacccacagcggcccgggagggaacaaagaggaacagg

SEQ ID NO: 30874 - RNA, 74 nt, Homo sapiens
ccgggccccacgacaacggcacagcggggggggacaagagggcaagcgaaaaagcacgaagcagggacgcagaa

SEQ ID NO: 30875 - RNA, 83 nt, Homo sapiens
aggcaacgggaagaccggggacccaccccgcaccagggggcgcaacacgaccaggccacgcagccagacccccagcggagcaa

SEQ ID NO: 30876 - RNA, 73 nt, Homo sapiens
ccgaagaaacagacccccagacggagaagcgccggcccacgagacgagggcgaggccccgcaagacccggcca

SEQ ID NO: 30877 - RNA, 78 nt, Homo sapiens
gagcacagagccgccggaaccgggccacgagcgcagggaggcaccaggacaaccgccaacacaccaggagagaaagac

SEQ ID NO: 30878 - RNA, 70 nt, Homo sapiens
aagagcagaggccccagaccgccaagaggcacagccggaggacaaggaggcgcaaggacagacgagaacg

SEQ ID NO: 30879 - RNA, 63 nt, Homo sapiens
acagacaaccaccaaaggggaaacagaaacaaggcaaaagagacacagcagaccccaggagaa

SEQ ID NO: 30880 - RNA, 75 nt, Homo sapiens
aagaggaaaaacacgacaaagcgggaagcaaggagacaagccgagagcccccaaacacgcagcgcagacccaaga

SEQ ID NO: 30881 - RNA, 78 nt, Homo sapiens
cgaccgcagggccagcccacgaccggaaacaggcacagaacagaaggaaaggacgaagagcccaggaacaccgcagac

SEQ ID NO: 30882 - RNA, 67 nt, Homo sapiens
ggaagaaaagaaggcacccagcgcaaaaaagcagaacagaacaggagcagggccgccagacgaagaa

SEQ ID NO: 30883 - RNA, 66 nt, Homo sapiens
gaggcacacaaaggcgcccaaaagggggaaggaacgagcaagaaaagcagcgagggaaagcggcaa

SEQ ID NO: 30884 - RNA, 57 nt, Homo sapiens
ggcacggggcgggggcaagggcgcccgcgggacaagcccccacgaggaaaacccccc

SEQ ID NO: 30885 - RNA, 93 nt, Homo sapiens
gggcagaaagaagaacaggagcagacccggagacacacggccgagcaggaacacaaggcccgaggagaggagcaccaacgggggaagaccgcc

SEQ ID NO: 30886 - RNA, 81 nt, Homo sapiens
gccgaaggacaagaacagcgccgcaccagcaggcccgcggccaaggcagcggcgcaggagaagacgcccccaccgagcgga

SEQ ID NO: 30887 - RNA, 77 nt, Homo sapiens
aggggaacaacccgcgcccaggccagcgccccaggccaagagggacccacccggcggcccaaaaaaacagaccacca

SEQ ID NO: 30888 - RNA, 53 nt, Homo sapiens
gagcccgcacgcggcgggcagggaccaccacacgaaaccaaggaaaaaccggg

SEQ ID NO: 30889 - RNA, 84 nt, Homo sapiens
ggagcagcagccgcgggaggggccgcggcccgcgcagcgccccaggccagaaggagcgcccccagggaacgaagcccaaaaggc

SEQ ID NO: 30890 - RNA, 85 nt, Homo sapiens
ggccggcgaagagaccgaagacagaaagacaaaacgaaaaaggcagaagaacgcagacagaagaaggaaacaagaggcaaggaga

SEQ ID NO: 30891 - RNA, 66 nt, Homo sapiens
gaaggaccaagaaccaggaagacagcacaaaggcggaagagaaaaagagaaagcagcaacagacaa

SEQ ID NO: 30892 - RNA, 78 nt, Homo sapiens
cgcgacacgggagcagggccaggcccgcagccaccccaggacagggcaaagaccaccacaaagagaagaacgggagcg

SEQ ID NO: 30893 - RNA, 82 nt, Homo sapiens
ccggcggagcagaggaaccacacgcgacaggcccacggcacagcagcagcggcgaaccgacaaagacacccgaaaagcacac

SEQ ID NO: 30894 - RNA, 80 nt, Homo sapiens
aaagcgagagagggaagcgcccggccaacaccgaaaacccccagcacagaaaggggacccgacggaaagaagaaggggag

SEQ ID NO: 30895 - RNA, 81 nt, Homo sapiens
ccagaagcacaagcacgaaagccacaaaaggggagaggcccaggaggacagggcaagaagaggcagagcggaggagccggc

SEQ ID NO: 30896 - RNA, 85 nt, Homo sapiens
ggaaccagagcagcccgccagaggaagagagcacagagagacaagaccccagagccaagaaagccggacagggccagcaaacaag

SEQ ID NO: 30897 - RNA, 84 nt, Homo sapiens
aaacccaggggaaaccagcacacaaggaaccgcaagggcagcacagaccaccacgccaacggaaggcaggacgaggaacagcgg

SEQ ID NO: 30898 - RNA, 73 nt, Homo sapiens
cggagagccagcagggggaaacaggaagcaaaacacagcgaggaaagaacggaacccgcggggaccagaagag

SEQ ID NO: 30899 - RNA, 76 nt, Homo sapiens
gagcggacgggccaacccaaaaccagggcggcaaaacgagcgggccagcgcggaccggaaacaacgggacgaagcc

SEQ ID NO: 30900 - RNA, 79 nt, Homo sapiens
ggacaggacacgggggacgcacagcagagaacgaaaacaaacggaagagagggcagcaagaaagaacaagaaagcgaac

SEQ ID NO: 30901 - RNA, 64 nt, Homo sapiens
aaacacagcaccccaaaacaggaacggggagggaggcggcaccacacggacaagggcaccggga

SEQ ID NO: 30902 - RNA, 60 nt, Homo sapiens
aaagccaacgccgggacaagagaggggccaacagcgggaaccaaaggaccaccagggacg

SEQ ID NO: 30903 - RNA, 41 nt, Homo sapiens
gaaacccgggcgccgccaagagccgcaagaacaggaagaac

SEQ ID NO: 30904 - RNA, 56 nt, Homo sapiens
ccgagccgaccccccaaaaaagcagacaccagacagcgaacgggcacgacggccag

SEQ ID NO: 30905 - RNA, 82 nt, Homo sapiens
acgccaccgaggcaacacagccagagaacagcacaagccagaagaaagaggaaacgaaaacgaagcaagaaaaggagcaaga

SEQ ID NO: 30906 - RNA, 73 nt, Homo sapiens
cagggagcgagaacgggccaggcaggaagacaggagcgccgcggccaagcccgccaggcacggagagagagaa

SEQ ID NO: 30907 - RNA, 64 nt, Homo sapiens
aaacaccggcccgccggaagggcaggcacagggcaaggaagcggaaaccagaagcccggaaaaa

SEQ ID NO: 30908 - RNA, 38 nt, Homo sapiens
agagaagaaccaccgccagagaggaggcccaggaggaa

SEQ ID NO: 30909 - RNA, 84 nt, Homo sapiens
cgcggggcaagcgggccacgcacccgcaccaaggccaaggaagaccaacccgcagcagccagagaccaacgggaacgcacaagc

SEQ ID NO: 30910 - RNA, 81 nt, Homo sapiens
gacacggcacgcagcgcgcccgccagggcccagaggggaaaagagacgcaaaccacgaggacagagaagagagaagccacc

SEQ ID NO: 30911 - RNA, 75 nt, Homo sapiens
cgcgggacggaccaacacacaggccaaggaaaaggaacagagagagcagaaccgaaacggggaaagaccgaagaa

SEQ ID NO: 30912 - RNA, 82 nt, Homo sapiens
gggacacgaagggaggcaaggaggcggacgagcgccccaagggaaacgaaggaggcccaaccacaaaaggagccgacggaac

SEQ ID NO: 30913 - RNA, 80 nt, Homo sapiens
gaagacccgccgcgaaccaggcaccagccccgagaggacccgagcggggaccgagaaagacccccgaggaaccacgcaga

SEQ ID NO: 30914 - RNA, 78 nt, Homo sapiens
cggggccacagcgccggcagcggccacgcagcgcgacggccaccagggcggggacagacgccgcggcccgacaggagc

SEQ ID NO: 30915 - RNA, 72 nt, Homo sapiens
gccggcagcagaaagcagaacagaggccagaaagaaaaaggccccaaggaggagccaagcgggaaaaggggc

SEQ ID NO: 30916 - RNA, 80 nt, Homo sapiens
caggggccaggcgaagcacgagcagaccggcccgaccgcccacagacccaaacaaaggaccagccgcccggagaagacag

SEQ ID NO: 30917 - RNA, 82 nt, Homo sapiens
aggaccggcggccgcgggagaggaaacagaacaccaggacacccagagcgggaaaggagcgacccgagcggcaggaagaagg

SEQ ID NO: 30918 - RNA, 73 nt, Homo sapiens
gcaccgccgacccggaagaccgccgccgcgaaggagaggaaaagaggacaaggcaagggaagcacaggacggc

SEQ ID NO: 30919 - RNA, 87 nt, Homo sapiens
aaaaaggaaaacgcggaaaaccgacacaacaggcggccgggagaggagggacagcagcgggagaacaccccacggagacaggacgcc

SEQ ID NO: 30920 - RNA, 52 nt, Homo sapiens
aggagcgaacaaggcgacaacacagggagaacacccagcagaggcgcaggaa

SEQ ID NO: 30921 - RNA, 74 nt, Homo sapiens
ggagcaaggcgacgaaccggagagaggagaacgaacaccggaccgccagacaacgaagagaggaaagaagcgga

SEQ ID NO: 30922 - RNA, 65 nt, Homo sapiens
ggcacacagccaccacagcaccgaagccgggagagggccgagggggcaagaagacaagccccgga

SEQ ID NO: 30923 - RNA, 81 nt, Homo sapiens
cgacgaggagaggcggcgagccaagcaggcgggcgcggggaggcccagcccgccgcagggccaccccgcggcccaccgccg

SEQ ID NO: 30924 - RNA, 87 nt, Homo sapiens
agagaagccagagaagcccagcccgaaagcgggccaggaaggcaacagcccccaggggagcaaccagggagcaaaacacaccggacc

SEQ ID NO: 30925 - RNA, 71 nt, Homo sapiens
gcgacaccgagcgggacgccccagaggaagaagaagacggaggacacggacaaaacccgcgcagcgcgcca

SEQ ID NO: 30926 - RNA, 54 nt, Homo sapiens
cggcccgcgggcgcggcccgcgggaccggcaaaaacgggaaaaggcagcggcgc

SEQ ID NO: 30927 - RNA, 58 nt, Homo sapiens
cccccacgggcagagaggcagaaggggcacaggccggaacgggcggacccagagccag

SEQ ID NO: 30928 - RNA, 80 nt, Homo sapiens
cggccacaacaagcccacaagccgacgcgggacgagaacaaaacccacaaggcgcggcccggaggggaaaggagggggca

SEQ ID NO: 30929 - RNA, 80 nt, Homo sapiens
ccgcccggcccgcacgccaagcacggggggcaggccaccgggcagcggggaagaagaaaaggaaccgaggccccccggcg

SEQ ID NO: 30930 - RNA, 81 nt, Homo sapiens
gcggcacacacgggacccgaagcccagcggcccccgaccccaaggggagccgcgcggagggccagcagagccagacggaca

SEQ ID NO: 30931 - RNA, 80 nt, Homo sapiens
gaaaagaaagagaacaaaaccccagggagaaaacaaccaagacagcagagagcacaggcagagagcaagcgaaagaggcc

SEQ ID NO: 30932 - RNA, 78 nt, Homo sapiens
aggcccggcacaccccacaccaggcaccggcagcccaccagacccgccacaaacccccccacgacaccgaagcagcga

SEQ ID NO: 30933 - RNA, 70 nt, Homo sapiens
gggcagaagcgaagcgggacagaacagccaccaaaacagaaggccaaacaagaagaggcagcgccaacaa

SEQ ID NO: 30934 - RNA, 79 nt, Homo sapiens
cagaagcacaaagcgcccgagaacaaggacaagacagcaaagcagcgaagcaaagaagaacgaaggaaagacacaagag

SEQ ID NO: 30935 - RNA, 77 nt, Homo sapiens
ggacgcaacgcggcgggcgagacgccaggggccaagcgacagagaagcgacggaacagaaggagggagaagaaaagg

SEQ ID NO: 30936 - RNA, 104 nt, Homo sapiens
ggaacgcccacccacggggaccagcagccgggccagggccagagcaaagcccacaccgcggacagagcaaacagcaacaaggagcggggggaccaggagcagag

SEQ ID NO: 30937 - RNA, 76 nt, Homo sapiens
gaccccaagcaggaacgccaacgaagccaacgcaaagcaaagcgagcccccagaccaggacccagacccggaccaa

SEQ ID NO: 30938 - RNA, 77 nt, Homo sapiens
accaagaaccaggaagaggggaggagcgccagcggggcccccggaggagcgcggcgagcacaccgcccacgcgcacc

SEQ ID NO: 30939 - RNA, 70 nt, Homo sapiens
gcgaggacgccgagagcgagaaacaaagccacccagccaagaaggaacacgacgcaggagggccgggacc

SEQ ID NO: 30940 - RNA, 83 nt, Homo sapiens
ccccccagggccggccgggagggcggccgcagcaggagcccgcccaggggacggacacaagcaggaggagcgggggaccgggg

SEQ ID NO: 30941 - RNA, 42 nt, Homo sapiens
cagcacccaccgggaagcacagacggggcgccagccagagcc

SEQ ID NO: 30942 - RNA, 69 nt, Homo sapiens
gagaacgcccccgacaccacaagcaaagaggaaaagagagaagacgacagcggaggccgcgcggaaggc

SEQ ID NO: 30943 - RNA, 86 nt, Homo sapiens
cacggccgaaggcgaacgccgcggccaaggagccgccaaagccagacggggccaggaaaaccaggaaggcacaacaacacggccag

SEQ ID NO: 30944 - RNA, 73 nt, Homo sapiens
cgcagagcgcgcagaccccggaaaacgcaaaaccagaagcgcgccgacacggcccgggcagccaggaggcggg

SEQ ID NO: 30945 - RNA, 74 nt, Homo sapiens
caggaggcggggaccccaaaggcagacccaacaccaacacgaggagaaggcagccccaggggcccagccagaga

SEQ ID NO: 30946 - RNA, 77 nt, Homo sapiens
acgcggcgcgcgcggcaccaggccgagcagggacaaagccaccgcccaaccagaggaaccaagcaagcacaagggac

SEQ ID NO: 30947 - RNA, 75 nt, Homo sapiens
gcggcagcccgagaccgcagcagggcggaaacagggagggccacagcccccgcccgggagacaaagccccaggcc

SEQ ID NO: 30948 - RNA, 67 nt, Homo sapiens
aagcggacagaacagacgggacccccagccaaaggcaaagaggaggagcaaagacaagaccaacagc

SEQ ID NO: 30949 - RNA, 80 nt, Homo sapiens
caacaacagggaggccaggaccaagagaaacgcagagggagaaccgggaaaacagaagcacaaaaaaacagaccagcccg

SEQ ID NO: 30950 - RNA, 41 nt, Homo sapiens
agcaaagcagcggcgcagcccgggaaccgcagcacgagccc

SEQ ID NO: 30951 - RNA, 111 nt, Homo sapiens
aacgcacgaaacaagggaggccgcagcagcagggacacgaagcgagcgccgagggccgggaccgaaggccgagggaccggcgagcgagaaccaaaccagacacgacaagcc

SEQ ID NO: 30952 - RNA, 72 nt, Homo sapiens
accccgcggagacagcgagacccgccaggagcaaaggggagacgagcaagacgagaacacccaagcgacaga

SEQ ID NO: 30953 - RNA, 36 nt, Homo sapiens
cgaggcaggaccgccaagagaggacggggacgggcc

SEQ ID NO: 30954 - RNA, 70 nt, Homo sapiens
caacaggccagcggcaaaaccggaaaaggggccagacagccacccgcaaacgaacgaggaaaaaacggcc

SEQ ID NO: 30955 - RNA, 85 nt, Homo sapiens
cgaagacggcaagcacggccacgccaagaaagagccgcagacgcacagcaaccaccggacccgaaggccaccacccagaggggcc

SEQ ID NO: 30956 - RNA, 77 nt, Homo sapiens
gcggggccccccgccagcggggcaacagcaacgaaacggcacggaggacacaaaggccccagggcagaccgacagcg

SEQ ID NO: 30957 - RNA, 85 nt, Homo sapiens
aacaacccccccgcccgccacagccggcagcgcgaagcagcaaccagcgccaaggggccaagggagagcggggccccccccaagg

SEQ ID NO: 30958 - RNA, 75 nt, Homo sapiens
agaaaaaagccacaccaaagaaggagaggaccaaagaaacgaaagggagccagcccagcagcaaggagcgaccca

SEQ ID NO: 30959 - RNA, 67 nt, Homo sapiens
gccgcaaagaggagcaagaaagaaaaagaggaagaggcaccaggaggagggagacaggggcaaaaaa

SEQ ID NO: 30960 - RNA, 40 nt, Homo sapiens
gaaggcagaagaaaaaggacgacgagaacggcaggagccc

SEQ ID NO: 30961 - RNA, 81 nt, Homo sapiens
agccggacgcaggaagagaagaaccaggccgggccagacacgacaccaccaccccaccccgggcccaacagcgcgacgggg

SEQ ID NO: 30962 - RNA, 73 nt, Homo sapiens
ggagcaacacaaagaagggaaccgagagaggaagacgcacagccccgaggcgccgcaggcgccaaaaggaaac

SEQ ID NO: 30963 - RNA, 53 nt, Homo sapiens
cacggcccccacgcaaaagaagggaccagggccaagagaagaagagcaccccc

SEQ ID NO: 30964 - RNA, 78 nt, Homo sapiens
caggaggggaccaccacacacaaaccccacggacaacgaggacaggggagccccgccagggcggcggcccagcgcccc

SEQ ID NO: 30965 - RNA, 79 nt, Homo sapiens
gagagagccaagcaaccaagccaacaagcggaaaccaaagaccccacgacgacacagcgagcccgagacacagacacca

SEQ ID NO: 30966 - RNA, 62 nt, Homo sapiens
gcgcagcccacgccagacgaccccacccgcgccgcgacccgccggcaggcgcccgagcacgc

SEQ ID NO: 30967 - RNA, 122 nt, Homo sapiens
ccgggggaacgagagcgaccgccgccccacgccggaggaaccgagaagagcagagcggagggagccccagacacggggcacacgcaggggcccagcaagaagacagacgccacgacaccgga

SEQ ID NO: 30968 - RNA, 76 nt, Homo sapiens
caaccccacagcaacccaggggcgagaaacagaaagcagagcccagaaccaacacagggcaaagcacagaaaccga

SEQ ID NO: 30969 - RNA, 79 nt, Homo sapiens
agcgggaaacccacaggaggcaaccacacagaggaaagcggcgagacaggaagcagagggcagggggcaaacaagccga

SEQ ID NO: 30970 - RNA, 70 nt, Homo sapiens
acacacccacccagaggaccacggcagccacgcaggcaccagggcccgagggcaggacagcaggcaccgg

SEQ ID NO: 30971 - RNA, 61 nt, Homo sapiens
ggagcaacccgaaaaccagccagacacaaacaggcccacaggccacccgccagacgcagcg

SEQ ID NO: 30972 - RNA, 74 nt, Homo sapiens
cgcgccgcagggaccacagcacgagaggaccccacgggacccagacgagagaaacggccacaaggcaaaccaca

SEQ ID NO: 30973 - RNA, 54 nt, Homo sapiens
cccaaccagaagagacacaaggggaggagagcaaaagacaacacccagaaacag

SEQ ID NO: 30974 - RNA, 71 nt, Homo sapiens
aaagccagaaaaaagaaggcgcagaggacccaaagacggggaaggggcgagagaaaaagaagaacaggaaa

SEQ ID NO: 30975 - RNA, 56 nt, Homo sapiens
ggaaggaaaccacacaccgcacaaaagaaggccacagaaccgcagacccagcaaag

SEQ ID NO: 30976 - RNA, 69 nt, Homo sapiens
gagaccgcgggccaccccggcgggagcgcaggggcccgcaggcaggaaccgcagaacgaagccacaaag

SEQ ID NO: 30977 - RNA, 71 nt, Homo sapiens
agcacagggcgcaacaagagcgacaaacgcaggaggagccgacggaggcaaaggccgagggaagccaggaa

SEQ ID NO: 30978 - RNA, 46 nt, Homo sapiens
cccgagagagaaggcacgaagcaaaacccgcaaaccccaacgcaga

SEQ ID NO: 30979 - RNA, 93 nt, Homo sapiens
aagaggcggcggcgaaaggaacggcgaaggcccacgggagaaaaccgggcgcaagaccccaagaagaagcggaagaggagccgcggaaccaag

SEQ ID NO: 30980 - RNA, 42 nt, Homo sapiens
accggagaaagcaaacaaggaccaagaaaggcccagggacca

SEQ ID NO: 30981 - RNA, 75 nt, Homo sapiens
accccaccgccaggaacacaccagaccgaaggacacagcccgcagaaaggaagcgggccagagcgccggagcccg

SEQ ID NO: 30982 - RNA, 42 nt, Homo sapiens
gcccaccccgcgcccgacaggacagaaggcaaagcaacaacc

SEQ ID NO: 30983 - RNA, 57 nt, Homo sapiens
gaagcgaagggagagcgccagagaagggaaaaccgcccagccggggcaccgggaaag

SEQ ID NO: 30984 - RNA, 70 nt, Homo sapiens
aaacgcccgaaagaagcggacggaggcagagaggcggaccccgcgggcgcgcggcccgaacccagcgaga

SEQ ID NO: 30985 - RNA, 67 nt, Homo sapiens
aagcagcacaggaaggaagccgcaaggggcccgccacgggagagcgaaggcacgagcgcccagaaga

SEQ ID NO: 30986 - RNA, 37 nt, Homo sapiens
acagaggagacaggcaaaaggcaacaacgaacagaac

SEQ ID NO: 30987 - RNA, 75 nt, Homo sapiens
aaagagacacagcccaggacggacaacaccaaccaagaagacagagacgaacgcaacagagaggcaacagaccag

SEQ ID NO: 30988 - RNA, 79 nt, Homo sapiens
ccgcagcgagaaagagcaggcccacagccccacacaaggagcggggaacaaggaagggagcacacaaagaggccaaacc

SEQ ID NO: 30989 - RNA, 78 nt, Homo sapiens
ccccccagaggcgcccccagccgagcaggaccccgcagaacagacagaggagcgggcggaggacgacgcaagaagacc

SEQ ID NO: 30990 - RNA, 82 nt, Homo sapiens
cagaggcagaaccccaaaaccagcagaccacagacccacagcgaaagcaacaggcccccagaggcacacggagaaggccggc

SEQ ID NO: 30991 - RNA, 75 nt, Homo sapiens
cacgaaaggcagccgcggacgccgcgccagcgacaaacaagagcagcccgagcgagccggcaaccaggccagaga

SEQ ID NO: 30992 - RNA, 81 nt, Homo sapiens
ggccgccaagaagaccgagagcaccacaaggccaagggcaaggagacaggcccacagaaaggggcggaaaggaggaaagac

SEQ ID NO: 30993 - RNA, 79 nt, Homo sapiens
ggccaacagggggggccgcggccggagcgagccgcaacacgaagagccccgacacagggacgcagaacccccgagggcg

SEQ ID NO: 30994 - RNA, 72 nt, Homo sapiens
ggcaaggacgggaaagacgagcagcgaccgaaggagaccccaacaggcccgaccaacaaagaaacccaacag

SEQ ID NO: 30995 - RNA, 34 nt, Homo sapiens
caagcgcacaggaccgggagagaaaggccagcac

SEQ ID NO: 30996 - RNA, 89 nt, Homo sapiens
gcggccagcggcaccgcaccggggccaccaccgccaggacccccgcaaagcgcccagcccggggaaaccccaagccaagaagaagaagc

SEQ ID NO: 30997 - RNA, 80 nt, Homo sapiens
ggaccgcgagacagccagccgaccgagcggcagcagaagcagcggccaagaacccaggcacgcaagaaaggggcccggga

SEQ ID NO: 30998 - RNA, 84 nt, Homo sapiens
ggcgccgccgcgggcgccgggagcgagcgggagggagccgcgcgccggcgcgcgccgaggcacaggcgaccccaccgagcccag

SEQ ID NO: 30999 - RNA, 63 nt, Homo sapiens
aacgaccacaagcagcgaaggagcaaaagaagagcagagcacaggaagacccaggaagaagca

SEQ ID NO: 31000 - RNA, 55 nt, Homo sapiens
ccgcgggccggcccggcacaggggggccgcaaggccaggcgcgcagaggcaccca

SEQ ID NO: 31001 - RNA, 54 nt, Homo sapiens
ggggggccacggcgccgccggcgcggccggcacacgagaaaccccaccacgcgg

SEQ ID NO: 31002 - RNA, 73 nt, Homo sapiens
cgcaaacagacaacacaaaacccgcaaacacaagaacccaaggacgccacaaacgggcacaccaacggcccag

SEQ ID NO: 31003 - RNA, 61 nt, Homo sapiens
aacaaaggcacaaaccgcaccacaagaagggcgggggcaggagacgaggacgcgcacagga

SEQ ID NO: 31004 - RNA, 63 nt, Homo sapiens
ccaagaggggccagaaaccaagacagcgcaggcagagcaggggcccgagccggacccaggggc

SEQ ID NO: 31005 - RNA, 68 nt, Homo sapiens
agggcccagggacaagagggaaaggagagggacagggagcacggcccaggcagccaagaaggcagaga

SEQ ID NO: 31006 - RNA, 57 nt, Homo sapiens
ggggcacaggcgggcacgcgcccaggaaaagagcacgggccaggacccagaggacac

SEQ ID NO: 31007 - RNA, 74 nt, Homo sapiens
cgcccgcaagaacggccaagaaagcccgaaaaccaaaccgccgggcgaagggggggcagagccgggccccagcc

SEQ ID NO: 31008 - RNA, 57 nt, Homo sapiens
ccggaggcagccaccagacagaaagcgacagcaacaaaagaccaacaacagaagcag

SEQ ID NO: 31009 - RNA, 79 nt, Homo sapiens
aggagggcaggaagagcgcagcggggacaagggccccagggcagccaaccccgcggcaggcacggccaccggaacagcc

SEQ ID NO: 31010 - RNA, 74 nt, Homo sapiens
acgcaaggaaaggaacaggaacagaggcccaagaacacgagagagagagggcccaagagccccaagaaacggag

SEQ ID NO: 31011 - RNA, 40 nt, Homo sapiens
gcggaggccgccgcagcaagggaaccacccgagggccaga

SEQ ID NO: 31012 - RNA, 81 nt, Homo sapiens
ccgaagcgaggcggaaaacgaagacagcagaaacgcagagggaagcgagggcagcagaagcaggcccggggaacgcaggca

SEQ ID NO: 31013 - RNA, 87 nt, Homo sapiens
ggcaggaggaccccgcggaggcgcggacgggagcgggcaggccagccccgagccgggggacacagaagagggggaaccgacacgcag

SEQ ID NO: 31014 - RNA, 54 nt, Homo sapiens
cagaaagcaaacggccaagagaagaaggggagcaaacgggaaagcagcggcaca

SEQ ID NO: 31015 - RNA, 78 nt, Homo sapiens
aacagaggcagaaaagagaaaggaagaaagaaaagagaccgagggacaaccggggacagcccaccacaagcaggcccc

SEQ ID NO: 31016 - RNA, 82 nt, Homo sapiens
gacaccccacccagacgaagacagcccggacaccgacagcacagacagaacccgcaccaggaagcgggaggcggagagcaag

SEQ ID NO: 31017 - RNA, 73 nt, Homo sapiens
gacaccagagcaacccaagcgaaaggagcacaggaagggggccaagggcacgacacggagcaggaggggaggc

SEQ ID NO: 31018 - RNA, 77 nt, Homo sapiens
ggccgcggaaaccgacgcccgggggaaacagagaaagaaggcggccaggccaaccgaagacagcaaagcaagccaag

SEQ ID NO: 31019 - RNA, 50 nt, Homo sapiens
gggagagagaaaaaccggacgagcgagcaaggcgcgagccggcacgaaac

SEQ ID NO: 31020 - RNA, 75 nt, Homo sapiens
caaaaagcacaacaccgggcaaccacggggcggcgccggccccaagaccaacgggacccacccccaccacggcac

SEQ ID NO: 31021 - RNA, 77 nt, Homo sapiens
agcgagcgagggggggcgcgccggaaaccggagcgcgcagcaggagaagcaggaaggaaaaaaaccagaagaggacc

SEQ ID NO: 31022 - RNA, 82 nt, Homo sapiens
gcagcacagaagaacgaagaaggcaacaagagagagggcgcggcagaccggggcacggcaggccaagacgcaggcagagacg

SEQ ID NO: 31023 - RNA, 72 nt, Homo sapiens
aaaaccccgggccgcggacgcagcacagccaaacagaggaaagagcggagcccgccagaaacagacaccacg

SEQ ID NO: 31024 - RNA, 54 nt, Homo sapiens
gaagacgggccccaacacccagagacgaaagagagcaaggaagagacacggcca

SEQ ID NO: 31025 - RNA, 72 nt, Homo sapiens
aacaagcacgaccggggccggcaaggacaaggggaccccgaagcaggaggcccaaggaacagcacagcagcg

SEQ ID NO: 31026 - RNA, 71 nt, Homo sapiens
ccaggccagcacccacccaccgggacagggaccaacacagccgccggaaggagagccaaaaaaaaagaccc

SEQ ID NO: 31027 - RNA, 76 nt, Homo sapiens
cgaccaccccgggcgggaagacagaaccagggccgggggccagaagggccaacccagaaggagcaaggaaaacccc

SEQ ID NO: 31028 - RNA, 76 nt, Homo sapiens
cgccccggggacaagaaacagagcaaaaaccggaaagggagcagaggacccacggaagcagggacagacccagcaa

SEQ ID NO: 31029 - RNA, 72 nt, Homo sapiens
cgcgggccggaggaccggagcggagggcggagccaggggggggccggagagagccccggcgaagcgagaccc

SEQ ID NO: 31030 - RNA, 54 nt, Homo sapiens
gcgacagaaccaccaccaaaaagccgggaacggcgaccccgaggcgccaaccgg

SEQ ID NO: 31031 - RNA, 65 nt, Homo sapiens
gagggagaggggaagaagcaaccaaggggccaaagcacagaggaaggccgaacaggggcccagaa

SEQ ID NO: 31032 - RNA, 63 nt, Homo sapiens
cgcgggaagaacgccgggagaggcggcggcagcgcagaaccggccgaaaagcacaaacagcaa

SEQ ID NO: 31033 - RNA, 55 nt, Homo sapiens
cagaacagaacaaagggccgaggccaaccagcagcaggcgcaaaaacgaacccac

SEQ ID NO: 31034 - RNA, 71 nt, Homo sapiens
caagaaaaacggaccaccgagaggaggggagacacccaaaacacaccgaagccagagcgccgcacccaggc

SEQ ID NO: 31035 - RNA, 58 nt, Homo sapiens
gaccgcgcgcgcaggagcaggccaagccgacgccagcgggcgccacccaacaggcgca

SEQ ID NO: 31036 - RNA, 81 nt, Homo sapiens
gcacggggcaaggaagagcccaaaaagccagaaacaacgccaagacgccaggaacccgccaccgccaccggccccaggccc

SEQ ID NO: 31037 - RNA, 39 nt, Homo sapiens
gcgccggccccaacacggaccgagggggaggccagggac

SEQ ID NO: 31038 - RNA, 101 nt, Homo sapiens
gagagcaacggaaccagcacgcggcagcagcggaagacgacagaggagcaaagcagcagccggcccagcccaccccaggcccccccagcccagcaccacca

SEQ ID NO: 31039 - RNA, 70 nt, Homo sapiens
gagaaagccgggcgacggccaccaccgaggagacaaacaagaagcgaccccgcaacaggcagaggaacga

SEQ ID NO: 31040 - RNA, 73 nt, Homo sapiens
ggcggggcgagagggcggcgaaggaggcagaggcacagcgcagacacagaggaaaaagacaaaccagccccgc

SEQ ID NO: 31041 - RNA, 39 nt, Homo sapiens
gccacccaggcacgggccgagcacagaggacccgaaacc

SEQ ID NO: 31042 - RNA, 62 nt, Homo sapiens
ggaagacgagggcaggcagaagccccagaggagcccgaaacccccaggcgggcaggaaggag

SEQ ID NO: 31043 - RNA, 78 nt, Homo sapiens
ccagacaaaccaaaacaagaacacgcaagggagcgcccaacacggcagcaggcaccagaacggaaaaaggggccggca

SEQ ID NO: 31044 - RNA, 83 nt, Homo sapiens
gcgaagggcgggggcgagggcccgggacagcgcacccacacagaggccgaagacaagccccggcacaggaggagagaaaccag

SEQ ID NO: 31045 - RNA, 71 nt, Homo sapiens
ggggaacagaggccgaaagcgccaggcagaaccaaccaagagcaaaggaaacagaaagggccgccgcagaa

SEQ ID NO: 31046 - RNA, 75 nt, Homo sapiens
acgcccgaaagaagcggacggagggcggagaacggaaaagcaccaggaagcagagaggaccgcagaagggaagga

SEQ ID NO: 31047 - RNA, 62 nt, Homo sapiens
aagcgcagcggcccgcgccgcgggcgaacgagggaaaccaggggaacgaaaggagccgagac

SEQ ID NO: 31048 - RNA, 84 nt, Homo sapiens
cagggaaggcccgcgagccagcccccagaccagagggcccccaccaggaccccagccggaaaaccaaaaaggaggggcaacaaa

SEQ ID NO: 31049 - RNA, 52 nt, Homo sapiens
gagaaccggagagcacccaacacaccaggagccgaagacgaggaaaaagggg

SEQ ID NO: 31050 - RNA, 62 nt, Homo sapiens
agagggcaaaagaacaagacggacacagaaacacgaacacaaacacaggccggagggcacag

SEQ ID NO: 31051 - RNA, 78 nt, Homo sapiens
gggaggcgccgggcccgccaacccaccaggagaccgaggacaggccggacaccgcagcccaaaggagagagggcccgg

SEQ ID NO: 31052 - RNA, 57 nt, Homo sapiens
caagacggggcgccccacagaggggcgacggaacagcgccgagcgggccaaaacaga

SEQ ID NO: 31053 - RNA, 80 nt, Homo sapiens
ccccgagaccccccgaaggccgccagcccagccccagccccagcccacagagggagccaccagggggagggggagcggcc

SEQ ID NO: 31054 - RNA, 61 nt, Homo sapiens
cggccgggccagcacccggccgagacggcggcagcagcggcacaggccggacaagacgcag

SEQ ID NO: 31055 - RNA, 79 nt, Homo sapiens
gacagcagccgagagacacaacgacgaaacggcgcacggcccaggcgacagaacccggaccaagcaaccccacccagcc

SEQ ID NO: 31056 - RNA, 80 nt, Homo sapiens
aacagcgacccaagagccccacggagccaagacagggccaaaaagggaaagggcaagaaggaacagacaaaaacggccgg

SEQ ID NO: 31057 - RNA, 84 nt, Homo sapiens
aggccaagaccacggagagaaccccgaccccgaaaccgacagcccaggaggcagaaaaaaccagcaggccaggaacacaaccca

SEQ ID NO: 31058 - RNA, 75 nt, Homo sapiens
cgggaaggccgcaaaaagcacagcagcgcaaaacaaagcagagccgagccagggacacgaagccagcaagcaacg

SEQ ID NO: 31059 - RNA, 77 nt, Homo sapiens
ccacgacaggccaagggcgcagcaggaggggaggaccagggaagacacgggagcgccgccgccggagggcaggacga

SEQ ID NO: 31060 - RNA, 78 nt, Homo sapiens
gaggcccgaacccggaggaggcgaccgcggcgcagcgacccccgccaggcaaaaggaaggagggacgcccggagccag

SEQ ID NO: 31061 - RNA, 69 nt, Homo sapiens
ggccgcccgcccacccagggccggaaaagccaacgccggcgaagggaaggcgccagacacagaaaagaa

SEQ ID NO: 31062 - RNA, 76 nt, Homo sapiens
ggcgggcgggcagcgggggaaggacacacaacgcccaggaggaacccacacaacaccaaaaaggcaaggacagaac

SEQ ID NO: 31063 - RNA, 57 nt, Homo sapiens
cagaaggagcgaagaagagacagaagcgaaggggacagggggagaaccgccagggaa

SEQ ID NO: 31064 - RNA, 75 nt, Homo sapiens
gaagcagcgcgcccgggccacccccggaccccggagaagcagaggaaaaggggccgcaaggccaggcgcgcagag

SEQ ID NO: 31065 - RNA, 75 nt, Homo sapiens
aaaagaaagaagagaaccaggagcacagcaagcgggagcaggcagaccaaaggaacagaagccagggccggaaaa

SEQ ID NO: 31066 - RNA, 64 nt, Homo sapiens
aacaacaaaagaacagcagagaagggaacgaggcgcggccagcgaagaagacgcagccagaccc

SEQ ID NO: 31067 - RNA, 82 nt, Homo sapiens
caggcccgaaaagcaccccccaaagccggagcgggaccaagcccaccaagggacgccagcacccaaccgccacagcagaaga

SEQ ID NO: 31068 - RNA, 77 nt, Homo sapiens
cgccgagcaggcgccgccccagcccgcgaacggaacgggaagggcacaggaagaaaggaccaaggaaacaggaaccc

SEQ ID NO: 31069 - RNA, 78 nt, Homo sapiens
ggagaaccggagccaacggcagcaccgaggccagagcaagacccacgaagggcacacaaaggacccaccgggaaagga

SEQ ID NO: 31070 - RNA, 77 nt, Homo sapiens
gacagacacgcccacgaaacccagccagccaagagagcccacgaacggcgggaacagaaagccagaggccggagagc

SEQ ID NO: 31071 - RNA, 113 nt, Homo sapiens
cccagcgccaccaccacgccagccgcaccagccgcccaagccgcacagccgcggcggcagcagcaggagagaggcacagggccaggcacacaacgagaccacggcccaaacaa

SEQ ID NO: 31072 - RNA, 50 nt, Homo sapiens
ccggccacaaggcccgaggggccccggacgggcaggcagccaaccagccg

SEQ ID NO: 31073 - RNA, 63 nt, Homo sapiens
aaaaggaggaacgccggcccgagaaagcccgccagcagaaacgaggaaagaaccaaggaagac

SEQ ID NO: 31074 - RNA, 76 nt, Homo sapiens
agccaccgagcaacaacagccacaggacaccaggcagaaagagcccacaagacaaaaaagcagacggaaacaggca

SEQ ID NO: 31075 - RNA, 38 nt, Homo sapiens
ggaaagcacaccaccccagccaggagaacggcagaacc

SEQ ID NO: 31076 - RNA, 85 nt, Homo sapiens
aagagcagcccggcggcagcaacagacacgaggaaggcggcggcgccgcaggaccgcagcacccagagagagacgggggcaccag

SEQ ID NO: 31077 - RNA, 81 nt, Homo sapiens
agaaccaagcggagagagcagcccggcagacgcagaaccagaaaaagaccacacaggcagagaagaaagcgaaacacaagc

SEQ ID NO: 31078 - RNA, 79 nt, Homo sapiens
cgggaccacggaccaaaggccgggcgcagaacccccagaccacagcaagccagaccgggagggagggccgaccgagggg

SEQ ID NO: 31079 - RNA, 60 nt, Homo sapiens
gccaagaccgccagcaaaggaagacgaggaagggagagaccagcagccgcgaaaccaccc

SEQ ID NO: 31080 - RNA, 66 nt, Homo sapiens
cgcgcgcgcagggagggggggcggcacaagaccaggagaggaaccggcccgaagccgaaagcgcgg

SEQ ID NO: 31081 - RNA, 79 nt, Homo sapiens
cagggccaggaaacaagacgaagccgaaagaccacagcaagaccacgcccccagccgggggaccaggccgaacgacccg

SEQ ID NO: 31082 - RNA, 71 nt, Homo sapiens
acaaagcacgcgggaaaccggccccagacacgccccggaaacgaagggggagagaaagagcaagcgccccc

SEQ ID NO: 31083 - RNA, 85 nt, Homo sapiens
acacccccagcggccgccggccccccacgagaggacccccacccccagccggggcccgagccaggccgacaccaccggcagcggg

SEQ ID NO: 31084 - RNA, 77 nt, Homo sapiens
gggacggggccaccggcggagcggacccacaccccggaccgagggacgcggccaacccagaggaccgcaaagggcgg

SEQ ID NO: 31085 - RNA, 74 nt, Homo sapiens
gaacagcagagacgcaacggaaaggcgcaggcagaggacagagagggaaagccggcccacgagaccccaagacc

SEQ ID NO: 31086 - RNA, 79 nt, Homo sapiens
ccggaagggacacgcgaacagacccgcgagggcccagaaagccggaaaccacgggcaaaacagaagcagacgagaacgg

SEQ ID NO: 31087 - RNA, 81 nt, Homo sapiens
cgcagggagaccgcagaaaagccccggcggagaaccacgaagacacacacagacaggagccgcaacaccagaacccaaaag

SEQ ID NO: 31088 - RNA, 75 nt, Homo sapiens
cgaagacgccccaccacgaggccagcacgggaacgcgaagcgccaaagccagacaaggaacccagacgaaaagag

SEQ ID NO: 31089 - RNA, 80 nt, Homo sapiens
gcagaggacgccgaggagggggacccacgcccggcaggagaggccggacccaagccagaagcccgcaaagcccccagacc

SEQ ID NO: 31090 - RNA, 75 nt, Homo sapiens
gcgcggagggccgagggagggccgagccagccgcggccggaggagcccccaggccagaagacggcccagcagagc

SEQ ID NO: 31091 - RNA, 87 nt, Homo sapiens
gaaggcaacagcaagacaccgcgggcggcacaggggggacaaggggacagccccccagagggacccgacaccagaccagcaccccgg

SEQ ID NO: 31092 - RNA, 62 nt, Homo sapiens
cccgagagagaaggcacaaaccacgagaagcaaaaacagaggaagagccaaggacaagaacc

SEQ ID NO: 31093 - RNA, 75 nt, Homo sapiens
cgccgcccgcggcgccccggggggcggcgcccacccgggaggacagcgccggggaggcagaaggggccgggagcg

SEQ ID NO: 31094 - RNA, 73 nt, Homo sapiens
gaagaaacccagcaacgcggcagcggggaaaccagcacgaggccagcaccggagagagaaacagacagagaag

SEQ ID NO: 31095 - RNA, 40 nt, Homo sapiens
cccaggacccgccggcgcgagaaggaccccgaaaaagacc

SEQ ID NO: 31096 - RNA, 120 nt, Homo sapiens
gcgaggagaggagagcagaggcggcagaaggccacagaccggccggcggaggaggccaagcggaacacagacaaccagggacacaccccgccaggcaggaagcaggaggacgaaaccacc

SEQ ID NO: 31097 - RNA, 75 nt, Homo sapiens
cgcaagcagcgccagggccacgcaggccaaaacaaaaaagaccggaagggaaggccccaaagaccacggagaaga

SEQ ID NO: 31098 - RNA, 85 nt, Homo sapiens
gccaaggaaaccccagggcccgcccaggacccccaagccgccgcggacgcaggcggagcaccggccagggaagacaaagagaaaa

SEQ ID NO: 31099 - RNA, 60 nt, Homo sapiens
ccaaaaacagggaaagggccagcacaggagagaaaaagaaggggagcgcaaccaaacagc

SEQ ID NO: 31100 - RNA, 69 nt, Homo sapiens
ggcacagaccaaagggaagagagaacaggaagaacaggcggggacccagcgggacccgggcgagggcac

SEQ ID NO: 31101 - RNA, 80 nt, Homo sapiens
cgagggaaccaggccgagaaccagacaaggagcaacacaagcggaaagaaggaaccgccccgggcagagaccccaaagga

SEQ ID NO: 31102 - RNA, 64 nt, Homo sapiens
gggaaccggcggcagcggagaaggcgccaggacaagaacgcaaagcccccaagagccagccagg

SEQ ID NO: 31103 - RNA, 77 nt, Homo sapiens
ggaacaaaccgaagaacagcgggaaagaaggcaaaacacggcggaaagggcaccccgcaaaacagaagaaggcgaac

SEQ ID NO: 31104 - RNA, 58 nt, Homo sapiens
aaaagagacgagaagcacagcccaacgcgcaagaaccagcaacaggaacagcagcggc

SEQ ID NO: 31105 - RNA, 74 nt, Homo sapiens
aggacaggccaaacggaaagacgaaggggccccagagccaaggaggaaggggccggggcccaaccaagaccgaa

SEQ ID NO: 31106 - RNA, 57 nt, Homo sapiens
agcaggaaacacaagaaccggcacaagaagagagaagaagcaaaccgggaccggaag

SEQ ID NO: 31107 - RNA, 77 nt, Homo sapiens
cacggccagaacaaacacaaaggaagcgaggagggcacggaggaagggaagcaggcacaacaccgggaaaagccgcc

SEQ ID NO: 31108 - RNA, 34 nt, Homo sapiens
ggagaaaggaggggagggacagacagcagccaca

SEQ ID NO: 31109 - RNA, 49 nt, Homo sapiens
aaaaccagacgggaaaaacaacagcgagaggagcaggcccagaaagaac

SEQ ID NO: 31110 - RNA, 115 nt, Homo sapiens
cccgaaccccacacgacggccgcaaggccaacggaaccggcaacgggcgccaagccgcggagccccagacggaaagaagcccggcgaggccggagggccacccccggaagcaaag

SEQ ID NO: 31111 - RNA, 71 nt, Homo sapiens
agagcccggcaacagcaacaagagcccaacaaggaaacccagaaaaaagagagaaccggaacagaagacag

SEQ ID NO: 31112 - RNA, 69 nt, Homo sapiens
agcggcagaccgaccaccccccaggcacccggaaacaagccacgaaggagagaaaaccagcagcagcgc

SEQ ID NO: 31113 - RNA, 88 nt, Homo sapiens
acggaccgagccgcgaggacacgggcgcaaccgcagcacacagcgaccgggagaacaagacgcaccgggaaccccaagaggaacagca

SEQ ID NO: 31114 - RNA, 76 nt, Homo sapiens
gagagccgcagggaggcggagggcagggccaggaggaacagagaagccgggcggaagcccacgcacaggcgccggg

SEQ ID NO: 31115 - RNA, 76 nt, Homo sapiens
gccgggccgcgggagccgaggcgccgaaggaccgacgcccgggaagaaacaagcccaggacgaagaaaacaagacc

SEQ ID NO: 31116 - RNA, 75 nt, Homo sapiens
acgccccagaccggagggcccgcggcggggaccacaagcagacgagccaagagcgaccgccggacgcagcaaaca

SEQ ID NO: 31117 - RNA, 56 nt, Homo sapiens
ggaaggcaccacgcaggacgagaccagcaggagaggagacgaagaccaagaaggga

SEQ ID NO: 31118 - RNA, 74 nt, Homo sapiens
ggaagacaagacagcgaagggagacaggcagcggcaagagcgggcaggcgggaaagagccgaaacagaaggaaa

SEQ ID NO: 31119 - RNA, 69 nt, Homo sapiens
agaggacgggacacgggccaagggagcgaaaagaacccccaaaaggcaaagagacacaggacggacaag

SEQ ID NO: 31120 - RNA, 59 nt, Homo sapiens
agacaagcgccagaggagcgcaaaccacggccggagcgcgaagacgcagggaaagcggc

SEQ ID NO: 31121 - RNA, 55 nt, Homo sapiens
gcaaagaagaagcgagcacacaggagcagacaaagggggagaagagggagacccg

SEQ ID NO: 31122 - RNA, 75 nt, Homo sapiens
ccggagcaaccccccaggacgggcggaggcggggggaccggcgggcgggaagaaaggaaggggcaccacaagaca

SEQ ID NO: 31123 - RNA, 73 nt, Homo sapiens
aaagcacacagcaagcacccgagaaaggccaaagaagagacgaagcaaaggcgcccggagccccagaaccgaa

SEQ ID NO: 31124 - RNA, 67 nt, Homo sapiens
agggaagacagagggaaaccagacccacagggagagggagagcgaacagagacgacccacgcgaaag

SEQ ID NO: 31125 - RNA, 77 nt, Homo sapiens
cacaaccacgacacccacaggaaagaagccggacagaaaaaaaggcagcgagaagaaaaagaagagagagacacgga

SEQ ID NO: 31126 - RNA, 74 nt, Homo sapiens
agggaccagcagacgggaaggaaaggagcagcaagaaagcgaaccaaccagaggccgagcgagcagacaagacc

SEQ ID NO: 31127 - RNA, 80 nt, Homo sapiens
ccgagccggcgggcggcacggcccggggaaaagcggagcagaagcccacaaggccccccccaggcgagccagcagcgaag

SEQ ID NO: 31128 - RNA, 58 nt, Homo sapiens
ggagcccccgcccaaggagaagcgcccaagcggacgacaaaacagaggagaccagacc

SEQ ID NO: 31129 - RNA, 63 nt, Homo sapiens
cgggaacggcgcgaaggaagccgaggagcccccacaccaaggagaaagcagccaccaggcccc

SEQ ID NO: 31130 - RNA, 60 nt, Homo sapiens
gggaagaaaaacagaggagcaaagacggggccgggcacggaccccaaacgggacaaacgg

SEQ ID NO: 31131 - RNA, 75 nt, Homo sapiens
ccggccacaaaaccagagcggagacacccaggaggcagaagccagaaagaccacagcaagaccacgcccccagcc

SEQ ID NO: 31132 - RNA, 75 nt, Homo sapiens
gagagacgggagcccgacacaggaggggcggcaggaccaagaggggccaagccggcacaaggggggcgccccggg

SEQ ID NO: 31133 - RNA, 68 nt, Homo sapiens
caaccgccaacaccccagcagagggagcccccaacaaccagagagcgaagagggaggggaccaaagga

SEQ ID NO: 31134 - RNA, 71 nt, Homo sapiens
cagcgggggcagggaggagcaacggccagccacagcacaaaagaacaggacaagaaaaacaggaggaccca

SEQ ID NO: 31135 - RNA, 81 nt, Homo sapiens
acaaccgagcgccaggagagagacaaagcaaaacaggcacacaaagaaaccagacggagacgggagagcgggcgaagcaag

SEQ ID NO: 31136 - RNA, 62 nt, Homo sapiens
aggagggagaacacagaaaccggccccagcccccggggccacacgagcccagcccagcgagc

SEQ ID NO: 31137 - RNA, 119 nt, Homo sapiens
cagcggccaagacaagcgcaacagagaggcaacaaaggcacaagaacaaggaccacgagcccgaagacaaggggaacacccaaaaaggaccaccacccacccaggccgagcagcgccaa

SEQ ID NO: 31138 - RNA, 81 nt, Homo sapiens
gagaaccagcagaaaaagcggagcgagcagagcaagcaaggcacagggacagagcgggagccaccagcgccaaagggaagc

SEQ ID NO: 31139 - RNA, 71 nt, Homo sapiens
gaaagagaaggaagcgcggcgcgcaaacccgcacagcaaacagcacaaggaaaacgagagaaacgaaggcg

SEQ ID NO: 31140 - RNA, 85 nt, Homo sapiens
ccggaggcgagcgcggcccacaggggaagcacaaaccacaggcaagaagccagcacccaaggggcaggacgaaacgaaggccagg

SEQ ID NO: 31141 - RNA, 70 nt, Homo sapiens
gaagaaacgggccacaacacacgaccaccggaggggggagaagaaccaacaacggaaaaccagcgggaca

SEQ ID NO: 31142 - RNA, 70 nt, Homo sapiens
gaccacggcgggccagaagccaaaccaaacgacaaaagcgaaaaaaggaaggaagagggcggcccacggg

SEQ ID NO: 31143 - RNA, 82 nt, Homo sapiens
caagcagacaagacggaggagcgcgaggaacgaaaaagcgagacagcccaaaaaacagaggaagcacggagaaaacgaaggc

SEQ ID NO: 31144 - RNA, 74 nt, Homo sapiens
gccgaagaccgcccgcccgggggaagaccagcaagcacaaaggacaccacagacaaacccccgcgaccaaggac

SEQ ID NO: 31145 - RNA, 60 nt, Homo sapiens
ccggccgaccaccggaacggacagcccccccaggacccggcaccccgacccgggcaaggc

SEQ ID NO: 31146 - RNA, 77 nt, Homo sapiens
cgggaacggagccaggcgcgcccaaggaggccacgccagccccggaggccaacaagaagaggggccgaaggggacag

SEQ ID NO: 31147 - RNA, 80 nt, Homo sapiens
gagcaaccccaagcaccacaaaaaccacgagagcccgcccaacaaacagaggacaggagaaggacggagaagcgaaagcc

SEQ ID NO: 31148 - RNA, 78 nt, Homo sapiens
ggaccgcgggcgcccacgaccaggcgcacggggaaggagccagggaacacacaagaagacaaccccgacccagcggcg

SEQ ID NO: 31149 - RNA, 79 nt, Homo sapiens
ccgcgcggcgcggggaccgcggcccgggacaaggagcccggcacacccaacccgaggccccggccgccaggccccacag

SEQ ID NO: 31150 - RNA, 71 nt, Homo sapiens
agcaagaagacgggaaagaaaaaaggaagaacaacaagagcccaaagggaaaaggcccaggacacaaaaca

SEQ ID NO: 31151 - RNA, 74 nt, Homo sapiens
gaaaccagcacacaaggaaccgcaagggcagcacagaccaccacgccaacgcggcagcggagagccgcccgacc

SEQ ID NO: 31152 - RNA, 74 nt, Homo sapiens
agaagcaggcccccagccgcagccacaacaccggcaggaaccaccaggacagagccaggcgaaccagccgaaaa

SEQ ID NO: 31153 - RNA, 90 nt, Homo sapiens
gcacggggggcaggccaccgggccggggacacgggcggcaagccgccacgcggggcgggacccgcagcgcggcccgcaggacggaaggca

SEQ ID NO: 31154 - RNA, 74 nt, Homo sapiens
cgcggcgccacccacaaacagggcgccaccccggcccagcccggagcgcagcacacaaagaaccaagagcaggg

SEQ ID NO: 31155 - RNA, 69 nt, Homo sapiens
aacacaacaagagggagccaggccagaaaacgggggggacacccacggccaaccaaaaaccgggaacag

SEQ ID NO: 31156 - RNA, 76 nt, Homo sapiens
gccacccccggagcgggccgcgaacacccacagagggagcgcaggggaagacacccggagcgaccgaacggaggga

SEQ ID NO: 31157 - RNA, 69 nt, Homo sapiens
aaaacagcagaagacgaagaaagaagcaagcaaagcgaccaagaacccaaagaaaaaaaagcaccagga

SEQ ID NO: 31158 - RNA, 58 nt, Homo sapiens
gcagacccacccaacaccagggcccgcaggagagaaggggcaaaccgccagcagcaga

SEQ ID NO: 31159 - RNA, 83 nt, Homo sapiens
aggccgacaaggaaggaagaaggcgcacaccccagcgcgcaaagcgcgaggggcgaggcggcgcccagcggccacacgcccca

SEQ ID NO: 31160 - RNA, 70 nt, Homo sapiens
agcccggaggcaagggacggcgggaggagggccgagaaggggccacaggcaccaggaagaaaaagacacc

SEQ ID NO: 31161 - RNA, 99 nt, Homo sapiens
aggacagaagccaagacaaacggcaacagaccggaacacagagaaaggagcgggagcacacaagggaggagaagagacaaaaagaaaagcagcaacaaa

SEQ ID NO: 31162 - RNA, 71 nt, Homo sapiens
cagccgcaagcagcgagcgcaggcaaacaccacgacacccaaacgggacccgggaagaagccacagggaaa

SEQ ID NO: 31163 - RNA, 81 nt, Homo sapiens
gaagacacaccgccccggccgccccccagaccgggacagaaggcaagggggcggacggcgcgaggaggcccagaggacacg

SEQ ID NO: 31164 - RNA, 84 nt, Homo sapiens
gggaacgagggggaagcggcccagggaggagcagagggaaaaaacgcaagaagagcagagagaagagaaaaaagggcggaggag

SEQ ID NO: 31165 - RNA, 73 nt, Homo sapiens
ggaacggcccaagcaagagcagcgaccgcaaccaccagaaggacaggagaaacaggggccaaaaaaccaaagg

SEQ ID NO: 31166 - RNA, 52 nt, Homo sapiens
gcacccgcccggccccacgggccgagacgacaagaaagacagcgacaaaagc

SEQ ID NO: 31167 - RNA, 80 nt, Homo sapiens
cggagaaccgaggcagcagcggggggccagaaagccaccccacccggggccccagcaccagccgacggcccgcagccccc

SEQ ID NO: 31168 - RNA, 73 nt, Homo sapiens
cagcccaccgagaaacacaaagcaggaacagacagagaaagggcaggaagaagaaaaacgaccagagcaggaa

SEQ ID NO: 31169 - RNA, 68 nt, Homo sapiens
ggacacagagccccaaacagacagacccggcacggggccaaaaaagacagggaaaaagcaggggagac

SEQ ID NO: 31170 - RNA, 68 nt, Homo sapiens
ccgcccgcgccgacgccgcccggcccaacccagacaccagggcaccgaaaggagggggaggggcccga

SEQ ID NO: 31171 - RNA, 62 nt, Homo sapiens
aacaccagcgcgcaagaagaccacagaggagggacaaagaagcagcaaaccggaaccgacgg

SEQ ID NO: 31172 - RNA, 70 nt, Homo sapiens
gccgcaccaaggagacaggacgaagcccaaaccacaagccacaaaagcggagggaggcgcccggccaccc

SEQ ID NO: 31173 - RNA, 31 nt, Homo sapiens
acccccagcacaggcagagaggcggaccccg

SEQ ID NO: 31174 - RNA, 67 nt, Homo sapiens
aacccagaaacagccgggacggacagccggccaggcccccgcgagaaacagggggcgcagcccgcgg

SEQ ID NO: 31175 - RNA, 60 nt, Homo sapiens
ggagggggacggaagaccaccgagacagggccggccgggcgcggggccacccgaacccag

SEQ ID NO: 31176 - RNA, 78 nt, Homo sapiens
cggacccgcccgcgcaggccccagaagggaccgcagaggagccaccaggcaacggaagcgcgcgccggaaggggaccc

SEQ ID NO: 31177 - RNA, 82 nt, Homo sapiens
ccccccggaccccagcaacgcagaggcaacccagagaaggcaagcagaacccccagcggaccaggcccaggaagagcaagaa

SEQ ID NO: 31178 - RNA, 68 nt, Homo sapiens
aaaacgaacagacgcacaccacgccccccgccaccgacgcggcccacaggaacaacgacgggcaaaag

SEQ ID NO: 31179 - RNA, 71 nt, Homo sapiens
aaggagaaaaaagcagcaggagcccaaagcacagacaggaacaggaggcccggacccccagcacaagcgca

SEQ ID NO: 31180 - RNA, 81 nt, Homo sapiens
cccgagcgcacccggaccccaaccagccccgcaacccggaccagcagaaaccagaggggaacacgacagagaggaaggaca

SEQ ID NO: 31181 - RNA, 67 nt, Homo sapiens
acgccagaagaacaaaaccggaaaaagcccaggaccaacaaccgaaaagaggagaaaagcagcacgg

SEQ ID NO: 31182 - RNA, 80 nt, Homo sapiens
ggaaagagacaggaagaaccaagaagcccaaggcccacaccaagcaacgccaggacaaaggcagaaccgaagaagccgga

SEQ ID NO: 31183 - RNA, 76 nt, Homo sapiens
cagagcgaggaccggaagcgcccgcaaacccgccgaccgagaggagaagcgcgcggggcaggaaggggcccgcccc

SEQ ID NO: 31184 - RNA, 72 nt, Homo sapiens
ccaagcaggagaaccgaccgacaggaagggaaggggcggagacgggcggaacgcaggaggccagaggacaga

SEQ ID NO: 31185 - RNA, 77 nt, Homo sapiens
agccgcggccaagaagcagaagcgagcaggacgagaacagcaaccagaccccggagacgagaaaacagagaacgagg

SEQ ID NO: 31186 - RNA, 94 nt, Homo sapiens
gaacaggaccacccgaggacaagagcggagcccgccacaccgggaaaagccgcagcggagacacaagggcaccgacaacaaacccagcccagag

SEQ ID NO: 31187 - RNA, 75 nt, Homo sapiens
ccacgagaagacagcaacaggcagcaagacccaaaggaagagagggcgggcggcagaggccccggcacaaagcag

SEQ ID NO: 31188 - RNA, 80 nt, Homo sapiens
aacaggcccaccaggaagaccaggaccacaagaggcggggcagcagagcccagcacacagcagggaggcgaggcgaagga

SEQ ID NO: 31189 - RNA, 83 nt, Homo sapiens
gagaagcagagcagcacaagccagaaccgaccgcgcacaggagcagacgccccgccagaccgaagccaccccaccccaccaga

SEQ ID NO: 31190 - RNA, 77 nt, Homo sapiens
ggaaaaaaagaccgaacagaaaccccccccccagccaccaagagaagacaaacagcaggcagacaacaggccaaaac

SEQ ID NO: 31191 - RNA, 54 nt, Homo sapiens
aagaagaggaagggcccgaagggcggcacaaggggaacacccagaggaacgcga

SEQ ID NO: 31192 - RNA, 66 nt, Homo sapiens
aagaagaagagaccagggaacaggacagagcaagcagggccgcacggggggggcccggcaaaagca

SEQ ID NO: 31193 - RNA, 75 nt, Homo sapiens
cgcggccgcgcgccgccggcgaaggaggaggcggccggaacgacaaaacggaaggcagagaccccaagcagcggc

SEQ ID NO: 31194 - RNA, 73 nt, Homo sapiens
cccagacgccaccacaacccccagacgcaagccaagggacaagcacaacagaaccacaaggcaagccagagcc

SEQ ID NO: 31195 - RNA, 68 nt, Homo sapiens
gaggaaggaaagagacagaagcacggaagaagaagcaggaaagggaaggacccaccaggagagggggc

SEQ ID NO: 31196 - RNA, 65 nt, Homo sapiens
gggcaagcaggacacaaccgcgaggaggacgccgcgcccaaggccccggagccgcagaaccaggc

SEQ ID NO: 31197 - RNA, 69 nt, Homo sapiens
ccggggcaacacgggagcgaagagcccgggaagcgcagagggaacacggccacgaggggaacgggacag

SEQ ID NO: 31198 - RNA, 70 nt, Homo sapiens
cagcgcacacggcgcaaagaaagggacgagagaaccaaaacaacgcaaaaaaccggaaaagggggaggca

SEQ ID NO: 31199 - RNA, 73 nt, Homo sapiens
gacgacgacaacgaggaagagggcccgaaccccccacaagccgccgcgaccacgcgcccgccgccacccgagc

SEQ ID NO: 31200 - RNA, 79 nt, Homo sapiens
aaccggcagccccacccaccggcccacccacaagcgcacaggaccgggacaagccaaaaccgagaaagggaacgacaag

SEQ ID NO: 31201 - RNA, 75 nt, Homo sapiens
cgaacaccagaccaccacccagcaggaacaggggacccaggaggcagcggcaggcaagagccgcagacaggcgga

SEQ ID NO: 31202 - RNA, 69 nt, Homo sapiens
agcagcccgaagacagaccgagagcgcagaaaggccagacagggaccgaacgacacaacacaccaaaaa

SEQ ID NO: 31203 - RNA, 66 nt, Homo sapiens
caaaacggaagcacgaaccaaccgaaaacagaaacaaacacaccagggagagaccgcacgcagggc

SEQ ID NO: 31204 - RNA, 70 nt, Homo sapiens
acggaaaggagaagacaacgaagcagaacgcgccgaaaaaagagcgggacaaagaaggacaagaacacac

SEQ ID NO: 31205 - RNA, 59 nt, Homo sapiens
ggaggaccacgccggagcaaggcccagaaggggaagacccccagcgaacagagacccaa

SEQ ID NO: 31206 - RNA, 83 nt, Homo sapiens
aggcgggaggaggggaagcggaacagccagaaggacccgaaaccagcccacgccaggcaagggggaaaacaggaagagaacga

SEQ ID NO: 31207 - RNA, 86 nt, Homo sapiens
caggccaggagagaggcagaaacacgcacaggcggggaggagccacagagcagcgagcagcaagaggcaccacacccccaaggcaa

SEQ ID NO: 31208 - RNA, 87 nt, Homo sapiens
gaaaacgcaaggaagaagccgcagcaacagggacaggaaagggcacaaggaagacgcagaaaacagacacacagcggagacaagcag

SEQ ID NO: 31209 - RNA, 71 nt, Homo sapiens
gggcaccgcgacgacaccccggggaggcgaggagagagaaagcaggaccggcacgcgccggcagggcgaag

SEQ ID NO: 31210 - RNA, 67 nt, Homo sapiens
agacgcagggcgcccccggccagagagaaggcgcgagggcgccacaccaaagcacgcagcacaagcc

SEQ ID NO: 31211 - RNA, 73 nt, Homo sapiens
gagccagaagcagaccacccaccagcaccccaggacagcccaaggcggaaaagcgaaggaagccacaagcaca

SEQ ID NO: 31212 - RNA, 65 nt, Homo sapiens
ggggagagagcggaggacagccgagaggaggcccaggcccaggcccaaggccaaggagagagccc

SEQ ID NO: 31213 - RNA, 72 nt, Homo sapiens
gccgaccgagacgggcggagaggagaagcccccagcccccaccccgcagcgcccgggcccacagcgccaccc

SEQ ID NO: 31214 - RNA, 85 nt, Homo sapiens
cccagcagccccgcagcggcgccgaggacaggcagccgaggcgcccccgcgcgagggcgacagcaagagggcgcccggaagagga

SEQ ID NO: 31215 - RNA, 94 nt, Homo sapiens
ggcggaggccccagggaagcgcagaaagcaggcgaacccgcggcgcaaaacggacccaggagcgacaccgaacccacgacccacggaccaggac

SEQ ID NO: 31216 - RNA, 64 nt, Homo sapiens
ccaaaggaagggagagggaagaccagagcgaaacgaagcggcaccgacgaagccgcaacccgag

SEQ ID NO: 31217 - RNA, 38 nt, Homo sapiens
accgcaccagccaaggacgcacagacacggggccagcc

SEQ ID NO: 31218 - RNA, 74 nt, Homo sapiens
gcgaagacaagaaagaaggacagggaacgcggaaggcaccaacccaggcgacaccccggggcgaccccgagaca

SEQ ID NO: 31219 - RNA, 74 nt, Homo sapiens
ggaccagaacaagcagacaccagaaagcgagaaggaccgaaaagacgcggccccaaaggaaacacccgaagaac

SEQ ID NO: 31220 - RNA, 37 nt, Homo sapiens
gaaaaagggacggcagcggagaccgaggagcccagga

SEQ ID NO: 31221 - RNA, 78 nt, Homo sapiens
cggcgccgcgcgcgcggaacagggccgccaggggcccccccaggcccagcaggagaagacagacacggccgcgcacaa

SEQ ID NO: 31222 - RNA, 76 nt, Homo sapiens
gcgcgcgcgagccacaaggagagcgaagcaaggcccggcgcaaggccaggccagcaacacagcaaggaaaggagcg

SEQ ID NO: 31223 - RNA, 80 nt, Homo sapiens
gccccaaaaggcggcaacagacaaccgagcacaaaaaaggcacccggagaacagacagaccagccgaacccagaagcccg

SEQ ID NO: 31224 - RNA, 69 nt, Homo sapiens
caccagccgggaccggaagcacacacagacagccgcccggggagaggaaccaaccaccaaaccccagga

SEQ ID NO: 31225 - RNA, 69 nt, Homo sapiens
cacggggacccccagagcaacccaagcaaagggaagccaggaccaagcgaaaaacaaccaccagcgagc

SEQ ID NO: 31226 - RNA, 78 nt, Homo sapiens
gccgagaaaggaagggcgggaccaacagggagccaggaacaggccaagacaaccccagagagggggggcagggggcgg

SEQ ID NO: 31227 - RNA, 74 nt, Homo sapiens
aagcgcccaacgacggagaaagcaaaaacgcaaaggcagagcccaacaaaacgaaagggaccgcaagcaggccg

SEQ ID NO: 31228 - RNA, 79 nt, Homo sapiens
ccggcgcgccggcgcgcggcgcggacaggcccaaacgagagagcacaaggagagaacaggggggcccacacgcccccag

SEQ ID NO: 31229 - RNA, 58 nt, Homo sapiens
acaggcacaggacggcgcccaaggcgacaaagagcgaaagggcccaaggaacagacca

SEQ ID NO: 31230 - RNA, 54 nt, Homo sapiens
ccagaagaaaggagggcggcgcgccgagcggaacagaccaaacgcgaagaaccc

SEQ ID NO: 31231 - RNA, 68 nt, Homo sapiens
acgcggccaaacccggaggaggagggcacacaagcaacagaagaaaaggagggaagagggaacagaag

SEQ ID NO: 31232 - RNA, 83 nt, Homo sapiens
gaggaaacaggccgccacccagaccagaccaccaccagaaccacacccggagacccagacaacacagaaaccgaaaagaagca

SEQ ID NO: 31233 - RNA, 69 nt, Homo sapiens
aacaggcagcaggaagcacggcgggcgaaacagaaaaggggaaggaacaaaccaaagagcagacccccc

SEQ ID NO: 31234 - RNA, 61 nt, Homo sapiens
agaaaaggacgcgacacaagcacaaaagcggaggaaaagagacgaggacgcgcacaggaaa

SEQ ID NO: 31235 - RNA, 73 nt, Homo sapiens
cggggaccaggacagcgcgaggcgagggcagagccgcggggcaagacccgaaacaaagaccagaagagaacaa

SEQ ID NO: 31236 - RNA, 66 nt, Homo sapiens
acgcccccacacagggcccgggggcccccccaagcgggaacggcggcccagaaacggaagaaagcc

SEQ ID NO: 31237 - RNA, 67 nt, Homo sapiens
agcccaaacgggcagcgaagggagggccccaaggcggcagccccgaccgacggggcaacgcgaagaa

SEQ ID NO: 31238 - RNA, 82 nt, Homo sapiens
aaaggaagggaggaggaaagaagaaacggcgaggaaagagaggagccccggaaagaaaaggacagacccggccagaaaggaa

SEQ ID NO: 31239 - RNA, 67 nt, Homo sapiens
cagccaccgcggaaagcaggggcgccaacgcccggccgcggcccagggggcacccgaggaggaagag

SEQ ID NO: 31240 - RNA, 62 nt, Homo sapiens
ccccaggagggggacaggaggcgcggggcccaggcagaaagcaacagaagcagaagaaaggc

SEQ ID NO: 31241 - RNA, 67 nt, Homo sapiens
gaacacaaagccaaggccgccgagacggaaccaaagccgaccccgaaacagggagcacaacagagac

SEQ ID NO: 31242 - RNA, 77 nt, Homo sapiens
cccgggaggcggcggcgggaggcccggcgcagaacgagaaggggaacggaaggcgcccaccacagagcaagagaggg

SEQ ID NO: 31243 - RNA, 63 nt, Homo sapiens
gacacaggagagcacaaaaggggagacagcaggaaggcagcaagccccaccccccgccagccc

SEQ ID NO: 31244 - RNA, 59 nt, Homo sapiens
aacaggacagagccacagcagaggaaacagggaggcacagcgagaagggaaggaagccc

SEQ ID NO: 31245 - RNA, 63 nt, Homo sapiens
agcgcacacagcaagcacgagggcggaccccaaggagaacagggggggcaggcgagcgggggg

SEQ ID NO: 31246 - RNA, 73 nt, Homo sapiens
gcccgcccccgccccacgaagccagaaagaagccacccagagagaaccaggggacggaaagagagccgcagcg

SEQ ID NO: 31247 - RNA, 103 nt, Homo sapiens
aaggccccaacaccaaacacagaagcaacagccacacagaggcagcaagcccaacaaggaaggccaagaacccaaagcaaggcgagacaaggggccaaccagc

SEQ ID NO: 31248 - RNA, 69 nt, Homo sapiens
caaaaaagcaaaaaaccagggcaagggcccaaaaaagggaaccgcacagcgagacaccccacacagagg

SEQ ID NO: 31249 - RNA, 80 nt, Homo sapiens
cccacacgacgaccacggcggaggaaggaccccgccaaagccagaaagcgacggaagcgcaaagggcgagaagacagacc

SEQ ID NO: 31250 - RNA, 80 nt, Homo sapiens
aaagcccgcaggaacagccaacccacccaagacacaacacaccacagagcaacaagagacccagcagaggcgggagaacc

SEQ ID NO: 31251 - RNA, 68 nt, Homo sapiens
ccaccggcgagcaagacaaaccccccaggcggccccacggacagcagcccggagcgcgaggagcagcg

SEQ ID NO: 31252 - RNA, 74 nt, Homo sapiens
aaaggagccagaaacagcgagccgacagagagagagaacccgagcgccgcagcggagaaagaaggaacgagcaa

SEQ ID NO: 31253 - RNA, 80 nt, Homo sapiens
gccacaggcaaggagagcaaaggaccccaggagacaaggggcagacagcagggggaacacaccgaaacagaggaacagca

SEQ ID NO: 31254 - RNA, 69 nt, Homo sapiens
ccagggaaggaagaaccaagaaccaccaccacccacaacaggggacagaagggaccaacggccaaaagc

SEQ ID NO: 31255 - RNA, 73 nt, Homo sapiens
cggccgaaggcgaacgccgcggccaaggagccgccaaagccagacgcagccccacggcaccaacacggcccac

SEQ ID NO: 31256 - RNA, 76 nt, Homo sapiens
cagacgaagacagcccggacaccgacagcacagacagaacccgcaccagaccagccaaggaagcaacacagcagcg

SEQ ID NO: 31257 - RNA, 70 nt, Homo sapiens
agccccgggggccacgagcgggaacaagcagaaagcacgaacaacgagaacaagacacgagcaaacccca

SEQ ID NO: 31258 - RNA, 76 nt, Homo sapiens
ggggccacgcagaagcgcagcaggcacaaagaaggaggaaggaggaccagggccacagggcgccaagagcccaggg

SEQ ID NO: 31259 - RNA, 64 nt, Homo sapiens
gcccccacccaacaccgaggcggccagacagagaagccgggacagggccagaagcgagcaccaa

SEQ ID NO: 31260 - RNA, 58 nt, Homo sapiens
gcaacggacacaaacaagccaggaggccaggcaaggaaaaccagacgagagacagaag

SEQ ID NO: 31261 - RNA, 80 nt, Homo sapiens
gaagagggccgggggcgcggccgcgcgccgccggcgaaggaggaggcggccgggaaaagcacaaaggcagagggaaggga

SEQ ID NO: 31262 - RNA, 53 nt, Homo sapiens
ccgcagaaacgggccgaagcaaaaacgggaacgcaaaggaacccgagggacag

SEQ ID NO: 31263 - RNA, 63 nt, Homo sapiens
gagcacagagcccgccgccgaccgccgcccgccacacccgccgccagacggcccgccacgggc

SEQ ID NO: 31264 - RNA, 81 nt, Homo sapiens
gcaggccgaggacgaccgcggcgcaccccagggcgagagagcgcagcacagcgagcagaaagcacccggagggcaaccggc

SEQ ID NO: 31265 - RNA, 84 nt, Homo sapiens
accaccagcacggacacaagaggaagcggaaaccagggccacagcacgcagccccaggcagaccaaacacaggacagacccaaa

SEQ ID NO: 31266 - RNA, 71 nt, Homo sapiens
caaccgagagcacaaacaagggcaggccgcgcacacagacccgggcccaacggaccgaaaacgcacaacca

SEQ ID NO: 31267 - RNA, 81 nt, Homo sapiens
gcgcgagcgggggggcgcgcgacggcggcccgaagccagcgccccaccggggcaagcaggcccggcagggcagagacaccc

SEQ ID NO: 31268 - RNA, 82 nt, Homo sapiens
ccagccggggcccagcgaacgccaggcagcccacagcaagcacgccgacacaaagggaccgccaggcaccccccaaaccagc

SEQ ID NO: 31269 - RNA, 80 nt, Homo sapiens
gagacgcaccagcggcagcgggaagcggccagccgagcaagcggaggaccacgccggccgggacgaaacccccgggccag

SEQ ID NO: 31270 - RNA, 72 nt, Homo sapiens
agccacaaggaaagcgagacaaagggagccaaaggaaaaaagaccccagacccgcagaaaaccacagcagca

SEQ ID NO: 31271 - RNA, 80 nt, Homo sapiens
ccacccaggaaaggggaagcgcgcacggcggcaaagaccacacagcgcaaaaacagagagaaacagcaaggaaagaggca

SEQ ID NO: 31272 - RNA, 66 nt, Homo sapiens
aaccgacaacggcccacgagccacaagcgcaccaagcggccacaaagccgaggacggaacaaaaag

SEQ ID NO: 31273 - RNA, 73 nt, Homo sapiens
caaggaccgcagaccagccaccacagccaggcagcaccgggaggaacaccaccagaacacaagccaagaacag

SEQ ID NO: 31274 - RNA, 73 nt, Homo sapiens
caggagcacagaaacaagagcagaagccagcccaacaagacggccagaaaaacggaaccgggagaaaacaagc

SEQ ID NO: 31275 - RNA, 118 nt, Homo sapiens
gagaagcgagggagacgaccacacacacgcaggacaaggacaagccagccgcaagacgcacggcaagagcgccgcaaggcacagccagcccgccagggacacacagacgccacagagg

SEQ ID NO: 31276 - RNA, 58 nt, Homo sapiens
agggcgagcagaggacgacaggccgggagagacaggggccaggccaggggcaggggaa

SEQ ID NO: 31277 - RNA, 79 nt, Homo sapiens
gagagggaagaaacacagcacaggagagccaaaggaggcacgacagcagaggaagagaagcagcgaagccgaggcacag

SEQ ID NO: 31278 - RNA, 63 nt, Homo sapiens
agagaggagaagaccagagaccaccacaaaaaacccgaacacgcagccccggaggcggagccc

SEQ ID NO: 31279 - RNA, 81 nt, Homo sapiens
cgacacaaagacgagccacaacccgaggcagcgaggaaaagaaggagggagcaacaacaaggagcaagcacagcgcgagcc

SEQ ID NO: 31280 - RNA, 78 nt, Homo sapiens
aaggcccaagaccagaagcacaaaaccggcaaaaccagcaaaccagccggcgggcgccacaacggacgacgaaaacac

SEQ ID NO: 31281 - RNA, 62 nt, Homo sapiens
agcggaggcggaagcaggaccggggcacggaaaaccggcgcagagccaaaaggaaccgagga

SEQ ID NO: 31282 - RNA, 73 nt, Homo sapiens
agcggaccaggcccaagcaaaagaccacagccgcgcaacgggcgaccccgagggaacagagccacagccaggc

SEQ ID NO: 31283 - RNA, 79 nt, Homo sapiens
gcgcagaccgcggagaagggagacacaaggacagcagcgacggggcccgcaccccaggggcggaagcagcagagggagg

SEQ ID NO: 31284 - RNA, 77 nt, Homo sapiens
gacaggagagaggggaaccggaccagggaccggaacgaagaacccagagcaggcagaagaagagacagaaaacacga

SEQ ID NO: 31285 - RNA, 86 nt, Homo sapiens
acccgacacagcggagcgcccagaggcgagcccggggaggaagaggcgcaaaggacgggcggacacagcaaggcacaggagagaaa

SEQ ID NO: 31286 - RNA, 75 nt, Homo sapiens
ggagcagcggggacaggacccaggaagccacccgcagaggggcaaggagaaagggcaaacgcagcacacaaggca

SEQ ID NO: 31287 - RNA, 79 nt, Homo sapiens
gcggaaaaccgggaagccacagcagccacgcaagagcaggccgagacgcgcgcaggaacgggcgcaccacgccaccccg

SEQ ID NO: 31288 - RNA, 70 nt, Homo sapiens
gccagcaaaccccgaagagccgccccagggaacgcgcaacacaaagaccccagacgacgaggacgcagaa

SEQ ID NO: 31289 - RNA, 77 nt, Homo sapiens
gcacggggcaccccgggcgagagacaccagcccaccgagggacccgcagccagcggaagaaggggcagaccaacacc

SEQ ID NO: 31290 - RNA, 69 nt, Homo sapiens
ccgcccaacagaagacccgccacgcagcaccagacaacgcgggaacggggacagccggacccagaacag

SEQ ID NO: 31291 - RNA, 85 nt, Homo sapiens
cgacgggaggcggagggcgcccggcgaggagcgccaggcgagggacacaggacaaggagccaccggagaggaagcggcagacagc

SEQ ID NO: 31292 - RNA, 78 nt, Homo sapiens
acggggaagcgcaaaaacaagacggggcgccccacagaggggcgacgagacaggcagaaaagacgacccaccacacga

SEQ ID NO: 31293 - RNA, 76 nt, Homo sapiens
gccagaaaacccgcgagcaggaaccccaggaaacggccagggacacggaggaccgaggaagaaggcacgaccgaca

SEQ ID NO: 31294 - RNA, 91 nt, Homo sapiens
aaccccaaagccgcgcgagcaggggaggagcaagagaggcaaccaagagccagaagcagcaggaccggcggaggagcgagagcaggacaga

SEQ ID NO: 31295 - RNA, 61 nt, Homo sapiens
gaagggaagcggccaaggcacggaggccgcgaagccgaagaaccaagacgagggggaaaag

SEQ ID NO: 31296 - RNA, 76 nt, Homo sapiens
cgcaagccccagcgaccccaagcaaaccggggcacaagaacgaacagggcaacaacggaaagaaaccaggggcagg

SEQ ID NO: 31297 - RNA, 81 nt, Homo sapiens
ggagggacaaaaacccagccggaggccacagcggcgaccgggacgacagagaaaaggcacagacggaggaggaacgcacag

SEQ ID NO: 31298 - RNA, 51 nt, Homo sapiens
acaacagaaccaacaaagcgggccggcgcccagaaagccccacaagacacg

SEQ ID NO: 31299 - RNA, 84 nt, Homo sapiens
gccgcggcagcaagaacagagagagaggggacagacgagagaacgagaacccaagaaggcagaagccagccccgcaggccgcca

SEQ ID NO: 31300 - RNA, 61 nt, Homo sapiens
caaaaaaaagggggccaagaaggaagcaccgcacagggacacgagaaaaccagccaaaaga

SEQ ID NO: 31301 - RNA, 74 nt, Homo sapiens
agggcgcaagaagaagaagcagcgaagccggggcgcacagaggagcggagcgaagacgcacaaaggacagaaag

SEQ ID NO: 31302 - RNA, 79 nt, Homo sapiens
ggccgagcaggcgagcgaacgacggagcaaaggagcagcaaaagggggacaagccaaaggaggggagaaaggggagacc

SEQ ID NO: 31303 - RNA, 70 nt, Homo sapiens
cgcgggaggcgaggaggcggcggcggagacggcgagacgacgggaccgaaggaccccgccagagacaacc

SEQ ID NO: 31304 - RNA, 79 nt, Homo sapiens
gaccgagagaagaaaaaacgccaaaagaagagcaaggagaagaggccggaagggaaggaacagaagggccgaagcgagc

SEQ ID NO: 31305 - RNA, 81 nt, Homo sapiens
aagaacgggcaccggcgggccagcgagagaggagcaccggccaggagaagcgcaggcgggggacacgaccagcgggcccac

SEQ ID NO: 31306 - RNA, 72 nt, Homo sapiens
ccgcccgggccagcggccgcgcacccccggccggaggcaccagcgaccacgccgcgaggcaaacgcaaggga

SEQ ID NO: 31307 - RNA, 56 nt, Homo sapiens
gaccccccggcgccgcgccggcggcgggcaacgacaggggaaccccagggaccagc

SEQ ID NO: 31308 - RNA, 86 nt, Homo sapiens
acgcacgggccccggcgccaccggagagaggccgcgccgggcagaggacccccgcaggcagcggcaggaccgaaggacacagcgag

SEQ ID NO: 31309 - RNA, 54 nt, Homo sapiens
cagccccgaggagcgggaacaggaagagagaaggcgaaggcacaaaacagagag

SEQ ID NO: 31310 - RNA, 72 nt, Homo sapiens
gagcggggcccggaccccaagacggccacggaggagaccacaaacagccacaaggggacgaagccaggcaaa

SEQ ID NO: 31311 - RNA, 73 nt, Homo sapiens
gcggggcaagcagccagacggggaaagcggccaggaacacagcacccacccacacccacacccgcgacgggag

SEQ ID NO: 31312 - RNA, 61 nt, Homo sapiens
caaggagaaacaacaggaacagacaaaccagaggagagaaaagggaggacggaggcacagg

SEQ ID NO: 31313 - RNA, 72 nt, Homo sapiens
ccaccagcaagcgggaaaaagaagcaggcagaccacaagagccacgaacaaggaaaccccaccgcacaaacg

SEQ ID NO: 31314 - RNA, 68 nt, Homo sapiens
cagacagcgagcgaggcggagacggcgccaaggggccaagccacccgcagccgggggccaccccaggc

SEQ ID NO: 31315 - RNA, 81 nt, Homo sapiens
cacccggccggcagagcagagaggagcccaggggaagagaggggccgaggggggcacacgaggaaacgagcggggaagacc

SEQ ID NO: 31316 - RNA, 70 nt, Homo sapiens
gggcgaaaagaagggggcgacccgacgaccagcggggccggcacgcacggggcggaaaacaccccaaaag

SEQ ID NO: 31317 - RNA, 73 nt, Homo sapiens
aggccggcaacccacacaagcgaaggcgcgcaccggaagcaccagcgaggaaggacgcaaaagaaggacaagg

SEQ ID NO: 31318 - RNA, 72 nt, Homo sapiens
acgggggacagaacggcaccgacgagacggagacagggaagaagaccgcaacacagcaacccagaccacaaa

SEQ ID NO: 31319 - RNA, 71 nt, Homo sapiens
acacggacaaaacaggcaaaaaaccggaccaacaaccccaaaaagcggggaaaacaaaaaaaagaaggagg

SEQ ID NO: 31320 - RNA, 74 nt, Homo sapiens
gggagaacccaccccccacagccacggacaccccaagagcgcagggagaagaaacgaacggaacgaggagagca

SEQ ID NO: 31321 - RNA, 85 nt, Homo sapiens
cgaaggcgggcgcagcggcggagcggagcggagcccggagggaaagagccagacccagaggcagcgcaacaaggggaccccaggg

SEQ ID NO: 31322 - RNA, 75 nt, Homo sapiens
aagggacccacgagaagacgcagaggcaaaaaccacaaggcagcggaacgcgccgacgccgcaaccagcaccccg

SEQ ID NO: 31323 - RNA, 52 nt, Homo sapiens
cgagaagccagccacgaaaggacaagagaaaggagcaagaaccaacgaacca

SEQ ID NO: 31324 - RNA, 71 nt, Homo sapiens
caaagagaggagagagaaacaccccggagggcaagaagcagcggagaacagaacccccccaccaccggaag

SEQ ID NO: 31325 - RNA, 81 nt, Homo sapiens
gggcgagagaagggcccagcagaaccaggaagccacacaagaggaggcaggaaagcgggagcagaggaagcacagagcggc

SEQ ID NO: 31326 - RNA, 85 nt, Homo sapiens
ccccgccggagaccaccgaggggacgccaggggcaggggcgggcgcgagcaggcacaacaccgggaaaagccgcccccagacagc

SEQ ID NO: 31327 - RNA, 82 nt, Homo sapiens
gacaggaaccagccgggggccaaccgaggagccacgcagcagggccggggcagagagccgaaagaccagacgccaacaagaa

SEQ ID NO: 31328 - RNA, 41 nt, Homo sapiens
cggggaggaggacgcggggaaggggagcagcagacaagagg

SEQ ID NO: 31329 - RNA, 82 nt, Homo sapiens
ggcggcagaccgcccccccagccgcgcggcccccagaccccggcgcgggggaccaaaagaacccagccaacccgcagaggga

SEQ ID NO: 31330 - RNA, 81 nt, Homo sapiens
cagcgccgcggggcccaggccgggagccgaccggcacagcaggcccgacaggcccccagagccgcccacaggaggccccgg

SEQ ID NO: 31331 - RNA, 83 nt, Homo sapiens
cccgggcccaggagcagcacggggacggccgcacacccgagagcgagggcgccaggcagacacggggccccccaggaggcgac

SEQ ID NO: 31332 - RNA, 61 nt, Homo sapiens
agcacggcgggcgaaacagggcgacgccaggagcacaccgaaaagaaaggaaaaccgggag

SEQ ID NO: 31333 - RNA, 81 nt, Homo sapiens
acgaaaccgcagacaccgcgaaaagcgaagaagcaccagggagggggggggaggagccaagccgccaggccaccacagccc

SEQ ID NO: 31334 - RNA, 76 nt, Homo sapiens
aaaagaaagagaacagcaaccacagcgggaagggcaagggccacacagcgacaaaagaaaacgcgggagagggcag

SEQ ID NO: 31335 - RNA, 71 nt, Homo sapiens
gcgcagggggcggcgcaggaaaggaggaccgacaggagcggacccgcggaggggcgggagcggccgagggc

SEQ ID NO: 31336 - RNA, 63 nt, Homo sapiens
aaaaaaagccaaaaagaaaaagcccggagaaccaggaggcgaggaggcaaggaaccgagcgcg

SEQ ID NO: 31337 - RNA, 52 nt, Homo sapiens
gaggaaaacgacccggcagagagcgagaagaagccggaacaggaaacacaaa

SEQ ID NO: 31338 - RNA, 76 nt, Homo sapiens
gcgaagggcaacaccccacggccaggaaaacggggaccaccacgcccaggcacccgagcaggaagcgggcccagac

SEQ ID NO: 31339 - RNA, 83 nt, Homo sapiens
cacgagaccccgagccggagcggaaaaacccggcggggggggaagaggaggaggcgcccgacacgacaaaccacgcccaaacg

SEQ ID NO: 31340 - RNA, 73 nt, Homo sapiens
cgggcgcggcgccccagccgaggagaacagaagcggagaacacaaagccacaagccaaacccaaaaggaaacg

SEQ ID NO: 31341 - RNA, 81 nt, Homo sapiens
ggaggccgggaccacccagccagcggaagaaggcagaaccaggcccaggccagagcccgggcagcacagccaggccgcaga

SEQ ID NO: 31342 - RNA, 48 nt, Homo sapiens
gagccggagcggacgacgccgcccggggagaggaaccaaccaccaaac

SEQ ID NO: 31343 - RNA, 85 nt, Homo sapiens
caaaacccacccgggaagcccaaaaccggcaaaaaaagcaaacagcaagccacaaaccgccagagcggaacgaccccagagcgag

SEQ ID NO: 31344 - RNA, 42 nt, Homo sapiens
gacacagggaaagcggagggagaacggacccacagacaaaca

SEQ ID NO: 31345 - RNA, 78 nt, Homo sapiens
ggacgccccccccgaccaagggaaagcaccccggggggggagaagggaagcgccaagaagcaacaagcacaggaggag

SEQ ID NO: 31346 - RNA, 60 nt, Homo sapiens
agaggcggccagcaggaggcgagaaggacaccagaggaccagaacccacgagaaacagac

SEQ ID NO: 31347 - RNA, 77 nt, Homo sapiens
cgcacgggaaccggaccaggaggaggcaggaccaaaagggaaaagcaccgagagggccgaggcagacaagggaaagg

SEQ ID NO: 31348 - RNA, 74 nt, Homo sapiens
ggacagcaggagacgacgacgccggcccggcacagggaccagcggagggcggagggaggcgcccggccacccca

SEQ ID NO: 31349 - RNA, 83 nt, Homo sapiens
gcagccagacacgcggagcgggagagcggccacaccagcgagggccacagagcaaccaaaaaccggccgcaggcacaaaagaa

SEQ ID NO: 31350 - RNA, 74 nt, Homo sapiens
ccaggacaacccacagcccaccaggagggccacagaccaagcccgcccaggcaagaagggccaaaggcaaagcg

SEQ ID NO: 31351 - RNA, 73 nt, Homo sapiens
agcaagagcgggagaaaagacccccaagagcacagccggaagagggagagaacagcacacagaggcgcaaggg

SEQ ID NO: 31352 - RNA, 79 nt, Homo sapiens
cgggcgggggagcggggcgcggcgggaaggagcgggcgacccgggggggccagcggagcccggagcggcagcccacaag

SEQ ID NO: 31353 - RNA, 86 nt, Homo sapiens
cccacccccacccacgcggaggggggcccacgccaggccggagcggacgccagaccagggggccaaagggcgagggcacaaaaaac

SEQ ID NO: 31354 - RNA, 52 nt, Homo sapiens
cgcagaacaggagaggaaagcggcagcccagaaccggaagcgaccacggaca

SEQ ID NO: 31355 - RNA, 76 nt, Homo sapiens
cagacgcagggcgcccccggccccacacaagaccacccaaggcagcgcaaaaggggaacggagaacccgcggacgg

SEQ ID NO: 31356 - RNA, 73 nt, Homo sapiens
aggaaccaggagagagcagccagaggaaggcaggcagcaaaaaagcagcagccaccccaccaaacaagcaacc

SEQ ID NO: 31357 - RNA, 86 nt, Homo sapiens
cccccaccccgcagcgggcaccacgcccaggaggcagcggaggaggagaaagagaggacccccggaccggcccgagggccgcggcc

SEQ ID NO: 31358 - RNA, 75 nt, Homo sapiens
ccggcagcagaagacaagaagaggagggccagcacaaaaaacaggagaccaaagaaagacagaagaaagacccaa

SEQ ID NO: 31359 - RNA, 67 nt, Homo sapiens
gacagggcacagccacggcacaccggcaaggaaagggacaggcagggagacgggcaaggacgcgaca

SEQ ID NO: 31360 - RNA, 53 nt, Homo sapiens
ggaaacacaagcacaaagacagcaacagaagcaaggaagccgcagcagccaga

SEQ ID NO: 31361 - RNA, 74 nt, Homo sapiens
ggacacgggagagaggccgggcgagcagcaggagcaccggcccaagaaacagaccaggcgaggggagcggcgca

SEQ ID NO: 31362 - RNA, 76 nt, Homo sapiens
agggcgggccccccgaagagaaagaggggaaaagacagaagcagaccccaccaccccgagcaacaccaccacacgg

SEQ ID NO: 31363 - RNA, 105 nt, Homo sapiens
gcgccacaaaagcagagaacagccacaacgagaaggccgaaagagccaggcccacccacagccaaaacacccacccagggaccccagggcgcaaccaagccaagc

SEQ ID NO: 31364 - RNA, 86 nt, Homo sapiens
caagcaggcaaagacggcaaaagcacaaggaccgcggacagagacaacaccgagagagaaggcgagcccgcgagacacgacaaaaa

SEQ ID NO: 31365 - RNA, 53 nt, Homo sapiens
gacaacaacaggaagcacaaacagcggaagacacagagcggacggccaaggag

SEQ ID NO: 31366 - RNA, 58 nt, Homo sapiens
agacaacaccacgaagccgcaaacccagacgaagaacggaagcgccccagaggagagg

SEQ ID NO: 31367 - RNA, 90 nt, Homo sapiens
gcgggcccggccggcggcggcggcggcggcggcggcggcgcagcgaagacacaggagaaacggacaaagagcaagcagccccgagaagaa

SEQ ID NO: 31368 - RNA, 45 nt, Homo sapiens
cgagcgccacaaccccagccaccccgcggaaggcgcgccgaagaa

SEQ ID NO: 31369 - RNA, 77 nt, Homo sapiens
gacaaagaccgaaaagaagagaacaaagaagaggcgggcggagggcacaccagaggggaacccggcaccagccgggc

SEQ ID NO: 31370 - RNA, 78 nt, Homo sapiens
agccaaaaagacaagcgaaaaagggcagaccaagaggaaccagaggaaagccccagaagcaaagagaggagaagaaag

SEQ ID NO: 31371 - RNA, 55 nt, Homo sapiens
cggcaaacaccaacaaagggaaggagaacaaaggaggagcagacagaagagagga

SEQ ID NO: 31372 - RNA, 73 nt, Homo sapiens
acgggaagcaccaagggcagaagacagcaggcaaaaggacaagagaccacaaaaggaaaaaaagagaaagggc

SEQ ID NO: 31373 - RNA, 75 nt, Homo sapiens
ccagcgccagagcgagcgccccgcccaggaaccccggccgggcgaagcggggaccaagcaagcaggaggggccag

SEQ ID NO: 31374 - RNA, 61 nt, Homo sapiens
aaaagagacaaggcggcccaaacaggcccaacacccacgaaagccagaaaaaagagaacgc

SEQ ID NO: 31375 - RNA, 73 nt, Homo sapiens
agcaaagaaaaagaacccaaacaagacgcaagacacccgacgaggaggcaacccgagcaagaaggcaggacag

SEQ ID NO: 31376 - RNA, 60 nt, Homo sapiens
aaacgacaccgacagcaggaaagaagggggaacaacgaggcaggaaaggaggacacgaac

SEQ ID NO: 31377 - RNA, 68 nt, Homo sapiens
gacggcgccagagcgacccagccagcgacgaggggcagagccggccgcgaccgccgggcccaacgcgc

SEQ ID NO: 31378 - RNA, 98 nt, Homo sapiens
cccgcggacgcgcccacaggcccgggaggagccggacacaaagaaaaggaggcccagaggaaaaagacacgcgagaagacgaggacccgggaaaagag

SEQ ID NO: 31379 - RNA, 76 nt, Homo sapiens
cggggggggccggaggagcagcgggccagaacggccaggagacgcaacgaggcgcaggaagggcaacaccaaacca

SEQ ID NO: 31380 - RNA, 73 nt, Homo sapiens
agaaagaaaacgacacaggaagaggaaaaaacggccaccccaagagacagaaagcgaggacggggccagggga

SEQ ID NO: 31381 - RNA, 79 nt, Homo sapiens
caacgcacccggaccgggccaggacagcccagagcaagcacacggaggcccgggagccagaccgggagcccgccccagc

SEQ ID NO: 31382 - RNA, 73 nt, Homo sapiens
ccagagggagccaaaaaccaggcccagcacgacagagacccggaaagcgagcagcaaagacccagcacccaac

SEQ ID NO: 31383 - RNA, 93 nt, Homo sapiens
cgggcagccagagaaacggaaccagaagcagagccaacagaccgaacaaagccaaggacaaaaggaagcaccgacaagacagaagaacggagc

SEQ ID NO: 31384 - RNA, 82 nt, Homo sapiens
gacaccccacccagacgaagacagcccggacaccgacagcacagacagaacccgcaccacagaccgaaaagggcggaaaagg

SEQ ID NO: 31385 - RNA, 36 nt, Homo sapiens
ggagagaacaaaaagggcagcagcaggaacaggaac

SEQ ID NO: 31386 - RNA, 73 nt, Homo sapiens
caaggccagagaagaagcggaggaaggaccaaagggacacagaagacaaagcaggacgagaccggcggggcag

SEQ ID NO: 31387 - RNA, 76 nt, Homo sapiens
acacgcgggccagggccggcgcaccaccaggccacccaggggcgccagcccccggcagggccaaggcccccccacg

SEQ ID NO: 31388 - RNA, 77 nt, Homo sapiens
ggaacacaccaggcgcacggaaacggagcagcaaggaaaaggaaaccgcccgcccccagacgcagaaaacagacaca

SEQ ID NO: 31389 - RNA, 83 nt, Homo sapiens
cgaacagccgacggggcgaccgccggcccaggggaacaccgcccagccaagggggagggcagcgccaaacagcgcaaaggcag

SEQ ID NO: 31390 - RNA, 75 nt, Homo sapiens
aagggaaggcagcgcgggaacagccgggcaaccgccccagacccaacccgcaggagcacggaagcccgcacgcag

SEQ ID NO: 31391 - RNA, 68 nt, Homo sapiens
gaccaacccaagcgaagaagagcggaaaacaagggggcagcggaccacacaagcaggccgcgacccga

SEQ ID NO: 31392 - RNA, 62 nt, Homo sapiens
gcggaagcagacgaggacaaaaccgggagggacacaagaaggggccgaagagaacaagagcg

SEQ ID NO: 31393 - RNA, 48 nt, Homo sapiens
gaacgcgcacacgaccagcagacaagaacaggaaaaagcaaggaacgg

SEQ ID NO: 31394 - RNA, 68 nt, Homo sapiens
agacacaccagcccggcgccagacccagagggcgaaccaaagaaggaaggcgacccaaaaccacgaag

SEQ ID NO: 31395 - RNA, 99 nt, Homo sapiens
agagaggcaccgggacggaccgagaccggaccgagagcggaccgagagcgcgaaacgcacgagaagacgcgccaggacccacaaccccagcccggccga

SEQ ID NO: 31396 - RNA, 66 nt, Homo sapiens
gcccagcccgcccccagggccaacagccaccccacgaggccaaaaggggggagaaaaggccaaggg

SEQ ID NO: 31397 - RNA, 82 nt, Homo sapiens
cgccccgcccggcagcgagcggcgccccaacccggaccccagccacagcggaggacgaggccaacaaggagcaggaacagag

SEQ ID NO: 31398 - RNA, 70 nt, Homo sapiens
aaccccgaagcagaacacgaaacgcagccacaagcacacagaccacacggacacaaaccaagaggcaaga

SEQ ID NO: 31399 - RNA, 79 nt, Homo sapiens
ggaaaagcccggaaacacacacaaccccaaagcccagagaagaccagagaggggggcagaaaccgaacagggcggagaa

SEQ ID NO: 31400 - RNA, 60 nt, Homo sapiens
gccaggagggagaggagaccaacacccacccagggcgccgccaggaggaagaaagcgggc

SEQ ID NO: 31401 - RNA, 72 nt, Homo sapiens
cggacagagcagacagaacagacaaggggacacgcacacagcgaaccgaagaaacacacagcggacagaaga

SEQ ID NO: 31402 - RNA, 72 nt, Homo sapiens
cggggagccagcggcacgaccgaaaccacgaggaaaccagacagccccgggggcgccgagggcacaagggca

SEQ ID NO: 31403 - RNA, 77 nt, Homo sapiens
cagcaggcgggcagaaaggcagcaccgggaccggaggcccagagcgacggacggagaaccaggcccgcagcagcagc

SEQ ID NO: 31404 - RNA, 59 nt, Homo sapiens
gcgggagggggcgggacggccgcccgcagcagagcccaaaaggcagagcgaggagagaa

SEQ ID NO: 31405 - RNA, 68 nt, Homo sapiens
agccagagaagaacacagagagagaagccaggagccaccaacaccaaaaaggaacaggaggcccggac

SEQ ID NO: 31406 - RNA, 73 nt, Homo sapiens
gccaagaagaccgagagcaccacaaggccaagggcaaggagacaggcagaggcagcgacagagaaaaccccgg

SEQ ID NO: 31407 - RNA, 70 nt, Homo sapiens
cacgacaaaaggcaaacaagaccaacaaaaacgcggccagcgcaacggaaacagaaaagagcgggaacca

SEQ ID NO: 31408 - RNA, 80 nt, Homo sapiens
agcaggccacccacacgcgcaacacagaagggaacaagcggacagaaaaagagaacaagccccggccagaaagaccagaa

SEQ ID NO: 31409 - RNA, 70 nt, Homo sapiens
cacccggccccgagacagaagccgccgggccggggcacaagcccccaagaccaggcccggccaaccacag

SEQ ID NO: 31410 - RNA, 99 nt, Homo sapiens
caacacaggaaaacagagaaagaaggaaggagggccgaggccagaccagaaggagcacaggcggaggccggcagacccaaaaaggccaggcagaagaag

SEQ ID NO: 31411 - RNA, 78 nt, Homo sapiens
agccagggaagaccccgaaggaccaagcgggaaaaagccaaagcaggccgccacaacgaaaagccaaaaaggagggaa

SEQ ID NO: 31412 - RNA, 68 nt, Homo sapiens
ccgagccggacccagggagagcagggcagggaaaagcgccgggcggaccagcagggcaacgcggggcg

SEQ ID NO: 31413 - RNA, 64 nt, Homo sapiens
acgcgaaaagcggagcacggaacagccaggggaaaggccacagaagagcaccaggacaaaagaa

SEQ ID NO: 31414 - RNA, 77 nt, Homo sapiens
aagagcagagcaccggaacgggaccccggcaaagacggacaagcgcaggggggggaagacaacccggagaacaccca

SEQ ID NO: 31415 - RNA, 57 nt, Homo sapiens
cagagccgagccgggaaccacggggagggaccacacacccccaacacgcggcggaga

SEQ ID NO: 31416 - RNA, 68 nt, Homo sapiens
agcaaaagacccgcaccaccgcacaccgagcagagaccgcggccaggagccaagaagaccagaccgcg

SEQ ID NO: 31417 - RNA, 66 nt, Homo sapiens
gggcgccccagcagaacaggaggcagggaagaagaccacccccaccaaacacgaaaaacaaaggga

SEQ ID NO: 31418 - RNA, 78 nt, Homo sapiens
ccgccggcggagaacagcggggcgcggcaccgagggccaggccaacggcacagccccaggggcgggccacgcgcgggg

SEQ ID NO: 31419 - RNA, 71 nt, Homo sapiens
gggaggaaccaagggaaacaagaaaagggaagcgggagacaccacgaaacacgccaaggaacccaggagaa

SEQ ID NO: 31420 - RNA, 80 nt, Homo sapiens
agaagagagggcaggaacggagcacaccaggaacacaggcccgcaggcagcagcagaacgcccccccgggaagaccgcag

SEQ ID NO: 31421 - RNA, 68 nt, Homo sapiens
gagcacagaaccaagggaagagaacacacggaccgagagaggaaagaccacagcaagaccacgccccc

SEQ ID NO: 31422 - RNA, 76 nt, Homo sapiens
cggggccgcagccaccaggacgcaaaggcccacgggccacgcccacaaggccaaccaccccggccggacccggggc

SEQ ID NO: 31423 - RNA, 92 nt, Homo sapiens
cccgacgcaacgcggagcgcaaggcgagggacgagaacgagggaagcagagagcaaccaagcaccaccaagcccacagcagcaggaacaaga

SEQ ID NO: 31424 - RNA, 88 nt, Homo sapiens
cgacggggcccagcagacagccgaggggagcgcggggcccggcagaaagcagggagagcaacaagccccggccccagagccagccgga

SEQ ID NO: 31425 - RNA, 68 nt, Homo sapiens
acaggaaggaaaggacaaggagaacaagagaaaacaccgccacacgaaaaagcggacaggacaaaacg

SEQ ID NO: 31426 - RNA, 66 nt, Homo sapiens
gaaacgggagggaaacagcaagaaaaaggaagcaaaacccggggacccacaaggccgcaaaaggac

SEQ ID NO: 31427 - RNA, 69 nt, Homo sapiens
ccaaagcccggaagcagacggccaaagaagcggaagagagccaagccggcacaagacaacaggaccccc

SEQ ID NO: 31428 - RNA, 79 nt, Homo sapiens
cgaccccgagacaccccggggcgggccgacggagacaaccgcagccccggcaccaaagcccggaggcgcccgaaggcca

SEQ ID NO: 31429 - RNA, 84 nt, Homo sapiens
gccgccgcagccgccgccgccgcgggagccagccggagaggccgaaccagcgcgggggcgagaacgaaaacaaacggaagagag

SEQ ID NO: 31430 - RNA, 70 nt, Homo sapiens
aaggccccagaaagggaaaaccgccaaacaaaaaagaacccacaggagggccagaggacaaagcacggcg

SEQ ID NO: 31431 - RNA, 81 nt, Homo sapiens
ggaggagcagcgggccagaacggccaggagacgcaacggaagggggagcaacagacaagcccgaaaggaacagcagcagga

SEQ ID NO: 31432 - RNA, 78 nt, Homo sapiens
cgcgacgcgggccgggcccgcgcccagcaccccagcccgcgggccggagggacagagaggacggagaaggcagcggga

SEQ ID NO: 31433 - RNA, 81 nt, Homo sapiens
cacggccagagggcaggaacagagcaacagggccagcagggagcgcggagagaaagggccgaagcgcaggaccacggaaga

SEQ ID NO: 31434 - RNA, 66 nt, Homo sapiens
accacaccgcaggccaccgacgacacagaaaaacccgaccaggcaacccgacacagacgaaaggaa

SEQ ID NO: 31435 - RNA, 54 nt, Homo sapiens
gccgccaccggcgggaagagcaccaggcccgagggaccgccaacaagcggcccg

SEQ ID NO: 31436 - RNA, 65 nt, Homo sapiens
cgggggaccccaaagccccaccccacaagcccaacaacaacagaagagaagagaaagaaggggac

SEQ ID NO: 31437 - RNA, 84 nt, Homo sapiens
cgccacgagccggcggcggacggcaggacagcggccgaagccagagccggggcggcgccaggccccacacgggcgcggcgcggc

SEQ ID NO: 31438 - RNA, 76 nt, Homo sapiens
caaagcggagaaaaacagcgagacaggggagccgccaccaaaagcagacggaaaacccacggggaagaccacaccc

SEQ ID NO: 31439 - RNA, 76 nt, Homo sapiens
gggcccagaggcccagggaggcaggggcagaaacagagaaggaacagggcggccggccggacggaccacacgacgc

SEQ ID NO: 31440 - RNA, 68 nt, Homo sapiens
caaggaaaaacacaacccaagaaggacagcagaccacagcccggcaggcccaaaaacccaaagggaca

SEQ ID NO: 31441 - RNA, 85 nt, Homo sapiens
ggaaaaggagcgagcagacgacaagccgggagcgggcggccaaccaggggaagaagggaaacaggaagaggaaaacccaaaggga

SEQ ID NO: 31442 - RNA, 73 nt, Homo sapiens
cgaacagagcccacggcaccagaggaggacagccggcgcaaccaagcaggaaaggaagacagaccgcgaggcc

SEQ ID NO: 31443 - RNA, 44 nt, Homo sapiens
agcacaacaggagcacgaggagggggccccgcagacaggggggg

SEQ ID NO: 31444 - RNA, 73 nt, Homo sapiens
ccgaaacggaaagcccaagaggagacgacgcccaaagggggggccacccagaccacgaagccaagagcagcag

SEQ ID NO: 31445 - RNA, 69 nt, Homo sapiens
aaagaacaccagcaggacagcagacccagagggacaagaacccacacccggggaaaggaggaggagacg

SEQ ID NO: 31446 - RNA, 82 nt, Homo sapiens
acagcgcagcgacgagagggaggcgggaggcggcagaagcagccagaggagggcacaggcggcgcggagcgcgccgagggca

SEQ ID NO: 31447 - RNA, 69 nt, Homo sapiens
ggacagggcagcaaggccggcccaagcccccaagaagcccgggacgaacaccaaggccccgcgcgcgcc

SEQ ID NO: 31448 - RNA, 60 nt, Homo sapiens
cagcaccgccggcggcaggaaaggacgcgccggagccgggcgcgaaaagccccccgggag

SEQ ID NO: 31449 - RNA, 80 nt, Homo sapiens
aaggcccaccaagcgagcagagagaagggcgggaccccgggcagaaagcggagcgccaacgcggagcggcgcggggcccc

SEQ ID NO: 31450 - RNA, 64 nt, Homo sapiens
aacggggaccccggagcccagaagacagagggcgagccccgggcaaggggagcagacaacaaaa

SEQ ID NO: 31451 - RNA, 80 nt, Homo sapiens
gccggaagccaggcacaccgcaaggacccaaaggggaggagaaagacagcaaagaaaaggagaagaaaggaaaaaaacaa

SEQ ID NO: 31452 - RNA, 119 nt, Homo sapiens
acccgcgcgggagggcagccaccaaaacagacccgggcagcaccagaacacaaaaggagacgcaggcagaaggaaagggcgcagaccgggcagcagcagccgcggaacggccaggccag

SEQ ID NO: 31453 - RNA, 70 nt, Homo sapiens
aacccgccacagcacacgaaaacggcgcacaaagagcccagaggcccggaaggcgcaaaagggggagaac

SEQ ID NO: 31454 - RNA, 81 nt, Homo sapiens
gagggaaggaggcgcagacccgggagcacaccgcagagagggacgcagcaaccaccaacaacaccgggcacacacacagga

SEQ ID NO: 31455 - RNA, 84 nt, Homo sapiens
gcggaggcccccgggcaagaggcgcaaacaagccaacccaggaggaaaaacggaaacccaccagagaaggcgcggccacccagg

SEQ ID NO: 31456 - RNA, 54 nt, Homo sapiens
gcagagcaggggccccccgaaggaaacacaacagacacacccaccaaacgcaac

SEQ ID NO: 31457 - RNA, 73 nt, Homo sapiens
aaacccaaaaaggagcagccggccggccggggaggaggagggcgggaccgcccaacgagaagacgggccacac

SEQ ID NO: 31458 - RNA, 54 nt, Homo sapiens
cgccaaaacaccagaaccaaccggaaagggcgaacggagaggccagcgcggaac

SEQ ID NO: 31459 - RNA, 67 nt, Homo sapiens
gaggagcggagcagcaggaacggggagcccagaacacgacagagagcaagcgggcccagagggagcg

SEQ ID NO: 31460 - RNA, 84 nt, Homo sapiens
gagaggccaggagaggaggacgcggcggccccgaagcggaaagagaggaacagagggcaccaggaaaccaagacaagcaaaaaa

SEQ ID NO: 31461 - RNA, 66 nt, Homo sapiens
acgagaagccgaaaagcgcagcgagcggagccgccggagggcacccaaacacaggagccaggacag

SEQ ID NO: 31462 - RNA, 76 nt, Homo sapiens
cgggccgcgagcggggcgacccgagacgggcggcagagaagagaagagcacagcgggaggaaagggagagacaaga

SEQ ID NO: 31463 - RNA, 76 nt, Homo sapiens
gggggaaccaaccccgaacaggggggacgcggaagagacagcagaacaagagccaggaccggacaggaagggagcc

SEQ ID NO: 31464 - RNA, 74 nt, Homo sapiens
gcccccgcaagcgagaaagaacacccaacccagcccaccccacagcagcccggggccgcgggcagcaggaagac

SEQ ID NO: 31465 - RNA, 68 nt, Homo sapiens
caggaaagagcggacgggagaaagacacagcccacacccagggccaaagagacaagggaagacaggac

SEQ ID NO: 31466 - RNA, 71 nt, Homo sapiens
cgaagaagcacgaaagccccacccgccgcagcaagcagagagcaggaaagcgcacagagagagccgcggag

SEQ ID NO: 31467 - RNA, 111 nt, Homo sapiens
gaagaaacaccaaccggccagaggaccaaccacaccacacggccacaccccagagacgccaaggccccaaaggacaaagcacagacagcagaagcaagaggccaacaaccc

SEQ ID NO: 31468 - RNA, 83 nt, Homo sapiens
ggcggacacacagacccccaccaagcagagcagcccgacggccaggaggcgaagagacgaggaagcccaggagcccgaacaca

SEQ ID NO: 31469 - RNA, 47 nt, Homo sapiens
accaagaagaagccaaaggcagccccaggcgccccccggggccaagc

SEQ ID NO: 31470 - RNA, 78 nt, Homo sapiens
gcgggcggcacgcacgcagggccagaagcccccaggaggagaacgagcaacggaagccagaagaagcacccccagcag

SEQ ID NO: 31471 - RNA, 39 nt, Homo sapiens
gagagccgggagaaacacaaagagaaaaaagaacccaga

SEQ ID NO: 31472 - RNA, 73 nt, Homo sapiens
gagaacaaaaccagcgagggagcccacaagcccggagggcacgagccacacgccacgcccgcagggccccagc

SEQ ID NO: 31473 - RNA, 52 nt, Homo sapiens
acacaggggcaagcccgagccaagacgcaggcagagacgacaacccggccca

SEQ ID NO: 31474 - RNA, 80 nt, Homo sapiens
gaccgcgcccgcggagagcccaaacaccaccaccaagcgccagaccaaaacgaagaagacgagccaaacccaaaaaggaa

SEQ ID NO: 31475 - RNA, 38 nt, Homo sapiens
ccccaagagcggaacaggcagaaacgagcaagacaaaa

SEQ ID NO: 31476 - RNA, 61 nt, Homo sapiens
ccgggaagaaaccgaaacaccgacaggacaaggagccaaggagaccgggagagagacgaag

SEQ ID NO: 31477 - RNA, 70 nt, Homo sapiens
gcccaacagaaaaagagaggagggagaacacagaaacccgccccggggcgggggcggagggcaagacgac

SEQ ID NO: 31478 - RNA, 70 nt, Homo sapiens
aaaagacgaggcccccaagcggggcgaccaacgaggacaggcgccaaaacaaaacagagagacacgaaag

SEQ ID NO: 31479 - RNA, 61 nt, Homo sapiens
cggagccagaggacggagaagacgaggaagaggagaacaggcccagcgacgcggggaaaac

SEQ ID NO: 31480 - RNA, 76 nt, Homo sapiens
ggaacgcgacgcgagagaaggacccacggcgcgcgaaggccagacggcagccggaaacgaggcgcagcgcggccca

SEQ ID NO: 31481 - RNA, 68 nt, Homo sapiens
gggggaagcaagcccccaacaagcaaaggaacgagaaggacggagaagcgaaagccagaccggcaaga

SEQ ID NO: 31482 - RNA, 77 nt, Homo sapiens
agacccaggcacccagggaaacgagagggaccgaagcacacacaaaggagacaagcccgagggaaccaccaccacca

SEQ ID NO: 31483 - RNA, 78 nt, Homo sapiens
caccccaggagcccagccacagccaccggacccccagcaagaacaacaggacagggacccagacgcggcaaacccccc

SEQ ID NO: 31484 - RNA, 85 nt, Homo sapiens
aacaggacgaaggcggcgaagagacagaggcgagcggccgggccgacagacgccacgccgagcgccgggccacggccacgggggc

SEQ ID NO: 31485 - RNA, 73 nt, Homo sapiens
ccccgggacggacgaagcgggcgcaaggacaggggccccaaccgaccgagagaagggaccaggaaaccgccaa

SEQ ID NO: 31486 - RNA, 76 nt, Homo sapiens
gcgccgccggggagaagcccccggggcccaggacgccaaaagaaacgaaggaggcccaaccacaaaaggagccgac

SEQ ID NO: 31487 - RNA, 74 nt, Homo sapiens
gccgcagacagaacaacaagcgagacccgccggccacacgaggagcccgggcaagagcaaagagaggcaccggg

SEQ ID NO: 31488 - RNA, 81 nt, Homo sapiens
gagcacccccaggccgccgcgaaggggggcaagaggaaagacacgcaaacgaaagacaggagccagcacggagacccccag

SEQ ID NO: 31489 - RNA, 80 nt, Homo sapiens
agacagagcaagaaaagcccgggagcagaagggaggcccaagacccacaacaaaagggggcagcacgccgaaggagagac

SEQ ID NO: 31490 - RNA, 56 nt, Homo sapiens
cccggggcaaagagcacgagaccaaaaaaaagcaccgggaggaaagagagccacac

SEQ ID NO: 31491 - RNA, 71 nt, Homo sapiens
cgaagcccaaagcaggcgcggagcgggaaagacacggagcaggccggaggagaccgggcaggaccagcaca

SEQ ID NO: 31492 - RNA, 64 nt, Homo sapiens
gggaaacccagagccaagaggaacccagaagcaggggaaaacgggaggagacaggagaagcagg

SEQ ID NO: 31493 - RNA, 53 nt, Homo sapiens
cccaaggacgcgaaaaccccgagagaaacggcgagaaaaccaaacaggagccg

SEQ ID NO: 31494 - RNA, 51 nt, Homo sapiens
gcaccgccgagcggaccccaagcaagaggcacggagcccaggcgccggaac

SEQ ID NO: 31495 - RNA, 68 nt, Homo sapiens
agaacccaagaaagcgcaagagcggcaggacgcagcaaagaaagggcggagaacggaaaagcaccagg

SEQ ID NO: 31496 - RNA, 40 nt, Homo sapiens
accagaagacagccacgggaggaccacaggagcagcaacc

SEQ ID NO: 31497 - RNA, 84 nt, Homo sapiens
agaagccgagacccacagcaacaccaccgaagccacaccgaagagccccagcggcccggacaaaaaagcgcgacccgagcacac

SEQ ID NO: 31498 - RNA, 53 nt, Homo sapiens
ggccagcgccccaggccaagagggacccacccggcgggagaccggcgacggcc

SEQ ID NO: 31499 - RNA, 71 nt, Homo sapiens
ggcgcggggccggggccgcgcgcccacccaacccgagacagggaacaagccgccaaaggaagagcaacaga

SEQ ID NO: 31500 - RNA, 111 nt, Homo sapiens
agaaaagggccgaaagcagaagaaaagggacgcaagaaacccaggacgagaacagcaacaggcaaacaggaagcacaccacaacgcgagccaccaagaacagggggagcgc

SEQ ID NO: 31501 - RNA, 78 nt, Homo sapiens
gcaggcaaaagaacccgcccacacggccaggaacggccaacggagcgcccacgaagggaggacagagggagggccgca

SEQ ID NO: 31502 - RNA, 87 nt, Homo sapiens
gcgcggcgcgagcccacgaagaggacgaccggagaacgcgaggcagagcgggagcgcgcagccaggccgcaccggccacagcgcgag

SEQ ID NO: 31503 - RNA, 62 nt, Homo sapiens
acgcgcaggcacaacacagcagagaccgagggaacccacccccacccaaacacgacccgggc

SEQ ID NO: 31504 - RNA, 72 nt, Homo sapiens
caagccccggggaccggggaggccacacaagcagagggcagagaagccggccagcccaccgccgccgacggc

SEQ ID NO: 31505 - RNA, 52 nt, Homo sapiens
gagaagggcgacaaaaggaccaaggcccaacaccaccaccgccaagaggaac

SEQ ID NO: 31506 - RNA, 90 nt, Homo sapiens
aaaaggagcagagaacagaggcccagccaagaacggcagccgacccccagggaagcagggcgagcccgaccaaggagacagaaggaccag

SEQ ID NO: 31507 - RNA, 77 nt, Homo sapiens
ggggaagggacccgcacgccgggcggggaaacccggaccgaccgccagagcggaacgaccccagagcgagcccgcag

SEQ ID NO: 31508 - RNA, 72 nt, Homo sapiens
gcaaaaggcagacaaaccccccagcgaggggccaggagagacccagagaacaaggacgcggcagagcgcaag

SEQ ID NO: 31509 - RNA, 65 nt, Homo sapiens
gaacccgaaaggagaggggcgaggaggcgggccaggaaaggagggaaaaccagccaaacaggcgg

SEQ ID NO: 31510 - RNA, 74 nt, Homo sapiens
ggagaggggcgagaacgcccagcagaaagcgccccagaggaaagggaagcgaaaacaaagcgaaaaccagggaa

SEQ ID NO: 31511 - RNA, 74 nt, Homo sapiens
cccaagagcgggacacaggccaaagaaaaagggggcggagcacccacccagcgagagagccaggggcaccccag

SEQ ID NO: 31512 - RNA, 39 nt, Homo sapiens
gagaagagaaggacggaacagagccacggcaggaagcac

SEQ ID NO: 31513 - RNA, 53 nt, Homo sapiens
accgagagcgcgaaacgcacgagaagaacccacggcaaccaacgccgaagccc

SEQ ID NO: 31514 - RNA, 89 nt, Homo sapiens
caggagccagggcggagagaaaacccgcgaggaaagggaaggagcaagccggaaaagcagcacgaagcaaaaacccacacaaaaaaaga

SEQ ID NO: 31515 - RNA, 42 nt, Homo sapiens
gcccgggagaccccgacaccggagaccaagaaaaagcaagca

SEQ ID NO: 31516 - RNA, 72 nt, Homo sapiens
accgagccagggaagggccccgaaaggaaggagcacaagccaaggacgcaagaaaaagggaacccggaacca

SEQ ID NO: 31517 - RNA, 72 nt, Homo sapiens
aaagaccaaggcgcacacaggagagcacggaagcgccgcaagagaggagggccaagcaaacgaagaacaaaa

SEQ ID NO: 31518 - RNA, 75 nt, Homo sapiens
cccccggacaagaggacgaagcagaggcaaccgacccaaccggcaaaccgacaccagcgacacaagcgcgaggga

SEQ ID NO: 31519 - RNA, 61 nt, Homo sapiens
ggcgacaacgagcacaaaaaggcgagggaccagcgagaaaggaaaaggcgcccggccgcac

SEQ ID NO: 31520 - RNA, 90 nt, Homo sapiens
ccgccggcaggccggcccgcgcccgacgagcaggaccaccaggccacgaggagggcgcgagaagacaaagacaagaggagaagggaggca

SEQ ID NO: 31521 - RNA, 80 nt, Homo sapiens
ggggcggccgggacggaggacgcgcagagaacacaaggaacgaaaggaagggaagaagcagaaccaagacaaaagaagac

SEQ ID NO: 31522 - RNA, 86 nt, Homo sapiens
ccagggcccaccccccggcgcggccagggccccccagcggcgagcgccaggggagccgagggaacaaaggagaagacagccagaaa

SEQ ID NO: 31523 - RNA, 81 nt, Homo sapiens
gggggccacaaagccccccggagacgcaaccaaggcgggaacaagcggagcaccacacccagcgaggaagccaagaacggg

SEQ ID NO: 31524 - RNA, 63 nt, Homo sapiens
ggcaacaacacaaccggacacaggaaacccaagccgaaacaggacgccgccacaaacaggaga

SEQ ID NO: 31525 - RNA, 125 nt, Homo sapiens
ccagcccaacaccggaaacccaaacaccagccacgcaccccaggagaaccaggggaagggagccaaccgacccgaggaggaccagaagaccccggcaagcccagaagcccggacgcccggcaccc

SEQ ID NO: 31526 - RNA, 79 nt, Homo sapiens
gaggccgcggacaccgaccggagcagaagaggcggccacccacgagccgacggcaaacgccagggagccaccaagggca

SEQ ID NO: 31527 - RNA, 54 nt, Homo sapiens
caagaaagcgaacagccagacggcggaagacacccaaggccagagccagcaaac

SEQ ID NO: 31528 - RNA, 79 nt, Homo sapiens
gaaaaagccacgagaagcggaggagagagcaaggcagccaggggaggaagacaaggccaaggagccagacccggaaccc

SEQ ID NO: 31529 - RNA, 76 nt, Homo sapiens
agaggagcccagaggccgagcaagaaccccaagggcggaaccagaccgcaggcacaggaggaggacccggcgacgc

SEQ ID NO: 31530 - RNA, 71 nt, Homo sapiens
acgccacagcaagaggaccccaccgacacccccgccaaccgcccccgagccaggcccaagcgggcccccaa

SEQ ID NO: 31531 - RNA, 60 nt, Homo sapiens
ggaggcgcgggcaggcagagcaccagaagggacaagcgaacaggagcgaggagaaaacaa

SEQ ID NO: 31532 - RNA, 86 nt, Homo sapiens
aaccaaaccgcgaagacgaacaaacccacagccagagccagagcaaaagacgagaggaccgacaccagagcagaaggcagagcgga

SEQ ID NO: 31533 - RNA, 82 nt, Homo sapiens
ggagagaccgggaaccgagaccccaagaacaaacgaggacaagcaaggaacaaaccaaggcaacaggaaccaaggaaaagga

SEQ ID NO: 31534 - RNA, 72 nt, Homo sapiens
cagcagaagacacaccaaggaaaaggaaaacacagcaaaggcagaaacaagagagacgagcacgaagcggaa

SEQ ID NO: 31535 - RNA, 83 nt, Homo sapiens
gcagcccggcgccgccgcgcccgccagacaagcagaccggaagaccgacggaagaccacaccccgagggagcccaggacacca

SEQ ID NO: 31536 - RNA, 77 nt, Homo sapiens
acacaccgcagcaacgggggcacagagagaaagccaggaaccaggagaacagcagacgagacagaggggcaggaaga

SEQ ID NO: 31537 - RNA, 67 nt, Homo sapiens
aaaaaagaccaaaccggccggcaagagccgcggaaaggcacccaccagcacagagagcccccggggc

SEQ ID NO: 31538 - RNA, 122 nt, Homo sapiens
gcaccacgcacccgccgggcaacgaagagaccccacccaaaaaaggcgcagaaacagaggacaagcaagacccccaccacgccaggaaaacgggcaaggcacaagccaggaggcggaagagc

SEQ ID NO: 31539 - RNA, 79 nt, Homo sapiens
ggccgagagagagagaaacaacgacggagggaaagaagaaccaggagcagcggccaaagggggcaaagaaaaaggagag

SEQ ID NO: 31540 - RNA, 85 nt, Homo sapiens
gccacgggcaaacaggacgcggaccccccaccgcgccagcgacagggagaggggagagcacccagggcgacagcggaacacacca

SEQ ID NO: 31541 - RNA, 82 nt, Homo sapiens
aggcaaagggacgcggccggggaaaccgcacgagcgggaagccacgccgccaccgaaggcaggggagcgcgcacgcacgcag

SEQ ID NO: 31542 - RNA, 80 nt, Homo sapiens
gcgagccaccaccagaacggaggcggcagcccaccccacaccgggccaaaaaaagggcgccccaaaaggaacaaaaggga

SEQ ID NO: 31543 - RNA, 94 nt, Homo sapiens
acaaaagacccaagcaggacacggccggaccaggaaaggccaaagaagagacgaagcaaaggcgcccggagccccagaaccgaagaagagccgc

SEQ ID NO: 31544 - RNA, 76 nt, Homo sapiens
cagaaccagcccgggaaagaaaacagacgacgaggagacccggggaacggggagaggcggcggcgccacagacgcg

SEQ ID NO: 31545 - RNA, 80 nt, Homo sapiens
cggcggccccaccagcagacgcagccgagacaccagcccgaaacaccaccaagcgagaaccagccaaaacacacgaacag

SEQ ID NO: 31546 - RNA, 79 nt, Homo sapiens
ggcgcccaagacagcaagggacagacgggaaaaaagagcaccaaagacgggagcccagaggccgagacaaccgaagacg

SEQ ID NO: 31547 - RNA, 58 nt, Homo sapiens
gaggggcccccgccagacgagaaggaagagacagcacccaagaaaacccaggccgcga

SEQ ID NO: 31548 - RNA, 75 nt, Homo sapiens
cacagcgcaggagaagggcccagagaccgccagagagaaccccacccaagagacaaagaccaacgagccaccaca

SEQ ID NO: 31549 - RNA, 83 nt, Homo sapiens
caacacaccagcccagacagcgcaagcaccaggacgcgaaggacccgggggccagcccacagaccagccaacagccccgagag

SEQ ID NO: 31550 - RNA, 72 nt, Homo sapiens
gagcggaccgagagcgcgaaacgcacgagaagccccaagaagaagaccacaaaggggcccgaagaagccgcc

SEQ ID NO: 31551 - RNA, 81 nt, Homo sapiens
cgaaacaaagaaaagagaaacaacaggcgcacagaaacaggcacgagaagagaagcccagagcaaaacaccccaaaccaga

SEQ ID NO: 31552 - RNA, 57 nt, Homo sapiens
cggcggcgccgggggaccccaaagccccaccccacaagaggaagacaaggggcaccc

SEQ ID NO: 31553 - RNA, 84 nt, Homo sapiens
caccaagcgaagagaaaaaagagaagaggagaaggaaaaacaagcgaagaaaggcacagccagaaccagagaacagcagaggcc

SEQ ID NO: 31554 - RNA, 81 nt, Homo sapiens
cccaaaagagcgcaccaacccccacgacaccaggggggaaaaaccacacaggcaaagaacgcgcaaaacaggacgaaaaca

SEQ ID NO: 31555 - RNA, 85 nt, Homo sapiens
gcgcagggccgggccgccgcgcaccgcagcgccggggcacgacacaaaaacagggccccagccccaccccagccccaaaggaggc

SEQ ID NO: 31556 - RNA, 82 nt, Homo sapiens
ggaggcccggagcgcccggagccggaggagagggcggggacacagcgggcaggaagaagacgccgaggcccccccacccaga

SEQ ID NO: 31557 - RNA, 78 nt, Homo sapiens
gacagggaaaaaggcgccaaagcacagagcaagcggacaaaagaagcccaagacacagccccagcagcccccagaccc

SEQ ID NO: 31558 - RNA, 86 nt, Homo sapiens
ggacgcggcagcccgggagcggcgagggaaaagcgaggcaaggcaggcggcgacaagcccagagaacaggaaagcaaaacccaacc

SEQ ID NO: 31559 - RNA, 69 nt, Homo sapiens
aagaagcagaaagaggagaaggagagcagacgcaaacaacgggaccagaggacgcaccagaagacaggg

SEQ ID NO: 31560 - RNA, 76 nt, Homo sapiens
agagagcagcacagaaccaggccccgaggaacagagaaaagaaaccagcagacagaagcagaagcggaagcaggag

SEQ ID NO: 31561 - RNA, 68 nt, Homo sapiens
ccggacagaaagccaaaaaggagaaagagccgcagaccgacagaagaacgagagacagagaaaggcca

SEQ ID NO: 31562 - RNA, 70 nt, Homo sapiens
gggaagcggccggggaggagaaaaggaagagagaacagaaagccaaagggaggacaccagagagaaacac

SEQ ID NO: 31563 - RNA, 76 nt, Homo sapiens
caggcaccacgggggaccgcacaggggcaggggccaaagcacggaggcaacgggggagacagagagaaagaaggcc

SEQ ID NO: 31564 - RNA, 83 nt, Homo sapiens
cgggggaccgaacaaggcaaaaggggccagaagcggacccagaagaggggagcagcaaggaggaagacagccggggccggagg

SEQ ID NO: 31565 - RNA, 89 nt, Homo sapiens
agacccgcccaacagaaaaagagaggagggagaacacagaaacccgccccggaaacaacgaacgagcaaggaagggccaaggcagaccc

SEQ ID NO: 31566 - RNA, 80 nt, Homo sapiens
ccggagcacagagaagccccagcgaaggcgcgggaacagcagagaacacaacacaggacaagcaagcccagagcgccgga

SEQ ID NO: 31567 - RNA, 59 nt, Homo sapiens
ggccggggggggcgcaaccgggagcccaggaagcgcagacacagaggaagacgcacgcc

SEQ ID NO: 31568 - RNA, 56 nt, Homo sapiens
gggaaagaggagaggcacccgaaagccaggccagaaaacagcacggcccaaagaag

SEQ ID NO: 31569 - RNA, 82 nt, Homo sapiens
cagcacaggcacagaaggccaaaaaggcaaccacagagagagagagggaggggagcaggaggagaagaaaccccaagaccag

SEQ ID NO: 31570 - RNA, 67 nt, Homo sapiens
caggcgggaaaccacaggcggaacgggcacaaagaaggcgcaggcaagacgcagagaggagaacagc

SEQ ID NO: 31571 - RNA, 67 nt, Homo sapiens
gaaggaggcggccacagggagaggagcgaaacggccaggacaggaagccaacccagaggaccgcaaa

SEQ ID NO: 31572 - RNA, 40 nt, Homo sapiens
caacaggaaaaggaccaggaaagcagagaccccggaaacc

SEQ ID NO: 31573 - RNA, 80 nt, Homo sapiens
ccaaagccggaacagaggggccaacacggacaaagagacccccaggagcagcacagagcacagcagcaaccggccccacc

SEQ ID NO: 31574 - RNA, 77 nt, Homo sapiens
gagacggccgacccgccagaggaggccccccagccacggaaacgcagcgccaacggcaagccgcgcagcgagacggg

SEQ ID NO: 31575 - RNA, 79 nt, Homo sapiens
ggagcaagcgcacacgaagagaagcaaggcccaagacccaggcggaccagcaacaaggcagagcgaacccaagcagaag

SEQ ID NO: 31576 - RNA, 77 nt, Homo sapiens
cgcgggagccggggcaccacagagagcggaccagacaaagggagcaccagccagaccgggaagaaacgaagggggga

SEQ ID NO: 31577 - RNA, 83 nt, Homo sapiens
ggacgccaaccagcccgcgagcgcccgaggaaaaccagagacccagacacgcgaaggaacgaaaggccaaaaggcaaaagacg

SEQ ID NO: 31578 - RNA, 70 nt, Homo sapiens
gacgagcggagcaaaaggagccagcagaaaacaacaagaagaggaacgacaaccggagagagcccaaaag

SEQ ID NO: 31579 - RNA, 71 nt, Homo sapiens
cgcagagggaaccagcggacgcggaggcccaaccgaagaaaacaaggccaggaaaggcgaacaccccaggc

SEQ ID NO: 31580 - RNA, 90 nt, Homo sapiens
aaaggggagcaaagccgggccggcccgaggcccccaggaccccaccccaagggaggaggaggagggggccaggggggagcagccacagac

SEQ ID NO: 31581 - RNA, 58 nt, Homo sapiens
cacacccgcagagcgaggaccggaagccacccgacgacgccacccacaaagaagcaag

SEQ ID NO: 31582 - RNA, 70 nt, Homo sapiens
ggaccccggagcccagaagacagagggcgaggacaggaagggaaacgaaaaaggccaggcgacagaaaaa

SEQ ID NO: 31583 - RNA, 101 nt, Homo sapiens
caaagaagaacgaaggaaagacacaagagaccacaagaccgaccaggaaaaggcaccagacccggaggagcagcaccccggcaggcagaccagccggcccc

SEQ ID NO: 31584 - RNA, 79 nt, Homo sapiens
gaggcccggcaagcccgccgcacagcacacggagcgcgccggccccacgggaaacaaaaaagccgaaggacggagaaca

SEQ ID NO: 31585 - RNA, 70 nt, Homo sapiens
aaccgccaacggaccccgaggacaggaaaaacagggaaaaaccacgcggagaagggagagacaacaaaaa

SEQ ID NO: 31586 - RNA, 102 nt, Homo sapiens
cagcaacggcccgcaaagccgcgcaggagagcgcaaagcacggaggcagcacacaggacaggccccccagccaccagcggggcccacaggagggcacgggcc

SEQ ID NO: 31587 - RNA, 78 nt, Homo sapiens
gcccccagacaaaccgaaggcgacagagacaggcggacgaaagaaagaaggagcaccaacgcaaagaaaaagaccaag

SEQ ID NO: 31588 - RNA, 56 nt, Homo sapiens
cgggaccgacagccgggcagagaacaaaccaggggagggaaacgagaaaaacgacg

SEQ ID NO: 31589 - RNA, 75 nt, Homo sapiens
gcggcccggcgagaaagaagcgaaaccagcaccaccacggcagcggcaggaagaggagcaggacggagggagaag

SEQ ID NO: 31590 - RNA, 79 nt, Homo sapiens
cacggccaggcaaaccggacagggagacggcccggcggcccggagacgacgcaagaacagccaacacagaagacaccgc

SEQ ID NO: 31591 - RNA, 69 nt, Homo sapiens
acagacagcgagcgcacacagagaaccaggggagcaaaagcagaaacgaaaacggcgaagagaagaaca

SEQ ID NO: 31592 - RNA, 51 nt, Homo sapiens
aaggaccagaggaacacgacgacagggccaagaacggaagcacgcaacaga

SEQ ID NO: 31593 - RNA, 56 nt, Homo sapiens
ggaaagagggggcagacccggaagccgaaccaacggagggcaccgcacccaggcgg

SEQ ID NO: 31594 - RNA, 62 nt, Homo sapiens
ggagaaggagccaagaaagagaagaccggagcgaaaaaaacgagcaaacagggcagaaaccc

SEQ ID NO: 31595 - RNA, 75 nt, Homo sapiens
aagaccaggaaacccgaacccggaagcgacaaaaccagcagcccagcggcccccaaagaaaccgacacggcggga

SEQ ID NO: 31596 - RNA, 80 nt, Homo sapiens
aaaccagccccggacgagaagcgcagcaacggcgggggaccacgagagcaagcgacccaggaggcccaccagcagggacg

SEQ ID NO: 31597 - RNA, 83 nt, Homo sapiens
gcggaagcacgacccggcagcggccgggaaccagcgagcaggcgagagggcggagaacggaaaagcaccaggaagcagagagg

SEQ ID NO: 31598 - RNA, 41 nt, Homo sapiens
acaggaaggcgaagaaaggacaaaaacgaacagaagaggac

SEQ ID NO: 31599 - RNA, 79 nt, Homo sapiens
gaaacaccacgcaccaccacgccaccccacgagaccaccgcacaccacaggccccaccgaggcaccaccaaccaaagcg

SEQ ID NO: 31600 - RNA, 64 nt, Homo sapiens
agcaccgagccagcccaggaaaaggagagacgaaccccagaaacccagaaaacagggaaaacgc

SEQ ID NO: 31601 - RNA, 86 nt, Homo sapiens
caagcaagccaccacgcggcgcggaggccaagagcacagcggaggagcaggcgagcaggaggccagagacagggccacgcagccag

SEQ ID NO: 31602 - RNA, 75 nt, Homo sapiens
ccaaaaacacaccaggaggggcaacaaaccaccccaacacccaggccaaaaccaaccaacaacaacgaccggccc

SEQ ID NO: 31603 - RNA, 62 nt, Homo sapiens
agcaggggcagaggcaagggagacagcaaccaaccagggcggagaacggaaaagcaccagga

SEQ ID NO: 31604 - RNA, 62 nt, Homo sapiens
aaagaccaacagcacgccacaaggagccgaggccagagcagaaaccagcccaggaacccagc

SEQ ID NO: 31605 - RNA, 69 nt, Homo sapiens
ggcgagcagacgcggggggcagcagcccgcagagcagacaccgaaaacgagaaacgaaagagacacggg

SEQ ID NO: 31606 - RNA, 73 nt, Homo sapiens
gaaaggaccgaagaacagcacgaagacacagccccgaagcgaaagagagccaaccgagcgcacacggacaagg

SEQ ID NO: 31607 - RNA, 49 nt, Homo sapiens
gccggccggcagccagggcagcaggcgggcagaaaggagcagcgagaag

SEQ ID NO: 31608 - RNA, 79 nt, Homo sapiens
gcgccgcacggaggcgcccggggacggggccgcagggagccaccccggccagaccggcaaaaagaagaaacacagacaa

SEQ ID NO: 31609 - RNA, 84 nt, Homo sapiens
ccgaaagcggagagagcgggcgggcggccgggagacccacaggaggagaaccaggaccaaagcaccagcacagaagggaagaac

SEQ ID NO: 31610 - RNA, 38 nt, Homo sapiens
cagagagaggagagagaccagaggacaggagagacaac

SEQ ID NO: 31611 - RNA, 74 nt, Homo sapiens
aagagaagcagaaaaccagaagcacaaggacagagcacccaccacaggaggaaagcccaggaaagagacacgca

SEQ ID NO: 31612 - RNA, 40 nt, Homo sapiens
gcaggccaaggagaaagcaggaccagaggaaggcggggag

SEQ ID NO: 31613 - RNA, 38 nt, Homo sapiens
acccacagcgaaagcaacagagacaagggcagagccaa

SEQ ID NO: 31614 - RNA, 73 nt, Homo sapiens
agaacgaacgaagaagaagacaggcacacaaggcgaaaaaacggaagcacaaaacaagagaagcacgaagaag

SEQ ID NO: 31615 - RNA, 66 nt, Homo sapiens
cgcggaggcagagaagggaacgcccggcccagccccgggggaaaggaaaccccagagacgggcacc

SEQ ID NO: 31616 - RNA, 53 nt, Homo sapiens
cacaagggagcccccccaccacccccgagaaagacaaggccccagcagcaggc

SEQ ID NO: 31617 - RNA, 59 nt, Homo sapiens
cacccgcgagcgcaacccaagcccagaaccgggacaacccagcaaacaggccagacccg

SEQ ID NO: 31618 - RNA, 69 nt, Homo sapiens
aggggcaagagcccgcagaaaaacccaaacacagaacaggaaggaggcgcagccaaaagaaacacccaa

SEQ ID NO: 31619 - RNA, 78 nt, Homo sapiens
aaaccaaaagacaaccgagagcagaggccccacacccccagaaggacccccagggccacgggaaacaggcacagaggc

SEQ ID NO: 31620 - RNA, 73 nt, Homo sapiens
gagagagcgcagaaacaaggcgaaagccacaccaaaccagaaaagaacaaaacgacccggaagccgcggaaag

SEQ ID NO: 31621 - RNA, 74 nt, Homo sapiens
aggagagcgcaacgcagaagcccacccccgaagggaagaaccccgccagcgccagaccaggcaccgcgaggccc

SEQ ID NO: 31622 - RNA, 39 nt, Homo sapiens
gccaagacccaccccaacagagggaagggaacccgagcg

SEQ ID NO: 31623 - RNA, 75 nt, Homo sapiens
agcggaccgagagcgcgaaacgcacgagaaggcgcggccgaacccagcgagaaaccaggaaccaccccgggagcc

SEQ ID NO: 31624 - RNA, 75 nt, Homo sapiens
caaagcagcggcgcagcccgggacaacaggcacaaagagagaaggaacacccacagggcagacagagaaagaaca

SEQ ID NO: 31625 - RNA, 73 nt, Homo sapiens
cgaggacgcggagcccagcaagggaccccgacggagagacaaagaagacggagggggggccagccaccgcgcc

SEQ ID NO: 31626 - RNA, 84 nt, Homo sapiens
gcggcggccgcccggggccgcgggaaggccgaccgacgccgcggggaaaggaaaccaaaccaggaaagaaggacaaggagcgag

SEQ ID NO: 31627 - RNA, 71 nt, Homo sapiens
gcggggaaggggagagcgcgaagaggagaaaaggcgaaagagagaacccaccgcaagagaccaaaggccaa

SEQ ID NO: 31628 - RNA, 107 nt, Homo sapiens
cacagaggaacagaagaaaaccagaaagaaagggacaggacaggaccagggccaccgccccaccaacggggccaaccaaaaggagcaggccagcaagacgaaagaac

SEQ ID NO: 31629 - RNA, 73 nt, Homo sapiens
gcggcccccaagcaagcaaccgaagccaagcagaaggagaaaacaagggaacagggaaaagacgcgaagaaga

SEQ ID NO: 31630 - RNA, 71 nt, Homo sapiens
caagcgaaaacagcaagcgagcgaaaggaagcagacaagcgacaagaggaggagagaaagaaagccagcgc

SEQ ID NO: 31631 - RNA, 59 nt, Homo sapiens
ggagaggcaccgcgggcaacaggcccacagggcagggagagagcgaagaaagggggcag

SEQ ID NO: 31632 - RNA, 87 nt, Homo sapiens
gagccccgacgccacagaacgaaggaaggcccgaagccacagagcggaaggagaaggggagcgcgccacaagaagccccgggagcgg

SEQ ID NO: 31633 - RNA, 38 nt, Homo sapiens
gcggcgcccacgagagaaacgccagaggcagcagcagg

SEQ ID NO: 31634 - RNA, 90 nt, Homo sapiens
aaagcagaaagcagcacagcaggcagcccccaggggcagggcagcaggcccaaacccccacagaaccgcgacaggccaagcaggagccga

SEQ ID NO: 31635 - RNA, 74 nt, Homo sapiens
cgcaagaccggagccagcgaggccacacccgaaagcaagcccagaagggggcagcgccccccgaaacaagacgc

SEQ ID NO: 31636 - RNA, 76 nt, Homo sapiens
cggggcgggggcaagggcgcccgcggggagaagccaaaggccagggagggaggagggcggcacgaagcgagagcca

SEQ ID NO: 31637 - RNA, 77 nt, Homo sapiens
ggaggcagaacgccagccaagaccgggagggggcgagggcagaaagggcccagccggcagagggaccggagaacgcc

SEQ ID NO: 31638 - RNA, 57 nt, Homo sapiens
caccaaccaccacgccaggagggaagcaggcagagacagaggaagaggcagagccgg

SEQ ID NO: 31639 - RNA, 74 nt, Homo sapiens
gggaaggggccggagggcagggggcagggcggcagaggcaaaagggaaagcaaggggaagggcccaagaagaca

SEQ ID NO: 31640 - RNA, 73 nt, Homo sapiens
ccagcccggcgcacggcccaggacccaaagacaggaccacgcaccagcagagaaggaaagcaaaccgaagcag

SEQ ID NO: 31641 - RNA, 78 nt, Homo sapiens
ccggcaaccgcgacccaaacacccaacgagacgggcaagcgccggcagggaacgcgaggacagagcaaggcgggccac

SEQ ID NO: 31642 - RNA, 40 nt, Homo sapiens
agcaagacccccagcgccaggccgagggagccaaccggag

SEQ ID NO: 31643 - RNA, 72 nt, Homo sapiens
ccaagaggagacccacaacaacccaagaagcgcgaccacaggaaaaacgaaaaaaggacgacaaggaggccc

SEQ ID NO: 31644 - RNA, 36 nt, Homo sapiens
caagcaccagcacgccggcaagagccccggccccac

SEQ ID NO: 31645 - RNA, 80 nt, Homo sapiens
gaaacacgcgaaaaaccgcccccagagcgaccagagggggagcaggggaaagcagaaagggcggaaggagccagaagacc

SEQ ID NO: 31646 - RNA, 97 nt, Homo sapiens
gcaggcgggcgcaggcccggcgcagcgcgggcccacgccagggagcgggaggacgaggaggaggccgccacgagcaagccagcagagagagacaggc

SEQ ID NO: 31647 - RNA, 87 nt, Homo sapiens
cgcgccgccccgggcggccgcgggcggcccgggcgcgccaggcacagccaagagcggaccggcagcggccagcgcagcggccggagc

SEQ ID NO: 31648 - RNA, 72 nt, Homo sapiens
accccccgaaggacaaccccgcaacggcaggggcaggccaggaccgacagcccccacaagagcgccggccca

SEQ ID NO: 31649 - RNA, 75 nt, Homo sapiens
cccgcagccggggaccgccccagggcacaggagaggggaccgccgggcggccggaccagggcgccgggagccgca

SEQ ID NO: 31650 - RNA, 82 nt, Homo sapiens
cacgaaaggagcaagagcaagacaccggacaccgagggcccccaaaaggccgagccaagaacagaggcgccggacccccgcc

SEQ ID NO: 31651 - RNA, 92 nt, Homo sapiens
gcccgggaccacaggccccggcccagacccgggcgcgccaggcacagccaagagcggaccggcagcggccagcgcagcggccggagcagaca

SEQ ID NO: 31652 - RNA, 67 nt, Homo sapiens
cgccacgacacagccggcgcaccgaaagagggcaggacacacagaaggccggaagagggaaacgagg

SEQ ID NO: 31653 - RNA, 73 nt, Homo sapiens
gacggggaccagcagcgcgccgccgcccagccaagaaaaccaggcccgacagcaagaaaaaaggagacggcgg

SEQ ID NO: 31654 - RNA, 68 nt, Homo sapiens
ccccggagagagagccgcgcacgcacagacaagaaagaccgaccaaggcggaccgccaagcccccacc

SEQ ID NO: 31655 - RNA, 78 nt, Homo sapiens
cgccacacggacccgacgcgacgagggagcgaaccggagaaaggaggccggcgaggaaaggcccagaccaggaccaac

SEQ ID NO: 31656 - RNA, 60 nt, Homo sapiens
aagaacccaaacaagacgcaagaccaaggagaccgggagagagacgaaggacgcgcaggg

SEQ ID NO: 31657 - RNA, 38 nt, Homo sapiens
ccccagagggcgggaacaggggaaaaagcccagaggga

SEQ ID NO: 31658 - RNA, 86 nt, Homo sapiens
cgacgacccgcgcagacacggaccgcgggccagccgccaaagaccccgccggagaccaggggcgcaagggacccacgaaggagaag

SEQ ID NO: 31659 - RNA, 70 nt, Homo sapiens
ccgaaaaaaaaccgcaaaaccagcaagagaggacaacacgcagcgaaggaggaggcggaggagaggaaaa

SEQ ID NO: 31660 - RNA, 81 nt, Homo sapiens
acggacaaggccccacaacggagcaaggagcgcacggaacccaggagaaacgagagggacagcaaggaagacgccagagag

SEQ ID NO: 31661 - RNA, 79 nt, Homo sapiens
caggggccaccggaggaaggagcagcccggcccgacggcccacacaggaccgagacgcaaccccccggaaggccaaccg

SEQ ID NO: 31662 - RNA, 82 nt, Homo sapiens
gcaggccaagcggggccaggacgcgggaggaccgacaagcagaccggaagaccgacggaagaccacaccccgagggagccca

SEQ ID NO: 31663 - RNA, 59 nt, Homo sapiens
gaacgaccgccgcggcggggcccaaacagcagaggggcaggacccagcagccagcgaag

SEQ ID NO: 31664 - RNA, 68 nt, Homo sapiens
cccggagcccggagcaagaggcagaaccccacccgggcagcgcgaagaccgggggcagccccccagcg

SEQ ID NO: 31665 - RNA, 75 nt, Homo sapiens
acccagacccggagcccagggaagcagccgaccagccgcggagccgggggcagacaacggcaagcggagaagagc

SEQ ID NO: 31666 - RNA, 55 nt, Homo sapiens
ccgccgcagagcgcagccggggccgaggacagacccggcgcccgacaacacacgc

SEQ ID NO: 31667 - RNA, 56 nt, Homo sapiens
caagccaccgagacccggaggaggcgaagcgagaggacaggcaccggcacggacca

SEQ ID NO: 31668 - RNA, 83 nt, Homo sapiens
gcggcggcggggcggaggcggcgggcaaaacgccgagcccgagaacgaccccagaaggaaggagcgaggcacgggacgcaagc

SEQ ID NO: 31669 - RNA, 78 nt, Homo sapiens
acgagcccccccccgaaagaaggagcaccccgaaacaaagaggagaggagaaaaccaggggcggaaggaccgagccag

SEQ ID NO: 31670 - RNA, 75 nt, Homo sapiens
ggaggcgccgggccccgcccaggacccgacggggaagccaggagcagaacgccgggggacccacccgccacaacc

SEQ ID NO: 31671 - RNA, 83 nt, Homo sapiens
aagcgcgagcaaggccgccagaggcagggccgccgcaccgacgccggggccgaggggggccaaccgccccccagcagcaggca

SEQ ID NO: 31672 - RNA, 80 nt, Homo sapiens
ggccagcccccgggccgccccgccgacgcggggggccgcagcagccgagaccaacaaacgcacaggagcaaaaggacaga

SEQ ID NO: 31673 - RNA, 83 nt, Homo sapiens
gcgagaccagaagcggaaacaccgcgacggcggccggagcgggacggaaggggacacaggcaagaccacacggacgcacaaca

SEQ ID NO: 31674 - RNA, 81 nt, Homo sapiens
ggagccgggcccgggcacggccagcaccccgaggagaaccagggcacagcgcagcggagcgaggaaagcaggcgggcccag

SEQ ID NO: 31675 - RNA, 53 nt, Homo sapiens
gaagacgggcgcaaacagagcaggaccgcagggagaaaggcagcgacggccac

SEQ ID NO: 31676 - RNA, 71 nt, Homo sapiens
cggagcagggaagccgggcccagcggacaggccacacaaagaaggggcggaggacaagaacggcgggcgag

SEQ ID NO: 31677 - RNA, 58 nt, Homo sapiens
gcgccacggaccgcgggacaagaaaacagcggacccaaagacaggaccacgcaccagc

SEQ ID NO: 31678 - RNA, 37 nt, Homo sapiens
aagcaaaggagaaggggaggaagcaaggaggggggaa

SEQ ID NO: 31679 - RNA, 60 nt, Homo sapiens
ccgaaacgccgaaaacgagccggccaaggaggagcagagcaaaccgggacgggagaccga

SEQ ID NO: 31680 - RNA, 58 nt, Homo sapiens
gcggcggagggcggggacagcgcagagcgcgccgaccggggccaaggggcagagcaca

SEQ ID NO: 31681 - RNA, 75 nt, Homo sapiens
aagagggcagagcaacaggcggaggcaaggacccaggggacaccaagccagaagccggacggaaaaggcgcacac

SEQ ID NO: 31682 - RNA, 115 nt, Homo sapiens
gcagaagagaccagcgccccaggcgcagacccagcggacacgaaacggccccccgcggagcaacacggggggcaaaggacaaaccgagaagaggccaagacaacacccaaacccc

SEQ ID NO: 31683 - RNA, 69 nt, Homo sapiens
gagagaaacagaaaaggaacaaccaaacgacacggccggcgcacaagagagagaggccaccgcacacaa

SEQ ID NO: 31684 - RNA, 75 nt, Homo sapiens
aaaagccgacaaccccagaaacagccagagacgcgcacgaaacgacgaagaggcccgaggacagaggagcaaagg

SEQ ID NO: 31685 - RNA, 59 nt, Homo sapiens
caacaagaggccggcggggcgacaggacgcacgggccagacacacagagcaccggcgac

SEQ ID NO: 31686 - RNA, 75 nt, Homo sapiens
gaacgcccacggggacaacccccgacggcccacgccagggagggggagacacacagggaacccagaaagaagaag

SEQ ID NO: 31687 - RNA, 73 nt, Homo sapiens
gagcacagagacgaagaggaccaggagcaaacagaaacagaggcacaaaaggagaaagcagaagaaacaggag

SEQ ID NO: 31688 - RNA, 74 nt, Homo sapiens
gaggccacacagcccccaggagcccaccagaccgcaaggcacggagggcggggggccaccgggcgcccgaccgg

SEQ ID NO: 31689 - RNA, 67 nt, Homo sapiens
aagaaggccgaaggacccccacaacgagcgcccggaggacggcaccaggacaagcgagggagacacg

SEQ ID NO: 31690 - RNA, 77 nt, Homo sapiens
cccggcgccgcgccggcggcgggcgacaggagccaagggaaaacacaccaaacggaacccggggaccaccagacagg

SEQ ID NO: 31691 - RNA, 87 nt, Homo sapiens
acgcccgcgccacccagggccggcgccgggcagggaggcgccgagacgcgcggacaagcagccccgggcaaggggagcagacaacaa

SEQ ID NO: 31692 - RNA, 69 nt, Homo sapiens
aggcgaggaggccaagaaagaacacaggaaaaccagcggggcaggaaagccccgggcaaggggagcaga

SEQ ID NO: 31693 - RNA, 79 nt, Homo sapiens
aaggacgagaccaaccccaaggacaaagcaggacccaaaggaaacaccccagcaccaggaacagaccaacaaagaacgg

SEQ ID NO: 31694 - RNA, 70 nt, Homo sapiens
ccgcgcccgccccaacccagccacagggcggagaacggaaaagcaccaggaagcagagaggaccgcagaa

SEQ ID NO: 31695 - RNA, 72 nt, Homo sapiens
gaaaagaagagagagagaagcaacggaccccaagcagagagcgggaagcggagaaaaccaggacccaagaca

SEQ ID NO: 31696 - RNA, 66 nt, Homo sapiens
cacaaccaccagaagaacgacagagaggagggagaacaagcaacggcggagccgaaaggcagagcc

SEQ ID NO: 31697 - RNA, 80 nt, Homo sapiens
accagagacacgccaagcagccagcccaggagaggaaacaggacccaaaaaacagagcacgcgaccagcgaggagcaaca

SEQ ID NO: 31698 - RNA, 98 nt, Homo sapiens
aagaaagagccaaaagaaagcaaagcgcagaaagggagaagcagggaacggggacaggagaaaggagaagagcacccggagcagaacacaaaggggag

SEQ ID NO: 31699 - RNA, 73 nt, Homo sapiens
cggccggcagcgggcaagaaaacaggagaccggaaaccgagagaaacgaagacgaagaaacagccgcacacag

SEQ ID NO: 31700 - RNA, 69 nt, Homo sapiens
agaccacaggagccgggaaagaaccggaacagaagacagggaaggacccaagagcggagaacccggacc

SEQ ID NO: 31701 - RNA, 80 nt, Homo sapiens
ggaggacgggaccgggaaccacgggggccgcggccggaccgagcgcccgacccggcgagagaggaaccagcaggcaaaga

SEQ ID NO: 31702 - RNA, 82 nt, Homo sapiens
cgaggaagcggagggccagagcgagagggaggcgccccaaagaggaagcgccaccagcaaaaccagagaaacaggcagagaa

SEQ ID NO: 31703 - RNA, 86 nt, Homo sapiens
caggaaaaagaggaaagggacgccggggccgggccaggagcagagggaaagaacgccggacaacagcggcgaagaaggcaaaccga

SEQ ID NO: 31704 - RNA, 75 nt, Homo sapiens
ggggaccaggagcagacgggacaaggcgagcggccggaagaagaagaacacaggccaccggagcagcaacaagaa

SEQ ID NO: 31705 - RNA, 55 nt, Homo sapiens
gacggaggaggagccggacgggccaggcagacggcagaaaacagacgaagcaaca

SEQ ID NO: 31706 - RNA, 80 nt, Homo sapiens
aagaacgcaaggaggcaaaacggggaaaacagagcgaaacaagggacccaggggggggaaaagccagccagaacacagaa

SEQ ID NO: 31707 - RNA, 46 nt, Homo sapiens
gccccgagcaaaccaggggggagagagacgcgggaaccgccagcaa

SEQ ID NO: 31708 - RNA, 71 nt, Homo sapiens
cgccaagggcacagagggagaggcccacccgggcaggagaggccgaccacccggggggcccgcgcgaacac

SEQ ID NO: 31709 - RNA, 78 nt, Homo sapiens
gagagccccgcagaagacgccgacgaggacaagccacacaagaaggagaaaaaaaagagaaggcaccccacacccgag

SEQ ID NO: 31710 - RNA, 85 nt, Homo sapiens
cgaacagaaaagagaaaaagagcgaaaaagaccagcgcgagacagagagacacggaaaagacagaccccaacaccaacaagacga

SEQ ID NO: 31711 - RNA, 39 nt, Homo sapiens
gggcacccgccacggacagggccaaggacacaacgggac

SEQ ID NO: 31712 - RNA, 56 nt, Homo sapiens
cacgcagaacagccaccaagcgaacgcccaagcaaaaacagggacagacaaaaccg

SEQ ID NO: 31713 - RNA, 90 nt, Homo sapiens
ggcagagagagaaacaggggagcaagggcaagagccacaaagggaccgagaagcgaagacaagcagagcaccaaacaggggggaaggaag

SEQ ID NO: 31714 - RNA, 70 nt, Homo sapiens
cgcaccacaacccccacggagagccccggggaaagacaccggacagaggaagcagagagacggggaccag

SEQ ID NO: 31715 - RNA, 81 nt, Homo sapiens
cgaacagcaccaaacaggaggcggccaaggcccaaacgcacgcacaagccacacacagggcagacaaacacgaaaagggaa

SEQ ID NO: 31716 - RNA, 64 nt, Homo sapiens
aagaggaggaaaaaaagaagaacggccacagggacaacagcagcacagagaggggagaaccaaa

SEQ ID NO: 31717 - RNA, 55 nt, Homo sapiens
ggaacaaaagggaccagaggggacagcaaaacccgagcgaaaagccaaaggccgg

SEQ ID NO: 31718 - RNA, 67 nt, Homo sapiens
acgcagggccggccaacagcgagcccgggaacggcgggggcacggggaagggacacaggagacaggc

SEQ ID NO: 31719 - RNA, 66 nt, Homo sapiens
cggaaagaaagcacaccaaaagaaacaacccaagagaccagcaagcaggcagacggcaacagaaaa

SEQ ID NO: 31720 - RNA, 90 nt, Homo sapiens
ccggggaagacgggccgaggcaggaggcaaccaggcccccggcggcggggccccggcccccggaccccgcggaccggcccggggcgccgg

SEQ ID NO: 31721 - RNA, 37 nt, Homo sapiens
ggacagcgaggccagacaggcaacgaaagaaacggac

SEQ ID NO: 31722 - RNA, 86 nt, Homo sapiens
caacgggcccgccagccccagcggcgccgagaaaggccaagacggcaaacgggaacagggaagcaggcgccccagaccagaagacc

SEQ ID NO: 31723 - RNA, 73 nt, Homo sapiens
caccaaacacccagaacaacaaagaggccgccagcaggaagcccagcaagcgcccagcagcacgccccagaga

SEQ ID NO: 31724 - RNA, 75 nt, Homo sapiens
gcaaccgcagcacacagcgaccgggagaacaagacgaaccaagaccggcagcgggggagaggggcggggccaacg

SEQ ID NO: 31725 - RNA, 66 nt, Homo sapiens
gagggggaaagccaaggaaaaacggagagccacaaaaaaggaagcgaaaccgccacagcgcccgga

SEQ ID NO: 31726 - RNA, 80 nt, Homo sapiens
aacaggccaaaaggggaccggcggagcgaggaggggcggacaaccaggagggaaacaggacgccgccaggaacccgccgg

SEQ ID NO: 31727 - RNA, 62 nt, Homo sapiens
cggagcagggagcccaaagaccccggagacagagccaaggagcaccaggaagaggcaacgag

SEQ ID NO: 31728 - RNA, 77 nt, Homo sapiens
cggggccccacacccccccggggggggaccaagaacgcccagcccgcgggcaccggcagaaaggaggaggaaaacac

SEQ ID NO: 31729 - RNA, 80 nt, Homo sapiens
cacgagcaggggcccaaaagacgggagcagaggaagcgcggaaaagggccagaccgccgagcccaagcgaccccagcaga

SEQ ID NO: 31730 - RNA, 76 nt, Homo sapiens
aaaagcaagaggaaagcaaggcccaccggagagagagacccccggacccccgagcccaggacggaggcggagacca

SEQ ID NO: 31731 - RNA, 75 nt, Homo sapiens
ggggacacgcgggggcggcacccggcaaaggaaggacagcagaaggagcaaagcccaagaaaccacagaaaccag

SEQ ID NO: 31732 - RNA, 79 nt, Homo sapiens
cccaaagggggaggagaggccaagcgcggcagggcccccaccggccgaccgcgcgccacgagggcaccagaagcaaccc

SEQ ID NO: 31733 - RNA, 75 nt, Homo sapiens
caggagccaacggcgccaagaacaaggacgaacgacaccgggccccccccggcgaggacccacgcgcagcccaag

SEQ ID NO: 31734 - RNA, 57 nt, Homo sapiens
gaggccccggacggagaaaaagagggaagagaaaaggccccaaagccggaaggagac

SEQ ID NO: 31735 - RNA, 80 nt, Homo sapiens
gggaaggcgcgaggaggaaaggaggacgagaaccccccacggaaaggacgaaagaaagaagcagccccagaaagaaggac

SEQ ID NO: 31736 - RNA, 85 nt, Homo sapiens
caagcagacacgcccacgccgcccagccaagggaaggagcggcggagcccagaggagaaggagaaacggaggacgcccccacaca

SEQ ID NO: 31737 - RNA, 53 nt, Homo sapiens
ggaaaccaagaacgaaaagccaagaacaagcacaagagcccaaaagcaaagca

SEQ ID NO: 31738 - RNA, 86 nt, Homo sapiens
agcccgggagcggcgagggaaaagcgaggcaaggcaggcggcaacccagacacacggaccacaacaaaacagcaccgacccagcac

SEQ ID NO: 31739 - RNA, 85 nt, Homo sapiens
gccggaagcacgcgcccgcacccgggaccagcacaaggggcacaggggcaaaaggaaccgaccaaggacggacggagagcggaag

SEQ ID NO: 31740 - RNA, 58 nt, Homo sapiens
ggcggagaagaggagcacgcccaggaaacccaaagcacccagcagccaaggacaagga

SEQ ID NO: 31741 - RNA, 80 nt, Homo sapiens
gcgaggcacaccccggagccaggaggccagccggcccggccggacgaaagaagcaccaggggccggcagggggccagaag

SEQ ID NO: 31742 - RNA, 78 nt, Homo sapiens
ccagcgccgaggcgcggccgcggcggccgcgccccagggcgcggggacgcccccagaaacccacaaagccccgagggg

SEQ ID NO: 31743 - RNA, 81 nt, Homo sapiens
gcgcggccaacgacccacccagcaggagaacggacccggagaaaaaaccagaggaggagaagagccgcagggcccagcggg

SEQ ID NO: 31744 - RNA, 73 nt, Homo sapiens
gaaggcacagcagagcgccacgcaacacaggacggccgacagccaggagccacccgaagccagcgagaccacg

SEQ ID NO: 31745 - RNA, 53 nt, Homo sapiens
gcccagcaacggacccaacagagcacgcaaaggaggggaagagaggaagagcg

SEQ ID NO: 31746 - RNA, 85 nt, Homo sapiens
acaagcacccgccgggccgaaccggaagggcaagggaaagggagcagcaccggccacacccacagcacgaccggaacccagcgac

SEQ ID NO: 31747 - RNA, 71 nt, Homo sapiens
cgggaccaaagggcaaccaaaaaccccccccaaaaaggacaagagaaaaaaagggcgggcgaacaaaaaga

SEQ ID NO: 31748 - RNA, 77 nt, Homo sapiens
gaggagagacacggaccaccacgcccggaagggaaaggcccgaacaggggccgagaaacagggacccggacccaaga

SEQ ID NO: 31749 - RNA, 78 nt, Homo sapiens
gaaggacaagcgcccgggcaccgcagcgccccaggaccgcgacgccacggccccagcccgccccgaccacagaccccg

SEQ ID NO: 31750 - RNA, 71 nt, Homo sapiens
agggccaccggggagcgaaggccaagagggcaaggaaggagggaaaacagcccccggccgggaccaggagg

SEQ ID NO: 31751 - RNA, 41 nt, Homo sapiens
ggccacgggcgggcaggcaaggcacaagcagcaccaagaaa

SEQ ID NO: 31752 - RNA, 80 nt, Homo sapiens
cgcacgcagagcggcaccacagaagcccaccagaggcgaggggaggaggaagcgagcgaaaagaggcgggaaacaggggg

SEQ ID NO: 31753 - RNA, 81 nt, Homo sapiens
ggggcaaaccagggcaaacagcaaccagaccaaggacagcagaacagaacaggaaaagcagcaaccgaccaggcacggggc

SEQ ID NO: 31754 - RNA, 73 nt, Homo sapiens
ggccagagagaacagcgcagggcacggaaggggcccagcacaggaagacggaggagagaaaacacaaaaggca

SEQ ID NO: 31755 - RNA, 59 nt, Homo sapiens
gcgaagcgacgagccgcgaggaggaagaacgaagcgcgcagaaaacacagaaggcaaaa

SEQ ID NO: 31756 - RNA, 68 nt, Homo sapiens
aaggcgcgaggcgggaacacgaagacagcaacggcaggaagagaagcccagacacgaagaagagagcc

SEQ ID NO: 31757 - RNA, 57 nt, Homo sapiens
cgggcggagcgcccagacgcggggagccgccggagcgagaaggaaaaagaagagcac

SEQ ID NO: 31758 - RNA, 81 nt, Homo sapiens
gaggccgccagcagcgacaaacgcccacaaagcgagaccccccgagagggcagcggcaaggcccccacccgaacccaccac

SEQ ID NO: 31759 - RNA, 68 nt, Homo sapiens
acgggaagaaaaacgcgaggcggagaaaccagaggcaagcgacgggaaggaccaccaaacccagccag

SEQ ID NO: 31760 - RNA, 64 nt, Homo sapiens
gcccagacggccaccggcgggaggaacaaaagggcccagccggagaagaggaccacgggagaaa

SEQ ID NO: 31761 - RNA, 88 nt, Homo sapiens
gcaacgaccggcggggggcgcggcgccgggacgcaccgcaccgagggcgagcccagggcacacgggccacagaggaccagcaaggaga

SEQ ID NO: 31762 - RNA, 60 nt, Homo sapiens
cacgcgccccgcagcccggcagcgaacacgaagagagggccggcacccgccggaaccgag

SEQ ID NO: 31763 - RNA, 70 nt, Homo sapiens
cccgacgccaggcagcgcccccaaacgcaacaggggaagaacacaggcgaggacagagggagaaagagcc

SEQ ID NO: 31764 - RNA, 112 nt, Homo sapiens
ggcaaagcggagacaaaggaaagcgggagaccccaggagacgccagaagaggagaacaaggaaacacgcagaaggaaaagcgcagagaccacacaacaggaaaaaacagcag

SEQ ID NO: 31765 - RNA, 53 nt, Homo sapiens
cacaacagaaggacggaaagggcaaaaagacaggaacggccgaacacagaggg

SEQ ID NO: 31766 - RNA, 60 nt, Homo sapiens
acccaccgagccagggagagggagaaccgaagaacaggaggccagcagaggggaacaaga

SEQ ID NO: 31767 - RNA, 72 nt, Homo sapiens
ccgcgacagaggagggaggaaaacaaccgagggcagagaacgcgaagagacccccaggccaaagcacccaaa

SEQ ID NO: 31768 - RNA, 72 nt, Homo sapiens
cgcagcgcagaaggaaccggcaaagcgcaggaacgggaacgcaggagcgaccaggggagccaggacaggaga

SEQ ID NO: 31769 - RNA, 100 nt, Homo sapiens
gccgcggcaccagggcgcgcagccgggccggcccgaccccaccggccaacggaacacagaaacgccccgggccagccgccaaggccgcccagagccccag

SEQ ID NO: 31770 - RNA, 75 nt, Homo sapiens
ggcgcagggcagcagggcgccggggccccggagacccggagacacgggaagcaggacaccaaccgacaagccaac

SEQ ID NO: 31771 - RNA, 60 nt, Homo sapiens
acaagacaagcccacacagagcaagcaaccgaggccaccaagcaggccagggaaggaagc

SEQ ID NO: 31772 - RNA, 78 nt, Homo sapiens
gaagaagaaagaggcgagaaaacgcaaggaagacgggaaaggggaaaggccgagggggacggcaagagcacacacccc

SEQ ID NO: 31773 - RNA, 76 nt, Homo sapiens
aagcaagcagcagaagagccaaggaaaaacagcaagaacccaaaaggggagaaaggcaacaaaagcacaggcagga

SEQ ID NO: 31774 - RNA, 78 nt, Homo sapiens
acaaagcgacggcggacgaagaggggagaaggaagcgagaccaacgcaacccaaggcagaaccccagacccgagcaca

SEQ ID NO: 31775 - RNA, 74 nt, Homo sapiens
ccggaggcggcggcggcgagcggccggggcagaggagaggaagacaccccccccaccgaaagaacccgaacggg

SEQ ID NO: 31776 - RNA, 77 nt, Homo sapiens
aacaagcaagcagcagcacgcgaaaggaaaccaccggcacggcagcgggaaacaagagggagaaggggaccaagaag

SEQ ID NO: 31777 - RNA, 70 nt, Homo sapiens
gaaccccccgggcgcccggagaccgcggcagccagcacacacggaaccacaccaagaccgcagggaacca

SEQ ID NO: 31778 - RNA, 76 nt, Homo sapiens
gccacccacacagagacacaaggcagcaggcgacaccagccacaggaacgacgaacagcagacagggcgccaggga

SEQ ID NO: 31779 - RNA, 61 nt, Homo sapiens
cccacaggggggggcaaacccgagagaacgggacccaaagacaggaccacgcaccagcaga

SEQ ID NO: 31780 - RNA, 78 nt, Homo sapiens
gacgaaggcccacgggcaagggaagaagagaaagccgaaaaagacaaggggaggacagcggaaaaaccggagacgcca

SEQ ID NO: 31781 - RNA, 75 nt, Homo sapiens
acggcaggcacacagcacaacccaacaggcagcgggaaaccggagcaagagaagacagcacggggagcccacagg

SEQ ID NO: 31782 - RNA, 66 nt, Homo sapiens
agccccaaaagcagccgggaaaggagccggccggcggcaaaggccccaggcccaccaggggcacga

SEQ ID NO: 31783 - RNA, 67 nt, Homo sapiens
ccccaacggggaggccaacggaagaaaggcagagcaacagggacacaagcaagaagaaagggaccga

SEQ ID NO: 31784 - RNA, 76 nt, Homo sapiens
cgccgccggcgcccgcgagcgccccgggccagcagccgcacccgggagcggagcacacaccccccagcaggggagg

SEQ ID NO: 31785 - RNA, 76 nt, Homo sapiens
gcacagccgacagcagggggagaggcaccagcaacagaccaaccgcagcaagcacagagacaggaagcccgccacc

SEQ ID NO: 31786 - RNA, 62 nt, Homo sapiens
caggagccggaagagaggcagaagcgacccccgaagggacccgccacgaaggggagccccgg

SEQ ID NO: 31787 - RNA, 77 nt, Homo sapiens
gcgccgccagcaaggggaggacgccagaacccaaaagagagaaagccaagaacacaagaagaagaaaggagcaaggc

SEQ ID NO: 31788 - RNA, 78 nt, Homo sapiens
ccggggggagcggcggccacggcaccggcggggggcacgaggaaagaacacagacagcaggcaaagcccccgacaggg

SEQ ID NO: 31789 - RNA, 82 nt, Homo sapiens
agaggcgggcggcgcgcggcggcggcgccggcgaggaggcgcccggagcggccgccccagcgcgaccggcccgaggaccgcc

SEQ ID NO: 31790 - RNA, 76 nt, Homo sapiens
agacgccggagcaaacgacgagaaagcccacagccaaagccgggcggacgcgggaaacacaaagaagacaccagaa

SEQ ID NO: 31791 - RNA, 81 nt, Homo sapiens
agccggcgggaggaacgccacgcagcgccggaaacgccacgaggcagcacggcaggagacgaggagaggacagcaggacac

SEQ ID NO: 31792 - RNA, 64 nt, Homo sapiens
ggcggccggacgggaagaggacgcagagccccccaagagaacccagggggagccacgccggagc

SEQ ID NO: 31793 - RNA, 65 nt, Homo sapiens
ggcaacgggggcccacggcagagcaggcagagccccgcaaaagaaggaggagagaaagaacccac

SEQ ID NO: 31794 - RNA, 55 nt, Homo sapiens
cgggccaaggagagcccacgcgcccagcggacacagacaggcaggagaagaagga

SEQ ID NO: 31795 - RNA, 72 nt, Homo sapiens
gacgcagggcgcccccggaaccgcgaacgcgcagagaaaggacacaacaaagaagccccagggagcaaaaaa

SEQ ID NO: 31796 - RNA, 76 nt, Homo sapiens
aagaaccaccggaaccacaagaagcggaccagcacccggggcgaccgaaaaggagcagaccagcacgcagaaggac

SEQ ID NO: 31797 - RNA, 71 nt, Homo sapiens
agaagccgcaaacgaccggagaaagaaacgccaagggaccacggaacagcgcaagaaaacaagcagaaaac

SEQ ID NO: 31798 - RNA, 69 nt, Homo sapiens
caggagacagggcccgggcacaaaaaccgacgagccaggaaagcggggcagcaaggcaaggaaaaaacg

SEQ ID NO: 31799 - RNA, 76 nt, Homo sapiens
acggcccggagagacgaaccgaagcgggcgggcccccccacccagagggcacccaaacaacaaaccgagggacaag

SEQ ID NO: 31800 - RNA, 80 nt, Homo sapiens
caggcgagaaacggaccaccaccgaaggaacggacaacaagccgcggagaaccgaaccaacagccagccaaagccaggca

SEQ ID NO: 31801 - RNA, 74 nt, Homo sapiens
ccggagaaagcacaagaagaagcagaggaggcccacaggcccgcccggacaccgaggcccgagggcccggaaag

SEQ ID NO: 31802 - RNA, 55 nt, Homo sapiens
ggccgcagaagacagggcggcgggccggacgacaacggaaaaggaggcgagagcg

SEQ ID NO: 31803 - RNA, 74 nt, Homo sapiens
cccagcggaccgaacaggaaaagcagcgaagagcccagcgaggcaccgccacagaggcgcacacggcaagagcc

SEQ ID NO: 31804 - RNA, 64 nt, Homo sapiens
cgcaaccgcacgagccacggaaaaaccgcagccagaagcagaggcaacgcgccagggaaaacga

SEQ ID NO: 31805 - RNA, 55 nt, Homo sapiens
caaaagccgacaaccccagaaacaggaggagacagcaaggaagaagaaaagagag

SEQ ID NO: 31806 - RNA, 91 nt, Homo sapiens
cggaccgagaccggaccgagagcggaccgagagcgcgaaacgcacgagaaggaggagagaaagaacccacgcaggacgacagaagaggccg

SEQ ID NO: 31807 - RNA, 76 nt, Homo sapiens
ggggcaaagacaaggcaggacagagaaaccgaggcgcgaaacaggaaggccacagcagaagagaaggagacccacg

SEQ ID NO: 31808 - RNA, 109 nt, Homo sapiens
ggcgccacgccgcccccgggcggccccgcgcgggcagcgcagccaggccgcgggacaaggaaacgggaagaaggaagccccgcgccccgcagaacccgaagccggcacg

SEQ ID NO: 31809 - RNA, 73 nt, Homo sapiens
ggagaggaagcgagacccagacggggaagcggagcacaggacgcaagacaccggaaaacgcacccaagggaac

SEQ ID NO: 31810 - RNA, 51 nt, Homo sapiens
agacaaggagagaagaaccaaagaagcaaaacacgaggaaggaagaccggg

SEQ ID NO: 31811 - RNA, 78 nt, Homo sapiens
gcgggaagagcaggaaagaacaacaaaggaggaaaggaagagaaagaacacaaaaggacggagccgccgggccaggcg

SEQ ID NO: 31812 - RNA, 82 nt, Homo sapiens
ggaagcaaagaaccagcaaggcacccagccacaccccaccgcccagagaagggaagagaggagcgagccgaagccagccagc

SEQ ID NO: 31813 - RNA, 74 nt, Homo sapiens
gaggccggacgccggaccgccacgccaccggccgcccagaagccggacacacaacgcaccaaggagacggggga

SEQ ID NO: 31814 - RNA, 73 nt, Homo sapiens
ccaggacccacggaagccagaaagcgcggcacgaagacccgaagaaacacacgggcaggcggaaaggaaagaa

SEQ ID NO: 31815 - RNA, 61 nt, Homo sapiens
cgagcgggacgcgggcagcagcaggccggcaggcaacaggaggccgccaaagaacaccgca

SEQ ID NO: 31816 - RNA, 102 nt, Homo sapiens
aacagccagacgagagccagccacacgaggagacggaaccggagaaaaaagcaaggccagaaacgcacaagacgagaagaagccggagaagaaacaaagagg

SEQ ID NO: 31817 - RNA, 80 nt, Homo sapiens
aagggccagggcagcccggggccgaccgagcacgaacgcccgccacgacaggaggaaagcgcagaccaggccggaaaaac

SEQ ID NO: 31818 - RNA, 81 nt, Homo sapiens
agggcccgagagcaccgcgccagacagggacacaggacaaggagccaccggagaggaagcggcagacagcgaaaggcacgc

SEQ ID NO: 31819 - RNA, 99 nt, Homo sapiens
ccgcggccgccaaagccgggagacgacggagcccggaagcgcagaagcgaaaccaagggagggaaccgggaacggcgcggcaaaggagagagaaagggc

SEQ ID NO: 31820 - RNA, 83 nt, Homo sapiens
gcggcgcggccacgcccccccacccccgcgcgcgcccggggagacagagcgcggggcaggccccccagggggcccggccaggg

SEQ ID NO: 31821 - RNA, 80 nt, Homo sapiens
gccgagccagagccagggaacggaggagcgagccacggcgggaaggaggcagagaacacaagagaaggagggagcagaga

SEQ ID NO: 31822 - RNA, 67 nt, Homo sapiens
accaacccaagcgaagaagagcggaaaacaaggggccgccgacccagcggaacaagaggaaaccacc

SEQ ID NO: 31823 - RNA, 78 nt, Homo sapiens
agccacccagaagggcgaaaggagagaggagaacccccaaaggcaagaaggaacagacaaaaacggccggaaggaaac

SEQ ID NO: 31824 - RNA, 69 nt, Homo sapiens
ccaacccgccaaaaaagacaagaaaccgcacaagaccgggaggggaacaggacaagcgaaccggagccc

SEQ ID NO: 31825 - RNA, 70 nt, Homo sapiens
gccgccggcagcaccacaggaggggcaggaaacgaagacaacgaagagaggaaagaagcggaaaggaggg

SEQ ID NO: 31826 - RNA, 66 nt, Homo sapiens
agagaaacacgcaaaacaaggaaaggcacaaggacacagagccacaaaagaggaaacaaacaggaa

SEQ ID NO: 31827 - RNA, 76 nt, Homo sapiens
gacaccacgggccagcccagccacccggcccgcagaaccgcgaccgggagagcaagaacgaggccaaggaggaggg

SEQ ID NO: 31828 - RNA, 56 nt, Homo sapiens
aaaggcccgcacggagagcggccgccaacggggggggagccgcacgacccgaacgc

SEQ ID NO: 31829 - RNA, 39 nt, Homo sapiens
aggagcgagccacggcggacaacaaacgagcacggagaa

SEQ ID NO: 31830 - RNA, 82 nt, Homo sapiens
agggcacaaggaaacaaaccagcggaggcagggaacggaaccgcggagcacagcggcggagcagcaaggcgcagagacacgc

SEQ ID NO: 31831 - RNA, 73 nt, Homo sapiens
ggaccggcgccgcgccccggcgcggaacccgcccagcggccgaggccccgagccccggccccaaagacccaaa

SEQ ID NO: 31832 - RNA, 78 nt, Homo sapiens
cgcaccaggcgcggagaaaacaacaagagaaggacagcggccaacaagaagcaacacccccagggagcgggggcggaa

SEQ ID NO: 31833 - RNA, 76 nt, Homo sapiens
acggagcggggcacaaagcccccgggggaccgagcagcccggaagaaagcgggacccccgccggagcagagagcca

SEQ ID NO: 31834 - RNA, 76 nt, Homo sapiens
cgaggacccggggccgaggagcgggaagaggcggggagggaaaccagaggagaggacagaggcacggcccgggccc

SEQ ID NO: 31835 - RNA, 79 nt, Homo sapiens
ggcggccccaagcccaagagagaagagcgaaggcagaaggaagggcagagagcgaagggcagaacagggggcacgccgc

SEQ ID NO: 31836 - RNA, 63 nt, Homo sapiens
agcgcccgcgacagaggagggaggaaaacaaccgagggcagacgcaggccaagcagaaggcag

SEQ ID NO: 31837 - RNA, 81 nt, Homo sapiens
accggagaccaagcagagaagcacgggccagagccgaagcggaagccaggaacaggcacccgaagacgggggagcgcggag

SEQ ID NO: 31838 - RNA, 102 nt, Homo sapiens
agggcgcagcgcggcgcggcagggacgcgggcgaccacccggcgcaggagcggccgcgcggcccagaaaaagcaccgggaggaaagagagccacacgaagaa

SEQ ID NO: 31839 - RNA, 84 nt, Homo sapiens
gcacaaaacgcccagcaaaccaagagggagaagacggaagaaagcagccaagagagcaaggcaggcgcgggagcgcaaaggcaa

SEQ ID NO: 31840 - RNA, 77 nt, Homo sapiens
agcaaaccagcaaacaagaagaaacacagcacacaccaggccacagagcaaccaaaaaccggccgcaggcacaaaag

SEQ ID NO: 31841 - RNA, 111 nt, Homo sapiens
cacaaagaggagggggacacggcggcgaaagcagaggcacgcacagcccagcaaaagaaagaaacccgaagacaacacacagagacacccgccaaaacgagaggagacagg

SEQ ID NO: 31842 - RNA, 67 nt, Homo sapiens
cccaggaggcggagcggcaaaaaccaccggagagaacagaaaaaaagcggcccgggaccaggaaaga

SEQ ID NO: 31843 - RNA, 78 nt, Homo sapiens
ccaaaacccaagccaggacaaaagccggaggcccgaccccagaagagacccagaaaggggagcgaagcaacgggagag

SEQ ID NO: 31844 - RNA, 43 nt, Homo sapiens
cagaagcaaggaagcgggcaagcccgagagagaaagggaaaga

SEQ ID NO: 31845 - RNA, 48 nt, Homo sapiens
cccccgaccccacaccaaaggcacgaagagccaccaaaaccggcaaag

SEQ ID NO: 31846 - RNA, 70 nt, Homo sapiens
gggcgggcaaccagaagggcccagacgaggggcccacaacaaaccaaggagacaaaacaaaaggaggcag

SEQ ID NO: 31847 - RNA, 63 nt, Homo sapiens
aggcacaggggcagagagcaggacggaggggggaggagcaggcccccaccgcgacccacaacc

SEQ ID NO: 31848 - RNA, 83 nt, Homo sapiens
ggagcaaaacccacacagacagaacgaccgcccggccagcccaccccccgacgaaggccacggggagacacgcccaccccgac

SEQ ID NO: 31849 - RNA, 70 nt, Homo sapiens
ccgcgcgcacgccccgacgcaagacgcccggcccgggagagagagagagagaggaagcgaagaaaaagcg

SEQ ID NO: 31850 - RNA, 42 nt, Homo sapiens
ggcggcacagcgacgagaacgacgcaccgaacaagaggagaa

SEQ ID NO: 31851 - RNA, 78 nt, Homo sapiens
agagaaaaagagaagaagagaagaaaccagcgaaggaaccagcaggcgaagacgcaggagagcacagacggacccgca

SEQ ID NO: 31852 - RNA, 77 nt, Homo sapiens
ccaacaagcgcgggccggcagcccagggcaacccgcccagaagaggcaccaggcccaccaaagaggggaagggaggc

SEQ ID NO: 31853 - RNA, 73 nt, Homo sapiens
ggcgcacagcaacagcgaaggcaaagaacgacgaaaaccagaggaacgcccaagaaaggacacggcaagaaaa

SEQ ID NO: 31854 - RNA, 36 nt, Homo sapiens
ggccagggcccacgcaagaccagggcaaagcacccc

SEQ ID NO: 31855 - RNA, 75 nt, Homo sapiens
ggggcccaaaaaggggagaaaaaggaccaccagaccacaggcggggacccggaaaaaagaggagcggaggagcgg

SEQ ID NO: 31856 - RNA, 55 nt, Homo sapiens
aaaggaggaggcacagacagccaagaagagggaaagaagacaggaaacaagggaa

SEQ ID NO: 31857 - RNA, 70 nt, Homo sapiens
ggaccaagaaccagggaacgcccagcgacccccacgccagaacgacagaaagcaagagcagcccagccgc

SEQ ID NO: 31858 - RNA, 79 nt, Homo sapiens
agaccaacaacaccgcccaaccccaaccaccgcaccccacgcgaccagggaacagaaacacagaaccccacccgagggc

SEQ ID NO: 31859 - RNA, 86 nt, Homo sapiens
caccacagacaaggaaaaggcggagcaccccacaggccaacaggaccgaagaccgaaacggccaagaagcggaaagagaccagagc

SEQ ID NO: 31860 - RNA, 84 nt, Homo sapiens
gaaaagcaggccgaagaaccgagcgacagagacaagcgagcgccgcacaaaaagcagagaggcaacagagacccgagcggaaga

SEQ ID NO: 31861 - RNA, 89 nt, Homo sapiens
gaaagaacagaaacccaggagcaaacaggaaaacaaggggaggagacgcaagcaacaaggcaagacccgcgcgcccacggccaggacac

SEQ ID NO: 31862 - RNA, 76 nt, Homo sapiens
ccacaaaagaggcaacaccgcaggcaaagcacaggacggccgacgcgggacaagaggacggacggacacacgagcc

SEQ ID NO: 31863 - RNA, 72 nt, Homo sapiens
caccaggaagcagagaggaccgcagaagggaaggagaacgaggggcaacggaaacaaggccaaagaggcaac

SEQ ID NO: 31864 - RNA, 76 nt, Homo sapiens
ggggcagcacggaaccacacagggccgccaccaacagagaagacagagcaccaacgagggggacggaagcggcagc

SEQ ID NO: 31865 - RNA, 71 nt, Homo sapiens
aggagaaaagagcagccggccggccccgaggaagccaagacccgccccggaggagacaggcagacacaacg

SEQ ID NO: 31866 - RNA, 78 nt, Homo sapiens
gaggcagagaagcccgcaagcgcagcaagcccaacacagaagggaacaagcggacagaaaaagagaacaagccccggc

SEQ ID NO: 31867 - RNA, 74 nt, Homo sapiens
cgccaaacccggagagacagagaaggacggagaagcgaaagccagaccggcaagagcggaagaaagcaccaaag

SEQ ID NO: 31868 - RNA, 67 nt, Homo sapiens
acccgggagaggagaccagaacgaacccccccccccggggagaaaaacaggaaaagaaagacgcaca

SEQ ID NO: 31869 - RNA, 76 nt, Homo sapiens
gcaccgcaggcaagcgcaacaggaggaaaacggccaacccaccgcgccgaaagaagaaagggcaggcgaagagagc

SEQ ID NO: 31870 - RNA, 81 nt, Homo sapiens
cgcccaccggcggcgaaggcacacgcggcagagagaagcggacagggacaagaacccaagaaacaggaaaaaacccaaaac

SEQ ID NO: 31871 - RNA, 67 nt, Homo sapiens
ggcggcgaaagacaaggaaagcgcaaagccgacgaggagagaccccgcagcggacaagacagaacac

SEQ ID NO: 31872 - RNA, 82 nt, Homo sapiens
gcgacccaccaacaggcaacccagacaaagaagagcagccgcagaaaaaaaggccagccagacggggcagaagggcgcaaaa

SEQ ID NO: 31873 - RNA, 82 nt, Homo sapiens
gaagacgccccaccacgaggccagcacgggaacgcgaagcgccaaagccagacaaaaccgaacggaagggaggaaaaaaagg

SEQ ID NO: 31874 - RNA, 60 nt, Homo sapiens
agaagggacagagaagggggaaaccgaagccggggaagcgaaggacaggagaaacagggg

SEQ ID NO: 31875 - RNA, 77 nt, Homo sapiens
gggagaccacagcaagacgccaggacccacggaagccagaaaggaacacaaggcccgaggagaggagcaccaacggg

SEQ ID NO: 31876 - RNA, 83 nt, Homo sapiens
cggaccgcagaggaagagaaaaagcaaacgaccagacggcagggaggcacaaaggggaacacaggacccaaagacaggaccac

SEQ ID NO: 31877 - RNA, 42 nt, Homo sapiens
gcaagccgacagacagcaacacggaccaacccccagaggggg

SEQ ID NO: 31878 - RNA, 76 nt, Homo sapiens
caccgcgacggaccgccagccagacccgggcgcagcgccaagagggcgaaccgaccaagaacaacacccagagggc

SEQ ID NO: 31879 - RNA, 74 nt, Homo sapiens
ggcccacgccaggaaaagaacgccaccccagagggaccaagaaaggcccagggaccaaagcccggacaaggccc

SEQ ID NO: 31880 - RNA, 84 nt, Homo sapiens
gccgagggagaagaccaccacaacaagagacaacaccgcgcggaccacaaaccgcgccagaaaaaaacgccgaagggaccaggc

SEQ ID NO: 31881 - RNA, 79 nt, Homo sapiens
cgggagcagacgagaccaggggaaacggacgagcacaagacccaagaaaccgagagacacaccacaaccacaggccgac

SEQ ID NO: 31882 - RNA, 68 nt, Homo sapiens
ggcccacgcgcggccaagggggcacccgaggaggaagagggcagggcccacggaaagaagggaaaccc

SEQ ID NO: 31883 - RNA, 80 nt, Homo sapiens
caccccagccaaagccaacaagaccaagcccgcggacgccaggggccagacccacagcacccaccgcccaaagcaggccg

SEQ ID NO: 31884 - RNA, 81 nt, Homo sapiens
ggaggagcggaggacggaccccaacaggaaccccaagaccccaacgcaggggacacggaacccaaggagacgaagcgaagc

SEQ ID NO: 31885 - RNA, 68 nt, Homo sapiens
agggaaccaacccccaaacaggaagccggagaagagaaagaggcagggccaggcacacaaacgggaga

SEQ ID NO: 31886 - RNA, 56 nt, Homo sapiens
cccagaaggaacggagacaaaaacggcccggagaggaggaccacaaagcaccaagc

SEQ ID NO: 31887 - RNA, 68 nt, Homo sapiens
caggcccccgcagcagaccaaaaagaaagacacaggcccgcacaaggaaacaaccggaagaaagggaa

SEQ ID NO: 31888 - RNA, 75 nt, Homo sapiens
cggccagaagggaggagaaagcaggggacacccgacacaacagcgcaggagaggccccgcggcgcgcgcgcccca

SEQ ID NO: 31889 - RNA, 76 nt, Homo sapiens
gcggagcacgagccacggcagaaccaaacccaccgcaagacagggaagcgagagccaaaaggccaggcacagcaac

SEQ ID NO: 31890 - RNA, 80 nt, Homo sapiens
aaagagggaccgaccggccagaggcggggaaaaaggagaagccagaacaaagagaagaaacccgaagccaagaagggagc

SEQ ID NO: 31891 - RNA, 85 nt, Homo sapiens
aaaggagaaggaaaagggaaggacaaggaaacaaacacaaacggggccaccgggaacccgccggccgaccgaacaagcaagagac

SEQ ID NO: 31892 - RNA, 121 nt, Homo sapiens
gcacagccagggccggagcacgacacggacaaggacgaggcggaaaggaaccccaaggcggaggcaagcaccggaagcaccccggcggccgcggaagcggggcgcacaccaccggacaacc

SEQ ID NO: 31893 - RNA, 78 nt, Homo sapiens
cagaggcgagcgagagaaagagggcacacagggaccaagaagccccggggacacgcgagaaaagacgccgaagggaag

SEQ ID NO: 31894 - RNA, 73 nt, Homo sapiens
caggcgcccccaagaagaaaaccgggaggaggagaggagagacccagagccgacagaagaagaccacaacaaa

SEQ ID NO: 31895 - RNA, 83 nt, Homo sapiens
cccggaggccaacggggccccggcccggcccggccagggaggaggagaccgcccaccgagacagccggagaagagcgaccagc

SEQ ID NO: 31896 - RNA, 74 nt, Homo sapiens
gcgccagggagcgccgcggcggagcggacaccaacaaggaaagaacggaacgaccgagaaaaacaaggaccaca

SEQ ID NO: 31897 - RNA, 77 nt, Homo sapiens
gccccaagccacggaccagagacacgccaagcagccagcccaggagagaagaggccccaggaccggcgaggcccccc

SEQ ID NO: 31898 - RNA, 73 nt, Homo sapiens
gaaggcggcgcagacggccaggacacgccaagaaagaaacaacggcccggaggggaacgccccccaggaccgc

SEQ ID NO: 31899 - RNA, 77 nt, Homo sapiens
gcaaccgccccgcgagaaaacagaacgggggaaggacggggaaacagcgaacagccaccccagaagcgcggccggca

SEQ ID NO: 31900 - RNA, 122 nt, Homo sapiens
ccgagccagaggcacacacaggggaccagacaaagggagaggggaccgacacccaacaggaaagaccacagcaagaccacgcccccagccgggggaccaggccgaacgacccggacacaaag

SEQ ID NO: 31901 - RNA, 81 nt, Homo sapiens
cagcccaacaacacccaggcccgccccaccgggggccaccccagggaggagaagagggacccagaaggcgaggagaagaag

SEQ ID NO: 31902 - RNA, 78 nt, Homo sapiens
ggcggagccaggccagcggaagacgcagcaaagaggccacaacagagaaggaaccagggacccaaagcaacggagcca

SEQ ID NO: 31903 - RNA, 82 nt, Homo sapiens
ggcaggagaaggcagagcggggcacccacccaagggcagaccaagaagcaagagagaccacgacggaagaaaggaggacaaa

SEQ ID NO: 31904 - RNA, 81 nt, Homo sapiens
aaaaaaccaacaaggagaaaaagacacacacaacgaaaagaaaacagaaccaggaggaagaagggggaaagggaaaagagg

SEQ ID NO: 31905 - RNA, 34 nt, Homo sapiens
cccaaagacaccagaccaaggaacagagacagac

SEQ ID NO: 31906 - RNA, 67 nt, Homo sapiens
gccaaagagaaggcaaagcaggcggagagaggcgcaaagcccaaaaggaaccagcccgagacaagag

SEQ ID NO: 31907 - RNA, 66 nt, Homo sapiens
gccccaacgcgcggggggcccaggggggaacacaccacagggaaacggcacacaacaaagaagaaa

SEQ ID NO: 31908 - RNA, 54 nt, Homo sapiens
cgcagggcgcccccggccagagcgcccccgagacccacgagccaccagcgcaag

SEQ ID NO: 31909 - RNA, 75 nt, Homo sapiens
agagagaggagacagaggagacgaggaggagacggcagaacaccaaccgcccagggccgcagcgagcgggcccgc

SEQ ID NO: 31910 - RNA, 84 nt, Homo sapiens
agacacggccgaaggcgaacgccgcggccaaggagccgccaaagccagacgggaaagcaacacaacaagagagaaggaaagaca

SEQ ID NO: 31911 - RNA, 81 nt, Homo sapiens
cgagcccaacccgcggccccggcgccaagccgccgcaccccggccagagcagcagcagagaaacgagcagaacaaaaaggg

SEQ ID NO: 31912 - RNA, 64 nt, Homo sapiens
gaccccgggcagcccaacgagaaccggagggcaccggaggaaagaaaccgacggccccaggaga

SEQ ID NO: 31913 - RNA, 67 nt, Homo sapiens
cacgaggagaaacagcagaaacgcaccaggccaaagaaagagaaggaggcaaaggcaggaaaagcga

SEQ ID NO: 31914 - RNA, 72 nt, Homo sapiens
agagaccagggcccgggcccgcggaggcgcccagagaggccgcccgggagggagggaaccgaccgacagccc

SEQ ID NO: 31915 - RNA, 75 nt, Homo sapiens
aaccacggacaagaccgagacacccaccacagcagcagaaacggcaagagaccggggccgagcagacaggcagca

SEQ ID NO: 31916 - RNA, 105 nt, Homo sapiens
cgaagaggcgacggccgagcgaggaggagcggacaagaagacaaccggcgaacggcgcagggaggaggccccgcgcccaaggcccacgaggaagccccggcaagc

SEQ ID NO: 31917 - RNA, 72 nt, Homo sapiens
gagacgcaccccaacacgacacggccagccccgcggcggcacagccgaggcagagaagggccgacaccaccc

SEQ ID NO: 31918 - RNA, 83 nt, Homo sapiens
accgccaacccccccacccaggccccgcaagaagggccgggggcgagccggagcgaccccggcaggccacggggaggacgacc

SEQ ID NO: 31919 - RNA, 73 nt, Homo sapiens
agcgcagcggcacgcacgcgaagacagcggcagggggcgggcacgaagcaagcagaccggaaaaagacaacac

SEQ ID NO: 31920 - RNA, 72 nt, Homo sapiens
aacaccggagccgccaccacacaagcgccaaccgaggagaacccgggagaaaagcccagaaccgagacagag

SEQ ID NO: 31921 - RNA, 97 nt, Homo sapiens
gaaaaacgaggcagccagcccgaagaaaagggaaaacgcgcgggccaagggaccccgacggagagacaaagaagacggagggggggccagccaccgc

SEQ ID NO: 31922 - RNA, 67 nt, Homo sapiens
gggacgggaaacgacaggagagacaacggaggcaagaaagacggagaagcgagaagagaccagcagc

SEQ ID NO: 31923 - RNA, 74 nt, Homo sapiens
agccgcaccgaagcgcccgcaacaaacaacaggcagacgaaagaacggccaggcccccaaggggaaacccaaag

SEQ ID NO: 31924 - RNA, 60 nt, Homo sapiens
aaaagaccgagaaccggcgggagaacccccaacaccgggacccaggaggaagccgggggg

SEQ ID NO: 31925 - RNA, 82 nt, Homo sapiens
gcagcgcggaccccccagcccagaccagagccacgcacacagaaacagcgagacggaggggacacccaaggcgacacaccgg

SEQ ID NO: 31926 - RNA, 84 nt, Homo sapiens
aaaaacccaggaagagaaaagcagcagggaacgcgagcaacacaaaaaagcagcccgacggccaggaggcgaagagacgaggaa

SEQ ID NO: 31927 - RNA, 34 nt, Homo sapiens
ccaaaggggaagccacggcacagaccaaacaagg

SEQ ID NO: 31928 - RNA, 50 nt, Homo sapiens
ggaaccggacaccgagggcaacggcagaggccagaccggcccgggccggg

SEQ ID NO: 31929 - RNA, 79 nt, Homo sapiens
cacacccaccgagccgagagggggcggaagggcaagaaagaaggaaagcccaagagggagcgcccgacacgcccacgaa

SEQ ID NO: 31930 - RNA, 74 nt, Homo sapiens
ccaagaccgaaaacagaaggaaagaaggaacggagaaggcaaagaagagaaaacccaggacaacccgaaaggca

SEQ ID NO: 31931 - RNA, 73 nt, Homo sapiens
gaaccgggagcgaggaaccagaacgaaaagcgccagaaaggcccggcccggcgaggaccccaaggcgccacag

SEQ ID NO: 31932 - RNA, 84 nt, Homo sapiens
cagaggccgccacaaccgccagacaaccggagccacgccccacgaccgccaggaccccccagggggcccgagcccaccccaggg

SEQ ID NO: 31933 - RNA, 76 nt, Homo sapiens
aggacacagagcacaagcccgacaggagaagaggggaagaagaaagccagaagagcagagaaggccggaggaagaa

SEQ ID NO: 31934 - RNA, 86 nt, Homo sapiens
gcgcgggcgagcggcgagccgaaaagcgagcgcgaggaaaaggcggcgggagagcagcccgacggccaggaggcgaagagacgagg

SEQ ID NO: 31935 - RNA, 73 nt, Homo sapiens
ggaggcgcggccaacggggccacaaggagaggagccaagcccaacgggacgggaaaacggccacagccaacga

SEQ ID NO: 31936 - RNA, 83 nt, Homo sapiens
gcggcgcgaagcgcggggcgggcccgggcgcggcgggcgcgcccgccagcgcccggagaacgaggaacggcagaaagcaaaac

SEQ ID NO: 31937 - RNA, 66 nt, Homo sapiens
aaccaagcgggaacacggacaggaaggccagacagaaggaaagaaaagaaaaaacagcacgcggag

SEQ ID NO: 31938 - RNA, 76 nt, Homo sapiens
agacagagagagaaacccgaagcgcggaaaacccagggggcgaacacggaaggcgcggagcgggaaagacacggag

SEQ ID NO: 31939 - RNA, 67 nt, Homo sapiens
aacaggcaaaggaacccaaagcgccccgccaccaagagacgaggaagccaagcgaggaagagagcca

SEQ ID NO: 31940 - RNA, 81 nt, Homo sapiens
gaaaaccaaccagaagacgaacaaacagcaagaaagaccacaagaccagaccaccacaaagaaaaagaaagaaaaggccgg

SEQ ID NO: 31941 - RNA, 65 nt, Homo sapiens
agaagggcagaaaccagggaggccccagccaacccgaaaaccccccagcggccacagagagcaca

SEQ ID NO: 31942 - RNA, 84 nt, Homo sapiens
acggaagagaaaaccgaaaaagcagaagcacaagccaaacggaccggccagccgcagcgagaccaggagccgcccgagcgcgag

SEQ ID NO: 31943 - RNA, 78 nt, Homo sapiens
gcagaaccccaaaaccagcagaccacagacccacagcgaaagcaacaggagaccggaaaccgagagaaacgaagacga

SEQ ID NO: 31944 - RNA, 67 nt, Homo sapiens
gcagcacccacccgcacagccgaggacacgggacccaggccacgggccggggcccccaccggaagca

SEQ ID NO: 31945 - RNA, 79 nt, Homo sapiens
cggccccggccccgcccggccggcgcgccccggagggcgcggcgcgcgaggagcaggaaaagagcgacgccgacaaagg

SEQ ID NO: 31946 - RNA, 74 nt, Homo sapiens
gagaggcaaagcggagcagccaggcaacgagaaaacacccacgggccaaaagggcggggaacggaccaccagcc

SEQ ID NO: 31947 - RNA, 71 nt, Homo sapiens
cacgccacgccaccccaccccaaaagggaccgacaaggagagagagaaagcgcaagaaacaaggcgaacaa

SEQ ID NO: 31948 - RNA, 69 nt, Homo sapiens
aaaaagcgaaaaaccggagccaacgaaacaaaaagcagaaacggcaagagagcaggaaccagaaagaaa

SEQ ID NO: 31949 - RNA, 76 nt, Homo sapiens
gagaccgcggccgaccagagaacaggaccgcagcgaagcacagcagaaggggccacaagacagcacaaaaagaccg

SEQ ID NO: 31950 - RNA, 76 nt, Homo sapiens
gcaccagccaaaacacacaccggccaaagagcggaaaggcaaaaggacaggaacaaaccaaggcaacaggaaccaa

SEQ ID NO: 31951 - RNA, 76 nt, Homo sapiens
agaaagagacaggacaaacgaagaagacaccacgaggcggcaccaggagggacacgagaggggaaagccgaaagca

SEQ ID NO: 31952 - RNA, 72 nt, Homo sapiens
caccccaccgggccccagaccggcgaccgagagcccggaccagcagagggccgacgagcacagagaccgaaa

SEQ ID NO: 31953 - RNA, 115 nt, Homo sapiens
gcagccgccagagccggcggagcagggcagcaccacgagccagaagcagagccggccgcagccagaaaacaccagcagcgcgcaggacccagagaagggagcaccagaaaagcag

SEQ ID NO: 31954 - RNA, 58 nt, Homo sapiens
cgcgcggaggcacggggagccccggcagcaggagcgcgcagcacgaaacacgggaagg

SEQ ID NO: 31955 - RNA, 95 nt, Homo sapiens
gcgccgcgaacaggaagcccgaagcccacacaccccgaaaacaaagacgagaagaggcgaacggaagcaacacccgggaaaagcagcgaggaaga

SEQ ID NO: 31956 - RNA, 38 nt, Homo sapiens
caacaggggcaaacgcccagacaacgaagagaggaaag

SEQ ID NO: 31957 - RNA, 82 nt, Homo sapiens
accggccagcagcggcgacagggcgggacacgacaggacaggcaacacaccgaaaaaagggaagcggagaggagcagagacg

SEQ ID NO: 31958 - RNA, 80 nt, Homo sapiens
agagaccaagcaccaagaaaacgccaaggaacgcacagaggcccgaaagcagaacagagaaggaacgaaaagaaaaaaaa

SEQ ID NO: 31959 - RNA, 84 nt, Homo sapiens
gccgcggccgccaggagcggcccgcgccgcagccccagagccaaggagcaccaggaagaggcaacgagacagcccgccccgcac

SEQ ID NO: 31960 - RNA, 73 nt, Homo sapiens
gaccaagggcgcccggaagaggcccccccgggcccccagcacaagggggcaccaggcggagaaggacgccaca

SEQ ID NO: 31961 - RNA, 74 nt, Homo sapiens
gcagcccaagccgggcccgcacgagcaacgaacaccacagacgaaagccaagggaacgcaaagaaggccacagg

SEQ ID NO: 31962 - RNA, 59 nt, Homo sapiens
cccaccgccccaccaccccaccagacggcgccccaagaccaaccgggccgcacaggcaa

SEQ ID NO: 31963 - RNA, 70 nt, Homo sapiens
gacccgaggaagcgcgacccaggaccacaccagggcgggcagcagcggcgcacaaaagcaggaaaggcag

SEQ ID NO: 31964 - RNA, 82 nt, Homo sapiens
ggaagaagacgcaaacagacaagaagcaccagaagcggagcagaggaggacagcagaggccgaaccagaagccggagcagcc

SEQ ID NO: 31965 - RNA, 62 nt, Homo sapiens
gcgcccccacacgaccagggaacgccggagagccgccaagaacagcaagccaccaaccacca

SEQ ID NO: 31966 - RNA, 73 nt, Homo sapiens
caaaccggaccaccccgaagaaagcacagaaacggagccccaaggagaccgcccccagcccacagaggcgcgg

SEQ ID NO: 31967 - RNA, 70 nt, Homo sapiens
caggagaaagaacacaggagcgcaggcgaccaagaaaccgagaaccaggcaggaccgggaaagcggacac

SEQ ID NO: 31968 - RNA, 57 nt, Homo sapiens
cccgccccgcagacccaccggggaaacccaacacccggccggaagcggacgagcagc

SEQ ID NO: 31969 - RNA, 67 nt, Homo sapiens
gcacgagcagggacggcgagacagaaacagagaacggacacagggaggaccaagaacccggaggagg

SEQ ID NO: 31970 - RNA, 61 nt, Homo sapiens
gagcgggggcgggaagaccacgaaggcaaacgccggaagaacacagagggccaagagcgac

SEQ ID NO: 31971 - RNA, 63 nt, Homo sapiens
ggaggaagcagggccccgaagagaacaaccccgagggagcggcgaagaagggacgagagccgc

SEQ ID NO: 31972 - RNA, 73 nt, Homo sapiens
gaagggagcccagaagacaagcaacggcccaggagagccggaggaacaccaggccgggcagagcgaaacggga

SEQ ID NO: 31973 - RNA, 82 nt, Homo sapiens
aggaggcagaggcagcagcggaagaaagccaaggagccgcaggcacggcagcgagggaaaaggccaaccaagcggagagcaa

SEQ ID NO: 31974 - RNA, 73 nt, Homo sapiens
gacagacaaacagcggaaagcgcggaaacagacagggccggagagggacacagaggagaggcgagagcgaggc

SEQ ID NO: 31975 - RNA, 82 nt, Homo sapiens
cgacaacggagaacaaaccgcgagaagcacgcacgccaggcacgagagacaaggaggggcgcgccgcccacccccaaagcca

SEQ ID NO: 31976 - RNA, 46 nt, Homo sapiens
aaaaaggaaaaacggcgacaggacgaccaaaaaaagacgaacaacc

SEQ ID NO: 31977 - RNA, 41 nt, Homo sapiens
cccgagaggggacacagaaaccccagcaaaaccagcgaaga

SEQ ID NO: 31978 - RNA, 75 nt, Homo sapiens
ccggggagcccgaccggaccgcggaggaaaaccgccgccggggccagcaagaacaaaaagcaccaacagacccac

SEQ ID NO: 31979 - RNA, 54 nt, Homo sapiens
cgcaggaagaccaggaccgaagcgaacgcggcagaacggaggcaggcagcacga

SEQ ID NO: 31980 - RNA, 81 nt, Homo sapiens
aagccccccccaaagccaaagcacagaggcccgaaagcagaacagagaaggaacgaaaagaaaaaaaaaggaagcgacagc

SEQ ID NO: 31981 - RNA, 76 nt, Homo sapiens
acccggcacagacgcggcggggcgcaaaccgagacaagcaccccgaagcgccgggaaagggagcagcaccggccac

SEQ ID NO: 31982 - RNA, 84 nt, Homo sapiens
caaagccgccaaggcagcagaacacggcggagccgaaaggaagaacgaggaaagcacagcgacaaccgaacacaaccgagggcg

SEQ ID NO: 31983 - RNA, 76 nt, Homo sapiens
ggaaaaggcgggggaagaggagacaggaagcacaggccaacccagcacagacgaccaccgagggcaggccgaacca

SEQ ID NO: 31984 - RNA, 68 nt, Homo sapiens
aacgacgaaagacccagacagacagaggaagacaggaaccaaaacagggacgaagcggcaccaacaaa

SEQ ID NO: 31985 - RNA, 63 nt, Homo sapiens
gagaaggaccaagaaccagggaagcaaggaccagaagcgccaacgcaagcagaaagaaggagg

SEQ ID NO: 31986 - RNA, 115 nt, Homo sapiens
gagcgaggaggcccgggagcgccgagcgcgccgccgccgccgccagaacaaccgggcgccgacgagacggagggcaccaacaaagcgccagccagcgggcagacgccacggcacg

SEQ ID NO: 31987 - RNA, 77 nt, Homo sapiens
ccagagggaaacggcacaccaggcggcaggggcaaccagacgggccaaggggccgcaaggccaggcgcgcagaggca

SEQ ID NO: 31988 - RNA, 80 nt, Homo sapiens
caggaacccaacgagccaaagaaacgacggagcagcagaagccgacaggagcaacccacacccccaacaagcagacaacc

SEQ ID NO: 31989 - RNA, 54 nt, Homo sapiens
cggagacaaacccaagcagacagaaggaccaaaagacacaaccagagggaagca

SEQ ID NO: 31990 - RNA, 63 nt, Homo sapiens
ggggcgggccagcccgggcgggccgcgcgggagagcagcaagaaggaacgacaaggcgcccag

SEQ ID NO: 31991 - RNA, 65 nt, Homo sapiens
gcaggcccggcacggcgggcaggccagggcgccgagccagacggcggcggccccacccaaagcag

SEQ ID NO: 31992 - RNA, 75 nt, Homo sapiens
agacaagccagaacgagaagcgcaccacagccgagcagcccaggccgccgggggcgaggggggggaagcagaccg

SEQ ID NO: 31993 - RNA, 73 nt, Homo sapiens
gacccaagagccaaacagggaagcaggggcgaaagaagaggagcacccgacagggcaaggaaggcgagaggaa

SEQ ID NO: 31994 - RNA, 75 nt, Homo sapiens
cagcgagccggagagcgggccaccacgggacccaccgcccggcgccccagccgccccgggagcaaaaggacggaa

SEQ ID NO: 31995 - RNA, 109 nt, Homo sapiens
cagagccaggaacgcccggccgcgcccgcgcccagcccgggccccgcgcacagccccagcgcagggcgaaccgaccaagaacaacacccagagggccaggagaaggcga

SEQ ID NO: 31996 - RNA, 74 nt, Homo sapiens
gcgggcgcagcacagaacgccaaaggcccgcaaggacaagcaacaacaggcgacgggcccaaacagcggaggcc

SEQ ID NO: 31997 - RNA, 66 nt, Homo sapiens
cacggcgggcccggcggggaggcgagacaacggcaagcggagaagagcaaggccgaaccgagagga

SEQ ID NO: 31998 - RNA, 78 nt, Homo sapiens
aacacgcaaggacccccccggccaagggcaagcaagaaggcagaagcgagcccagagcgaaggaacaggacgcggaca

SEQ ID NO: 31999 - RNA, 60 nt, Homo sapiens
ccacgccgcaccaccaacacagagggagggaccggggcacgggccccccagcccgcggaa

SEQ ID NO: 32000 - RNA, 78 nt, Homo sapiens
gcgcccgcgccgaggccgcgggcggcgggcccgggcagcaggaggagccagagcagggcagaagacaagcaacgcaga

SEQ ID NO: 32001 - RNA, 73 nt, Homo sapiens
ccagaacgcccccgaacggagaagagcgaaccgccagacccccagcgcaggggagaagaccaagccccccgag

SEQ ID NO: 32002 - RNA, 61 nt, Homo sapiens
gagccacaacccacgcaaagacagaacacgaggccagagaagaacacccaaagcaaagcca

SEQ ID NO: 32003 - RNA, 72 nt, Homo sapiens
cgcccagccccgagagcaggacacagaaaggcggggaaaaaaacaaacagaagagcagggcgcacacaaacg

SEQ ID NO: 32004 - RNA, 70 nt, Homo sapiens
caggcgccagccggaagcccgagggcagcgcccacggccgcgaccggccgggcccaacgcgcaggccacg

SEQ ID NO: 32005 - RNA, 78 nt, Homo sapiens
acgagacccgaccagcgggggcgcggcggccgcgcagccacccaagaagaggcggccacccacgagccgacggcaaac

SEQ ID NO: 32006 - RNA, 81 nt, Homo sapiens
ccgggcccgaccgcaggagggagaccacagcaagacgccaggacccacggaagccagaaaggaaggggaacagggaagaaa

SEQ ID NO: 32007 - RNA, 62 nt, Homo sapiens
aggcagcagggcagccacgaggggaccaaaccccacacccagggcacgcagaaaagaagagc

SEQ ID NO: 32008 - RNA, 77 nt, Homo sapiens
ggcgcgcagcgggggccgggggccgaccggcaggcgccggaccgaaggcgcgaccacgacgagaagcgggggccgca

SEQ ID NO: 32009 - RNA, 88 nt, Homo sapiens
aagagacaggccacggccgcgagcagcaagacaagagcccgggagcccccccggagccggcccaggagcagcagggaggcgggaacgc

SEQ ID NO: 32010 - RNA, 59 nt, Homo sapiens
accaagccgagccaaccgcgaaaggagaagacggaccagccagagagagacacggggga

SEQ ID NO: 32011 - RNA, 65 nt, Homo sapiens
aacagaagcacgcgaccgaaagaagaaagcaccacggaggacgacaccgggagcccacggagaac

SEQ ID NO: 32012 - RNA, 77 nt, Homo sapiens
cgcagagggacccggaaacgcccagaggggaggccacaccgcaaaaccccggacaagaaagccagagaaacgacacc

SEQ ID NO: 32013 - RNA, 84 nt, Homo sapiens
caggcgagggcgccgcagcccaggagcggcggaggccaaccagcgcccgccccgcgcagaccgcacccaccagaaccgggcagg

SEQ ID NO: 32014 - RNA, 80 nt, Homo sapiens
ccccccgcccggaggggagaggaggacggagccgagaaggagaacacccgccgcagcagaaccccccgcgggagccggaa

SEQ ID NO: 32015 - RNA, 77 nt, Homo sapiens
aagaaaacgggggcgccaccgggccgcgggggcagaaagcgcaacccaggcccaagaaacagacagcagcggaggca

SEQ ID NO: 32016 - RNA, 78 nt, Homo sapiens
agggggggcgagccgaaaacgcgggaaagcgcacccaacggcagaggcccaaggcaccggaaggaagaaagagccccc

SEQ ID NO: 32017 - RNA, 85 nt, Homo sapiens
ggcagcagcgcgacccgagccggcgcccgggccggccaggacgacccgcaaggcagccgcggagcccgacacaggcccaccggga

SEQ ID NO: 32018 - RNA, 67 nt, Homo sapiens
ggccggaacacccggcgaaccagaggaaaggaaggaaaagcaaaaaccccagccggaacacaacaag

SEQ ID NO: 32019 - RNA, 78 nt, Homo sapiens
agaccccacggagcgggcgacgagcgacccgggagacacgacgggggcgaggaagagacaggcgggggagaagaagca

SEQ ID NO: 32020 - RNA, 75 nt, Homo sapiens
gcagagcaagcgcggaggcacaggaaacaccagaaaggacccacccaccccagcgaacaacacaccggccaagaa

SEQ ID NO: 32021 - RNA, 84 nt, Homo sapiens
cgaggggagacggccggaagccagaggcgggcccgagaaagacacgcaccgcagcgcaccaccaccccagagcagcggccacgc

SEQ ID NO: 32022 - RNA, 65 nt, Homo sapiens
gagaaggaagaccccaagaagcgcaccgggcgagccccgcggccagcgccccaccgggagccagc

SEQ ID NO: 32023 - RNA, 68 nt, Homo sapiens
gcaccaaaagcggaacccaagacccagaaaacacccgacacgaagaccagaaccaaaaccagacaggc

SEQ ID NO: 32024 - RNA, 80 nt, Homo sapiens
cacgccagccaccacgcggcgcacaacgcaggaacaccgcacgcgcggaggagcggcggaggcagacaaaccagaaagga

SEQ ID NO: 32025 - RNA, 74 nt, Homo sapiens
cagacccaccaagccaccacaggcgcagcgcaccgccccaccacccagggaggccacccacccgagcggggccg

SEQ ID NO: 32026 - RNA, 58 nt, Homo sapiens
aacagggaaagacccagggcaacggacgcaggccgccagacccacccggacccccaga

SEQ ID NO: 32027 - RNA, 72 nt, Homo sapiens
ccaagacgcggaagaggagaccggaaaccgagagaaacgaagacgaagaaacagccgcacacagaagaaaac

SEQ ID NO: 32028 - RNA, 74 nt, Homo sapiens
aaagcccaagagaggcaggcagcgacagccacacaacggacagagacaaaagacagaaagaacacaaggcagca

SEQ ID NO: 32029 - RNA, 81 nt, Homo sapiens
cccagaagaagcaggggccacaggggcacgggagaggggagagacaggaggaggaaacgcggaggccgcagccggggcgcc

SEQ ID NO: 32030 - RNA, 87 nt, Homo sapiens
cgcgcgcagggccgcagcgggagcggacggcgagcgcgagcggcgcgagaaaacggcccgccacgggccccgcagccgcgcccgagc

SEQ ID NO: 32031 - RNA, 81 nt, Homo sapiens
gacccccaacaccagcaccgcagaggcaaggggccaccaggaggccagggggcgccagacacacaacaacaggaggcaaac

SEQ ID NO: 32032 - RNA, 79 nt, Homo sapiens
caccgccaggccacgccgccgcagcgcccccgcagcaaaacacccccagacacaggcgggaacaagggccgaggcagca

SEQ ID NO: 32033 - RNA, 66 nt, Homo sapiens
acccgcccagcaagcaggacacgaccaacaagggggacgcggaagagacagcagaacaagagccag

SEQ ID NO: 32034 - RNA, 86 nt, Homo sapiens
caccgaggccccccggcaccgcgccgcgccggggcgcccggcacccgcggggcaggaggcagcagagaaagccacagaacacgcgg

SEQ ID NO: 32035 - RNA, 49 nt, Homo sapiens
gcaggaacagggagacaacacggagaacgacccaacccaacacgaggca

SEQ ID NO: 32036 - RNA, 84 nt, Homo sapiens
gaacaacaccaccacccaagggaacagaaaaccaggcaacaagcaaagggcacaaggccaagacggccaagggagccacagggc

SEQ ID NO: 32037 - RNA, 55 nt, Homo sapiens
acaccaagaccgaccccgcacagcaaccaacccgcagaagaccagagagagaacc

SEQ ID NO: 32038 - RNA, 76 nt, Homo sapiens
gccagcgcccgagacaacacaccaaggcacgaccgcggcagcaacaccgccagggcaggcgaggagaaagcgcaga

SEQ ID NO: 32039 - RNA, 94 nt, Homo sapiens
cgccgagcgcggcggggccccgcggcgccaggcgcacagccagcggcgccccgaacggagcccagaaaccaggcgccaggaacagcgggaccca

SEQ ID NO: 32040 - RNA, 84 nt, Homo sapiens
caaccgcgcccaaaagaaaaacaagaccagcaacaagaggcagaacaacaacggacgaagaggggcacagggccagagcagagg

SEQ ID NO: 32041 - RNA, 71 nt, Homo sapiens
gccagaggagagagagagacaacagcaggagagccgccgccccagccaccgggccgccagcgagaggaagg

SEQ ID NO: 32042 - RNA, 36 nt, Homo sapiens
ccagggaagagaaaaaaagggcacgcccaacaggac

SEQ ID NO: 32043 - RNA, 58 nt, Homo sapiens
aaacccaccggggcccgaaaggcagcggaaacggaggccaaggcaaaagacgaaaacc

SEQ ID NO: 32044 - RNA, 38 nt, Homo sapiens
cggaccgcagaaacgagggcggaaaacaccccaaaagc

SEQ ID NO: 32045 - RNA, 82 nt, Homo sapiens
ccgcgcacggcccccggaccgcggccgcccggggacgcagaccgaggccaaaagaaaggaagaaaacccccaaaaagccaaa

SEQ ID NO: 32046 - RNA, 77 nt, Homo sapiens
ggacgcaccagccaacgcgcggggccgccgccagcgcccgagcggaagccgcagaaggaccggccagaagcaagccg

SEQ ID NO: 32047 - RNA, 77 nt, Homo sapiens
ggcaccgccccccgccaaggcgacccccaccgagacgaagcgggcggcgaaggcgaccaacgacgaagagcagagca

SEQ ID NO: 32048 - RNA, 76 nt, Homo sapiens
gcgaggagcccagccagaccagaccgggcacagcaaagcgaggaccagaccagccgcaagaagcaagcaagaaaaa

SEQ ID NO: 32049 - RNA, 56 nt, Homo sapiens
cagaggccaggcagacccagccaaaccggagcgagaagaagccggaacaggaaaca

SEQ ID NO: 32050 - RNA, 80 nt, Homo sapiens
gcgccccgcagcccccaagcaggcccccagaagccgccgaacgccgcacccccggggccgaggagcccccacacagccga

SEQ ID NO: 32051 - RNA, 74 nt, Homo sapiens
acgaagacgaagagccaccaggcccgggaaggggaaccgaaggaaagagacggcccagaaggacggaacagcca

SEQ ID NO: 32052 - RNA, 77 nt, Homo sapiens
acgcagcggccccaggccgagcgggcggagaccccgccaagcagagggaacaggcacgccccacccgccagccgagc

SEQ ID NO: 32053 - RNA, 63 nt, Homo sapiens
ccgagaaggacgcaagagaggggcaagcgacaaggaaaagaagggagaaaaagagccggacca

SEQ ID NO: 32054 - RNA, 82 nt, Homo sapiens
cccaggcgggcagcaaccccgcaccccaacgagccaggagagcaagagaaggagaacaccgaaggagaagccaagccaggcc

SEQ ID NO: 32055 - RNA, 83 nt, Homo sapiens
gggagagcccgggccacccccccaggcaagaagaagagccgaacgagacaaggcgaaggcagcggcgggagaccggagaaccg

SEQ ID NO: 32056 - RNA, 41 nt, Homo sapiens
gagacggcggcagcagcggcacagaaacgggagcaggagaa

SEQ ID NO: 32057 - RNA, 70 nt, Homo sapiens
ggaagagcagagagaaggcagggcaaaccagaaagacgagcgcgacaaggaccagagccaggaaacacag

SEQ ID NO: 32058 - RNA, 87 nt, Homo sapiens
ggcggaggcccccgggcaagaggcgcaaacaagccaacccaggaggaaaaacggagaagacagaaccaccaaagcgacagaagaaag

SEQ ID NO: 32059 - RNA, 82 nt, Homo sapiens
cgccccgggcccacgacccagcggccccggaaaagacagagcggagaagcggaggagaccaaggaggccaccaccacagaag

SEQ ID NO: 32060 - RNA, 57 nt, Homo sapiens
agcacgagaagaacgagagcgccgccaggaggaagaaagcgggcaaaaggccgccga

SEQ ID NO: 32061 - RNA, 76 nt, Homo sapiens
aagaaacagcaaacaagaggaagcgcaaggaagaagagacgccgcgcggcagacaaggcccggcaggcaaagcggg

SEQ ID NO: 32062 - RNA, 80 nt, Homo sapiens
gaagaagccgcggaccccgcgacacagaccagcgcgagagaacaccaaggagccccaaaccaaagagagccaagcacagc

SEQ ID NO: 32063 - RNA, 82 nt, Homo sapiens
aacggccaaccggcaagaccagacgggaacgggagacaagcgcagcgaggcccagcaggccaaggccccaagggcacaggac

SEQ ID NO: 32064 - RNA, 39 nt, Homo sapiens
gacgccccccaggagacaccgagggccgcaggcccaggc

SEQ ID NO: 32065 - RNA, 72 nt, Homo sapiens
ggaaagcaaccaaaacaagggaccagcggcaggagggagaaaagcaaagggaacacaagccgagaacagccg

SEQ ID NO: 32066 - RNA, 84 nt, Homo sapiens
cggggacgcggccggcgccgggaccggaggggacgcggggccgaagcagcaggacaccgaccagggaaacccagacgacaagga

SEQ ID NO: 32067 - RNA, 66 nt, Homo sapiens
acgggcgaagggagagggcccaggacgaggcgcagccgagccaaagaaaaagccggccagggcgga

SEQ ID NO: 32068 - RNA, 70 nt, Homo sapiens
cgccacggcaccagcagacaggcacagccaagagcccccgagacgccgccccacacgacaagacggaaaa

SEQ ID NO: 32069 - RNA, 51 nt, Homo sapiens
gagaaaaaaaacagccaagcaggcgcccgcagacgcagaagaccgcagagc

SEQ ID NO: 32070 - RNA, 79 nt, Homo sapiens
ccggcccgagcgcaccggagggacggcacagggaggccagccggagaagcgagcagcggaacaaagcaaagcagcggca

SEQ ID NO: 32071 - RNA, 56 nt, Homo sapiens
cccacaggcccccaccaggccgcggcagacaagccgagaccaccaggagcagagcg

SEQ ID NO: 32072 - RNA, 50 nt, Homo sapiens
acacggggggcaccaggaaaacaacggaaagaggaggaagagagagacac

SEQ ID NO: 32073 - RNA, 76 nt, Homo sapiens
caggcggaggcaccaccaaggaacgccaagagccaccaacaggaagagacaacgacgaaagacccacagaagcgcg

SEQ ID NO: 32074 - RNA, 58 nt, Homo sapiens
cagccgagcaggcagcacaagggagcaacaaaaaaacgggaaagccaccgccaccaac

SEQ ID NO: 32075 - RNA, 74 nt, Homo sapiens
caagaagcccagcgcagcaagaccgccagccagagaacgcgagaccggggcgaaacaagggaagagcgagacaa

SEQ ID NO: 32076 - RNA, 82 nt, Homo sapiens
cgcacagggggcacaggaaacggccacagaagaccggcacagcagagggcgggcacacacggggaagcaagaagcacagcac

SEQ ID NO: 32077 - RNA, 89 nt, Homo sapiens
cgggcccggaggccgagccccggcggcgcccgggcccacgcggaacgacggggcgagcagaggaaaggcccgagcccacccgagcaggg

SEQ ID NO: 32078 - RNA, 72 nt, Homo sapiens
cccccgcgggggacgggcaccgggaacagccgcgcgacgggggaaaaaagccaggacaaggagacaaaacaa

SEQ ID NO: 32079 - RNA, 66 nt, Homo sapiens
cggagccacgccccacgaccgccagcccaaacacagaacaggaaggaggcgcagccaaaagaaaca

SEQ ID NO: 32080 - RNA, 76 nt, Homo sapiens
gccaggaacaagggagcccgccagggcgacccaccaacaggcaacccagacaaagaagagcagccgcagaaaaaaa

SEQ ID NO: 32081 - RNA, 76 nt, Homo sapiens
ggcagacgacgacagaacccgacaagaagcacgaacagcaggccaaagaccagaggcgcgcgcagaaccaacaaaa

SEQ ID NO: 32082 - RNA, 70 nt, Homo sapiens
gagaagcgcccgccgaaaaagagaaggaacgggccagcggggcgagcagagcgcgcgaagggcgcacaca

SEQ ID NO: 32083 - RNA, 86 nt, Homo sapiens
cgccgccccgccggccccaccgccgcacgccgccggggcgcggccgcccgagagaacacaaggaacgaaaggaagggaagaagcag

SEQ ID NO: 32084 - RNA, 64 nt, Homo sapiens
cgcagggcgcccccgggggggaccggagacgccggcaaaggaacgacggggcagaaacacggcc

SEQ ID NO: 32085 - RNA, 77 nt, Homo sapiens
gaagcgaagccgaaaaaggcagcagcgaaggacagccagacaagaccccaacgaagggccagaaaagggagaggaca

SEQ ID NO: 32086 - RNA, 69 nt, Homo sapiens
gccacgccgcgccacagaccccagccagacagcacaaggggggggccgggcgggccggaccggacgcaa

SEQ ID NO: 32087 - RNA, 71 nt, Homo sapiens
gaaaccagagggccccagagcaaaggagacggccccacggcaggaaggacaacgagagacaacaagagcgc

SEQ ID NO: 32088 - RNA, 64 nt, Homo sapiens
cgagcggcgcgggcccagaccgccgggcaagcaccagagaggacgccaaacgaggcagcaacac

SEQ ID NO: 32089 - RNA, 84 nt, Homo sapiens
aaacagaggcaccgcccagccccggggcggaaagaagccaaggccaaggagcgggcggcagcgcagcggaggccgaggagcaga

SEQ ID NO: 32090 - RNA, 57 nt, Homo sapiens
gaccagcaggaacgggaaagggagcagcaccggccacacccacagcacgaccggaac

SEQ ID NO: 32091 - RNA, 85 nt, Homo sapiens
ccggaggcaggaccggggccaaaagccaagaaacgaaggaggcccaaccacaaaaggagccgacggaacccagacggagaacaaa

SEQ ID NO: 32092 - RNA, 63 nt, Homo sapiens
gcggggccagccccacaacccgccagcggcacaggcagaggaagcggcgcgagaacaggaagc

SEQ ID NO: 32093 - RNA, 84 nt, Homo sapiens
ggcggcggcaccccgggcgcgacaagcagaccggaagaccgacggaagaccacaccccgagggagcccaggacaccacgagaag

SEQ ID NO: 32094 - RNA, 60 nt, Homo sapiens
cggaaaaagaggggaacggaagaacggacccaagaacagcaaaaccggaaagcccgaacc

SEQ ID NO: 32095 - RNA, 68 nt, Homo sapiens
acaacaccacggggccccagagaagaaccaacccagcagagcaacgagagcaaaacaacaagaggaga

SEQ ID NO: 32096 - RNA, 74 nt, Homo sapiens
accgagcaccgacagccccggaacgccgaaagagcaagcaacaaccacgagagaccaagcacgaggcgccgaac

SEQ ID NO: 32097 - RNA, 79 nt, Homo sapiens
caggcaggaaaacgggagaacacgacaccggcgaggaacggcagcaccgccccggagccacagcaaagccacccaaggc

SEQ ID NO: 32098 - RNA, 73 nt, Homo sapiens
gccggcccacacacgggcgagcgacagcggcggaaggccaccagaggcgagggggcaggggggcggcgcgccc

SEQ ID NO: 32099 - RNA, 75 nt, Homo sapiens
acccagaagcacaagaaggacccacccaggagagaccgaaggaaccgcccgaaaaagacgacggaccaaccccca

SEQ ID NO: 32100 - RNA, 122 nt, Homo sapiens
gcagggaccaagaaccagccggggaccagacagacaaagccacaaccagggcaacagggaggaagagcaagcaggcccgagggacaaagaaggcagaccagcggagaacggagagcagggcg

SEQ ID NO: 32101 - RNA, 87 nt, Homo sapiens
gggaaacacacacacaaaaaacccacacaggacgcggacaagggcggcaggcggaggcccaggcaaccaacccaggagaaggaagac

SEQ ID NO: 32102 - RNA, 87 nt, Homo sapiens
cggcccggagcaacgagcgcagcgccgagagaccgaaaggcccaaccgacagccccacccagagcagccacacgggaaagaggagcg

SEQ ID NO: 32103 - RNA, 78 nt, Homo sapiens
aaaaccgggcaaagccaagacaaaaccaaccccccccaaaagggaagcggacagcaagacaggccccggaacagcaga

SEQ ID NO: 32104 - RNA, 75 nt, Homo sapiens
aaaaaccccggcgacaaagaaagaaacaagggacgaacaaaacaccgaggaaggacacacacaacacgaaaccaa

SEQ ID NO: 32105 - RNA, 74 nt, Homo sapiens
ggggaccgaccgcaacagaacggacccgaacagaggggaaaaagcgagaaggacagcaaaacgaaaagaaacaa

SEQ ID NO: 32106 - RNA, 90 nt, Homo sapiens
cgggagcagggcagcacccccagccgcagcccccgcgcagaagaggcggccacccacgagccgacggcaaacgccagggagccaccaagg

SEQ ID NO: 32107 - RNA, 64 nt, Homo sapiens
cgccggccacagcgaggcggcggccagcagacccagaacagagccaccgaagaagcagggcggg

SEQ ID NO: 32108 - RNA, 81 nt, Homo sapiens
ccagaacccaggcccacggaggaagagccgggcagcccggagcgggccaggacaaggcacgaggcgcggcgaccaccacag

SEQ ID NO: 32109 - RNA, 72 nt, Homo sapiens
gaacgaacaggaacaaagccagacggcaaaccgccaaaagcccgaggaccagacgggcgcaggaggggagcc

SEQ ID NO: 32110 - RNA, 76 nt, Homo sapiens
gagagagcgagcgagggggggcgcgccggaaaccggagcgcgcagcaggggaaaaccagaaccgaaaacccagacc

SEQ ID NO: 32111 - RNA, 71 nt, Homo sapiens
accgggggagcggccagccacgacccaggccaaccccggggcacgcgcccacaggccagccggagccaacc

SEQ ID NO: 32112 - RNA, 77 nt, Homo sapiens
ggacggcgagcgggcaccgacacgacgcgggagacccagggaagcagaacgaacccaaggcaaaggaagagagaaac

SEQ ID NO: 32113 - RNA, 41 nt, Homo sapiens
gacaagcaccccgaagcgccgacgcccggcaacgcagaaaa

SEQ ID NO: 32114 - RNA, 75 nt, Homo sapiens
acagaccagaggggggacggggaggaacacccaggacggcaaaagccgaccccaagaggcacaggcggaagagga

SEQ ID NO: 32115 - RNA, 40 nt, Homo sapiens
gaccagcagcgcccacccaggcgagaaagaaccccagaag

SEQ ID NO: 32116 - RNA, 62 nt, Homo sapiens
cccgaccccacggcggaaggccagagagcacaagaagaaggacacacccaggggacacaaca

SEQ ID NO: 32117 - RNA, 68 nt, Homo sapiens
cgggacaggagggcaggaagagcgcagcggggacaaggacaaggcacgaggcgcggcgaccaccacag

SEQ ID NO: 32118 - RNA, 80 nt, Homo sapiens
gcagccacgggcaggcccgccgcgcggggggccacggcgccgccggcgcggccggcacacgagacaaaacaccggggccc

SEQ ID NO: 32119 - RNA, 80 nt, Homo sapiens
acccgggagcccaagacaacgaccccacagaaacaagccaccaggagaagcaaaagaggagacaaaaacaggaagagaag

SEQ ID NO: 32120 - RNA, 73 nt, Homo sapiens
cgacacaacagagggaccacgggacaccgcggggcacgggcaccagccacaggcaaaaaggaagccccagaga

SEQ ID NO: 32121 - RNA, 79 nt, Homo sapiens
accagagagcgcggcgggagcgaggccgccgcgcaagaacaaacggggacagcgccgaccggaacagggaccacggaag

SEQ ID NO: 32122 - RNA, 79 nt, Homo sapiens
gggacgcgcaaccagacaagacgccgaaacacgccccacgaaaggagaaccggggcaagagacggcagacaaacacagc

SEQ ID NO: 32123 - RNA, 77 nt, Homo sapiens
gacccacccggcggaggaacggggcccgcccgcggcccccgcgcggaggacaccagggcggagaacggaaaagcacc

SEQ ID NO: 32124 - RNA, 86 nt, Homo sapiens
aaccccggaggccggaggaacgggcccgcaagcgcgccgacagaaagcccgaagaagagccaaccagcccggagccaagacaacgc

SEQ ID NO: 32125 - RNA, 73 nt, Homo sapiens
caagaagaccacagagggacccggacaaccagaggcagccagcagggggaggaaccaagcgaaaagacacgca

SEQ ID NO: 32126 - RNA, 70 nt, Homo sapiens
gggagagcaagaccacagcgcgcggcccccacaccacacagagagcgacgagacgacgggaccgaaggac

SEQ ID NO: 32127 - RNA, 76 nt, Homo sapiens
gcggagagcccccgccaagccagagaaaagcacgacacaaggcaccgggagcccaccagagaccacggagcggggg

SEQ ID NO: 32128 - RNA, 62 nt, Homo sapiens
agccagaggcacagcaggagagaagcgcagcggcaccagcgcggcaccaaacaccgccagaa

SEQ ID NO: 32129 - RNA, 79 nt, Homo sapiens
cgaggaggaaggaaggaagggggagagccggcagcagaagacagagaagggcgccccggaggaacacaaaggaaaacca

SEQ ID NO: 32130 - RNA, 63 nt, Homo sapiens
aacgccgcggacgaccgcacgggcagggcggcgacggcggcgcgaggaccgaccgggcccgcg

SEQ ID NO: 32131 - RNA, 37 nt, Homo sapiens
cgcacccacaacagccaggcaagaacggaagcacggg

SEQ ID NO: 32132 - RNA, 72 nt, Homo sapiens
ccaagccgcaaaaccagcaaagaagaaaggaaaagaaggcacggagaagaagcacagccccccacccggcgc

SEQ ID NO: 32133 - RNA, 64 nt, Homo sapiens
gacaaaagggccaaagaagggagagaggaagacgcaaacacaaggaaggaaccaaccgaggcag

SEQ ID NO: 32134 - RNA, 82 nt, Homo sapiens
cgagcccagccgaaggagaaggggggcacagggcaacaacacaggcggaggcggcggaaggcagaggagaacacgccccgcg

SEQ ID NO: 32135 - RNA, 77 nt, Homo sapiens
gcggggagaagaggagcccccccccaggcacagcgccaaggaaagaaaacccagaagacacgagaaaaacccaacgg

SEQ ID NO: 32136 - RNA, 78 nt, Homo sapiens
gcgcacggcgacgccccaggggaaaacccccgggaccagaacaacaacaaggcggaaacagacgaaaccgaccaacca

SEQ ID NO: 32137 - RNA, 80 nt, Homo sapiens
agggacgaggcccacaggccgccggcccccgggccaccgggaccccgggacagccccaagccggcaggagaagcggcgcc

SEQ ID NO: 32138 - RNA, 70 nt, Homo sapiens
cccacgcggccgaccaccggggacagagaggggaccacaaacaggcccaccggagcagcagcccgacccg

SEQ ID NO: 32139 - RNA, 74 nt, Homo sapiens
ccaagcgacccggaagggccgccaacccgagcccaaaaaaacggccagacggagggagagcgccggaaacagca

SEQ ID NO: 32140 - RNA, 69 nt, Homo sapiens
cacgacaaccggagagcccagccacagcggcccaacgccacaacagaagcagaaagggccgccaaaaca

SEQ ID NO: 32141 - RNA, 76 nt, Homo sapiens
agagcagcggaaaagaccagcacagggcggggcgcggggggcgcgagcggacaccccgaccaccgaccggccaggc

SEQ ID NO: 32142 - RNA, 59 nt, Homo sapiens
ggacccagcccaggcggcgcggacggggcggccggagcggagagcgcgcccgcccagag

SEQ ID NO: 32143 - RNA, 58 nt, Homo sapiens
gagaaaagcacaacaagaccaaccaccggagccagacacacaggacagagagcacaca

SEQ ID NO: 32144 - RNA, 68 nt, Homo sapiens
agagggggaaaacgccggccgaacagcccacgccaagaagaggccccaggaccggcgaggcccccccc

SEQ ID NO: 32145 - RNA, 74 nt, Homo sapiens
cacaaaacagcaccccggaggagccgggcggaggcacgggccaccagccacgcaaccgaccccgagcaaggacg

SEQ ID NO: 32146 - RNA, 83 nt, Homo sapiens
gcccccaccccagaagaggaggcaaaggggcaaggacccaacccaggagaaaaagggaaccaagaccaggacaaagaagaccc

SEQ ID NO: 32147 - RNA, 81 nt, Homo sapiens
cggaggacaacaccaagcaaggggacaagggccgccgacacgcccacgacagcagcgccagcacgagaaggagaacgaaag

SEQ ID NO: 32148 - RNA, 75 nt, Homo sapiens
gggaccgcccggacacaagaaaaagagcgaaaaagacacgccgggaacacagaagagaacccgaacacagcagga

SEQ ID NO: 32149 - RNA, 50 nt, Homo sapiens
gaaggaccaagaaccaggggcggaacaccaaccaggaccacccagcaagc

SEQ ID NO: 32150 - RNA, 84 nt, Homo sapiens
gcgagacacccccgagaaggacagccagggcccggagacagccaacgagagacccaagaggagccaccaggggaaccccccgga

SEQ ID NO: 32151 - RNA, 64 nt, Homo sapiens
ggaaagccaccacgaagaagacaggaaggggagagcaagggacgacgggggacagaagaggaaa

SEQ ID NO: 32152 - RNA, 84 nt, Homo sapiens
ggaaaccgaggcgcaccagacgaaagcaaccaacgcagagcaccagaagcaaacgggagcacagagaaccagccaagacgaaag

SEQ ID NO: 32153 - RNA, 86 nt, Homo sapiens
cccgacccggccgccccgagcggagccggagaacgaagcgcgcggcaggcgcgcgccgccccaggccgcaagacccagcgcccaac

SEQ ID NO: 32154 - RNA, 80 nt, Homo sapiens
aaggccgggacccggccccggcccacaggggggggcaaacccgagagaacggggcagcagaaggaaagggcaaaaaaaac

SEQ ID NO: 32155 - RNA, 74 nt, Homo sapiens
gggagcccgcgcccgccgcgggagagaggacccccccccccccccaaggccaacaaaggcagcaacacagacag

SEQ ID NO: 32156 - RNA, 68 nt, Homo sapiens
cgagcgacacagaaccaccccaacagggagaaaccgaaacgaacccagccagaaacacaaaacgaaga

SEQ ID NO: 32157 - RNA, 73 nt, Homo sapiens
aaagaagagaaagaggagcccggaagcccaaaggccccggaccccggaaccccgaccccgccccggcagagca

SEQ ID NO: 32158 - RNA, 74 nt, Homo sapiens
gcggaaaacgggccaaagcaggaaacgcccagaagagaagagaacagccacacaccggggcaaaccagacaaca

SEQ ID NO: 32159 - RNA, 78 nt, Homo sapiens
ggacgaacaaagccagccagccgccagggagaaaagacgaggaagcccaaaaaccgcaagaaaggcacagaagaagcc

SEQ ID NO: 32160 - RNA, 66 nt, Homo sapiens
acccgaaaagcgccaaggaaaaggacgagaacgccgcgacagaaaagaaaacaggccccccaaggc

SEQ ID NO: 32161 - RNA, 72 nt, Homo sapiens
ggggcccgccccacaacaccaagggggggaagagcggcaggcgaagagaaaagcaggcggcaggacccagcc

SEQ ID NO: 32162 - RNA, 80 nt, Homo sapiens
cggcaaaagcacaaggaccgcggacagagacaacaccgagagagaagcaacagcagaagcgggggaccccgagaacgcag

SEQ ID NO: 32163 - RNA, 81 nt, Homo sapiens
acggagagaaggcggcgcgggagggaaggcgcgggaccggggcagagccagggcagccaaggcccccacacacacacccgc

SEQ ID NO: 32164 - RNA, 73 nt, Homo sapiens
ccgacgccaggcagcgcccccaaacgacgagaagaggacagacggaggagaaggaggaagaacaacacaggga

SEQ ID NO: 32165 - RNA, 50 nt, Homo sapiens
accagaagccgcacgcacgcaacccccaggcaccacagaaaagcaaggcg

SEQ ID NO: 32166 - RNA, 102 nt, Homo sapiens
aggagaaagaacccgaaaaagaaacagagcgacggaagaagaacgagccaggagaggggaaaacgacccccaggaaaaagaaaaggaccagaaacacaaaaa

SEQ ID NO: 32167 - RNA, 83 nt, Homo sapiens
gagccgagaggcggaagcccggcggggggcaggcccaggagcacaacagccacaggaagagggaacaaagaaggaaacaggag

SEQ ID NO: 32168 - RNA, 76 nt, Homo sapiens
ggagggccacaaacaaccggcaaagcgagagaaagaaagcaacacagaccagcggaagacccccggcccagcggac

SEQ ID NO: 32169 - RNA, 83 nt, Homo sapiens
ccaagaagagagaaacaggcaaaacaaccagaaggggagaaggcaggcaccacaaaaaggacagaggccccaaagccggggaa

SEQ ID NO: 32170 - RNA, 74 nt, Homo sapiens
ggcgcccccggagccgccccggaggagaagaaagccaaggacacgcaggacgaagaaggaggagagcccagaag

SEQ ID NO: 32171 - RNA, 78 nt, Homo sapiens
ccgccaccgcaggcgaggacggcggaccccgcggcgggaggagccgccccgagacgacagacacccgaacgggggaca

SEQ ID NO: 32172 - RNA, 76 nt, Homo sapiens
caagcaggaccacccaccagccaccaggccccaagcagcgcacccggaacccaccgagcgccccacccaaacaagc

SEQ ID NO: 32173 - RNA, 68 nt, Homo sapiens
caccggacggcaagcacaacccgagcggccagagagccagagcaccagcaaaggaaaaaaaggcggac

SEQ ID NO: 32174 - RNA, 82 nt, Homo sapiens
aacacagcaagcacaagggagcaaaggggccagggaggaagccagcccgagcaggcccaggggaggaggggcaaccacagac

SEQ ID NO: 32175 - RNA, 82 nt, Homo sapiens
ccagggacccggcaggccgcccccggcaaggaccaggacaaaaccccagaggaacggacaaagaaaccagaagaaggcaaac

SEQ ID NO: 32176 - RNA, 81 nt, Homo sapiens
caggacacaggcgggaggacagcggagaaaaaggggaccaggaccccagcacagggggggccacccccagaggaggcagaa

SEQ ID NO: 32177 - RNA, 56 nt, Homo sapiens
aagaccacagcgcgcggcccccacaccacacagagagcgagacagcagaccacagc

SEQ ID NO: 32178 - RNA, 75 nt, Homo sapiens
gacacggaagaccagcaaggaggaagagagcggcccaagagcgagacgacgggaccgaaggaccccgccagagac

SEQ ID NO: 32179 - RNA, 68 nt, Homo sapiens
ggaccccgaccaggaggacaggacaacagaaaaacacacacagggggaagaacgagaaaaacaaggga

SEQ ID NO: 32180 - RNA, 66 nt, Homo sapiens
cgccacgagagcaaccgacacagaagcacggagcccaagggccggcccagggagaacgcaaaacca

SEQ ID NO: 32181 - RNA, 78 nt, Homo sapiens
acaggaaaaaaaaggaggcgacaagcaacaacaacaagcgaaaggccaaggcagagaagccccagcccgacggacgcc

SEQ ID NO: 32182 - RNA, 78 nt, Homo sapiens
accaggaaacccgaacccaaaacaggggcacagacgacagaagccaagagggcgcaaagaggaaaagaagagaaaagc

SEQ ID NO: 32183 - RNA, 69 nt, Homo sapiens
gaaaagggggaaggaaacccgcgaaaccccaccacgcggcaggggccgccgaggaaaaagcaacaagaa

SEQ ID NO: 32184 - RNA, 74 nt, Homo sapiens
caagacgcccgacgcgaagaaaaaaccagggcgaaggacgaggaccgaaaaagggcagaggacgaccagagcgg

SEQ ID NO: 32185 - RNA, 71 nt, Homo sapiens
aagaacccgccaaaacacagcgaggagacagaggaaagaaagaaaccggggaagcccaccggcgggaagcg

SEQ ID NO: 32186 - RNA, 55 nt, Homo sapiens
cggagaagagcacgcggccaaaaagaggccacggggccccgaacagccggacccc

SEQ ID NO: 32187 - RNA, 80 nt, Homo sapiens
cagcccggaaagagcaggcccggcgggcaagaccagcgaaagaggccgcaacggcaggagagcaggaaaaaaaacaacca

SEQ ID NO: 32188 - RNA, 59 nt, Homo sapiens
agccccagccggccgagacccacccaacaggggcacccaggacgcagacgaacccaaga

SEQ ID NO: 32189 - RNA, 76 nt, Homo sapiens
acaaccacccggcaacaaacaccggcccaggaggagggcccggggaacgagggggaaaagcaccacggagggacgc

SEQ ID NO: 32190 - RNA, 77 nt, Homo sapiens
gaggccacagaaaggaaccaggccccagaagaggcccagggaccaagaggggcgacccgcagcccggccaccaccgc

SEQ ID NO: 32191 - RNA, 62 nt, Homo sapiens
ccggcgccagcggagagcagccgcggagcgacggagagccagagcacacagccaccagggac

SEQ ID NO: 32192 - RNA, 72 nt, Homo sapiens
cgcaccgcgcaccaaacccagcgacacccccaagaagccaccccaaaaaagaccggcggaacccacgaggag

SEQ ID NO: 32193 - RNA, 100 nt, Homo sapiens
ggagagcccaccgaaggacgggccacgggcccgcgacgcgcagccacgcaggagaccagagaaggaggggcaggagaagccaagagggggagggcagaga

SEQ ID NO: 32194 - RNA, 77 nt, Homo sapiens
gaaggcaccaaggaggccaaagaaagaagagacacaaaaggccccagaggcaacagggaagaagcacaggccgagac

SEQ ID NO: 32195 - RNA, 68 nt, Homo sapiens
gcaagggaaggacagagcaaaaaggcaccacggcgagaaggcaaaacggcaaacaagggagcgaaacc

SEQ ID NO: 32196 - RNA, 56 nt, Homo sapiens
gcgcaaggcgacaagggaggcagggagcccagaaagaagagaaaaagagagagaag

SEQ ID NO: 32197 - RNA, 71 nt, Homo sapiens
ccgaaaaaggccacaggagaggagaaaggggaaacaaaggaacagaagagacacacgcgcgaaggagaagg

SEQ ID NO: 32198 - RNA, 74 nt, Homo sapiens
agacccgggggcgagcacaaacggggcggggccggggaacacacagaaagacagaaccagcacagcaaaaaagg

SEQ ID NO: 32199 - RNA, 70 nt, Homo sapiens
ggccaagaaaaagaaaggggaggacgcagaggcggcacaaggaggaacaagccaagccagagggaccaaa

SEQ ID NO: 32200 - RNA, 75 nt, Homo sapiens
gcgcccgccccccagcaccgggcggacgaacggccaacagcccagcacaagacgcccaggaagcacaaagaagaa

SEQ ID NO: 32201 - RNA, 45 nt, Homo sapiens
gaagggaccgccaggccccggacacccagggaaacacacgaagga

SEQ ID NO: 32202 - RNA, 71 nt, Homo sapiens
gcacggacccccgggacaaaacaaaaccagccaagcagaggagaaaaagacagcaccccagagccagaacc

SEQ ID NO: 32203 - RNA, 55 nt, Homo sapiens
aaaagcacggagcaacaaggaccgacaagacggaaaccgggagggggaaaagcga

SEQ ID NO: 32204 - RNA, 79 nt, Homo sapiens
gaacagcaggaccaagcgccaccaggcacacacggcagcgcagagccaggccccggggccccagcggcaccagcggaga

SEQ ID NO: 32205 - RNA, 74 nt, Homo sapiens
aaggggcaccccccaggaggaagccaggggcaaaggagcagagaacgacaagccacacgaggacagcccgcaac

SEQ ID NO: 32206 - RNA, 84 nt, Homo sapiens
gccgcgacaccccggccagggggacggcgccacgcaccggacgacgcccggcgccagcacacgcaggcggagagagcagggacg

SEQ ID NO: 32207 - RNA, 88 nt, Homo sapiens
gcggccggcggaggcgagccggccgcgggcgcgaccggaggcaggagggagacagagggggcacccagaggccggggaccgccaaccc

SEQ ID NO: 32208 - RNA, 83 nt, Homo sapiens
ccgggccacggagaggagcagcccccggagacagcggcacagagggccgccagccggaaacacgggaaaaccccagacagacc

SEQ ID NO: 32209 - RNA, 73 nt, Homo sapiens
ggccacaaacgaagaaaaaggaaccccaaaggagcgacaaaaaccgccgggccgacaaccagcgggagaacga

SEQ ID NO: 32210 - RNA, 69 nt, Homo sapiens
gggggaggaggcaacgccgcgccgagaaagaacaagccgcccaaacagcagccgaacccggacaggagc

SEQ ID NO: 32211 - RNA, 68 nt, Homo sapiens
ccaccgagggcaggccgaaccaggcgcaagccacaggccagcgcacgcgcgagaagaagaaaagaaga

SEQ ID NO: 32212 - RNA, 71 nt, Homo sapiens
aggaccccacgaggagaagaaggaaagagaagacgaagagaccgaaggaccgacaagacggaaaccgggag

SEQ ID NO: 32213 - RNA, 82 nt, Homo sapiens
agcgaacccggcccccgacggccgcagaacgggaccagccgcggaccaaggacagggccaaaggagacaagcagaacaccgg

SEQ ID NO: 32214 - RNA, 67 nt, Homo sapiens
caaggggacaaagaacacagaccccaacaccggaaaaagcccacggggaaccagaagaggccaacca

SEQ ID NO: 32215 - RNA, 82 nt, Homo sapiens
gacaaagcagagcacagaagcgacaaagacaccccagagcgcccccagcagccccgcgccacggcggcgccccacagagacg

SEQ ID NO: 32216 - RNA, 66 nt, Homo sapiens
gacagcaacagccgccggcggaagggaaccagcggggaaacgaggccggggggagcgcaggagggg

SEQ ID NO: 32217 - RNA, 79 nt, Homo sapiens
cggccagaacccggccccaccgccccaccaccccaccagacggcgccccaagaccagggggggaagacaacccggagaa

SEQ ID NO: 32218 - RNA, 91 nt, Homo sapiens
cgagccaagagggcagccgccgaaggaacgcgacggcggcgcccgcagggcgcccgcgccggcagaggaggcgagcacccgccagggagag

SEQ ID NO: 32219 - RNA, 76 nt, Homo sapiens
cagagaaccgcccgcaacacaacagggcccaaaggagcgcaaaagcgccagaacagggcaggaggagaggaaaaaa

SEQ ID NO: 32220 - RNA, 72 nt, Homo sapiens
gaaaagaacccggagaccacacccgagaaaccccaacaaggccggccgcgccaaagaggcccccgacaggac

SEQ ID NO: 32221 - RNA, 84 nt, Homo sapiens
cggcgcgcagcccgggcggcgccgagaaggagggaggggaaacacaaagccggcacgcgcgcgaggcaagccaacgaaaaaggg

SEQ ID NO: 32222 - RNA, 73 nt, Homo sapiens
aggacacgacgacggaaggagcagaacaaacggccaagaagggccaccccacagacggggaaaacgaccccca

SEQ ID NO: 32223 - RNA, 77 nt, Homo sapiens
caagaccaaaagagaggcaccgcggaacacaagagcaggaaaccaaaccccccaaaggcccaggacaggacgaagcc

SEQ ID NO: 32224 - RNA, 52 nt, Homo sapiens
gcggcgccgccaacgcgcccccgagagccagaccaagaagaaccgccccagc

SEQ ID NO: 32225 - RNA, 70 nt, Homo sapiens
acagaacccaggagcacagcagcgaagcagcaggacaaaccggcgaccacacacggggacgacggggaag

SEQ ID NO: 32226 - RNA, 74 nt, Homo sapiens
gaggcccggccggcgaccaccgacaccggcccgagcgagacacgggaagcgcggaagaccagagccagagccga

SEQ ID NO: 32227 - RNA, 59 nt, Homo sapiens
cggaccaagcaaagaacacgcagcggccgaggcaggggaagagagcggccccggacacg

SEQ ID NO: 32228 - RNA, 46 nt, Homo sapiens
gcgggcgcgcgagcgcccggcccggccgcggcccccacggcgcacg

SEQ ID NO: 32229 - RNA, 69 nt, Homo sapiens
agacacaacagagcagaaggggagcacagaggaccggaagcagcaaaggggagacagagaagagaaaac

SEQ ID NO: 32230 - RNA, 85 nt, Homo sapiens
ccccggagcaccggggccaccaggagggagaacaacccccccagcagagacccgcagaaacaccacggcacagaacgcccggggg

SEQ ID NO: 32231 - RNA, 85 nt, Homo sapiens
cgcgaacgagcgacggcggaacccggggccgggacgcagcccggcggcagcagagagaagcccaaggcaaccccaaaccacaggg

SEQ ID NO: 32232 - RNA, 64 nt, Homo sapiens
cgccccaaggaaaccaggaggagcacgcaagcgagcaccagcagggaaggagaacagaacccag

SEQ ID NO: 32233 - RNA, 73 nt, Homo sapiens
gaagacaccggggacagacagggaagagagaaggccacgcccgaccccaagcaacaacggggcagggacaggc

SEQ ID NO: 32234 - RNA, 78 nt, Homo sapiens
cccaccaaagggggcgcgaccgagagagccaccagccagcacccggaaccgcacggacacgacagggcagggcacgga

SEQ ID NO: 32235 - RNA, 53 nt, Homo sapiens
ggagcagcagcacgccagccaggaagaagcggaggcacggcgcacacgcagac

SEQ ID NO: 32236 - RNA, 85 nt, Homo sapiens
gcgagggaagcagaaagagaaggaaggcagggaacgccgcagaaagaagaaggggcaagaacagccacagcagagacaaaaaacc

SEQ ID NO: 32237 - RNA, 76 nt, Homo sapiens
caaacgcgaagaagacagcaagcccacgagcggccccccgagacggaggagagggccggagaaagaagaaacaaag

SEQ ID NO: 32238 - RNA, 71 nt, Homo sapiens
aagaagcaaaagagaagaaacgcacagccccgaccagaccagacggggaggaagcacccgcgagaaagaag

SEQ ID NO: 32239 - RNA, 80 nt, Homo sapiens
ggagccgggcgcggccggggaccggagaaacgcgggcagccggcgaggggggagcccagcaggagcgggaaaaccgagcg

SEQ ID NO: 32240 - RNA, 61 nt, Homo sapiens
gaaggaccaagaaccaggcaccacccgcaacgggagagaaaccgaggggcaaaacaggagc

SEQ ID NO: 32241 - RNA, 80 nt, Homo sapiens
ggggcgccccacggacgaccaggacgaaggccggcggcaggaaaccggagcacgcccgaagagcgcgcgaacggaacgag

SEQ ID NO: 32242 - RNA, 62 nt, Homo sapiens
ggacgaggccgacagcacgccgagaagggcagagaacacacagaagagaaaaaccgaacaca

SEQ ID NO: 32243 - RNA, 69 nt, Homo sapiens
aacacggaccccagccaccaggcgcaaaggccccaaaacaggagaggcagaaggcaggcgggcaacagc

SEQ ID NO: 32244 - RNA, 53 nt, Homo sapiens
cccgcccccgcagcagcgccaggcgaacaagaggcgccagcgggcgcgccgga

SEQ ID NO: 32245 - RNA, 79 nt, Homo sapiens
gaggaggcgcaagacgcgaccaaagccgacggggcaagccggagcgggcagggcacacaaccgggcagcggacacggag

SEQ ID NO: 32246 - RNA, 71 nt, Homo sapiens
caccacagccccgacgaacacggggacaccaacaggacccggaaccaccggacaaacaccggaaaccacaa

SEQ ID NO: 32247 - RNA, 79 nt, Homo sapiens
cccaaggaacaccaccaaaaacagcaccgccggccaggaggagagcgcaccaccaaaaaggcaaacacaccagccccag

SEQ ID NO: 32248 - RNA, 76 nt, Homo sapiens
gaggaacgcgggggacagcagccggaagaccagagccgaaaaccgaaaaccccgggcccagccacaaagccggaag

SEQ ID NO: 32249 - RNA, 74 nt, Homo sapiens
gaaaaaggaggaccggacagggcacagcagaaacaacaaaacaagagaaaggaagagagacacggagaagaaag

SEQ ID NO: 32250 - RNA, 79 nt, Homo sapiens
aaggagcagaagcagcccacaaggcaaagcccagaggaccgcaacaccaggacagaacaagacaacccgaaccaccacc

SEQ ID NO: 32251 - RNA, 33 nt, Homo sapiens
gagagcacccaacagcgggaaaaccgccacaaa

SEQ ID NO: 32252 - RNA, 56 nt, Homo sapiens
gacaagccggcaacacacggaagagcggggcccggcgcacccaccaccgccgccca

SEQ ID NO: 32253 - RNA, 56 nt, Homo sapiens
cagccggacggcggggccgggcccccggccgcaagcagggcccgccggagcaaaga

SEQ ID NO: 32254 - RNA, 83 nt, Homo sapiens
gccgcgagcccggaggcggcgggaggaggcggcggccgacggcccgccacgggccccgcagccgcgcccgagcgcccgagcag

SEQ ID NO: 32255 - RNA, 69 nt, Homo sapiens
ggggaggacgaagacacgcccagcagggagcggaggagccagacagggccaggcaggccagcagacaag

SEQ ID NO: 32256 - RNA, 83 nt, Homo sapiens
gagcgcgcgcagggcccgccgacggaggaggaagaacaacgccgagagacgaagggaacgcacgagaggccacacaaaacagg

SEQ ID NO: 32257 - RNA, 81 nt, Homo sapiens
agcggggcaaccggacgagcggggcaaccgaccggcgcggagggggcccaagaaagggcaggcggggaagagccgggcggg

SEQ ID NO: 32258 - RNA, 53 nt, Homo sapiens
gagccccgagcccaccagaagacgccaaaagaccagacccagacaggaggacg

SEQ ID NO: 32259 - RNA, 55 nt, Homo sapiens
caagccaggcaccccacacagacacaaggccgcaggagggaagcgcacggaaacc

SEQ ID NO: 32260 - RNA, 56 nt, Homo sapiens
gaggaggccgcagcagagacaagggcaaaggaggaagaacggggaggaagggaacc

SEQ ID NO: 32261 - RNA, 74 nt, Homo sapiens
ggaaaaggacaccaagcccaagagaaccgcaaggagagaagcagacccccagcccagacccccagcaccggggc

SEQ ID NO: 32262 - RNA, 76 nt, Homo sapiens
gacgaacgcaaaaaggaaacgggcagaggaggaaacaaagaccaaagaaaaacaaaaagaaaagacaagaaacaac

SEQ ID NO: 32263 - RNA, 70 nt, Homo sapiens
gccaagagagccgaacccaccgagccagggagaaacccggcccggagcccagggcgcccgggcagaacag

SEQ ID NO: 32264 - RNA, 108 nt, Homo sapiens
cacaacacaggcagcccgaagcaacaaagagagccagggcggacccaagagaaggcagggggcaccaccgcaccaccccggaaaggcagccggccggcccagagaaga

SEQ ID NO: 32265 - RNA, 84 nt, Homo sapiens
ggacgcggacagagagcggacgggccaacccaaaaccagggcggcaaaacgagcgggccagagcccacgcaggagacgggagga

SEQ ID NO: 32266 - RNA, 77 nt, Homo sapiens
agaagacgaggagcaggcgcaaaaaacgaaccggaacaaacaggacacaggagcggagagcccccgcgacaccaccc

SEQ ID NO: 32267 - RNA, 73 nt, Homo sapiens
cggccgaagcgccgcgcgcggaggacacggaccggcagcgaaggaccacggcaggagaagaacacagccccac

SEQ ID NO: 32268 - RNA, 77 nt, Homo sapiens
agcagacagagaagcgcgcagcaggcccccacagagagcacacaaacaaagcgaaaccacggaagaaaagggcaaag

SEQ ID NO: 32269 - RNA, 77 nt, Homo sapiens
cagaaggaagaggcggacggaggagcaggcgagaagagaaggggagggaagcagagcacagcagcccaaagcgaagc

SEQ ID NO: 32270 - RNA, 81 nt, Homo sapiens
gaaagaacgccaaaacgcgagaaccccaacccaccaacaagaccaggagcagcagccaagcggacagagaccgccccgcca

SEQ ID NO: 32271 - RNA, 72 nt, Homo sapiens
caaggagacggacgcccgggacggagaaccagccaagccccagcccaggagaggcggcagccggaggcggaa

SEQ ID NO: 32272 - RNA, 73 nt, Homo sapiens
gccgaaaacaacgacaacgagcacaggggacgaagggaacccgccgggcggcccggcacccagccccccggca

SEQ ID NO: 32273 - RNA, 79 nt, Homo sapiens
agaggaagagaggaggcgcgagagcgggaagaggcggcagacagcgggggccacccccccaaagcggagcaaccggcgg

SEQ ID NO: 32274 - RNA, 78 nt, Homo sapiens
agagccagcagggcaggaagaaacagggaaccacaccaccacgaccacacgacagcagcaggggacacggaacccaag

SEQ ID NO: 32275 - RNA, 88 nt, Homo sapiens
cgcgggagagcccgggccacccccccaggcaaggagggcaagcaggcggaccgcccccggcgaccccacaacagggcagcgcagacgc

SEQ ID NO: 32276 - RNA, 62 nt, Homo sapiens
ggaccaagaaccaggcagaaagagggaaagaacacaggcgacgggaaagcagaggacgcgaa

SEQ ID NO: 32277 - RNA, 75 nt, Homo sapiens
cacaccaagacagcgcacgcccagggacgccccgggcaggagccgggaccagagaccggcagaaagagaacggca

SEQ ID NO: 32278 - RNA, 81 nt, Homo sapiens
ccgggaccggccggagaggagcgacgcgagggccgagacggcgcggcaagacagcgcgggagccaggaaacgcagaccccc

SEQ ID NO: 32279 - RNA, 82 nt, Homo sapiens
agccaggccgaccccgacccggaccggacaagagacagggccaccgcgcccaagcggaggcagcaggcacacagccacgcag

SEQ ID NO: 32280 - RNA, 55 nt, Homo sapiens
ccccgagagcgggacgcagaaacagacaacacacgaacccccaaaccggaaggcc

SEQ ID NO: 32281 - RNA, 83 nt, Homo sapiens
aggaaacaaacacgacggaggggcgagaggccccaaagccaacaccgcagaacacccgccaaaacaccaaacccccaggcaaa

SEQ ID NO: 32282 - RNA, 78 nt, Homo sapiens
gccacgggcaccaggaggaacaaaacagggaggaagaggcagagaggacggaccagcaccacccgccaccgcccaggg

SEQ ID NO: 32283 - RNA, 56 nt, Homo sapiens
aacccacggaggaccagaagaaaaaaccagagcgccaagagccacccaggaaggcc

SEQ ID NO: 32284 - RNA, 52 nt, Homo sapiens
aaggggaaccccggagaaaaggccaagaaggcagcggaacacgggcaacggg

SEQ ID NO: 32285 - RNA, 74 nt, Homo sapiens
ggggcccccccagccgcaccaccaagcgccgcaggcgccaaaaggaaacacggaagaccacaacacacaaccca

SEQ ID NO: 32286 - RNA, 97 nt, Homo sapiens
gagaaaaggcagacgaagaagaagcaagcgaggcccacaagaagaagacacgggcaacaaggcgaaggagagcccggaagaggaaaaaaggcgggag

SEQ ID NO: 32287 - RNA, 81 nt, Homo sapiens
gcagagcccagagaaccggcaccagccccccagcacaaacgcggggaagacccggaaggagggccccggagcagccacacc

SEQ ID NO: 32288 - RNA, 102 nt, Homo sapiens
agaaaagaagagagcgaggagcggcaggagcaagccaagaaagaaccgaagacagaaacgggagcaacagcgagcaacaggcaacgaaaacagacaaaacaa

SEQ ID NO: 32289 - RNA, 38 nt, Homo sapiens
ccagaccgccaagaggcacagggaagacaaacccgccc

SEQ ID NO: 32290 - RNA, 52 nt, Homo sapiens
acaggcgagaccgagacaaggccaagagacggagcagcagagcacccagaag

SEQ ID NO: 32291 - RNA, 73 nt, Homo sapiens
agcggcgcggcgggccggcggcgcggaggagaaccaggaccaaagcaccagcacagaagggaagaacgccaaa

SEQ ID NO: 32292 - RNA, 80 nt, Homo sapiens
gcaagacaggaagaagcaacaaaaacagcaacacaaaaaggggcgcaaggaagcaaaaaaggcaagcaagcacaaaaaga

SEQ ID NO: 32293 - RNA, 73 nt, Homo sapiens
acaacaccgagcgaagaaaagggcccagaccaagccccaccaacagaagagccccacacacagcccggacaag

SEQ ID NO: 32294 - RNA, 93 nt, Homo sapiens
cccgcgcccgccgcgggagagaggacccccccccccccccaagaaacgcgaagacgacgagcgcaccaagaggaacacaggcgaccgccaaac

SEQ ID NO: 32295 - RNA, 69 nt, Homo sapiens
gcaagcacaacccgccacaggagcagcgggcaaaaacaggaaggagacacccggacggcaagcagagcg

SEQ ID NO: 32296 - RNA, 79 nt, Homo sapiens
caaagaccgccgaggcgcaggagaccgccgccgcaccacaccaggccgacacgaacggacaacaagcagggcacaccga

SEQ ID NO: 32297 - RNA, 78 nt, Homo sapiens
ggggcccccagaaggacgccagcggagaacgcggcaaagcgagggccacaggaagaacaggcagcagaacccggagga

SEQ ID NO: 32298 - RNA, 74 nt, Homo sapiens
aagacacagaagagaagaaaacagaacaagcaaaaaagagcaaaaaacagacaggcgcccaagccaagcagccc

SEQ ID NO: 32299 - RNA, 78 nt, Homo sapiens
gcgccacaaaacagagaagaagaccccacggaaagacaccggccagcggccagagcgagcagacccagccccgggccg

SEQ ID NO: 32300 - RNA, 60 nt, Homo sapiens
cgggaaaacccgggccaacagccgggaccgcccccagacagaacggcccccgcacccccg

SEQ ID NO: 32301 - RNA, 92 nt, Homo sapiens
gacgaggaccggcgcgggaagagcgggcgcacgcgccaagaccaaggaaaagcggcacagaccgccacgggcgaagggagggccgccccaac

SEQ ID NO: 32302 - RNA, 75 nt, Homo sapiens
cgcaccaacgagaagagacaacagcagcgagagagaaaagaaggaaggcaggacgggcaagggcaccacccaaca

SEQ ID NO: 32303 - RNA, 76 nt, Homo sapiens
caagcccacccggagacaaaccaacacaaccgacagggaggaacacaagcggaggagaagcggaggcagacgcgcc

SEQ ID NO: 32304 - RNA, 75 nt, Homo sapiens
aagaggaccagcaaccacaggaagcacagggacacaaacaaagcccccaagcccgaaagcccaggaacccccggg

SEQ ID NO: 32305 - RNA, 74 nt, Homo sapiens
cgaccgacagaagaccggcaggggaaccagacgggcaaggcaaagcccaagcgcaaaaaaaaggccccaacaaa

SEQ ID NO: 32306 - RNA, 80 nt, Homo sapiens
gcaggaccagaacccgcgaaagagggaagcggcaaaccaaaagagcaacgagagggcacagacccaggccagcagaacgg

SEQ ID NO: 32307 - RNA, 81 nt, Homo sapiens
gcaaccgggacccggcccggaggcgaagcagcacgaccagccaagcgccggagcaaggaagggcaggcgcccgcaggaccc

SEQ ID NO: 32308 - RNA, 74 nt, Homo sapiens
acagccaggagacaggggccgcccagaccccagaagagacggaaagccaagaggcccaaggaacgcacagagac

SEQ ID NO: 32309 - RNA, 68 nt, Homo sapiens
cggcgggcgccggagggaagagaggaggagagaaaggagcagaagcagacaaaagcagcccagaacac

SEQ ID NO: 32310 - RNA, 102 nt, Homo sapiens
gaggcaagggggcacccagcggcacaaaaaggacgccggcaaccaagacaccagaggaccagaacccacgagaaacagacgagccaaccagaccccaggagc

SEQ ID NO: 32311 - RNA, 55 nt, Homo sapiens
aacagccgcgacacaaagcaggaaagggaacacggaagcgacaaaaaaacacaag

SEQ ID NO: 32312 - RNA, 63 nt, Homo sapiens
cacaacaacaggaacccagacagcgcgggaaagcccaaggcggaacacgaccaggaacgaagc

SEQ ID NO: 32313 - RNA, 46 nt, Homo sapiens
gaagccgggccaaaggacgaagaacccacagagcgccaagagaaac

SEQ ID NO: 32314 - RNA, 80 nt, Homo sapiens
gaagacacgagcacaaacggaggcaacgcacgggccacaggcagccgcagaacaggccggggacggagggggacccagcg

SEQ ID NO: 32315 - RNA, 75 nt, Homo sapiens
ggccgcccgggagcggagcaagggagaagacaacacaccgaggccacggacccgccccgccccgaggccgaggcg

SEQ ID NO: 32316 - RNA, 71 nt, Homo sapiens
acaagagcaacggaacacaagaaacggggacagacagcgcaagcaagggcagaagacccgagcggcccgag

SEQ ID NO: 32317 - RNA, 71 nt, Homo sapiens
ggcccaacccacagcgccccagagccgcgagaaggggccagcaaagacggagcgggaagaaggggcgaaaa

SEQ ID NO: 32318 - RNA, 74 nt, Homo sapiens
caggggacccccagccagccacgcaacccacagacacaaccgcgaggagccaagaggacaccagaaaccagaag

SEQ ID NO: 32319 - RNA, 51 nt, Homo sapiens
gaaaccgggaccagcaaacccagccagacccgaacgagacacaccaccgcc

SEQ ID NO: 32320 - RNA, 82 nt, Homo sapiens
ggaggccaacggcagaagccaccacaaaagcgaaagggcacaccacaggccggacagcaacgaaggaagcagaagaagaggg

SEQ ID NO: 32321 - RNA, 71 nt, Homo sapiens
cgaaaccacgacccacagaaaggcgagcgaccgacaccaggggggggggggcccccacgggcagaggagcc

SEQ ID NO: 32322 - RNA, 100 nt, Homo sapiens
ccggccgcccccccgcccacccacccggcagcgggggcagcagagcggagccaagagcgaagggaaagccacaggacagggagaaaagaagggaagggac

SEQ ID NO: 32323 - RNA, 55 nt, Homo sapiens
ccggacagaccaaccgcaggcgcaaggagaaggaggagcagaacacaggggacag

SEQ ID NO: 32324 - RNA, 72 nt, Homo sapiens
aaggaacagaccgacccaaacccacgcgcggggaccccagaacacgacccgggccgcagccgacccggcgga

SEQ ID NO: 32325 - RNA, 70 nt, Homo sapiens
gggggaaagccaaggaaaaacggagagccacaaaaaaggaagcgaaaggaggacagaggaaaccgaagag

SEQ ID NO: 32326 - RNA, 90 nt, Homo sapiens
cggcgagcagggagcggagaccagcaccaccagcaggcacaggcccgccccggcccccggaggagagcccacccccgagagacggaggga

SEQ ID NO: 32327 - RNA, 67 nt, Homo sapiens
ggacgaacagcaaagaccgcgcccagcgaaggaacgcacgaccagcagggccaccgccccagagcca

SEQ ID NO: 32328 - RNA, 75 nt, Homo sapiens
ccgggagacgccccgccgcccacccaggggccgcgcaccagcccgaggacggcccagggcacaagcggacaaccg

SEQ ID NO: 32329 - RNA, 37 nt, Homo sapiens
caagcggaaaggacacagcgggagggacaggagaaca

SEQ ID NO: 32330 - RNA, 70 nt, Homo sapiens
aacagcaagggaacaacaacaggacgccacaggggaaaaaggagaccaagcacgccccacgcgaccagaa

SEQ ID NO: 32331 - RNA, 63 nt, Homo sapiens
cgcagccccggccccggcccgccggagaaacaggcagaaaccacaaacagcccgcagggcaac

SEQ ID NO: 32332 - RNA, 76 nt, Homo sapiens
cgagagccgcccgggccagcggccgcgcacccccggccggaggcaccagcaccaagggaagaacaccaccggagaa

SEQ ID NO: 32333 - RNA, 72 nt, Homo sapiens
cagaagggaaaagacgcagagacggcacagaagcagaaggacaagaacgcagaccgaggagaagcaggcaga

SEQ ID NO: 32334 - RNA, 70 nt, Homo sapiens
agacgacaggaacaggggaagggccggcgcccaccggcacacccaagcggagggaaggaagcaagaaaca

SEQ ID NO: 32335 - RNA, 83 nt, Homo sapiens
caagagcaccacgggcaggaaggcagcgcacgacagcaaaagaaacaacgaacgagcaaggaagggccaaggcagaccccaca

SEQ ID NO: 32336 - RNA, 56 nt, Homo sapiens
gcgacacccaaggccggaagacaaaaaggaccaagagccgaggcaagagaaaaacg

SEQ ID NO: 32337 - RNA, 69 nt, Homo sapiens
accccacaagccgccccccccggccccagaccccccagccgcggcaacggggcaggcacacaagaggcc

SEQ ID NO: 32338 - RNA, 58 nt, Homo sapiens
aaagacggacaagccgacacggaccgccacagccacaaggcgagcgaggagagccacg

SEQ ID NO: 32339 - RNA, 90 nt, Homo sapiens
gccacggagaggagcagcccccggagacagcggcacagagggccgccaggagagaaacaaaccgggcaaggcaggcccggcaaacggaag

SEQ ID NO: 32340 - RNA, 76 nt, Homo sapiens
gcgcacggacggcacagcccgccgaacccgaaaggagggacccaccaggccacacccagcggaaaagaccgccagc

SEQ ID NO: 32341 - RNA, 71 nt, Homo sapiens
accaacgcccgcgcccagcagggccccagacaaaccaggaggccagagggaagcaaagcagccaacaccag

SEQ ID NO: 32342 - RNA, 80 nt, Homo sapiens
gcgggaggagcggcagccgcgaggaggcgcgggagggcgagaacgaccccgagacggcagaccagaagaagccccgaagg

SEQ ID NO: 32343 - RNA, 70 nt, Homo sapiens
aggggccccaccagacagggaccggcggcaaccggaaggaacggaggacggccggacaaacgaaacgcga

SEQ ID NO: 32344 - RNA, 83 nt, Homo sapiens
ggacccgggacaagacgccagaggagcgcacagcgaggaggggggcgcgcagcccggggaccccccgccccagcaggcaccca

SEQ ID NO: 32345 - RNA, 43 nt, Homo sapiens
ggcacagcagcagaccgcagcagccaccagcaggaagacaaga

SEQ ID NO: 32346 - RNA, 34 nt, Homo sapiens
aacaggggcaaggggggggcaaggcggcccggca

SEQ ID NO: 32347 - RNA, 51 nt, Homo sapiens
cgggcaaggaggaccagagcacagcaagaaaaagcaagagagcccaacaaa

SEQ ID NO: 32348 - RNA, 83 nt, Homo sapiens
ccagccagggccccccccccagcccacgccacaacacaggaaaggccgaggggcaaagaaaaggaaagcacggccgaaaagaa

SEQ ID NO: 32349 - RNA, 84 nt, Homo sapiens
gccacgcccaacaccagggggccggagggcccggccagcccaggcagccggccaggccggcgcggcacccacaaagcacgggag

SEQ ID NO: 32350 - RNA, 76 nt, Homo sapiens
cgcccccgggccgacgccagaagacaaagagccaagaaacccgacaccaaaccgccaccgcgacgcaaggagaggc

SEQ ID NO: 32351 - RNA, 78 nt, Homo sapiens
aaaagcaagggagagaaccccgaaacgcaccgaaaacgcacccgacagacaacgcacaaagaccgacagcacgaggag

SEQ ID NO: 32352 - RNA, 87 nt, Homo sapiens
ccgaggacccagcacaccgagggacagacaagcagacggggccgccacacgcccaaccagggcaccgcaagcgggaagaaaggcgac

SEQ ID NO: 32353 - RNA, 48 nt, Homo sapiens
gaacagccaacaaagagaggggaaccagaagaggccaaccagcacgaa

SEQ ID NO: 32354 - RNA, 74 nt, Homo sapiens
gcagcaaggaaaaccaggaccagaggccagcccacagcagaaggcaaagaccagcaaggcaccaacagaaaaac

SEQ ID NO: 32355 - RNA, 67 nt, Homo sapiens
ccgagggaaaggcgcgccccgccgcccaccccggcagcgcaaacagcaaagcgaaaccagacaaacg

SEQ ID NO: 32356 - RNA, 79 nt, Homo sapiens
ggaggccccgcgacccacccccgagggcggccccccccagcgcacaccaagggccaacccccccagcaaaggccagccc

SEQ ID NO: 32357 - RNA, 73 nt, Homo sapiens
ggaacgggacggagaacagcaggccacggggccaagaagcagaccacaacagagggggacaaagcgagaacgg

SEQ ID NO: 32358 - RNA, 73 nt, Homo sapiens
accgccggagacagggcaaagggggaggggccaggaagacaaaaacagagagaacagccaaaacggaaaacgg

SEQ ID NO: 32359 - RNA, 94 nt, Homo sapiens
gccggcccaggggcagcaggagcccgacgggaccagggaccagcaggcaaccagaggccaggccagagacaccccaagccgcagacccggaacc

SEQ ID NO: 32360 - RNA, 41 nt, Homo sapiens
ccgggccgaacgcggaaagcccgcgagccccagcccgggag

SEQ ID NO: 32361 - RNA, 39 nt, Homo sapiens
ccgagccagaaaacaccagccccgaaaagcacgcaggga

SEQ ID NO: 32362 - RNA, 71 nt, Homo sapiens
ggcaaaacgcagaaaggaagaagccccacggcagcagcaaccacacgccgaaaccggcgacgccggagcgg

SEQ ID NO: 32363 - RNA, 42 nt, Homo sapiens
cccagcgacacccggccagggcccaaagggggaaaagcagca

SEQ ID NO: 32364 - RNA, 72 nt, Homo sapiens
agaggaggaacaccaggcacaagagcggagccgcggagcccgggccagaccacaggaaagcgcaggaccccg

SEQ ID NO: 32365 - RNA, 70 nt, Homo sapiens
aagcccagcaaagccgacagcagaagaagcaccaaaacaaggaaacacgcagaaggaaaagcgcagagac

SEQ ID NO: 32366 - RNA, 66 nt, Homo sapiens
gagccaaccgacacaacagcgcaagccaagaaaaaaaacagggcgaccagcggaagagcgcaacaa

SEQ ID NO: 32367 - RNA, 53 nt, Homo sapiens
caaaccgcacggccccagagaaaccagccgagaaaacaaaggcgaagcaagag

SEQ ID NO: 32368 - RNA, 77 nt, Homo sapiens
caccagcagacaaagacaggaagaaaaagagaaccaagcacccaccaaggggggacacagcgagccacgcgccagga

SEQ ID NO: 32369 - RNA, 71 nt, Homo sapiens
agagcaggcgggcgccaggcccagcagcccagaaggacccagaggaagggccgcccagcggcacccacgac

SEQ ID NO: 32370 - RNA, 75 nt, Homo sapiens
agcaaacgcaacaagagaacagccggaacaagacaccaagggaaggaaacacaaaccagcacgaagaaaagccgc

SEQ ID NO: 32371 - RNA, 76 nt, Homo sapiens
gagagcaaaacgcgacgacaaaacccggcgaagccaggcgagccaccacagcacaggcaagaaaaggagaagaaag

SEQ ID NO: 32372 - RNA, 76 nt, Homo sapiens
gaaaacccggcaggaaacagaagaaggccagcgaggaaggacaagcccccacgaggaaaacccccccaccgaagga

SEQ ID NO: 32373 - RNA, 71 nt, Homo sapiens
gccgacggacccggaaaaccggcccccaacgacaaaagcgagcaggagcacgaaggggagaaaagggaagg

SEQ ID NO: 32374 - RNA, 78 nt, Homo sapiens
acccccacccgaggaaacaagaagacgaaagcaggcaccagcaagagaacgcaaaaacagcgcaaggaaaagaagccc

SEQ ID NO: 32375 - RNA, 83 nt, Homo sapiens
agagcggacaagaccaacaaacacaaggagccacaaggacgggaagcaccaaagcgcgccaagagggcagaacgggaagccag

SEQ ID NO: 32376 - RNA, 69 nt, Homo sapiens
cgagacaccagcccgaaacaccaccaagggacaagagaaaaaaagggcgggcgaacaaaaagagcagag

SEQ ID NO: 32377 - RNA, 82 nt, Homo sapiens
cggggggcagaggagcggaggaggcagaagccaggaggcggcggagcaagcggcgcggggaggagcgacggccgccgagagc

SEQ ID NO: 32378 - RNA, 62 nt, Homo sapiens
acaccccgaagggggaaagccagagacgcgcacgaaacgacgaagaggcccgaggacagagg

SEQ ID NO: 32379 - RNA, 78 nt, Homo sapiens
aaacaagagaggaacggagcaagaagcgacacaaggagaaaaggaagagagaagggcacagaccaagacaacgaaccc

SEQ ID NO: 32380 - RNA, 79 nt, Homo sapiens
cgcgcccacggccaggcggagcaacggacccgcgcggaacacagcccaaaccagagggaccagagaggaggcagaagac

SEQ ID NO: 32381 - RNA, 73 nt, Homo sapiens
ggacacaccccaggaaaaagacagcccgcagcacgaccagcaggaacgcgacacggcgaccccgggagcagag

SEQ ID NO: 32382 - RNA, 81 nt, Homo sapiens
ggcccagggccggcccccccaggacaacccagaggcaacaaaggcgaggagccccaagggggggcaggcagcagagaggcc

SEQ ID NO: 32383 - RNA, 74 nt, Homo sapiens
gacccggggaggcgcacacacaccaaagagggaagagaacaaccccaaccaggcaccaaaccagaaccggacag

SEQ ID NO: 32384 - RNA, 66 nt, Homo sapiens
aacacgcagccccggcaaccggcccagcgcagccagagaacccaaaagcaaacccaagaccgaaag

SEQ ID NO: 32385 - RNA, 78 nt, Homo sapiens
aaaaagaaggcccgagcaaagaagagcccgaacaaacaaacacccagaaacaagagggaaggggaagcaggccaaccc

SEQ ID NO: 32386 - RNA, 72 nt, Homo sapiens
acgaccccaaaggaagccagcaaggagggcgaaaggacgcaacggaaaggacaaggacaccaaggggacagg

SEQ ID NO: 32387 - RNA, 76 nt, Homo sapiens
gcggaaggcagcgcccagcagcgcagggcccccagagccgacggcccccaccccccacaagacgcggcccacgggg

SEQ ID NO: 32388 - RNA, 53 nt, Homo sapiens
cgacccagccggggggcacagccggccggccccaaagacgggaaagcacgcca

SEQ ID NO: 32389 - RNA, 58 nt, Homo sapiens
gggacaaaaaccagaccagcccgacagagaaaggcacaacccagaccagagaagcgac

SEQ ID NO: 32390 - RNA, 91 nt, Homo sapiens
gacaagagaagcacaaaacagcagacccaagagcagcggaaaagaccagcacagaacggccgagcgaccaggagaggagcccccgcccgaa

SEQ ID NO: 32391 - RNA, 83 nt, Homo sapiens
ggggcggaagaaaaacaaacacacgcaaaggagaaaggaaccgacaggacccagagagggaccagggccaaagaagagccggg

SEQ ID NO: 32392 - RNA, 67 nt, Homo sapiens
gacggccaaaacaacccgcagccagcgaagccggaccccaaaaacaaccgggaaggcgagaagcgcc

SEQ ID NO: 32393 - RNA, 77 nt, Homo sapiens
cccccacaacccgaccggaggccaagacaacgacaagagaacaaaggaggggaccccggcaaaaaaaacccacaaag

SEQ ID NO: 32394 - RNA, 58 nt, Homo sapiens
gacccagcccgcggaggccgcggagcgccagccaagaaaccagcagggaaagaccacc

SEQ ID NO: 32395 - RNA, 81 nt, Homo sapiens
cgcgcaagacgagggccggaggggcccacgaggagccaacacaccagcaggagggagaagcacagaacaaggagagcggag

SEQ ID NO: 32396 - RNA, 92 nt, Homo sapiens
ggaagcccaaaccagcacaagagagacacccacgcccacacgccaccaaggagccggaagagggaagaaggaagcagaaaggaaagaggaaa

SEQ ID NO: 32397 - RNA, 74 nt, Homo sapiens
caagcacggacggcgggagggcggccaacgaaaggagcccaagaaaagaggaggaggagagggaaccagagcgc

SEQ ID NO: 32398 - RNA, 72 nt, Homo sapiens
agaagggacaaagggcaaggccacggggagacacacgggaagaaaagaagaacgcccgcaaccaaaaggagc

SEQ ID NO: 32399 - RNA, 43 nt, Homo sapiens
acgagggaggcaaaagcaggcacagccagagaacaacacacac

SEQ ID NO: 32400 - RNA, 81 nt, Homo sapiens
gaacgcagaaacacaggaccccccccaacgagaggacacccccacacgagccccaaccccccagaccaaacacaccgcccc

SEQ ID NO: 32401 - RNA, 86 nt, Homo sapiens
ccccaccgcccgggcccgaggaggcagccaagccgggccgcccgcggcacaggccgacggcgcaaggccacggcaagcaccgggag

SEQ ID NO: 32402 - RNA, 68 nt, Homo sapiens
gaaaagcgacgaggagcaaccagacagcacgaaggaaaccagacggacaccggggcaaaggaggcgag

SEQ ID NO: 32403 - RNA, 32 nt, Homo sapiens
acggacacagcaaaaggggacgaagagccagc

SEQ ID NO: 32404 - RNA, 85 nt, Homo sapiens
gcagggagaagaccagcaagcgggcggcaagacacggggcgacgccacagagaaagcgcccccagcgagcagacacagggagggg

SEQ ID NO: 32405 - RNA, 68 nt, Homo sapiens
acggaagaagcggcggagcaggacacgaaccaccagagccaagaggaaggaagcccaacaggagaaaa

SEQ ID NO: 32406 - RNA, 83 nt, Homo sapiens
caagagcaaagcacccaccagaaagaggcacagccccaaaagaaaggcaggagggcacggagcggggagccccgcgcacacag

SEQ ID NO: 32407 - RNA, 35 nt, Homo sapiens
cgcccgggagagcaagcccggagcaggcgcgggag

SEQ ID NO: 32408 - RNA, 76 nt, Homo sapiens
ggagaaaaccgaagaagaggcccggaccaacagagagaaagccagaaaggagcagcagggaagcccagaggcacgg

SEQ ID NO: 32409 - RNA, 64 nt, Homo sapiens
gcacacggacgccaaccagccccggcaagaccgaaggcgccggccaaaagaggacagcagacca

SEQ ID NO: 32410 - RNA, 76 nt, Homo sapiens
ccgaaaggcaaggagcccggaagcaagagaccagagcccaagggaccagggcagcagacgcaaggaggccagagca

SEQ ID NO: 32411 - RNA, 68 nt, Homo sapiens
aaggaccaagaaccagaggacagaaaaaggcgagcacaaagacaaagagagagcagcaaagggaccca

SEQ ID NO: 32412 - RNA, 59 nt, Homo sapiens
cagcaagcccacggaggacccccgcccgaaccgagggaacagcccaagagacagaccca

SEQ ID NO: 32413 - RNA, 80 nt, Homo sapiens
gccggcagcacgaggaccccaaacagaccacccccggcgcaaaagagccaacacccaggccaggccgcccggaaggaggc

SEQ ID NO: 32414 - RNA, 71 nt, Homo sapiens
ggagcacaacaggcagacagacaaagaacgaccgaagaaaagcaacaaaccaacaacccaagaacccgaac

SEQ ID NO: 32415 - RNA, 65 nt, Homo sapiens
aagagcaagaagacaggaaacccccggagaaagggcccacacacacgcagggcgcccagcacgcc

SEQ ID NO: 32416 - RNA, 77 nt, Homo sapiens
cgccggaggcggccgcaccggcacgagccagggagccgccgggaccggcccgggagacgacaacccaaaccgaaaag

SEQ ID NO: 32417 - RNA, 70 nt, Homo sapiens
ccccgcaagaggaagacccagcgaaggaaagagaccaacccgacggccccccagagaacagaagcacgga

SEQ ID NO: 32418 - RNA, 78 nt, Homo sapiens
agcccggcggccacgcccgccggaccgcgcccaggccccccagacgggaggcgcacgaaaccaggaggaagaagaagg

SEQ ID NO: 32419 - RNA, 85 nt, Homo sapiens
aggagcaggacgcagaagacgcagggccaaggagggaagagacaagaaccggagcccgggccggggacggcgacgaaccagcagc

SEQ ID NO: 32420 - RNA, 60 nt, Homo sapiens
aggaaagaagaaaaccaagaaagccccacgaaagaaaagaaggggagaaccagacacgag

SEQ ID NO: 32421 - RNA, 73 nt, Homo sapiens
cgaagagagagacaaaagacggcggccaaacagagcaaaggaaagaggccaaagaagcaacaagaaggagacc

SEQ ID NO: 32422 - RNA, 72 nt, Homo sapiens
cagagagaagaaaacaggagccccagcgccaccgccgaccgaagccgcaaaagaaggagaggaagagcaggc

SEQ ID NO: 32423 - RNA, 87 nt, Homo sapiens
ccacgccaagcaaaccgggaaaggagaggacccggagccgggcccagcagcacaaacgcccagaagcaagcccccgccagaccaaca

SEQ ID NO: 32424 - RNA, 74 nt, Homo sapiens
ccagcgccgcgggccgcaggccgcgagcagcggacgccggccgccgcaggaggacagaaagcgggacacaagca

SEQ ID NO: 32425 - RNA, 65 nt, Homo sapiens
gcggagcccccgcgccccgacccagaggcgggaggcggcagaagcagccagaggagggcacaggc

SEQ ID NO: 32426 - RNA, 77 nt, Homo sapiens
caaaaggcgaggcaggggagaggagccggcacacagaacaccagaagacccaggacgaaacggaaaagaagaacgac

SEQ ID NO: 32427 - RNA, 79 nt, Homo sapiens
cccgacgcacggccaagaggaaggccaagcgagggccaagacgaagacacggaaggaggagcccacggcagccagcgga

SEQ ID NO: 32428 - RNA, 81 nt, Homo sapiens
cagaaaaaccagcccggcgcaggcaccagcccgcacgggagcagggaggacggcgcacggcgcgcgggcagagcaggagac

SEQ ID NO: 32429 - RNA, 81 nt, Homo sapiens
gcgcgagagggggaaaagcgagcgacgagcgagcgcgcgcgcgaaaacccgggcagggagccacgccccaggggagccaac

SEQ ID NO: 32430 - RNA, 68 nt, Homo sapiens
aggaagggagagggaagaccagagcgaaacgaagcgcccaccccacgggaggccgggacgggacaacg

SEQ ID NO: 32431 - RNA, 67 nt, Homo sapiens
gaagggacgacgccaggacagcagaccacagcccggcaggcccaaaaacccaaagggacagaagcac

SEQ ID NO: 32432 - RNA, 81 nt, Homo sapiens
acccgagaaggggaagacgagaaaaccgagaaaacgggacaaagagccagcccgagcagcacccggcccaagcagagccca

SEQ ID NO: 32433 - RNA, 41 nt, Homo sapiens
ggcggggcccgacacgaaaggaggaggagaacggggcgagg

SEQ ID NO: 32434 - RNA, 78 nt, Homo sapiens
cggccaaacaaccacaagcggagacagcgaagggccaagggccaacaacccagaagcgacaagacccggagagaaaca

SEQ ID NO: 32435 - RNA, 85 nt, Homo sapiens
ggagggaaggaccgacacgggagaccgcgagggaaaggagcgggacccggaccccaggaggccgcagccaagccggaacaggagc

SEQ ID NO: 32436 - RNA, 72 nt, Homo sapiens
gagcggggaagggggaaaggcaccaggacaagcaaaggaaggagaaaagacagcaaaacaaaagaaggaacg

SEQ ID NO: 32437 - RNA, 69 nt, Homo sapiens
aaaggcaaacacaacccacggaacaccaccacagcccagccacaccggagagggggaagccggaaaaca

SEQ ID NO: 32438 - RNA, 79 nt, Homo sapiens
gagaacgcgcgccgcagcgccgccgcccgcggaagggagcccaagcgcagagccggcccaggccggggaagcggggcgc

SEQ ID NO: 32439 - RNA, 73 nt, Homo sapiens
gaggagagaggcgggcaggccgcgccagggggacgcagaagagcggcaggaccagggaagcacagcacagcag

SEQ ID NO: 32440 - RNA, 71 nt, Homo sapiens
gaagggcaacagagggacacacggaggcggagacgggagggcagaaaggaaaggggggagaggggagcgac

SEQ ID NO: 32441 - RNA, 84 nt, Homo sapiens
cacgaccccgcggccaagggggggaaaccagaaccgccggagaacagaggcaaccaggaaggccccaaagccgaaggccccccg

SEQ ID NO: 32442 - RNA, 76 nt, Homo sapiens
aaggaacaccaagcggaaaagagcagcgcccagccccagcagggaagcagaacagacacaagaacaggacgaccca

SEQ ID NO: 32443 - RNA, 37 nt, Homo sapiens
ccggggcccgcccagcggagaaagacagcaaagaaaa

SEQ ID NO: 32444 - RNA, 67 nt, Homo sapiens
gcgcccaagcgggcacccccgggacccgcagccgcccaccgcgcaagagggagcacaggaaccgcaa

SEQ ID NO: 32445 - RNA, 76 nt, Homo sapiens
ggacccgaggccaggagccaggggcccagaagaaccaaaggcaagaaccggagcaggagaaaagccggaaagaaaa

SEQ ID NO: 32446 - RNA, 57 nt, Homo sapiens
cggcccccgcgcacggccacgggccacggaggccacccagcacggggggccacgcca

SEQ ID NO: 32447 - RNA, 73 nt, Homo sapiens
cacaccaccacgccacggcggcacccgccggccaccgccggacaccacacaaggggccaacccgaggcacaga

SEQ ID NO: 32448 - RNA, 80 nt, Homo sapiens
ccggggcgcggagggccgagggagggccgagccagccgcggccggaggagcccccaggccacaaagaaacagccggaaaa

SEQ ID NO: 32449 - RNA, 77 nt, Homo sapiens
ggagcggcgcccaagacagcaagggacagacgggaaaaaagagcaccagaggcagccgaagaagcaggaaggccgga

SEQ ID NO: 32450 - RNA, 73 nt, Homo sapiens
cggggggcaggacgagcagccgccgggacggccaggaacggggcgggccaagcagaggagaggagccaagccc

SEQ ID NO: 32451 - RNA, 79 nt, Homo sapiens
ccagaccgggcacagcaaagcgaggaccagaccagccgcaagaaccaggccagagagcacgcagacacgaccgcccagc

SEQ ID NO: 32452 - RNA, 81 nt, Homo sapiens
acaggaaaacagagaaagaaggaaggagggccgagcaggacagcggccgaagccagagccggggcggcgccaggccccaca

SEQ ID NO: 32453 - RNA, 84 nt, Homo sapiens
acagccccacggcagacccggagaaacgaaggaggcccaaccacaaaaggagccgacggaacccagacggagaacaaaaggaag

SEQ ID NO: 32454 - RNA, 81 nt, Homo sapiens
ccgagagccagagagagcggacgacagaacccggccgacccggaccaacaaccccaaggaacaagacccccgaaaggaacc

SEQ ID NO: 32455 - RNA, 65 nt, Homo sapiens
aagcccagaacagcacgagccccgagacagacagcccaaaagccggccgagcgccaagacaagca

SEQ ID NO: 32456 - RNA, 76 nt, Homo sapiens
gagagcccacgagcgaggccgcaggggagcccggcagccgcccgcgccccccccaacccaacggcaccaaggaaga

SEQ ID NO: 32457 - RNA, 71 nt, Homo sapiens
aggcgaaacacaaagggcaacgaccaacaagggaggacaacaccaaaaagaaaaggagaaaccaaaaggaa

SEQ ID NO: 32458 - RNA, 85 nt, Homo sapiens
cgccggccggggccgaggacaccgcggccgcccgggccgcgggaagcgaggagcccgggaaggcaccagacacgaaagagcagaa

SEQ ID NO: 32459 - RNA, 74 nt, Homo sapiens
ccggccgcaggccaccgacacgagacaaccgggagccggcgagccaaagccgcaaagccgccggaagccaaaga

SEQ ID NO: 32460 - RNA, 86 nt, Homo sapiens
aaggacggccccggggcgggcgcagcgggcaggcggaggccagcggggccggaagcggcggcgcagcaccagcccgaagaagccgg

SEQ ID NO: 32461 - RNA, 75 nt, Homo sapiens
ccaaagagccgaggcaggggcggagaaagccaacaggcagaccagagacagcgccacgcacccggggagcagacc

SEQ ID NO: 32462 - RNA, 78 nt, Homo sapiens
accgccccagccagaagggcacgccagcggcgcgagaggaccaccggggcggcccggcggagaggcaggacaaaaaga

SEQ ID NO: 32463 - RNA, 99 nt, Homo sapiens
cgcccgcccccgccccacgaagccagaaagaagccacccagagagaaccagagcggcaaggagacagcaacgagaaaaaaacgagaaccgcgcagccgc

SEQ ID NO: 32464 - RNA, 81 nt, Homo sapiens
gggaaaagcaccacgcaagaagaagaggagagaacgccgagccgcgccgcagccccgccgccgagaagcccgcccgcgcgg

SEQ ID NO: 32465 - RNA, 79 nt, Homo sapiens
gaggagcggccagggggaggcccgacggcgcggggagagagccaagcaaccaagccaagacaggggccaggccaggggc

SEQ ID NO: 32466 - RNA, 76 nt, Homo sapiens
caaaccaacagaagggcaaccaggcagaggcagccaacgacaagcggagagagggaagcccaggggcggacaggag

SEQ ID NO: 32467 - RNA, 80 nt, Homo sapiens
agggaaagaggaccaagaaagagacagaaggccgagcagcagccaacggaacagaggaggccaccagaaacggccagcga

SEQ ID NO: 32468 - RNA, 69 nt, Homo sapiens
ggcagaaggcgccccacccagcacgagaaaaaagcaggggcgccaaaagaccaacacggaggaagaaac

SEQ ID NO: 32469 - RNA, 79 nt, Homo sapiens
gccccagaacgcagacagaggagcggacccccgcggcgcgcagcccagcagacccccgccagaaccagccacccagggc

SEQ ID NO: 32470 - RNA, 76 nt, Homo sapiens
cggccaggccaaccgaaggcggcagagaggccccgagacccagaacgcaaaaccaaggcccggcagccacccaccc

SEQ ID NO: 32471 - RNA, 72 nt, Homo sapiens
aggccgaggggaacaccggcgagcccgggcggggccggcagcaccgcggccgcaggaacagcgacacccagc

SEQ ID NO: 32472 - RNA, 53 nt, Homo sapiens
gaaaagccgaaaccaaacggagccaggagaccaaaagaaggggagcccagaag

SEQ ID NO: 32473 - RNA, 80 nt, Homo sapiens
gacgcccgggcgcggcaccaaggcacaggacccaggaagcgcccccggcacccggacaagacgacggacaagcaggcgac

SEQ ID NO: 32474 - RNA, 77 nt, Homo sapiens
agggaagagaagcaaggaaagcggcaagagagcaagacggcgaaagagccagcaaaaacagaaccaaggagagacac

SEQ ID NO: 32475 - RNA, 55 nt, Homo sapiens
gcgccaggaggggggcgacaagggaccaacacgagcggcacacacaacgaccaag

SEQ ID NO: 32476 - RNA, 77 nt, Homo sapiens
ccggggaccagaggagaccgccacacaagagaagacccaccgaggaggaggaggcacaccagaggcagaaccacaac

SEQ ID NO: 32477 - RNA, 77 nt, Homo sapiens
cgggggcggccgggacggaggacgcgcagcaggaggcaaagggaccccaagaaaccaaagggcaagagccgcagccc

SEQ ID NO: 32478 - RNA, 89 nt, Homo sapiens
cgaagccagcgggggccccagcaccgcaaccaccgccaccagccacggagggcagagagcggccgccaccccagccgcagaggggaaga

SEQ ID NO: 32479 - RNA, 85 nt, Homo sapiens
gaggccagcacgggaacgcgaagcgccaaagccagacaaggaggggggaagacagggcccagcaccacaggacgggccgggaagc

SEQ ID NO: 32480 - RNA, 63 nt, Homo sapiens
cccaacgacccagcacggagcaccaacaacagccacgccaggaccggccaggcaggcagcaca

SEQ ID NO: 32481 - RNA, 70 nt, Homo sapiens
ggcggggcacggggggcgacggccaagcggcagacggcagaaaacagacgaagcaacagcgaacaaaaaa

SEQ ID NO: 32482 - RNA, 73 nt, Homo sapiens
agaagggaagacacacaacccaacagagcgcgaggagggaaacgcgagggccaccagagagagaggcaccagg

SEQ ID NO: 32483 - RNA, 81 nt, Homo sapiens
gccaccgccgcagcggcgcagcccacgccagacgaccccacccgcgccgcgacccgggcgaccagacgaggggagacggac

SEQ ID NO: 32484 - RNA, 69 nt, Homo sapiens
cggaggcccccaggaccggagcccgcaaccaagggagcacacggacagggggaccaggcagcacagacg

SEQ ID NO: 32485 - RNA, 58 nt, Homo sapiens
agacgcggccgcggcaccccgaacggggccccccgcgcgagacacgcacgagaacccc

SEQ ID NO: 32486 - RNA, 49 nt, Homo sapiens
caagcgaacggagagccagccgggagggaaggaagaagcgcgaaaacgc

SEQ ID NO: 32487 - RNA, 77 nt, Homo sapiens
gaaaagaacgccccaggagagagaaccgccaacggaccccgaggacaggaaaaacagcaccagggcaagagcgcaag

SEQ ID NO: 32488 - RNA, 71 nt, Homo sapiens
ccggcccggaagacacagccaggggaagaagggacggcgcaaaccagcaaccgcccgggacaccccagagg

SEQ ID NO: 32489 - RNA, 82 nt, Homo sapiens
aaaggaagcagcaggacacgcccggaagcccgaccacagagacgcgccaggcccgagcaagagaagcagccggagcccaccg

SEQ ID NO: 32490 - RNA, 78 nt, Homo sapiens
ccacccagagcgcacggcgacgccccaggggaaaacccccgggaccaggagcagacaagggcccacaccaaagccacc

SEQ ID NO: 32491 - RNA, 77 nt, Homo sapiens
gaacacgcagaaaagccagagagaccgaaagcgacaggaaaccacacagcggccgaccccggagaccaccacccgac

SEQ ID NO: 32492 - RNA, 78 nt, Homo sapiens
cagccgcccaaccgcgggaccaaccacccgagcggcgcggacgaaggaaaacaaagagggaaaacggagaaaagcccc

SEQ ID NO: 32493 - RNA, 76 nt, Homo sapiens
cggacgccagcggacacgcgggcgagggagacaaggaaaaaggaaggaaagcgaggccggaaaaaggccagacagc

SEQ ID NO: 32494 - RNA, 78 nt, Homo sapiens
gggcggcgaggaggaaagcgagccgccaagacccgcaccggaggcagagaagaggcccagggagaaaaggaggccgga

SEQ ID NO: 32495 - RNA, 70 nt, Homo sapiens
gccgcagaaaccgccccacagaccggggaaccagcaccccagaaggaggagagccagagcccacaaccag

SEQ ID NO: 32496 - RNA, 73 nt, Homo sapiens
ggaggaaaccaagacagcccaaacgccccacgaccaggggaaggagggcgaaacaaaggaccagcacgggaac

SEQ ID NO: 32497 - RNA, 79 nt, Homo sapiens
ggaacacggggaaccccgaaagccagcacacaccccgcaggacccgccagcaggaaaccccagacagccagcagcaggc

SEQ ID NO: 32498 - RNA, 79 nt, Homo sapiens
caggccgcagcgggagacggcacaggacacaaaccaggaggaagaggagaaaggcccaaaggggcgaaaagccaaaaag

SEQ ID NO: 32499 - RNA, 37 nt, Homo sapiens
cgaggcgcagaagggagaggagacccccagcagaggc

SEQ ID NO: 32500 - RNA, 88 nt, Homo sapiens
aacaacacacaaacggagcaacaaaaagccaggcaggacagcaccagaagcgcgcgcgcacccggccccagagcgccccgcgacccgc

SEQ ID NO: 32501 - RNA, 82 nt, Homo sapiens
cacaaagcacgcgacaggaaccaggggcaagccagccaccaaaccagagcagggaccacccagcgcaaggacagcgaaggaa

SEQ ID NO: 32502 - RNA, 79 nt, Homo sapiens
ccaggcggcaggggcaaccagacgggccaagaacgacaccgaacaccgcacagaaagcagaccaaccgacaccagagga

SEQ ID NO: 32503 - RNA, 67 nt, Homo sapiens
ccggggcgcccggcgccggccgagaaggcagaggcggaggaagaggagaaaggcccaaaggggcgaa

SEQ ID NO: 32504 - RNA, 62 nt, Homo sapiens
ccgggcacacccggcccccggacgcccgagcggaccgcgaagagagacacgcaggaaagccc

SEQ ID NO: 32505 - RNA, 77 nt, Homo sapiens
gggagaaaggggggccgagaccgaggcaacggggccccgaggccacggcccgggcggcaaagacgcaacaacagcga

SEQ ID NO: 32506 - RNA, 56 nt, Homo sapiens
gcaccgccccgggacagggcaccaccagcagcagcggagaccagcccgcgagcgag

SEQ ID NO: 32507 - RNA, 81 nt, Homo sapiens
ccagaaaggaaccccaagcgacgcaggcagaagcgagacggcaaggaccaacaggggaaccaaaggacagcacagaccgag

SEQ ID NO: 32508 - RNA, 55 nt, Homo sapiens
gcccacggaaagggaccgggaacaggggacgaaaagaggaagaccgaaaaaacca

SEQ ID NO: 32509 - RNA, 84 nt, Homo sapiens
cgcgagggagcgacacccaagagcagcggcaccggcgcgaccacaagcgagcaggaagcagcagcgcaggcccaggacggagcc

SEQ ID NO: 32510 - RNA, 79 nt, Homo sapiens
acggggcggcccggagccggcgcgaaccggcccccgcagcgggacccgggacaggagagacaacggaggcaagaaagac

SEQ ID NO: 32511 - RNA, 77 nt, Homo sapiens
aaagaaacaaagaacggacccacaccgaggcacccgaagaagagaccaccaaccagaccaggaaaacaaagagggga

SEQ ID NO: 32512 - RNA, 80 nt, Homo sapiens
aaaccgcgaagacgaacaaacccacagccagagccagagagcaggacgccagaagagccgaagcaaagagaggagcaaga

SEQ ID NO: 32513 - RNA, 74 nt, Homo sapiens
ccagagcacaggcgcgggaccacagagagcacgagaacaaaccgacaggacaaagcccccagaacaccggggaa

SEQ ID NO: 32514 - RNA, 72 nt, Homo sapiens
gaaaagggaggcaaggagcgacagagacacaggccgggaaacaccaaaggaaagggagccacggagaagcag

SEQ ID NO: 32515 - RNA, 50 nt, Homo sapiens
ggggggagacacggcaacagagacagcagggaggaaacaacaaggaccaa

SEQ ID NO: 32516 - RNA, 94 nt, Homo sapiens
cggcgcagccccaaagcgagcgaagcagggcgccgccacgccgcaggaggcggagagagcagcaccagcagaagagggcccgaccacggcaacc

SEQ ID NO: 32517 - RNA, 83 nt, Homo sapiens
caagcggagagccaggacacaacaccgcggagcccgcaggcgaaggcacaagggacaagcaacgagagcccggagccccgggg

SEQ ID NO: 32518 - RNA, 84 nt, Homo sapiens
gagaggccgaagccggcgcccagcccccaagcggcccgcgagcaaacgccgcggccccagagaagaaggaagagacgggccccc

SEQ ID NO: 32519 - RNA, 72 nt, Homo sapiens
gcgggaaaccacacaccggaccggaggggggcagcgagcaagcggcaaggcccgaggggggccacgggcccc

SEQ ID NO: 32520 - RNA, 39 nt, Homo sapiens
gggccaggaccaagacgggcggagaacggaaaagcacca

SEQ ID NO: 32521 - RNA, 78 nt, Homo sapiens
ggaggagacacccacgacccgagagccaggacgcaggaaagccaaccagacggggagggcagaacaacagcagcagaa

SEQ ID NO: 32522 - RNA, 73 nt, Homo sapiens
gcacgagcagaagaggcacagagaagggggagcaacagacaagcccgaaaggaacagcagcaggaacgaaacc

SEQ ID NO: 32523 - RNA, 76 nt, Homo sapiens
gaacgcgaggcagagcgggagcgcgcagccagcccggccccaccgcgcccgcagagagaggcaccagagccggacc

SEQ ID NO: 32524 - RNA, 84 nt, Homo sapiens
aaagaaaagaaacgacaaaaacacgagcccaccacagcggagaagagaacccgaccgaagaaggaacaggcagaaagaagagag

SEQ ID NO: 32525 - RNA, 76 nt, Homo sapiens
ggcagaaagaagccggacaccagaccaacacaacccaggacgagaaaaaacagagcggaacaagcggcccaagaga

SEQ ID NO: 32526 - RNA, 74 nt, Homo sapiens
cccggcgcgaccgcccggcaccgggagaaccaccgccaccgccaccagcaaagcaaacgccagaaggacaaggc

SEQ ID NO: 32527 - RNA, 88 nt, Homo sapiens
cagccccagccccaagggcagagcgccgcagcgggaaccgcaagagcggggaggaacgcccccccgacccccccggccccgcgccagc

SEQ ID NO: 32528 - RNA, 68 nt, Homo sapiens
gacccagaggcagagccgccccagcagcaggggcgccagggagggagcagaccaggggaaggggcacc

SEQ ID NO: 32529 - RNA, 51 nt, Homo sapiens
gagagagggagagccaaagaagaaccccggaaagccccggcgaagccgccg

SEQ ID NO: 32530 - RNA, 82 nt, Homo sapiens
aggaagacccagccagaccagggacaaagagcaaacagacagggccgcaggcagcagagaaagccgaacagaacagcacgaa

SEQ ID NO: 32531 - RNA, 79 nt, Homo sapiens
cccaacaccaaaagacccgcggcacggccaggcgacagggaagccagagagcagcacccgacagcggcacaagaggggg

SEQ ID NO: 32532 - RNA, 75 nt, Homo sapiens
gaagaaaacaaagccagaagacagcaaccagagcagaagaaagggaaagcaaaacgcccgacacaagaaaggagc

SEQ ID NO: 32533 - RNA, 69 nt, Homo sapiens
gccgcgcggcgagcggcccgcacaaggccggcagagaaggaaggcccgcccgccgcaggaaagaagcaa

SEQ ID NO: 32534 - RNA, 74 nt, Homo sapiens
caaacaaaaagacacgaagaggaggaagcccaggaaacagaacgggaagggaagaagaccggcccaccgagaag

SEQ ID NO: 32535 - RNA, 50 nt, Homo sapiens
cagaagcgcggccaagccacgaagaagcggcgccaaccgggaaggaaagc

SEQ ID NO: 32536 - RNA, 80 nt, Homo sapiens
agaccaagcaggagaaccgaccggcgaagccgacgagcccgaacagacgcaccagcgggaggaagagggacggcccagga

SEQ ID NO: 32537 - RNA, 68 nt, Homo sapiens
caggcagagccggggcacgggaggagcagcagaccaagacgggagaacaaacgagaaagagcgaggca

SEQ ID NO: 32538 - RNA, 65 nt, Homo sapiens
cgggagaagaggcccaggagacgcaaacagccgcacgcacaagacaaacccagaaaagaagggag

SEQ ID NO: 32539 - RNA, 74 nt, Homo sapiens
cgaggcgccccaggacagccagccgcggccggagccaggagcccggaacagagcggaggaagaggaagcccagg

SEQ ID NO: 32540 - RNA, 84 nt, Homo sapiens
ggagaaccgagcccgaccaaggcgaacacaggcgccccgcacccaacaacccaccaggcacccgagagaaaccgaagaaggccc

SEQ ID NO: 32541 - RNA, 71 nt, Homo sapiens
cccaaaccagcggaaaccccgaccaaaacaggaaaggagaagccaaacaagccaccacccggaagaggcag

SEQ ID NO: 32542 - RNA, 64 nt, Homo sapiens
cgccacgcgcggaaggcagcgcccagcagcgcagggccgggccggccccagaacagggagaaac

SEQ ID NO: 32543 - RNA, 71 nt, Homo sapiens
accagaccaggaggggcccgcagccgagcaggaaggggcgcgggagacaggacagaagagcacgaccgcac

SEQ ID NO: 32544 - RNA, 82 nt, Homo sapiens
gccagccagaagaagggcaggccagaaggaacgaagacccccaggggacaagaaccagcagaacagaaaccccaagagcccc

SEQ ID NO: 32545 - RNA, 84 nt, Homo sapiens
agcgggccaggagcagggacggaaggacgccagcacaacaccggcgcgaggccgacgagcccgcgcgaggccgcgcccccccgc

SEQ ID NO: 32546 - RNA, 79 nt, Homo sapiens
gcggcgccggccggccgggcggcgagccgagcgaggcagccgagccgcgcgacggggcgccagccagagcccgagaccg

SEQ ID NO: 32547 - RNA, 77 nt, Homo sapiens
ccaagcagccaccagcagcccccagagcgggaccacagaggaaccccaaaacggcccgaccgaacagcagggggaga

SEQ ID NO: 32548 - RNA, 80 nt, Homo sapiens
agccgagcagccccggccgggcacggacagggcgaaagccgaccacccggcgaagaggcgcgaacagggcccacccgcca

SEQ ID NO: 32549 - RNA, 76 nt, Homo sapiens
gcgccagcacagacagcccaaaggcaccagacccggaggagcagcaccccggcaggcagaccagccggcccccacc

SEQ ID NO: 32550 - RNA, 75 nt, Homo sapiens
cccacggcgaggcgggggcaggcggagaaggagacaccggaggacgaagagggggaggccgcaccgaggggaaac

SEQ ID NO: 32551 - RNA, 77 nt, Homo sapiens
aggcaggaaacgcagcaaagccacgggggagaaggccagcggcggggcagccgagggcaggagcaagaaggcgcccc

SEQ ID NO: 32552 - RNA, 73 nt, Homo sapiens
caccccgaggaaaaaagaaaaagaaaggagaaggaggcgagaacgcggacaagcaaacaaagaggaaaaagag

SEQ ID NO: 32553 - RNA, 84 nt, Homo sapiens
gcggcgccgcagcacggagcgcacggccgacgccaccgccgagcccagaccggaacagacggggggccaacaaagaagcaggag

SEQ ID NO: 32554 - RNA, 42 nt, Homo sapiens
ggcaaaacgagcgggccaggaaccaacagccgcaacccggcc

SEQ ID NO: 32555 - RNA, 79 nt, Homo sapiens
gcccagcggccaggcggcggaggagaagagccagccccaggccgcgagccggacaacacaccacaagaaccgcagcaca

SEQ ID NO: 32556 - RNA, 66 nt, Homo sapiens
aagccaaaccacaaccgcggaggagcggacaacccagagagaaacgccagaccacagcggagagag

SEQ ID NO: 32557 - RNA, 75 nt, Homo sapiens
accccgagccaccccaggcgcccagaccaagggaacggcagaggaagggcagcagaacaacgcagccaccagcca

SEQ ID NO: 32558 - RNA, 75 nt, Homo sapiens
cgcggggaccgcggcccggaagggccgggccggggcacgggcccacggccccccaccgggccaccccgggggcgg

SEQ ID NO: 32559 - RNA, 70 nt, Homo sapiens
gagcccaggagcgccacgcgcggaaggcagcgcccagcagcgcagccgccccagcacgcgcccaccaaga

SEQ ID NO: 32560 - RNA, 82 nt, Homo sapiens
cccgggcccgggaaaacacacggccagcggcccagcaggagggcggggccgcggcagccacccccacagcacgccacacggg

SEQ ID NO: 32561 - RNA, 53 nt, Homo sapiens
gagccggcagcaaagagggaacagggacaccacgccaccagcggagggagaaa

SEQ ID NO: 32562 - RNA, 85 nt, Homo sapiens
gcgggaaggcgaggacgaggacgaggacgcaaggcgaagccgacgagcccgaacagacgcaccagcgggaggaagagggacggcc

SEQ ID NO: 32563 - RNA, 78 nt, Homo sapiens
aggacgaggaaacaccgaagggaagaacacaccagggcagacacgaaaaaaagcgggccgcacgggggaaagggagac

SEQ ID NO: 32564 - RNA, 75 nt, Homo sapiens
gaaaagaaaaagaagaaaacaaaccaccaacccgaagaaaaggaaaggggaagcagcacacaaaagaaacgagcc

SEQ ID NO: 32565 - RNA, 79 nt, Homo sapiens
acagcggcggggcggcagcaccacgcgcgagagaggaggagggaacccggcccccgagcacgagccaaagccacaagga

SEQ ID NO: 32566 - RNA, 77 nt, Homo sapiens
gcagaaggggcgccaccaccccagccggagaccccagagaaacaggcgccaaacgacagagaccccaccacgggccg

SEQ ID NO: 32567 - RNA, 56 nt, Homo sapiens
gaccgcgccgccagccggcccagacaacaaaagggaagggagcgcacgcccaaagc

SEQ ID NO: 32568 - RNA, 54 nt, Homo sapiens
cgccccgcggccacccaaggcccggccggaagcgcagagccagcaagaccaacc

SEQ ID NO: 32569 - RNA, 72 nt, Homo sapiens
ccccgcacccccgcgcccaggcgggacaagggcgcaccggggcgcagcgagggaggacaacggggcggggag

SEQ ID NO: 32570 - RNA, 81 nt, Homo sapiens
cgacccggaccaagaaggggaggcccgcggcagagggagccgggggaccggccaggaagaaacaggccggaacgacccccc

SEQ ID NO: 32571 - RNA, 80 nt, Homo sapiens
aaggcccagcgccaaacgacaaagcccggcgcaggaaaccaagacgaagacgaaccgaagaagccaagaagacaggccca

SEQ ID NO: 32572 - RNA, 57 nt, Homo sapiens
acccaaggcagagggggcgcccaccaacccgaggagagcggcagggacagccgccca

SEQ ID NO: 32573 - RNA, 77 nt, Homo sapiens
cacggaggaggaggacgccgacacgccagaacacacgcacaaggcccagaggccacgccggcacagagcacaggaag

SEQ ID NO: 32574 - RNA, 85 nt, Homo sapiens
caggaccaggcacccgggaaggaagcgcagaaaggaagagaagaagaagcagaaagggcaggacgaagaagaagaaaccaaagag

SEQ ID NO: 32575 - RNA, 79 nt, Homo sapiens
caacgccagagcccagggcccagaggaccccagccgcgcccgggagagcaagcgaagagagagaaacgaaaaagaggaa

SEQ ID NO: 32576 - RNA, 79 nt, Homo sapiens
ccgccgaggcgaagggaagaggcgcccgccgcgggcaggagagcagccagacacagaaacgagaccagcaacgaggaag

SEQ ID NO: 32577 - RNA, 80 nt, Homo sapiens
ggggccccaccgggcacagcaccacaacaaacaggccaccccccaagggaagaacgaagcagcgcgcaggagcgagagag

SEQ ID NO: 32578 - RNA, 56 nt, Homo sapiens
gagacccggcgcgaccacgcccggcgccccaccccaggcgagccgccggcccaggc

SEQ ID NO: 32579 - RNA, 83 nt, Homo sapiens
ggcgaggaggccccccagaggcggacggccacgccacagcgagcggccacgacacaccagacggcacgccggcccagaacccg

SEQ ID NO: 32580 - RNA, 98 nt, Homo sapiens
gcgcacggaacagcgaggccagcaggagacggagccacggagcaggcgcgagccggcacgaaacaaaggagcgagacagaagagaaccggaaggggac

SEQ ID NO: 32581 - RNA, 79 nt, Homo sapiens
gcccccgcccgagcccacagccccacgccaggaacagcgcaggaggaggcccggccagcagccccgccacgacagcgac

SEQ ID NO: 32582 - RNA, 108 nt, Homo sapiens
gaacaggcgaaacagcacaaacaaaaagaaaccgagaagaaggaaaaaagaggcacagacaagaaacggggggcacccagccacacgccaagaagacaccggcacggg

SEQ ID NO: 32583 - RNA, 77 nt, Homo sapiens
ggcagcaaacaaacccccaagagaggagagccgaacaggaaccgagaccggacagaaacgaagacagacaaaccaaa

SEQ ID NO: 32584 - RNA, 58 nt, Homo sapiens
ccgccggaaacaggagggagccaggagcgcgggagcgaaggccagccacacgcgcacc

SEQ ID NO: 32585 - RNA, 88 nt, Homo sapiens
agcgaggcggcggcggcggcgcggaggcgcaggcagcaacgaggcagcggcaggccagggcagccgcggagaggggcgggagccgaga

SEQ ID NO: 32586 - RNA, 82 nt, Homo sapiens
cgcgcgcaggcgcaggccggaggcgggaggcccgggcgaagcccccgcgcaggcccccaggcccccaggggcgagaaagaag

SEQ ID NO: 32587 - RNA, 78 nt, Homo sapiens
ggacgaccgaacgccacgaacgggaagcgggcagcacaaaacaaggccggacgaaaacaggaaggcaagaacaaaggc

SEQ ID NO: 32588 - RNA, 69 nt, Homo sapiens
agaaagagagagacagaagccacaggagagagacgaggaaagaaggaagcagcgaagcagggaggaaga

SEQ ID NO: 32589 - RNA, 84 nt, Homo sapiens
gccccggcagcggagagccgagcccaaggcaagacccaaggcgacgaccgacaggggggaaaggagggacaggcaagaaggaag

SEQ ID NO: 32590 - RNA, 77 nt, Homo sapiens
ggacggaagaaacccacccaggaaaacggggagaggaggaaaggagggcaaaaaccaggccaaccgagcaagaaagc

SEQ ID NO: 32591 - RNA, 76 nt, Homo sapiens
cgcggagccgcgcagccccggagcacgggaaagacaaggagccgggccgagaaaccgaaccagagaccagagaaga

SEQ ID NO: 32592 - RNA, 75 nt, Homo sapiens
aaagagaaaccggggaaccacggacaacccagaggacaacgaaggcgggggggaccgaaccaacggcgacgaaag

SEQ ID NO: 32593 - RNA, 72 nt, Homo sapiens
gggaggacgacgagagagcgaaagagcgacaagaaccagaagcgccagagcccagagcaacgagccaaaagg

SEQ ID NO: 32594 - RNA, 97 nt, Homo sapiens
caaccagcagaaggaagccaagacaaagccagacccagcaacagacacaagggcagaaggaaggcagcgcagagaaagcggacaaacagcaacaggg

SEQ ID NO: 32595 - RNA, 80 nt, Homo sapiens
gcaacccagccagccaccgccaccgcgaccacacgggggagccgccaccaaaagcagacggaaaacccacggggaagacc

SEQ ID NO: 32596 - RNA, 111 nt, Homo sapiens
agagcgaggccagccagaacgccggggaccaggcccgggcgccgcaaaaggaggaggacccgagcgagggaaagcggggacgggaaaagcacccacccggacggccggagg

SEQ ID NO: 32597 - RNA, 64 nt, Homo sapiens
gcggcgcggaggcggcgagggcgagccggccaagaagcgagagaagaaaaacagaaaaagccaa

SEQ ID NO: 32598 - RNA, 63 nt, Homo sapiens
agccacgcgcgcccacgcaggagcaccacaacaggccccagggagcgccaggcccgcgcacgc

SEQ ID NO: 32599 - RNA, 79 nt, Homo sapiens
gaccccaaaggcacccgcgagcgcaacccaagggggaagaagggaagccagcagagccacagcccacaccagccagcaa

SEQ ID NO: 32600 - RNA, 74 nt, Homo sapiens
cacccgccggacgggaggcccaacagggaaagacccagggcaacggacgcaggccccagagaaggagaagagag

SEQ ID NO: 32601 - RNA, 77 nt, Homo sapiens
cagacccaggccagagggaaaagcaagagcccaaagcaagggcaacaaagcaggaaccaggacagcccacgagcagc

SEQ ID NO: 32602 - RNA, 82 nt, Homo sapiens
gaggagcgcgcggcgccggggggcgcgccgcgaccgcccgccggaccagaacacacaagaaccgggagaacgaacaaaccaa

SEQ ID NO: 32603 - RNA, 82 nt, Homo sapiens
aagagagacgcagacaggcaaaaagggaaccggagggacggagggcaaccaggaagaaggggacaccaacagagagaggcac

SEQ ID NO: 32604 - RNA, 70 nt, Homo sapiens
cggacgagggagcagcgccggaaaaggggacaaaggagaagccaacaagcaaaggggcaagaggaccgga

SEQ ID NO: 32605 - RNA, 81 nt, Homo sapiens
cagaaagaggcgcccggagcaggcagagcagccgagccaggaccagggaacgggacacacagacggaggaaacgaaaaggg

SEQ ID NO: 32606 - RNA, 80 nt, Homo sapiens
caccgggggaaaagaaggaccggaagagagcacacaaggcgggagcagccaagagaagcagaaggcagaacacccacagg

SEQ ID NO: 32607 - RNA, 75 nt, Homo sapiens
caaagcagcgaagaagaggcccaacccccaccccgcccaaggaggcccagcggagggccggggaccggagagccc

SEQ ID NO: 32608 - RNA, 71 nt, Homo sapiens
cggccagggaaccaaacagcagagcagagcacggaaaaggcccacagggccagaggaggaagagggagaaa

SEQ ID NO: 32609 - RNA, 54 nt, Homo sapiens
cagaacgaacccccccccccggaaacaggaacacgaaagaggaaaaacgcacaa

SEQ ID NO: 32610 - RNA, 77 nt, Homo sapiens
gacgaaggggcgcgaaaccaagcgcggcccagaaggggcaagaagaacaggaaaaacggaacagacaaagccagaag

SEQ ID NO: 32611 - RNA, 68 nt, Homo sapiens
caaaggcgaagccaggcgaaacgggggggcaggggcgcaacgacgaaacagcacgcagaaaacgagaa

SEQ ID NO: 32612 - RNA, 73 nt, Homo sapiens
gacggcgcgagaggagcgcgcgcagaggccccaccgacccaagagaccgggcagggccaaaccagagagcccg

SEQ ID NO: 32613 - RNA, 93 nt, Homo sapiens
cccggccccgcccgcgccggaagagccacgccgccggaaccaaaaagaagccccagagccggggccaggagccccaagcgccccagcagcaaa

SEQ ID NO: 32614 - RNA, 85 nt, Homo sapiens
gacaaggccacccacgggagaagcagcccaccacaaagcgcccgcgaggcgcaacaaaaaggcgcgcaaaagccaacgagacagg

SEQ ID NO: 32615 - RNA, 63 nt, Homo sapiens
agacaaaaaagcgaaggacccaaacggaaagcgcacaaaaggagcggagccgccagcccagaa

SEQ ID NO: 32616 - RNA, 74 nt, Homo sapiens
acgccggcaagggccaaagaggaaggagaagcaaaggcacagaaccggcccacaaccggagagcgccaccgaag

SEQ ID NO: 32617 - RNA, 77 nt, Homo sapiens
agagccacacacaccacaggccgggcaggacgggccagggggagggagaagaacccggaagaagaaacaggagcgca

SEQ ID NO: 32618 - RNA, 74 nt, Homo sapiens
agccagggcccgagcaaagcacgaggccggcaccaaggcagaaaaacgcgcaccaggagacacaaacgccgcac

SEQ ID NO: 32619 - RNA, 55 nt, Homo sapiens
ccccaggagcgggaacagaaaccacggagccccggaacagccgcccagagggaag

SEQ ID NO: 32620 - RNA, 59 nt, Homo sapiens
cgcacggggagggaggccggcgccaggccgaacggaccagaccaaaggcccagggacag

SEQ ID NO: 32621 - RNA, 74 nt, Homo sapiens
gccgggagcacagcagaaggaccaggggaccgaagggcccacagcaaccgcacccgcagaagaccggcagaccg

SEQ ID NO: 32622 - RNA, 77 nt, Homo sapiens
gaggaaagcgagggaggaagagcgagaccaagagggaccgagcgggaagccacggaccggccccagccaacccgaaa

SEQ ID NO: 32623 - RNA, 59 nt, Homo sapiens
gcaagaagaacagagacagcagccaaacccccagccaagacgcaggcagagacgacaac

SEQ ID NO: 32624 - RNA, 67 nt, Homo sapiens
cccgaccccgacgcggccccgacagcccggccggcggaaggcaggcaaaccgacaccagcgacacaa

SEQ ID NO: 32625 - RNA, 82 nt, Homo sapiens
ggcaaaaggaacaggcgaagaagagcgaaagccagggggcgaaacaaaacaaaaaggagcaaaaggagaaggcccccaggcc

SEQ ID NO: 32626 - RNA, 70 nt, Homo sapiens
gaaagccaagcacaaggacgggaaaaacagccagagagcagcggccacacaccagaaacaaccccgaaac

SEQ ID NO: 32627 - RNA, 81 nt, Homo sapiens
cgccgcgcgcgccccggccgccaccggcaagaggagccaggagcacggggggaacaagaccgccgggacggaagacgggag

SEQ ID NO: 32628 - RNA, 34 nt, Homo sapiens
gacgaagcggaaggcagaagagccacaaagaaga

SEQ ID NO: 32629 - RNA, 58 nt, Homo sapiens
cgggcacaacccccagcagagggccacccgccccaaggaggaaagacaagccccaaaa

SEQ ID NO: 32630 - RNA, 79 nt, Homo sapiens
ggcccaaggccgcgccgaccgcacgcgcacggaacagcagcaaccccagagaagcccggggcaagaacggggcggacag

SEQ ID NO: 32631 - RNA, 39 nt, Homo sapiens
cccgagggcgggaacagccacccgaagggccccccaagc

SEQ ID NO: 32632 - RNA, 66 nt, Homo sapiens
aaaaccacggccagaaagaccccaaaagaaaaaaaacagggcgaccagcggaagagcgcaacaagc

SEQ ID NO: 32633 - RNA, 85 nt, Homo sapiens
gcgggagcggacggcgagcgcgagcggcgcgagaaagagccagcaccgccgaccgccagcgccagaagccagagagggcggacag

SEQ ID NO: 32634 - RNA, 78 nt, Homo sapiens
cgcggccgcccgaagaaccccgagacgagggggaacgcacacccccaggcaggaccaggaacacagcacggccaacag

SEQ ID NO: 32635 - RNA, 81 nt, Homo sapiens
ggggccaaagcggaagggccaaggcgcggagaaagacagcaaagaaaaggagaagaaaggaaaaaaacaaccccgggcacc

SEQ ID NO: 32636 - RNA, 68 nt, Homo sapiens
gacaagagcaccacgggcaggaaggcagcgcacgacagcaaaaggaaagaccacagcaagaccacgcc

SEQ ID NO: 32637 - RNA, 74 nt, Homo sapiens
caagcggcgccgcgccccggccgcacgggagcccagaggacagaaccccagcccagagccaacaccccacaaga

SEQ ID NO: 32638 - RNA, 76 nt, Homo sapiens
ggaagccgacagacaaccagggaaaagcacagggccaggaagcagagggacagccaggccagaaacaggcccagca

SEQ ID NO: 32639 - RNA, 76 nt, Homo sapiens
ggaggccagggggcgccagccccaggccaacgcaaggagcggacagaacagccacggcaagggcgggagcggagcc

SEQ ID NO: 32640 - RNA, 78 nt, Homo sapiens
agaaggggagcaagaagcaggaaaggccggacaccagccgagagcggcccaggaggaacaaccagcccacccggagag

SEQ ID NO: 32641 - RNA, 91 nt, Homo sapiens
cccagggaggcaagcagagcgcggccaagaacagaggaaggggccacaaacgaacagcgaaacggagaacggaagaaagccccagcacccc

SEQ ID NO: 32642 - RNA, 81 nt, Homo sapiens
ggggagaagacgcgcgccccccagcagggagagcaccacagcaaccaggaagaggaagcagggaacgggggaaagccagcc

SEQ ID NO: 32643 - RNA, 70 nt, Homo sapiens
acaaaagccaccaacacaaacacgcaacaggccggaaagagcgaagccaggcgaaaacggcaaaccgcgc

SEQ ID NO: 32644 - RNA, 77 nt, Homo sapiens
ccgaggccgcgggcggcgggcccgggaaaggggacacaaggagggcggccaccaaggaagagcggcacaggaaaagc

SEQ ID NO: 32645 - RNA, 69 nt, Homo sapiens
aaacgcgaacaccgacggagccagccacaggccacacaaccgaaaccaccacccgacaaaccaaaagga

SEQ ID NO: 32646 - RNA, 58 nt, Homo sapiens
aagagcagcgaggcgaaagcaaccacaggggaaagagggaccagcgcagcagaagcag

SEQ ID NO: 32647 - RNA, 51 nt, Homo sapiens
gcaaaacaaacagagaaaagcagaaggggaccaacagggcggaacagccac

SEQ ID NO: 32648 - RNA, 78 nt, Homo sapiens
cagccccagcaccacgcagaggacagccgcggcaagccgcacgagcgggcgccagaggcagaggcccaaaacagaggc

SEQ ID NO: 32649 - RNA, 71 nt, Homo sapiens
aagaaaacaccgaagggccggcgggcggggccccggggggcggcggcgcggcgcggaccgaccccccacaa

SEQ ID NO: 32650 - RNA, 83 nt, Homo sapiens
gccacgcacagcgaggggccaaggcagaagaaacggagaagggcaaaggacaccagaggaccagaacccacgagaaacagacg

SEQ ID NO: 32651 - RNA, 75 nt, Homo sapiens
cgagggcacaacacggcgcgcgcaggccaagcagaaggcagccgcggagcgcgcagaaccacaaccggccaccaa

SEQ ID NO: 32652 - RNA, 74 nt, Homo sapiens
cacagcacacggggccagcgaacgacaaagagaggggaccacaaacaggcccaccggagcagcagcccgacccg

SEQ ID NO: 32653 - RNA, 75 nt, Homo sapiens
cgccgcacgcccagcggccgccggcgaagaagggcggacgggcaagggcggagcggccgggcccggaacgcccgc

SEQ ID NO: 32654 - RNA, 120 nt, Homo sapiens
agaaggggcgggcaaacgccccccgccgcaggcccggcacggaagcgaggcaaacacgagaagggaacagcaagaaagaaagccgaaccacaggagaacagcaccaacggaagacagcgg

SEQ ID NO: 32655 - RNA, 76 nt, Homo sapiens
cccgcggcggccggcccccccccagggccaggcgccgccagaacgggaggggcacacagggaacacccagagaggc

SEQ ID NO: 32656 - RNA, 83 nt, Homo sapiens
agggccagccgagcgacggccccaggcggagaccggggggaccacacaacgagggaagagcgcaccacgcgaaccgccccccc

SEQ ID NO: 32657 - RNA, 89 nt, Homo sapiens
aaagaaagagcgccgggacagggggaggaaagcaccgaggcacaacagccagaaccgaaaggcgcgaaaggcagggagaacaaaaggaa

SEQ ID NO: 32658 - RNA, 57 nt, Homo sapiens
aagagaagaaacccagcgaaggcaccaagaaggcggagaggaaagagagggaccacc

SEQ ID NO: 32659 - RNA, 90 nt, Homo sapiens
cgccccaacggggcggccgcgacccccggcaacccggagaaggcacagagcggccgcgccagcgaggcgcccgcgccggcagaggaggcg

SEQ ID NO: 32660 - RNA, 77 nt, Homo sapiens
ccgggagaagcagcagcgcaagagagaaaaggaacagccgaagccaggggcaagcgaaaccacagaagaaaggagga

SEQ ID NO: 32661 - RNA, 65 nt, Homo sapiens
cacaaccgcggaggcaaccgcgcccccagagcccagcaaagaagaaggaggagacgggacaggag

SEQ ID NO: 32662 - RNA, 87 nt, Homo sapiens
cgagaccgcgccgccccgcgagcacagagcccgccgccgaccgccgcccgccacacccgccgccagccagaagggggaacgaggagg

SEQ ID NO: 32663 - RNA, 80 nt, Homo sapiens
cacaggcccaggcagaccgcagcaaagaggaagcggcccaggcaggggccacaccagccccaagaaacgacaaccacaca

SEQ ID NO: 32664 - RNA, 76 nt, Homo sapiens
ccccaagagcgggagcaggagggagcggccgagcacccaacgccagccggcccccaggacccgcccggggaccggg

SEQ ID NO: 32665 - RNA, 76 nt, Homo sapiens
gagaacggcgccacaagaaagagcaggacaagagaaaggaaagagggcacgcccagcgggcccagcccagaacaca

SEQ ID NO: 32666 - RNA, 81 nt, Homo sapiens
gacagcacgcagagcggagaagccccagaccagcgagagaggaacgaggggcacagaaaccagaaaaacggagcgcgcaag

SEQ ID NO: 32667 - RNA, 76 nt, Homo sapiens
ggagagcccaagacgggcgccaaaccccaaaggcaaaaacgccaccccaacaggagagggaaggcgaccaagcaca

SEQ ID NO: 32668 - RNA, 73 nt, Homo sapiens
acgaaagagaagccccggagagaagaggacgacaacaacgacccagaaacgcacaccagcgaagcccgggaac

SEQ ID NO: 32669 - RNA, 61 nt, Homo sapiens
aagcaagaaggcccggacacagcaaaccgggccacaggcagaacaacggggaacgcacgcg

SEQ ID NO: 32670 - RNA, 70 nt, Homo sapiens
agaaagaggggagccacagggagacgcaggaaaacccaagcgcaaacgggccaaaaaggaaacgcgaaaa

SEQ ID NO: 32671 - RNA, 87 nt, Homo sapiens
cggggacgacaagcgcccacgaggagacgcggaggacagcccgcagaaccggggagaccacgacgcgccccgggcgccagagccgca

SEQ ID NO: 32672 - RNA, 71 nt, Homo sapiens
ggccacacggagagccaaagggacgaaagcgccagcagcgaaccccagacggaaagcccacccacacaaga

SEQ ID NO: 32673 - RNA, 94 nt, Homo sapiens
cccggaagcgcgagcaaggccgccagaggcagacgcaaacagcagacggaagaccccacggcaaaaccacacccgaggcgagcccaggacacca

SEQ ID NO: 32674 - RNA, 84 nt, Homo sapiens
acccgaggagcgcgggggcggcccgccccggacccgagcagagggcccccagagccgacggcccccaccccccacaagacgcgg

SEQ ID NO: 32675 - RNA, 66 nt, Homo sapiens
acagagaaagagccaggaaacggaaagagacagacaccaacaggaaaaggaagccagagacacgag

SEQ ID NO: 32676 - RNA, 74 nt, Homo sapiens
cggcgcgcgaggcaagcgcgcgccggaaacacgccgcaccagggaggagagaaacgacaccccccacccgaagg

SEQ ID NO: 32677 - RNA, 82 nt, Homo sapiens
cggcaagggcgcgcccgggccgggcggcgcgcgcccacgcccagccgccacaagaccgagccacgcagacccaagacagaaa

SEQ ID NO: 32678 - RNA, 76 nt, Homo sapiens
ccacagacacagacacaacaggagcaacacaagcggaaagaaggaaccgccccgggcagagaccccaaaggaagga

SEQ ID NO: 32679 - RNA, 56 nt, Homo sapiens
caaaccgagagccagaacgaacaagccaacagggaccggcagaagcgaagggccag

SEQ ID NO: 32680 - RNA, 73 nt, Homo sapiens
gaacgaagcccaaagaaaaggggagggaagaggggaagagcagagcgaaaggccgccgccgcgccgccgcgcc

SEQ ID NO: 32681 - RNA, 85 nt, Homo sapiens
ggccagcgcgcacggccccggacgaaggaccgcagcacggagcgcagaaccggccgcgcccgacaaaggaaagggcgccaacaaa

SEQ ID NO: 32682 - RNA, 82 nt, Homo sapiens
aggaccccccccaacgaggagacaagcgcaagcagccagagcccgggcgcaaagaaccaggcccggaccagagccgccagac

SEQ ID NO: 32683 - RNA, 50 nt, Homo sapiens
aagaccacacacgggaaacacaaaacgaccaaagaagccaaccgacacaa

SEQ ID NO: 32684 - RNA, 83 nt, Homo sapiens
cgaacccaagcggaccagccggggaacaccaaaggaagcagccacaaacagggggacaccggaccccgcccccccgccgggcc

SEQ ID NO: 32685 - RNA, 77 nt, Homo sapiens
ccccaagcgacccggcccacggacaacacgcacccagggcccgggcacccagcaaccgacagcgccgcccacccggg

SEQ ID NO: 32686 - RNA, 77 nt, Homo sapiens
gagacgcaccccaacagcaccccagcaggccaaaaaacacggcgaccggaaagcgaacgacccccacgacccaggaa

SEQ ID NO: 32687 - RNA, 83 nt, Homo sapiens
ggggaggggagaaagccaccgccacagccacgacagagaccagaccaaaagcagacaaccagaggcaaaggagaaaaggggcc

SEQ ID NO: 32688 - RNA, 79 nt, Homo sapiens
aggacaagcaagaacaccgcacggggacaggcacccggaaggacaagggcagacccgggaaaaggcgagaggaacgcag

SEQ ID NO: 32689 - RNA, 78 nt, Homo sapiens
aagcacgaaagcgggagagggaccggaacggcggcgacaaggggcccgaacagagggaaacgcagccgccaagaaggc

SEQ ID NO: 32690 - RNA, 81 nt, Homo sapiens
cgggggcaacggagaaaacccggaaccgcgacggcggcagcacccaggccacagaggaggaaagagaggggaaagaagcag

SEQ ID NO: 32691 - RNA, 61 nt, Homo sapiens
agagcagcaccaggccagagccagaacaggccggagcgagggagagcaggaacacagagag

SEQ ID NO: 32692 - RNA, 68 nt, Homo sapiens
aagcaaggcgcaggaggaggcaacaagggggaaaccgaaaaacaaaaagccgcgaaacagaaaacggg

SEQ ID NO: 32693 - RNA, 77 nt, Homo sapiens
aaaagcggcagaaaggaacaaaagaaaagaagcaggaggagagaaccagaagagccaggcaacagcaaaggagcaaa

SEQ ID NO: 32694 - RNA, 85 nt, Homo sapiens
ccagaccacacgggggcaggacggcagcggagaagaagcaggcgccccccaccagccacagacacagacgacacggcggacaacg

SEQ ID NO: 32695 - RNA, 74 nt, Homo sapiens
accccgcggacagggcggagagcacaggagcacgggagcaggggcagacacgggacaccacggacccgcgcagc

SEQ ID NO: 32696 - RNA, 84 nt, Homo sapiens
gcgaggacccgggcgggccccacccgggaggaagaaggcaccacgacaaaccggagccgaggggagggaggccagccaagacga

SEQ ID NO: 32697 - RNA, 96 nt, Homo sapiens
cgcaagagagacagggcgggcaggcccccgcagcaggacaacccgaacaagcgaggaacagagacagacccgggggcccccaaggagagggaagaa

SEQ ID NO: 32698 - RNA, 76 nt, Homo sapiens
caaaggccgagccaggggaaagaggaagaccacggagcagcgcaggagaaaaagcaaacagcgcaagacacaagcc

SEQ ID NO: 32699 - RNA, 72 nt, Homo sapiens
cgcagcccagacccgcaccgcagaagccaggcaggagccgcaggcaggggagaggcgaagggacaggagaca

SEQ ID NO: 32700 - RNA, 45 nt, Homo sapiens
aaacaacccaacaggaaaaagcacaaacgaccggacacaagaggg

SEQ ID NO: 32701 - RNA, 66 nt, Homo sapiens
cggacagcgcaccccacgcggccgaaccgaggggcgaagccggggaagcccaaagcagaagggcga

SEQ ID NO: 32702 - RNA, 74 nt, Homo sapiens
gccgagagccgcccgggccagcggccgcgcacccccggccggaggcaccagcgaccaccaaccccccccaacac

SEQ ID NO: 32703 - RNA, 81 nt, Homo sapiens
agccaagagcaagggcccaaggcccagaagacagaaggaagccggccacagggggcggcgagcgagcagggcacagccgag

SEQ ID NO: 32704 - RNA, 82 nt, Homo sapiens
gggacagccgccccgggcacacaccccgacccgcccccccaggccaagagaacagccgcgaggcgcagccaagggccccccg

SEQ ID NO: 32705 - RNA, 80 nt, Homo sapiens
gcgacaaaacccaggcaagaccagaaggggggccgcagcccccgcaagccaaaaagaagaggcaggggaagcacaaaagc

SEQ ID NO: 32706 - RNA, 75 nt, Homo sapiens
gcagcggcgcagcccacgccagacgaccccacccgcgccgcgacccgcggagcagaccaccgcccagcaaaaagc

SEQ ID NO: 32707 - RNA, 69 nt, Homo sapiens
cgaccccggccgagcgaggagaacggagaaacccgcgacgaaccgcaccaaaccacaggaaaacacaag

SEQ ID NO: 32708 - RNA, 72 nt, Homo sapiens
agaaggaccaagaaccaggccgcagaacagcgccacagccggccacaacacccaaacaaggccacccgcccg

SEQ ID NO: 32709 - RNA, 37 nt, Homo sapiens
agcagaaagcgagaaacgcccagcgacaaagaaaagc

SEQ ID NO: 32710 - RNA, 67 nt, Homo sapiens
cgggcacccacagacggcgaaggcagccacagcgcccagagaggacaagcccccacgaggaaaaccc

SEQ ID NO: 32711 - RNA, 70 nt, Homo sapiens
gaggccaggcacgcaaggaaaaagacgcagcagaagggaaaagagagacaccaaaaaaccaggcacaagc

SEQ ID NO: 32712 - RNA, 53 nt, Homo sapiens
gcagggaggcacgagagcagaaggcggcaggagggaaagcaaggaaacgcccc

SEQ ID NO: 32713 - RNA, 82 nt, Homo sapiens
aagaacccagggcagaaaggagggaagccaaaaaccccccacccggggccgagcaagagagggagcacgcacgggaaccgga

SEQ ID NO: 32714 - RNA, 86 nt, Homo sapiens
caggagaccggaggccaacggcagaagccaccacaaaagcgaaagggcacaccacaggacccagcagaaggaagagaaaaaagaag

SEQ ID NO: 32715 - RNA, 52 nt, Homo sapiens
ggggacgaagggaacagccaagcaagaaaagagacacagaaggaaaaagaag

SEQ ID NO: 32716 - RNA, 44 nt, Homo sapiens
gagccgggccgcacccgccgagccggggggagggcgaacccggc

SEQ ID NO: 32717 - RNA, 74 nt, Homo sapiens
cgggaaaagccccgagaggaggccaggagcacagaaacacccaccaggagccaagcagaagagaaaaggccaga

SEQ ID NO: 32718 - RNA, 77 nt, Homo sapiens
gagaagcagacggaaggagggaaaagcaagagaccgaggaccaagcgagccgagcagagcacccggcccggcaccag

SEQ ID NO: 32719 - RNA, 35 nt, Homo sapiens
accaccagggggcccccaggggaccaccgccaggg

SEQ ID NO: 32720 - RNA, 65 nt, Homo sapiens
gaccgcgcggacccggccgggagaagcagcagcgcaaggggagaagcccgaggaagagaccaaga

SEQ ID NO: 32721 - RNA, 77 nt, Homo sapiens
aggcgcgacgagcgcggaggaagaaaggagggcagagagggccagggagaagagcgccagcaggaccagaggcgagg

SEQ ID NO: 32722 - RNA, 62 nt, Homo sapiens
gcacaccccacccaccgggccagcgaacgcagagcaagggcgcaggccgggcaccgccccac

SEQ ID NO: 32723 - RNA, 89 nt, Homo sapiens
caccgcagaacgccacaaccagcgaccgggacgagccaagcagaaggaggaccggagcggccagaagaggccaccaccgacaacaggcg

SEQ ID NO: 32724 - RNA, 78 nt, Homo sapiens
agagacccaacagaagaaagaaacccgaggacagcaccaaacaacaccaaaggagaaagaagagaccccccaaaccca

SEQ ID NO: 32725 - RNA, 76 nt, Homo sapiens
cagccaagcggcacagcaggagggcaccgccgaccgaaaccgcaaacacacgacagaggcaaggcaaacacgaaga

SEQ ID NO: 32726 - RNA, 60 nt, Homo sapiens
aagcagcccgccacaacaaacaaagagagaagaagcaaaccgggaccggaagcaccaagg

SEQ ID NO: 32727 - RNA, 84 nt, Homo sapiens
caggcacagagacggcgacaaagacaccgccaggggacagaaccacgagggacggcaacgagggcccccagccgggccccccca

SEQ ID NO: 32728 - RNA, 70 nt, Homo sapiens
ggcagaggcaaacgccccgcaaagggcacaagcccccgaagacaagaggccggggagaccgacaaccccg

SEQ ID NO: 32729 - RNA, 51 nt, Homo sapiens
gcccggcgccggccgagaaggcagaggcgggaaagggagcagcaccggcca

SEQ ID NO: 32730 - RNA, 59 nt, Homo sapiens
caaggacagggcagcaagaaacaccgcccaccacccccgacacaaggggcacacaccgg

SEQ ID NO: 32731 - RNA, 69 nt, Homo sapiens
ggaaagcacacagacccaaggccaagaaccccacaggccgaggagcagggaaagaccaaaccccaaagc

SEQ ID NO: 32732 - RNA, 58 nt, Homo sapiens
caagcaaccaccagcagcccccagagcggaacacagcggccggagcgggacggaaggg

SEQ ID NO: 32733 - RNA, 105 nt, Homo sapiens
aagcagaccacccggacaccacggaccaaaaagacccgaccaggaaagagagccggagcaagaaaacaccagcgcggagagagacgggaagcgacagaggagcga

SEQ ID NO: 32734 - RNA, 103 nt, Homo sapiens
aaaggcccacacaggacagcgccggccacccaaagcacgggggcaacagaggccaaagaagccccgaaaaacgaagccgggcgcaggcacaacaagaaggagg

SEQ ID NO: 32735 - RNA, 71 nt, Homo sapiens
aacggagaagagacaagcgacgaaagaggaacagagccaccccgggcggagaacggaaaagcaccaggaag

SEQ ID NO: 32736 - RNA, 76 nt, Homo sapiens
gggccccagcaaaacccacacaggagcccagaaagagaggaagccaagcggcaggcccgaccccaagcgcacccgc

SEQ ID NO: 32737 - RNA, 72 nt, Homo sapiens
gagggaggggaccgccgcggggacccccaaaagacaagggcaaaacggaccagacacaaagaggagggcggg

SEQ ID NO: 32738 - RNA, 81 nt, Homo sapiens
gcggggcggggcgagcagaggacccggcgggcggcccgcgggcaggggagacacaagaccggcggccacgcaccccccaag

SEQ ID NO: 32739 - RNA, 78 nt, Homo sapiens
cggggcccaagccggcgcgaggggacagagcccagcccgccggccagggcgggaaaccaacccgcaaggcagaaccag

SEQ ID NO: 32740 - RNA, 67 nt, Homo sapiens
gacgccgagacgacaccagccaaggacccccgggaggcggcaaccgggaaacgcagaggcgcaccgc

SEQ ID NO: 32741 - RNA, 76 nt, Homo sapiens
ggcagacgacgacagaacccgacaagaagcacgaacagcaggccaaagaccagagacccggccggcccggggaagg

SEQ ID NO: 32742 - RNA, 47 nt, Homo sapiens
ggccccccagccacgggaacacccgacagaagcaaggggagacaggc

SEQ ID NO: 32743 - RNA, 73 nt, Homo sapiens
cggaaccaaaagggagcgaagggaaacgccgccacgaaggaccgcaccccagaaggaaacgaccaggcagaag

SEQ ID NO: 32744 - RNA, 70 nt, Homo sapiens
ccaaagcggaccagagacagccggacaccagaaggccagaaggaacgaccaaagagaacgagacaaaaga

SEQ ID NO: 32745 - RNA, 54 nt, Homo sapiens
aagaccaagacggacacggaaaaaaccaggagcaccaggagacaaagccacaaa

SEQ ID NO: 32746 - RNA, 81 nt, Homo sapiens
cggccaagaaagacaaagacccaggaacaaaccgggggcaaggccaaaaagaaggaaacagaagacagccgaaccaagggc

SEQ ID NO: 32747 - RNA, 62 nt, Homo sapiens
gccggacggcggggccgggcccccggccgcaagcagggcgaccggacaccaccaggcgcgag

SEQ ID NO: 32748 - RNA, 72 nt, Homo sapiens
cgcaaaaacaagacggggcgccccacagaggggcgacgagaggggccgggggcaggcgggccaaacccggcc

SEQ ID NO: 32749 - RNA, 70 nt, Homo sapiens
ccaccggcccgccacgcgccgaggcggccccagaggagggccagacaaggggaacacaagaggagagaag

SEQ ID NO: 32750 - RNA, 37 nt, Homo sapiens
gaggaggagcaaccaccaaagggcaaagagaaccagg

SEQ ID NO: 32751 - RNA, 81 nt, Homo sapiens
cgcgagacccaaggaaccaaggcggcccggcgggggaaccacagacaaaagccagaaggaagaccgcacccaggcgaagaa

SEQ ID NO: 32752 - RNA, 74 nt, Homo sapiens
agagggagaagaaacagaacgccccacgaggcggcgccgcgaaaggagacgacaccaagaggaaaaaccaggca

SEQ ID NO: 32753 - RNA, 77 nt, Homo sapiens
gacccaaaccacaggaaggagcgccaaggccagcgccacacacgagccagcggccaaagccaacagccacggaggcc

SEQ ID NO: 32754 - RNA, 71 nt, Homo sapiens
acgacaccggaaaaccaaagacagcacgagcacagaaaggcaaggacaggcggaagaggcaaagacgaagg

SEQ ID NO: 32755 - RNA, 53 nt, Homo sapiens
gcgaaacgcacgagaaggcaaagcagaagaaagacggcagagaggagaaagga

SEQ ID NO: 32756 - RNA, 80 nt, Homo sapiens
accgacaagcccaaacggaagaagaggaagccaaagcacagagccaaaagggacaggaaggcacgagcaaaaaaaagccc

SEQ ID NO: 32757 - RNA, 55 nt, Homo sapiens
aagacaggagacaaggccggaccagaacagacacggacagcgaggcgcccgggga

SEQ ID NO: 32758 - RNA, 79 nt, Homo sapiens
cgcccggcgcagcggggaccggcggcggcgcccaggcacccggcccgggggcagacaccccacaggcaccagcagcaac

SEQ ID NO: 32759 - RNA, 76 nt, Homo sapiens
gaaaggaggaggccaaacgcgccagacgagaaccggcaaagggaggggagagggccagaacgaagcacaacaggca

SEQ ID NO: 32760 - RNA, 83 nt, Homo sapiens
gaggcggaggcgcccaccccacgggaagacgaagaagaagaggacaggcccaggaaagggaagaacaaaggaagagagcagga

SEQ ID NO: 32761 - RNA, 76 nt, Homo sapiens
gcgaccgaggcagccccccaaagcccggccccacaggaagaagccaagaggagaaagaagcgacacccacacgaag

SEQ ID NO: 32762 - RNA, 37 nt, Homo sapiens
gaaacacagaacgcaggacagggccccgcacccaggc

SEQ ID NO: 32763 - RNA, 64 nt, Homo sapiens
aggaccaggacaaaagaacaccgaaaacaacagcccaccagccggacacccgaagcagaagcgc

SEQ ID NO: 32764 - RNA, 65 nt, Homo sapiens
aagagggcaaacaagggaagcacgccgggacaaaacgagagacagggaagcacagcacagcagaa

SEQ ID NO: 32765 - RNA, 56 nt, Homo sapiens
ggagcacaacaggcagacagacaacgaaaagggcgacagcaagccagggggcagag

SEQ ID NO: 32766 - RNA, 74 nt, Homo sapiens
gagaaaagagaggaaacacgaagaaggcaagcaccgacgaagcagaggagacaagaggcaaaggcggcgggccc

SEQ ID NO: 32767 - RNA, 68 nt, Homo sapiens
cccgacaaaaggagaagccaaaagcaggccggcaccggaggcagaacccaaggggcaggaagaggcag

SEQ ID NO: 32768 - RNA, 75 nt, Homo sapiens
cggagaaccaccaaacacagggcagaaagccagacaccaggaggaggcaaaacagacagaacgcagaaagcaggc

SEQ ID NO: 32769 - RNA, 82 nt, Homo sapiens
caggcggccccgggggaaccgaggaaggcacaagcagagacacagaaacacagcaagaaggggaaacgcgcaggagccggaa

SEQ ID NO: 32770 - RNA, 79 nt, Homo sapiens
gacgaggcaagaccgaggaggaaccagaagccagacagacacagcacagcagccacgaagagcaaagcaagccgaaaaa

SEQ ID NO: 32771 - RNA, 78 nt, Homo sapiens
cgcagcggcaggacgaaggaggcaaaagcagaccggaaaacccaccggcaagaccacacccgaggggagcccaggaca

SEQ ID NO: 32772 - RNA, 65 nt, Homo sapiens
gagagagaaagaagccaccaccaacacgagaaacaagcagggcacagcggagaggggcgagaggg

SEQ ID NO: 32773 - RNA, 75 nt, Homo sapiens
aaaagggaagccaagaacagcaacgacccaaaggagaggaaggaacaaggcaagaagcaagcaaccaggcgccgc

SEQ ID NO: 32774 - RNA, 70 nt, Homo sapiens
acacgcgcacacaggcaggaggcgggaaacgcagccggaagaagcaaggaagccggaggcaaggagcaga

SEQ ID NO: 32775 - RNA, 82 nt, Homo sapiens
agcgacggggcaagggcgagaccggagagccgcaggacggcgcggcagagccccgacgccacagaacgggacgcggagggcc

SEQ ID NO: 32776 - RNA, 85 nt, Homo sapiens
agcgaaaaagggagacaagcacaggaaaacgaaacaccgaagcggaccacgaggagaagggggccgaggcgacgagcagacagca

SEQ ID NO: 32777 - RNA, 61 nt, Homo sapiens
aaggccaaaagccaaagcggaaccaacggccagacagccaccgaaggggcccagggaccgg

SEQ ID NO: 32778 - RNA, 75 nt, Homo sapiens
gggagcgcagcggcgcgacacaggcggggccgacgggggagacggagccccagaccacgcggcggaccaagccag

SEQ ID NO: 32779 - RNA, 58 nt, Homo sapiens
ggggggccagggagcccggaagggcacccgccagcagccagcaacaccgccagcggca

SEQ ID NO: 32780 - RNA, 86 nt, Homo sapiens
gcgggccgaggagcccgcgcggcgcggagagagacaagagccgccagagcgcggccgccaagggaagagacagcgagcagagacca

SEQ ID NO: 32781 - RNA, 71 nt, Homo sapiens
acaaaggacaggaagaggagggggagccagagcaacaccgcccgaggggccaaaggaaaaggaaggaaaac

SEQ ID NO: 32782 - RNA, 54 nt, Homo sapiens
ggaggaaggaaagagcagagcagcaaacaggccaaggaaaaggaacagagagag

SEQ ID NO: 32783 - RNA, 86 nt, Homo sapiens
acaagcccgcgggccggcgggggacgaacagcggggacgccccagcagaccgcccaggagaggaaagcaggaggaaagaccaccca

SEQ ID NO: 32784 - RNA, 69 nt, Homo sapiens
ccagccagaccagggacaaagagcaaacagacagggccgcaggcgggggaagcaccgcaaacaacaaag

SEQ ID NO: 32785 - RNA, 69 nt, Homo sapiens
caggcgggaacggggaaacaggaagggcagcaaaggggaaaaaaccggccacagacccgaagaccacca

SEQ ID NO: 32786 - RNA, 73 nt, Homo sapiens
cgggggaaaacacaccacagggagaggccaccgaggcgcaagaacgcaagaaccacccggcaccaccaccccc

SEQ ID NO: 32787 - RNA, 73 nt, Homo sapiens
gaaaccgcccggagcacgaccgaggcggcaagagggcacagggagacagcgcaagagccgaacgacagaagac

SEQ ID NO: 32788 - RNA, 81 nt, Homo sapiens
ggcgggcaggcaacccccggaaccggcaaacaagagcaaggggcacccggcaaggagaaacacgaaacgcgcaagacccac

SEQ ID NO: 32789 - RNA, 53 nt, Homo sapiens
cggaggaacaggaagggacaggaaacgggcaccgacagcaggggaccgggaac

SEQ ID NO: 32790 - RNA, 85 nt, Homo sapiens
cagaacaaagcaaaaacccagaagggaggccggcccagggaaggagaggaccagagacaagaagccccagaggagacaagcaggc

SEQ ID NO: 32791 - RNA, 72 nt, Homo sapiens
gggcgccggcgagagccgcaccgccaacccccgagcaagacgggggaaagaccaaaccccaaagcaggccaa

SEQ ID NO: 32792 - RNA, 101 nt, Homo sapiens
gagaccggaccgagagcggaccgagagcgcgaaacgcacgagaaggagaaaccccagaggaacccacgagaaaaacagacaaaggaggccgcagaagaggg

SEQ ID NO: 32793 - RNA, 76 nt, Homo sapiens
cacaccccgggccacgcggaaaacacaagaagggagaccgggagagaaaagagaagcaaggaggcaggggcaccca

SEQ ID NO: 32794 - RNA, 102 nt, Homo sapiens
cggccccagagcccaccgggaggagaaggaggaggaacggccccgagccccggccccaaagacccaaaacagagacaccccccagcccccgcgccccgaaaa

SEQ ID NO: 32795 - RNA, 51 nt, Homo sapiens
aagacagcccaaacgccccacgaccaggagaccggaaacgagagaaacgaa

SEQ ID NO: 32796 - RNA, 68 nt, Homo sapiens
caagagaaagcagggaagcgacagggagacacccagacagcccgaacacggaaaccgacgacggccac

SEQ ID NO: 32797 - RNA, 41 nt, Homo sapiens
cggaccacgggaaggggcggccgcccaacaacaacggagcg

SEQ ID NO: 32798 - RNA, 39 nt, Homo sapiens
acggacgcagagaaggaacgggggcagcccaggccgcgc

SEQ ID NO: 32799 - RNA, 58 nt, Homo sapiens
gaccacaacaagggccggaccacccagagaagcaacggaacaccgacaaggcaagaca

SEQ ID NO: 32800 - RNA, 67 nt, Homo sapiens
cgcaccgcgccgccgcgccgccccacaaacaaccggaccgacgacaagcccgacacccagcggcacc

SEQ ID NO: 32801 - RNA, 78 nt, Homo sapiens
ggcaccgcggagcaaaaaaagagcccgcaagaagaacagagacagcagccaaacccccaggaaagcgagagcccacgg

SEQ ID NO: 32802 - RNA, 48 nt, Homo sapiens
gcaaagcagaagaaggcagaacaacaaaaccaaaagagcaaggaagaa

SEQ ID NO: 32803 - RNA, 70 nt, Homo sapiens
ccagcgccgcgggccgcaggccgcgagcagcggacgccggccgccgcaggagggacagcaaggacacccc

SEQ ID NO: 32804 - RNA, 108 nt, Homo sapiens
cccgcccggccgcgggagcccgggcgcgcaccgccgcccccccagacaagaggacaccgcggaggaagcaacggggcggcacacaaggagcgaagggcagggagaacg

SEQ ID NO: 32805 - RNA, 71 nt, Homo sapiens
ggagcaaaggcggcggaggggcaggaggcgcggacacgcaaaccacacaagaacccacaggagggccagag

SEQ ID NO: 32806 - RNA, 68 nt, Homo sapiens
ccgcaggagcagcaaacgcaaggggaaagagggggacccaaggacgcgaaacgccccacaaggaaaga

SEQ ID NO: 32807 - RNA, 71 nt, Homo sapiens
acaagaccccgcgccaccaaagggagggcggccaaccgcacagacgaccagccaacagaaaaacagccgac

SEQ ID NO: 32808 - RNA, 110 nt, Homo sapiens
cgaagacacgcaaccaaaggcgacggcgggagagggaggggcggaacgggcacgaagcggaaccaaaaaacacggcccacagccaagagacagaaaaacagcggcaggca

SEQ ID NO: 32809 - RNA, 79 nt, Homo sapiens
aaagcacagaccccggaaacacccaccaccgaaccagagggagcacagcgcggaagccccgaggcagccccgcggagga

SEQ ID NO: 32810 - RNA, 82 nt, Homo sapiens
gcagaccgcgaccccggaggccggcggacaggccgcacaaaaagaggcagacggcccaaaacgccacccggaacaaaccagc

SEQ ID NO: 32811 - RNA, 82 nt, Homo sapiens
cgggccaggaacaagccaccagcaacacacagcacgacaggagggagggaaagcagcaggagcgcacaccgagcccagggcc

SEQ ID NO: 32812 - RNA, 64 nt, Homo sapiens
aacgagacagaacaggaaaaagggagagaagagacccacgcgagaaccaggcgcgaacgaagaa

SEQ ID NO: 32813 - RNA, 72 nt, Homo sapiens
gagcagacacgcaaagaagcccgaggcgcaagagacaaaaccaaaggcaagaaccggagcaggagaaaagcc

SEQ ID NO: 32814 - RNA, 71 nt, Homo sapiens
gaaaggggcacggcaaaagaccaagagcacagcagaaggaaacaggaacacgaaagaggaaaaacgcacaa

SEQ ID NO: 32815 - RNA, 82 nt, Homo sapiens
accccaggacaggagcagagacacccgcagccgcacagccgggccggacccggagcagaggaccgggcgcgaggagggcccc

SEQ ID NO: 32816 - RNA, 63 nt, Homo sapiens
ggaagagaaagagaaagaccagccaaacagggaagggacagcgagggcagaaagggcccagcc

SEQ ID NO: 32817 - RNA, 82 nt, Homo sapiens
ggcaggggcggaggcggaggcagaggggaggcgcgaaaggggcaagaagggagggagcggcaggcacgggaacagcccacac

SEQ ID NO: 32818 - RNA, 78 nt, Homo sapiens
aggagaccagcaaagaaccaggaacaccacccgcaggagggcaaaaaaggagaaagccacaaggacaaaagacacgga

SEQ ID NO: 32819 - RNA, 58 nt, Homo sapiens
cggccggccggggggaagcgagcgcgggggagccgggcgggaggcgaggagccggagc

SEQ ID NO: 32820 - RNA, 81 nt, Homo sapiens
caaaagcacacaaagaccccccccacaggggagacagagggccaagcagcgccccagaacccaggcaagcaagcacagaac

SEQ ID NO: 32821 - RNA, 73 nt, Homo sapiens
gggacaaggcgcacaaagggcacaacccggaccggaaaccaaaccccaagaaaggcacagggcggagggggag

SEQ ID NO: 32822 - RNA, 81 nt, Homo sapiens
gaaccagggagaagccgcccgaacaccagagaagcagggcccgagcggaagaggaaagaaggagccgcacccggaaggccg

SEQ ID NO: 32823 - RNA, 59 nt, Homo sapiens
gacggccgcaggccagcccgcccgccaccacccggaagaggcagacggccggggggccg

SEQ ID NO: 32824 - RNA, 78 nt, Homo sapiens
cagggccagcccgggaccacggaccaaaggccgggcgcagaacccccagaccacaacagaagcgaaggggacaggggg

SEQ ID NO: 32825 - RNA, 54 nt, Homo sapiens
agaaagcgcccacgcacgaaagcccaggccaaaaagagggccaaacgaccagga

SEQ ID NO: 32826 - RNA, 82 nt, Homo sapiens
ccgggggaaccgacaaggcaacagcagcggccagggccagagcgcaaccgaacgcacacgaaggaagacccaggaaagggga

SEQ ID NO: 32827 - RNA, 78 nt, Homo sapiens
agagcagggccaagccacaaggaacaccaacacagcggaccaaaccccaaaaaggaaagcagggcgaaaccagaagcg

SEQ ID NO: 32828 - RNA, 48 nt, Homo sapiens
ggagcggaggcgcaggcaagccagcccggagacggggagcaaccgcca

SEQ ID NO: 32829 - RNA, 78 nt, Homo sapiens
agggcgagcggacccccggagaaggaacgaagcagagcccaacaggggagccgagaagccgaagcagaaggaaaccag

SEQ ID NO: 32830 - RNA, 80 nt, Homo sapiens
aaacagcaagcgcagagccaaacagccaggcagaggacaggcagaaaaaaggaggccaggcggaagggcccccgaacagg

SEQ ID NO: 32831 - RNA, 68 nt, Homo sapiens
aacggacgcaacagaggaggcgacccgggccgaacacgcaagggaagaagggcgaacggcgggagaag

SEQ ID NO: 32832 - RNA, 73 nt, Homo sapiens
caaccaacaaacacagaggaaagaggccaccacacccgagcaaaagcccaaaagcaaagcagggcagcaaaga

SEQ ID NO: 32833 - RNA, 80 nt, Homo sapiens
cagcgcaggggcgggaaagacccaggagaagccgcccaaagaacgcgcagaaccggccgaaaagcacaaacagcaagaaa

SEQ ID NO: 32834 - RNA, 88 nt, Homo sapiens
agacacccgcagcaacaagacccggcaggaccaggacccccgcacagcgaccgacgcgaacaccaggggcgaacgacccccaaccccc

SEQ ID NO: 32835 - RNA, 57 nt, Homo sapiens
cgcacacagcaagcacgagggcaggcgccccaacccaagccagaggaggcacccagg

SEQ ID NO: 32836 - RNA, 54 nt, Homo sapiens
gcgaggagcaccccccgccggaaagagcccaaaagcaaagcagggcagcaaaga

SEQ ID NO: 32837 - RNA, 90 nt, Homo sapiens
cacgaaccagacggaccgggaccgcgaagaaagaccccgaaaggccagggagaaaagaagcagcccacgaaccccgacaacagagcagaa

SEQ ID NO: 32838 - RNA, 84 nt, Homo sapiens
gcggcccgcgggccccgggcccgagccgcaggcgccacggccggggccgcccaacaacaacggagcgggccacgaggccgagcg

SEQ ID NO: 32839 - RNA, 71 nt, Homo sapiens
ggaagcaaggagggaaaaggcagaaggagaaaaggcagccaaacgaaaagggggccaggaagcaaaaagac

SEQ ID NO: 32840 - RNA, 62 nt, Homo sapiens
cgcaacagcaccggggacagcgagcggcacagaagaccacgcccagacaagccagcgccagg

SEQ ID NO: 32841 - RNA, 76 nt, Homo sapiens
gacccagccaggcagaccccgggcagcaggggggggccccagcccggccgaacgggcgcacgacacaaacacaacc

SEQ ID NO: 32842 - RNA, 83 nt, Homo sapiens
agaaaggccggagagcggcggacagcagggagcggccgagccacccaaaaacagaaggcaggcccacgggagccgagaccccc

SEQ ID NO: 32843 - RNA, 86 nt, Homo sapiens
ccgccccggggagcgcaaggccgccccgcccggcgggagggcgcggggggcgcggaggcgcaagagcaaaaccgcccagccacaca

SEQ ID NO: 32844 - RNA, 75 nt, Homo sapiens
aagaaaccaaacagaaccagggagaagaaaagcaacacagcgaccagaaaaaacagggagccaccagcccaaagc

SEQ ID NO: 32845 - RNA, 66 nt, Homo sapiens
acccaccgagccagggagcaccagacacgagacccgagcacacaagggaaggaacgggcaccgaac

SEQ ID NO: 32846 - RNA, 78 nt, Homo sapiens
aggggaggcaaagggaggaggaggaccggaggcagcgaaaaaaacccgcagaaagcgaaaagaagggggaggaacaga

SEQ ID NO: 32847 - RNA, 78 nt, Homo sapiens
aggcccaggcggccggcagcggcgcgcgggcaggacagaggagagggaccggaagcccgggaacgaagaagcacccgg

SEQ ID NO: 32848 - RNA, 68 nt, Homo sapiens
ccagagaagcgccaaaggaagagagaagaagcaaaccgggaccggaagcaccaaggagaaaaaggacc

SEQ ID NO: 32849 - RNA, 78 nt, Homo sapiens
accccgcgcgaaccaacaaggcaaaagcagaccggaaaacccaccggcaagaccacacccgaggggagcccaggacac

SEQ ID NO: 32850 - RNA, 68 nt, Homo sapiens
acaaccgacccgccaagcgcacacaaaagaggagaaaaccgggcgcagccagcgaggcccggcagggc

SEQ ID NO: 32851 - RNA, 62 nt, Homo sapiens
gggacagggcaccggcaagagcagcccgacggccaggaggcgaagagacgaggaagcccagg

SEQ ID NO: 32852 - RNA, 73 nt, Homo sapiens
aggacaggccaaaacggaccccaacccccagccacaacgcgaaccgggcggacgaaggaggcggcaacaggac

SEQ ID NO: 32853 - RNA, 77 nt, Homo sapiens
caggagcacggacgccagaacggcaaaggagaaagccgagagagacgacaggagggagccagagccagaaaaaagga

SEQ ID NO: 32854 - RNA, 73 nt, Homo sapiens
gcaaggagcggcggcgcgcaaaaaagaaaccggaacaccaccagagaccacgcaaaggaacaggaggccaccg

SEQ ID NO: 32855 - RNA, 75 nt, Homo sapiens
cagccggaggaggggccgcaagaccggggccgaccggcggcaggagggaaagcaaggaaacgcccccccagaggc

SEQ ID NO: 32856 - RNA, 71 nt, Homo sapiens
ggaaaacaaacaaaaccaccagaccaaggccgagcccccgaaacaaccaaccagaggagaggaagcccaaa

SEQ ID NO: 32857 - RNA, 55 nt, Homo sapiens
cggaaacaaagggaacaaaaagaacccgcaacggacggaaggaaaaggacaggag

SEQ ID NO: 32858 - RNA, 45 nt, Homo sapiens
gagagaaagcaagcaaagaacaaggaagccccccagaaaagaggc

SEQ ID NO: 32859 - RNA, 73 nt, Homo sapiens
gcccggcaaagaagagagggagagaacgggcaagaaggcgcggggcaacggggaacagaacagcggcaacaga

SEQ ID NO: 32860 - RNA, 74 nt, Homo sapiens
ggaaaagggggaggaagagaagacaacgcacaacagggcaaagaagacgagaccaacgcgcgggagcgccaaaa

SEQ ID NO: 32861 - RNA, 72 nt, Homo sapiens
acgcgaaccggcaggccgcgccaggagccaccaagcgggaaacccagacgacaaggaaggccaagggaccca

SEQ ID NO: 32862 - RNA, 63 nt, Homo sapiens
ccaccaaaaacaccgagcagaccagaagcgagcagcccaaaccacagacaccaggagaccgca

SEQ ID NO: 32863 - RNA, 66 nt, Homo sapiens
gcccggcgccggccgagaaggcagaggcggacgcaaggccacggaggaacagcagcgcaggcggga

SEQ ID NO: 32864 - RNA, 76 nt, Homo sapiens
cggccggcaacacacggcgggacccaggccgaagcagaaggcagcgggccaagcggcgagcccagaacgaagcggc

SEQ ID NO: 32865 - RNA, 84 nt, Homo sapiens
accccaccaaccgcccacccagcgcacaccccaggcaacagcacccacccggagccggagccgggccagcgccgaggagcgacc

SEQ ID NO: 32866 - RNA, 61 nt, Homo sapiens
cgccagcgcaagcggcggaagccgggcagaaaacacggagcggaaccgccagaccacaaga

SEQ ID NO: 32867 - RNA, 72 nt, Homo sapiens
aagcgcaacaggaggaaaacggccaacccaccgcgccgaaagaagaaagagagggacggaccccgggccccc

SEQ ID NO: 32868 - RNA, 76 nt, Homo sapiens
acccgagaacggcgggaagagaagacacgagcacaaacgccaaccgccgccaggagaccaggagacaccgggggaa

SEQ ID NO: 32869 - RNA, 77 nt, Homo sapiens
gagagaaggggaagggccaccggaaagcacagagaagcaaaaaccggaaaagacggcagacagaggggaagcggagc

SEQ ID NO: 32870 - RNA, 78 nt, Homo sapiens
aaaaaggccgggagaccaagaaaaggagcccagggcccggaggaccgaaagaagagccagaagcagcaggaccggcgg

SEQ ID NO: 32871 - RNA, 62 nt, Homo sapiens
caaagcgggagagacggaccagaccagggccgagcacaggacgagaacccccgcgaaccaga

SEQ ID NO: 32872 - RNA, 80 nt, Homo sapiens
agaccccaaagaagggagccgaagcgaggcggaaaacgaagacagcaagcccagccacagagcgagaaggaaaaaacagg

SEQ ID NO: 32873 - RNA, 57 nt, Homo sapiens
cccacacaaacccccaaagaacaggccagagagggaaacacgagcgaggggaggcca

SEQ ID NO: 32874 - RNA, 76 nt, Homo sapiens
ccccccggaaagaaagacacccaagaaggcaagaaacaacagcgcccgacaagccaggggggaccacgaagaaggc

SEQ ID NO: 32875 - RNA, 72 nt, Homo sapiens
ggggcgggacggcgcgcccgacccgcaaccaaaggggacagagcaaagaaaggaggaaaagccggaaacaaa

SEQ ID NO: 32876 - RNA, 58 nt, Homo sapiens
agaggccagccccccgagggcaacgagaaagagacgcgccacagagccgggacagcag

SEQ ID NO: 32877 - RNA, 65 nt, Homo sapiens
ggagaccgaaggaagaaaccgggggcagaacccccgagcggccccccagaccagcccgaccacgg

SEQ ID NO: 32878 - RNA, 73 nt, Homo sapiens
cccgggggcccagcgggcgccgcgcacgcgaccccagccacccccagggccaggcaagaaagagcgcgacgag

SEQ ID NO: 32879 - RNA, 74 nt, Homo sapiens
cacaagcaaccggagggagcaaaagggcaaaaaccacgaaggacaaaaaaggagaacaagacaggcacacagac

SEQ ID NO: 32880 - RNA, 69 nt, Homo sapiens
agggaaacaggaaaaaaaaggaggcgacaagcaacaacaacaagcgaacaaacggagagacgccgaacg

SEQ ID NO: 32881 - RNA, 55 nt, Homo sapiens
acgcaacgggcccgcgcgcagaaggcgcagcgccaggccaccagaccgcgacacc

SEQ ID NO: 32882 - RNA, 76 nt, Homo sapiens
caggaaccaagggcaacaggaaggcgcaagcggagccggagcgaggcgggggaggcagcagaagcccgcccccgag

SEQ ID NO: 32883 - RNA, 74 nt, Homo sapiens
gggaaaaagaccaaaaggcgcaacacgggaagaggagggcgccagcgaacccgccgagccagccagacacacgc

SEQ ID NO: 32884 - RNA, 81 nt, Homo sapiens
aacgaaaggaacaggagccgccaggcgacacaccggaagcaggagaaaagagccggaagcaaaccccaggaccaaagcaaa

SEQ ID NO: 32885 - RNA, 39 nt, Homo sapiens
cgaggcaggccgaaccacaaggcggacaaggagggaaac

SEQ ID NO: 32886 - RNA, 83 nt, Homo sapiens
ccaacgaaaggaagagggagcagagcaagaaaaaaaggaagacgagaccagcggagaccagaggcccacggccaacagcccag

SEQ ID NO: 32887 - RNA, 35 nt, Homo sapiens
cggagcagacaaagaaaaccgggcacaggaccaaa

SEQ ID NO: 32888 - RNA, 72 nt, Homo sapiens
gcacccacccggcgcgcgcgcccccagccccaagaaaggcacagcaagcaacccggccgaggggggcacccc

SEQ ID NO: 32889 - RNA, 73 nt, Homo sapiens
acacgcaaaacacaagaagaagagcgccacagcggcaaacaggcagacagaagaagagccaaagcccaggacg

SEQ ID NO: 32890 - RNA, 51 nt, Homo sapiens
acaaaacggaaaagcggcgaacacaccaccagcaaggagggcacaaccgga

SEQ ID NO: 32891 - RNA, 79 nt, Homo sapiens
gcaggcccgggcgaagagcccccccccaagggggcaagaccagagaccacagaccccagaaccagggcacccggacagc

SEQ ID NO: 32892 - RNA, 67 nt, Homo sapiens
aaaccaaaaaaccaagaacggagaacgaaaaacccaccagcaggccccgcgggaccccgggcgaaga

SEQ ID NO: 32893 - RNA, 76 nt, Homo sapiens
cagcagcggccaaacaacggcggaaagcagggccagaggaaaaagcccaggaccaacaaccgaaaagaggagaaaa

SEQ ID NO: 32894 - RNA, 69 nt, Homo sapiens
gacgccaggaaaccgccggcacaccaaacggcagaggaagaagagagggcgaaggaggccacacagaag

SEQ ID NO: 32895 - RNA, 73 nt, Homo sapiens
caaggcagggagcccgacaacacagggcagggggagaccaccgagcagaaaaaccccagaaaagacggggaaa

SEQ ID NO: 32896 - RNA, 72 nt, Homo sapiens
ggagccaagagaccaagggacgagacaccccagcaccccaagagcaccccagcggcacccgcagagaaagag

SEQ ID NO: 32897 - RNA, 72 nt, Homo sapiens
cccagccggcgacgacccacccgggggggcagcgcacggaggagcggcgggccagacagcggcggagaaacc

SEQ ID NO: 32898 - RNA, 70 nt, Homo sapiens
cccgcgcggggcgcgggcgcggccggaccgcagccgcaagcaaaggacccgaagacacccaggggaagag

SEQ ID NO: 32899 - RNA, 79 nt, Homo sapiens
acgacccgccgagcaaaaaaagagcccggaaggaagagacagagacagagcaaaaccagacaacgaagagaggaaagaa

SEQ ID NO: 32900 - RNA, 89 nt, Homo sapiens
gccaggaggagagcccacagggcaaagagagcagacccgaggagcccgcagaaagcaggagcccggaaaggagaaggaaaagacggcag

SEQ ID NO: 32901 - RNA, 99 nt, Homo sapiens
gccgcgaagcgccgccggccccgccgccaagaggagcgagcggacccgcgaggaccacacgaaggggcagaagagcacaagacggaagagaggagcgac

SEQ ID NO: 32902 - RNA, 85 nt, Homo sapiens
gccaagagcagaaccagagccacccgggagaggaagagcgaggaggaacgcgcaaggcaaagcaccgagcaaacgagacggaaga

SEQ ID NO: 32903 - RNA, 74 nt, Homo sapiens
agcccccgcgggcccagaaaccagaagggccggagaagccacgagcagacagcaacaagggcccgggaagggaa

SEQ ID NO: 32904 - RNA, 71 nt, Homo sapiens
aaagagaagaagcacccgagaaaaagagagacaacgagggagacggggaagggagaccgcgagacacggcc

SEQ ID NO: 32905 - RNA, 77 nt, Homo sapiens
ccaggcccgggcgccccccacagagaaagaaaccacgggcgccgaggaggaagaggcccaggggggaagcagacagc

SEQ ID NO: 32906 - RNA, 82 nt, Homo sapiens
ggcgacggcaggacgcgggcagagagcggacccgcgacgcgggcccagcagccacagggaccagcaggccaggaaggaaaca

SEQ ID NO: 32907 - RNA, 81 nt, Homo sapiens
aagaggcggcggagcggcagggcggcgcgaggaggcgccccaggagcccccgcgccccgccacccgggccacgccgggcgc

SEQ ID NO: 32908 - RNA, 77 nt, Homo sapiens
gacgcaggaagggcccccccacacccccaccccacccacacacggcggccggaccccagaagcgagccccggggcgg

SEQ ID NO: 32909 - RNA, 78 nt, Homo sapiens
cggagagacacacagcagcccagccagcccgagcaagaaagagggaccaagaaaggcccagggaccaaagcccggaca

SEQ ID NO: 32910 - RNA, 100 nt, Homo sapiens
acggacgcaccccacgggaacccacgaccaaagcggaaggccccggcaggcgcccgagcacgccaaccccaaccccacggacagcgcccccaccgaacac

SEQ ID NO: 32911 - RNA, 110 nt, Homo sapiens
gccgccgccgccgccgcgggcgccagaaggaagaggcggacggaggagcaggcgagaagagaaggggagccgccaccaaaagcagacggaaaacccacggggaagaccac

SEQ ID NO: 32912 - RNA, 71 nt, Homo sapiens
cgacagagacgaaaaaccgaggcgagacccaaagggaacgggcgacgaagcggcgaagcaggagaagccca

SEQ ID NO: 32913 - RNA, 82 nt, Homo sapiens
ccaccacgcccgcaacagggcaccaagagaggcgagagaccagcccccaacagggaacagcggggcacacaggcgggaaaac

SEQ ID NO: 32914 - RNA, 82 nt, Homo sapiens
gggcacgggcgaccggcccgcgagggaaagcccagaggccggaacagaggaaagagggaggacgccgaccaggaggccaacg

SEQ ID NO: 32915 - RNA, 77 nt, Homo sapiens
gaaaggcacgaagggaaaagagccgagggacaagacaacaaacagaagaagaggacagcgcccagccccaggcccac

SEQ ID NO: 32916 - RNA, 64 nt, Homo sapiens
caggaacaagacaacagagcagaggaaaaagacaagagaggccaacgcaacgacgcacaggaac

SEQ ID NO: 32917 - RNA, 60 nt, Homo sapiens
cccaagcaacagaagcagccagcagaggcgcagggccagcagagcagagaaagggggagg

SEQ ID NO: 32918 - RNA, 54 nt, Homo sapiens
gaggcagggccccagggaaggccaggcccaaggaaagcccaggaaagagacacg

SEQ ID NO: 32919 - RNA, 70 nt, Homo sapiens
aaagaaccagcgaagaaggaaagcaaggacaggcacgccacacacagcggcagcggagagccgcccgacc

SEQ ID NO: 32920 - RNA, 83 nt, Homo sapiens
acaaggaaggaagaaggcgcacaccccagcgcgcaaagcgcgaggggcgaggggagccgccaccaaaagcagacggaaaaccc

SEQ ID NO: 32921 - RNA, 85 nt, Homo sapiens
ccccagccccggcagagggacggacacgcggacgcagcggagaccgagacaggggcccggcaccgcgcccgagcccacccacaga

SEQ ID NO: 32922 - RNA, 53 nt, Homo sapiens
gagccaccaccagaacggaggcggacgccccggggcacagccggggcggcaag

SEQ ID NO: 32923 - RNA, 61 nt, Homo sapiens
gaaccaccaccgccggacaaggagccccgcgcgcagcagcaggagaaggaccaaaaggaac

SEQ ID NO: 32924 - RNA, 82 nt, Homo sapiens
aaccgaaagcagcgggcgggggaggaggcaacgggagccacagccggcccacccgcagaagacagcggagaacccacgaaca

SEQ ID NO: 32925 - RNA, 86 nt, Homo sapiens
ccccggagagagcacgaaggacccagcagggcaccagggccggggacacaagcaacagccagaacaagccgaagcacgaaaccaag

SEQ ID NO: 32926 - RNA, 75 nt, Homo sapiens
aaaggaacgcccacccacggggaccagcagccgggccagggccagagcaaagcccccggcccgagaagcggcccc

SEQ ID NO: 32927 - RNA, 85 nt, Homo sapiens
gcgcgggcgcggggccgaaccccggggggcagaaccgaagagccaagccgcaggaagagagagccagcagccaaaaaaacgcccc

SEQ ID NO: 32928 - RNA, 73 nt, Homo sapiens
gcccgggaccgcccggagcaacggggcggcacacaaggagcgaagggcagggagaacgccaggcacagcacga

SEQ ID NO: 32929 - RNA, 40 nt, Homo sapiens
gcagcgaccgaaagccgccaggggccagaaccgcccaaac

SEQ ID NO: 32930 - RNA, 72 nt, Homo sapiens
gccacaccgacaaagggaaccacgacagacacaaggagggagaacagcacaagcgggaccagaagggaggag

SEQ ID NO: 32931 - RNA, 80 nt, Homo sapiens
gagacgcccgggcgcgcgcgcgggcgcgccaccgacagagacacggaagccggagcagggaagaaggccaaacggagcga

SEQ ID NO: 32932 - RNA, 76 nt, Homo sapiens
aaagacgggggacgcagccacgaacgccgggaagagaacccagcagggcagagccaccagaaggagcggcacagag

SEQ ID NO: 32933 - RNA, 70 nt, Homo sapiens
agcgcagaagcgagagacacccagaaggcgcagcagcaggaaaacccagagccacaggagagaaaaaaag

SEQ ID NO: 32934 - RNA, 63 nt, Homo sapiens
ggcaaggggccaccaggaggccagggggcgccaggcagcaagagagggaaaggaaaggcaaac

SEQ ID NO: 32935 - RNA, 56 nt, Homo sapiens
cggcaggggcaaccagacgggccaagaacaccagaggaagacaaaagaagagagcc

SEQ ID NO: 32936 - RNA, 58 nt, Homo sapiens
aagacagcccaaacgccccacgaccagggccaggacggggggcccggagcgagacgag

SEQ ID NO: 32937 - RNA, 60 nt, Homo sapiens
cgagggcggcggaaaaagccgccacacgccaaaggcaacgcaaccaccaccgaggccccg

SEQ ID NO: 32938 - RNA, 72 nt, Homo sapiens
ccagacgccaacgcaggagcacccaggcccggcgaccggcagggagcagccgcccgccacgcgaggccccaa

SEQ ID NO: 32939 - RNA, 70 nt, Homo sapiens
gcgaagagaccgagccggagggaacagaaaagagagggacagacacaacaacccaaagccaagcccccgc

SEQ ID NO: 32940 - RNA, 74 nt, Homo sapiens
gccaaccaggcccgagacaaaaagacacccggaagcaggcgaacgaaggcaaacgagcagacggcccaggcaac

SEQ ID NO: 32941 - RNA, 76 nt, Homo sapiens
gagaggcgcccgaggcccagccacaccagcggacagccaccaagaggccagaaggcagaacagcgacacgaacgga

SEQ ID NO: 32942 - RNA, 111 nt, Homo sapiens
cgcgagccccgggcccgcccggggccggcgaggccaccgaggcgaggagaggagagccagggccccccgggccggccgccggacgacacagcccgccgccaggcacgggga

SEQ ID NO: 32943 - RNA, 80 nt, Homo sapiens
acgacaccgccagcaccgaccaccgaggcggagggggagaacacccaggccaggcaagacccgcccgccaagcgagcagg

SEQ ID NO: 32944 - RNA, 78 nt, Homo sapiens
ggcagccaaaggcacacggccagcgggagcgaccgcggaacgccacaccccgagagcccagcgcgaaggagagccccg

SEQ ID NO: 32945 - RNA, 82 nt, Homo sapiens
acccaagcccgcgagcaggagaggaggcggcagaagcacacaagaagacaccgcagcggcagccacgccacggacagaccag

SEQ ID NO: 32946 - RNA, 67 nt, Homo sapiens
cccaagaaggagaagccccgcagccggagcaggaagggcgggcgagggcgcgcacagcgagcggagc

SEQ ID NO: 32947 - RNA, 72 nt, Homo sapiens
gaagaaaagaaccagggacccaaagcgaccaccgaaaacacacggagaagaggcaccacacccagaccacca

SEQ ID NO: 32948 - RNA, 74 nt, Homo sapiens
ccgaacacaagagggcaacccccagcgggggagaggggagccaacagaagccagaaccagaccagagccaaaac

SEQ ID NO: 32949 - RNA, 40 nt, Homo sapiens
cgcccagaagaagggccgagcccaagaagacggcagaaca

SEQ ID NO: 32950 - RNA, 77 nt, Homo sapiens
ggcccaacgaagagacgacacaaggagacgaggggaagaggaagagagaaggccacgcccgaccccaagcaacaacg

SEQ ID NO: 32951 - RNA, 84 nt, Homo sapiens
gggcggccgggggccagagaccaaggcgcgcccggcgggccggaccaagcagcagcaaagaacacaccaagagacagaaaccaa

SEQ ID NO: 32952 - RNA, 74 nt, Homo sapiens
ggagcaggaaaaacacagagacagacggcggcaggagccaaaaaccgaacacccggaaggggacaagggacggc

SEQ ID NO: 32953 - RNA, 70 nt, Homo sapiens
cggagaaccgaggcagcagcggggggccaggaacccaaagaaggaggacacacgcaccgggcgccaaggc

SEQ ID NO: 32954 - RNA, 60 nt, Homo sapiens
cccgagcggggggacgcgccaggcacagcagcaggcgcagccaggcaagaagcagccggg

SEQ ID NO: 32955 - RNA, 82 nt, Homo sapiens
agcgggcgggccccgagagcagcagcgggccaggccacggaagaaggccgggagaagagcacggggcgagagcagccaagca

SEQ ID NO: 32956 - RNA, 71 nt, Homo sapiens
cgaggagagccaaggccaacccaaaaggaggccaggaagagcaggaccgacagcgggcccaaggaacagcc

SEQ ID NO: 32957 - RNA, 75 nt, Homo sapiens
aaaaacagaacaaaaagcagaaggcagagccgccaagcaaaacagccaccacccacgacagcccaacccgacggc

SEQ ID NO: 32958 - RNA, 62 nt, Homo sapiens
acagacggcccgggcccccccaaccacgaggagcaagagaggcagagaagagagacgcccaa

SEQ ID NO: 32959 - RNA, 74 nt, Homo sapiens
agccagacagagagagaaacccgaagcgcggaaaacccagggggcgaacacggaagacccgccgccaggaaggg

SEQ ID NO: 32960 - RNA, 77 nt, Homo sapiens
agaggagagagaccagaggaggcccagggaccgcaggagacacggacacgagaacaacagaagagaaaaagcaccag

SEQ ID NO: 32961 - RNA, 105 nt, Homo sapiens
ccgcggaagcaggcagacgcggcccagcggaggggcaggaggcgggagaaggacggcaagacgaggcaaaaagacacagaacaagagcgccaacagaaaagccaa

SEQ ID NO: 32962 - RNA, 58 nt, Homo sapiens
caagcaaaaaccaaagaacacaagaaaccgcgagaacccagccggggcagggagccag

SEQ ID NO: 32963 - RNA, 84 nt, Homo sapiens
gcgcccccggcgcaggggagcgaaggcgaggggcagcggcaggagagccggccgcgacaggacgccagaaggcagccgcccccc

SEQ ID NO: 32964 - RNA, 77 nt, Homo sapiens
gagagaagcagacggaaagaagagagaggaacagcaaaaaggacagagaagacgacagaaagaaaaaagaaagagaa

SEQ ID NO: 32965 - RNA, 43 nt, Homo sapiens
cgcacacccgcccccccggccagagccacccagagaacaacgc

SEQ ID NO: 32966 - RNA, 85 nt, Homo sapiens
cgaggacggggagcaagaacaaaccggcacgagccaggcaccagaaccagaacaccaccaggagcgcgcagaacgcccgacgcga

SEQ ID NO: 32967 - RNA, 70 nt, Homo sapiens
acaacaccggcaggaaccaccaggacagacaacgaagaggagaagcaggaccaagacacgcagacaccgc

SEQ ID NO: 32968 - RNA, 79 nt, Homo sapiens
gcggcgaagaggaaaaaaaacagaacaggaggggagagggcaggaaccaccgcccaaagagaaaccacaaccccagaac

SEQ ID NO: 32969 - RNA, 51 nt, Homo sapiens
aagcaaggcccggcgcaaggccagaagaaaccacaaaggggaaaacagaac

SEQ ID NO: 32970 - RNA, 60 nt, Homo sapiens
aggcgcggaggacgccccaccgccgacgcccccagccaccaggccagccaggagcccgga

SEQ ID NO: 32971 - RNA, 71 nt, Homo sapiens
aagaaaagaagggcgcccggaaaggcgccgaagagagaggaccgacggacgaggcggcaccgcagaggaag

SEQ ID NO: 32972 - RNA, 53 nt, Homo sapiens
caaacgagcgccgaccgagaagggagaacacccagcagaggcgcaggaaaagc

SEQ ID NO: 32973 - RNA, 67 nt, Homo sapiens
agaaacagacacaccgcacaggcgccccgggccgggggggcccggcagcacccggcacagacgggcc

SEQ ID NO: 32974 - RNA, 83 nt, Homo sapiens
gaacgccccacaacgcaggagggggcggggcaccggaaacaccacccaggacggaacccggcgccagaacggcgggagagcaa

SEQ ID NO: 32975 - RNA, 76 nt, Homo sapiens
ggcggcccggaccgggagacacggccagacgcccccacaggggaaagcgcgagcgagcacccggagcagcagagca

SEQ ID NO: 32976 - RNA, 70 nt, Homo sapiens
acacaacagcagcgggaaagaagagcgggaagggacaaaacagaggcaacaagggggcagcacagcccag

SEQ ID NO: 32977 - RNA, 94 nt, Homo sapiens
acaccagccggcacaaccaggagccaacccagagcggaccggggcagaccaaagaacgggcccaagcacaggacgcagcgacccgcccccggga

SEQ ID NO: 32978 - RNA, 72 nt, Homo sapiens
accaccaccaggccggagaacgccccaaggagcaagggaagccaggaccaccccgggccggggcccgacacg

SEQ ID NO: 32979 - RNA, 69 nt, Homo sapiens
gggggcccgcaccgccccccccaccaagaaggaacagaacagacaccaccgaaacgcgccaagcagaca

SEQ ID NO: 32980 - RNA, 80 nt, Homo sapiens
ggagcgcggcaaaggcgaggcagcggaaaaggcaaaagagacggacaagcaaggcaggagaaagcaagcaagccacagac

SEQ ID NO: 32981 - RNA, 85 nt, Homo sapiens
aggcgagcgaagaagccggaagaagagccagggcagcaagaacccagaagaccggacaaggagcgcaggcgcgccgcgccccggg

SEQ ID NO: 32982 - RNA, 52 nt, Homo sapiens
agacagggacgcaccgacgaggagcggccgaaaggcggcgaaaagacagcca

SEQ ID NO: 32983 - RNA, 77 nt, Homo sapiens
ggcggcgacaccgggagagcgaccagggacaaaagggcgcccacccgccacaggaagagaccaaagagcaacacgca

SEQ ID NO: 32984 - RNA, 83 nt, Homo sapiens
agagaccaaaccacggccaaccacagagaaggaggccccaacccgagcacaacagcaaccggccaaacagaggggcgcagcaa

SEQ ID NO: 32985 - RNA, 51 nt, Homo sapiens
cggaccacacaagcaaaagaggggacaggacccaaaaagacccccggcaac

SEQ ID NO: 32986 - RNA, 69 nt, Homo sapiens
acacaccaggcaaggagacagacccggggaccgaacgcaagcggcgcagggagcaggagaagcggagcg

SEQ ID NO: 32987 - RNA, 83 nt, Homo sapiens
agcgagggaagcggcacgaacaccaagccgaaaaggaagagcagccgaggagaggaaagcggcagcaaagagaccccgcgcac

SEQ ID NO: 32988 - RNA, 83 nt, Homo sapiens
cgccggaaaccgcaagaaccaaagcacaagccggcccacgggcgcccaggaccccacacagccgaacaaagaggagaggagcc

SEQ ID NO: 32989 - RNA, 84 nt, Homo sapiens
gacagacaggcggcggccggaaggcggcaagcccggcagcgggaacacagagagcgaagccaggggcagaaagagaagacagaa

SEQ ID NO: 32990 - RNA, 57 nt, Homo sapiens
gcacacgcacccaggggcagccgcaagggggagagaaggaagagagaaagaaaggaa

SEQ ID NO: 32991 - RNA, 74 nt, Homo sapiens
caaacccacgagcccaccccacggagggaagcccggacccaagaacaccacacgcacagcggagacgcacagac

SEQ ID NO: 32992 - RNA, 81 nt, Homo sapiens
ccacaaccgcagggaccacagcaccgaaaacaccaggaaagacaggagaccaaaaaggcgagcccagacaccagaagcgaa

SEQ ID NO: 32993 - RNA, 82 nt, Homo sapiens
ccaaccagagaagagcggagaggaacagaaggcggaggaaacgcaggaaggaggcagaaagggagccccaagagagagggcc

SEQ ID NO: 32994 - RNA, 89 nt, Homo sapiens
cccacacggcaaggaggacacccggacaccggaagcgggaaagagggagacgcgcacggaccggaaccagaacaagacgaaagacaacg

SEQ ID NO: 32995 - RNA, 61 nt, Homo sapiens
aggccccagggcgagcacagcacacaaggaccaccaagcagggccagggaagagcgggggc

SEQ ID NO: 32996 - RNA, 55 nt, Homo sapiens
cccaaccagagccgcaacagagccaccaaaaccggcaaaggccgcgaggaaccac

SEQ ID NO: 32997 - RNA, 66 nt, Homo sapiens
accgccgccccaaacaccagccagcgaggggggccaggaggagccccagcacagcagagaaaaaac

SEQ ID NO: 32998 - RNA, 54 nt, Homo sapiens
cggcaggaccccccgaaacaaacagggaccccgagccagcgaggagcgcaggcc

SEQ ID NO: 32999 - RNA, 117 nt, Homo sapiens
gggggaagaggcgcggccggaggaaaccaagacagcccaaacgccccacgaccagaacgccaaaagacgaacacaaagggaaagaggagaggcacccgaaagccaggccagaaaaca

SEQ ID NO: 33000 - RNA, 79 nt, Homo sapiens
cgcggccgggcccggcaccgccgcggacggccgagccgagagcagaacacagcccgaggaacacgagaacagccagaga

SEQ ID NO: 33001 - RNA, 58 nt, Homo sapiens
ggaccccaaggaagccacggcagacacacaacccgacccgacgaacaggagaacggcg

SEQ ID NO: 33002 - RNA, 69 nt, Homo sapiens
cccaagagcgacagccccagaagcaagagaggaaaacagaagcgggccaggaaacaggggaccggagaa

SEQ ID NO: 33003 - RNA, 75 nt, Homo sapiens
acgaacgcaccccagagccgacccccaccgcaagccccgagccagagaagacgccagcgggaacgcacgccaggg

SEQ ID NO: 33004 - RNA, 84 nt, Homo sapiens
gaaagaaaaaccacaggcaagcccagccgccacaccccgccgggcagggagcgaagagacgccgaaagcgagaagaaagagcag

SEQ ID NO: 33005 - RNA, 86 nt, Homo sapiens
ccaccagcaaccagagggccagagggaaggacagaaagaaccaagagggagacaagggaaaaggaagacaaaaaacacaaggaaag

SEQ ID NO: 33006 - RNA, 42 nt, Homo sapiens
ggcgcgagggcagaaccgggggcacgaaggcaaagaccccag

SEQ ID NO: 33007 - RNA, 82 nt, Homo sapiens
ggcggacccgcccaaaggacacgacagggaggagcggagaacgcaggaaccggcccacaggaggggaaaggacaaggaagga

SEQ ID NO: 33008 - RNA, 70 nt, Homo sapiens
gaccccagccaaggagacacacacaggggcgcaagacagaccacacgaaggggcagaagagcacaagacg

SEQ ID NO: 33009 - RNA, 68 nt, Homo sapiens
aggcaaggaccgcccagcccccaagagcggaaacaggcagacgagaccggagaaggaaagacaagccg

SEQ ID NO: 33010 - RNA, 65 nt, Homo sapiens
gagaacaaaggagagaggaccacccagaggagcaaccggggaaaccgggacagcagacccccccg

SEQ ID NO: 33011 - RNA, 69 nt, Homo sapiens
aaggaacaaagccacgaaaaccaaaggacgccaagaagcggaacaaaccagcaagaagcggcaacggga

SEQ ID NO: 33012 - RNA, 80 nt, Homo sapiens
cacccccccgcggcccccacccagagccgccacaagaagccaaccgagaaggacaggaaaggaccgccagaagcagcgcg

SEQ ID NO: 33013 - RNA, 81 nt, Homo sapiens
gaccagcgaggagcaacacaggagccggaggggcaggcagggcccagcaggacgcggaaacaccccggaggcgacccaccc

SEQ ID NO: 33014 - RNA, 68 nt, Homo sapiens
gacccccgggcaggcgaaagaggcggcggcgcgccgcggccggccacgcggcgacaggagcgcgcagc

SEQ ID NO: 33015 - RNA, 84 nt, Homo sapiens
ggggccgccgcggcagcaagaacagagagagaggggacagacgagagaacgagggagacggggcacgcccagagcaggccgcca

SEQ ID NO: 33016 - RNA, 68 nt, Homo sapiens
aacgcggccccagccgcggagacacaacaacagaggcagcaacggaggagggagacaggggcaaaaaa

SEQ ID NO: 33017 - RNA, 43 nt, Homo sapiens
cccccgagggcgggaacaggccaaacgcaggggcacgggaacc

SEQ ID NO: 33018 - RNA, 105 nt, Homo sapiens
ccacgaggcgggggacagccggagcaccagccgcggagcgcgagggacccggacccccccacgccgagaggagacaaaggcgggcccagaggccaaacccgagcc

SEQ ID NO: 33019 - RNA, 96 nt, Homo sapiens
aaacagcaagaggccagagcagacgaagaccaacgaaagaaaacacacacacacaagcagaaggaacgagggagcacggagggaaaagaagccgcc

SEQ ID NO: 33020 - RNA, 78 nt, Homo sapiens
ggcaacccaagaacaggccacacgggagcgagaaggaaaggaaacgaaaagaaaacaggagcccaacgcagaccacgg

SEQ ID NO: 33021 - RNA, 74 nt, Homo sapiens
ggggcgccggcgggggggcccggaaaccccccaggcaagaggcgcaggaccgggaagaccaacaaacgcaccgc

SEQ ID NO: 33022 - RNA, 74 nt, Homo sapiens
ccagaccgaaaaacagcgaaaccagaccacaaacgaaaccaaaccagcaggccaggcacgagggcgcgaacaag

SEQ ID NO: 33023 - RNA, 79 nt, Homo sapiens
agccgaagccccggaagcccaagacgcggagaggcagcaggggaacagcgagagaggaaagcccagagcggaggagaac

SEQ ID NO: 33024 - RNA, 80 nt, Homo sapiens
agaggcggacaccccggacgaaccacaggaagcgcggggcggcggcgaaaggacggcaaaagcagaccggaaaacccacc

SEQ ID NO: 33025 - RNA, 57 nt, Homo sapiens
gcccacccgcaaacagacccagcccgcggaaggcgagcccgggaccaaggcagcaag

SEQ ID NO: 33026 - RNA, 56 nt, Homo sapiens
gaccagggcacgagggagcaacgggccagagaaagcacggaccgccaggacgaagg

SEQ ID NO: 33027 - RNA, 35 nt, Homo sapiens
gcgcgcacgggcggcgcggcgagaaagggcgcaaa

SEQ ID NO: 33028 - RNA, 73 nt, Homo sapiens
agcgcacggacgcaccccacgggaacccacgaccaaagcggaaggccggaaagcaacggcgcaagcggcggcg

SEQ ID NO: 33029 - RNA, 75 nt, Homo sapiens
accaacaccccaggaagacaagcaacggccgcaaacagcagacgccgcccacaccgcgagcgccaacacaccaca

SEQ ID NO: 33030 - RNA, 68 nt, Homo sapiens
aaaagaaaagggggaaggaaacccgcgggaagagcgagacaagagccaaggacagggcccgccaccag

SEQ ID NO: 33031 - RNA, 112 nt, Homo sapiens
ggcccgagccaggccggagcgaggagaacgacgggcgccgcccagcaaagcgaagccagccaggggaagcccccccaagaaggggcccgcagcaccacaaccgcgcgccacg

SEQ ID NO: 33032 - RNA, 75 nt, Homo sapiens
aaaaacaaacacacgcaaaggagaaaggaaccgacagggcagcggagcagaaaaggaaacgaggcgcagaaaagg

SEQ ID NO: 33033 - RNA, 58 nt, Homo sapiens
accgaggcgcccgcggggcggggaccgccgcccgggacggagcgccggccaggcggag

SEQ ID NO: 33034 - RNA, 78 nt, Homo sapiens
agggaggagacaggacccaacgacaaaagggcaacaccacagacacacaaccgcccaagagaccacaaggccccacaa

SEQ ID NO: 33035 - RNA, 78 nt, Homo sapiens
gacagccccaagacaaccccaccagcaccacaggggcaaaggagcagagaacgacaagccacacgaggacagcccgca

SEQ ID NO: 33036 - RNA, 48 nt, Homo sapiens
gcgggaagaggcggcagacagcgggcgggcgacgcacgaggcacacag

SEQ ID NO: 33037 - RNA, 80 nt, Homo sapiens
ggaaacccacaggaggcaaccacacagagccagcaagcgcccggaggaccgggacccgggccgacagcagcagaaggacg

SEQ ID NO: 33038 - RNA, 92 nt, Homo sapiens
ggaaagagcaggcggcggcggcggaacgccaggcaggcagcagagcgggagcgacagggagaagaagcgaaggaggggggacaaacaacgcg

SEQ ID NO: 33039 - RNA, 89 nt, Homo sapiens
cggccgggcgcaaggccccgaacaacaggagagcacgaccacagagcgcagcgagcgcagccagccaaggcagagagcgggcggcagca

SEQ ID NO: 33040 - RNA, 40 nt, Homo sapiens
ggcccaaacgcacgcacaggcagagacggaccagagaagc

SEQ ID NO: 33041 - RNA, 66 nt, Homo sapiens
cccccccccccccaaggccccccacccggcgccccgggccagcgggacaccagcaagcaggggaca

SEQ ID NO: 33042 - RNA, 71 nt, Homo sapiens
ccccacgcacagcagaagccgaacggccgaagaaagaagcagccgcaaggagcggccaaagcacggaccac

SEQ ID NO: 33043 - RNA, 71 nt, Homo sapiens
gaacgccgcggccaaggagccgccaaagccagacggcaaggcaaggaggaccaagcgaaaaacccagaaga

SEQ ID NO: 33044 - RNA, 73 nt, Homo sapiens
aacagccaaggacagaggaccaaagcggaccagagacaggcccagagggaggcacaacagcgaggacaccacc

SEQ ID NO: 33045 - RNA, 68 nt, Homo sapiens
aacggccgaacacagagggagaagaggggacagcacacagcacacacacacaaacagaaccaagccgc

SEQ ID NO: 33046 - RNA, 77 nt, Homo sapiens
ccaacgaagcccccaaggcaaaggacgcggccccgggaagcccggagcagcgacggacccagagccagggcggcccc

SEQ ID NO: 33047 - RNA, 79 nt, Homo sapiens
acaggcccggcagagcgggccgacccgaaagcgcggcgcccacaagaaaggcagcccccagacaggaccggccacagcg

SEQ ID NO: 33048 - RNA, 66 nt, Homo sapiens
accaaccaaaagaccccaaaggggggacagaggagccaaaggccaaaccaccagcagacagcgagc

SEQ ID NO: 33049 - RNA, 80 nt, Homo sapiens
cgagccccggacagacgccagagcgaggagggcgcacgcggcaaccccaaagccagggcccccgagccaggaagccacca

SEQ ID NO: 33050 - RNA, 81 nt, Homo sapiens
cacccgccggaacccaaggcacagaaggaagagcccaacacgcggaaggagcagccccacagagaaccaacagccgccgag

SEQ ID NO: 33051 - RNA, 78 nt, Homo sapiens
gcacaaacacagcaggacaggaagcaaaacagaggaagcagaacaacgggagaagcccacggggacgcgccgccaccg

SEQ ID NO: 33052 - RNA, 82 nt, Homo sapiens
gaggcacagcgcagcgacgagagggggaccagaagcagcagccccagaagccccgaagccggggcaccccaccacccgcggc

SEQ ID NO: 33053 - RNA, 84 nt, Homo sapiens
ccgggaccgcggagagaagcagcggacagcagaggaaccgcaagcccacaaccccagcgcccacgaaaaggaggacagccccag

SEQ ID NO: 33054 - RNA, 67 nt, Homo sapiens
caaaacacacagccccccggagaaaagaggcaaggagcaggaacacaaacaccgaagcacgggccca

SEQ ID NO: 33055 - RNA, 68 nt, Homo sapiens
cgcagaggcgaagacggggagccacgaggagaaggcaaccaaaggcaggacacaaaaacaaccgaaag

SEQ ID NO: 33056 - RNA, 42 nt, Homo sapiens
aaacacccgaacagcgagagcacaggcggaggcagcggaggc

SEQ ID NO: 33057 - RNA, 86 nt, Homo sapiens
ccggggccggcgaggccaccgaggcgaggagaggagagccagaagaagccgagaagagagcacagaagagaggcaccaggacgaga

SEQ ID NO: 33058 - RNA, 63 nt, Homo sapiens
cagaaaaccacgacacccggcggacgagcagggccgaaagaagaaggggaaagaaacaaaaac

SEQ ID NO: 33059 - RNA, 81 nt, Homo sapiens
caggagggggcaggccgaggaacacaacaagagaagagaacacgccagaaacacgaagaacggaaaacaccaggacccggc

SEQ ID NO: 33060 - RNA, 42 nt, Homo sapiens
gcagcacagccgcgaccaagggaaggcaagaagaagaacagg

SEQ ID NO: 33061 - RNA, 81 nt, Homo sapiens
gaggggacggcgccgcacgaggaccaccaggcacggcacggggcagagcagagccccccccagcgccgaaggcccgaccca

SEQ ID NO: 33062 - RNA, 85 nt, Homo sapiens
ccgcccacgccagggcccggcgcgcacgggcccagcgggacccgcgcccccggacggccacgagaccgggccaaaggcagacacc

SEQ ID NO: 33063 - RNA, 72 nt, Homo sapiens
caggcggcgcgcgcggcgcgggacgcgcgcgggcacccacggagccccggggcgggccaaaagaacacagcc

SEQ ID NO: 33064 - RNA, 70 nt, Homo sapiens
gacccggggacccccgacgccaggcagcgcccccaaacgcggacagcagcagcacagcaaagaacccagg

SEQ ID NO: 33065 - RNA, 37 nt, Homo sapiens
aaaggacacgcagaacagaccagaacacacaagaacc

SEQ ID NO: 33066 - RNA, 98 nt, Homo sapiens
caccacaagccaggaagggggggccacgcgccggacaggcgcgacggagacccacgcagaggggaggcaagcaggggggcaaaggaaagaaggcagaa

SEQ ID NO: 33067 - RNA, 74 nt, Homo sapiens
ggggacagaggcaccaaggaccccaagacaggacaggaaccgagaggcacagcggcgcgcaccagaggagggcc

SEQ ID NO: 33068 - RNA, 60 nt, Homo sapiens
cggaggagaaggagcgaaagcgcgcacccagccacaccccaccgcccagagaagggaaga

SEQ ID NO: 33069 - RNA, 73 nt, Homo sapiens
gccacaccaaggccaagaacgggcaccggcgggcggcccgcaaaccccgccgagccgccgagcggaggcgagc

SEQ ID NO: 33070 - RNA, 37 nt, Homo sapiens
gggaccagcgacgcacccgccacagcacgagcgaggc

SEQ ID NO: 33071 - RNA, 80 nt, Homo sapiens
cggacgggccgggcacaggccagggcgccgagcgcaccagaccaagcacagaaaaagaaaaaacagaggaaaacaggagg

SEQ ID NO: 33072 - RNA, 93 nt, Homo sapiens
gaacgaccggagaacgcaggcccgaagggccgggaggggcaacaaggccccgggaacagagagaccagcgccccacaagaaacccaaagaagg

SEQ ID NO: 33073 - RNA, 70 nt, Homo sapiens
cagaacgggcggacgggcgcccagccagaagggccaaaggcaaagcgggacaagccaaaacagcggacaa

SEQ ID NO: 33074 - RNA, 76 nt, Homo sapiens
gagaccccagcccaaacagcgcaaccaagaaggacaccaggggggaaaaaccacacaggcaaagaacgcgcaaaac

SEQ ID NO: 33075 - RNA, 82 nt, Homo sapiens
acgggccaaccagcgcggcggggcggacgagaggaaggcgcgaccccgcaagagccccacaagacacggacacaccaagccc

SEQ ID NO: 33076 - RNA, 74 nt, Homo sapiens
gagggaggccaaggagcccagagcagaaccacacagggcaccaaaacaggcacgaagcgccgcccacacgcagc

SEQ ID NO: 33077 - RNA, 59 nt, Homo sapiens
agacaccgccccgagacgagagcccaaaaggcagagcgaggagagaagaaggagggaaa

SEQ ID NO: 33078 - RNA, 82 nt, Homo sapiens
aaagccaaggaaaccccaacacagagccaagcgccaaggcaccacacaccacaaaccgagggaagaaaggacaacagaagac

SEQ ID NO: 33079 - RNA, 57 nt, Homo sapiens
ggacggaacaggcaaaagaaaaaccccgcggaggcgcagaggagcggaacggcgaac

SEQ ID NO: 33080 - RNA, 75 nt, Homo sapiens
gagggcgaggaaggggaagaaagaagccaaacgccaagccagaccaggcaaaacaggaaaacaaacgagaccaca

SEQ ID NO: 33081 - RNA, 72 nt, Homo sapiens
cgccaacccgcgaaagcaggaaagggcaaaagcggcaaagggaaaaaggcgaaaagagcgagaagaagagag

SEQ ID NO: 33082 - RNA, 77 nt, Homo sapiens
ggaagagccggaggcagaggggggaccccggacggaccggcaggacaggacccaggcccaggcggaagaaccggacc

SEQ ID NO: 33083 - RNA, 82 nt, Homo sapiens
gcacgaggcgccggaagaaaaggcccggggagaagggcgccagcagagcgccaccacccccccgccggcaaagccccggacc

SEQ ID NO: 33084 - RNA, 85 nt, Homo sapiens
gggccacacagagcgagcagccgagagacacagcgcgagaagccaaacaagggaaaacgcgcgcaaccaaagccacgcggagaac

SEQ ID NO: 33085 - RNA, 39 nt, Homo sapiens
accagaccgcccaggaaacggccacgaccgaagaaaaag

SEQ ID NO: 33086 - RNA, 77 nt, Homo sapiens
gggcaagaaacaaacaaaagggacacgaaaagcacaaaccccacacgcagaggaagggacgcgagagaaaagacacc

SEQ ID NO: 33087 - RNA, 77 nt, Homo sapiens
accgggcgcccgcgcccccggagcgcaggagaagacagaggagccagaccaagagacagcacaggcgagcgagcaga

SEQ ID NO: 33088 - RNA, 68 nt, Homo sapiens
cacgcaagcagcggcccagggcgacagaccaagaccaaagcaaacaggcgagacagaccaggaccgcc

SEQ ID NO: 33089 - RNA, 73 nt, Homo sapiens
gggccccaacaccagccgccgccccgcagccccccgcagcacccagccggccacgcggagacacaaccgagcc

SEQ ID NO: 33090 - RNA, 52 nt, Homo sapiens
gaccggccgggaacagacgggcaacggacagccaagacgagaccaccaagac

SEQ ID NO: 33091 - RNA, 78 nt, Homo sapiens
cgacgagccgccaaagagcccaggcaaaacaagaagaaccggacacagacgaggcccaacagcaaccccccggagaga

SEQ ID NO: 33092 - RNA, 76 nt, Homo sapiens
cgaaacccccacccccacgcaagcggcaaccaagcgggcaccacaagcagaggggggcagaagagagaagagaaga

SEQ ID NO: 33093 - RNA, 77 nt, Homo sapiens
cagcaagacccgagcccaaaccagaagagggaagcacagagaagccgaggcggcacgacagggcggagccacagccc

SEQ ID NO: 33094 - RNA, 67 nt, Homo sapiens
gcggaggggaccagagaccaaaaaaaaaacgcgaacaccgacggagccaggcacgggcagagaacag

SEQ ID NO: 33095 - RNA, 64 nt, Homo sapiens
caccaaggccacacgcgaggggcaagcccaacacaagaccaccgcgaaaccaccacacagaggc

SEQ ID NO: 33096 - RNA, 60 nt, Homo sapiens
gcgccaccaacagcccggcagggaaagcaaagacggaggagagaaacgccagccaacgcc

SEQ ID NO: 33097 - RNA, 79 nt, Homo sapiens
gagggccgggcgacgccagaacccggagccagaggaccacagaaaggacaccaggagcgggccacaaaaagaaaaagac

SEQ ID NO: 33098 - RNA, 31 nt, Homo sapiens
acacggacaacaaacgggcgaagagagaaca

SEQ ID NO: 33099 - RNA, 70 nt, Homo sapiens
cgcccggagccgcgcacacggagggacccacccgagaaggaagaaggagaacaaaaccaaacagaggaaa

SEQ ID NO: 33100 - RNA, 66 nt, Homo sapiens
cgcagggcgcccccgggaccacgccaagcgagaacgaacaaaacgggaagaagaaagaacccagaa

SEQ ID NO: 33101 - RNA, 82 nt, Homo sapiens
accagacgaggaagacccggaaacaggggccacggagccacggccacggccgcaagaaagaggcaggcaagcgagaaggagg

SEQ ID NO: 33102 - RNA, 73 nt, Homo sapiens
gagacagggagaccaagagacagacaccgccccgagacgagacgccgcgagcggcacaaggacaagcggagcg

SEQ ID NO: 33103 - RNA, 55 nt, Homo sapiens
gcccgcggcggcgggcacccggaggcgcccgagcggcgaccaggcaccggccagg

SEQ ID NO: 33104 - RNA, 83 nt, Homo sapiens
cggaagaagggagagcagaagccgcgaaaaaggggggccgagaccagagacaaggccccgagggaggagcccgaaggcgcacg

SEQ ID NO: 33105 - RNA, 76 nt, Homo sapiens
agacagggggggccagcgcccgcacgccccgaccccacgagaggcccgggcaggcccgaggcggcgcgccggagcc

SEQ ID NO: 33106 - RNA, 100 nt, Homo sapiens
gcgccgccacacccacagcgcggcaccgcgacacggaaccccacccaacaaggcgaacccaggcacccagagacggagcggaaaccaaggaagaaaagcc

SEQ ID NO: 33107 - RNA, 77 nt, Homo sapiens
gaaaacaaaggagaacaggaggacgcaggccaaacaaaacgggcaccgccgaccgaaaccgcaaacacacgacagag

SEQ ID NO: 33108 - RNA, 42 nt, Homo sapiens
gccagaccgacccacccgcgcgggaccaagaacgcccagccc

SEQ ID NO: 33109 - RNA, 73 nt, Homo sapiens
gccagcagaggcggagcccgcagaccgcagaaggccggagacaccagcaggcagggccaccacaggaggacga

SEQ ID NO: 33110 - RNA, 54 nt, Homo sapiens
acgaaaagcgccagaaaggcccaggcggcggcgcagcagacgggcaccgcggcc

SEQ ID NO: 33111 - RNA, 72 nt, Homo sapiens
gcccgggaacaccgacaacaacccagcaggaccacccgcggcacaagcgacgccaccagcgccgggggccag

SEQ ID NO: 33112 - RNA, 74 nt, Homo sapiens
ggggcacgccggcacgggaggcagaaggaggaagaagaagcacagaaaaccgcagaacgccggaacagaacaag

SEQ ID NO: 33113 - RNA, 80 nt, Homo sapiens
ggagaaggcaggcaccacaaaaaggacaggagcgagcgagcccgcggaaacgcccgggacacagcagcgggaagccgccg

SEQ ID NO: 33114 - RNA, 72 nt, Homo sapiens
gacgaggcgcgggcgcgcacccgagccgcaaggaacagcagagaacaaaggaccgcaaacgaagacggcagc

SEQ ID NO: 33115 - RNA, 72 nt, Homo sapiens
ccgcgggagagaggacccccccccccccccaagggcccgaagccagcagagagcggaggcgcaaaccgagcc

SEQ ID NO: 33116 - RNA, 71 nt, Homo sapiens
acagccaaggcccggagccccagcgcaggaacagggggggggaacaaagaggaaaaagggacaacagcaac

SEQ ID NO: 33117 - RNA, 81 nt, Homo sapiens
cggccacgcccgccggaccgcgcccaggccccccaggggcggcagggggaccagccagcaacccgcccccggaccaagcaa

SEQ ID NO: 33118 - RNA, 85 nt, Homo sapiens
ggacccgccgccggggacccggaggggggaccccgagaggagacgccaagcacaaggggcccccgggcaccaggaggagagaaca

SEQ ID NO: 33119 - RNA, 52 nt, Homo sapiens
cacgcagaacgggcggacgggcgcccagccaggcccaccaagccgagaacac

SEQ ID NO: 33120 - RNA, 82 nt, Homo sapiens
ggcccaggaggaaaccagcagcgcacaaaagggaggagacagccgccgacgccagcacagggaagaagaccgcaacacagca

SEQ ID NO: 33121 - RNA, 81 nt, Homo sapiens
aacagagcgagagaggcacggagcgcagcaggaccagcgagagccccgcccccgcccgcagccccagggaacccgagaagg

SEQ ID NO: 33122 - RNA, 86 nt, Homo sapiens
ggccagacacacacaagacaccaccgcagagaaaggggagcaagaagaaagagcagggaggagggagcgacaggaagaaagaaacc

SEQ ID NO: 33123 - RNA, 84 nt, Homo sapiens
cggagcggagaacgaccggcccgccaagaccagagaaggaggagggaccacgcgcgagcccaccgggggacggcacggcaggcg

SEQ ID NO: 33124 - RNA, 75 nt, Homo sapiens
gccaagaaggacggaggagcggcagacaggagcgcacaggcggcacgcagcaaccacggcaagagcgggaagccc

SEQ ID NO: 33125 - RNA, 76 nt, Homo sapiens
gaaagaagaagaaaaccaggaaacaagaagggaccaaggagaccgggagagagacgaaggacgcgcaggggcagca

SEQ ID NO: 33126 - RNA, 75 nt, Homo sapiens
gcgcagcggaccagaaacccaaacgcaccaacaggaccaagacacccaggagaaagacagcggggaaaagaaaaa

SEQ ID NO: 33127 - RNA, 78 nt, Homo sapiens
cgaaacacacagaccacccgacccagagaaagacgagaaccaggacgaacgaccccaccgaggacaccggacaggccg

SEQ ID NO: 33128 - RNA, 38 nt, Homo sapiens
cccccaaaggcgggagacagggcagggccacaccgaac

SEQ ID NO: 33129 - RNA, 79 nt, Homo sapiens
aagagacccgcaaagaccgggagaccaagcagggacgcaccaaaacggacagccgaagacaggcgacccaccaccagga

SEQ ID NO: 33130 - RNA, 73 nt, Homo sapiens
ccgcgaaagcggggcacaggcgggcacgcgcccagaaaggacacaaacgcaaaaaggcacggaaaaaagcccc

SEQ ID NO: 33131 - RNA, 58 nt, Homo sapiens
acacccccaggaggcccggcagagcaggcggagaaaacggaaaagaaggcagaacaga

SEQ ID NO: 33132 - RNA, 70 nt, Homo sapiens
ggcagcaagcgggagcggggaaggcacggcggaaagcgccgaaccagacgacaccacagagaacacggac

SEQ ID NO: 33133 - RNA, 61 nt, Homo sapiens
aaccagaaggaggcgggccagcagcaacccggaccacagcaggcaggagaagggcaccggg

SEQ ID NO: 33134 - RNA, 63 nt, Homo sapiens
accaagaaccagccgccgcggagaggccggaaggaccacggaaaccccaccaagacagcaacc

SEQ ID NO: 33135 - RNA, 79 nt, Homo sapiens
aacgaagacccacaggcaagcgggaagacaaccaaaccagagaaagacccaggccagccacgagcagaacaggagaaca

SEQ ID NO: 33136 - RNA, 95 nt, Homo sapiens
gagaaagggaaggaggcccccggaggcaggacccccggaggcggaccgcggcccgcggcgagagagggaacaaggcccgcggccccccggaccag

SEQ ID NO: 33137 - RNA, 47 nt, Homo sapiens
agccaagcaaacagaagcgcggccaaggcacaggagacgaggaagga

SEQ ID NO: 33138 - RNA, 57 nt, Homo sapiens
aagcaacggaagccccgggcccacccaggcggcaagagaccgggcacggccccaagc

SEQ ID NO: 33139 - RNA, 39 nt, Homo sapiens
aaagaaggcaaaacacgggaaaaaagcagagagaacaca

SEQ ID NO: 33140 - RNA, 77 nt, Homo sapiens
ccagaccgcccaggaaacgggcacacggcacggacagggcgggacgcagaaccagggcgcgacagccaaagaagaga

SEQ ID NO: 33141 - RNA, 53 nt, Homo sapiens
cagccgcacacacaagccaacacacgaccaggaaagggccgagaaagaagaga

SEQ ID NO: 33142 - RNA, 77 nt, Homo sapiens
gccaaacgagaggggccagccaaggacagggaggaagaccgcaggaaagcaggaaggcaagaaagccaaggacgaaa

SEQ ID NO: 33143 - RNA, 77 nt, Homo sapiens
agggcgagggagcagcagaaaccggaaaacacacccagcagcacgcaaggggccaaaaacagaaggcgaggcaagga

SEQ ID NO: 33144 - RNA, 74 nt, Homo sapiens
ggcggccaaggggacgagcaaaggaagcgcgaacagcagcgcaggacccagagaagacggcagccccgcgcgag

SEQ ID NO: 33145 - RNA, 74 nt, Homo sapiens
aaagaagcagcaaaccccccaagacaaaggggcagacgagggacggacagaagcccacaggaagagacagaaca

SEQ ID NO: 33146 - RNA, 71 nt, Homo sapiens
gaccaagccgagaaacaaggggagaaagcacagaggggaagaacgcacccacaccgaaccaagagagaagc

SEQ ID NO: 33147 - RNA, 85 nt, Homo sapiens
ggacaagcccacaaggcaggcagaggggcaggacaccaggggggaaaaaccacacaggcaaagaacgcgcaaaacaggacgaaaa

SEQ ID NO: 33148 - RNA, 67 nt, Homo sapiens
cgcgcgacgaacaacaaagaccgccgcccgacaagggcggggccgggaacaaggccagcggacacag

SEQ ID NO: 33149 - RNA, 75 nt, Homo sapiens
cccagccaaaacaaggcgggaaaccacaggacggggcgccagggagcagagaaaaccgccgccggggccagcaag

SEQ ID NO: 33150 - RNA, 60 nt, Homo sapiens
ggaaacgcgcacgggaaacgacacgagaggcgagggacgacagagcaagcggcagagggc

SEQ ID NO: 33151 - RNA, 67 nt, Homo sapiens
aagggaagagacacacaaaacgcaaagaagggaaacggaaacaccagacacacccccagaccggacg

SEQ ID NO: 33152 - RNA, 67 nt, Homo sapiens
aggccaaaagggaccggcaacggagaaccgaaccagaggaggggaggaaccaccacagaaagcagga

SEQ ID NO: 33153 - RNA, 79 nt, Homo sapiens
cgggcgaaggcgcaggaagaagggcgagcacacagagaggggaagggcagcagcagcagagaaccaaacccaaagcgaa

SEQ ID NO: 33154 - RNA, 74 nt, Homo sapiens
caagaacggccagcaaccggcccggcacgccacaaaccaagccaggaccaggaccggaggcggacaggcgcaga

SEQ ID NO: 33155 - RNA, 71 nt, Homo sapiens
cacacaccccccagaacccgaagggaaccaaagagcgagcaaaagaggaaaaccagcaaagccaccgcagc

SEQ ID NO: 33156 - RNA, 77 nt, Homo sapiens
gagcggccgaggcccgaggacgcggaggagacgagagagagccgccgacggaagagcacagagagcggcggacccga

SEQ ID NO: 33157 - RNA, 74 nt, Homo sapiens
ccccacgcaggggcccggaacgcccgaccgcacacggccacccgaggaagacgggaagccaagcaggacaacca

SEQ ID NO: 33158 - RNA, 79 nt, Homo sapiens
aaggaccgcgcgcgggagcgaggcccgcggagcgccgccgcgcggagaaggccggaacaacgaaggggaggcaccaagg

SEQ ID NO: 33159 - RNA, 70 nt, Homo sapiens
aaagcgagcaaaaggcacgggaaggaaagaccgggagaaaaggcccgccaaagagcacaaacagcaaaaa

SEQ ID NO: 33160 - RNA, 65 nt, Homo sapiens
cggcgcccgcgccacagccaccagagccggcagcaaagagggaacagggaaggaccgaccgccca

SEQ ID NO: 33161 - RNA, 86 nt, Homo sapiens
gagcagcagcagcccagcaggcgcggcccgccaggagcacgcagccggaaacccaggacgcccagccaacagaaaaggaaaccgag

SEQ ID NO: 33162 - RNA, 54 nt, Homo sapiens
aggaacagcaccacccccaaaacgggccaacggcccgccgccccggggcacgcc

SEQ ID NO: 33163 - RNA, 80 nt, Homo sapiens
ggagagccccggaggagcggagagcgagcggcaacccggagaacagaggcaggaaaggccggcccagcaaaaggaccaga

SEQ ID NO: 33164 - RNA, 74 nt, Homo sapiens
gcgacccaagacacccagagagggacagaccccgaccgccacggacccgggcgccaccccggcgcgagggacca

SEQ ID NO: 33165 - RNA, 96 nt, Homo sapiens
cggggcccgcgggcccagaggaggccggggaccagggcccaggacaagaggaggaagccaagaacgggagcgaagccacgcagcggcaccaacgac

SEQ ID NO: 33166 - RNA, 79 nt, Homo sapiens
agcgcggaagaagcaggaggcaagaaaggggaaccccggagaaaaggccaagaaggcaggccggcgcggaagaggccgg

SEQ ID NO: 33167 - RNA, 71 nt, Homo sapiens
agagaggaagaagaacgacccgcccggggcagcaggaggcccagggagaaaaggaggccggacagagaagg

SEQ ID NO: 33168 - RNA, 44 nt, Homo sapiens
acgacacaaggagacgaggggaagagacggacagcggcaaagga

SEQ ID NO: 33169 - RNA, 77 nt, Homo sapiens
ggagcggcgaagagcaaccaggggcccccggagggccacaagccagagcgccccggccaaggcagaccagcgggcac

SEQ ID NO: 33170 - RNA, 82 nt, Homo sapiens
cggacgaccgcgcgcccgcccggcccgcacgccaagcacggggggcaggccaccggggccagccggggagcaaggggagcag

SEQ ID NO: 33171 - RNA, 76 nt, Homo sapiens
agccaagagaagcaaacgcacgggccccaagagacaacaggggccagacagcagggaagaacggaaaccagagaaa

SEQ ID NO: 33172 - RNA, 73 nt, Homo sapiens
acgggcggagaggagaaggcagaaccaaaggcaagaaggaaaaaacacgacacaccagagaagaggagccccc

SEQ ID NO: 33173 - RNA, 59 nt, Homo sapiens
gacccgcgcacgacccagcggcggcagagaagaaacgccaggaagccaagcaagggcgg

SEQ ID NO: 33174 - RNA, 79 nt, Homo sapiens
gaaaagcagaaaccagagacaagaaaaaccagaagagaaaaaacaaaggggagaggcaccccgcgggacgaccggacag

SEQ ID NO: 33175 - RNA, 76 nt, Homo sapiens
gccaaaggacagaccaggaagagcagaagggacgagcgcggaccgaccgagagcgacaaagacgaagacccagagc

SEQ ID NO: 33176 - RNA, 75 nt, Homo sapiens
agaggcgaggccagaagggggccggacagccgcccgaggggccaaaggaaaaggaaggaaaaccacagcaacgcg

SEQ ID NO: 33177 - RNA, 62 nt, Homo sapiens
accggaccgagagcggaccgagagcgcgaaacgcacgagaaggcgccaggggagaggaggca

SEQ ID NO: 33178 - RNA, 76 nt, Homo sapiens
aggggaaacgagcaacacacaagggccaaaggcaaagcgggacaagccaaaacagcggacaaagcaccagaaaacc

SEQ ID NO: 33179 - RNA, 71 nt, Homo sapiens
cagccgggacagaacgaacaggcaaagcccaaaaggcaaggcacaagcccacaagagagggaaggagaaag

SEQ ID NO: 33180 - RNA, 76 nt, Homo sapiens
caccacagagccacacgagcaggagcacaaaggaacggaaaccaagccaaagaggcaagaaagcccggaaaacgag

SEQ ID NO: 33181 - RNA, 74 nt, Homo sapiens
cggccaaacacccccaaagcaccggacaagcaaacaacggaaaggagggggaagcaacggccaaaagccgacac

SEQ ID NO: 33182 - RNA, 58 nt, Homo sapiens
gccgagcggaggagaccagcagaagggcagaagcccacccagagagagaagaacaagg

SEQ ID NO: 33183 - RNA, 72 nt, Homo sapiens
gccagcagcgacaaacgcccacaaagcggggagcccagcagcgacagcggcggggagacggaggaagacacg

SEQ ID NO: 33184 - RNA, 74 nt, Homo sapiens
gggcgcgagccacgggcacccaagcccaagccgcagacaacacgcaacagagcccccgaaggcaccgaaagacc

SEQ ID NO: 33185 - RNA, 75 nt, Homo sapiens
gggaaacgcccaggacaaacccagaccacacaagggcaggggggaaaggcagagacagaccgcgcaggcgcggca

SEQ ID NO: 33186 - RNA, 55 nt, Homo sapiens
aggccccggcccgcgggccccgggacaagcggccgaccgccagccgcgacagggg

SEQ ID NO: 33187 - RNA, 59 nt, Homo sapiens
cgaagcagaggccaagaccaaccccacaaagagacgggaacccgggagggaaaccagac

SEQ ID NO: 33188 - RNA, 82 nt, Homo sapiens
ggagaccagaccacgcagccacgcgggcgagcggcggggagcggcgaagccgcgggcgaggcggagggaaggccggagaggc

SEQ ID NO: 33189 - RNA, 81 nt, Homo sapiens
gaaaaaagagccaagacaaaggcaaaccgaagaaaaaaaccagaagcggaacacaggaccgaaaaggaacgcccaagcagg

SEQ ID NO: 33190 - RNA, 84 nt, Homo sapiens
gcggggcggcggcggcggcggcgcggcccaaaagggcgaggcccggaccgcggcaggacggggggcgggccgcccagcaagggc

SEQ ID NO: 33191 - RNA, 78 nt, Homo sapiens
ccgagaccggaaagcgccagaagaacgccgcccggggcagagggaccacagagcccaccacacagcaggccaggacgc

SEQ ID NO: 33192 - RNA, 79 nt, Homo sapiens
acccaaggaaggaccaaacggagaaccagcgcgaacgaggcaacacagagggaaaagaaccagaagggcggggagaaaa

SEQ ID NO: 33193 - RNA, 80 nt, Homo sapiens
gaggaggggcagggaggagggacagggagagaagaagaccgcggaggacagccaggaacccaacgaagacggccacacag

SEQ ID NO: 33194 - RNA, 61 nt, Homo sapiens
agggaacagaagaaacagcagcgaaagaaccagccaagaaagaagccggacacaagagggc

SEQ ID NO: 33195 - RNA, 59 nt, Homo sapiens
gcaaggggccaccaggaggccagggggcgccaggaggagaggagagacccagagccgac

SEQ ID NO: 33196 - RNA, 55 nt, Homo sapiens
ccaaggaagcacaaccccgagcacgccaggaccccacccgcggacagaagggaag

SEQ ID NO: 33197 - RNA, 77 nt, Homo sapiens
ggcagcaggggaccccggggaggccgccgcgaagacaggagcgcgaaaggggaacccacagggggcagcgggaccag

SEQ ID NO: 33198 - RNA, 77 nt, Homo sapiens
ccccaggggaaaacccccgggaccagaccggaccacgccacaagcgaaggcacccgaggccccacgagaaagcgaca

SEQ ID NO: 33199 - RNA, 58 nt, Homo sapiens
ccggcccacccacaagcgcacaggaccggggcccggccaggccccaccgccacaagca

SEQ ID NO: 33200 - RNA, 79 nt, Homo sapiens
acaagaaggaaaaacgccacgcaccggagagagcacagacgggggcaagagcagcaagagcgcagcaagaacaggagag

SEQ ID NO: 33201 - RNA, 66 nt, Homo sapiens
gggacgagaaaacaaaagaaacaaaacaacaggggaaagaaaacagcggacaccagaccaacagga

SEQ ID NO: 33202 - RNA, 56 nt, Homo sapiens
ccgggcaccgaggaccagccaagacaggaacaagacaacacacacgcaccagggca

SEQ ID NO: 33203 - RNA, 74 nt, Homo sapiens
gcggcaccgaagcaggagaccaagaaccaaccaaccggacacacggaccgacagaccaagacacaagcgggacg

SEQ ID NO: 33204 - RNA, 76 nt, Homo sapiens
gagaacaagcgagaccaaagcccagagcaagagagaccacacaaaggggggcagaaagaagaggaggacaacaagc

SEQ ID NO: 33205 - RNA, 80 nt, Homo sapiens
cgcgcggaccagccaagcagcaccaccgggggccgacacgggcgacccacgcaccagcagcgcgcacccagggcacagga

SEQ ID NO: 33206 - RNA, 87 nt, Homo sapiens
cggaaaaagaagccaagaagcaaaaaagggacgcaagaagaaccaccagcggaaggccaaagacagacgggcccagcacacagggac

SEQ ID NO: 33207 - RNA, 75 nt, Homo sapiens
cccgccagcgcgccgggacgagaccacagaaggaaggaagaagacaaagagcggaaggcagggacaaaccacaaa

SEQ ID NO: 33208 - RNA, 52 nt, Homo sapiens
aggcgagccagggcccgcagcgagggagaaaagaagcagcccacgaaccccg

SEQ ID NO: 33209 - RNA, 57 nt, Homo sapiens
cgagacccgccaggagcaaagcagaggacaaagacccgagagccggaaaacccgaca

SEQ ID NO: 33210 - RNA, 73 nt, Homo sapiens
acgcagcggggggacacacgcgaccggcgaggcccaccaagccaggaccgagacagaagagggcgggaacagc

SEQ ID NO: 33211 - RNA, 97 nt, Homo sapiens
ggaacaggggcccgccagccccgcggcgcccgggcccgggcggcggcccaccgcccacggggaagcgggagaggccacccgcccacgagcggaagaa

SEQ ID NO: 33212 - RNA, 82 nt, Homo sapiens
gacgcgcccggcccggagcccccagcgcagcggccgcgcaaaacaaacggagagaggagggagaaacaaaggccaaagacgc

SEQ ID NO: 33213 - RNA, 77 nt, Homo sapiens
gggcacaacccagccaccgagaaggcacggcaccagacagaagacacggcccaggagcccggaccgaacagcaaccc

SEQ ID NO: 33214 - RNA, 65 nt, Homo sapiens
gaggagacagcagggcagccccgggcaaaaggagccccggcacaaaggaagaagaaagaagggag

SEQ ID NO: 33215 - RNA, 78 nt, Homo sapiens
ggaggcgacgcacacgagcggaggcgaaggacagcaccgaagcagagacagaaaaccagcaacggaagaagcaacaaa

SEQ ID NO: 33216 - RNA, 79 nt, Homo sapiens
aacagcaagcgcacaggccgggcacagggagccccaaaaacagccaagcaagggaagacagcaagaaaaaacgagaaga

SEQ ID NO: 33217 - RNA, 68 nt, Homo sapiens
agcgggcacccgcgcggccgcgggcgcgcccgcagcgcccgccacagccgacaggcaagacggcaggg

SEQ ID NO: 33218 - RNA, 78 nt, Homo sapiens
gccagagaaacccacagagaggagcggaaaacccagaaccggcccacagagccagcggagagcacggagagcaagaga

SEQ ID NO: 33219 - RNA, 73 nt, Homo sapiens
cagaaaccgggaagggggcgccggcggacgcacccggacgcaaagcgcacggaaggcgccagggggggcggcg

SEQ ID NO: 33220 - RNA, 72 nt, Homo sapiens
cacgagggagggcggcggcccaccaaggaaagggcgacagcaacagccgccggcggaaggaagaaggcgggc

SEQ ID NO: 33221 - RNA, 72 nt, Homo sapiens
gcaccccgggagagaggcaaccaggaagccacggcgaacacggccaggccgcagccaagccggaacaggagc

SEQ ID NO: 33222 - RNA, 90 nt, Homo sapiens
ggagagggaggcaggccgaggcacggagcgcccccacaggagaggccgaaagaagaaaacccgagcagagaaaacaacaaagcgcccagc

SEQ ID NO: 33223 - RNA, 77 nt, Homo sapiens
caccacgccggcccaccaaacagaaacgagggcgagagccccgcacgcagggcaccccgccgagggaacaccagaac

SEQ ID NO: 33224 - RNA, 64 nt, Homo sapiens
gcagagggaaccagcggacgcggaggcccaaccgaagaaaacaagagagagccggagggcagga

SEQ ID NO: 33225 - RNA, 84 nt, Homo sapiens
ccggcacaccgaggccggccgccccgccgcgagagcaagaacgaggccaaggaggagggacacagagacagcgaagaaagaacg

SEQ ID NO: 33226 - RNA, 82 nt, Homo sapiens
ggaagaggcggacggcgggaccacaagacaacgcggagcggcgaagagcaaccagaaaccagagacgaccacaagaacccac

SEQ ID NO: 33227 - RNA, 76 nt, Homo sapiens
gaagacccagggcggaaaggaagaggagacagagggccgagaaggacaggacagaaccaagccgccacagggagaa

SEQ ID NO: 33228 - RNA, 85 nt, Homo sapiens
cacaaccgcggaggcaaccgcgcccccagagcccaggccagcggagccgcaccaccgggagacaaccggagacccggccccgaac

SEQ ID NO: 33229 - RNA, 67 nt, Homo sapiens
gaagacagagggcgaggaccaaccaagccgagggaccccagcggaacaggacacaggcgacggaaac

SEQ ID NO: 33230 - RNA, 51 nt, Homo sapiens
accggggcagaacagaacacgaaaagccaggcggcggaagccccgcccacc

SEQ ID NO: 33231 - RNA, 78 nt, Homo sapiens
ggcggccggcgaagcccggcgccagacagagaagaagagacaggaagaaggcggcccaaacaaaagagaaggaagaca

SEQ ID NO: 33232 - RNA, 81 nt, Homo sapiens
gccccacgaccccacgcggacgggcgaggagaacacccggaccggacacgccgagcacacgagaggcgagggacgacagag

SEQ ID NO: 33233 - RNA, 60 nt, Homo sapiens
aacagccaaccggggaagcggaccccagcaagaccgccccagcacaccccaccccaccag

SEQ ID NO: 33234 - RNA, 84 nt, Homo sapiens
agccgcagccacaacaccggcaggaaccaccaggacagacagacagggggaacgcggaagacaacaaccaaggaaacagacaag

SEQ ID NO: 33235 - RNA, 55 nt, Homo sapiens
caaaccgccgagccaggccgacggccagaaggagaaaaaagagcccccaagaggc

SEQ ID NO: 33236 - RNA, 72 nt, Homo sapiens
gagaacagaagcacggaagaagcgcaaaaaacgaagcagcggcgaggacaccccggcaggcccggcccaacc

SEQ ID NO: 33237 - RNA, 83 nt, Homo sapiens
agagccagaacagagcagaaacaaagaagagagcaggaagaaggaagaaaaggaccgcagccaagagcgagaaaaagcgagaa

SEQ ID NO: 33238 - RNA, 67 nt, Homo sapiens
ccccccaccggcaagcgaagcgggacaagaggaccccgcaggcaccgaacagaccgagagaggcagc

SEQ ID NO: 33239 - RNA, 74 nt, Homo sapiens
cgccgggacggcccaccagccaccccaccgcgcagggaggaagccagcagagcagggaggaaaaccaaggcaac

SEQ ID NO: 33240 - RNA, 85 nt, Homo sapiens
gggccgggcagccgcggacccgccaagaagcgcccacgcagcagccggacagcccagagcaagcacacggaggcccgggagccag

SEQ ID NO: 33241 - RNA, 87 nt, Homo sapiens
cgagcaggggcgggagagccccgcagaagacgccgacgaggaaggaaaccagaggaggaaggcaagagaaccaccacagacgaccag

SEQ ID NO: 33242 - RNA, 36 nt, Homo sapiens
acagacaaaccaaggaggacccagcgaaaggcacac

SEQ ID NO: 33243 - RNA, 79 nt, Homo sapiens
cagggaaccaaacacccccagaaagggacagggggagaggcaccagcaacagaccaaccgcagcaagcacagagacagg

SEQ ID NO: 33244 - RNA, 64 nt, Homo sapiens
ccggaccagccaagccccaacggcccccgcgccgggcgcagcggccgaggacgagacccgccgg

SEQ ID NO: 33245 - RNA, 79 nt, Homo sapiens
aaggcgagaacgagagaggcagacaaacccacagccagggaaaagcgagacacagcagaacaccggaggggcggaccag

SEQ ID NO: 33246 - RNA, 82 nt, Homo sapiens
agaaggacaaggacggagagaagagacagaggcggaggagccgcacccccagaagacaggccgccccgcaagaaacccaccg

SEQ ID NO: 33247 - RNA, 80 nt, Homo sapiens
ggacaacaaaggcaaccaaaagcgggaaagggggaccagagaagaaaaaacgcaagcaaggccgagagcagggaggccaa

SEQ ID NO: 33248 - RNA, 96 nt, Homo sapiens
aaaaggaagagagaccgacacccaagacaagacagcgcaaggcagcaccaggacaaaagaagggcagcacaaaggaaagccccaaaccccggaacg

SEQ ID NO: 33249 - RNA, 77 nt, Homo sapiens
acaaagaccccgcaaggcggaccggaacagaacagcagacgcccccccgacagggacgccgaaacaggacgccacac

SEQ ID NO: 33250 - RNA, 84 nt, Homo sapiens
cacgaggggcccgccaccacgcacgggcgcacggaggacgggaaaaccagcagcagacagacggaaggagggggaagaaccaac

SEQ ID NO: 33251 - RNA, 51 nt, Homo sapiens
cgaagcgggcgcgcgcacggcaggacggagaaagggcaaggggggccagcc

SEQ ID NO: 33252 - RNA, 81 nt, Homo sapiens
gaaaccagccccggacgagaagcgcagcaacggcgggggaccacgagagcgggcaacagaaagccacaaccggacaagaaa

SEQ ID NO: 33253 - RNA, 71 nt, Homo sapiens
ggaacaaggaaacccaccgaggccgaaacacaagcaaggaacacaaagaagaaagaaaggaacggaaggaa

SEQ ID NO: 33254 - RNA, 73 nt, Homo sapiens
gccgaggcccggaacccgggaggggaggaccaaagacgagaacgagcaaaaacaccacggcagccagcacaaa

SEQ ID NO: 33255 - RNA, 71 nt, Homo sapiens
gcaggaaccaccaggacagaaggggaaaccacgggaagacaacaaggaacgagggaaagcacggacagaag

SEQ ID NO: 33256 - RNA, 55 nt, Homo sapiens
cccaccccccgaacccagccgcaccggaaagggccgagaaagaagagaggaagaa

SEQ ID NO: 33257 - RNA, 72 nt, Homo sapiens
caggccgaggaagaagacagccacaggccagcgaggcagaggggcgggcaaaggagaggcacaggaagcaga

SEQ ID NO: 33258 - RNA, 74 nt, Homo sapiens
aagcccaggcccacgcacaagcgggcaccagggccgaccgccgcagaacccaggagcccccgcagggccccgga

SEQ ID NO: 33259 - RNA, 68 nt, Homo sapiens
cccagggaggcaggggcagaaacagagaaggaacagggaaggggaagcaggccaacccagaacacacc

SEQ ID NO: 33260 - RNA, 75 nt, Homo sapiens
acgaaaccacgccgcccaccccagggggaaaggaagaaaaggccacaagagaaccaaggaaaagaagacgacgag

SEQ ID NO: 33261 - RNA, 79 nt, Homo sapiens
gacagcagcgagcccccgcggacccacccccgaacccccaagcccccgcagccaccgccacccaggaaggccaacaggg

SEQ ID NO: 33262 - RNA, 82 nt, Homo sapiens
gggcccccccggcacaaccgccacacccggcaaaacggacaccacggcagggcccaagggggcaaacgaccccaagaccaca

SEQ ID NO: 33263 - RNA, 79 nt, Homo sapiens
cggcggagagcggccaccaccggacccggagaccacccagagaggaaggaagcacaagaagaggggaccaccgaccaac

SEQ ID NO: 33264 - RNA, 78 nt, Homo sapiens
ccacaacgaagggaacccgagaaacaccacaacacacaagcgcaccaggagggacggcagaaacagaacaggaagaaa

SEQ ID NO: 33265 - RNA, 73 nt, Homo sapiens
caccggaaggaggcggccccgggaaaagcgaccgcaggagcaacgcacgaaaacgcacgaggagcacagaaac

SEQ ID NO: 33266 - RNA, 84 nt, Homo sapiens
cgggcccgccccggaggggagcccaggccaggagggggacccagggaccgccccaccgacccaaggagagggaccaaagaggac

SEQ ID NO: 33267 - RNA, 90 nt, Homo sapiens
gccgccccgccaccgccccggccgccgcgcccggacacacagaacaacaaccagacgaccgaacggacagaccggaaccaagccggacca

SEQ ID NO: 33268 - RNA, 78 nt, Homo sapiens
ccgggaggcgcccacccccaccaccgaccgcgcacaaagaggaggaaccaggcgaccccggagcacacaccacagccc

SEQ ID NO: 33269 - RNA, 60 nt, Homo sapiens
cagcggggcagaagcgcgggcaagggcgaagacgcagacccgaaaacaccaaggggacag

SEQ ID NO: 33270 - RNA, 78 nt, Homo sapiens
aaaagacgccaaaaaagccgaagaagaagaacaaacagagagcagaagcacagcccgacagaccgaagaaaagagaaa

SEQ ID NO: 33271 - RNA, 62 nt, Homo sapiens
ccagaccgaccagcccaagaaacaccaccaacaaaccgggccggcgcggcccagcaagccga

SEQ ID NO: 33272 - RNA, 58 nt, Homo sapiens
agagacaccaagcccacgaaagcaccggcaaagggcgaaagaaacggcgaggaaagag

SEQ ID NO: 33273 - RNA, 72 nt, Homo sapiens
cccacagcagggccacaaccagcgggaaaaggcacggaaacagaagagacaaacaccgcacagaaagaacac

SEQ ID NO: 33274 - RNA, 76 nt, Homo sapiens
agagggggaccgggcgcacaggcggcgccgacaggggaaacaggaagagaacagaacggaagaaagcagaagagga

SEQ ID NO: 33275 - RNA, 72 nt, Homo sapiens
cccccacgcggccagcgaaaacgcccagacaacgaagagaggaaagaagcggaaaggagggagcacacaaca

SEQ ID NO: 33276 - RNA, 76 nt, Homo sapiens
caaaggaaggcggccggagaagcaccgccggaacgccaaggcacagaagacgagcacgaggagaggaaccaacgaa

SEQ ID NO: 33277 - RNA, 71 nt, Homo sapiens
ggagcgaaggccggaggacaagggcggagaacggaaaagcaccaggaagcagagaggaccgcagaagggaa

SEQ ID NO: 33278 - RNA, 75 nt, Homo sapiens
gggagcagccgaccgagccaggacaaacaggcaccgcagacagccgagcccaccgcccccccaagaccggagacc

SEQ ID NO: 33279 - RNA, 82 nt, Homo sapiens
ggagcagccagaaagcggcacgaacagagccgggagcaagaagaacacccagaggaaccgggagaacccaaggaggagaagg

SEQ ID NO: 33280 - RNA, 82 nt, Homo sapiens
caagaggcggaaggccaaggcaccggcccccacgggcggcgcagggggagggcccgagggccggggacaaccacagcagcgg

SEQ ID NO: 33281 - RNA, 76 nt, Homo sapiens
acccgagaacggcgggaagagaagacacgagcacaaacgggacagagagccgaaagccgggcaaggggaaagaagg

SEQ ID NO: 33282 - RNA, 78 nt, Homo sapiens
aacacagacacaagcagaaagaacaaagcacaaaggaaccagagacagagagggcgcgaacaaacagcgccgaagaac

SEQ ID NO: 33283 - RNA, 71 nt, Homo sapiens
gacaggacaccgggaagcggaaaaaggaccaggcacagagcgcaaagacagaccccaggagacagccagac

SEQ ID NO: 33284 - RNA, 77 nt, Homo sapiens
ggccgcgagcccccgccgcgccccacgccggcacacacacagaggcacaccggaaaaagacgagaaggaaaacgccg

SEQ ID NO: 33285 - RNA, 76 nt, Homo sapiens
gggcgaccacaggcgaaagaggaaccaggaagacacagagccgcagagcaaccagcaaagagacggggcgccggag

SEQ ID NO: 33286 - RNA, 72 nt, Homo sapiens
cccgacaacccagaaacagggaacaggcaggacgaaggccaaccgcccagcaacaaagacgaaggccgaacc

SEQ ID NO: 33287 - RNA, 36 nt, Homo sapiens
ggccaaaacggacccaaacgaagggcaaaggcaaag

SEQ ID NO: 33288 - RNA, 74 nt, Homo sapiens
cgaacccaaccacaggagcaaaacccacacaggccagagcaaggcaccgcggcaccgccaccacagagcgccac

SEQ ID NO: 33289 - RNA, 73 nt, Homo sapiens
gccgaaggaggaccgggcgcggcgcgcagcggacggggccagacagcgaacccacccaacacggcaaaacaaa

SEQ ID NO: 33290 - RNA, 87 nt, Homo sapiens
aggggccaggccagcgacggggccaggaagcaacggaagcgcagcaacagcaagccccgggcaggcgccggggaaggaaccagaacg

SEQ ID NO: 33291 - RNA, 56 nt, Homo sapiens
ccgaaagcagaacaggccaagcaagcacaaccggccgcgccaaccacggaccggga

SEQ ID NO: 33292 - RNA, 77 nt, Homo sapiens
agacagcccaagagccagagacacggagaggcaagagccgcagagcacacaacagaccgaaggggacagcggacgac

SEQ ID NO: 33293 - RNA, 53 nt, Homo sapiens
ggacccgcgcagcgagcccgagcggcagcgccggaggagcggcggccccacgc

SEQ ID NO: 33294 - RNA, 83 nt, Homo sapiens
gagcccccgcccggcagccaccccacgggaacaaacaacacccaacagcccaaagcaaaggagcaacagcccaggagaaaacg

SEQ ID NO: 33295 - RNA, 77 nt, Homo sapiens
gggaagaaaaacagaggagcaaagacggagacagggaaacgaaaaccaccgggcaccacgagcccacgagagaggac

SEQ ID NO: 33296 - RNA, 81 nt, Homo sapiens
caggaccgggccggaacgagacgcacgcggagccggagcgaggcgggggaggcagcagaagcccgcccccgagagcgaccc

SEQ ID NO: 33297 - RNA, 68 nt, Homo sapiens
acaccacgcccgccgaacagggcagaaaagccccaacacccccaaccaccgggcagccaagcagggaa

SEQ ID NO: 33298 - RNA, 74 nt, Homo sapiens
gccacagcagccagccggcccgaggacaccgacaccagcaggaaacgccaagagcgagcggacgaggagcccgg

SEQ ID NO: 33299 - RNA, 52 nt, Homo sapiens
gcgccgcccccaggagcacaaaaggggagcgacaacaaagaacagccgagcg

SEQ ID NO: 33300 - RNA, 66 nt, Homo sapiens
cacagaggccagccgccgcagaagccaacaaaggaacgagcagcaacggccaggaaccaggccagg

SEQ ID NO: 33301 - RNA, 59 nt, Homo sapiens
cggccgggaccgaacaggcgaacacgggcagaaggagaccacacgagaaacaacggaag

SEQ ID NO: 33302 - RNA, 62 nt, Homo sapiens
ccaggacaccccgaagccgagaaagaccggaaacaggcacagaacagaaggaaaggacgaag

SEQ ID NO: 33303 - RNA, 59 nt, Homo sapiens
gacggaacaccgaccggaggcgcccccagaaggaagacgaaacgccaagagagaaacga

SEQ ID NO: 33304 - RNA, 88 nt, Homo sapiens
gcaaagggagccgacccgaggaccaaaaggcaaaaaaggcccggggacaggaaaaacgaggcaaagaggaacgggaaaacagcggcag

SEQ ID NO: 33305 - RNA, 73 nt, Homo sapiens
cgccgcgccgcgcgggggggaggggacagccggcagcgagcaccacaagacgcaagagacccccacccccccg

SEQ ID NO: 33306 - RNA, 80 nt, Homo sapiens
agaacagcagcgccgcccgccgacagccaggcccgggagaaagaagccagaaccccagaagaaagacggcaggaacacgc

SEQ ID NO: 33307 - RNA, 80 nt, Homo sapiens
ggcgagcggcggggagcggcgaagccgcgggcgagcacccgagggacccgaggagcccaccaagccgaccgcaggcaagg

SEQ ID NO: 33308 - RNA, 77 nt, Homo sapiens
gcagcggggagacaacggcacagacacaggacccaaagacaggaccacgcaccagcagagaaggaaagcaaaccgaa

SEQ ID NO: 33309 - RNA, 72 nt, Homo sapiens
agaagacggccacacaggaaacccaccagagaaggcgcggccacccaggacccgggggaggcagcgaagaaa

SEQ ID NO: 33310 - RNA, 74 nt, Homo sapiens
aacacgcccccacgaacaccgagaagcgagagaaagagccccgcaccacaacaaggggaaggagggccccgccg

SEQ ID NO: 33311 - RNA, 80 nt, Homo sapiens
accaaaggacaccccagccaccccgaggcgcggccaccagcaccagcacaggagcggccccgggcaccaccagaaaacag

SEQ ID NO: 33312 - RNA, 79 nt, Homo sapiens
cacaaaggagaaagagcacaccagggaggacgacaagaaggaaaggaagccgacaagagcaagcaagaagaacagaaag

SEQ ID NO: 33313 - RNA, 83 nt, Homo sapiens
ggcgcagcgacgccggggccacggcaggggcggcggccacggggggagcccggcccagccccccaccccccgcccccccgagc

SEQ ID NO: 33314 - RNA, 86 nt, Homo sapiens
acgacccccgggccagcgaagcggaggcggccgcgccgaggaaacagacgcggagcaccccaggcggaaacaagaacgcaaagaaa

SEQ ID NO: 33315 - RNA, 83 nt, Homo sapiens
cccccaagagcggggcacaggaagaagcgggcggagaaccggaggacccgcggcgacgggccagagacccggggacaagcacg

SEQ ID NO: 33316 - RNA, 80 nt, Homo sapiens
ggaagggagaacaggcccagggcgggcgagaaccccagcggcgagcagaccaggacccgagccccaaagacagaaaagcc

SEQ ID NO: 33317 - RNA, 80 nt, Homo sapiens
cagaccaggaacacaccaagggagccagggccaggccccccgggcagaagaaacaccaccagcgagcaccccagagagag

SEQ ID NO: 33318 - RNA, 74 nt, Homo sapiens
agcgccgcaccccagagcccacacccgcagagcgaggaccggaagggggacccaaaaggaaaaggacaggcagc

SEQ ID NO: 33319 - RNA, 63 nt, Homo sapiens
cggggcaagagcaggagcccggcaccccccgccgacaaggaggaccagagaggacaaccaaaa

SEQ ID NO: 33320 - RNA, 76 nt, Homo sapiens
gggggcagcccggcccgggacacggggcacccaccccggagagcccacaaaggccgggcaaacccacgaagcggga

SEQ ID NO: 33321 - RNA, 74 nt, Homo sapiens
cgggcaaagaagaggaagaagcaccagcaaggcacccacacccagaccagcgaaaaaaacaacacagcagacgc

SEQ ID NO: 33322 - RNA, 69 nt, Homo sapiens
aagaccacaaaaaagagacccacagccagcaacacccggaaaaggaggcgagagcgggcggggggacca

SEQ ID NO: 33323 - RNA, 79 nt, Homo sapiens
acgggggccgcgcacaccaaccccgacacggcgagggcgccacggcagggggcgccccggacgcccagacgccgcagga

SEQ ID NO: 33324 - RNA, 60 nt, Homo sapiens
ccggggcaggaagaaggaaggacccccaaccggcagacagaccgagaccaggaaaaggaa

SEQ ID NO: 33325 - RNA, 98 nt, Homo sapiens
gaaggccaaccaaaccacccagacaagccacccaccgagcagcagcaggaggaccaggacacaccccagaagaagcccacagaaagcgcaaggcgacg

SEQ ID NO: 33326 - RNA, 77 nt, Homo sapiens
aaagggggaacaggcggagcaccacgcccggcccaggcccacaaccaagaagcggggagaccgagcgaaggcagagc

SEQ ID NO: 33327 - RNA, 76 nt, Homo sapiens
cccaaggccagaaccaaacagacgacaaagagcacgcaccagaagaaaggagagagccgaaagagaaaagcgcgcg

SEQ ID NO: 33328 - RNA, 114 nt, Homo sapiens
gggcaagagcaaaggagcacaccagggcaaacgggagacagcgccaccacgaccgaaagggcgggggcacccccccccgccaccccaagcgcgggcggcagcaggggacagcac

SEQ ID NO: 33329 - RNA, 53 nt, Homo sapiens
cgcggcgagcgccaccgcagggcccggcgagcgaccgccgggggaacgcccga

SEQ ID NO: 33330 - RNA, 88 nt, Homo sapiens
cgaaaacggaagcgcagggagaaggaagaggggaaaagggcggagaacggaaaagcaccaggaagcagagaggaccgcagaagggaag

SEQ ID NO: 33331 - RNA, 83 nt, Homo sapiens
accagagcacagacacaaaggaggaggcaaaccagcggaggagccggcccagacaacccaacccgccaaggagccaccggcca

SEQ ID NO: 33332 - RNA, 85 nt, Homo sapiens
cccccagccacccgacaggagccccgccgccgcgcaccgcccgccccgcaccgaaccagagaaccccaaagacaaaagagcgaaa

SEQ ID NO: 33333 - RNA, 73 nt, Homo sapiens
gggaacaggcggaaacccaaccaagaaggcccagagagggcgcaggcccaagcgaccaacccggcccaaggga

SEQ ID NO: 33334 - RNA, 89 nt, Homo sapiens
ggagcggaagaaggcaggccaaaccaccgaccagaaaaggacccaagggggcaaaggcggaaacagcagaggacaccaggagaggcggc

SEQ ID NO: 33335 - RNA, 57 nt, Homo sapiens
gccaacaccccgcaggaagcccacggaacacaggccaaacacacaggaacgccagac

SEQ ID NO: 33336 - RNA, 72 nt, Homo sapiens
cagaaggggcccgacagagcccagcagaccaaagggaaaccaccgccagcggccgggcagccaccacagcac

SEQ ID NO: 33337 - RNA, 52 nt, Homo sapiens
aagccagaaccccagggcaaccagcaaccggcagcccacccccggcagcccc

SEQ ID NO: 33338 - RNA, 73 nt, Homo sapiens
ggccccgggcgagcggggaaccgccgcgcccgggaaaggaggaaagaaagagaagaagagcaaccaagcaaag

SEQ ID NO: 33339 - RNA, 69 nt, Homo sapiens
accgcgcccgcggagagcccaaacaccaccaccaaggcccaccgcgaggagaacggcggcgcggcaggg

SEQ ID NO: 33340 - RNA, 43 nt, Homo sapiens
cgccagacgccggccgcggaccagacaaagacaccaccagccg

SEQ ID NO: 33341 - RNA, 85 nt, Homo sapiens
caagagcgaggaggcggcgggagcggcaggcgccgacccgaaggccgccgccgggcgagaagccagaggacaacagagcaaccag

SEQ ID NO: 33342 - RNA, 53 nt, Homo sapiens
aaaaccaaaacgcaacagaaacaacaggaagaaaaacgcccaaagacaggaca

SEQ ID NO: 33343 - RNA, 74 nt, Homo sapiens
ggacagagcccccgaggccccagaacaccggcagaacaagaagggcaaccaggggggaaggagggagcggagaa

SEQ ID NO: 33344 - RNA, 77 nt, Homo sapiens
aagagcgaaaaaacaggaggacacaaggggaaaaagaaaagggcgaagacccgaagcagcgcaggaacagaagagaa

SEQ ID NO: 33345 - RNA, 80 nt, Homo sapiens
cccgagacaaccaccgggggccaccaccgaggaccgcacaaacacgcagaggcaagaagagaggcaggagggccgggacg

SEQ ID NO: 33346 - RNA, 69 nt, Homo sapiens
ggacccaaacccgaccagaccagggacgccagaccacaccaaacggacacggaaaaagagcggacagga

SEQ ID NO: 33347 - RNA, 58 nt, Homo sapiens
gagccggagagccggccgagcgaggcggcgcggccagaagacaagcagaccggaagac

SEQ ID NO: 33348 - RNA, 41 nt, Homo sapiens
gacaagggcaacaaggccgcccagaaggggaagaccccagc

SEQ ID NO: 33349 - RNA, 103 nt, Homo sapiens
cgcggacgggcgcggcggggacggcgcccgcgccaccaccggcgaaggccaagacaaggggcgcagagcggggggacaggcgcaagaccggagaagcaggagc

SEQ ID NO: 33350 - RNA, 52 nt, Homo sapiens
gaaagggcgggaaaagccacccacagaccgaggccaaaagaaaggaagaaaa

SEQ ID NO: 33351 - RNA, 71 nt, Homo sapiens
gcacacggagacaccacaacccagcccaggagcgaggggcccgccacgggagagcgaaggcacgagcgccc

SEQ ID NO: 33352 - RNA, 75 nt, Homo sapiens
acagagcagccgaaggagagcgaacgcacgcaaaggggaaaagagacgcaaaccacgaggacagagaagagagaa

SEQ ID NO: 33353 - RNA, 69 nt, Homo sapiens
aaacaaaacaaaagaacagaaagcgagcagagcccgcgaacaagacaagcggagcggcaagccacccgc

SEQ ID NO: 33354 - RNA, 62 nt, Homo sapiens
gcacacaccaccacacacgagcggacagacgcagcggggcaggccccaccacgggcagggcc

SEQ ID NO: 33355 - RNA, 75 nt, Homo sapiens
agacgcggcgccgacgggccccgaggccgcgggcgggacgagcagggggaggaacaaagcgaggaagggaaggga

SEQ ID NO: 33356 - RNA, 74 nt, Homo sapiens
ccacccgcaaggacccggaaggccggggggccgaggcccaaaggacgaaaacaagaaaggagaaagacagaaag

SEQ ID NO: 33357 - RNA, 75 nt, Homo sapiens
ccgaaacaccacgccacacaccagcggagaaaacccggcaccaaacggccgaaggagccgcacaagaaccaagga

SEQ ID NO: 33358 - RNA, 65 nt, Homo sapiens
gaacagacgccgcacccccgcgacacagggcccgagcacccgcgagacaccaccggggcggccca

SEQ ID NO: 33359 - RNA, 78 nt, Homo sapiens
cagcggcaacacggggcgaccggacgcagcggagcggacagcgcacacaacgaggcccaaacagggcaaggagcggag

SEQ ID NO: 33360 - RNA, 75 nt, Homo sapiens
gaacacccacacaaagaaaagccacgaccaaggaaacaaagaaggcgggggaggagaaagaagggagccaggcgg

SEQ ID NO: 33361 - RNA, 90 nt, Homo sapiens
cgccagcccacccccaccaccccccgaagcacccagaacccgaggcagcacacagccacccccggaagaaccagacgcaaacagcagacg

SEQ ID NO: 33362 - RNA, 61 nt, Homo sapiens
caggaaaagaccaagaaggggaacggaaagaccccaaccacaaaagccgccaaggagcagg

SEQ ID NO: 33363 - RNA, 77 nt, Homo sapiens
cccaggccaagcagccaccagcagcccccagagcgggaccacagacgcggacggcacgcacagcagagcacgccgca

SEQ ID NO: 33364 - RNA, 71 nt, Homo sapiens
acggcacagggaggccagccggagaagcgagcagcgccaaaaccaaccaacaacaacgaccggcccgcagc

SEQ ID NO: 33365 - RNA, 89 nt, Homo sapiens
aggagcaagcagcgagcccacacaaaagggagaccagagacagacgaggaagacaccaagaaggcaaagaaaaggagccagggaggccc

SEQ ID NO: 33366 - RNA, 72 nt, Homo sapiens
ggaccagaagggaggaggacccccagccaaacagagagaccgaaggggcagcagagccccgacggacagacc

SEQ ID NO: 33367 - RNA, 54 nt, Homo sapiens
ccagaacccgcggagccacccaagggaagagcggccaagagagaaacacaagag

SEQ ID NO: 33368 - RNA, 80 nt, Homo sapiens
aaccagggggccgggcagccgcggacccgccaagaagcgcccacgcagcagccggccacagaacaccgccggccacaccg

SEQ ID NO: 33369 - RNA, 72 nt, Homo sapiens
cgacagcgcggggcccggagaagcccacccccgcggcgccgcgccccagaccagagagaagaacggcacaca

SEQ ID NO: 33370 - RNA, 77 nt, Homo sapiens
caaacaaggaagaaggaagaaggcccgggggaagaggaaaagggagaaggccaaaggcaccccagcaggaagcgaag

SEQ ID NO: 33371 - RNA, 85 nt, Homo sapiens
gcggcacaccacgggggcgcagaccgccagggggcagacccaaaggaaacgcacgaaagaaacaggagagcgcagcgaagcccgg

SEQ ID NO: 33372 - RNA, 75 nt, Homo sapiens
agggcggggccccacccagggaacaggccgagagcagccagaagacaaagaggggaagacacagaaccaaccaca

SEQ ID NO: 33373 - RNA, 73 nt, Homo sapiens
ccagggccacgggggaagaggacagaggcagccccggccaccacaaagaacacacgaacgacaagacgaaaag

SEQ ID NO: 33374 - RNA, 83 nt, Homo sapiens
caacgcggcccaccagggcgcacgggacccgcccaagagccccaaaaacaccaggaagaacgaagcgcgcagaaaacacagaa

SEQ ID NO: 33375 - RNA, 73 nt, Homo sapiens
gcccgaaccccaggccccccacccggcccaacgccagagcgcaccagaaggcgacccaaaaagagcagccccc

SEQ ID NO: 33376 - RNA, 81 nt, Homo sapiens
cggcagggcaccgcgcgaagcggccaaagccgcccagacggccaccggcgggaggaacaaaaggacagccagacaagaccc

SEQ ID NO: 33377 - RNA, 78 nt, Homo sapiens
gcggggggaggcgcggggcgccgccagccccgggaagaggggcgcagcggcggcaacgaggacgccggcccaggcgga

SEQ ID NO: 33378 - RNA, 74 nt, Homo sapiens
gcagccgacggccaagaaacccccaagagggcacaacaccagaacacagggacccaaccagagaaacggaagag

SEQ ID NO: 33379 - RNA, 69 nt, Homo sapiens
aaggcccagcgggcccaggaacaggcccaaagacgcacccacagagaaacccgacccgcaggggagaca

SEQ ID NO: 33380 - RNA, 36 nt, Homo sapiens
ggaccagagaacgcaaagccgggcacaaagccagcg

SEQ ID NO: 33381 - RNA, 61 nt, Homo sapiens
acccaggcccacggaggaagagccgggcagcccggagcgggccagagaggggcgaaaacgc

SEQ ID NO: 33382 - RNA, 72 nt, Homo sapiens
gagaaagaaggagaacaaacgccccggggcggacagaggggaagcaagaggccaacacacacgagcgggcga

SEQ ID NO: 33383 - RNA, 80 nt, Homo sapiens
aaacgaacgagacgccagcaaacacgaggaaagaagaaaaaaccaccgggaacaccgccagaaccgagaagaaccggcaa

SEQ ID NO: 33384 - RNA, 74 nt, Homo sapiens
gcaccagggaaagcagggccagagggaaggaaaccagcccacagagaaacaagaacaggacggccaaaaaccca

SEQ ID NO: 33385 - RNA, 72 nt, Homo sapiens
gggggcgaaggcaaggcacaaagcccgacagggcaacacccgacaaaggagaaagacgaccgccaaccaggg

SEQ ID NO: 33386 - RNA, 78 nt, Homo sapiens
cgacagccgcagaacgaggagacacacagccccagacgggaggaaaaaaggaaggaccgcgacgaacacaaccaaaga

SEQ ID NO: 33387 - RNA, 81 nt, Homo sapiens
gaggccgcaccgcagcgaggccaggaacccggggagaccccgacgggaggccgagcagagcaccaaacaggggggaaggaa

SEQ ID NO: 33388 - RNA, 68 nt, Homo sapiens
gcggaaaagcaaagacaagccgggaagagaaagcgcaagaacaggaagaacgccaggaggacgagaag

SEQ ID NO: 33389 - RNA, 69 nt, Homo sapiens
acaggaggagcggccacgcagacaaaagagcggaacgcccagcccaggcggagacaaggggaaagccac

SEQ ID NO: 33390 - RNA, 77 nt, Homo sapiens
acccagcgccgcggcgcccgagcggcgggccgcagaggcgcgcgacgggaccacaggcgaccgggaccacgcggcga

SEQ ID NO: 33391 - RNA, 86 nt, Homo sapiens
gcgagcagagccgcccagcccgccagcgcgccgggacgaaacgccgaagggaccaggcagacgggaagaacccagaaagaaaggag

SEQ ID NO: 33392 - RNA, 65 nt, Homo sapiens
gggagccaagacacacaagcaggcacacaaaacagaaagcgagcgagcagaccaacgaacaccaa

SEQ ID NO: 33393 - RNA, 72 nt, Homo sapiens
gagccgcccccagcagcgagcgaaggacacgcagccccagaccgcgggacaggcagaaggcaggcgcccaag

SEQ ID NO: 33394 - RNA, 64 nt, Homo sapiens
ggcggagacgagccgagacagagcacgcccgggaccaggccaaccggagcgcacccacgccaca

SEQ ID NO: 33395 - RNA, 73 nt, Homo sapiens
agaaagagaccgcagagacagccaacacggcacccacagggaggccaggagaaggcggggcagcagaagaagc

SEQ ID NO: 33396 - RNA, 81 nt, Homo sapiens
cgcggggagcgcgcgaagccggggcggagcacgcgagcagggaccaccacacgaaaccaaggaaaaaccgggaacagcaga

SEQ ID NO: 33397 - RNA, 78 nt, Homo sapiens
cacccaacgaaaacacgaggcaaagacaccccacaccaggggacccccgcccacgaccgccccagcagggagaggcga

SEQ ID NO: 33398 - RNA, 79 nt, Homo sapiens
acaaagcacaaacagcagcacgaggagaggaagaggcgagaaaaacaaccagaaccaccaggccccgaaagagccagag

SEQ ID NO: 33399 - RNA, 80 nt, Homo sapiens
cgaccgagagaaccagcgccagccgggagcaccggaggggcaaccaccagcacacggcaagcccccaccaccgcagagag

SEQ ID NO: 33400 - RNA, 76 nt, Homo sapiens
aaaagggccaggaacaggcgcccaaagcgacccaaagaacagggaagaagcgcgagcgaagcaggggcagcggcac

SEQ ID NO: 33401 - RNA, 87 nt, Homo sapiens
ggagacggccagacaggaacaagacccggacaccaggccacagccgggaagcagagggagaaagacaccagaccagagcacgggcag

SEQ ID NO: 33402 - RNA, 81 nt, Homo sapiens
acccgaagaaggacggcgacccgccgaagcaccgcgggcgcgcggaaagcaccgggaggaaagagagccacacgaagaaca

SEQ ID NO: 33403 - RNA, 47 nt, Homo sapiens
aagggaacgcccggcccagccccgcccagaggcagagcacacaacca

SEQ ID NO: 33404 - RNA, 70 nt, Homo sapiens
gacaacccacgagaagagaagaaagcaccgaggaccgccaacaaaaagaggaaccaggaccagccgaagg

SEQ ID NO: 33405 - RNA, 86 nt, Homo sapiens
caggcccgaggagcgacgagggggccgacgacgagccccgcgaggagcgcagcggagaggccagaacgcccgccagcccagccgcc

SEQ ID NO: 33406 - RNA, 60 nt, Homo sapiens
ggggcggacgacccagccggggggcacagccgggacgcgcaaccaacacaaccccaccaa

SEQ ID NO: 33407 - RNA, 73 nt, Homo sapiens
gcggcggagggaggcggcgacccggcgagggcgggcgacaaaccccgggggaccacccaccgggggaggcagc

SEQ ID NO: 33408 - RNA, 110 nt, Homo sapiens
acaggaagagaagcgcagcaccgcaaggcaggggaaccccggggcagaagacccaaggaagaccggaccaaggacaagaccgcgggcacaccgaccaccaacgccggagc

SEQ ID NO: 33409 - RNA, 70 nt, Homo sapiens
aggcgccggacccggggggacgagagggcccaaaccagaaacaggaacagcggcagaaaaccccacagac

SEQ ID NO: 33410 - RNA, 38 nt, Homo sapiens
cgcccacagaacaccgagcgccacgcagagccccgcca

SEQ ID NO: 33411 - RNA, 82 nt, Homo sapiens
ggcggaaaaccgaagggaaggccagcagcgcgcggagaagaacggggagccagaggaagacggcaccggagcaccccagacc

SEQ ID NO: 33412 - RNA, 71 nt, Homo sapiens
aggggaacaagcggaagaccaggcagagaagaggcagcgcaagaaagcggaaaaacgcccagaacccgcca

SEQ ID NO: 33413 - RNA, 51 nt, Homo sapiens
accaggcggacccagagcagggaagcagcacaccacacaaagaggagagga

SEQ ID NO: 33414 - RNA, 57 nt, Homo sapiens
gaggcaccacaaaaccacaagggaggaaaggccaaacagcagagggaggcgaacgga

SEQ ID NO: 33415 - RNA, 81 nt, Homo sapiens
ggagccgcggcggagccggaggaagcgaggcacccaagcagcggccccgcgaagcggagaacacccaccaaggcagacacc

SEQ ID NO: 33416 - RNA, 99 nt, Homo sapiens
cgccccccagcggcgggagagacgcgaagaagaagagggaaggacggagcagagcggcacgagggggagcaagagaacaaccggagaccccaacaaaac

SEQ ID NO: 33417 - RNA, 76 nt, Homo sapiens
cagagcgcacggcgacgccccaggggaaaacccccgggaccagagcgcgacaaggaccagagccaggaaacacagg

SEQ ID NO: 33418 - RNA, 77 nt, Homo sapiens
cgcggagcacagaagaagcaacacgagaaccaccccgacacaacaccaccaggccccacgaaggacggccagcgcgg

SEQ ID NO: 33419 - RNA, 95 nt, Homo sapiens
gcaagagcaaacgaaggaggaaaggcccgagcacccgagcgaagaagaagcgaaacggcaccgaaagcgaaggaagcccgcccccaaagccgaag

SEQ ID NO: 33420 - RNA, 84 nt, Homo sapiens
gacgccagcgggacgaggaccgagaccgcggccgggaccgaggaacaccccaccagaccacccagcaagcccacaaaaaaggca

SEQ ID NO: 33421 - RNA, 70 nt, Homo sapiens
ggacgacaccaggaagagagggacaggagacgaggaggagaaccagcacgcagaagagaagcacgaaaac

SEQ ID NO: 33422 - RNA, 78 nt, Homo sapiens
acacccccccgggggggagccggcagcgcccgagggagcaaggagaagagcggaacccagaccgcgcccggagccacc

SEQ ID NO: 33423 - RNA, 74 nt, Homo sapiens
ggagcgcggagggcggcgcaggccggggcgagcggcgggcccgcgggccaggccgggaggggagaccagaaaga

SEQ ID NO: 33424 - RNA, 71 nt, Homo sapiens
ccggcaggcaccgcgcgcgcgggggccgcagaagcgagacaaacagcggggcacgcgaggaagccccagaa

SEQ ID NO: 33425 - RNA, 39 nt, Homo sapiens
cagagggggacagcgaaacgagcgcaagacacagggcac

SEQ ID NO: 33426 - RNA, 74 nt, Homo sapiens
ggaggccccagaggggccccagacgccacacggggccgcagacccaaaggcggaagccaggaggacgaaccagc

SEQ ID NO: 33427 - RNA, 72 nt, Homo sapiens
ccgcccggggccagacccccggcaggaaacgcaaccggacagaagaggaggcaaggaaagcccaaaacccag

SEQ ID NO: 33428 - RNA, 69 nt, Homo sapiens
ccacagaagaagcaaaaccaacagggcagagcaggggaacaaggacagccggaagaggccgaacaaaga

SEQ ID NO: 33429 - RNA, 69 nt, Homo sapiens
accaagaaccagcaccagcagcgcgcacccagggcacaggagacagagaggaggagccgcgggaacaac

SEQ ID NO: 33430 - RNA, 82 nt, Homo sapiens
aaagaagagacgcgggcccagggggaacaggcacgagcgaaccgggaggacgcccgaccccacccagcccgcaccgggcagc

SEQ ID NO: 33431 - RNA, 77 nt, Homo sapiens
gcaagaaaggggaaccccggagaaaaggccaagaaggcagcaccacgcaagagccacccaccagaagccggccagac

SEQ ID NO: 33432 - RNA, 72 nt, Homo sapiens
aggcggcgcggagagggggcgcgagcgggggagacaggagggaccgggcagaagaacgggggacgaaagcca

SEQ ID NO: 33433 - RNA, 73 nt, Homo sapiens
gggacggcgcgcgggacggccgaggaaggaacggcccccccccagcccgccccaaaagaaggagcacaacagg

SEQ ID NO: 33434 - RNA, 53 nt, Homo sapiens
agagagacgagccgaggaaaacaacccgcgcacagaagggagcggcaccggag

SEQ ID NO: 33435 - RNA, 76 nt, Homo sapiens
caagccggcaccgagcggcggagacggcgagcacaagaacgaggagagggacagcggcagaaggcgaaagcgaaga

SEQ ID NO: 33436 - RNA, 30 nt, Homo sapiens
ccggcggggagcacggagaccaccgccagg

SEQ ID NO: 33437 - RNA, 69 nt, Homo sapiens
gcaagaggcacgcccagagcaagaaggcagaggcagaaaagcagagacagacacaagaggcccagcagc

SEQ ID NO: 33438 - RNA, 85 nt, Homo sapiens
agagcgaaacgaaggcccggcaagacgcgcaggaagaccagcgcgcgggagcgcccccacgcccagcacggacgccgagaccccg

SEQ ID NO: 33439 - RNA, 40 nt, Homo sapiens
gggcccccgagagaaaggagaaagagccgcagacgcacag

SEQ ID NO: 33440 - RNA, 80 nt, Homo sapiens
agcgacaagaggcggacgcacaagagggggaagacggggggccccccaccgccccgcagaagagcagcggccgccggcaa

SEQ ID NO: 33441 - RNA, 71 nt, Homo sapiens
aagaaaaggagaaaagaagccaaagggacacggcgggagacaggaaaggaaaacagggcgggaggcgagcc

SEQ ID NO: 33442 - RNA, 85 nt, Homo sapiens
cacaaaaagggcaagaaagagaagaagacaggaaaaaaaaaacaccgagcgcaaagccgaaaaacagcagcagaggaaagaaaag

SEQ ID NO: 33443 - RNA, 73 nt, Homo sapiens
cgaagacgccaccggagagagaaaagcaaccgaaggggaaaaaacaagacgaggaccaaaacggaaggcaaaa

SEQ ID NO: 33444 - RNA, 79 nt, Homo sapiens
gcggaagagcgaggccagccagaacgccggggaccaggcccgggcgccgcaaaaggaggcgaccaacgacgaagagcag

SEQ ID NO: 33445 - RNA, 68 nt, Homo sapiens
gaggaaacccgacagcaaagagacgccccaagcaccgccaagacggccaggccccagggacgcgagcg

SEQ ID NO: 33446 - RNA, 65 nt, Homo sapiens
ggcaagccagaacccaacaaggaggccagggcggccagacagccaagcccccggcccccacccag

SEQ ID NO: 33447 - RNA, 82 nt, Homo sapiens
ggacgggcacccgcccacaacggcccgagaaccgcgcgggccccccgcagcagccggagggagacgagagggccccaaaggg

SEQ ID NO: 33448 - RNA, 80 nt, Homo sapiens
acccccccggccgcgagcgcgccaggaggggggggcagcggagggacacagcgcggagacagccccaagcaaggccacaa

SEQ ID NO: 33449 - RNA, 59 nt, Homo sapiens
ggcggagcacccaccacggagggaaagaccaggcagaccagcgcaaaggagaagcgaag

SEQ ID NO: 33450 - RNA, 80 nt, Homo sapiens
gggaagaacgagcaaagccgaaggacaaagacaaaggaaagccaaacgaaggaggcccaaccacaaaaggagccgacgga

SEQ ID NO: 33451 - RNA, 82 nt, Homo sapiens
cgccggggccgccaggagcccgaccgggagaggacaagaccacgagccaggccaagaaaaggagacggggcggcgcggccaa

SEQ ID NO: 33452 - RNA, 72 nt, Homo sapiens
gggcaggggcgggaccaccaggccagcagcagggggagagcacaaggcgaacaagcccccaggcgagagcaa

SEQ ID NO: 33453 - RNA, 72 nt, Homo sapiens
cagaaagcgaaagaccaacaaaaaagccaggagggagcagagggcaaacgcaggagcgaccaaaaagcagaa

SEQ ID NO: 33454 - RNA, 60 nt, Homo sapiens
aacccgcggggcggaccggagaagccccgagcaccccacaggccgacaaccccgaaacca

SEQ ID NO: 33455 - RNA, 82 nt, Homo sapiens
ggaagaagccggcccggggccgcggacgaggaccagcagaggccagcacgagaacccagcacggggaggagagcgaggacgc

SEQ ID NO: 33456 - RNA, 84 nt, Homo sapiens
gccaaagccgggggaagcggggcgccggcgcaccggagaggccaggaacgagaccccgaggggacccgcaccagccacaaaggc

SEQ ID NO: 33457 - RNA, 76 nt, Homo sapiens
gagagccaggaagcaaggaggaaagaccacagcaagaccacgcccccagccgggggaccaggccgaacgacccgga

SEQ ID NO: 33458 - RNA, 73 nt, Homo sapiens
gaaaggcccaccggccgggagggcccagggcggggcccgaggccaacaggaaccggaaaacaacgcgcagggc

SEQ ID NO: 33459 - RNA, 81 nt, Homo sapiens
cccccaaaggcgggacacagagaacaggaagcgggcaggaggccagaggcagaaccccaaaaccagcagaccacagaccca

SEQ ID NO: 33460 - RNA, 74 nt, Homo sapiens
ggccacaggacgaaacagcagacagaagagcagaccaccaagagggcgaaccaaagaaggaaggcgacccaaaa

SEQ ID NO: 33461 - RNA, 82 nt, Homo sapiens
cgccaccaggcggcgcccccgcagcccgcacccacccacgacaggacggacccgggcagaagccccagaggagcccgaaacc

SEQ ID NO: 33462 - RNA, 86 nt, Homo sapiens
gccccggccgcggggcccggcgaagggcagaaacgaaggaggcccaaccacaaaaggagccgacggaacccagacggagaacaaaa

SEQ ID NO: 33463 - RNA, 71 nt, Homo sapiens
gcgaagaagcgcagccgcaccggccaaggcccggccccgggcccgcacggcccaccaccgagcggcaccac

SEQ ID NO: 33464 - RNA, 81 nt, Homo sapiens
acccggccgggacccgaaaccccgaccgcagccaggccgacccgaccggaccagacaagggggcgccggcagcaggagggc

SEQ ID NO: 33465 - RNA, 73 nt, Homo sapiens
gaacgacagcccggcccgggagcacgagaaggccgaggaggagacaagcagaagcagaacacagccaaagccg

SEQ ID NO: 33466 - RNA, 58 nt, Homo sapiens
agaaaaggacgcgacacaagcacaaaagcggaggaaaaggaacgggcgcaccacgcca

SEQ ID NO: 33467 - RNA, 85 nt, Homo sapiens
gagagaaccgccggcagggacccaccagcaagacacaggggacgacgcgggcccagccagcggccacaaggagggcgaccgagca

SEQ ID NO: 33468 - RNA, 85 nt, Homo sapiens
cagacacgccaccccaaggagcacgcagggcgagggaacagagagaaacccggcaagaaagcggaggcagggcgcgaccggccac

SEQ ID NO: 33469 - RNA, 69 nt, Homo sapiens
ccggaagggcaaggaggcagcagccaaaccgcagaccggacgaaggggcggaagcccgggaccggggga

SEQ ID NO: 33470 - RNA, 74 nt, Homo sapiens
ggaaagagccacgaacacaaaggagggacagcagcaagagccccaaagccaccaggaaacggacacggggggcg

SEQ ID NO: 33471 - RNA, 84 nt, Homo sapiens
gaggcaggaggacgaggaggaaaacccaggcagggaaagaagagaccccccaaacccaaccagccaccgaagaagaacgggcga

SEQ ID NO: 33472 - RNA, 70 nt, Homo sapiens
aaacgcccacagaacaccgagggaaaaggcaacggacacaggacaccacgggagagcgaacacacaggaa

SEQ ID NO: 33473 - RNA, 83 nt, Homo sapiens
agccggccccaggaccgcacaccaccccggcaggagaaagaccggggaagaggaggcgaggaggcggagggcgagaagcaccc

SEQ ID NO: 33474 - RNA, 65 nt, Homo sapiens
acggagccgagaccaagcgcggggagcccccacccccaaaaacgcggaagacggggcagcacaaa

SEQ ID NO: 33475 - RNA, 71 nt, Homo sapiens
aggaaaaacgccacgcaccggagagagcacagccgccccagccaccaccccaggggccagagcccccccag

SEQ ID NO: 33476 - RNA, 84 nt, Homo sapiens
cccggccgccgccccacacggagaggcccggcggcgcgcccaaccggcgacggaaccaaggcgagcacacagagaggggaaggg

SEQ ID NO: 33477 - RNA, 44 nt, Homo sapiens
ccccaaaggcgggacacagccaccgcaaggccagcgcacggaaa

SEQ ID NO: 33478 - RNA, 68 nt, Homo sapiens
ggaaagacaacagaaacaagacaggaacgccagaaaaccagaaggcaccgacaggaaaggaaaaggag

SEQ ID NO: 33479 - RNA, 53 nt, Homo sapiens
gaaacgcagaaaagacgcgcacaacaaggaaagccccccccacccggcacccg

SEQ ID NO: 33480 - RNA, 90 nt, Homo sapiens
agaaagcaggcgaacccgcggcgcaaaacggcagggcaagaaggacgaccccaagcgagcaggagggcaagcaggcaggagaagaacgcc

SEQ ID NO: 33481 - RNA, 65 nt, Homo sapiens
acggcgagaggggcgagaacgccacgcgggccggcgaaagcgcaagaggagccaggagcacgggg

SEQ ID NO: 33482 - RNA, 101 nt, Homo sapiens
gagcccccaccccagacaggggaacagggcacagcccacccagggggacgaccaccagccaggccggggacaaacaggcaaccgacggggaggggcaaggg

SEQ ID NO: 33483 - RNA, 69 nt, Homo sapiens
ggaccaagaaccagggcgaagagagaacacgcacggaaggaaggagaccacgagaaagaaaaaacagaa

SEQ ID NO: 33484 - RNA, 79 nt, Homo sapiens
gcgacccaggagacagcgaagagccaaacaccgagacagaggaccggaaaagacgccagcaagcgcccggaggaccggg

SEQ ID NO: 33485 - RNA, 74 nt, Homo sapiens
caacgcgagcagaacagcccagccaggagcgacccagccagccaacaggagcacggcaagaaggacaaaccgag

SEQ ID NO: 33486 - RNA, 68 nt, Homo sapiens
cgcgccggcgagggaagcggaaccaaccgggaaagcccggggcagggcaagaacaacccaagaaggac

SEQ ID NO: 33487 - RNA, 75 nt, Homo sapiens
acgggagaccagccccaagccacggaccagagacacgccaagcagccagcccaggagagacaggccgaaggaccg

SEQ ID NO: 33488 - RNA, 79 nt, Homo sapiens
gcagacgaccgagacccagcacacaacaaggcccccgaagggcggcagcagcggaggggaggaaggccgacggccaaaa

SEQ ID NO: 33489 - RNA, 104 nt, Homo sapiens
acaggagcggaacgggacgcagaaagggcagacacaggcacaccaaggggcagcaaaaccccagaagaggcgaaccgcaggaaaccagagcaagaaacgagcga

SEQ ID NO: 33490 - RNA, 66 nt, Homo sapiens
gccgccaggcgacacaccggaagcagaagcccaccagaggcgaggggaggaggaagcgagcgaaaa

SEQ ID NO: 33491 - RNA, 106 nt, Homo sapiens
agggccggacaggcaccacgcaccgacagcgccgccaccgagccgggcccaccccccaccaaggaagagccaggccccggggccccagcggcaccagcggagacca

SEQ ID NO: 33492 - RNA, 59 nt, Homo sapiens
gacaagaaagcacccggaacagacaccccgaagaaccccaaagaaacccagagaccaac

SEQ ID NO: 33493 - RNA, 42 nt, Homo sapiens
accaggagcccgagagagaagggcaggcgacacgagacccac

SEQ ID NO: 33494 - RNA, 55 nt, Homo sapiens
cccacccgcacaggaccaagccaaagaccacgggggccaaacaccaggagaaggg

SEQ ID NO: 33495 - RNA, 69 nt, Homo sapiens
gaaaaagggggcgcaaggcgacaaaacgaaacaagaaggcccaaacaggccaacacaggaagggagcaa

SEQ ID NO: 33496 - RNA, 55 nt, Homo sapiens
cgcgccaccagagacggaaacgacacaaaccaagcacaaaagggagcggaggcaa

SEQ ID NO: 33497 - RNA, 70 nt, Homo sapiens
caagacgcgcgagcacacaggagaagcaagaggcgcaaagaaggacgccgccggcaaaaaggcaaaaaga

SEQ ID NO: 33498 - RNA, 81 nt, Homo sapiens
cggggccgggacgcagcccggcggcagcagcaccaggacaaaagaagggcagcacaaaggaaagccccaaaccccggaacg

SEQ ID NO: 33499 - RNA, 76 nt, Homo sapiens
gcaccgcagcgaggccaggaacccggggagaccccgacgggaggccgagagaccaagcgaccaagcaagcagcgcc

SEQ ID NO: 33500 - RNA, 78 nt, Homo sapiens
gaacaccacagaaagaccgaagacaaaaaccagaagacaagcagcgaacgccagaacaaacagcgagaaaaccgaccc

SEQ ID NO: 33501 - RNA, 78 nt, Homo sapiens
agccgggaaacccacagagaagaacccagcagacagaagcgcggcgccaggacaaggggagaaggacggcagaaaacg

SEQ ID NO: 33502 - RNA, 80 nt, Homo sapiens
ggcggagagagaggggagccggcccccgaaagagggacagaaagacagagcaaccacggcaggcaagcgaaagaaaaaaa

SEQ ID NO: 33503 - RNA, 73 nt, Homo sapiens
cccggcccggccccgacacgagaggacggggacgggccccaggacgaggaagacaaggccagccacggaagga

SEQ ID NO: 33504 - RNA, 81 nt, Homo sapiens
gcgacccccacaagcacaaacgaccaagcacagagcaccagccaagaagcaaggggaacaaaggagaagacagccagaaac

SEQ ID NO: 33505 - RNA, 76 nt, Homo sapiens
agcgcgcccccaggaggcgagcccgcggaaccgcagccaggagacaaaaacaggaagagaaggagggagccccaag

SEQ ID NO: 33506 - RNA, 70 nt, Homo sapiens
cgcgcagcgcagcaggagagaagaaaacgggcgcagcaacccggccaaccagaccgaaaccaggacccgc

SEQ ID NO: 33507 - RNA, 72 nt, Homo sapiens
gggagaacagaggcgagagcggcagcagcaccagcccaagagaaggaggcagcacggcaggagacgaggaga

SEQ ID NO: 33508 - RNA, 74 nt, Homo sapiens
ccggggggccggggggaaaggggcagcagaggcgagaggcagccagaacccccccagacccaccagggaaaccc

SEQ ID NO: 33509 - RNA, 48 nt, Homo sapiens
acagggagagccaacacaaggaagggagaaaagaagcagcccacgaac

SEQ ID NO: 33510 - RNA, 81 nt, Homo sapiens
gaaagcggcgagacaggaagcagagggcagggggcaaacaagccgaccggaaaaagaccggacaaacaccagaccagacga

SEQ ID NO: 33511 - RNA, 73 nt, Homo sapiens
agcggaccggggcagaccaaacggcaaggaacgagaaggccagacacacaccacggagccgacaaccgaccac

SEQ ID NO: 33512 - RNA, 76 nt, Homo sapiens
cccaaggccagaaccaggaagaggagggggaaagggcacacagggaccaagaagccccggggacacgcgagaaaag

SEQ ID NO: 33513 - RNA, 70 nt, Homo sapiens
aggagcacccacccaggaacccgccaccagaaacaacggcaagcggagaagagcaaggccgaaccgagag

SEQ ID NO: 33514 - RNA, 75 nt, Homo sapiens
cacgccaggccccggccagaaggaccggcggacacgagagaaggaacagaacagacaccaccgaaacgcgccaag

SEQ ID NO: 33515 - RNA, 71 nt, Homo sapiens
gagaacgggaggacgaccccaccacccaggagacaggacagcacaccccaaaggagccgcaaagccaaccc

SEQ ID NO: 33516 - RNA, 74 nt, Homo sapiens
ccgcgaagccacaggaccgaagcccgcgagacaagacgaggggggaacccagaggaggagcgccgagcgagcac

SEQ ID NO: 33517 - RNA, 72 nt, Homo sapiens
agcgcaaaaacaagacggggcgccccacagaggggcgacgacaaaacaccggggcccacaggacagccgggc

SEQ ID NO: 33518 - RNA, 74 nt, Homo sapiens
aagacacgggagccaggaagaccaagggcaccacaagccgaacagccagccagcaaaagaacagcagcaccaga

SEQ ID NO: 33519 - RNA, 72 nt, Homo sapiens
cgccccacgaccagagacacgagaccagaagccaagaaacgaggagagccaccaccaaggagacacccgggc

SEQ ID NO: 33520 - RNA, 87 nt, Homo sapiens
gcgccgcgagcggcgcgggacgcgaggccggagacaccaggcgccgagaaggccagcagagaaacaggcaggagaggcccacaggcg

SEQ ID NO: 33521 - RNA, 81 nt, Homo sapiens
acacaaggagacgaggggaagaggcccagcaggaggcgaaagcaaacgcacaaggaacaccaaccggaaacaccaaagcaa

SEQ ID NO: 33522 - RNA, 72 nt, Homo sapiens
agagaccggcaaggccaagaagggcccaagacccacccagcaggaaacgcaaaagagccacacccacaaaaa

SEQ ID NO: 33523 - RNA, 74 nt, Homo sapiens
cagcaaggccaggacgacccagccggccaacaaggagccagggggggccacaccgagcagaacccacacagggg

SEQ ID NO: 33524 - RNA, 60 nt, Homo sapiens
caacaccggaaaaagcccacgagcccagcaacacaacagcccggcagcaaaccgaagccg

SEQ ID NO: 33525 - RNA, 72 nt, Homo sapiens
cgcccggcacaacgaccccagcaggggcgcgccccaggcggaggcagggggacggccacgcagcccgaaccc

SEQ ID NO: 33526 - RNA, 82 nt, Homo sapiens
gcgaggcgccggcccagacccacccccagcggaaaggaaaccacacagcacgaggaccgcgggcacgagcgaccagcaaggc

SEQ ID NO: 33527 - RNA, 75 nt, Homo sapiens
gagggaggaacaaagccccaccaaaggcgcccaagaacaaaccaccgggagaaccaccaaaagaaacggccagaa

SEQ ID NO: 33528 - RNA, 84 nt, Homo sapiens
agccccgacgggacgggggagggggcggccgggcggagagaaccagcgaggacgaggcgacccccccaaggagcagggaagcca

SEQ ID NO: 33529 - RNA, 76 nt, Homo sapiens
gcgccacaccgagcgcgaggcgcggagagcaacgccgggacagcgcaagcggggacgacgagcccacggcacaacg

SEQ ID NO: 33530 - RNA, 53 nt, Homo sapiens
ccagcccaccggaagaaccccagccccacaccgaggagcgggcagagacggac

SEQ ID NO: 33531 - RNA, 58 nt, Homo sapiens
ggacccgcgaagggcggccgggggcagagccgcacgccggaaacagaacgacagcccg

SEQ ID NO: 33532 - RNA, 72 nt, Homo sapiens
ggccagcaaagccagggcaaccgcagacgacgccgaccccccagagcgggccgcccggccgggcgcacgggc

SEQ ID NO: 33533 - RNA, 63 nt, Homo sapiens
agaagcggagacaccaaagaaccccaggacaggagccagaaggagcacaacaggcagacagac

SEQ ID NO: 33534 - RNA, 82 nt, Homo sapiens
gggcccaacgacgaggagagccagacaacaaccccacaccgcgcccggggacggcggcgagcggacacaccaagaccaggac

SEQ ID NO: 33535 - RNA, 49 nt, Homo sapiens
ccgggggaggcgaggaccaaaggcgaccaggagagaaaaccaaacacac

SEQ ID NO: 33536 - RNA, 73 nt, Homo sapiens
agcgggaagcggccagccgagcaagcggaggaccacgccggccggggacaaagcccccagaggaaccggggca

SEQ ID NO: 33537 - RNA, 71 nt, Homo sapiens
cggaccgcgcagaaccagggcggcggccagcgccacgcgaagaagagagggcgaaggaggccacacagaag

SEQ ID NO: 33538 - RNA, 40 nt, Homo sapiens
gcaagcccgacagcgaaagacccggaggaaagcccagagg

SEQ ID NO: 33539 - RNA, 72 nt, Homo sapiens
cggggaccaggcggagccgcccggggcagcggagcagaaaaggaaacgaggcgcagaaaaggaagcacgaac

SEQ ID NO: 33540 - RNA, 74 nt, Homo sapiens
agaaccggggcggcacagccagggaccccagggagccggggggaacgggggcacgccggcacgggaggcagaag

SEQ ID NO: 33541 - RNA, 85 nt, Homo sapiens
cggagagcgaccaaacacaagggaggaacaacacaaacaacaaaagaacaggggaagaaagaaacagaacggcagaagaacaaga

SEQ ID NO: 33542 - RNA, 81 nt, Homo sapiens
ccgccaggagaacgggcaaccaggaacaacaaggaggagagaaagccagccagagaccgaaaggcacaggaggacaagggg

SEQ ID NO: 33543 - RNA, 69 nt, Homo sapiens
cgcaggcggacaccgcagacagcccggaagccacggggggagagaccaagccacccaccaacacggggc

SEQ ID NO: 33544 - RNA, 74 nt, Homo sapiens
ccagccagggccgcgggaagagacaagcgaccgccacaggaccgacaagacggaaaccgggagggggaaaagcg

SEQ ID NO: 33545 - RNA, 83 nt, Homo sapiens
caggccccaggccccggggacgccagcaccagcaggagcagccaaccagcagcagccacaggaggacggaggaagaccagcgg

SEQ ID NO: 33546 - RNA, 75 nt, Homo sapiens
gccggcccggggccgcggacgaggaccagcagaggccagcacgagaacccaggccgcaggagggaagcgcacgga

SEQ ID NO: 33547 - RNA, 75 nt, Homo sapiens
agccccccgcaagccccacagacacggaagaagaggccaggaaacacaggaacaggaagacaaaagacggggagc

SEQ ID NO: 33548 - RNA, 94 nt, Homo sapiens
gggggcggcggccggcgggcaaaggacgccaggaggaagggacaaaaggaggcacggacaaaacgcagggccagcaaacccgggcccaagacgc

SEQ ID NO: 33549 - RNA, 59 nt, Homo sapiens
cggaaacaacaggcgagaccggagaggaccggacgggcagaaaagcaccgacgaccggg

SEQ ID NO: 33550 - RNA, 79 nt, Homo sapiens
agaggaagcgcgggagaagcggcgcccaccggcgggcaacacccgccgcagaggaccgacaagacggaaaccgggaggg

SEQ ID NO: 33551 - RNA, 72 nt, Homo sapiens
accgcccggggacgaaagcagggaagaacgaccagagacacgaagagaagccacaacgcccacacagagcag

SEQ ID NO: 33552 - RNA, 75 nt, Homo sapiens
gccacggacggccaacaagacgcacccgccaccgggaccgacgggcacgggggagagagagaaaaggaggaggac

SEQ ID NO: 33553 - RNA, 99 nt, Homo sapiens
cgagagaggaggagccagacgacaagcacacacaggcgcgaaacggaaaaaggacacacagaaagaccaacacagagggccggaaacggaccaagcaaa

SEQ ID NO: 33554 - RNA, 71 nt, Homo sapiens
ccaccaagccagagacgacagcgagagacccggaggcacaggcgaagggagggcagcagcccagccaaagc

SEQ ID NO: 33555 - RNA, 91 nt, Homo sapiens
gcggacgccggcccccaggaccccgggcgagagggcgcggccccgggccaccgggcgcggacccggcgcaaggaagccggagaaagaggag

SEQ ID NO: 33556 - RNA, 58 nt, Homo sapiens
ggcggaggagagccgcagagcgcgcagaccccgggcaaaccagacagaaccgacgggg

SEQ ID NO: 33557 - RNA, 77 nt, Homo sapiens
ccgagaaggagggaggggaaacacaaagccggcacgcgcgcgagaacccacggcaaccaacgccgaagcccgacaca

SEQ ID NO: 33558 - RNA, 76 nt, Homo sapiens
caacgaaagcaccagggaaaacccacccagaggagaggagaaaaccaggggcggaaggaccgagccagagcaaaga

SEQ ID NO: 33559 - RNA, 79 nt, Homo sapiens
gcaagggcccaagaccaccacgcacagccggaagaaggacgggggaggggacgaaagagaggagacggccccagcaccc

SEQ ID NO: 33560 - RNA, 70 nt, Homo sapiens
gaaggaccaagaaccagcaaagccagagaagaagcgggaggagagggcccaaagcaacgccaagacacag

SEQ ID NO: 33561 - RNA, 74 nt, Homo sapiens
gacccacgcagagggcggagcggcaggacagaggccacccgcaccgcccgcaggcggggacagagcaggaccca

SEQ ID NO: 33562 - RNA, 74 nt, Homo sapiens
cggaagacgcccggggaggagcaggacgcagaaccaccaaaagccaagaaacggagagcaagcccggaggcacc

SEQ ID NO: 33563 - RNA, 75 nt, Homo sapiens
ccccaaagccagaccagggcccaaacgacccacggaaaccaaaaggagagacgaagaaacaagggaagagaaagg

SEQ ID NO: 33564 - RNA, 100 nt, Homo sapiens
ggcgaagaagagccgagagggaggaaagggaggcaagaaggaagcagcacaacaaagagagcagggagagaagggggagaaaaggaacagaaaaggaagc

SEQ ID NO: 33565 - RNA, 72 nt, Homo sapiens
cgcgcggggcgggcgcgaaacaccgaggggccgggcggcacgcaggacccagggggaaggaccacggaccaa

SEQ ID NO: 33566 - RNA, 86 nt, Homo sapiens
cggagggggaggcggcgggggccggcggggccggagcccccgccgcgccccccgccgccgcgcaacggaaacacagacccagacca

SEQ ID NO: 33567 - RNA, 70 nt, Homo sapiens
agcgccccccaacgccccgcagccgccgcgccccgaccccggacgcaggcggcggagaaaccaccacaaa

SEQ ID NO: 33568 - RNA, 85 nt, Homo sapiens
gccggagagaggagaagcgggagcccagcgagccagaggcaggggacacgagcaacacaggcggaaacggaccggcagcgaggag

SEQ ID NO: 33569 - RNA, 70 nt, Homo sapiens
acaggagcggaacgggacgcagaaagggcagacacaggcacaccaagggcccgagaaaggaggagaaaca

SEQ ID NO: 33570 - RNA, 116 nt, Homo sapiens
gaggcaccgggacggaccgagaccggaccgagagcggaccgagagcgcgaaacgcacgagaagacagcgcacgaaacacacaaagaaccaccaccgggaggaagccagacaacccc

SEQ ID NO: 33571 - RNA, 69 nt, Homo sapiens
gagccgcccgggccagcggccgcgcacccccggccggaggcaccagcaggagcaggagcggccgcggag

SEQ ID NO: 33572 - RNA, 57 nt, Homo sapiens
aagaacagacgccgcacccccgcgacacaggccccaggacggcgagagcccggggga

SEQ ID NO: 33573 - RNA, 70 nt, Homo sapiens
agccaaccggcagggagcgcggacgcagagaggggcaggcagacaaacgagagcccaaaaggcagagcga

SEQ ID NO: 33574 - RNA, 88 nt, Homo sapiens
cggaacccgcaccaagccgcccacacgccaaccggccagaggacgagggggacgcggaggcccgggccacgaggagggcccaggggga

SEQ ID NO: 33575 - RNA, 81 nt, Homo sapiens
ggaccacggagagcaggcagcgggggggcgagcccgaaacgaggcgggagcagcacagaggcgaccagagaaagccaaagc

SEQ ID NO: 33576 - RNA, 82 nt, Homo sapiens
acaggaaaaagaaagaagaacaaaacgacaggagcacccaggaaggggcccagaagcagaaccaagagacaaggaagaacgc

SEQ ID NO: 33577 - RNA, 66 nt, Homo sapiens
aaggaccaagaaccagagcgaccgcagcgcaaaacggagaacggacgcgacagggccgcagcgacc

SEQ ID NO: 33578 - RNA, 84 nt, Homo sapiens
ccagcgaaggaaagcggaacgacgacaccgagcagaccgcaggaggaaacaagcccacgagacagcaacccaacagcacagggg

SEQ ID NO: 33579 - RNA, 77 nt, Homo sapiens
gcgagaagaaagacggagggagaaggaagcccccagccccccaggcccgccagcaccgggcagagaacaccagcccg

SEQ ID NO: 33580 - RNA, 82 nt, Homo sapiens
accggaggacagcacggcccaccgccccggagcgcccgacccgacagggggggcccacgagaagagcaggcgacgggggaga

SEQ ID NO: 33581 - RNA, 45 nt, Homo sapiens
ggcccagcaaggcagacccagaccagggagcaccgaagacgagca

SEQ ID NO: 33582 - RNA, 81 nt, Homo sapiens
caacccaaccacggggaaaaggcaaaaacccacaccgcaacccagcgagagaaagcgacgcggcccaaaagccgagaggga

SEQ ID NO: 33583 - RNA, 74 nt, Homo sapiens
agcacaccgcggaagcaaaccaagcgcgggggaagaagagaaagaaaaccaggaccagcagcaggggccaggac

SEQ ID NO: 33584 - RNA, 75 nt, Homo sapiens
gggcagccacaaccgaaacaacagcccagcaaaaccggcggacaagaacacgggccccgagaaacgcagaaaaga

SEQ ID NO: 33585 - RNA, 78 nt, Homo sapiens
cgggggcgcgccccgcgcgcagggaccgcccgaccagggccgccacgcaccggagggcgacaccagcgccagcgccgc

SEQ ID NO: 33586 - RNA, 62 nt, Homo sapiens
cccccgcacggagcgagagggccaagcgacagagaagcgacggaacagaaggagggagaaga

SEQ ID NO: 33587 - RNA, 71 nt, Homo sapiens
gggagcggcgaagaggcaccggaggaggaggaagagaaagcggccgaagaaagaacagaagaagcaaacga

SEQ ID NO: 33588 - RNA, 59 nt, Homo sapiens
ggacggggcccaggaagggccaaagacccacagacgagggggagacggggaaagggagg

SEQ ID NO: 33589 - RNA, 83 nt, Homo sapiens
acgacaacgagcagccacacccagacgagcgggagaaggcgcgcgcaagcacgcgaggagacagcgaacccacccaacacggc

SEQ ID NO: 33590 - RNA, 64 nt, Homo sapiens
gccgaggcgggggacacaaggcaggagcaagaccagccggccaacagggaaaccccaccacaaa

SEQ ID NO: 33591 - RNA, 77 nt, Homo sapiens
gccggaaaggggcaaaaaccccggagcccgaccaggacccgagaacaagacacaggaaaacgggccacaacacaacc

SEQ ID NO: 33592 - RNA, 85 nt, Homo sapiens
gggcaagaagcagcggacgggaagcacagggccaagacgacggccccgcccgggcaccccccggccaaggaccacagcgcacccg

SEQ ID NO: 33593 - RNA, 83 nt, Homo sapiens
gccccaggcagaaccgcggaaccagagaaggccacagacacagcacgggggagaaaagccccagggggccgaccaaacccaag

SEQ ID NO: 33594 - RNA, 69 nt, Homo sapiens
agagaggacacgaaacagagaggggaaggagcccagcgacaaagggaaaaagcgggagaacgggaagca

SEQ ID NO: 33595 - RNA, 84 nt, Homo sapiens
aaaggccccggaggcccaaaaccaagacaacccaacaaacaaccggagggagggagcacaggcggaggcagcggaggccccgcc

SEQ ID NO: 33596 - RNA, 62 nt, Homo sapiens
aaggaacagagccaaaccagaagaggagggcccagaagaaaaagggcacagaacggcaccca

SEQ ID NO: 33597 - RNA, 61 nt, Homo sapiens
acgggaccaggcgaagcggccgagcaggcgagcgaacgacgggcagcggggaagaagaaaa

SEQ ID NO: 33598 - RNA, 80 nt, Homo sapiens
cggggaggcgcggccaacggggccacaaggaagaaggaccggggagacaggaacacgggcaagacagcgcgggcaccgcc

SEQ ID NO: 33599 - RNA, 60 nt, Homo sapiens
caagggcgcgcgacacgaacaccgaggaggccaagaacgacaccgaacaccgcacagaaa

SEQ ID NO: 33600 - RNA, 75 nt, Homo sapiens
cgcgccacacagccgccaagacccagggaaggagaggagaggcccggaaaaaggcacgaaacagccgacaaaccg

SEQ ID NO: 33601 - RNA, 79 nt, Homo sapiens
cggaggacgaagagggggaggcgagaaccacgccgacaacggcggaagaggaacgggaacggggaagaagagcggcgcc

SEQ ID NO: 33602 - RNA, 72 nt, Homo sapiens
caggagagcgggcaagggcccaggacaccaacacggacacggggcggcagcagacgacaggacggcagagcc

SEQ ID NO: 33603 - RNA, 69 nt, Homo sapiens
cgcccgggaccacgcgcagcacaccagaccccagggggacaggagacccaacaccccagccagacggca

SEQ ID NO: 33604 - RNA, 80 nt, Homo sapiens
agcccgggcagccagagaaaacacaaaagcggaacccagaaaaggacaggaaggaagcagccaccccgccaggccccccg

SEQ ID NO: 33605 - RNA, 67 nt, Homo sapiens
cgggaaggcggcgccccggccgaggggcggcggccccaggccagcacccgcccgaggacagagaggc

SEQ ID NO: 33606 - RNA, 93 nt, Homo sapiens
caggcgagcggaagaagcaacgaccaagaggaggaacacgccggaaacaaggacaagcagaccggaagaccgacggaagaccacaccccgagg

SEQ ID NO: 33607 - RNA, 67 nt, Homo sapiens
cggaccgaagagacaggcagcacgaaggaggcagaaggacagcccccaagcaggccgcggggaccga

SEQ ID NO: 33608 - RNA, 79 nt, Homo sapiens
ggaggaggggaggccggggccggaggagggggggccccgcggaggccgagaggcaaggagggcaacaaggacccagaca

SEQ ID NO: 33609 - RNA, 85 nt, Homo sapiens
ggcggcccgaggaggcagaaggaccgagccgacgcgggccgcgcggacaagggaggcgaggacggacaaaaggaaacggacggga

SEQ ID NO: 33610 - RNA, 75 nt, Homo sapiens
gcaccacgagcccacaacagcaggaaacagaacaacggcccagccccacaggacaaagagaaagcggcgcgacgg

SEQ ID NO: 33611 - RNA, 87 nt, Homo sapiens
cagccaagcacaggagaaggcgacaggaaccagccgggggccaaccgaggagccacgcagcaggagacgcaggcagaaggaaagggc

SEQ ID NO: 33612 - RNA, 73 nt, Homo sapiens
acaccccggaagcgggaaaggagccagggcagaaacccccaccaggcgggcgccacacggcaccccgggacaa

SEQ ID NO: 33613 - RNA, 43 nt, Homo sapiens
cgaaggccaggccagggaggcagagcagagcgggcggaggacc

SEQ ID NO: 33614 - RNA, 75 nt, Homo sapiens
ccaccgcccgcagggaaaaagggcgcccggacaccaacacacaaaccagggaaaagcgaaccgagaccgccgccg

SEQ ID NO: 33615 - RNA, 71 nt, Homo sapiens
caacaccgccggcgggcaggcccccaagaagaaccaaccccacagaacggcacgcaccaacccaagggaag

SEQ ID NO: 33616 - RNA, 78 nt, Homo sapiens
cagaccgcggccggggagcccccggcccggcagcgagcgacgcgcccacggaggaggcgggggccccacaagaagacc

SEQ ID NO: 33617 - RNA, 80 nt, Homo sapiens
gcggggcgcgggccgggaagaagcgccgcgcacggaccggcagaggacaagagacacgcaaaccaaggcgacggaaggca

SEQ ID NO: 33618 - RNA, 74 nt, Homo sapiens
gccaccacacaggagagagcaagaccagccaggggaaacccggagggaaccaagaaggggaggaacagagggac

SEQ ID NO: 33619 - RNA, 76 nt, Homo sapiens
caagcgacagggaaaaacacaccagaagcacagggggagagacaaccagagcggaaagggagaaaagcccccagaa

SEQ ID NO: 33620 - RNA, 42 nt, Homo sapiens
gccagcccgagcaagaaagaggacggaagcacgggaaaccag

SEQ ID NO: 33621 - RNA, 46 nt, Homo sapiens
agaaggaccaagaaccaggccgaacggccccccccaaagaggagaa

SEQ ID NO: 33622 - RNA, 75 nt, Homo sapiens
agcaggaaagccagggggacccagcacagagagaggacggggacgggccccaggacgaggaagacaaggccagcc

SEQ ID NO: 33623 - RNA, 69 nt, Homo sapiens
agaggcaaaaccccaggagcagaagccgcaaccgcaggcgggcggcaaagaaggggcgaccacagaggc

SEQ ID NO: 33624 - RNA, 55 nt, Homo sapiens
ccgggcagcgagcccacacagggcccaaagaagaggaacgagacagcccagaaaa

SEQ ID NO: 33625 - RNA, 63 nt, Homo sapiens
ccccaccagcccggccacaacagagacccaccaacggacagaaggccaaagcggcggagagca

SEQ ID NO: 33626 - RNA, 72 nt, Homo sapiens
gacaagaacacaacccaaacccgcccggggggagaaaaggccaagggcaggagacacgagacgcaggaagca

SEQ ID NO: 33627 - RNA, 36 nt, Homo sapiens
gcgcaacagagcgccggcgcgccgcacccaggcgga

SEQ ID NO: 33628 - RNA, 79 nt, Homo sapiens
cccacagaggggcgacggagagccaaaggaggcacgacagcagaggaagagaagcagcgaagccgaggcacagaccccg

SEQ ID NO: 33629 - RNA, 70 nt, Homo sapiens
caggagaggccggcgccgacacaaggacggaagacacggcgcgcggagccggcacacggggccaaaaacc

SEQ ID NO: 33630 - RNA, 53 nt, Homo sapiens
gggcagggacagcgcaggcagcaggaacaagggccagaagcagcgaacagagc

SEQ ID NO: 33631 - RNA, 53 nt, Homo sapiens
accccaaaggcacccgcgagcgcaacccaagagcccccaaaccggaggaaagg

SEQ ID NO: 33632 - RNA, 73 nt, Homo sapiens
agaggagcgaaagaaggggaggcaaggaagccgacaagaacggggagagggaagaaacaagcccgaaacgcca

SEQ ID NO: 33633 - RNA, 51 nt, Homo sapiens
cgcaggacaacgagcccaccgagccaaaaacagccaacccgccgaaaaagc

SEQ ID NO: 33634 - RNA, 87 nt, Homo sapiens
gagaggagagacagcaaagcagggaggaggggagcgaagaagggagccacccaaaacacgcggaaacgccacaggaaaagggacgag

SEQ ID NO: 33635 - RNA, 56 nt, Homo sapiens
accgccagccacccacgccagcagagaaagagcgggaaccgccaaagcccacgccc

SEQ ID NO: 33636 - RNA, 80 nt, Homo sapiens
cccaaacagggaccaaccaaagacgccaaggagaaggcagaccggaagcggcgggccgccagcccgagcgaaagggacgc

SEQ ID NO: 33637 - RNA, 82 nt, Homo sapiens
ggcagcggaggaacaaacagacggcaagcaggaaacggaggacggggaaaaaggaccacaagccacgaagaagagccggaac

SEQ ID NO: 33638 - RNA, 76 nt, Homo sapiens
gcaccggcacaccagcgcccgcaggagcccagagcgcaaacgagaacagcacgcacccaagacgccgagacaagga

SEQ ID NO: 33639 - RNA, 73 nt, Homo sapiens
ccaggaccaaacggaggcagaaggaaccagacggagggaagagaccgaaaggacccagaccgcaacccagcaa

SEQ ID NO: 33640 - RNA, 82 nt, Homo sapiens
cgcgacgaggcggagagcaggcaaaccggaaaagcagccaaaggaccagaaacggcaagcaagcgagcaaagcaacagaaca

SEQ ID NO: 33641 - RNA, 71 nt, Homo sapiens
ggcccgcgggagagaccagcgccacgagccaagaaccccaaaaccaagacccaggccccagacagaacaga

SEQ ID NO: 33642 - RNA, 77 nt, Homo sapiens
aggagacaagaagcagaccggaaaccagcaggcgaagacgcaggagagcacagacggacccgcacgacccggaggga

SEQ ID NO: 33643 - RNA, 54 nt, Homo sapiens
aaggcgagcacggcacccggggggcagcgaaagaccacaggaggagcagcggac

SEQ ID NO: 33644 - RNA, 76 nt, Homo sapiens
caaggacgccgcgccagcagcccgccggcgcgagaggacccgagcggggaccgagaaagacccccgaggaaccacg

SEQ ID NO: 33645 - RNA, 50 nt, Homo sapiens
gaaggggacggcgggcgagggaggggaccgccgcgagaaagagcgcgcac

SEQ ID NO: 33646 - RNA, 85 nt, Homo sapiens
ggaaaaccgagggcggaggccagacacaagaagaggaggaaccagccgaacagcacaaggagagccacaagaagaggacagcagc

SEQ ID NO: 33647 - RNA, 74 nt, Homo sapiens
gaaggaaagaggcaaacaaagagaggcaaggcagcacgacaaaggagaacccaccccccacggaccgacgaagc

SEQ ID NO: 33648 - RNA, 84 nt, Homo sapiens
gccgggaccgggacaggaaggggcgcacccacgacgcgcacaccaccggcagaccggcgccacagcaccacccgacggcagcgc

SEQ ID NO: 33649 - RNA, 55 nt, Homo sapiens
ggacaacagccaagaggaaaaaacaaagcgaaaggggccgaaaaccccacagcca

SEQ ID NO: 33650 - RNA, 63 nt, Homo sapiens
cggcacgagacaggaagggaaaggagagacagcacaagaaaagaggcagagcaacagggacac

SEQ ID NO: 33651 - RNA, 79 nt, Homo sapiens
acaccgaaaagcgcaggggcagacccaaaggaaacgcacgaaagaaacaggagagcgcagcgaagcccggggaagcaca

SEQ ID NO: 33652 - RNA, 80 nt, Homo sapiens
cgacaagccgcggcagccgcggaccaccgccgccaggcggagggaggcgcccggccaccccaagccccggcgccacgggg

SEQ ID NO: 33653 - RNA, 74 nt, Homo sapiens
ccggacacaagaaaaagagcgaaaaagacacgccgggggcggacaggaccaccaggaacaaagagaaagcagcc

SEQ ID NO: 33654 - RNA, 72 nt, Homo sapiens
gcgaaccaacggagcggggcaggggcgacgagagcgcgcggacccaaggacccaagaagaaagaaaaaccaa

SEQ ID NO: 33655 - RNA, 80 nt, Homo sapiens
cggaaacccgggggcagcgggccgaccaacccgaaaacagcagccgcacaaacacgcagaggcaagaagagaggcaggag

SEQ ID NO: 33656 - RNA, 55 nt, Homo sapiens
gcgcggcgcgcccgccccaagccgcagacgcggaccaccgccacaccagcaggga

SEQ ID NO: 33657 - RNA, 75 nt, Homo sapiens
cagggagcgcaccgaaccggacccagaaggcgcgaaggcagaccgcccagcggcggaggaaagagaggaaccggc

SEQ ID NO: 33658 - RNA, 67 nt, Homo sapiens
aggcgcccaacacgccccaggaaaaaaccaaggacaaaggagacaacagcaagcgcagcagagggaa

SEQ ID NO: 33659 - RNA, 72 nt, Homo sapiens
aaagccgaggccccgaaccaaaggccgagcacgagacacagacccgccaggagcgggagggccgccgcgaga

SEQ ID NO: 33660 - RNA, 81 nt, Homo sapiens
gaagaaaaaagcagaaagaaagcgcggccgacaccagaggagaagacgagcagaaggagaggaagacgaggaagcagaaga

SEQ ID NO: 33661 - RNA, 83 nt, Homo sapiens
aaaaaaaaagaagagaaccgaaaaaggaaaaaaagcgaagaaaccccgccaacaagcgggaaacaccaagaaagaacagaagc

SEQ ID NO: 33662 - RNA, 80 nt, Homo sapiens
aggaacaggagggcgagccccagcgcgccaggaggggggggcagcggagggacacagcgcggagacagccccaagcaagg

SEQ ID NO: 33663 - RNA, 81 nt, Homo sapiens
gcgcgagcccgccagagggcccgacagggagggacacggagaacacagccaccggccacagggacagagagaggcagaaga

SEQ ID NO: 33664 - RNA, 84 nt, Homo sapiens
ggacggcggaaggacgcgcgcaccgaggccagggggccggccgcgcgccgaggagcgcgaggacccccgaccggcgggggccca

SEQ ID NO: 33665 - RNA, 77 nt, Homo sapiens
gaaagcgcagccaggcggcgccggcgcccagggacgccggagccccagcgcagccaagccagaaccccaacgccacc

SEQ ID NO: 33666 - RNA, 57 nt, Homo sapiens
agaggccgagggcacagcggagcaggagaacacccacacgaggcaccccacagccgg

SEQ ID NO: 33667 - RNA, 66 nt, Homo sapiens
acgacgcaccgcaggcagacaaaagggccaaagaagggagagaggagaagagaaaagggaaggcac

SEQ ID NO: 33668 - RNA, 65 nt, Homo sapiens
gccagagaaagaagacaaagagacccgaaggcagcacaagggaaaccacaggaaaaggcacacaa

SEQ ID NO: 33669 - RNA, 120 nt, Homo sapiens
ggaggcgcgcggccacagcccggcccggcggccagggggcaccaaggccgcccgaaggagccccacccgggccaggagccgggacgcggcagggagcgcccgcccgaggagggaagcgag

SEQ ID NO: 33670 - RNA, 75 nt, Homo sapiens
ggagaagcacggaccaaagcagcgcaacccagccacaggagcagggacggggggaaaagcgcacccgggcccggg

SEQ ID NO: 33671 - RNA, 70 nt, Homo sapiens
cgggaagacggggcaacaacagcaaagaacgggagaacgcccagaagaagagagaccaaaagaacaaacg

SEQ ID NO: 33672 - RNA, 71 nt, Homo sapiens
gaccacacccaggaagccaggcacgcacagcccaggaccccacccgcggacagaagggaagaagcggccag

SEQ ID NO: 33673 - RNA, 50 nt, Homo sapiens
aacgaagcgaccaaagcgcacggcagcgagagaaccacaccaagccaccg

SEQ ID NO: 33674 - RNA, 76 nt, Homo sapiens
ggggacgcagggaggagcgggacaccccggaagcgggaaaggggacgacaacccgacacgagaggcccaaccaaaa

SEQ ID NO: 33675 - RNA, 39 nt, Homo sapiens
cccagaggacaacgaaggcgagcagcaaggcgaaccggc

SEQ ID NO: 33676 - RNA, 78 nt, Homo sapiens
acgaagaaaaaaaaccccccaaaggaaaaggcgggggaccccccgacgcccggggagggccgcgacccccggccgggg

SEQ ID NO: 33677 - RNA, 80 nt, Homo sapiens
ggagaacaaagcaggaaacaaaaacaagccaggaaggaaaggacggaagcaccaaaaaggcgacaggaagaagggaacag

SEQ ID NO: 33678 - RNA, 59 nt, Homo sapiens
aaagacgaacaaagacggcaacgcgcacagcgcagagaagagccgcagggggggggccg

SEQ ID NO: 33679 - RNA, 83 nt, Homo sapiens
caagcccagggcccagaaacccaggaaacgagaccagaccccagagaggaggcacagaagacaagccgagaccaccaggagca

SEQ ID NO: 33680 - RNA, 88 nt, Homo sapiens
gcgacacccgacgaggcgggcgggaagccgcacgggaaccagcgcaagcgccgcaagagaagcaggccaacagcaaaaaaccaagagg

SEQ ID NO: 33681 - RNA, 69 nt, Homo sapiens
gaacacccgccagagcggcccagccgcccaggacagaaccagcacccgaaggaaaggggaacacaaaag

SEQ ID NO: 33682 - RNA, 78 nt, Homo sapiens
cggcacagacaacgggcgaagaggggccagcagaaagcgaagcagaagccgagaacagcggcgagccggaaagaaccc

SEQ ID NO: 33683 - RNA, 57 nt, Homo sapiens
cgggccccccacacacggcaaaagcagaccggaaaacccaccggcaagaccacaccc

SEQ ID NO: 33684 - RNA, 43 nt, Homo sapiens
gccaggggacaggcacaccaacaggcacagggcgggcagcccc

SEQ ID NO: 33685 - RNA, 77 nt, Homo sapiens
cggaacagccaggaagggacgcacacaaagcccgaacagcaaggaaaagaaagggcagcggaggcagagccgaagaa

SEQ ID NO: 33686 - RNA, 100 nt, Homo sapiens
gaagaaagaagaaggaggaacagggccagcagggagagacagagacgagaagcaaaggagacgagcgccaaagacagaagcaagcagaaaagagcaacac

SEQ ID NO: 33687 - RNA, 66 nt, Homo sapiens
cgacacccagcgcccggcgccgagaggcaccgccccaggacaaaagggggagagagagagagagag

SEQ ID NO: 33688 - RNA, 78 nt, Homo sapiens
cagcccccgcgcccgccagcccaacagcggagagcggccgggaggaagcagagggaaccaggacagagcgaaacggga

SEQ ID NO: 33689 - RNA, 53 nt, Homo sapiens
gcgccgagcgaacgcgcaacagggccgcacgcaagaacgccagaacaaacagc

SEQ ID NO: 33690 - RNA, 88 nt, Homo sapiens
cgagccgggaggaacggcccggaaacaggaggacggccaggccgagggcccgcccggccccaggagaagaaccagccgcagaggaggc

SEQ ID NO: 33691 - RNA, 74 nt, Homo sapiens
gcacaggcgacgcggggccaggcaggacccaacgacaggcgccccggcccaacggaaacccaagaagaaacaga

SEQ ID NO: 33692 - RNA, 72 nt, Homo sapiens
gagcagagggagcagagcaccaacagggaaccaaggccacacacaagcgggaagggaaaagcacagggccag

SEQ ID NO: 33693 - RNA, 82 nt, Homo sapiens
gcgcgccgggggaagaagggaacgcgcgccagcgcgggacccgccagaccggaccagggacgacacaagaccaccaccaccg

SEQ ID NO: 33694 - RNA, 88 nt, Homo sapiens
gggaccgcggcgcccagccccaggaaggacccaggacacccggaagccggaaagcggccggagcgggacggaaggggacacaggcaag

SEQ ID NO: 33695 - RNA, 73 nt, Homo sapiens
gaggccccccagccacggaaacgagggccacagcaccccggaacccacaaagaccaaacaaacgaaaggggag

SEQ ID NO: 33696 - RNA, 73 nt, Homo sapiens
gggaccccgccgcggcgggagggggagcagagcgcagcacggagcgccagaccacgggaggaaaaaggccccc

SEQ ID NO: 33697 - RNA, 71 nt, Homo sapiens
agcgaccgccaagagacacacagggcaccagaccggcacaggaaaagagccagcgcgaccgagcagccgac

SEQ ID NO: 33698 - RNA, 82 nt, Homo sapiens
agcccgcgaggccgacaagagccacccggagcaggagcgcggcagccgccgccgcaccaaggaacccgcgccagccccccac

SEQ ID NO: 33699 - RNA, 78 nt, Homo sapiens
gagcgcagacggccagccgaaaccacgagccacgccgccaggagcccgaacacagccacgcaaccccaccggccaaca

SEQ ID NO: 33700 - RNA, 80 nt, Homo sapiens
gcgacgaagaagaccggaagcccacaaagaccccaaaggagcgaacaccaagaagcaaaacgcgcaaacgaagagaacca

SEQ ID NO: 33701 - RNA, 70 nt, Homo sapiens
ggaccaaagacgacaacaaacgcaagagcagaaaacagggaaaacagaaccagaggcagggccaggacac

SEQ ID NO: 33702 - RNA, 68 nt, Homo sapiens
gggaagagaagaagaagacccgggaaaagagacacaaaccaggaaagacaacagggaacaaaacaagg

SEQ ID NO: 33703 - RNA, 81 nt, Homo sapiens
aaccggccgacgggcggaccgcgagacccaacgcggaccgagagcgaggcggcaccggagcgaaagagaagggcaggcacg

SEQ ID NO: 33704 - RNA, 72 nt, Homo sapiens
aagcaaggagaggaggagcacaacggagacaaagccgagaagaaaccgcaagaaagaaagcgggcacaacaa

SEQ ID NO: 33705 - RNA, 56 nt, Homo sapiens
aggcagcggggaaccggagccgcaagggcaaacagagaaacgcaaggaaaccagac

SEQ ID NO: 33706 - RNA, 83 nt, Homo sapiens
gaaccggcacgcgacacaggcaggcccagcgggacgacccgggacagcccacggggcagaccagcgaccaccggcacagccgc

SEQ ID NO: 33707 - RNA, 72 nt, Homo sapiens
aagaacaacccgcaccggaaggggccggaagcaggacaccgagacacaagggaagggaccgaaaacaaggac

SEQ ID NO: 33708 - RNA, 81 nt, Homo sapiens
ggcggagggagggcaacggggaggcgcgacggcggcgcccagggacaggcggcggaccagaacccaggagaaacgagaggg

SEQ ID NO: 33709 - RNA, 59 nt, Homo sapiens
caaggaaccaaggcggcccggcgggggaaccacagacaagaggacacgggaccacacaa

SEQ ID NO: 33710 - RNA, 61 nt, Homo sapiens
gagaacgcgagggaagggacaccgaaagggagcgcaaacgggccaccacgccgccacgagc

SEQ ID NO: 33711 - RNA, 75 nt, Homo sapiens
aaaggagggaagaagccagaaccagcaaaccacccaaggggaacaaaacgacagacggcacaaaagaagaaccga

SEQ ID NO: 33712 - RNA, 76 nt, Homo sapiens
caaggaccaagcaggaagcgccgcgggcaacccggcacacgcccccggcccgcccggaggaggaagccaagaacgg

SEQ ID NO: 33713 - RNA, 77 nt, Homo sapiens
ggccagcaccgcgcccaggcagagccagaccgggcgcggggggccaccaacacccccggaacaccagacccaaaagc

SEQ ID NO: 33714 - RNA, 57 nt, Homo sapiens
gagaagaacggaacacagaacacggagagggccccaagaaaagcggaagaagaccgg

SEQ ID NO: 33715 - RNA, 60 nt, Homo sapiens
gggaaggcgcgaggaggaaaggaggacgaggggggagaaggaacaagccgcccaaacagc

SEQ ID NO: 33716 - RNA, 69 nt, Homo sapiens
ggacccccgggaagaagacacagaaaacaggacagcccaaggcggaaaagcgaaggaagccacaagcac

SEQ ID NO: 33717 - RNA, 56 nt, Homo sapiens
ggccgggcagccgccgacgagcaggagccgcagcccaaagcaagaagagcgaggcc

SEQ ID NO: 33718 - RNA, 103 nt, Homo sapiens
ggcaccacagcggcagcgacaagcaggcagcgggcgccagcaaaaccgaaacagagcccccccggaagccggagaacgggacaggaccagaggaccacgcccc

SEQ ID NO: 33719 - RNA, 83 nt, Homo sapiens
agcccccagcccgcggcgccgcgcccgccaggccccgggggcggcggccaagagccggccgagcacggccgggacgggaaaga

SEQ ID NO: 33720 - RNA, 73 nt, Homo sapiens
aagcaccccgcaccaacgagaagaggcccgggcccccacaaccgggccccacggccccccccacggggcggac

SEQ ID NO: 33721 - RNA, 73 nt, Homo sapiens
ccaacggccagcgccaaccccccagccagggaaaaaaccggccacagacccgaagaccaccacaggacacgag

SEQ ID NO: 33722 - RNA, 67 nt, Homo sapiens
aggaaccaccgcccaaagggagcggcaggggaggcgaagaagagcccggacagaaagacgacaaaaa

SEQ ID NO: 33723 - RNA, 83 nt, Homo sapiens
gggcaacagccgccccgcccgcccggcggggccagccggcgagcaaacccaagagcgccagagcaaacacaggggaagaccca

SEQ ID NO: 33724 - RNA, 64 nt, Homo sapiens
accaagcccggggcaaggagggcgggaacaaagaagaccgaggaggcaaggaaaccgacgaagc

SEQ ID NO: 33725 - RNA, 73 nt, Homo sapiens
gaaaagacagggcgcaggaagagagcaaaagaggggccgcagcccccagaacccagaacagaccgaaggcaag

SEQ ID NO: 33726 - RNA, 75 nt, Homo sapiens
gaaacacaccagacacaggagccaaaccgcacggccccagagaaaccagaacaacccagccacggaagaaaagca

SEQ ID NO: 33727 - RNA, 64 nt, Homo sapiens
agaccaagcgcgccacgcgcggcgcgccgagagagagaacccgagcgccgcagcggagaaagaa

SEQ ID NO: 33728 - RNA, 78 nt, Homo sapiens
cggggcggcgccccgcgccgccgcgcccacggccccgccagcaaggcggcgcgcccaggaggggccacagacacaccc

SEQ ID NO: 33729 - RNA, 60 nt, Homo sapiens
cacagaggaaaccgcaccgcccggaggaggccaggccagagggaccaacgaaggcaaaca

SEQ ID NO: 33730 - RNA, 60 nt, Homo sapiens
gagaagaggaaaaacccccggggcaaaaagggaaggagaacagaacccagaggcccaaga

SEQ ID NO: 33731 - RNA, 75 nt, Homo sapiens
agaagggagccgaagcgaggcggaaaacgaagacagcaggagggaacgacaacccacaggcaaacgaaagaacaa

SEQ ID NO: 33732 - RNA, 39 nt, Homo sapiens
ggccggcaaccgagggacccgcgccagaaggaggggcag

SEQ ID NO: 33733 - RNA, 67 nt, Homo sapiens
aaacgggcaaggcggcaagagcgagcacaccagaccgaagaggccaacgaaacccagggagaaaaag

SEQ ID NO: 33734 - RNA, 78 nt, Homo sapiens
gaaaaggacagcgggaaacgccaaacacacgcaggcagcagagaaagccgaacagaacagcacgaacaagagcaggaa

SEQ ID NO: 33735 - RNA, 78 nt, Homo sapiens
gacggcgaagaaaggggagcgaggaaaggggcggccgaggccaggggacaacaggagaagcggaaggagaccacccac

SEQ ID NO: 33736 - RNA, 67 nt, Homo sapiens
aaccgaaagccagcagcggggagaaaagaagcagcccacgaaccccgacaacagagcagaagccgag

SEQ ID NO: 33737 - RNA, 67 nt, Homo sapiens
agacacagcacagagccgcaaaaaagcaagaagaccacgcacgacacaacgaagaggaagcgaagga

SEQ ID NO: 33738 - RNA, 79 nt, Homo sapiens
ggcggggaacagccggaagggcggggggcgggccggaggggagacgggaggcaggggaagaaacgagcgagcccgggac

SEQ ID NO: 33739 - RNA, 80 nt, Homo sapiens
gagcgggccagcccaccgcaaagaacaccagaccgcgagggagcgcagagagcaccgagacggagccagaacgagcccag

SEQ ID NO: 33740 - RNA, 83 nt, Homo sapiens
gaccacgcgcaccaccaacggcagccaggacccgccaaagaagggaaacgaaagaaaccgacggccccaggagagagccagca

SEQ ID NO: 33741 - RNA, 69 nt, Homo sapiens
aggaggacgcaagaaacgcaccggaacagagacagacccgggggcccccaaggagagggaagaagccag

SEQ ID NO: 33742 - RNA, 76 nt, Homo sapiens
gccccaggggggcgcccgccgggacgccgaccgccgggacgaggaaggaagaaggaaaagcggaagcgcagacaag

SEQ ID NO: 33743 - RNA, 64 nt, Homo sapiens
caagaacaggagcaacccaggacaccaccagcgcccaccccagggcccccagaacagagcaagg

SEQ ID NO: 33744 - RNA, 76 nt, Homo sapiens
gagccccgggcccggccgccaggcgcccacccaggaagaaagggcaggcgagagagggggaacaggaccaacggaa

SEQ ID NO: 33745 - RNA, 77 nt, Homo sapiens
cggaaccccaccccacagacccgccggggcgaaagccacggagcacccggcaaacagagggcggagaacggaaaagc

SEQ ID NO: 33746 - RNA, 83 nt, Homo sapiens
gaggagagcggggccggcaagaaggacaaggaccggggcaacgaccggaacacgaacggaaacggcaaacaaggccacccacc

SEQ ID NO: 33747 - RNA, 105 nt, Homo sapiens
aagccggaccggcaggacaaaacccccaagcaaccccaagcaaaagggcaaacaagggaccaagaggcgggaggaaacccgcacaccagaggaaggacggcccac

SEQ ID NO: 33748 - RNA, 79 nt, Homo sapiens
gaaacacccggaagcccgcagacagcagcggggaaaaacaagagaaacaacgaacgagcaaggaagggccaaggcagac

SEQ ID NO: 33749 - RNA, 73 nt, Homo sapiens
cggggagggcccgggcgaagggaaacaggccagccacgcagcagcagaagccaggccgggcgggggagaccag

SEQ ID NO: 33750 - RNA, 82 nt, Homo sapiens
ggaagccggagagggccgggacgggagagaaaagccgagcacgcaaaagcgaacagccaggagaagaagacaagcggagaac

SEQ ID NO: 33751 - RNA, 72 nt, Homo sapiens
ccacaccacacagagagcgaccgggacagggccagaagcgagcaccaaagcaaagaccaccaaggaccaaac

SEQ ID NO: 33752 - RNA, 78 nt, Homo sapiens
gaaccggccccacccgggaggggggagcggcgggaggccaccgccagagaagagcaagagaccgaccaaaacacaacc

SEQ ID NO: 33753 - RNA, 62 nt, Homo sapiens
ccgccccggagggagacgcgcgccgaggagaacccagcggggggacaacccacccacacggg

SEQ ID NO: 33754 - RNA, 72 nt, Homo sapiens
gaccccgcggagacagcgagacccgccaggagcaaagaaccccaagacccggccaccgccgacgcgggcgaa

SEQ ID NO: 33755 - RNA, 74 nt, Homo sapiens
caacagagccccagccggaggagcaggcgcgagagagaaggggaggaaaagcagcaaagacgaccccagggaga

SEQ ID NO: 33756 - RNA, 60 nt, Homo sapiens
aacgacacagaggacccaagggaccaagaaaggcccagggaccaaagcccggacaaggcc

SEQ ID NO: 33757 - RNA, 76 nt, Homo sapiens
gggcaaggaggggaggcgagaacacgaggagcacaggagcgcccagcagccccaaggaggacgcagcaccgaagac

SEQ ID NO: 33758 - RNA, 74 nt, Homo sapiens
ccaaaacccaaacccgacagagaacagcggaggcacgaaccaagaggacacaaagagagaggaaagaccgaaag

SEQ ID NO: 33759 - RNA, 72 nt, Homo sapiens
gagccggcggcggaccccgccgaccagcgcagcccgaggaccagcagcaggggcggggccccgaacgagaca

SEQ ID NO: 33760 - RNA, 77 nt, Homo sapiens
gaaccgcgcgggcgaaccgaggccaggacaacacagagaaccggaaagaacaagccaccaaaaagaaggagaaaaag

SEQ ID NO: 33761 - RNA, 58 nt, Homo sapiens
cggccaggccccagacacagacgagcaggggaagggcgccggcccagagcaaaaggaa

SEQ ID NO: 33762 - RNA, 49 nt, Homo sapiens
gacaaaagggccaaagaagggagagagagaagaacaggcgagccagaaa

SEQ ID NO: 33763 - RNA, 82 nt, Homo sapiens
ggagaaccggaggaggaggccacacagaaggacggcccgacggaaggaccaggccaaccggagcgcacccacgccacaagcc

SEQ ID NO: 33764 - RNA, 75 nt, Homo sapiens
ccccagcaggccgcggacagagaagaggacgcggagacaagaggaagcaccgaagaacagcccgccacaccgaag

SEQ ID NO: 33765 - RNA, 65 nt, Homo sapiens
ccgcccaagccgcagcaccccgggcaggggaggcacacccagaagccacaggagaagcaagaggc

SEQ ID NO: 33766 - RNA, 79 nt, Homo sapiens
gggaggccggaacagagagggcacagcagcggccaagggaggaacccgacacgggcacggagcaaagaagggaaccgga

SEQ ID NO: 33767 - RNA, 66 nt, Homo sapiens
ccccggaacaaacaacacagaagacggaaacgcacggagaaggccgcaaaggaacgccacaaagag

SEQ ID NO: 33768 - RNA, 77 nt, Homo sapiens
gagggcgaaagagcgcccggaccaccagaggaggaacccgcacagacaagacagcaacgcaggaaaaggaagccaca

SEQ ID NO: 33769 - RNA, 74 nt, Homo sapiens
cgcacccccagcggagccaagaggggaaggaacgaggaagaaaacgccaaggggccccaagcaggcggccacag

SEQ ID NO: 33770 - RNA, 39 nt, Homo sapiens
ccaagaagaagccacggacccgcgagacgggggcaccag

SEQ ID NO: 33771 - RNA, 87 nt, Homo sapiens
aagagggaaggcggagaacaggaaaagaagacagagccaaagaggagaggagagacccagagccgacagaagaagaccacaacaaaa

SEQ ID NO: 33772 - RNA, 79 nt, Homo sapiens
acccagcgccggcccccaggcgaagaagcgcagccgcaccggccaagggccgggcacgggccacgcggaacccagcacg

SEQ ID NO: 33773 - RNA, 74 nt, Homo sapiens
ccaacacacgcagcggggggacacacgcgaccggcgaggcccaccaagccagagccggaggaaaccacagagca

SEQ ID NO: 33774 - RNA, 44 nt, Homo sapiens
caggagcagcccaagcgccccccacgcacagcaagcaacccggc

SEQ ID NO: 33775 - RNA, 51 nt, Homo sapiens
aacggccagacacccgaaagaccgaagcagaagaagagggggagacccgcg

SEQ ID NO: 33776 - RNA, 73 nt, Homo sapiens
acaagaaggagaccaccaaacgggaccagccggcaaaaacacccccgacgaaccaagaaacaaaagggaagac

SEQ ID NO: 33777 - RNA, 77 nt, Homo sapiens
aaggagacaaggaccgaaacagaaacggaacaccaagaaccccacgaaacaggcgccaagggacaaacaaagccaag

SEQ ID NO: 33778 - RNA, 79 nt, Homo sapiens
ggagcggccaacgaccgacccagcacgggcggcaggagggaagaaagcaccacaggcacggcagcgaccggggcacagc

SEQ ID NO: 33779 - RNA, 70 nt, Homo sapiens
aggaggaagaagaagcacagaaaaccgcagaacgggcagaaagccaagacaggaaagcccggggaacacc

SEQ ID NO: 33780 - RNA, 68 nt, Homo sapiens
gcgccaaaccagaccgggcaaccggagcaccgggaaaccagcgaggacaggcggccaacaccccggag

SEQ ID NO: 33781 - RNA, 58 nt, Homo sapiens
aggcggacgcgcggcgcgcagcggcccagaaggacggaacagccagggaggcgcgaca

SEQ ID NO: 33782 - RNA, 75 nt, Homo sapiens
agaggcggacgagacgcacacccagcccggggcgcacgccacccgggcaaccggaggcaacaggaagaagaaacc

SEQ ID NO: 33783 - RNA, 70 nt, Homo sapiens
gcgagaggcccgagaccaggcggaaggacggacgacacagggagcaggaacgaagagaacggagaagagc

SEQ ID NO: 33784 - RNA, 76 nt, Homo sapiens
gacagcaacacccacaggacacgaaggcggcccgccggcagagcgagggaaaagagggcgaggaagacgaccacgg

SEQ ID NO: 33785 - RNA, 69 nt, Homo sapiens
ccggccgacaaccacgggcagagcaaacaaagcaaaaaacaaaaagaagcgcaacccgcaaagagggga

SEQ ID NO: 33786 - RNA, 89 nt, Homo sapiens
cgcccccggcgcaggggagcgaaggcgaggggcagcggcaggagagccggccgcgacaggacggagcaaagaagaaggagcgagcgcag

SEQ ID NO: 33787 - RNA, 69 nt, Homo sapiens
cgcgcgggccgcgagcggggcgacccgagacaacggcaagcggagaagagcaaggccgaaccgagagga

SEQ ID NO: 33788 - RNA, 86 nt, Homo sapiens
aaccgcccgaccagaaaggcggcgcgagggggccaccagcaagcgccgcgggcggacacgccagaggaggaggccggggaaggccg

SEQ ID NO: 33789 - RNA, 59 nt, Homo sapiens
ggacccggagcaagcaaagcgccaaaccaagcaaccaccgaaacgggcgaaaaagaaga

SEQ ID NO: 33790 - RNA, 76 nt, Homo sapiens
gccccagcacgagaagggcaggagccacagaagccaccgaagcccggggcccaggggagggaagaagacgccgaac

SEQ ID NO: 33791 - RNA, 58 nt, Homo sapiens
ggaccgagagcggaccgagagcgcgaaacgcacgagaagcgccacagaccgggccaaa

SEQ ID NO: 33792 - RNA, 52 nt, Homo sapiens
cgcgagcacacaggagaagcaagaggcgcaaagaagccgaaccgcccggaac

SEQ ID NO: 33793 - RNA, 75 nt, Homo sapiens
ccaggaagagcaaagccgagcgcagaggggagccagggcaagaacgcgcgcgaggagagggaaagccgaagaccc

SEQ ID NO: 33794 - RNA, 71 nt, Homo sapiens
gaagacacagaaaacagggcggaaagaagaggaaagaaacagaaaaagacccagcagaaccccacgaagag

SEQ ID NO: 33795 - RNA, 73 nt, Homo sapiens
agccaaacgacgccacgaacaaaagagaggacagcaaaccaagccgcgcgagagggcagacagagcgcaaaaa

SEQ ID NO: 33796 - RNA, 79 nt, Homo sapiens
gggacggcgcaccgggacagaggacagcagcggacggccggaccaagaggcgccgccccccagcaaacgagaaaaaccc

SEQ ID NO: 33797 - RNA, 85 nt, Homo sapiens
cagggaggcacaaaggggaacacagggaaagcacgaagggagcccagcgacacaccagcagcagccaaagaccaaccagccccga

SEQ ID NO: 33798 - RNA, 71 nt, Homo sapiens
ccacccgcaccagccggaggggcagaccggacaagccaggagcaggagaagagccaagaacggaaagaagg

SEQ ID NO: 33799 - RNA, 81 nt, Homo sapiens
caacagggacgcgacaccgcacgagcggcccagcccagcaagcaaccacgagagcacaaggacaaccaacaacccccagaa

SEQ ID NO: 33800 - RNA, 85 nt, Homo sapiens
gccgcagcccgagcccagaaggcggcgaccgggcgcgggcaaggcggagccacagagagcagcaaaggaggaccaagccaaagga

SEQ ID NO: 33801 - RNA, 67 nt, Homo sapiens
caacaagcaaggcacaaagcaggcgagcgggaaacgcagcgacagcgaggaagagcccccacccgcc

SEQ ID NO: 33802 - RNA, 81 nt, Homo sapiens
aggcaaccaaacgggaggcagaccccagacaaagagggacccaggagaaggaagcgccggccaaacgagcacagcaaacgc

SEQ ID NO: 33803 - RNA, 73 nt, Homo sapiens
aagagagagggagaacagggagaaaagcagacaaggaggaagacccgcaaacagagcaagcccaagccacaga

SEQ ID NO: 33804 - RNA, 77 nt, Homo sapiens
gcgacggcggaacccggggccgggacgcagcccggcggcagcaggcaggaaaaggaagagcaaaaacaaaaacccag

SEQ ID NO: 33805 - RNA, 79 nt, Homo sapiens
aaaccagcaacagcaacccgagcccagagacccagggacaggccgcgcggccggcggacgcccacccgcacccaggggc

SEQ ID NO: 33806 - RNA, 33 nt, Homo sapiens
cgcgccgaagcggaggaccccaaaaaagaacag

SEQ ID NO: 33807 - RNA, 82 nt, Homo sapiens
ggaccgggaccgcgcggacccggccgggagaagcagcagcgcaagcggagggacgggaagagaggagcgcagcagacgagaa

SEQ ID NO: 33808 - RNA, 77 nt, Homo sapiens
ggaaaccaagagacggcacagaagacagacaggccggcgggagcccacggagaaccacggggaccaagaagcgagca

SEQ ID NO: 33809 - RNA, 56 nt, Homo sapiens
caaggaggagaaaggaaaaagagagcggcggcaccaggcaagcgggagcggggagg

SEQ ID NO: 33810 - RNA, 80 nt, Homo sapiens
caacgagaaacggacaaccaacggccaagaacaagaacaaaggccgcgacggagaccacaaaaagaggaggacacgggaa

SEQ ID NO: 33811 - RNA, 73 nt, Homo sapiens
accagagcggggccaggcgaaggacacgaggaaggggaaggggcaaagcagacggcacaggagagggccaaaa

SEQ ID NO: 33812 - RNA, 41 nt, Homo sapiens
cccagccaagggggcaaaagggaaagaaaggcaaagcgagc

SEQ ID NO: 33813 - RNA, 59 nt, Homo sapiens
acaagcacagcgagaccgcggcgcaggaggaggaggagggaggcccgacggagacgagc

SEQ ID NO: 33814 - RNA, 71 nt, Homo sapiens
ccaggaacgcccggccgcgcccgcgcccagcccgggccccgcgcacagccccagcgcaggaaacagaaccg

SEQ ID NO: 33815 - RNA, 83 nt, Homo sapiens
gaaggaccagagccagagcaccccggggagcggcgaggaagagcgcagggacagccgacaagccaacaggcagcggagagcgg

SEQ ID NO: 33816 - RNA, 73 nt, Homo sapiens
ccaaggggcggaagacacaggccccgagggcgggggacaggaccgggaaccccggacaaaacgcgcaaaagga

SEQ ID NO: 33817 - RNA, 77 nt, Homo sapiens
gaaacggcgcagaagaacggcaaagacagagaccccaacaggaaccccccggcggcagagagcagaagggccagcgc

SEQ ID NO: 33818 - RNA, 76 nt, Homo sapiens
aggcagcgaaaggacacgggagaaagggagccgagcgagaccacgcaccacgggcgaccagacaaagggagcacca

SEQ ID NO: 33819 - RNA, 78 nt, Homo sapiens
ggcagaaggaggccgccgccagcggaagacgcgccaccggagcggagaaaaaggacggcagcaacacaaacaaggaag

SEQ ID NO: 33820 - RNA, 74 nt, Homo sapiens
aggcgccacgaaccaaaggccgcgcaaaacggcgcaccaccaacgggcccagacagacagggggaggccgcccg

SEQ ID NO: 33821 - RNA, 95 nt, Homo sapiens
cagaccaggcccgccacaccccggcgccggaaaggcagccaaaggcaccggcacggaccaccccaacaccgggggagaaccgggcccaccaggga

SEQ ID NO: 33822 - RNA, 79 nt, Homo sapiens
ccgagcgggccgggacaggcaacagggaagggggcagggaaccagagagaagaggaagagaagaagaagaacgccccca

SEQ ID NO: 33823 - RNA, 115 nt, Homo sapiens
gccagccgggcaggccccgagaggaacccagccgacacgacgccgccggcaggcccgcgcaccaggcagaagagacaacacagaaaccagggcggaggcaggaacagcagcaaaa

SEQ ID NO: 33824 - RNA, 56 nt, Homo sapiens
cgcggagcgggaccgccgcagggggcccgcgcagacgcaccgagaaaacgccggac

SEQ ID NO: 33825 - RNA, 76 nt, Homo sapiens
agacaccaaaaagcaaacggaccagaccgaccaccaaaagacagagcgggagccaccagcgccaaagggaagccag

SEQ ID NO: 33826 - RNA, 59 nt, Homo sapiens
ggcaagaggcaacagaggcccacacagcccagaggaggggggaagcccaggggaggaag

SEQ ID NO: 33827 - RNA, 76 nt, Homo sapiens
ccacccacacccaccaacaacaccacaaaaccacagccaaggacagaaaacagccacgcaaagggaggaggaggga

SEQ ID NO: 33828 - RNA, 93 nt, Homo sapiens
acccaccccaggcccagaaacggccggggcccagcaaggcagacccagaccaggcggaggagggcgcaacggacaccacaaccccgccccagg

SEQ ID NO: 33829 - RNA, 77 nt, Homo sapiens
aggagccagcagagcgccagacaaacggcaagggagggcacagccgcggccagaacacccgggcgcgcgcccgcccc

SEQ ID NO: 33830 - RNA, 57 nt, Homo sapiens
agaaccgccaacggaccccgaggacaggaaaaacagcccaaggagaggcacacagga

SEQ ID NO: 33831 - RNA, 79 nt, Homo sapiens
ggagcccaccaagaaggaagcgaccacaggcccaccaaccgggcaccgaccgcacgaggccggaaccaccgagagcggg

SEQ ID NO: 33832 - RNA, 69 nt, Homo sapiens
gccgcgagggggaagcgagaccggggccgcaaggccaggcgcgcagaggcacccaacggcacagacccc

SEQ ID NO: 33833 - RNA, 83 nt, Homo sapiens
aaggaagcacccgaggaggcggagcggcaccagccacagagggcaagcgacggaagaaggggagcccgcagcgcaaccaaaag

SEQ ID NO: 33834 - RNA, 90 nt, Homo sapiens
cagaccaggccggcagagccagcaccaccagcagacaagcgaaaagagagcgggacgaagccgacaggagaagcggacaccccagcgcag

SEQ ID NO: 33835 - RNA, 66 nt, Homo sapiens
acccgaaggcacaagaaaaccaagagaacagcagacagaacaaacggagagacgccgaacgaccac

SEQ ID NO: 33836 - RNA, 81 nt, Homo sapiens
cccccacccaccgcgccggcgccccgcacgcccgggaagcgcgcaccgccaagcaggggcaagaaagaggagccccacaga

SEQ ID NO: 33837 - RNA, 70 nt, Homo sapiens
cgccaccaccgagaagacaaaacaaggacagggcagaccgccagcagcacagcaagccacagagagggcc

SEQ ID NO: 33838 - RNA, 51 nt, Homo sapiens
ggacagaaaaaaagcaagggacccgaccagaaaggacaaaaaggagaggac

SEQ ID NO: 33839 - RNA, 83 nt, Homo sapiens
gagaccacgacgggggggaggcggcagcgcaaccacgagacggccccaagggagaccggaacccccaaaacagaccagcgaga

SEQ ID NO: 33840 - RNA, 80 nt, Homo sapiens
ccagccggcccggcacgggcccgccccaccgggggccaccccagggaggagaagagggacccagaaggcgaggagaagaa

SEQ ID NO: 33841 - RNA, 81 nt, Homo sapiens
gcggggaacagccggaagggcggggggcgggccggaggggagacgggaggcagacaccaacaagaagaggggggaacagcc

SEQ ID NO: 33842 - RNA, 34 nt, Homo sapiens
cccacacggggaaccacaggggaacgaagggaga

SEQ ID NO: 33843 - RNA, 77 nt, Homo sapiens
cacccggaaaaaggacaccccaagaagcgcccaccaaccagggccaaaggacaccagagacccagcccccacccgcg

SEQ ID NO: 33844 - RNA, 52 nt, Homo sapiens
ggcggagcgccccccgggagcgggaagggggggcggaggcggcgcaggcaga

SEQ ID NO: 33845 - RNA, 79 nt, Homo sapiens
ggccaccaaacccggacagggaaagaccaaagggcccaaacccgagcccgcaagcagagaccgggagcaaagaggcaga

SEQ ID NO: 33846 - RNA, 79 nt, Homo sapiens
gacgcacgcgaggagcggcaggacgcgaggagcgggcaaggcaccagacccggaggagcagcaccccggcaggcagacc

SEQ ID NO: 33847 - RNA, 79 nt, Homo sapiens
aaagcacaacagagggacaacaaaagccccacaagagccaccaaaagcaccagggaaaaacacccaacacggacaccgg

SEQ ID NO: 33848 - RNA, 67 nt, Homo sapiens
cagacgggaagccgccacaaggccaccggggggggggaccaggagggccaaaaccaggcgagaacca

SEQ ID NO: 33849 - RNA, 79 nt, Homo sapiens
gaagaggggcaagcggccgccccccgcacaccagggcaccgccgaccgaaaccgcaaacacacgacagaggcaaggcaa

SEQ ID NO: 33850 - RNA, 56 nt, Homo sapiens
cggggaagcaagggcagcaggccaccggcacacggaaacgcacaggaagcagccag

SEQ ID NO: 33851 - RNA, 76 nt, Homo sapiens
cccacacaaagagggggcggaagagacagccaggcacagaaggcacaaacaacagagcgggacaaaagaaccagaa

SEQ ID NO: 33852 - RNA, 55 nt, Homo sapiens
gagggcagacggacaagagcgcggaacaggacgccccgaaggaaaggcaagggca

SEQ ID NO: 33853 - RNA, 74 nt, Homo sapiens
ggggaccagagaggacggcaccagccaggagcgggaaggcaaagaagaagcgcccacagaaggaagcgcgggaa

SEQ ID NO: 33854 - RNA, 81 nt, Homo sapiens
cagcaccggccggcgcacagaccacgccggggacacaggccgccaaaggagggaaaagggagagcgaagaccacacagggc

SEQ ID NO: 33855 - RNA, 81 nt, Homo sapiens
cgccgagcgcggcccgggcgccacgagccggcggcggacggcagaacagacacggacagcgaggcgcccggggaacgcacc

SEQ ID NO: 33856 - RNA, 70 nt, Homo sapiens
cgccagcaccacaccggcccaaccacgcacagccaaggacggagaggccgcccacggagcgcagagccaa

SEQ ID NO: 33857 - RNA, 39 nt, Homo sapiens
ccagcgcgcggcgggcgaggccccgagcagccaaaccgg

SEQ ID NO: 33858 - RNA, 72 nt, Homo sapiens
aaagaggaagccggagacagccacaaaaaaggacgacagcaccaggcgaacccaggcacccagagacggagc

SEQ ID NO: 33859 - RNA, 58 nt, Homo sapiens
agaccccgaaaacggaagcgcagggagaaggaagaggggaaaaggcgcgaacggcgga

SEQ ID NO: 33860 - RNA, 74 nt, Homo sapiens
cgcgaaggcaaagcagaggaagaacagagcccgacggagcagcagcgccgggaaggaaagcacacaggacagaa

SEQ ID NO: 33861 - RNA, 75 nt, Homo sapiens
ccaggacaacccagaggcaacaaaggcgagagacccaccaccaggacgcgaaagagcaccggagaggacccaagg

SEQ ID NO: 33862 - RNA, 71 nt, Homo sapiens
cgcacaacaaccacggcggaaccagagcccaaaaccgcaagcgccagaaagaccaccagacaaacgacagc

SEQ ID NO: 33863 - RNA, 71 nt, Homo sapiens
acacagacaggaccgaaagagccagcaaaagacgagacaacagggcccgagaaacaacagcacgacaggaa

SEQ ID NO: 33864 - RNA, 52 nt, Homo sapiens
ggccaggagcaggcagaagcggaccagcagacaacaggacaggcaacaagga

SEQ ID NO: 33865 - RNA, 76 nt, Homo sapiens
agcccgccgcacagcacacggagcgcgccggccccacgggaaacaaagaggcggcggggaaagacacaaaaacagc

SEQ ID NO: 33866 - RNA, 79 nt, Homo sapiens
ggggagaagaacacgggaggagaggacccccagacggcgaaccaccaaaagggaccagagcgggcacccacaaagcaaa

SEQ ID NO: 33867 - RNA, 95 nt, Homo sapiens
gaaaagaagggcgcccggaaaggcgccgaagagagaggacgaagaaccccccaaaaaaaagcaagagaaaaaagcaacgaacaaaaagcagagcc

SEQ ID NO: 33868 - RNA, 58 nt, Homo sapiens
agaacccagaaacccgacccaggccgcgcagcgcggagagcaggcaggaggcagacga

SEQ ID NO: 33869 - RNA, 63 nt, Homo sapiens
acgcgacaccaggagagccacgcaaacccagggaaaaagggaacgaaccggaccggaaagggg

SEQ ID NO: 33870 - RNA, 71 nt, Homo sapiens
ccccaaaggcgggagcaggacgcccaaaagaggagccaaaagagaaagcacagaaaccaaagccagccagg

SEQ ID NO: 33871 - RNA, 81 nt, Homo sapiens
agcgacagccacacaacggacaggggcgacagcaagaaggagccagcacagaggcaaaagaaccaacaaaggccaaaagag

SEQ ID NO: 33872 - RNA, 65 nt, Homo sapiens
agccaggccagagagccagaacggagaggcgcagcccagcccgaaagcagaacgacgccggcgag

SEQ ID NO: 33873 - RNA, 81 nt, Homo sapiens
acggggagagaaagaaaaggaacgggagcgagaggggacccagaaagaagcacaaaacaaacgacagcagcagagaaacac

SEQ ID NO: 33874 - RNA, 71 nt, Homo sapiens
agagcgaaagagagagagccaacaagagccagacaaacaggagaaaaggagaaaagcccgaaaaacgagga

SEQ ID NO: 33875 - RNA, 73 nt, Homo sapiens
cccgccaccgcggggcgccgcagccagcaacacagggagccgccaccggacaccaaccagaagagaagaccgc

SEQ ID NO: 33876 - RNA, 82 nt, Homo sapiens
gggagaggcaccaaacggccgggggcccgagaagcccccagggcggagaacggaaaagcaccaggaagcagagaggaccgca

SEQ ID NO: 33877 - RNA, 77 nt, Homo sapiens
gggaggaaggcgcaggagcccggccaccacacccagcggaacgagaaaagggcgcccgggagaagaagcaaagcaca

SEQ ID NO: 33878 - RNA, 75 nt, Homo sapiens
agcccaggaggccgagcgcgggaaagcagcggcaagaacggaagcacgggcggaggaaagcacaagcagagcccc

SEQ ID NO: 33879 - RNA, 69 nt, Homo sapiens
gacaggaggcaaaggccccccgaaaaacggagagaccaggaacagccccggccgacaggaccggaaaac

SEQ ID NO: 33880 - RNA, 81 nt, Homo sapiens
gacccggaggggggaccccgaggaggaaacgaagagacacccacaagagcgccgaagaggacagggggcgccaacgcgaca

SEQ ID NO: 33881 - RNA, 80 nt, Homo sapiens
gcgcacgaagccggcgcaccccacaccgacaccacggaggaggcggccggagggaagcccggggcggcgacggagcacga

SEQ ID NO: 33882 - RNA, 81 nt, Homo sapiens
gcgcgggcacccacggagccccggggcgccagaggagcagccaagaagccccccaggggcccgcagaccaacaacaagcca

SEQ ID NO: 33883 - RNA, 79 nt, Homo sapiens
aaaaaacaaaaggagagcgccaaaccaacgagagggaggaacagcaccgaagaccgggagcacagaagaaaagaacaag

SEQ ID NO: 33884 - RNA, 71 nt, Homo sapiens
ggcaggaaggaggagacgaagaaaggagccacccaaggaaagccgacaggaacggaagaccggaaaccgag

SEQ ID NO: 33885 - RNA, 35 nt, Homo sapiens
cccagagcaggagggacaggaacagagacagaccc

SEQ ID NO: 33886 - RNA, 73 nt, Homo sapiens
gaaaaaggacccacaaacagacaagggagaagacaccccaacaagccaggcagcgccaaggaccgggacagac

SEQ ID NO: 33887 - RNA, 84 nt, Homo sapiens
aaggccgggacccggccccggcccacaggggggggcaaacccgagagaacgggcagagaccacaagaaccaggagagacccaga

SEQ ID NO: 33888 - RNA, 71 nt, Homo sapiens
cggccggaggaaaccaagacagcccaaacgccccacgaccagggcgcaagcagagaagaaccaccgaaccc

SEQ ID NO: 33889 - RNA, 56 nt, Homo sapiens
gaacaaacggccaagaagggccaccccacagacgggaagcgggagaggccacccgc

SEQ ID NO: 33890 - RNA, 75 nt, Homo sapiens
caaaagagggagagggacgagccccaaacccgaaaaaagggaaggaagaagaagggccgagaaaaaggcccccac

SEQ ID NO: 33891 - RNA, 72 nt, Homo sapiens
ggagagagcagcccggcagacgcagaaccaggaggagcgcggcaagacaaccacgaaaacgaagaggggaga

SEQ ID NO: 33892 - RNA, 48 nt, Homo sapiens
ccccgcgaaaggaggaggcacagaaggcacacccagaagccacaggag

SEQ ID NO: 33893 - RNA, 80 nt, Homo sapiens
ggaacaaaccgaagaacagcgggaaagaaggcaaaacacggcaccaaaaagcccgggcaccgcccagcgcccagaccacc

SEQ ID NO: 33894 - RNA, 57 nt, Homo sapiens
acagcggacaaagagagaaaggagcaaagggccagggaggaacacgcacccggagcc

SEQ ID NO: 33895 - RNA, 71 nt, Homo sapiens
agggaggaaaagggcagggacagcgcaggcagcagggacggcagaaacagaacaggaagaaacaaacagac

SEQ ID NO: 33896 - RNA, 50 nt, Homo sapiens
cccgacccagcggcagcggagccagaaagcaagcaccacagccccaccac

SEQ ID NO: 33897 - RNA, 72 nt, Homo sapiens
gggcgagaccccgcccggaccgcaggaggcacggacaaaacgcagggccagcaaacccgggcccaagacgca

SEQ ID NO: 33898 - RNA, 60 nt, Homo sapiens
cgcagaaccagaccgggagcacgcacccacgaggccacgaggcggccccagcgcgggcga

SEQ ID NO: 33899 - RNA, 101 nt, Homo sapiens
aacgcgcagccacccaggacccgcagcccagaacccgaggaccccgcaggccagaacagaagggagaaacccagaacaaaaaaacgggcagaaagagagag

SEQ ID NO: 33900 - RNA, 83 nt, Homo sapiens
ggcgggccgccgagcggacccggaccggggcaaggcggaaagaaggcggcacaagaaaagagaccagcaggagcagagcggca

SEQ ID NO: 33901 - RNA, 78 nt, Homo sapiens
gaagcagaacgacaaaagccaagggcaaacgacggagaacaccgaagggaagacaccaagccggcaagaaacccagag

SEQ ID NO: 33902 - RNA, 76 nt, Homo sapiens
cggccgccgccgccgccgcccaggcgcaggcaccccgccaggaagaggcggcggcggaggagccccgcagcagagc

SEQ ID NO: 33903 - RNA, 71 nt, Homo sapiens
acaagaagccaaagagcggaggcggcccgcgggacaagcggagaaaacagacacgaccgccagacgcacag

SEQ ID NO: 33904 - RNA, 70 nt, Homo sapiens
ccggggaggcgacacacgcgccagggagaaagacacgcacgccagaggacaaaagcagccccccggggca

SEQ ID NO: 33905 - RNA, 80 nt, Homo sapiens
gaagggcaaccaagaacgcaaacacccaacgagagagcaaaagagagcgccaaaaaagagggggcgaagggaaaagcccc

SEQ ID NO: 33906 - RNA, 81 nt, Homo sapiens
cgaaaaagaagaagaaaaaaaaaaggcagaacccgagacaaccaccgggggccaccaccgaggaagggaccagcacgccca

SEQ ID NO: 33907 - RNA, 53 nt, Homo sapiens
ccggaggagacggggcagacaacggagcccggggccggaaaggaaaaacacca

SEQ ID NO: 33908 - RNA, 76 nt, Homo sapiens
ccagcccacaacccacgcgcaccgggagcaggagaagagggcaaagaaaaaggagcaagcgcgggaagaacccaga

SEQ ID NO: 33909 - RNA, 51 nt, Homo sapiens
ccagcgaggcggaacaggagcgagaaggacaaaggaggaaaacgacccaga

SEQ ID NO: 33910 - RNA, 78 nt, Homo sapiens
caacaacaagcccgagggcagccacagcgggaaaagaaagcaacgcgagcccgcacaggcacgcaaaaaaaccaaggg

SEQ ID NO: 33911 - RNA, 78 nt, Homo sapiens
ccccgggcgagaacccgcccagcccccaagcagcgggcacagggacacagcaggcaggagagacaacagcaacccagc

SEQ ID NO: 33912 - RNA, 69 nt, Homo sapiens
cgaagaacaaacacccgagcgcgagaaaagagcaccggccagcagaaccagccggggccggcaagcccc

SEQ ID NO: 33913 - RNA, 60 nt, Homo sapiens
gccccccagcccgggcgggggcagagccaggacagagaggaaggcacgcagagaacagag

SEQ ID NO: 33914 - RNA, 63 nt, Homo sapiens
caacacacgcaagcaacccacagaagaaaagggcggaaaccggaaggcgaaacagcgcgccga

SEQ ID NO: 33915 - RNA, 40 nt, Homo sapiens
ggggccaaggagccggcagcaggcgggagagagaacggaa

SEQ ID NO: 33916 - RNA, 76 nt, Homo sapiens
ccccagcagcggagggggaggacgcaggacgcacaggagagcaaggaccagaccgggccccccaggaaaggcccga

SEQ ID NO: 33917 - RNA, 81 nt, Homo sapiens
gcccaccgaaaggagagaagcagaggaggggcaacaaacaaccacccgcccagcagacgccagaagcaaaagagagacaga

SEQ ID NO: 33918 - RNA, 69 nt, Homo sapiens
cagcagcaagcgaacaccagaggaccaagccaaacggggccagagcccagcacccacggagaagagaag

SEQ ID NO: 33919 - RNA, 36 nt, Homo sapiens
gaagaggcaccggaggagcgggccccggggaacgac

SEQ ID NO: 33920 - RNA, 83 nt, Homo sapiens
ccaagagccaaccgagggcgccgagaagccagcacgccgggagcggacacagcccaggaagaccccggggaggccgggcggag

SEQ ID NO: 33921 - RNA, 81 nt, Homo sapiens
ccgagggccacgcgacaaggcacccgcagcgaggcgccccaccagggcaaggccagagaaggcgggagaaagacacgaacc

SEQ ID NO: 33922 - RNA, 72 nt, Homo sapiens
ggagacaaagaccgggcgacgaggcacagcgcgcaagaagggagaggagaagcaagggacagaccacaacac

SEQ ID NO: 33923 - RNA, 74 nt, Homo sapiens
cacggggaagcgcaaaaacaagacggggcgccccacagaggggcgacggaggcgcgaccagagaaaaacaggac

SEQ ID NO: 33924 - RNA, 54 nt, Homo sapiens
gcgggcggccgcgcccccaggacacaaggaaagaccacagcaagaccacgcccc

SEQ ID NO: 33925 - RNA, 62 nt, Homo sapiens
cgagcagccagcccaaggggccaagcgacagagaagcgacggaacagaaggagggagaagaa

SEQ ID NO: 33926 - RNA, 35 nt, Homo sapiens
accacgggcggccccagaagaacggagaaacccgc

SEQ ID NO: 33927 - RNA, 78 nt, Homo sapiens
cgagagaggaaacacagcagaaacaaagaagcagcgcgaaaggagcagcaccagggacccccgaaccacaggccccag

SEQ ID NO: 33928 - RNA, 62 nt, Homo sapiens
aacaacgcaaacagcaagaacaggacagagcaacaaaagccaaaccgcaggagagagaaagg

SEQ ID NO: 33929 - RNA, 60 nt, Homo sapiens
agacacggggcaccgcccggggacgaaagcaggcccagaaggggaagacccccagcgaac

SEQ ID NO: 33930 - RNA, 77 nt, Homo sapiens
aagcggcaggccgcagaggagccccgcacaagagcaagaggagccacggaggagacgaagaggccaaagggaccgaa

SEQ ID NO: 33931 - RNA, 79 nt, Homo sapiens
gcgggagcggcggcaagaaaaagccagccagaagaggcgcgcgcgcggcacaccggagaagccggccggacagccacgg

SEQ ID NO: 33932 - RNA, 72 nt, Homo sapiens
gaagggaggcgcgcggcagcaggggcgacgaggcgggacgcaggaaggacaggaacacaagacacaaacaaa

SEQ ID NO: 33933 - RNA, 72 nt, Homo sapiens
gggagacaaaaagcaagggggacaaggaccgaaaacaaggacacgaggcacaagcacaaaacgagcggcgac

SEQ ID NO: 33934 - RNA, 79 nt, Homo sapiens
ggcacccgcgccccagagccacgaaggcaccgacgcacagcgaccaccaacagaccgaagaaaaagcggggaagggggg

SEQ ID NO: 33935 - RNA, 42 nt, Homo sapiens
gcccccagagggggaacaggcccaaaagccaggacgcaaaca

SEQ ID NO: 33936 - RNA, 86 nt, Homo sapiens
gggcagaggcagcgagcgagccccaggacccgcggccggccgcccacgcgagcggcccgagacccgaggaacaggagggaggcggg

SEQ ID NO: 33937 - RNA, 47 nt, Homo sapiens
gccagacgaccgcgccacccgcagggccaggaacagcccaggaagaa

SEQ ID NO: 33938 - RNA, 54 nt, Homo sapiens
gggccagaaggcaaacggacaggaggacccgcagacacaacggaggcccgaccg

SEQ ID NO: 33939 - RNA, 66 nt, Homo sapiens
cacccgccgcgcccaagccccgcggggaagaacggcacgcggacagggagcagagaaacagaaggc

SEQ ID NO: 33940 - RNA, 70 nt, Homo sapiens
cagggaagaggaagaccagaggacccacagacagaacaaccgagcacaacgggggccgacacagcaagga

SEQ ID NO: 33941 - RNA, 74 nt, Homo sapiens
acacggacacccacagcggggcggcggcggcggcggcgcggcccaaaaggggcaaagaaaaaggagagaaaaag

SEQ ID NO: 33942 - RNA, 73 nt, Homo sapiens
gacggacaagcacagccggaagacccccgccccaacaagaggccaacggccaagaccgcccggcagcggggga

SEQ ID NO: 33943 - RNA, 74 nt, Homo sapiens
gccaacccgaagagacacgaaaacggacaaaacaaagaaaaccagggcgacaagaacagaggcacaggaagggc

SEQ ID NO: 33944 - RNA, 56 nt, Homo sapiens
gaggcgaagcgagaggacagcaccagaaaggagcaggcaggaagacagaacggcag

SEQ ID NO: 33945 - RNA, 115 nt, Homo sapiens
ccaaaaccaggccccaaggccggaagaagggagagcagaagccgcgaaaaaggggggccgagagaaggagggggcagagcacggcaggcagaaggggccaacccgggggaacgca

SEQ ID NO: 33946 - RNA, 84 nt, Homo sapiens
gggaaccaaggggacaaaccaacagaagggcaaccagggacaggcggccgacaggaagggaaacaaggcagcagccccgcccca

SEQ ID NO: 33947 - RNA, 91 nt, Homo sapiens
ccccaacagcccgagggccgcagcacagggaaccccaggaagaccccgggcagagaccagagggaagacacgagaggcgagggacgacaga

SEQ ID NO: 33948 - RNA, 81 nt, Homo sapiens
aggaccggagcggccgccgagggggagaaaagcagggggagacggaggcccacggcggacgcgaacaggcggggacccaga

SEQ ID NO: 33949 - RNA, 68 nt, Homo sapiens
gaaaagagaaacacaccccgaaggcgggacaaagaccaacaggaagccgcccgaacacgaagaagagg

SEQ ID NO: 33950 - RNA, 86 nt, Homo sapiens
cgcacgaaacgaaggacagaagccaccagaaggcgcgggacggaacagaaaccgggcaaaagccggaagcaacgaggccgaaaaag

SEQ ID NO: 33951 - RNA, 67 nt, Homo sapiens
acaccgggcaaccacggggcggcgccggccccaagaacagagaacgaggaagaaaaggaaacccaaa

SEQ ID NO: 33952 - RNA, 64 nt, Homo sapiens
caccagacaggaccaccgaggagcagcaccaacacacagcgagacggcagggagaccaaggccg

SEQ ID NO: 33953 - RNA, 73 nt, Homo sapiens
gagaaaaaccaccggacagaacaggggccccgggaggaaaggccgaacaggaaacacaagagaaacacgagac

SEQ ID NO: 33954 - RNA, 48 nt, Homo sapiens
cgggcccgcccgacgcggaagggggaaagagcccgggagaggcccgcg

SEQ ID NO: 33955 - RNA, 47 nt, Homo sapiens
cgcagggcgcccccgggaaaaacaacgaaccgggaggcccaagaccc

SEQ ID NO: 33956 - RNA, 79 nt, Homo sapiens
cgcaaaggagaaaggaaccgacaggaggcggagcccgagaacaacccaggcagagcagggacgccccacggagacggcc

SEQ ID NO: 33957 - RNA, 84 nt, Homo sapiens
gaccgacggcggagcaccgccccggcagaagcggcagcaaaccccccccccgcacccccccagccacagcaccggcagcgacgg

SEQ ID NO: 33958 - RNA, 77 nt, Homo sapiens
gggacgaccgacggcagaaagcaaggaaacaaagacaaaagagagaaaaccaaggacaaaccaaagaagaggagagc

SEQ ID NO: 33959 - RNA, 74 nt, Homo sapiens
aacacagccagcagcaagcagcacacaagccagccggacagcaacaggagagcgaaaggggaccagacggggaa

SEQ ID NO: 33960 - RNA, 81 nt, Homo sapiens
gaagaagcggaccagccgccaaggagggaagcggacacacaggacgagaaacccgaccacacccaggcagcaccacaacac

SEQ ID NO: 33961 - RNA, 52 nt, Homo sapiens
gaggcccccagagcgcggagccgggcccgacccacaggggggaaggagacgc

SEQ ID NO: 33962 - RNA, 84 nt, Homo sapiens
agagccgggaccgggaccagcaacacagaggaaaagaaagaggccaagagacagacaccaaacagacgagaaacgcagcaaaag

SEQ ID NO: 33963 - RNA, 71 nt, Homo sapiens
ggggcagacaacggagcccggggcaagacaggcgcaccccaaaaacagcagaacccaacgcgcacggcggc

SEQ ID NO: 33964 - RNA, 80 nt, Homo sapiens
accgacaggaacagggaccacggggggagagcaagaggcaaagcagcccagaaaccccaaacccaaaaccaaagaaggaa

SEQ ID NO: 33965 - RNA, 71 nt, Homo sapiens
acaagagagggccagcggagagagagcacagaccacagccgcgaacgcggccgggaggcagagcgaggcac

SEQ ID NO: 33966 - RNA, 80 nt, Homo sapiens
ccagggcccaaaaaaagggcaggaaccacgaaggacagaagacaccacagaggcacgggaacaaagcagcgccagcaggg

SEQ ID NO: 33967 - RNA, 46 nt, Homo sapiens
ggacccacacaccaggcgaaaggaaaggcaagaaggcgcccagccc

SEQ ID NO: 33968 - RNA, 75 nt, Homo sapiens
cagagaaaaagcaccaagaaagaccgaaaaaggaagacagagagcaagaccccagcccaaccgaggcggcaagga

SEQ ID NO: 33969 - RNA, 58 nt, Homo sapiens
cagaccgccagcgcaggaaggccggggcgcagacaggcccagaacaggacagagcagg

SEQ ID NO: 33970 - RNA, 54 nt, Homo sapiens
cgaaggcgcaaacgacaccacccgaccgggggaggggggcgaaaccgagcgcgg

SEQ ID NO: 33971 - RNA, 78 nt, Homo sapiens
gggaacagacacccacccgacggggccggcccgccgcccaaaggaaaacgacagaccaaagagcaacccagcaaggcc

SEQ ID NO: 33972 - RNA, 69 nt, Homo sapiens
ccaacaaagggaaggagaacaaagaagcacacaaggaagacaggaggccagagcgaccaaaccgcagca

SEQ ID NO: 33973 - RNA, 85 nt, Homo sapiens
aagccaagacccggccagggaaaaccacaaaagcgccagaggggacccggcagcaaccccaacaaacgccagaggcagccccccc

SEQ ID NO: 33974 - RNA, 72 nt, Homo sapiens
cagcccagagggaggcccacagggagaacagggcagaacgaggggaggaaagcagggggacacagccagggc

SEQ ID NO: 33975 - RNA, 79 nt, Homo sapiens
gagagcgcgaaacgcacgagaagaccacagccgcgcccagaacgggagccggggagcacgggggagggccgacaccccg

SEQ ID NO: 33976 - RNA, 81 nt, Homo sapiens
ggcgcggcaaccggggagcccgccagagaggggagaagagcgagacgagaaagaagaggaagaagagagagaagagaagag

SEQ ID NO: 33977 - RNA, 73 nt, Homo sapiens
gccgaaggaagccaaggcgcgcggccgcaagaaaaggacagacgcaacacaggaaacaagagcaccaaaacac

SEQ ID NO: 33978 - RNA, 84 nt, Homo sapiens
ggccgggcaccccgagcgcaaggacagcgcgaggccgcgcagcccagcgcagccaaggcgagggcgccggcaccagggcgcaac

SEQ ID NO: 33979 - RNA, 45 nt, Homo sapiens
gccaaagaggaccgcggcgagagaagcccagcccgcggcggcgag

SEQ ID NO: 33980 - RNA, 67 nt, Homo sapiens
acaaagccaccgacaccccgaaaccgcccccgaagaagcagcgccaacgcaaacacagcagggggac

SEQ ID NO: 33981 - RNA, 76 nt, Homo sapiens
caaggaaacccaccgagcaccgccccggagccacagcaaagccacccaaggcaggcacagcaccagaccagggcac

SEQ ID NO: 33982 - RNA, 78 nt, Homo sapiens
cccgcgcaccgccagggaagaaacggggggacgcccacacagcaccggagaggaccagagaacggcacaaccaagccg

SEQ ID NO: 33983 - RNA, 77 nt, Homo sapiens
ccacgaagagacaaaagccgaaagaagggagaggaagaaagaccaaacgagagacaaaagagaacaacagaacgcaa

SEQ ID NO: 33984 - RNA, 83 nt, Homo sapiens
cagaaaggaagcaccgggccagcgagccgacccagcgccgaggggggggaaccacacgaaggccagcagagaagccgcaggag

SEQ ID NO: 33985 - RNA, 75 nt, Homo sapiens
aaagcgcgcagaaagggcgaccaccaaaaaaacggaagagagagaaaacccaaaacggagagaagaacggaaaga

SEQ ID NO: 33986 - RNA, 80 nt, Homo sapiens
gaaacacagccgaaagacagcaaccgcccggaggacgcaccggaagacacagcgggggaccaagaggaccaccaacagca

SEQ ID NO: 33987 - RNA, 54 nt, Homo sapiens
agcagcagcgagcgaaagcaaggaagcggagcagcggcaaaccagaaaagccca

SEQ ID NO: 33988 - RNA, 74 nt, Homo sapiens
gagcccggacagaccaaccgcaggcgcaaaccccgcgacaaggacggacgcagaagaggcgagaaggaggccgg

SEQ ID NO: 33989 - RNA, 36 nt, Homo sapiens
cgaagccgccaccacggcccggccggcacgagacag

SEQ ID NO: 33990 - RNA, 73 nt, Homo sapiens
gggcaggaagcaaggagggaaaaggcagaaggagaaaaggcagccaaacgcacagccacagccgcaagccaag

SEQ ID NO: 33991 - RNA, 75 nt, Homo sapiens
acaaccacggaaaaacccaaccagaaaagacgggaaacagggccccaacaaaggaaggagagcccggacccaccc

SEQ ID NO: 33992 - RNA, 63 nt, Homo sapiens
acacacaggggcacgcacacgaccgcgagagggcgaagaacgccaaaacccaccaaccagagg

SEQ ID NO: 33993 - RNA, 58 nt, Homo sapiens
accaggggagccagcgcacgacaaggccgacgaaagggaaggaacagaagaggcgccc

SEQ ID NO: 33994 - RNA, 76 nt, Homo sapiens
ccaagggccacaagcacacccccccagcgccggcacggccgcacaggcaccacagcacgacagccaggagaacacc

SEQ ID NO: 33995 - RNA, 62 nt, Homo sapiens
caagacgagcccagcgcaaccccaagcgcccaaaggaccccaggagcaagcacaagcaaaac

SEQ ID NO: 33996 - RNA, 74 nt, Homo sapiens
ccccggaccagaacggcacggccacgggcgggcaggcaagcagagcacaggaagggcaaggagaagggagaaag

SEQ ID NO: 33997 - RNA, 64 nt, Homo sapiens
gggggccgccgggacccggccaccagcaagccgagaaaggacagggacaggaaagaaagaaaaa

SEQ ID NO: 33998 - RNA, 37 nt, Homo sapiens
ggcggggagcgcccacgccaaagcggaccagcacccg

SEQ ID NO: 33999 - RNA, 78 nt, Homo sapiens
aagcaggcaccaaggacagagcaggaccaaaagaagcaaaaggagaggacacaggacaacgccaggcggaagaaaaaa

SEQ ID NO: 34000 - RNA, 68 nt, Homo sapiens
gccgggcgacccaaccaagggaccaggacgccgccagccaccggcgcgaagccagaccagaccagcag

SEQ ID NO: 34001 - RNA, 76 nt, Homo sapiens
cgccacagcggggggcgggaaccgacgaggaccccagagacacgcccagaaccaaccaggagcgcaggaaaaacag

SEQ ID NO: 34002 - RNA, 70 nt, Homo sapiens
cagggcaagaaacaggaaaagccggcagagaacggccccgaagacacgaagcccgggcaagacaacaaaa

SEQ ID NO: 34003 - RNA, 102 nt, Homo sapiens
cggcccccgcccgccccgccgcccgagccggcgccaagggacccaggaggaaaccagcagccgcaccgcccgagaaggcggcgggccggaaacgcgggaaag

SEQ ID NO: 34004 - RNA, 79 nt, Homo sapiens
ggaaagcaagaaggcaaacaaagcaaagaaacaaccaagcacaccccagagccgaaggaaagcccgaccaccgagcaga

SEQ ID NO: 34005 - RNA, 70 nt, Homo sapiens
ccagggcccccgacccaaaagggcggaaaaccccaggccaagggaggcagcgccgcccagcagggccccc

SEQ ID NO: 34006 - RNA, 72 nt, Homo sapiens
agacccccccaccagggcaacgaggacaagcgagaagacgaacaagaccacagagaacggggcgaaaacaaa

SEQ ID NO: 34007 - RNA, 69 nt, Homo sapiens
ggagccaaccgcccaggaaggacaaagcccggaacgaccaggagacgcgggaaggacagaagacagccg

SEQ ID NO: 34008 - RNA, 69 nt, Homo sapiens
gccgagcggggccggccacaggaaacaggcgacacaggggcgcgcgcaaagaaggaggaaacacggaac

SEQ ID NO: 34009 - RNA, 81 nt, Homo sapiens
agggcagagccggcaggggcgcccccaggaccgagcaggaaccggagcagggaggcggaaccaacccccggccagggaggg

SEQ ID NO: 34010 - RNA, 75 nt, Homo sapiens
ccaggaacacacgacgggacaaaagacccaagcaggacacggccggaccaggaggacagcagcggacggccggac

SEQ ID NO: 34011 - RNA, 83 nt, Homo sapiens
agaccaaggagcaccaccccggaaggagacgcccggcaagaggggagagcccggaacaggacagggggaggagaagccacgag

SEQ ID NO: 34012 - RNA, 58 nt, Homo sapiens
gcaacggcgaacggaaccgacgcacggaccaagggcaaaagcagaccggaaaacccac

SEQ ID NO: 34013 - RNA, 77 nt, Homo sapiens
aagccagaggccaaaggcaggaggaccaggaacagcagccaagggcaaggggcagcgcaggcacacaaagaaacaag

SEQ ID NO: 34014 - RNA, 42 nt, Homo sapiens
aagagaccgcaaccccgagcgcagaggcggagacagaggggc

SEQ ID NO: 34015 - RNA, 91 nt, Homo sapiens
agggaaaagcacgccaacgaccgaaaccacagcgaagggaaaagaaggcaagcagaagaggaacagaagaagcagagcagagacggagcag

SEQ ID NO: 34016 - RNA, 71 nt, Homo sapiens
aagggaggaaagacaccgggcgggggccagcaggcgcgccaaccacaaggaaaggaaggagacaagagcca

SEQ ID NO: 34017 - RNA, 76 nt, Homo sapiens
gccccgcaagaggagggccccacagaaccggggcagagaggagggcaaaaagacaaacaccaccggagcacaaaca

SEQ ID NO: 34018 - RNA, 77 nt, Homo sapiens
aagcgcaagagcaacaccccaccccaaggaccacgcggagagccaggaccaaggggcgcgcaaccagacagaacgca

SEQ ID NO: 34019 - RNA, 82 nt, Homo sapiens
agagaagcacagcagcaaccaaacccaagaacaaaaagaccccagaaagagcaacagaaggagacagagcacggaaggacaa

SEQ ID NO: 34020 - RNA, 85 nt, Homo sapiens
ggaaagaccccaacgccaccgagagggcgccggaagccacccaccccaccagagccggacaccagagccggacaccagggaggag

SEQ ID NO: 34021 - RNA, 74 nt, Homo sapiens
ccaccaaacgcagggacgccggccgccgacccaggagaggcaaagaagcagacgaacacaaaggggcagcaaca

SEQ ID NO: 34022 - RNA, 53 nt, Homo sapiens
aacccccgcaccggggggccgccgggcgcggcaagagaggagccacacaggcc

SEQ ID NO: 34023 - RNA, 77 nt, Homo sapiens
gaccaaggggacgaggcaaaaagcacagaagagaggcaccggaccagcgggaagccgcacaggaaaaccggagcaca

SEQ ID NO: 34024 - RNA, 83 nt, Homo sapiens
ccaccgcccccggcccgaccagggcggccaccgagaggacaggagagacaacggaggcaagaaagacggagaagcgagaagag

SEQ ID NO: 34025 - RNA, 74 nt, Homo sapiens
gcggccccagccgcggagacacaacaacagaggcagcaacgggaccccgacggagagacaaagaagacggaggg

SEQ ID NO: 34026 - RNA, 72 nt, Homo sapiens
agaaacaaggaaaagagcccaagaggaaacggagcacccaccaacgagagagccgcagggcaggaccagaag

SEQ ID NO: 34027 - RNA, 77 nt, Homo sapiens
ggcgcaccaaggccgcgccgcgccagcaaagcacggacagagaaggaggagaagcgagccaggccagcaacaggcgg

SEQ ID NO: 34028 - RNA, 80 nt, Homo sapiens
agaagaagggaaggcgcgaggaggaaaggaggacgaggggccccagggacgacgagacaacagagaaacgggcaacaagc

SEQ ID NO: 34029 - RNA, 78 nt, Homo sapiens
caggaggcaagacaaacaacacgggaagacacacaggacacagagaagggacgaggacggccaaacaagaggcaccga

SEQ ID NO: 34030 - RNA, 75 nt, Homo sapiens
caaagaccgggcgacgaggcacagcgcgcaagaagggaggcagagaaagcaagagacgcaaccgaacgcagagcg

SEQ ID NO: 34031 - RNA, 54 nt, Homo sapiens
aaaccaagccaacaaaagaagcgccgcaggaggaccggaaaagaaaaaggcagc

SEQ ID NO: 34032 - RNA, 84 nt, Homo sapiens
gccggcaggccgccgccgagcgcccgagcgggaagaagccgcagcaagccgcagcggcgcgcaccgggcggcccaggaccgagc

SEQ ID NO: 34033 - RNA, 68 nt, Homo sapiens
aagcccacagaccagagaaaggccaggaagcggagcaggaggacagagagccgaaagccgggcaaggg

SEQ ID NO: 34034 - RNA, 58 nt, Homo sapiens
gacgcccgcggggaggcccgaccgaccaccgcacggaccacgcagcaagaggaacaga

SEQ ID NO: 34035 - RNA, 73 nt, Homo sapiens
aggacgagagacgaaggggcagaggccaagagcccaacaccacccgagagccccaaggccaaaacaaagggga

SEQ ID NO: 34036 - RNA, 79 nt, Homo sapiens
cccgacccggagcgacgacggccgcgccaagcggaaagaacaaaacaggaagcggaaaacagaaccacagacacccccg

SEQ ID NO: 34037 - RNA, 58 nt, Homo sapiens
gcccaggccccggcagcgccgggacaaggcacaaggcacaaagcaggaggcaggaggc

SEQ ID NO: 34038 - RNA, 33 nt, Homo sapiens
cggcagcacggccggcaggggaagggcaggcgc

SEQ ID NO: 34039 - RNA, 79 nt, Homo sapiens
cggacacgaggacacgccagcgagccccacgccggggaggaggagccacggccggggacaggggaggaacgggaagagg

SEQ ID NO: 34040 - RNA, 80 nt, Homo sapiens
aaacacaagcgagggaagcagaaagagaaggaaggcagacagacacggagacgagcgggggaagaaggcaaggcacggcc

SEQ ID NO: 34041 - RNA, 79 nt, Homo sapiens
ggcgagggaggcagcagaccgcacaaccccagaagcgcgcccgggaggggcgagcaccaaagccaaggaagcccagaag

SEQ ID NO: 34042 - RNA, 79 nt, Homo sapiens
acgccaaccaagcagcccacgcacgacggaaagagaccacggggacccaggccgagccccggacagcagccccaggccc

SEQ ID NO: 34043 - RNA, 66 nt, Homo sapiens
agcaagccacgacccggaggcgagaaggggagaaggaacccccgacaacacaccgggcagaccggc

SEQ ID NO: 34044 - RNA, 70 nt, Homo sapiens
cagccaggccccaggacgaggaagaaaagaaacaaggaaaagagcccaagaggaggcaaggaggccacgg

SEQ ID NO: 34045 - RNA, 69 nt, Homo sapiens
agcagcagcagccccaagcgagagggggccaggaggagccccagcacagcagagaaaaaaccacaggcg

SEQ ID NO: 34046 - RNA, 76 nt, Homo sapiens
cggacaggcgccgcgccgccgcacgggaccgccgagccacaccggcgccgggaggaaccgaggccacagagaggca

SEQ ID NO: 34047 - RNA, 51 nt, Homo sapiens
gaagacccggacaacggaccggacggccagcgaaccagcaagaagagggac

SEQ ID NO: 34048 - RNA, 77 nt, Homo sapiens
aggcgacgcacacgagcggaggcgaaggcgaggaaacgagaccccgcccagaaggcggaggacgagagagaaaagca

SEQ ID NO: 34049 - RNA, 81 nt, Homo sapiens
cagggccccagggaaggccaggcccaaggaacaaacaaagccaggcaggaggaacaaagaaacccagagacagcaacaaga

SEQ ID NO: 34050 - RNA, 76 nt, Homo sapiens
gcggcgcgggcggcggggcccacggccggcccgcacgcacgggccgccaagaggcagagagacgaaacacgcgccg

SEQ ID NO: 34051 - RNA, 80 nt, Homo sapiens
accagacgcagggagaacgggggaagcaagccccggaaggagggcaggaacgaacaaacaccccagagagcccaggccga

SEQ ID NO: 34052 - RNA, 73 nt, Homo sapiens
agaaacaaaccaacgcaaaaaccagagccgagaaccgggagaagggaaggccgcgccaaacagagaccaaggg

SEQ ID NO: 34053 - RNA, 72 nt, Homo sapiens
ccggcaccgcccggagggggccccaccgggcccgaaggcgcgggggcagagaagacacagccgaaagaggac

SEQ ID NO: 34054 - RNA, 50 nt, Homo sapiens
ccaggagcccgagagagaaggagccacaaagagaacagacaccgaagggg

SEQ ID NO: 34055 - RNA, 73 nt, Homo sapiens
gcgccccaggacccgcagaagagcgcacacccacaggaaggccgacgcaggagaggaaccaagaggacaacag

SEQ ID NO: 34056 - RNA, 73 nt, Homo sapiens
cgaacccaaaggaggaaacagcggcaagccacagacggagcaaccaccagacggcaggaagcaaaagccagac

SEQ ID NO: 34057 - RNA, 81 nt, Homo sapiens
cagcgggcggagccgacgagcggcggggcacaaggccaagacggccaagggagccacagggcccagagcacggaaccggcc

SEQ ID NO: 34058 - RNA, 79 nt, Homo sapiens
gcgccgcacccgccccggcgccgccggagaggccagggggcgacagacagcggaaagccccaggaggggcgggggccca

SEQ ID NO: 34059 - RNA, 77 nt, Homo sapiens
gagccccacgggaaggagagcagccagcaggcaggaagagacgaagagaaaaaaagggaacggagcaaagcgaagag

SEQ ID NO: 34060 - RNA, 72 nt, Homo sapiens
ggagaaggcccgcccacaggaggccaaagaacccgcgcaggggaagagggaagggacacagaacaggcaaac

SEQ ID NO: 34061 - RNA, 57 nt, Homo sapiens
acccaagcggaccagccggggaacaccaaagagcagacgaagaaagagaagcagaac

SEQ ID NO: 34062 - RNA, 76 nt, Homo sapiens
ggaccaccaccagcacccaaaggggcacgcaaaaggagacacacaaaagggaagaagaagaaacaggcagaagcag

SEQ ID NO: 34063 - RNA, 76 nt, Homo sapiens
agaggaaaccagcccgcacaggagccgcagcagccagcgacccgagccagcagcacccagcgaccgaggccagcag

SEQ ID NO: 34064 - RNA, 73 nt, Homo sapiens
ccagcgaagggcgcccaaggaaacacgagcgaggggaggccaacggcgagcgccgacgcacacacgaacccga

SEQ ID NO: 34065 - RNA, 78 nt, Homo sapiens
caaacagcaccaaccacgacaaacacaacaggcacaaagagagaaggaacacccacagggcagacagagaaagaacac

SEQ ID NO: 34066 - RNA, 81 nt, Homo sapiens
ccggcgcaggcccggaccgcgcaggaagcgcgcccaagagcccagccgagccggccgaggaggccgcgggggagcgacgac

SEQ ID NO: 34067 - RNA, 79 nt, Homo sapiens
agacaacgggagggcccgagcgaccagaaccgcccaggggccggcgccaggccggggccggacaaagggaacagcgaag

SEQ ID NO: 34068 - RNA, 85 nt, Homo sapiens
aaacgaagcaaaagacagcgaggagcagcagcagcccagcaggcgcggcccgccagaacacacgaggagagccacagagcacggg

SEQ ID NO: 34069 - RNA, 80 nt, Homo sapiens
aaaagacaagcgaaaaagggcagaccaagaagcaacacagccacagcacaacagcaccaaccgcacccagcaaaggagcc

SEQ ID NO: 34070 - RNA, 48 nt, Homo sapiens
aggcagacaaaagggccaaagaagggagagagaaagacggggaccacg

SEQ ID NO: 34071 - RNA, 70 nt, Homo sapiens
acaggcaggcaaaaacaggagaccgcggccgaccagagaacaggaagcgaaagggggcagacagaagaga

SEQ ID NO: 34072 - RNA, 68 nt, Homo sapiens
gcccaagggagcgaccaggagagacagaggccagaagccaaggaccaaaggaacaaaagacgagggga

SEQ ID NO: 34073 - RNA, 74 nt, Homo sapiens
agccaccaagggcaccaggagaccaccagcacaccgacagagaacccaggccaacacacagacagaggcagcca

SEQ ID NO: 34074 - RNA, 59 nt, Homo sapiens
gcggggcagggcagacaacaccgacgaggagggcaccggcgcacccgggacgaacgcca

SEQ ID NO: 34075 - RNA, 89 nt, Homo sapiens
gcgcaggacaaccagcagaggaacccagggaaggaacaaaagcagagcagcgcaggaggagagacccgccaccggaaccagacaaggcc

SEQ ID NO: 34076 - RNA, 66 nt, Homo sapiens
ccgcgccgggcacagccggaaagcaggaccgcgacggcagcagagcaggacggacagcaacggaga

SEQ ID NO: 34077 - RNA, 80 nt, Homo sapiens
ggaggcgagcagaagcaaagggaagaaggagaaagggccaaccccgaagaagcaaacagaaacgaaggagacagagaaga

SEQ ID NO: 34078 - RNA, 63 nt, Homo sapiens
gaaacaaaaaagaaaaagacaaggaagaagcgaaaaagcccaaaggcccagaaccccagcagc

SEQ ID NO: 34079 - RNA, 72 nt, Homo sapiens
ggggcccgccaacgaaccacaggcgagaccgagacaagggcggagaacggaaaagcaccaggaagcagagag

SEQ ID NO: 34080 - RNA, 62 nt, Homo sapiens
ccgagacccggacagggcaggaaacagaagaacccagccgagcagcaagacccaggaacggg

SEQ ID NO: 34081 - RNA, 76 nt, Homo sapiens
agccgcccggaaacaaacaccccagggcaagcacgacggccccgaggagccagcagagcgggggggcacgaccggg

SEQ ID NO: 34082 - RNA, 79 nt, Homo sapiens
ccaggccccgggagggcagccacacaaaagggaagcgggcagaaccgagaaaaacagcagagaccaggggccaaagcac

SEQ ID NO: 34083 - RNA, 84 nt, Homo sapiens
aaggcaggggccagaagacaaagcaaccagacaagacgacagaaaccgccgaaagagagaaggaaagacgcaaccaggaagccc

SEQ ID NO: 34084 - RNA, 64 nt, Homo sapiens
ggaaggagacccaaggaaaggagaaccagccaaaaaagggcagaaccgacaacggggacccgcg

SEQ ID NO: 34085 - RNA, 84 nt, Homo sapiens
cgaggaggccagcagagaaacaagaaaaggaccccggcgcggagaggaagccagccaccagccagggcagaacaaaacgccacc

SEQ ID NO: 34086 - RNA, 79 nt, Homo sapiens
cgcgggggcaagggaacccaagccgaggcaagccggcagcgcccgagggagcaaggagaagagcggaacccagaccgcg

SEQ ID NO: 34087 - RNA, 74 nt, Homo sapiens
aaagaagaaaaaggagcggaagcagccagaagaagagagccgggccggagacccccgcgccccaagcgcgcccc

SEQ ID NO: 34088 - RNA, 56 nt, Homo sapiens
gaaccccaggcccaggagacggagaggaggaggaaaggcaagccgaccgaggggag

SEQ ID NO: 34089 - RNA, 41 nt, Homo sapiens
ggagggcaaagcggggcgagcaggaagaaggaccggggaga

SEQ ID NO: 34090 - RNA, 70 nt, Homo sapiens
cacgccaccgcaccccggccgcccccacggccccggcggccaaacaccgggcaacaagaggaaacaacag

SEQ ID NO: 34091 - RNA, 67 nt, Homo sapiens
aaacgggaagagaccgccaggaaaagagaaaaacagggacaaggggcaccaaaaagacaagggagca

SEQ ID NO: 34092 - RNA, 71 nt, Homo sapiens
ggacacgccaagcgcacgaaggagcccgccacgggaacccgaaacaaaaggaccccaacgaagcagaaaga

SEQ ID NO: 34093 - RNA, 81 nt, Homo sapiens
acagagagaagaggagaacacagcagccggccacaggaaggccccccaggccaggccgaggagggagcgggagaggacggg

SEQ ID NO: 34094 - RNA, 45 nt, Homo sapiens
acggagagcccagccaccgccgcaggaagggaccacagaccagca

SEQ ID NO: 34095 - RNA, 72 nt, Homo sapiens
gaacaccagccccgaggcagacagccgagacaccggagccgcacaggacgggaccggaaggacgagaccggg

SEQ ID NO: 34096 - RNA, 58 nt, Homo sapiens
gaacaaagagagagaaggcacacaagacgaccgcacacaagcggccagaaggacgaca

SEQ ID NO: 34097 - RNA, 84 nt, Homo sapiens
gagaagagggcacagccggggaggaggagacacaaagcccggaaaaagagaagcgcagcgaaaagaagagcaccgaggaacggc

SEQ ID NO: 34098 - RNA, 77 nt, Homo sapiens
aagcacgcgacgaggcggagagcagacaggacacccagcaacagaccgagaagacagcggcaaaaccagccggaaag

SEQ ID NO: 34099 - RNA, 78 nt, Homo sapiens
aggagccacacacccggcacaaacagagaggcacccagacgccccacagccagccggggcggaagaccgcacccccgc

SEQ ID NO: 34100 - RNA, 75 nt, Homo sapiens
ggaggacacgaagccacccagggaccccaagcgacgcacccgaagagcaccggccagaaggaggacaggaaaaag

SEQ ID NO: 34101 - RNA, 50 nt, Homo sapiens
gccgcggccgccgcaaggaaacacaacgagaagcacagggaacaccagag

SEQ ID NO: 34102 - RNA, 94 nt, Homo sapiens
gcggccaccgaagccaccgcggccacggagaagggcgagaagaagaaggagcggaagccgcagaaggaccggccagaagcaagccggagaacag

SEQ ID NO: 34103 - RNA, 81 nt, Homo sapiens
gaggaaccgagaagagcagagcggagggagccccagacacgggagcacaagcgggaggggccggcgaagcgaagaagccgc

SEQ ID NO: 34104 - RNA, 72 nt, Homo sapiens
ccaacacggcaacgcaggccagcaaccccagccaagcaagccgcccaacagcacaagaagcgccaccacgcc

SEQ ID NO: 34105 - RNA, 74 nt, Homo sapiens
cccagagaggacgggaacagcgagcagaggcgggagcaaaacggggggaaaaagaaaagggcgaagacccgaag

SEQ ID NO: 34106 - RNA, 79 nt, Homo sapiens
gggaaacacagcaccccaaaacagagccgcagagcacacaacagaccgaaggggacagcggacgacgaagccacaacgg

SEQ ID NO: 34107 - RNA, 79 nt, Homo sapiens
accgaaaaagcgcgaagcgccgaaagcaagaccaaaagagaggcaccgcggaacacaagagggaacagaaaagagaggg

SEQ ID NO: 34108 - RNA, 74 nt, Homo sapiens
cgccccgccgcgccgcgcccaaccgcccccccccagaacgcgggccgccgacccagcggaacaagaggaaacca

SEQ ID NO: 34109 - RNA, 58 nt, Homo sapiens
ggcccgccacagccgcagcaagaacggaagcacgggcggaggaaagcacaagcagagc

SEQ ID NO: 34110 - RNA, 87 nt, Homo sapiens
cgaagcaggacccgaagccaaaccaggaggaggaagacaccaccggacaccgaccaggccgcccgagcagcgaggcccaccaggcac

SEQ ID NO: 34111 - RNA, 79 nt, Homo sapiens
agagccaaggaaaaacagcaagaacccaaaaggcccgagaacacgaaacaaggaagaaagaagcaagaaaaacagaccg

SEQ ID NO: 34112 - RNA, 73 nt, Homo sapiens
ccacgcgcggacggcgcgagggagagggacaagccaaggccgcgagggacccgagaaacccccagacagcgag

SEQ ID NO: 34113 - RNA, 71 nt, Homo sapiens
gagggcgcggcacgccggcccgcagaccccagggacacagaggaacacccagcagccggaggagaccggag

SEQ ID NO: 34114 - RNA, 74 nt, Homo sapiens
ggaagcggcaccccccacgggccccaagggggccacggagaaccagcgcagcccaacacagaggaggaggcacg

SEQ ID NO: 34115 - RNA, 79 nt, Homo sapiens
cgcgcgcgcgagagcccacgagcgaggccgcaggggagcccggcagccgcccgaaaacggggacggacccaggccagga

SEQ ID NO: 34116 - RNA, 81 nt, Homo sapiens
cagcagaaaacacggaaggagcccacagcaccagagaaaaaaaaagaaggcaaaagagccccccaccagcaagccagaaca

SEQ ID NO: 34117 - RNA, 75 nt, Homo sapiens
gacggggcgagaccccgcccggaccgcaggaccaaagggaggggaaacaagaaccagacaggcacaggcgagggg

SEQ ID NO: 34118 - RNA, 75 nt, Homo sapiens
acacgcaccaggcccggcagcagcggcccgccgccgcccgcccgcgcgcagcccccagcgaaaagcggcaagaac

SEQ ID NO: 34119 - RNA, 74 nt, Homo sapiens
ggcacagacgggagccccaggcccaggggggccagacacaccagcagcagaaggcaagcggccgaaaacaggac

SEQ ID NO: 34120 - RNA, 74 nt, Homo sapiens
agcgggaaagaagagcgggaagggacaaaacagaggcaacaaggaagggaaaaggccgaggcacagcgggaaga

SEQ ID NO: 34121 - RNA, 34 nt, Homo sapiens
agaaggcagaggaacacaacagagcgccaccaag

SEQ ID NO: 34122 - RNA, 79 nt, Homo sapiens
ccggggacaagaaacagagcaaaaaccggaaaggcccggccaggccccaccgccacaagcaggggaacaccgccaaccc

SEQ ID NO: 34123 - RNA, 86 nt, Homo sapiens
ccgagaaggaggccagcagggccaaaacagaagaggcaaagcccagccacagcagcagcccagcagcaaacaaccaaagagaaggg

SEQ ID NO: 34124 - RNA, 75 nt, Homo sapiens
caccgccaaacagaacacgcaagcacagcgacacacaggaaaggagcaagaagaaaagaagagcgaagaggccga

SEQ ID NO: 34125 - RNA, 75 nt, Homo sapiens
gcgccccgggaggagccaccagcgagaacaccgagcaaagccaccaacaagcgacagcaagcgagcaaaccaaca

SEQ ID NO: 34126 - RNA, 72 nt, Homo sapiens
ggaaggccaagaaaacaggaacgaggagaaaagagccggaagcaaaccccaggaccaaagcaaacacggacg

SEQ ID NO: 34127 - RNA, 73 nt, Homo sapiens
caagcacaaagccacagcgaccaagcacgcacccggcaaagaacgcagccaaccgaaagccacggcaaccaga

SEQ ID NO: 34128 - RNA, 73 nt, Homo sapiens
ggcgagcggccaaggagccgaaaagaggaaggggcaggccacacgggcaggcccaaccgggccgcggcagacg

SEQ ID NO: 34129 - RNA, 52 nt, Homo sapiens
ggagcacaagagaccacagacacagccagcccgcagcgggcccaggcggagg

SEQ ID NO: 34130 - RNA, 74 nt, Homo sapiens
aaaagacagcccgcagcacgaccagcaggaacgggacaggcccagggagggcacgacagcagagaggaaggcgg

SEQ ID NO: 34131 - RNA, 77 nt, Homo sapiens
acagcgagccccacgggaccaagacacccgcgagagagccaagggaagcccggaagcaggagccagacagcagcgca

SEQ ID NO: 34132 - RNA, 76 nt, Homo sapiens
ccaacccaggacccccccacagaaagccagaaggaggaaggaccgagcgcaggaaccaggccagcgcccagcaagc

SEQ ID NO: 34133 - RNA, 82 nt, Homo sapiens
gcgaggggaggaggcaaacaaggaacgaacaacccacagagccaacgccggcggaccccagcgacacagcagaaccagcagc

SEQ ID NO: 34134 - RNA, 63 nt, Homo sapiens
gcgcggaaccggcgccccgccccgcccacccggaggggcggagaacggaaaagcaccaggaag

SEQ ID NO: 34135 - RNA, 102 nt, Homo sapiens
cgcccccgagaccccgcggaacgcccaccgcggagagcagcacgaccccagcacaggcggaaggaggagagagaggaaacgcccgccaacgcccagacccgg

SEQ ID NO: 34136 - RNA, 77 nt, Homo sapiens
cgaaagccaacggcgaggacgcccaaccaggggcccgggcagagggaaagcagaggacggaacaacccgggggaccg

SEQ ID NO: 34137 - RNA, 76 nt, Homo sapiens
caaaaagcaccccggcgaagaagggaagacccaagaaacagaagggaaaccacccccgccacacacaaccgggacc

SEQ ID NO: 34138 - RNA, 56 nt, Homo sapiens
caaagaagcgagcggcgagagacgacacaaagggaagagccacaaagggaaccagg

SEQ ID NO: 34139 - RNA, 73 nt, Homo sapiens
gagaaaggccaacgagaacaagcacagccaaaaggagcccggaaagcaagcaggcccccacacacagacacaa

SEQ ID NO: 34140 - RNA, 70 nt, Homo sapiens
aaaagaagaggaggaaaaaaagaagaacggccacaggaagaccgaggagcagggagcaaccacaaggaaa

SEQ ID NO: 34141 - RNA, 75 nt, Homo sapiens
aaagaagaagaaaacaaagggaccagagcgccagcaaacgccacggccggacacaagagggcaagaaaggcgcga

SEQ ID NO: 34142 - RNA, 62 nt, Homo sapiens
cggcccagcgcaggcagcccggcgaggagaaagcgcagaggaggaggcaccaagaccaagcc

SEQ ID NO: 34143 - RNA, 77 nt, Homo sapiens
accagggaccacaagcaagcgaaggaggccagaagaccagaagcgacacggaaaggcagccacagcagaggaaagag

SEQ ID NO: 34144 - RNA, 75 nt, Homo sapiens
gccacaaacaccacccgagaacggagagcgaccacaaggagaacagaaggcacaagacgcccgaagagcagagca

SEQ ID NO: 34145 - RNA, 77 nt, Homo sapiens
cgaggggccccaagagcacagaccagcagccgccaaagccaaaagcggaacaaacgaacggaagaggcagacgcgac

SEQ ID NO: 34146 - RNA, 75 nt, Homo sapiens
ggagaagaaaacgaaacggggaaagcaacaaccaaaggccagggcacaaaaaagaaagggcaccgaagagggaac

SEQ ID NO: 34147 - RNA, 57 nt, Homo sapiens
gcaccccccggcagggaagaggccaagcacgggccccaccagcgccagggacaaggg

SEQ ID NO: 34148 - RNA, 51 nt, Homo sapiens
cacgccggaaagaagggcagaaaccagggagagcccaaaaccaaacgacgc

SEQ ID NO: 34149 - RNA, 52 nt, Homo sapiens
cccccggggggcagcaaagagacccgagcccccacgaggacaccgcagaaac

SEQ ID NO: 34150 - RNA, 90 nt, Homo sapiens
cggagacacgaaggggaggggggagaccagagacgaccagcaacagggacgcaaagagagcaggagaaggacagaccagcagcccacgga

SEQ ID NO: 34151 - RNA, 73 nt, Homo sapiens
aaccagaagacgaacaaacagcaagaaagaccacaagaccagaccgagagaaacaggccagaggaggaaaggc

SEQ ID NO: 34152 - RNA, 78 nt, Homo sapiens
aagaaaagcacaagagaaagaaggaagcggcgccgaaaaaaagccaaggagaccgggagagagacgaaggacgcgcag

SEQ ID NO: 34153 - RNA, 77 nt, Homo sapiens
agcccaagaaacaccaccaacaaacgggggacagccaaagagacggccggcagcgcacggcaccggacaaagacccg

SEQ ID NO: 34154 - RNA, 71 nt, Homo sapiens
agagacgcaagacgaacaggaacagagaagcacacccgcgcacggaacacaccagaccagccccaccaaag

SEQ ID NO: 34155 - RNA, 74 nt, Homo sapiens
gcgacgcacgccagagacaccaagggcgacgcaaaggaagaagcagagcgaggccgggggccgcgacagagcgg

SEQ ID NO: 34156 - RNA, 76 nt, Homo sapiens
aaaaagcaaagggaccaggggaaacccaaaggacaggaaacaaaagaaaaggaaacaggaaggcggagaccccgga

SEQ ID NO: 34157 - RNA, 85 nt, Homo sapiens
caacagcgaggagaacagcaacgaagcccggccacccccagccccgcccccacaggaaccggagaggacacagcagaagagaaca

SEQ ID NO: 34158 - RNA, 77 nt, Homo sapiens
gacaccacacagcgcagcgggaccacgccggagccgaggacacccgcgcacagagcgagaagaaccagagcaacggg

SEQ ID NO: 34159 - RNA, 63 nt, Homo sapiens
cgaggacccggaaaccagagcaagaccaagagcagcacacagaacccagcccacccccaaccc

SEQ ID NO: 34160 - RNA, 85 nt, Homo sapiens
cgccgccgccccgccagcgccagacggacgaggcggcggagaacaagcggcagaagcaaaccgggcaaacaccaaaaagagaagc

SEQ ID NO: 34161 - RNA, 88 nt, Homo sapiens
ggcgggcgggcaggagggcggcggcggcggcgcggcgaagaaggggacgccgacaagggggagccggcgggccggaccccggccccca

SEQ ID NO: 34162 - RNA, 70 nt, Homo sapiens
cgagagccgcccgggccagcggccgcgcacccccggccggaggcaccagcgcccggcagcgccgcgacgc

SEQ ID NO: 34163 - RNA, 82 nt, Homo sapiens
cacggggcgccgcaagaccgggcagacggcccaacgaggcgagggcgccccaggagacgcaggaacgggagcaaggagggcg

SEQ ID NO: 34164 - RNA, 79 nt, Homo sapiens
ccaccacaaacgcgcaggagaaggcaggaaaccgacgagaggacccagcccaagaaagagcacgaggcgagcggggaga

SEQ ID NO: 34165 - RNA, 57 nt, Homo sapiens
ggcgcagccgcgaagccgagggcccgggggagcaagagaaacggacaaccgagcgga

SEQ ID NO: 34166 - RNA, 79 nt, Homo sapiens
caagaagaccacagagggacccggacaaccagaggcagccagcagggggagccggccacacacggcacaagggaagaga

SEQ ID NO: 34167 - RNA, 82 nt, Homo sapiens
ggggagcagaagcagggcagacaagacccggagggcgagccggcaccagggcccaggaacagagacgccaagcccgggcccg

SEQ ID NO: 34168 - RNA, 65 nt, Homo sapiens
ggcgagaccacccaaaggggggaaaagaacagaagaaggagcgaaaaggaaaaggcccgaagaac

SEQ ID NO: 34169 - RNA, 87 nt, Homo sapiens
gaccggccaccgcaaccccgcccccaggcagaagaagagcaacaagagaaaggcggcggcaaacccaaagacaaagaaggaaaagag

SEQ ID NO: 34170 - RNA, 71 nt, Homo sapiens
ggggcagccgcagaggcgcggcaacaccaagacacggccacggcaagaggcacaacgaggccgaagcgcgc

SEQ ID NO: 34171 - RNA, 66 nt, Homo sapiens
ccccgaagacgcaggagccgccgggagccagccccaaggggcccgccccaccgggggccaccccag

SEQ ID NO: 34172 - RNA, 74 nt, Homo sapiens
gaaaggggagcgaagaggaccggacccgccaggcccgagccaagaagaggaaaagaggcggaccacacggggag

SEQ ID NO: 34173 - RNA, 39 nt, Homo sapiens
ccggaggggagacgggaggcagacaggaaagagagacaa

SEQ ID NO: 34174 - RNA, 81 nt, Homo sapiens
accgccgcagagggagaaagaacaaggccaaggaagcgcgagcccaggacagaaaaacacacagagaaagaagaaaagagg

SEQ ID NO: 34175 - RNA, 69 nt, Homo sapiens
gaagcaaaaccgagaggccaggaagacggcggccagcaaaacgggcgaagagcacgaaagaaccccagg

SEQ ID NO: 34176 - RNA, 76 nt, Homo sapiens
gcggccgagacaaaggcaccaggccaccacagaaacaaaagcaacaaagagggaaaaaggggggagacacaccgac

SEQ ID NO: 34177 - RNA, 71 nt, Homo sapiens
cacagagcaacacaccaacccgggacaaaagggcacgcccggacaacaccccagaggacaagacacgacca

SEQ ID NO: 34178 - RNA, 80 nt, Homo sapiens
caccgggacggaccgagaccggaccgagagcggaccgagagcgcgaaacgcacgagaaggagcagaaggcacaacaggcg

SEQ ID NO: 34179 - RNA, 100 nt, Homo sapiens
gggccacggaaagcagccccgcaggagaagcgaaaagaaacccaagaagcgggacacggcccagaaaaccacggaggaacagagggaaagcgaggcccac

SEQ ID NO: 34180 - RNA, 73 nt, Homo sapiens
agaggggaaaccccgaaaggggggcagggagagaaggaacacagcagcccaacacagacaggaacccaagggc

SEQ ID NO: 34181 - RNA, 82 nt, Homo sapiens
caccgaccaaaaagagcgagacaggaaaaccaccgcgacgaaacggagacaaggagaaggccaggacacgggggagccggag

SEQ ID NO: 34182 - RNA, 81 nt, Homo sapiens
cccaaaacccggaagagcgccccaggagaaacaaaccaacgcgcgagcgggaagacaacggacggaacacagagggaggac

SEQ ID NO: 34183 - RNA, 64 nt, Homo sapiens
gaaggaccaagaaccaggaagacgggaagccaagcaggacaaccacaaaagcagcaaacagaag

SEQ ID NO: 34184 - RNA, 83 nt, Homo sapiens
ccgcaaggcgggggaggcggcggcccagccacgagagggaaggagagaaggagagagacccagcccaccaaaggaagcagcaa

SEQ ID NO: 34185 - RNA, 62 nt, Homo sapiens
aagcaggacccgggaggaccaggagcgccccaaggccacccggagaaaggccacggccccag

SEQ ID NO: 34186 - RNA, 53 nt, Homo sapiens
acaggggggaacgcaaaaaaggacaaccggcgaaacaccacaggggcaagaag

SEQ ID NO: 34187 - RNA, 61 nt, Homo sapiens
aaaaggaggagaaaaagggcccgacacaagaaagagcggccgcgagaaccgggcagagcag

SEQ ID NO: 34188 - RNA, 75 nt, Homo sapiens
aggcaacagccggagacaggaaaaaaaagcccaacaccaaagacacacaaggcaaccaggaggggccaaagaccg

SEQ ID NO: 34189 - RNA, 78 nt, Homo sapiens
cagaggagcggaggaggcagaagccaggccgcagcggcacccaggaccccacacaacgccccgcagcccgccccacgc

SEQ ID NO: 34190 - RNA, 64 nt, Homo sapiens
gccggaccacagcaacacaccgcgcggcacgaagacccgaagaaacacacgggcaggcggaaag

SEQ ID NO: 34191 - RNA, 85 nt, Homo sapiens
gggagagaagaagccagagcagagcaccgaaagggccacaccagcagaagagcccaacaacaaacgggaggaaaaagcggccaac

SEQ ID NO: 34192 - RNA, 75 nt, Homo sapiens
ggagaagcacgcgcccgcggagacacacccgcagcggcgaccgcgcgacgcaaaagaaggacaaggagaacacca

SEQ ID NO: 34193 - RNA, 73 nt, Homo sapiens
aaggcaggacaaaaagaaaaaagagaccggacaaggacgaccaacaggaacagagggacggacagaccacggg

SEQ ID NO: 34194 - RNA, 52 nt, Homo sapiens
ggggcaggaggagaaggcaaagagccagcccgacgggaacggagccccccgc

SEQ ID NO: 34195 - RNA, 83 nt, Homo sapiens
acccccgacagcgccaggcccagacgccaacgcaggagcacccagggccacaaagcccagacaagcgcagaagcaacagaacc

SEQ ID NO: 34196 - RNA, 72 nt, Homo sapiens
gcagacgccagcgcccgaccgacgacaacacacgggacgcggccaagaacagagacaaaggacccagaagga

SEQ ID NO: 34197 - RNA, 68 nt, Homo sapiens
ccaaggaaaccccgaaagggggaccccgacggagagacaaagaagacggagggggggccagccaccgc

SEQ ID NO: 34198 - RNA, 83 nt, Homo sapiens
aaaccccaagcaagcagggacaccaagaaggaagggcacccagagacgcggcaacccacgccgcccagcaccgggcaagcccc

SEQ ID NO: 34199 - RNA, 83 nt, Homo sapiens
aacgcagaccgaggcgaagcgcgcagcgccggcaacacacgcgcgcacggaccgacgcccgcgggacgcacacgcgcgccgga

SEQ ID NO: 34200 - RNA, 85 nt, Homo sapiens
cggagcccaccaagcgggaaggacaagccggcaaaccgagccccaccaagggaacaaggagaaccacaggacacagaagagaaac

SEQ ID NO: 34201 - RNA, 79 nt, Homo sapiens
agccggcaagggcgcgccaccgcaaaggcccgcgcaccgccagggaagaaacggaggcagagaagaagcggaggcaagc

SEQ ID NO: 34202 - RNA, 69 nt, Homo sapiens
aagaacagaaaccaagccaacaaaagaagcgccgcaggggacgggggccacgcgaaggggccaaggaca

SEQ ID NO: 34203 - RNA, 61 nt, Homo sapiens
agaggagccccggggaacccgcagcacaccagggggcaggcccgcaacgagaggccagcga

SEQ ID NO: 34204 - RNA, 78 nt, Homo sapiens
ggacccgccaaagacgccgcggccgcgacccagccagccagcaaccggaccggcaaaagcagaccggaaaacccaccg

SEQ ID NO: 34205 - RNA, 71 nt, Homo sapiens
cacagggaagcaagccaaccaccagaagcgaagggggaagagcgaacagagaaacaggaaagaggagacca

SEQ ID NO: 34206 - RNA, 60 nt, Homo sapiens
cggagagagaaagaagacggggggagaccagaaagaacacaccggagacggagccggagc

SEQ ID NO: 34207 - RNA, 76 nt, Homo sapiens
agcggggagacggcgaaggaggacacccacagcgaccgacgaacccgggcccgagcagagggcagccgcccggcca

SEQ ID NO: 34208 - RNA, 75 nt, Homo sapiens
gaggaaggggaaacgggcggagccagcagcgcggccgccggagccgccgcgcgcgacggccgggccggccgcgcg

SEQ ID NO: 34209 - RNA, 60 nt, Homo sapiens
caagaaagaccgcaaggggaagggacccaccgaccagcagcgcgaagccggcaaacagcg

SEQ ID NO: 34210 - RNA, 74 nt, Homo sapiens
gagggccggggaacaggcccgcaccgcaggcccagaggacagagcaggcagaaagcaacagaagcagaagaaag

SEQ ID NO: 34211 - RNA, 65 nt, Homo sapiens
ggccaggcccagggcaggcgacccgagggccgagggggaaccgcagagacggcccgccacgggcc

SEQ ID NO: 34212 - RNA, 35 nt, Homo sapiens
gacagaagggacagaccgccccaggagaaagccag

SEQ ID NO: 34213 - RNA, 65 nt, Homo sapiens
cagcagccgaagcaccagaccaacacagcagacacaggccggagaccagcaccccccagcgccgg

SEQ ID NO: 34214 - RNA, 72 nt, Homo sapiens
gccacaagagagccagagcaacgcacaagaacgaaaccggaaccagacagaaggggaggacacaaccccaga

SEQ ID NO: 34215 - RNA, 80 nt, Homo sapiens
gacggggccggcccccgggaccccggccgcggagcgacgccgacgggaacaggccaagacaaccccagagagggggggca

SEQ ID NO: 34216 - RNA, 78 nt, Homo sapiens
cagcgcggagcgaaccacggggacgacaccgaccaaggaaagggcccaccggaggcaacaggaggcaccaagcggggc

SEQ ID NO: 34217 - RNA, 73 nt, Homo sapiens
caacggaggacagccagaacccgccccacacaccggaagccccccacaagggagacaaaagcacaagaggaca

SEQ ID NO: 34218 - RNA, 86 nt, Homo sapiens
cggggcgccggcccaggcgaccgggccggggagccggcaggacccgaagacgaggcagaacaaccgggagggcggagcaggggagc

SEQ ID NO: 34219 - RNA, 78 nt, Homo sapiens
caccaaacgcagccacgcgcggagaccaggccagcacgacaaaggaaccaagggaggaacgaggcaacaccggcaaaa

SEQ ID NO: 34220 - RNA, 77 nt, Homo sapiens
gcgagggcggacagcggggcccgcggaaaacaggacagggccaaagcggcaggagaaggaagggaccggaaacgaca

SEQ ID NO: 34221 - RNA, 81 nt, Homo sapiens
ggaaaaaggcaaacgcaaagggagcagacgccccgccagaccgaagccaccccaccccaccagacgacaccagagagaacc

SEQ ID NO: 34222 - RNA, 75 nt, Homo sapiens
ccaccagcaggagcacacaggccgcgagcccacacaagacccggggccggaagcggcgcagcgcgggagggcacg

SEQ ID NO: 34223 - RNA, 60 nt, Homo sapiens
cagcgggaaggcagacagcgagggcgacgacccggggcggagggagaggaaacgaagggg

SEQ ID NO: 34224 - RNA, 76 nt, Homo sapiens
agcgcccgaccacaccaagcggaaaaaagacaccagcgacaaggacagggacaaacagcaggggccaagaaagaag

SEQ ID NO: 34225 - RNA, 84 nt, Homo sapiens
gcgacccccaccacccagccccgagagcggaaccacaagcaccagcacgccggcaaaaggccggggcagaaagaaaaaagaggg

SEQ ID NO: 34226 - RNA, 75 nt, Homo sapiens
caggccccaacaaaagccgaagaacaagagggcaaaagcaaacaacggaacgaagaaagacgcggcgaggaagag

SEQ ID NO: 34227 - RNA, 69 nt, Homo sapiens
gaacaaccgagacacaagaggcaaaacagaaggagaacccccagcccaggccagccacagaccagccgg

SEQ ID NO: 34228 - RNA, 84 nt, Homo sapiens
gggcgccccccgccagaagccgaggaaagcggaagcggccggcaggggaaggacgaggacccccgcagagagagcagcgggaaa

SEQ ID NO: 34229 - RNA, 86 nt, Homo sapiens
aagacaagagagacacagaaggccaaggggcaggacagaaggaggagcagcccccggagcagacaacaggcacaaagagagaagga

SEQ ID NO: 34230 - RNA, 73 nt, Homo sapiens
gccagaccgccagccggaggagcagaggaccacgagcgaccggaagccgcgggggacacccggccgccccaag

SEQ ID NO: 34231 - RNA, 52 nt, Homo sapiens
aagccagagaaaaagcggagaaaaggcacgcaccagcaaaacaaggaaaaaa

SEQ ID NO: 34232 - RNA, 60 nt, Homo sapiens
gaaacaaggcaacagaaagagcaacagcagggcaacagacaagcagaccggaagaccgac

SEQ ID NO: 34233 - RNA, 94 nt, Homo sapiens
cgccgcccgcaccgccgcccgcgccccaccagcaacagcgccggccaccggaggacaagcgagacgcggcgcaggcacgggacgaggcgcaggg

SEQ ID NO: 34234 - RNA, 80 nt, Homo sapiens
cccaccaggccaccacgcggcgggccgggacagagcgggagccaccagcgccaaagggaagccaggagcccgggggcacg

SEQ ID NO: 34235 - RNA, 77 nt, Homo sapiens
cgcgacgccaaccacgacgaagcggaaggcagaaggaaaacacgaaggagagaagagaagccggaaaggccgccaag

SEQ ID NO: 34236 - RNA, 80 nt, Homo sapiens
gagaggccggggaaagccggcacgacaagaacgccccgagaaaaggagcgaccccccaagcccgaggaaaaaacaaaaag

SEQ ID NO: 34237 - RNA, 72 nt, Homo sapiens
aaccaccggggccaggccaccggaccaggaccggggacccccaagcagaagggcacggcagaacgacgagac

SEQ ID NO: 34238 - RNA, 61 nt, Homo sapiens
gacgccggaacacccggaagccgagaaaggggccagggaggaacacgcacccggagccggc

SEQ ID NO: 34239 - RNA, 53 nt, Homo sapiens
aaggcggggaagggccaacccaacagcacagaggcgggaagcagggaacgccc

SEQ ID NO: 34240 - RNA, 57 nt, Homo sapiens
caacagaacggacccgccaggaaccagaacgggacacgccgcagggcgaggcccacg

SEQ ID NO: 34241 - RNA, 84 nt, Homo sapiens
aagggaaggccagcagcgcgcggagaagaacggggagccagggccggcggcagagaccacgcccagcaggagcggcgcaggcca

SEQ ID NO: 34242 - RNA, 55 nt, Homo sapiens
accggaaggagaaagcacgacccaaggagaaacacacccgggacggaggcccagg

SEQ ID NO: 34243 - RNA, 51 nt, Homo sapiens
agacccccgacgggacgcaggagacagacgacgagaaaacgaaggcaaagc

SEQ ID NO: 34244 - RNA, 79 nt, Homo sapiens
gcggccagccagcggcagacagaacgggaccggcagacacaggcagcgcgacaagcggcgaaaacaccgccggaggaaa

SEQ ID NO: 34245 - RNA, 36 nt, Homo sapiens
accaagaaccaggaggaaggcgaaacccgcagcacc

SEQ ID NO: 34246 - RNA, 75 nt, Homo sapiens
agaaccgggcccagcagcacgggggaccgacagcaagaaaaggagaaaacaaggccgcgggcacacagcaaccag

SEQ ID NO: 34247 - RNA, 79 nt, Homo sapiens
gccacgaccgggagaccgccccgagccccggccccaaagacccaaaacagagacaccccccagcccccgcgccccgaaa

SEQ ID NO: 34248 - RNA, 82 nt, Homo sapiens
agccggacaagcccgcgggccggcgggaaccagggccgaaaacccagaagaacggccacccagagacacgcagagcagagga

SEQ ID NO: 34249 - RNA, 58 nt, Homo sapiens
gcaaggaggccccagcggaccgaacagcgggaagagggcagcagaagacaggccggaa

SEQ ID NO: 34250 - RNA, 51 nt, Homo sapiens
ggagacccccggaaaaccccccccggcacaggaagagggcggcacgcggcc

SEQ ID NO: 34251 - RNA, 74 nt, Homo sapiens
ggaccacgacacccacggacgccacaggggcaagcgccagaggacccggcgccgacgcaaggaacgagccagca

SEQ ID NO: 34252 - RNA, 56 nt, Homo sapiens
ccgaccgcaacagaacggacccgaccacacgaaggggcagaagagcacaagacgga

SEQ ID NO: 34253 - RNA, 79 nt, Homo sapiens
gggccagcacccggccgagacggcggcagcagcggcacagaacagaggcaggaaaggccggcccagcaaaaggaccaga

SEQ ID NO: 34254 - RNA, 79 nt, Homo sapiens
agaggaagacaccgggaccaccagaggagaaggagaaacggaggacgcccccacacaagccaacacgggcgccggagag

SEQ ID NO: 34255 - RNA, 80 nt, Homo sapiens
aggagaaagggcggaaccgggacacggaacgaggaagagaggaggaagagagaaggacaaaggaaaacgaagcccaacca

SEQ ID NO: 34256 - RNA, 75 nt, Homo sapiens
ccagaagaaggaccggaagcacacaacaggaaaacaaaagaggagaaagagggcccagaccgaagccaaccccgc

SEQ ID NO: 34257 - RNA, 66 nt, Homo sapiens
ccggagagacagcacagcacccacaaagcaacggccagggcagccgggagggaccacccagaccgg

SEQ ID NO: 34258 - RNA, 73 nt, Homo sapiens
aacccgccccgaggggaaggccagaccaggagaacgggacacgaaggaaagggagccgccaccaaaagcagac

SEQ ID NO: 34259 - RNA, 81 nt, Homo sapiens
aagggcacgccgcccagccgccgccgccgccgcgccgcagcgccaccgggcggagaacggaaaagcaccaggaagcagaga

SEQ ID NO: 34260 - RNA, 57 nt, Homo sapiens
cgcagggcgcccccggcgggaggggcgaacggggaagacaggccgaggagcggggag

SEQ ID NO: 34261 - RNA, 86 nt, Homo sapiens
gaaccaggggccccacggggaaaaagacccaccccacccgcgacaacccagccccgaaagcacaggaacccacgaagaaggagaag

SEQ ID NO: 34262 - RNA, 63 nt, Homo sapiens
cacaagaccaacccgccaaaagagaaaggacagggacaggaaagaaagaaaaagaaaagaaaa

SEQ ID NO: 34263 - RNA, 72 nt, Homo sapiens
ggaagcggggaggaggccccccggaaggagaccccggcaacagggaacaggcagcaaaggggaaggccggaa

SEQ ID NO: 34264 - RNA, 77 nt, Homo sapiens
gccggacgagacggggggcagggagaaacaacagaaggagcaaagcagagaagagcggacaggagaacaccagacgg

SEQ ID NO: 34265 - RNA, 37 nt, Homo sapiens
ccgccgacgcacgagaagaagaagaagcagagagcca

SEQ ID NO: 34266 - RNA, 79 nt, Homo sapiens
ccccccccggcccggaaagcccgccacagcggcccggccccccggacagacgccgacgcccagcacccaccccgaagaa

SEQ ID NO: 34267 - RNA, 79 nt, Homo sapiens
ccaggccagcgccccaggccaagagggacccacccggcggacacgaaaacagcaacagaacaggaaacacaggaaaaga

SEQ ID NO: 34268 - RNA, 85 nt, Homo sapiens
ccagcggcagaggggcggagcggcgacagaccccaaaacacgagacgcgcagaacgcggaccgaggccaaaagaaaggaagaaaa

SEQ ID NO: 34269 - RNA, 84 nt, Homo sapiens
cgaggaccagcagaggccagcacgagaacccagcgcgccccagaccaccggcagggaacagccgagcagaccgaggaggcccac

SEQ ID NO: 34270 - RNA, 54 nt, Homo sapiens
caaaaggaaagccgaaaaagaaccaaaacccaacagcgagacgacgggaccgaa

SEQ ID NO: 34271 - RNA, 58 nt, Homo sapiens
acccccgagcccagcaccgcgggaaggagagaccgcacgcagggccacagcagcacga

SEQ ID NO: 34272 - RNA, 83 nt, Homo sapiens
aaaccaaaaagaggcaccagaagagaggcgacacaggggcaccagagaaggagaagcaggcgaacaaggaagaggaaggggaa

SEQ ID NO: 34273 - RNA, 67 nt, Homo sapiens
aaggagaagagcgggaccccaaccccccacaaagaagggacagcggaacgcagggcgcaccaccaga

SEQ ID NO: 34274 - RNA, 67 nt, Homo sapiens
ccaaagagacagagaacccccaagcccagaaaagaaggaggagagaaagaacccacgcaggacgaca

SEQ ID NO: 34275 - RNA, 60 nt, Homo sapiens
cggcccggcccgccgcgcccggaggagccgccccacaagccacgggaacacgagcacaac

SEQ ID NO: 34276 - RNA, 73 nt, Homo sapiens
cccagaggcagggggcgacccgaacccaaaggaggaaacagcggcaagccacagacggaccgaagcggcgggc

SEQ ID NO: 34277 - RNA, 80 nt, Homo sapiens
cgaacaccgagacacggcaagcgggaaacaaagacccgcggaggaagaccagaagcacccagagccgacggcggaccgcg

SEQ ID NO: 34278 - RNA, 84 nt, Homo sapiens
aaggccaagaccaggaaaggaagaagccggcaggaggacccggcaggaggacccacccagcacacggcccacgaagggcaccaa

SEQ ID NO: 34279 - RNA, 73 nt, Homo sapiens
cgcaggacccaggccagaccggagcagcggggacaggaaacgagaagaacgaaagagaaacccaaaaaaagga

SEQ ID NO: 34280 - RNA, 77 nt, Homo sapiens
accgaaagacgggccagagacgacaacccgggccccgaggacaccgccgcccagccacaggaccgacaccgaaaaag

SEQ ID NO: 34281 - RNA, 55 nt, Homo sapiens
cgggacggaggccagagagagacgacagggcaggccggggagcccgcggacagag

SEQ ID NO: 34282 - RNA, 73 nt, Homo sapiens
aggagaaagcaccaacagcagcggcagccaagggcacagaacacccccagcccaacaaggcaaacccagaaga

SEQ ID NO: 34283 - RNA, 68 nt, Homo sapiens
aggggacagacagaggcagacaacccccaccccacaccgcacagaaaagccgcccaggcccagcacca

SEQ ID NO: 34284 - RNA, 77 nt, Homo sapiens
agccacaaggagacgccgccgcgcccccgcgacggcaagacgaggcaaaaagacacagaacaagagcgccaacagaa

SEQ ID NO: 34285 - RNA, 85 nt, Homo sapiens
caagccgggccgcccgcggcgagccggcccaggagcagcagggaggcgggaacgcccagggagcccccgcccccaggagaaggca

SEQ ID NO: 34286 - RNA, 81 nt, Homo sapiens
gcgagcggggggacgccggcggagacgcgggcgagggggcacccgaggaggaagagggcagggcccacggaaagaagggaa

SEQ ID NO: 34287 - RNA, 73 nt, Homo sapiens
gccgcaggcggcagcaggacaacgagccacggaggcggagagaggaacagagacagacccgggggcccccaag

SEQ ID NO: 34288 - RNA, 71 nt, Homo sapiens
gcgcgcaggcacccgccccaggaggacaagcgccggcacgcgaccgaacgcaaagggaacgcaagaagaga

SEQ ID NO: 34289 - RNA, 62 nt, Homo sapiens
accaccggaacggacagcccccccaggggagcccccgagcgcccgcgacgcagcacggaccc

SEQ ID NO: 34290 - RNA, 83 nt, Homo sapiens
gccgcgcgggcgcgcaccaaggcgcggccaacgacccacccagcaggagaacggacccggaggcccagcacaaaacacagaca

SEQ ID NO: 34291 - RNA, 70 nt, Homo sapiens
gccgccgccaggccacccgcagagggagcaagacagaccggcgcaggagaaaagggacagggccgcaagc

SEQ ID NO: 34292 - RNA, 67 nt, Homo sapiens
ggaagacgggacaggaaggaacggcccaggaccggaccgcagcagaaggggggcagcggagcacagg

SEQ ID NO: 34293 - RNA, 61 nt, Homo sapiens
ccacagcagccagccggcccgaggacaccgacaccagcagggcgcacgagggaaacccaga

SEQ ID NO: 34294 - RNA, 79 nt, Homo sapiens
cggcgaggacaacacaaaaacacggagcagggggccgagcaaaccgcccagccccggcggaacacgaggcgcaggacag

SEQ ID NO: 34295 - RNA, 81 nt, Homo sapiens
agacaggaagaaaagaagaagcgaccccgaaggaaacaaaggccagacagcaacagagaagagaaccccagaaacacaaaa

SEQ ID NO: 34296 - RNA, 33 nt, Homo sapiens
caggaaaaacaccgggagagagggagcacaaaa

SEQ ID NO: 34297 - RNA, 61 nt, Homo sapiens
gccgagccgccagagacggcaggcccggccaaagacgagagaaacgacaccaagaacgagc

SEQ ID NO: 34298 - RNA, 65 nt, Homo sapiens
gcaggcgcagacccacccgccagaagccccccgcagggacagggccgggcgccccaacccccaac

SEQ ID NO: 34299 - RNA, 75 nt, Homo sapiens
gcaggcacaaaaggcgcccacagccacgggaccggcgcaggaaccaacgcagagccccagaacaaaagaacacag

SEQ ID NO: 34300 - RNA, 77 nt, Homo sapiens
cggcaagcgagaaagccacggggggcccagagcaggcggcgcaacgagacaggcagggagaggcgccccgggggaag

SEQ ID NO: 34301 - RNA, 79 nt, Homo sapiens
aacccgaagaagaaaggacgacagccagagagggaaagggagcagcaccggccacacccacagcacgaccggaacccag

SEQ ID NO: 34302 - RNA, 59 nt, Homo sapiens
acgagggagaagcacaagacagcacagaggagaagacacccgggcgggaaaaaggagca

SEQ ID NO: 34303 - RNA, 57 nt, Homo sapiens
aagaggaagccaagacgacaggaaggaagaaaggcccgagccgggccaaacgacccc

SEQ ID NO: 34304 - RNA, 83 nt, Homo sapiens
ggccacggcagaccacccgccccgaacacggcgaggcccagacacggccgacgagagaaacggggaagagaacgaccccaaac

SEQ ID NO: 34305 - RNA, 79 nt, Homo sapiens
gcccgccgcccggccaaggcccgcggaacagcggaggacgaagagcgggacccgagcccggcggagggcggcggcccca

SEQ ID NO: 34306 - RNA, 77 nt, Homo sapiens
gaagcaccgagacccaagaaaggcggagcacagggcagaccggcaacgcaacccgccgcccccaggcaagcaacccg

SEQ ID NO: 34307 - RNA, 110 nt, Homo sapiens
cggcccaggcaccccggaccccaagaaaagaccgcacgacgcagacaagacggcgaagaagagcaaacagcccaggccccaggaagaagaggaggagggcgggacgacac

SEQ ID NO: 34308 - RNA, 80 nt, Homo sapiens
gccggaggagcccccaggccagaaagagagacgagcgcacagccgaaggagcagcggcagaacgcagcaaagagaagcaa

SEQ ID NO: 34309 - RNA, 75 nt, Homo sapiens
acgaagaggagggcagaggcacccaaagggagccccggggaggcccagagcggagacgccaccaccccccagagg

SEQ ID NO: 34310 - RNA, 52 nt, Homo sapiens
aagggagaaggaagcacggaacccgcagggcaagggggcccccaaagggaag

SEQ ID NO: 34311 - RNA, 70 nt, Homo sapiens
gcccacagggggagcacggaggcgaaacaggaaaaagaggcaaagcaaagaagagggaggaagggacacc

SEQ ID NO: 34312 - RNA, 70 nt, Homo sapiens
cggggacccccgacgccaggcagcgcccccaaacgggaaaaaaccaggcagccaaacgcgccagagaacc

SEQ ID NO: 34313 - RNA, 68 nt, Homo sapiens
cggaagcccgccccagcccagggagcagaaaaaagccccccgggccgggcacgggcgccagcggcacg

SEQ ID NO: 34314 - RNA, 74 nt, Homo sapiens
aagcggcagcgggagacaaagcccagaggacccagaggggcagcgaaggacaggagaaacaggggccaaaaaac

SEQ ID NO: 34315 - RNA, 56 nt, Homo sapiens
ggacccccgcgggcgacgcgagcccaggggacaacaggagaagcggaaggagacca

SEQ ID NO: 34316 - RNA, 79 nt, Homo sapiens
cagacggaacggacccgaacgcacagccgccgcagccaaccagggaccgcagccaaagcaccacgcacaccccaggggg

SEQ ID NO: 34317 - RNA, 71 nt, Homo sapiens
cggaacgcgcgcacccaccgggcccgcgggccgccccaccccacagcgagcgggaagaacaagaaccaccc

SEQ ID NO: 34318 - RNA, 75 nt, Homo sapiens
gaaaggaagggaaacacccagacccaaacacgaaggacaaaccggcgaccacacacggggacgacggggaagccg

SEQ ID NO: 34319 - RNA, 74 nt, Homo sapiens
gaagaagaaacacagcgcaggggaggcagcgagcaggacgaagcgagggaacacggagggaaacccacgccgca

SEQ ID NO: 34320 - RNA, 44 nt, Homo sapiens
ggaggagagcaagcgagcccgagggcagcagacgcaccaggacg

SEQ ID NO: 34321 - RNA, 85 nt, Homo sapiens
cgcggccacccagcgagaggagaggcgcccccggggacgagagaggccaccgcggcccacgagccgggggaccccgccagcagcg

SEQ ID NO: 34322 - RNA, 67 nt, Homo sapiens
cagcaggcagcagagccaagcccagaaacagcaccgagaggcacggcggcaaaggggacagggaccc

SEQ ID NO: 34323 - RNA, 85 nt, Homo sapiens
cgaggggccaaccagcgaagagcgacaagccgcggcagccgcggaccaccgccgccagggcgcggggaggcccagcccgccgcag

SEQ ID NO: 34324 - RNA, 78 nt, Homo sapiens
gccacgacagaggagcaaccagaggaaggacagaaagacagagcaaccacggcaggcaagcgaaagaaaaaaagacag

SEQ ID NO: 34325 - RNA, 59 nt, Homo sapiens
aaaaggcccacgccgggcgagaaagcacaccaaggaaaccgggaacggagccgccgaaa

SEQ ID NO: 34326 - RNA, 74 nt, Homo sapiens
gcgagggaccaggccagaaaccgcagccggacgggaagcaaaggccccccgcccccccacgcccaggaacccag

SEQ ID NO: 34327 - RNA, 84 nt, Homo sapiens
ggggaacggcccggaacgggacagcaggcagaaggggagccgagaaggacccagccgggaagggccagagaagacagaaggggc

SEQ ID NO: 34328 - RNA, 83 nt, Homo sapiens
agacgggagccgggagccggcagaccccgaggcccgccgcccgcgggcccacgaggccggggaggccgcggcagcacagacac

SEQ ID NO: 34329 - RNA, 62 nt, Homo sapiens
cagaaccagcggggaacagcccggccaccaaggccaacgagggacggacagcgcgacagggc

SEQ ID NO: 34330 - RNA, 37 nt, Homo sapiens
gcagagagccccaaggcgcagaggacgcgaaggccga

SEQ ID NO: 34331 - RNA, 88 nt, Homo sapiens
agggcggagagaaaacccgcgaggaaagggaaggagcaagccgggagaccgaggagcccaggaggaggaacccacagacccccagcga

SEQ ID NO: 34332 - RNA, 35 nt, Homo sapiens
gcacgaacaccgcccgccagaccacacgaaggggc

SEQ ID NO: 34333 - RNA, 81 nt, Homo sapiens
cgacggcccacccaaagaaccacgccaaaggaagcagcgcagcaaagagggagcacgcgcccacccccacagacacacccg

SEQ ID NO: 34334 - RNA, 68 nt, Homo sapiens
ggaagagagaccagaaaggacaggacggcggaaggagagaaccaggagaccgaagcaaccaacaagcg

SEQ ID NO: 34335 - RNA, 36 nt, Homo sapiens
acggagcgccaggacgggcggagaacggaaaagcac

SEQ ID NO: 34336 - RNA, 86 nt, Homo sapiens
cccagggcccgcgggccaggagagcgccggcggagcaagaacgaggccaaggaggagggacacagagacagcgaagaaagaacgcc

SEQ ID NO: 34337 - RNA, 85 nt, Homo sapiens
cgacccggcacccagggaccgccgggggcagagagcgcccccccgaggccgggcgcacccacagggcacggaacaccagcgagac

SEQ ID NO: 34338 - RNA, 41 nt, Homo sapiens
agaccagccgggcaacacaaggagccacgcacccaggcgga

SEQ ID NO: 34339 - RNA, 69 nt, Homo sapiens
ggcaaggaggcaccgcggcagacgggaccacgaggcaacgccccagcgggaacaacacacggcagggca

SEQ ID NO: 34340 - RNA, 58 nt, Homo sapiens
gaagaacgccgccaccagccaccaccaaggaaaccgggcgccaggccgcaccgcgcac

SEQ ID NO: 34341 - RNA, 75 nt, Homo sapiens
gacaggcggggggagcgcagcgaccacaggaacaggcgcgccgggggcccgggccagcggccgccgcaaggcccc

SEQ ID NO: 34342 - RNA, 59 nt, Homo sapiens
gcccggacccgcgcagcgagcccgagcggcagcgccggagacacggaaccagaggcagc

SEQ ID NO: 34343 - RNA, 104 nt, Homo sapiens
ggggaacgacccgaggggggagagcgcgggggcgacggccgagcagacagaaggagaccggagccgccccgccagaaagccaggggcaccaccacagaaggccc

SEQ ID NO: 34344 - RNA, 62 nt, Homo sapiens
gcgacaggccccggccaccagccaccgcagaggacagacaggacaacaaccgacagcccccc

SEQ ID NO: 34345 - RNA, 70 nt, Homo sapiens
gacccccgagcgcagccagaacggaggaggagccgcagccaaaaggcggaaacgacgcccaaaacgcaga

SEQ ID NO: 34346 - RNA, 82 nt, Homo sapiens
gcccggcggcggcgagccgcgcgcgcagccgacgcgggaagaagcgggcgcgggcaggacaggccccggaacaagaggagga

SEQ ID NO: 34347 - RNA, 69 nt, Homo sapiens
ccggaagagagagcagagaggagaaagagagaagcaacaggagccgcaagagcaaaaaagggaaagaac

SEQ ID NO: 34348 - RNA, 69 nt, Homo sapiens
gcccagacaccccccccgcccaggaggcaaggaggccacggggccgaagacaccaaccgggcaccagcc

SEQ ID NO: 34349 - RNA, 83 nt, Homo sapiens
ccgcgggaagaccgaggggcacaccgaccagccgcacgccgaccggcgccgggagaccggggaaagacaaggagccgggccga

SEQ ID NO: 34350 - RNA, 82 nt, Homo sapiens
aacagaggaacgaggaaacagaaagaacagggagaaggaagggaaaacgaagaaagaaaccggcagggaaaagaagagccac

SEQ ID NO: 34351 - RNA, 77 nt, Homo sapiens
cgcgaggagggggaagcccacggcggacgcaagggcaacaagaggaaacaacagcacgggacggcggaacaaaaccc

SEQ ID NO: 34352 - RNA, 71 nt, Homo sapiens
agaggcagcgccacccgcggacaaccccagcaggggaaaggaccacccagcaaaagagggagagaggcggg

SEQ ID NO: 34353 - RNA, 77 nt, Homo sapiens
ccagccgggcggaaggcgcgcaccacggagcgggcgcggcggcagcaccggaacaacagggggcagcacgccgaagg

SEQ ID NO: 34354 - RNA, 58 nt, Homo sapiens
ggggacgccaccggagaagggaggaaaaccaacaaggaaccccgacagcagagacgac

SEQ ID NO: 34355 - RNA, 61 nt, Homo sapiens
accgagacaccaaaaagcgagccaagccacacccgggaaacacacccaagcacggcgcgga

SEQ ID NO: 34356 - RNA, 58 nt, Homo sapiens
agccccgagagcggcacacaggaaaccagacaaaagaccaagaagagagaaccaacag

SEQ ID NO: 34357 - RNA, 70 nt, Homo sapiens
aagcccaggaacgcacgcgcaaggacgggcccaagacaaaaggagacgacacgagaaagcggacaggaac

SEQ ID NO: 34358 - RNA, 79 nt, Homo sapiens
caaacgccaaagcacaagagacagcagcgccaagggagcagacgaaagcggccaagagaagcagaggacagaacccaca

SEQ ID NO: 34359 - RNA, 79 nt, Homo sapiens
ccacgccgccacaggccaaggcagagcagccgagaagaagccaaaaaacacggaggagcaggagaacagcagagcagaa

SEQ ID NO: 34360 - RNA, 74 nt, Homo sapiens
aagccgacaaggggcggaggaagggaggagacccgaccccagaagggccggagcgagggagagcaggaacacag

SEQ ID NO: 34361 - RNA, 52 nt, Homo sapiens
gacacgggcgacacgaacaacaagcagaggaccaaaggaagacccgcggaag

SEQ ID NO: 34362 - RNA, 62 nt, Homo sapiens
aaaaaagaacagcaaccaagccagcgaagaaaccagccaccggacaaagaggccggaaaacc

SEQ ID NO: 34363 - RNA, 86 nt, Homo sapiens
gcgagcgaggggaggcaggcgcggcagacggcgacagggcggcggcgccaggcagggcgcaggccgaaaaggaaaaggagccaggg

SEQ ID NO: 34364 - RNA, 77 nt, Homo sapiens
ccgggccgcgcggcgccgcgccggcggccgccagcagccaaaagaagcaagggaaagaccaggagccagaaaccaac

SEQ ID NO: 34365 - RNA, 74 nt, Homo sapiens
aagaaccggcagcgaacaaggagaaagccacaacagggcggcaacaggggcgagaaaggccagggcgagggcac

SEQ ID NO: 34366 - RNA, 52 nt, Homo sapiens
cggccggaggaggacggccggcacgcgcccaaagcaagaccaaaaaaggcgg

SEQ ID NO: 34367 - RNA, 77 nt, Homo sapiens
acccgcacccggagggaaacgggcaagaggccccagcccggaaaaggagcgggcccaccaccacacccggaaccaac

SEQ ID NO: 34368 - RNA, 79 nt, Homo sapiens
cccagccggagaaggagcccacaacaaccacaggggagggagacgcggagcggggccaggaaggcccggacggagcagg

SEQ ID NO: 34369 - RNA, 77 nt, Homo sapiens
ggaccaagaaccaggaacaagccagccagcaccacccaacaccagccagaccggcagcaaccagcgacgaagaggaa

SEQ ID NO: 34370 - RNA, 71 nt, Homo sapiens
ggaccggcgcccggacaacccgacagagaggggcacagagggagccaacgggagcgaccaacgcggaacac

SEQ ID NO: 34371 - RNA, 77 nt, Homo sapiens
gaaagacgcgaggggacgaggaagacaggcagaacgaggaaaagagagccagccacaaagccaagcagaaccgcggg

SEQ ID NO: 34372 - RNA, 64 nt, Homo sapiens
gcagaggaacggaacagaggaacagaaaccccgcagggccccggaccccggcccaggagcgccc

SEQ ID NO: 34373 - RNA, 76 nt, Homo sapiens
ccgcggccggaccgagcgcccgacccggcgagaagcaaagccagggagggaaccgaagccacgggcgggggacgcg

SEQ ID NO: 34374 - RNA, 85 nt, Homo sapiens
ccaaggagccagacggaaggacgacagacaggcgaagcagcccggcccagcccacccaggaaccgacacggcaccagggggggag

SEQ ID NO: 34375 - RNA, 36 nt, Homo sapiens
gggacgacggaccgaaaagacacgggggaccgcggc

SEQ ID NO: 34376 - RNA, 72 nt, Homo sapiens
gacggcccccaagcaccgagaggcagcaaagacagaagcagacaagaagcacagggaggaaaccggagaagg

SEQ ID NO: 34377 - RNA, 76 nt, Homo sapiens
gcacaccaaaaaaaagagagagcacaggcaaccggagaaaccgcacacacagcacagcacgcgcaccacaacgcag

SEQ ID NO: 34378 - RNA, 66 nt, Homo sapiens
ccacaggggggggcaaacccgagagaacggaacagcgaaccaagccagggaagccagccacagaag

SEQ ID NO: 34379 - RNA, 78 nt, Homo sapiens
aaagggaccccgggagacacgacaggaaggcaaaagaagcaaaagcagcagaagccaaaggaaagagaggaaacacaa

SEQ ID NO: 34380 - RNA, 77 nt, Homo sapiens
gcacacccagaaaccacacgagcagaccccagaggacaaccaaagggaacaggcccaaagaacagcagccggaaaag

SEQ ID NO: 34381 - RNA, 42 nt, Homo sapiens
gaggacaaccgcccgggaccagcgggggagagcagcggcgcc

SEQ ID NO: 34382 - RNA, 80 nt, Homo sapiens
ccaccccaccgcgcagggagaaccaagccgccacagggagaaaagagcagaggccgaccccaggacacgacgggggcccc

SEQ ID NO: 34383 - RNA, 65 nt, Homo sapiens
cggaaacggaaccgggaggcgacgcacacgagcggaggcgaagaggcagcagcgccccgagcccc

SEQ ID NO: 34384 - RNA, 75 nt, Homo sapiens
agaaccgcaaagcaccccccgcggggaggcaaggggggaccagacaggcggcaaaaaacccgcagaggaaagagc

SEQ ID NO: 34385 - RNA, 91 nt, Homo sapiens
gaagacacaaacagaagacagcacagaaacccaggaggagccaagaaaggaccagagcccacgggaccaggcgcgccaagacggcgcagag

SEQ ID NO: 34386 - RNA, 72 nt, Homo sapiens
ccggggcacacagccaagacacaaggcagaagaagaagagcggagaaccgaacaggcgcagggagcccccac

SEQ ID NO: 34387 - RNA, 54 nt, Homo sapiens
gcaagacaacaagagaggagccaagcccaacgggacgggaaaacggccacagcc

SEQ ID NO: 34388 - RNA, 59 nt, Homo sapiens
ccaggggcaccagaaaccgacgaaagaggcggacgaacccaaggaggcaggaggaggcc

SEQ ID NO: 34389 - RNA, 41 nt, Homo sapiens
gccagccccaacgagcaaaaaaaccaccagaccccaacccc

SEQ ID NO: 34390 - RNA, 70 nt, Homo sapiens
agaaccgaacacacaaagagcgagcagcggcgcacacgcaagggagcgccggagccggggccgcgaaaaa

SEQ ID NO: 34391 - RNA, 75 nt, Homo sapiens
gagaggacaagaccacgagccagaaacaaacagggaccccgagccagcgaggagcgcaggcccccggaggagcgc

SEQ ID NO: 34392 - RNA, 76 nt, Homo sapiens
ggaaggccaaaagacacagggaaccaccaggagacacgaaacgaacggaggcaaggaggccacggggccgaagaca

SEQ ID NO: 34393 - RNA, 69 nt, Homo sapiens
acagagcgccgccaaggacgaaagaagacagagaagcaaagaagcaggaagaacacccacaagccagga

SEQ ID NO: 34394 - RNA, 76 nt, Homo sapiens
ggccgaaggggcgcgcggccccgccgccccagcccgccccccgggccgagccgaggaacagaaacaggagaagccc

SEQ ID NO: 34395 - RNA, 76 nt, Homo sapiens
cagacggacaacagcccaacaacacccagccggagcgaccaaagggaagcagcaggcacggccaccaagccgagca

SEQ ID NO: 34396 - RNA, 53 nt, Homo sapiens
gcacgagaacagagacaccggaagaagaagcggccgcgagaaggagcgccggg

SEQ ID NO: 34397 - RNA, 80 nt, Homo sapiens
gcgcgagccgcgcgcggcccgcgcgcccagacagcgaacaaacaggagcaggccgggcccgccagggcacgcgcccgcca

SEQ ID NO: 34398 - RNA, 74 nt, Homo sapiens
gagcgacccccacccagcccgagagcagacacgggcacggaggccccagcccaacccagcccaggaggaggagc

SEQ ID NO: 34399 - RNA, 61 nt, Homo sapiens
cggcccggccccccggacagacgccgacgcccagcaggcggacaccgaccgcaggaaggag

SEQ ID NO: 34400 - RNA, 81 nt, Homo sapiens
ccgcaccacccaccgcacaacgacccgggagggcagcaaccccgagggagcagggcgaagcgggccagcggccagggaggc

SEQ ID NO: 34401 - RNA, 58 nt, Homo sapiens
cccaggcacacacagaacaaaagcagggacccccaaaagacaagggcaaaacggacca

SEQ ID NO: 34402 - RNA, 70 nt, Homo sapiens
acgagccagaccgccaaaccagagaaagaaacacccgaacagcgagacaagcccccacgaggaaaacccc

SEQ ID NO: 34403 - RNA, 82 nt, Homo sapiens
aaaagccagccagaagaggcgcgcgcgcggcacaccgaaccggggagaccacgacgcgccccgggcgccagagccgcagccc

SEQ ID NO: 34404 - RNA, 81 nt, Homo sapiens
ccggcgccccgccgcccgcgagcacccagggccccgaggcagacggaacaaccacgaaaaaaagcagggggggaagccaaa

SEQ ID NO: 34405 - RNA, 87 nt, Homo sapiens
accagaggaacccacccccccaaggagaaggacccaaggaggccgcccgccccccaagaaaggccagccgaagaaaagcgaaaggga

SEQ ID NO: 34406 - RNA, 77 nt, Homo sapiens
gcccgagcgcgcccgagggcgagaaggcaagaaggaacagacaaaaacggccggaaggaaacacaggacaccaggga

SEQ ID NO: 34407 - RNA, 74 nt, Homo sapiens
gggcggggccccgagcagggggggggggaagccgcagcggaaagcaggagcacagaacacacgaaggccagcgg

SEQ ID NO: 34408 - RNA, 67 nt, Homo sapiens
cacagcccgaggcccggagcgaccagaagcacacaaggaagacaggaggccagagcgaccaaaccgc

SEQ ID NO: 34409 - RNA, 70 nt, Homo sapiens
gaaaaacggagagccacaaaaaaggaagcgaaagccgagaccccacaagccagcaggcagacccaccacg

SEQ ID NO: 34410 - RNA, 69 nt, Homo sapiens
cacagccacaggggccgaaaaccaagaacggcgccgagagagccacgggaagaaacaccggaaagcaca

SEQ ID NO: 34411 - RNA, 67 nt, Homo sapiens
ggcccaagggagcgaccaggagagaccccgccaagaccggcccacgggcacgccaaaaccagaaaca

SEQ ID NO: 34412 - RNA, 62 nt, Homo sapiens
ggaaaaccagaccagaaacggaggagcccgccgaagcaggaccaggaccgaagagggcggaa

SEQ ID NO: 34413 - RNA, 80 nt, Homo sapiens
aggacggcggggcgcagcggacaccgggggacccacaaagcggccgggggagccccccccagccccggccacaaccggcc

SEQ ID NO: 34414 - RNA, 78 nt, Homo sapiens
cggaacccggggccgggacgcagcccggcggcagcaggcaaaggagaaagccgagagagacgacaggagggagccaga

SEQ ID NO: 34415 - RNA, 59 nt, Homo sapiens
acaaccagcaacagcccaaagggaccaagaaaggcccagggaccaaagcccggacaagg

SEQ ID NO: 34416 - RNA, 86 nt, Homo sapiens
cccaggacagcacagaggcccaggcgagaggaggagacaaggagcacccaggcgacacgaccagcggaggcagagaaggcagaaca

SEQ ID NO: 34417 - RNA, 95 nt, Homo sapiens
gggaacaggggcccgccagccccgcggcgcccgggcccgggcggcggcccaccgcccacggaaaaacaaccaccagcgagcaaaaaggcaaagac

SEQ ID NO: 34418 - RNA, 65 nt, Homo sapiens
caccagccggcccaagcgggcccccggagcggcagcccacaagcaggaagaccagccccaggagg

SEQ ID NO: 34419 - RNA, 79 nt, Homo sapiens
aagggaagaagaagaggaaacccgaaccacaccacacccaaagaacccaacgggagaaccacccccgcacacaccgccg

SEQ ID NO: 34420 - RNA, 78 nt, Homo sapiens
gaaaagcggcccggaccgaaggcgcaagagggaggcgcacacacagcccggcaagccgaaacggcagaccccaaaagg

SEQ ID NO: 34421 - RNA, 78 nt, Homo sapiens
ggcccgcgagaagcaagcggaacccgagcacaaaagaccccacagcgagagagagcaaacgaaacaggcaaacgagac

SEQ ID NO: 34422 - RNA, 60 nt, Homo sapiens
aagcagggcgaaccagagaaaacggcaaggaagcggagcgaagaaggcaagaaagggacc

SEQ ID NO: 34423 - RNA, 60 nt, Homo sapiens
cggggccgggacgccagccaggaggacccccggggaaaggccccagggcgaagacccccc

SEQ ID NO: 34424 - RNA, 72 nt, Homo sapiens
aacccaccagccagggacagagcaagcagagccaagaggggccccgaggggaaagcgcgaaaaagggcgcaa

SEQ ID NO: 34425 - RNA, 69 nt, Homo sapiens
gcccccagcgcacaagaccaaaggaacgggcacaaccacggggcagggccgccaagggaaagaagacga

SEQ ID NO: 34426 - RNA, 76 nt, Homo sapiens
caccgcaccaaacccggaaggaaaagggaagggaaggcaacaaaggcaaccgaaagaggaaaagggagcacgccca

SEQ ID NO: 34427 - RNA, 82 nt, Homo sapiens
cagccagaaggggaggaggagccgaggaaagacagggccgaccaggaagacagccagaaacagggaagaagagcgcaacaaa

SEQ ID NO: 34428 - RNA, 83 nt, Homo sapiens
acccagagcccccggcagaggcagaaacggggacacaagcgaaaggcaacggcgcacagaacaaaggacgagccaaagagcca

SEQ ID NO: 34429 - RNA, 71 nt, Homo sapiens
agcccccggccgggcagagagaaaggaacggggaggggcaaccagaaggaacgaacagacccggccgagaa

SEQ ID NO: 34430 - RNA, 75 nt, Homo sapiens
cagccaccgcagaggcgaccccaggacggacgacacccagaggacagccccccgaagagaagcgggccgaaggag

SEQ ID NO: 34431 - RNA, 77 nt, Homo sapiens
aacacagaaacccgccccggcaaagacagaaagcccggaggaagagaagccgggccgcaggcggaaaccaaagggag

SEQ ID NO: 34432 - RNA, 78 nt, Homo sapiens
ggaccaacggagcgcgaggcgggcgcggagaagcgcggaggcgaccccgcacacacacccaccagccacggcagccca

SEQ ID NO: 34433 - RNA, 82 nt, Homo sapiens
gagaagaagaagcaggagaacgaaacggagccagagaaggcagaagagaacgaccgaagaaaagcaacaaaccaacaaccca

SEQ ID NO: 34434 - RNA, 73 nt, Homo sapiens
cacaggaaacacagaagaagagaaaaagcaccgccccagaccgcaaacagggacgggacgagagggaagcggc

SEQ ID NO: 34435 - RNA, 79 nt, Homo sapiens
ggggcaccagagaccgggcagacgaccagcacggaagcggccgacacgagccacacgaagccggcaagcagcggccaaa

SEQ ID NO: 34436 - RNA, 73 nt, Homo sapiens
gcagggcagcggcccccgcccgcaggacccaaagacaggaccacgcaccagcagagaaggaaagcaaaccgaa

SEQ ID NO: 34437 - RNA, 68 nt, Homo sapiens
aggccgaaggacccccacaacgagcgcccggaggcacacagcccagagggggccggccgaaagaagac

SEQ ID NO: 34438 - RNA, 80 nt, Homo sapiens
ccgcgcccgcccacgaaaagagaggaacagcacggaagaaccgaagaaagcaagaacaaccggacaagccaaaacagcca

SEQ ID NO: 34439 - RNA, 78 nt, Homo sapiens
gcacccggcacgccccgccagaccacgggagaacaaaccaagaagcacagggaagcagagccccgggccgggaagggg

SEQ ID NO: 34440 - RNA, 54 nt, Homo sapiens
ccacgcgcggaaggcagcgcccagcagcgcagagggggcgaaacggagaacccc

SEQ ID NO: 34441 - RNA, 83 nt, Homo sapiens
gaccggagagccagcacaccgaccaccccgcggcccggaggcggcggccgcgagcgaggcaaggaacgcaaagaaaccaagag

SEQ ID NO: 34442 - RNA, 60 nt, Homo sapiens
cacagggagaaaccgcccgaaaacggagaagcagcggagcaacaccccgcaccgggaacc

SEQ ID NO: 34443 - RNA, 73 nt, Homo sapiens
ccccccgcccagcgcgagggaggccaacagacccaacccagaaggcaccaaacggagggggaacaggcggcaa

SEQ ID NO: 34444 - RNA, 71 nt, Homo sapiens
ccaggcccgcgacagaaggaagagaccgcaccacgccgggaacggggaggcccagccacaacgacgcccaa

SEQ ID NO: 34445 - RNA, 77 nt, Homo sapiens
agcgagggaaggaagcaaaagaggcccccggccccaaggcccaggggacacccagcaggccagggaagaggcagccc

SEQ ID NO: 34446 - RNA, 57 nt, Homo sapiens
ggagccggcggaagggccgcaccggggcgcgggccacgcgaccacccggaggagggg

SEQ ID NO: 34447 - RNA, 55 nt, Homo sapiens
cagcaaaccggaccaccccgaagaaagcacagaagaaagacaaggcgaccgaacc

SEQ ID NO: 34448 - RNA, 70 nt, Homo sapiens
gagaagagaccacccacacaggagggaagaaagcacgggaaaaggccgggcccacaggggagagcccaga

SEQ ID NO: 34449 - RNA, 77 nt, Homo sapiens
gacacagcggagcgcccagaggcgagcccggggaggaagagagcaagcacgccacccacgcccaccccacccgagag

SEQ ID NO: 34450 - RNA, 38 nt, Homo sapiens
gaaggaagaggggaaaagagccgggcacaaagccagcg

SEQ ID NO: 34451 - RNA, 59 nt, Homo sapiens
gccgaccgagacgggcggagaggagaagagcaaaggcagacaagaccagccacaaaaag

SEQ ID NO: 34452 - RNA, 77 nt, Homo sapiens
aaagcgcacgacaaccagcaaccagaaccacgagagaaagacccaccaagagccacggagaaagacacacgcaggga

SEQ ID NO: 34453 - RNA, 72 nt, Homo sapiens
agggcagcggaaaagcaaagacaagccgggaagagaaagcggcgccaggaacggaggggcagccgcacccaa

SEQ ID NO: 34454 - RNA, 69 nt, Homo sapiens
aaacgggccgggacaggccaaccagaacggccagacagaaacccacagcagagaaagcaagagacgcaa

SEQ ID NO: 34455 - RNA, 75 nt, Homo sapiens
gcggcgcgcgccgccccgcgcagggccggcgacagagaagcgacgcgaagggcacaaccaaagcggagaagaaac

SEQ ID NO: 34456 - RNA, 79 nt, Homo sapiens
gcgccgcggaggcgccgacccgggcccgccggcccgagccccggcggcgcagcgggggagacggagcgaagcagacgga

SEQ ID NO: 34457 - RNA, 72 nt, Homo sapiens
ggagaggcagccagaggccgaccaccagggccagaaaaggggaaggaacaaaccaaagagcagaccccccgg

SEQ ID NO: 34458 - RNA, 86 nt, Homo sapiens
gcagaggcgcggagcgggcagccgccgccaccccgcggccgcacccccgccccaggcgcacaagagcagggaccccaggcgcggcc

SEQ ID NO: 34459 - RNA, 72 nt, Homo sapiens
gaagaagcgacaagggagggaggcacacaaggcaagccaccgagaaagggaggaccacaacaacaaacaggc

SEQ ID NO: 34460 - RNA, 76 nt, Homo sapiens
gaggggcgcaaacgcagaagaaccagcaaaagagagcgcagagaaaaggaagaccagaaagaagcacaggaaacaa

SEQ ID NO: 34461 - RNA, 81 nt, Homo sapiens
ggccggcggcacccgcacccggggacaagcgcgggaacggcgcggaagcagacaagaaggaagaggaaggccgaagagagg

SEQ ID NO: 34462 - RNA, 53 nt, Homo sapiens
ccgggaaaggagccggccggcggcaaaggaggccggaaacacaccagaacggg

SEQ ID NO: 34463 - RNA, 86 nt, Homo sapiens
ccggcccgcggccgggagggggccacagcacccccggcgcccaggggccaggaccggcggacagccccagaggagccaccgcaccc

SEQ ID NO: 34464 - RNA, 80 nt, Homo sapiens
caaggcccggccgagggcggccggacccccccccggcgcccaagcggaagaccaacccacagaggaccagagagaggacg

SEQ ID NO: 34465 - RNA, 72 nt, Homo sapiens
agggaacacagagaaaaagaaaagaagaaaacacgaaaaaagccaagcaacaaaggaacaagcaccccgagc

SEQ ID NO: 34466 - RNA, 76 nt, Homo sapiens
acggacaccaacgagcgaagcagacccggagagggccagcccacccaggacaccaccggacgggaaggacccccca

SEQ ID NO: 34467 - RNA, 72 nt, Homo sapiens
gccacaggaggcggccgcacaaaggagcagaagacagagggaggagggccacggacaaacacgggcccggcc

SEQ ID NO: 34468 - RNA, 70 nt, Homo sapiens
cccacaaccccaccaaaaccacaaaacccggggcgcaaacgcggaccagccagccacaagggcagaacgc

SEQ ID NO: 34469 - RNA, 87 nt, Homo sapiens
aggaaaaggacaaggaagaagaagacaagcgggcagaaggcgggacaaggcggggaagaaacagaaagaaacacaaaagcaaaagag

SEQ ID NO: 34470 - RNA, 80 nt, Homo sapiens
ggagcacacggagccaagagcaagccccgacaagggaccgggcgggccccgcaggaaacccccaccggcccacacagacg

SEQ ID NO: 34471 - RNA, 75 nt, Homo sapiens
gacgccgcgccagcgacaaacaagcagagggggcaccgccaggccccaccgcagggcccaggaggccgagcaggg

SEQ ID NO: 34472 - RNA, 35 nt, Homo sapiens
gcaccgccagcaagaccgagggacaaaagacagca

SEQ ID NO: 34473 - RNA, 77 nt, Homo sapiens
gccaccaaccccgacaggaggaagagcccggaacgccagagcggaaaggaagagaacgccggaagcgcaacaccaag

SEQ ID NO: 34474 - RNA, 73 nt, Homo sapiens
gcccacggggaggcgcggcggaagcggcgccaagaggggcaaagacccagccaccccacgacccaccccaaag

SEQ ID NO: 34475 - RNA, 54 nt, Homo sapiens
gccgaaagaggcacgccagccccaacaccacacaagcaaagcgggccacagaga

SEQ ID NO: 34476 - RNA, 54 nt, Homo sapiens
aaaaacccacagaaccaaagcagaaagccaccagccccaccaagacgggacaag

SEQ ID NO: 34477 - RNA, 74 nt, Homo sapiens
caagccggaggagaagcaagaaggcccggacacagcaaaccgggccacaggaccacgaacgaaaccaaaccgag

SEQ ID NO: 34478 - RNA, 71 nt, Homo sapiens
cccccgccagggaccaggcgagcgcagggagaagaaacgaacggaacgaggagagcacgagagcgccggcc

SEQ ID NO: 34479 - RNA, 84 nt, Homo sapiens
cgccaagagcgacgccgccgggcccaacggcgggccccggcgaggcagcgcggccgcagcagcccaacagccagcaaagacaag

SEQ ID NO: 34480 - RNA, 77 nt, Homo sapiens
cccggcagagcgggccgacccgaaaggggccgcagccggccaggggacccgaagggggcgagacgacacagaaaaga

SEQ ID NO: 34481 - RNA, 95 nt, Homo sapiens
gccaagccagcaagacccaacaaaaaagaaacagcaaacaagaggaacaaagaagaaacaccccgccgccagggacaagccagccgcccacagcc

SEQ ID NO: 34482 - RNA, 69 nt, Homo sapiens
cccccggagacgcaaccaaggccccgggggcgccgagggcacaagggcaacgacagaagggcgaagcca

SEQ ID NO: 34483 - RNA, 81 nt, Homo sapiens
gccacacagcacaacacaacacgccccgaaggcaggaccggaaggaacaacaccaaacccaagagggcagcggcagcacca

SEQ ID NO: 34484 - RNA, 83 nt, Homo sapiens
gccacaagcagggaccaggaaccaaccgggagccccccaagagacccaggggaagacccaaaggcagcaaaaacaagagcccc

SEQ ID NO: 34485 - RNA, 72 nt, Homo sapiens
gccggggccggccccgcaaccaaggacacaggccccgagccccggccccaaagacccaaaacagagacaccc

SEQ ID NO: 34486 - RNA, 82 nt, Homo sapiens
aggccgggcggcgaagggcgacggcccaggcagggcacacaacgagcagaagcaccacacccccaaggcaagggcgcaaagc

SEQ ID NO: 34487 - RNA, 73 nt, Homo sapiens
aggggccacaaaggaccccggaacgggcgggcggcccccggccacaaagaggaaaagcaacccacaggcgaag

SEQ ID NO: 34488 - RNA, 72 nt, Homo sapiens
gcaggcacccaagacaggagaaggcggcccagccaaagaaaaggccccaacgagcaaccgagacaaaaagaa

SEQ ID NO: 34489 - RNA, 79 nt, Homo sapiens
gaacggacgggaccgaaaggaaagagccggagaccccgcagcagaagagggagagcgcggcagcgagcgagcagcgcgc

SEQ ID NO: 34490 - RNA, 47 nt, Homo sapiens
caaaaacgcaacaacagacggcaaaagcagaccggaaaacccaccgg

SEQ ID NO: 34491 - RNA, 70 nt, Homo sapiens
aggcaacgaaaaaagaaaccgagaacggaaggcagaaaggagaacacaaagaacccaaacgaaaggaaaa

SEQ ID NO: 34492 - RNA, 78 nt, Homo sapiens
ccaaacgcggcacgggagagcgcagcagcaaacagccagggccggcccgacggcaggggggcggcggggaagagccgg

SEQ ID NO: 34493 - RNA, 50 nt, Homo sapiens
cagggacaggacagcgagcgaggacgaggaacggcgcccagaacgagagg

SEQ ID NO: 34494 - RNA, 73 nt, Homo sapiens
ggaaaaaccaggagacacaaacagaaaaggaagaaagggacaaagagaggagcagccaaaaacagacggagaa

SEQ ID NO: 34495 - RNA, 65 nt, Homo sapiens
cagaaccagggccaaagaggagccgacccaagcccagaagaacaggcggcgggcagagcgaggca

SEQ ID NO: 34496 - RNA, 82 nt, Homo sapiens
ccagccacccggaaagcaaggacagggaaaagaggcacaagaaaaggaagcaaggaaaaggacagcaaaaagaaacgacaag

SEQ ID NO: 34497 - RNA, 68 nt, Homo sapiens
acgacacccaaccgggccagaagcaggcgagacgaagaggagcagaaccagaagggacacacaggacg

SEQ ID NO: 34498 - RNA, 70 nt, Homo sapiens
ccaggagagcgagggagcgagcgggcagcgcggaccgaaggagaagaaggagaaggggaggagaaggcaa

SEQ ID NO: 34499 - RNA, 83 nt, Homo sapiens
gaaaagaacggaaagcacagaccgcggcaagggaggagagaaacaggaagggaaaggccaaccaaccacaacaaaacagaggc

SEQ ID NO: 34500 - RNA, 60 nt, Homo sapiens
gcagggaaacagccacagagggaagcgcaagcaacaccagcggaaaacacacagaaaaag

SEQ ID NO: 34501 - RNA, 91 nt, Homo sapiens
caaacgaacggaagaggcagacgaacgggggcaggaggacggcaaccaagcacacaggaggggacccccggcgaagcccggaaacacgaga

SEQ ID NO: 34502 - RNA, 78 nt, Homo sapiens
caagcagaaagcgaacaccgaacgagagcagagcaccggccagaacaagccaaggagccaagacgagagggacacacg

SEQ ID NO: 34503 - RNA, 76 nt, Homo sapiens
agacagcagagaaccacaagcacaggagggcagaccaaaagcacaaaaagaacggcccgaagaccccaagccagac

SEQ ID NO: 34504 - RNA, 75 nt, Homo sapiens
agaaaggcaccagacccgggaaaggagagagagaccgacagagccacaagaaacaaaggcacggcacggccggca

SEQ ID NO: 34505 - RNA, 64 nt, Homo sapiens
gcgggggagcgcacacccacggagcccagccggccgggccgcggaagaccgcccccgacaaaga

SEQ ID NO: 34506 - RNA, 57 nt, Homo sapiens
gcagaaggagcgaagaagagccccgcccaggccgagagaggagccccagaaagcgcg

SEQ ID NO: 34507 - RNA, 83 nt, Homo sapiens
ccacagccacggagaaaaagaagaaaagaaaaagaacagaacaaggacaacgccaacaagggaggcgaggacggacaaaagga

SEQ ID NO: 34508 - RNA, 72 nt, Homo sapiens
cagcagaaagagaaccggccaggacaaaggaggaaaacgacccagacagccaaaacaaaacaccaaaaggag

SEQ ID NO: 34509 - RNA, 64 nt, Homo sapiens
cgcgcaccccgcggacgccacagcgcccacccaggcccaggaccgagcccgacgcccacagaca

SEQ ID NO: 34510 - RNA, 104 nt, Homo sapiens
cgagccggcaacaggaaaggcagaaagaggagaaacgaggagagaacaagaagcagccagagcccaaaagcaaagcagggcagcaaagaacacaaaggcacggg

SEQ ID NO: 34511 - RNA, 80 nt, Homo sapiens
gcggccgggccccgagacggggacgacaagcagaccggaagaccgacggaagaccacaccccgagggagcccaggacacc

SEQ ID NO: 34512 - RNA, 85 nt, Homo sapiens
gccgcagcgcggagcagaaagcagaacccgcaggaacagcgagaacagaccaccaaaccaccgcgaagcccaagcgacgaggcag

SEQ ID NO: 34513 - RNA, 83 nt, Homo sapiens
acagcccccgcgcccgccagcccaacaggccccgagccccggccccaaagacccaaaacagagacaccccccagcccccgcgc

SEQ ID NO: 34514 - RNA, 68 nt, Homo sapiens
aaagagaaggaggcgcgagaagagaagcgcaggggaagagggaccggagccacaccaccggaggagga

SEQ ID NO: 34515 - RNA, 38 nt, Homo sapiens
cacagaaacccgccccggggggcccccaaagggaagcc

SEQ ID NO: 34516 - RNA, 54 nt, Homo sapiens
acccaaagggaaaacagaaacaggacccggcgggcccccgaagaaccggaccca

SEQ ID NO: 34517 - RNA, 67 nt, Homo sapiens
acagcaaggacgggaaaaagacacaaagaggcagaggcagcgacagagaaaaccccggagcagggag

SEQ ID NO: 34518 - RNA, 68 nt, Homo sapiens
caaacaggaagcagaaacaaggagggaacagggcaacagagaaagccacagacgggaaggaaagaaga

SEQ ID NO: 34519 - RNA, 84 nt, Homo sapiens
gggaggcggaggcggggcgccgcggaaggccgccgcgcgagacgcgcagagggaggagcccggcagagagaggccaccgcggcc

SEQ ID NO: 34520 - RNA, 75 nt, Homo sapiens
gggcccccgggcgagcaaacagggaggacagccaggcagagccacacgggaggaacacggagccaagaggaacac

SEQ ID NO: 34521 - RNA, 75 nt, Homo sapiens
aaccacggagacgcagggccagagaggcagcagaagcgcaacaaacgaaacaacgaacgagcaaggaagggccaa

SEQ ID NO: 34522 - RNA, 61 nt, Homo sapiens
agaacagcgacagacaaagaagaccgcacacaagccaacaacaaggcaagaacggaagcac

SEQ ID NO: 34523 - RNA, 75 nt, Homo sapiens
cgggaacgggaaaaggccggaaggcgggaaagcagacgaaggacaagccgagggaagacaggaagggcgggcaaa

SEQ ID NO: 34524 - RNA, 74 nt, Homo sapiens
ggagaagaggagcacgcccagcaagacgcgaagcgagaaaaggaagccacaggagaggaggaaaaaaaaaggaa

SEQ ID NO: 34525 - RNA, 69 nt, Homo sapiens
cagcgagacggcaaagcaccgagcaccccgcgcagcccgaggaagcagagccccgggccgggaagggga

SEQ ID NO: 34526 - RNA, 53 nt, Homo sapiens
gaaaccgcaccgcccggagaagaagcaacagcagcaagaaaccgaggcaaaaa

SEQ ID NO: 34527 - RNA, 70 nt, Homo sapiens
cgcacccacccaccccacagcgggcaccgacgcgggagaagccaagacgcacaacacgaaaggagaagag

SEQ ID NO: 34528 - RNA, 78 nt, Homo sapiens
gaagaacagggaaccacacacaaaagcacacaaagaccccccccacaggggagacagaggacaacgaacgcaagaaaa

SEQ ID NO: 34529 - RNA, 79 nt, Homo sapiens
gacccccgaacccccagcccaaacccggaaacccagcggcccagccgggcaccggggccgagaagccgcgccgggaacc

SEQ ID NO: 34530 - RNA, 56 nt, Homo sapiens
aaccagagagagcaagaaggagaacagacagcacgggggaggacacccgggacagc

SEQ ID NO: 34531 - RNA, 75 nt, Homo sapiens
ccagaagaaggaccggaagcacacaacaggaaaacaaaagaggagaaagaccgcagaaaccggcacaggcaggag

SEQ ID NO: 34532 - RNA, 55 nt, Homo sapiens
agacccgcaccagaaaacccccaccagaaccagccacgcgaaccgcgacaccaca

SEQ ID NO: 34533 - RNA, 74 nt, Homo sapiens
cgcgggaaggggcgggggcacggccgcccagcccacgccgccccgcgcgcagcggcggagaacggaaaagcacc

SEQ ID NO: 34534 - RNA, 58 nt, Homo sapiens
gccgagcaggaggcgccacagacccggacccccacaccggagcagggccacgccgcag

SEQ ID NO: 34535 - RNA, 61 nt, Homo sapiens
acggggccgcacaaaagccccagagcacaacaggcgaaccccaaaggcccgcgaggcacag

SEQ ID NO: 34536 - RNA, 68 nt, Homo sapiens
acgcagcccaaccagaaggagggcacccaccgcccagccagcggaaccagagagacagggcgccgggg

SEQ ID NO: 34537 - RNA, 71 nt, Homo sapiens
agcacaaagacaaaaagaccaggagagaaacccgcgaaaaagcccccccgaggcgccccccagcacccaac

SEQ ID NO: 34538 - RNA, 73 nt, Homo sapiens
acgggccccaacacccagagacgaaaggcaccaagccacaaaacaggccagaccgggcacagacaccgcggac

SEQ ID NO: 34539 - RNA, 68 nt, Homo sapiens
ccagccgcagaagaagcgacaagggagggaggcacacaagggagcagcgcggaggaagacaggacgcg

SEQ ID NO: 34540 - RNA, 80 nt, Homo sapiens
aagcaagaaaccgggagacccccccagcacaccaccagcaaggcacagggaacacccaacagaagaaaaggagaaaaagc

SEQ ID NO: 34541 - RNA, 78 nt, Homo sapiens
acagcgcagccaggaacaggacgaagaccagcgccagggaaagaagagcgagggggaaaagcaaaagcagaggggccc

SEQ ID NO: 34542 - RNA, 54 nt, Homo sapiens
aaggaccacgccgaggcccacgcaccccgggaagcgacacaaacccgccgggcg

SEQ ID NO: 34543 - RNA, 73 nt, Homo sapiens
gggccgagcgacccccacccagcccgagagcagacacggacaacaggcacaaagagagaaggaacacccacag

SEQ ID NO: 34544 - RNA, 43 nt, Homo sapiens
agcaggagcaggagcagaggagaacgaaacacaacacacgcag

SEQ ID NO: 34545 - RNA, 53 nt, Homo sapiens
aaacggaaagagagcggcacccccagcgcagccagagcaaaaacacagccagc

SEQ ID NO: 34546 - RNA, 70 nt, Homo sapiens
gcaaagaaacagccccccgacagcccgggaagaagcagacacaagacaaagggaaacggaaaggccgggc

SEQ ID NO: 34547 - RNA, 70 nt, Homo sapiens
aaggaggggaggcgagaacacgaggagagcgggccgcacgggggaaagggagacaggagagcaaaacaca

SEQ ID NO: 34548 - RNA, 60 nt, Homo sapiens
cgcgccgcgccgccgccaccagcccaagagaaaggagccaaacaaaggaacgccaagccc

SEQ ID NO: 34549 - RNA, 60 nt, Homo sapiens
gccggaggcagaggggggaccccggacggaccggcaggaaagagagccacccgccaggcc

SEQ ID NO: 34550 - RNA, 73 nt, Homo sapiens
ggggcgggggcgccagcccaccaagaagggccgagcacagcaagcaagaaaaggacagaacgaaccccccaaa

SEQ ID NO: 34551 - RNA, 51 nt, Homo sapiens
acggaccaacgggaaaacgaacaacgcaaacgcccacacagcaagcacggg

SEQ ID NO: 34552 - RNA, 64 nt, Homo sapiens
gccaaagaagggagagagggagaggagaacggccacggcccaaggaggacgccaccccaacccg

SEQ ID NO: 34553 - RNA, 75 nt, Homo sapiens
gaaagccagagacagagcagcacaccgacagagaacccaggccaacacacagacagaggcagccaccccagacga

SEQ ID NO: 34554 - RNA, 73 nt, Homo sapiens
agccagccggcaccgccaccccacaggcccccaccaggccgcggcaggcaaggacggggacacaagaccagcc

SEQ ID NO: 34555 - RNA, 51 nt, Homo sapiens
ccagaagacagacccaccaggcaaaagacgcgggcaacgaaaagaagacga

SEQ ID NO: 34556 - RNA, 71 nt, Homo sapiens
acggaaagcgggccggcgcaagacaaggacggcaaggacgacagcgaaggcagggaaggcgggccacgaag

SEQ ID NO: 34557 - RNA, 50 nt, Homo sapiens
cgcagggcgcccccggggccgagacacgcgaggacaagacaggcgcaggg

SEQ ID NO: 34558 - RNA, 122 nt, Homo sapiens
cagagaagcaaggaacaggggacggagacaccaacggccgcccacccggcagccaaggaagaggggagaacaaccacggaagaggagcccagggcagcagggacacgcccgaagaggaggac

SEQ ID NO: 34559 - RNA, 56 nt, Homo sapiens
gggcgcccagccagcgggaagacacacaaccgcgaccaccaggaacaacggaacca

SEQ ID NO: 34560 - RNA, 84 nt, Homo sapiens
ggagaagacagccaagcccgggcgggccggaacagcgccgcggggagcaccgagcccagggccagaagcccccaggaggagaac

SEQ ID NO: 34561 - RNA, 74 nt, Homo sapiens
gggagagacaagaagggccgcacagaaggaagaaaagccaggcaagggaccccagaagaaaggcggacaggagg

SEQ ID NO: 34562 - RNA, 49 nt, Homo sapiens
agacgcagggcgcccccggggcggaaaaacaaacgagccaccagcgccc

SEQ ID NO: 34563 - RNA, 71 nt, Homo sapiens
caccacggccaggcaaagaaagacgggcccgggacgagcggcccagcgacgagcgaagaggcacaaaaccg

SEQ ID NO: 34564 - RNA, 73 nt, Homo sapiens
cggacaggcagaacagaggccaaaagaagaagagggaaaaaaggccagagacagacggcacagacggagggaa

SEQ ID NO: 34565 - RNA, 65 nt, Homo sapiens
gaaagagacccgcagagccacagggcagggaagaaggagaaagggccaaccccgaagaagcaaac

SEQ ID NO: 34566 - RNA, 71 nt, Homo sapiens
gcacagcaggaagggcaggagaaaggaggacccgggaagacagagacgggcaacggaaagcgaacaccaag

SEQ ID NO: 34567 - RNA, 75 nt, Homo sapiens
gcccccaaaggcggaacaggggagaagccgcaccaggcgccgggcggcgacccccacgcgacaccgccaaacaca

SEQ ID NO: 34568 - RNA, 56 nt, Homo sapiens
gcgaccggcgcccgcccgcggacgcacaggccggcccaggccagggaagggcaccc

SEQ ID NO: 34569 - RNA, 72 nt, Homo sapiens
caaaacgagaggagacagggacagacgagagccaaaccgcgcagcccgccagggccggcggcagacacacca

SEQ ID NO: 34570 - RNA, 60 nt, Homo sapiens
ccccgggaacggagccagaacagacggaaaccaaaaggaggaaagagaaagacaagaagc

SEQ ID NO: 34571 - RNA, 108 nt, Homo sapiens
gccgaaagcagaagaaaagggacgcaagaaacccaggacgagaacagcaacagggggaccacacaacgagggaagagcgcaccacgcgaaccgcccccccaccgggaa

SEQ ID NO: 34572 - RNA, 66 nt, Homo sapiens
ccccggcccacaggggggggcaaacccgagagaacggcgcgccccagaccaccggcagggaacagc

SEQ ID NO: 34573 - RNA, 70 nt, Homo sapiens
aagacagaggccacagaaaggacaagagggacccgagacagaaggccaaagagacagcagccagggcaac

SEQ ID NO: 34574 - RNA, 76 nt, Homo sapiens
cgggagagcgcgccagccggccgcgaggccccaagaaaagcggaagaagaccgggagcgcccagaacagggaaacc

SEQ ID NO: 34575 - RNA, 78 nt, Homo sapiens
ggggcgggcggaccacggagcaggcaagagaggcccggccggacgaagaagagaaaagaaagaaaggccccaccccca

SEQ ID NO: 34576 - RNA, 78 nt, Homo sapiens
ccggggagccggaaccagaaggaacagcaccgacacgaaaacccggacccgcaccgcagcggcgaaacaagcacccag

SEQ ID NO: 34577 - RNA, 75 nt, Homo sapiens
aagaggacaaggagaaggacggggggcagacaggagcccaaggaacagagacagacccgggggcccccaaggaga

SEQ ID NO: 34578 - RNA, 52 nt, Homo sapiens
aggagagcagaccgggaccaggagccgcaaaggacccccggaacagcgcccc

SEQ ID NO: 34579 - RNA, 76 nt, Homo sapiens
cggcggccacggcaccggcggggggcacgaggaaaggcagggaaaaaccaggacaaaaagcaaaggacggcgcaag

SEQ ID NO: 34580 - RNA, 76 nt, Homo sapiens
cgcaaaggccccggcaagaagggcccaaaaaagggaaccgcacagcgagacaccccacacagagggaccgcaaagg

SEQ ID NO: 34581 - RNA, 78 nt, Homo sapiens
cgacgcggggcgggcccgggggcccagcgggcgccgcgcacgcggaaaagaggacacccagagacccacagaccaaga

SEQ ID NO: 34582 - RNA, 81 nt, Homo sapiens
ggccaacgggaggccgcaaggagaagaagggaagcacgccaggccagggaagggcccagcaagacagggcccgaaaggaca

SEQ ID NO: 34583 - RNA, 70 nt, Homo sapiens
aaaaccaaagcagaccagaaaaaacagcacaccaggaagcaaggggagcccggaagaaacaaaacaaagc

SEQ ID NO: 34584 - RNA, 57 nt, Homo sapiens
gaaggagggcgagcgaggaggaggcggagcggggcccgacgcggccgcgagaaccgg

SEQ ID NO: 34585 - RNA, 72 nt, Homo sapiens
acagacgcaaggggcaggcacagcgacccgaacgcagcggggcccacacgagaaccagccagaccgagggca

SEQ ID NO: 34586 - RNA, 55 nt, Homo sapiens
ccacacaaacccgggacgggccgagagcaacccccagccacaacgcgaaccgggc

SEQ ID NO: 34587 - RNA, 76 nt, Homo sapiens
aaaagaacgagaggaaaggaaagccaaaaaaacgccagacacagcggccaggccgccaagccagacgaacaggcga

SEQ ID NO: 34588 - RNA, 67 nt, Homo sapiens
agaacgcaccggcacagacagaagccaaagcgccaacgaacccgggaacgcgagcaagcagcgccac

SEQ ID NO: 34589 - RNA, 76 nt, Homo sapiens
cgggaaagccaccgaaaagggagagaacagcacacagaggcgcaaggggaagagaaaagacagaagcaccaaacag

SEQ ID NO: 34590 - RNA, 70 nt, Homo sapiens
ccaaaaacacgagcaggcgcgagacgggggaacggacccccagggagaaagcaagaaggcaccgaaccgc

SEQ ID NO: 34591 - RNA, 80 nt, Homo sapiens
aaagcaaacgaccagacggcagggaggcacaaaggggaacacagcgaggggcacgagaggggagccccacccgccccgcc

SEQ ID NO: 34592 - RNA, 74 nt, Homo sapiens
cacgaagggaaaagagccgagggacaagacaacaaacagaagaagaggaaacccaccagagaaggcgcggccac

SEQ ID NO: 34593 - RNA, 53 nt, Homo sapiens
ggcgcgccggagcaagggaggacaaaccggcgaccacacacggggacgacggg

SEQ ID NO: 34594 - RNA, 72 nt, Homo sapiens
ggaccaagaaccagggcgacccagcaacgcggccggccaggggcaagcgagcacggagggagccgggagagg

SEQ ID NO: 34595 - RNA, 68 nt, Homo sapiens
gccgcgagccgcccaccggcgccacgcaagggcgaggcagccccaaacaccgacaccgaaaacgagaa

SEQ ID NO: 34596 - RNA, 74 nt, Homo sapiens
aacgacagagcaaaaggcgacgcacacaacccccgaaagcacaacaggcacaaagagagaaggaacacccacag

SEQ ID NO: 34597 - RNA, 59 nt, Homo sapiens
aggacggggaacgacaaacgcaaggcagcaccccgacgacaagacaccccgagacaaga

SEQ ID NO: 34598 - RNA, 75 nt, Homo sapiens
cggcggagccggaggaagcgaggcacccaaggaaagacaaggagccgggccgagaaaccgaaccagagaccagag

SEQ ID NO: 34599 - RNA, 83 nt, Homo sapiens
cccaaaggcgggaacaggaaacggagaggcgggcggaccaagaccccccccaggagcaggccccccccccaacaaccggccac

SEQ ID NO: 34600 - RNA, 79 nt, Homo sapiens
gcggggcaggcacacaccaccagacgaagaccgagcggccagcacagcccaaccagaaggaacccagccagccggcgga

SEQ ID NO: 34601 - RNA, 68 nt, Homo sapiens
gccgggcccggacccgcgcagcgagcccgagcggcagcgccggagggagcgaggcggccagggcccca

SEQ ID NO: 34602 - RNA, 79 nt, Homo sapiens
ggccccaccagcagacgcagccgagacaccagcccgaaacaccaccaagagccggcagcgcccgagggagcaaggagaa

SEQ ID NO: 34603 - RNA, 37 nt, Homo sapiens
agcccccagagcgggaccacagaaaggcaagaacaag

SEQ ID NO: 34604 - RNA, 80 nt, Homo sapiens
cgagcagaagaggagaagaccaaaaccagaaccacgccccccaccccaagaagcagagagcaggcagcagaagaagaagc

SEQ ID NO: 34605 - RNA, 80 nt, Homo sapiens
agcaaccccccaggacgggcggaggcggggggaccggcgggcgggaacgcggcaggcaaagaggcaaagagcgcgggcgg

SEQ ID NO: 34606 - RNA, 73 nt, Homo sapiens
ccaccgccagccacccacgccagcagagcaaggcgccaccggaagaaacgggaggggaggagccgggaaagac

SEQ ID NO: 34607 - RNA, 68 nt, Homo sapiens
cagcaggccagccagggaccgcggccagcgacagaccgcgccgcgccggcgagagccaaagcagaccc

SEQ ID NO: 34608 - RNA, 78 nt, Homo sapiens
acgccgggggcgaggagacaaaaaagcccaaggaagaaccccaccagggccccgcggggcacagggcgggcacaacca

SEQ ID NO: 34609 - RNA, 65 nt, Homo sapiens
gcgcagaaagcaggcgaacccgcggcgcaaaacgaggaccacccgcacccaggggacgcacggcc

SEQ ID NO: 34610 - RNA, 73 nt, Homo sapiens
ggcacccgcgcggccgcgggcgcgcccgcagcgcccgccacaggcccagcgggcgagaagggcccggcagcga

SEQ ID NO: 34611 - RNA, 83 nt, Homo sapiens
caccacccccccgcacggcggccaggacacggaaacaggagaggaacagggcgcaccacagaagagccaaagacggcaaggcg

SEQ ID NO: 34612 - RNA, 84 nt, Homo sapiens
gcacgaggccgcggagccggacgcggggggcgggaagagccggggccgggcgacaggagcagccaaaagaaacccccaaaaccg

SEQ ID NO: 34613 - RNA, 63 nt, Homo sapiens
ccagcgaccgggcagcaaggaagagaaaaggaaccccagccacggaagccggggaggaggagg

SEQ ID NO: 34614 - RNA, 66 nt, Homo sapiens
gccgggcaagcaccagagaggccaaccaggaaaccgccagacggccgcaccagaaggaaaggcgac

SEQ ID NO: 34615 - RNA, 56 nt, Homo sapiens
agaccagaaaccaaacggcaaagaggaccccaagaagcaggcagacacaggcccac

SEQ ID NO: 34616 - RNA, 93 nt, Homo sapiens
cgccaaggacacggcacaccgaccgacggccaccaacggcggggggcgaggagcgagcaggagccgggcggcggccggggaggaaggccacac

SEQ ID NO: 34617 - RNA, 75 nt, Homo sapiens
cccggggggaacgacccgaggggggagagcgcgggggcgacggccgagcaggggaaaaaaaaggaggcgaggaag

SEQ ID NO: 34618 - RNA, 78 nt, Homo sapiens
gcgcggcggccccgccggggcaggagggaacggagccagcacacagaaaaagaggcgaccgagcggaagcagaggaaa

SEQ ID NO: 34619 - RNA, 77 nt, Homo sapiens
gccaagaggccaaggcgacagccacaggagacacgcgcgcacgaagcccaggagccagggcagaaacccccaccagg

SEQ ID NO: 34620 - RNA, 76 nt, Homo sapiens
ggggcgcggcgcgggagccggcggggcggcggcaacggggcacgaccggggaaagagaggcacaacgggcggacag

SEQ ID NO: 34621 - RNA, 76 nt, Homo sapiens
aaccgaccagaccaacaaccagcgaccacgccacaaccaggacaccagcaaaaaccacacaggcgaaccaacacga

SEQ ID NO: 34622 - RNA, 79 nt, Homo sapiens
cgcggaggggagaagagcaggaacgcaaggcggggaaaaaaaggcagcacacagacgcagcaacgggcacgcaaccaag

SEQ ID NO: 34623 - RNA, 77 nt, Homo sapiens
cagagggagacaaaaggaccggacccagaaaccggacccaaaggcgccaaacaagggaaccgacccagagaggaaag

SEQ ID NO: 34624 - RNA, 71 nt, Homo sapiens
aacacgaacaaagagcgaccgagaaaaaccgaaagagccagcaaaagaaggaccccagcaggaaaagcaaa

SEQ ID NO: 34625 - RNA, 42 nt, Homo sapiens
gaggaggacggagccgcacagggcccaagcacgggggaagcg

SEQ ID NO: 34626 - RNA, 60 nt, Homo sapiens
gcagcccccagagcgggaccacagagcgaggaacgcggggagcagcccagcggagcacag

SEQ ID NO: 34627 - RNA, 77 nt, Homo sapiens
aaggcagggacgcggcagcaagaggacaggcaccaagcagccgaagagaaacaagggacagcagacaagccccgcgc

SEQ ID NO: 34628 - RNA, 77 nt, Homo sapiens
gcccccgccaacgcagccaggcaccagagccaggacaccgaggggaagaaggaggggagcgaagagagagcccgaga

SEQ ID NO: 34629 - RNA, 77 nt, Homo sapiens
gagcgcagcggcgcgacacaggcggggccgacgggggagacggagccccagcacggggaacagggcgagacaaacgg

SEQ ID NO: 34630 - RNA, 79 nt, Homo sapiens
gcagccggcgaggggggagcccagcaggagcgggaaaaccgagcgcgggagaaggccccgagccccggccccaaagacc

SEQ ID NO: 34631 - RNA, 81 nt, Homo sapiens
cccagcacgagaggccaagacaggaggacacccaggcagacgggaggaagaagaggaggagacagagcaaccaggaaccga

SEQ ID NO: 34632 - RNA, 43 nt, Homo sapiens
ccccagggagggagccgcagccgagaccgacccccaccaccgg

SEQ ID NO: 34633 - RNA, 77 nt, Homo sapiens
gggcagaacaccgaaaaccgccgaagcagcaaaggaagcagagcagggggagaggcaccagcaacagaccaaccgca

SEQ ID NO: 34634 - RNA, 56 nt, Homo sapiens
cggacaagaagaagacagaacgcccccaccaccgcaaacagccaggcgcgggccac

SEQ ID NO: 34635 - RNA, 99 nt, Homo sapiens
ggaagcgccgggcccgcgcgggggggagagccacgacgccgggaccgggaccgccgccgccgccgccaccaggacccaaagacaggaccacgcaccagc

SEQ ID NO: 34636 - RNA, 55 nt, Homo sapiens
aaccgagcccgagaaacagggagaagcaaagggaagcacggcgaagagaaccaga

SEQ ID NO: 34637 - RNA, 71 nt, Homo sapiens
gagggacgggagcgaggagacgaaaaggggaaaggagaaagaagggagaagaaacagagaaccccaaggac

SEQ ID NO: 34638 - RNA, 77 nt, Homo sapiens
caggagccgccccgcccggggacgaagagcgcagcccccggcggggcagcccgccgcgggaacagacagaggaagac

SEQ ID NO: 34639 - RNA, 69 nt, Homo sapiens
gggggaacagcggcggaggaaacagggcagaccccccagaggaaagccaaaccagaaaggggacagcgg

SEQ ID NO: 34640 - RNA, 110 nt, Homo sapiens
cacaccaccagccacagaaaacgaacaaaagcgccgggaagcaagaggcaaagagaacgggaagaacagacggcaacaagcggaccgaacccagacgccaacaacacaag

SEQ ID NO: 34641 - RNA, 85 nt, Homo sapiens
gcgaacccagagaggggaagacgccaagaagggcacgcgggaccgccagacacaggaccgcaaggagagcacccgcgcggacaca

SEQ ID NO: 34642 - RNA, 86 nt, Homo sapiens
ggaggagccacggaaggacgacgacaaacacgcagaggaaggagcagcgcaagggcagccagcagccggcccgggggcagccaccc

SEQ ID NO: 34643 - RNA, 80 nt, Homo sapiens
aaaacccccagcagaccggcgcccagaaagagaagacagccaggaagaggaagccagacgcgagggccggcccaggcccc

SEQ ID NO: 34644 - RNA, 75 nt, Homo sapiens
gggaaaaggagagaaaagagcagaacgaagaaacccgcaggagcaagaggacacagcagagaggccaaagacgag

SEQ ID NO: 34645 - RNA, 81 nt, Homo sapiens
accaaacagccagagaccaccccgcccggggagaagcacagccacagcgcaggaaggagaagaccaaaaccacgacggccc

SEQ ID NO: 34646 - RNA, 75 nt, Homo sapiens
ccacagcccaccgaggcaccacagggaggcaggcgacaacagaggagaaggcgaagaaaacagccaagcaccaga

SEQ ID NO: 34647 - RNA, 70 nt, Homo sapiens
cgagcgacgacacacggaccaaagccaaaccggcggccaagagcagaaaagagacacacaaaggaagcaa

SEQ ID NO: 34648 - RNA, 68 nt, Homo sapiens
ggcgagaggggaagaggcgccgggacaggggcaaacacgaagaccgagggaaacgggagaacacagag

SEQ ID NO: 34649 - RNA, 36 nt, Homo sapiens
ggcgcgggagccacacccaaccgggagcccggagca

SEQ ID NO: 34650 - RNA, 55 nt, Homo sapiens
aggaccaagaaccagacagcgaggggcgcagcaaccaagaacaaaagaaaagaaa

SEQ ID NO: 34651 - RNA, 74 nt, Homo sapiens
aacagggaaggagaagcaggcacagaaggcgccaggagaaacaaggcgaacggaaaggaagcaacgcgagagca

SEQ ID NO: 34652 - RNA, 68 nt, Homo sapiens
gacgaagggaacccgcacacagccggaaaaacagggagagccacagagggggaaagccaaggaaaaac

SEQ ID NO: 34653 - RNA, 57 nt, Homo sapiens
cggagcggacgacggggcgacagcaagaaggagccagcacagaggcaaaagaaccaa

SEQ ID NO: 34654 - RNA, 54 nt, Homo sapiens
accccaaccggggaggaaaaccgacgaagagacaaagcaggaggacacaagaag

SEQ ID NO: 34655 - RNA, 77 nt, Homo sapiens
gaaggccggagaaagaggagaagccgaaaaaggcacagaagaggcaggaaacaaagagccccgggaaaagaaaaaaa

SEQ ID NO: 34656 - RNA, 69 nt, Homo sapiens
aagagacagcgagaacaaaggagagaggaccacccagaggagcaacgagaaacaggaagacaaccacca

SEQ ID NO: 34657 - RNA, 78 nt, Homo sapiens
aaacaggcagcgggagccgagagaaggcacggcggcgcagaaaaggcggcagacaaagagccagcaggggcagcaaag

SEQ ID NO: 34658 - RNA, 72 nt, Homo sapiens
caccagccggaccccgacacgcgccgcggccacaccccaggagcagccaccaagggcccagaccagacacgg

SEQ ID NO: 34659 - RNA, 71 nt, Homo sapiens
gacccaaggcgacgaccgacaggggggaaaggaacgcgaagagacccccaggccaaagcacccaaaaacca

SEQ ID NO: 34660 - RNA, 69 nt, Homo sapiens
aagagagaggggaaaggccaaagagcacagggacagaaaaacagcgcagacgagccgcaaggacaagac

SEQ ID NO: 34661 - RNA, 76 nt, Homo sapiens
aagagcgggggacgggggcgggaggccacgggagggccgcgcgccggagaccgaaggagcggaccgcgaagagaga

SEQ ID NO: 34662 - RNA, 74 nt, Homo sapiens
aagaagcgcacccaggaacaggggaaacgggaacacaggagacccaaagcaaagccaccagagaacacagacca

SEQ ID NO: 34663 - RNA, 70 nt, Homo sapiens
ggaaaaagccagccaggagggcaaaacgccccagaggaaggaaccacgaagcgacgacagaacaagagac

SEQ ID NO: 34664 - RNA, 86 nt, Homo sapiens
cgagcgcgaggcgcggagagcaacgccgggacagcgcaagaacccaagaaggcagaagccagccccgcaggccgccacccgccccc

SEQ ID NO: 34665 - RNA, 74 nt, Homo sapiens
ccaaaaaacggagcaaagggcagcggcggagccgccaaggcggcgcagcgggacaagagaaaaaaagggcgggc

SEQ ID NO: 34666 - RNA, 77 nt, Homo sapiens
acagcccaagaggccgaccgagacgggcggagaggagaagcaaacgaggaccccaccacaagaacgcaggaagaggc

SEQ ID NO: 34667 - RNA, 76 nt, Homo sapiens
ggcggagaggagagaaggccaaacaacccaagcacggcagaagaagaaggcccaacgaaaaagcggaaagagacca

SEQ ID NO: 34668 - RNA, 80 nt, Homo sapiens
acacgggggggccgggcacccccagggggccacagcgcccagccaaagaaaaccagcgggcaagcagaaaacaagaggcc

SEQ ID NO: 34669 - RNA, 80 nt, Homo sapiens
ccggcccccaacagcgccgggaccaaccaagaagaaacaacgaccaccaccaaaacagcccacgaagaaccagcaagaaa

SEQ ID NO: 34670 - RNA, 74 nt, Homo sapiens
agagagcgagcgagggggggcgcgccggaaaccggagcgcgcagcaggcgcaaccaaagacaaaaacaagagaa

SEQ ID NO: 34671 - RNA, 79 nt, Homo sapiens
ccggggccaggagagcgcgccggcgagaagcggccgagccagcagcagccagcacgcccaccccagagacccaggcccg

SEQ ID NO: 34672 - RNA, 75 nt, Homo sapiens
cagccgaaaaacccaacacgagaaacaaaggaccccagccagaaggcgccgcgggcaacaggaagccgggaaagg

SEQ ID NO: 34673 - RNA, 76 nt, Homo sapiens
ggcaagcacaaaccacagcaccgagagcggcccgcagaacgccagcagaaggcaagaaagaagcgccagccgaccc

SEQ ID NO: 34674 - RNA, 78 nt, Homo sapiens
cgcacccgggccccgaggagcggacaaagccaccaggacacccggaaagaacaggccaggcccagaccggccaccagg

SEQ ID NO: 34675 - RNA, 56 nt, Homo sapiens
agggaagagacacacccagggagaagaagcacggaaaaaccaacaaagagaaaaaa

SEQ ID NO: 34676 - RNA, 92 nt, Homo sapiens
ccccacgcgccggccggaggggcgaagaggacgagggggccaaggcccccgggccccaaaagcacgcacgaaaccggcaagccagcggaggg

SEQ ID NO: 34677 - RNA, 63 nt, Homo sapiens
aggggcgaaggaaccgaaaggcaacggcagcagcaggacgaagagaggcccgaccagagaaag

SEQ ID NO: 34678 - RNA, 72 nt, Homo sapiens
aaagccaccgcaaagccagccagagcaacagcagcacacagcgcggcacaggacgcgacccagccagagcca

SEQ ID NO: 34679 - RNA, 77 nt, Homo sapiens
cggcggcggagagaagcgccaaaggaccggacccagagaagaggaaaaccaccgggcagaaaaacgaggccgggaag

SEQ ID NO: 34680 - RNA, 73 nt, Homo sapiens
cacagagaaccagacagcacgagaggccccagagagacacgggacgggaggacgaagccaaaccaggcgccag

SEQ ID NO: 34681 - RNA, 81 nt, Homo sapiens
cgccgagcaggcgccgccccagcccgcgaacgacggggcgggcaccagaacaagacggcagagccgcggcggaggaagcca

SEQ ID NO: 34682 - RNA, 76 nt, Homo sapiens
gggcggcccggcgcggcacagcgccgccagcagggccgaccaggaaagagcccagacccccccagcaaggacagca

SEQ ID NO: 34683 - RNA, 81 nt, Homo sapiens
gcaccaacgagaccaccaaggccaggaagcaagaagaccacagccaggacgcaaagagaaccagggggaagagaaggaaag

SEQ ID NO: 34684 - RNA, 74 nt, Homo sapiens
cgccaacgagcgacagcaccaagaccgccaggagagaaggagggggcagagcacggcaggcagaaggggccaac

SEQ ID NO: 34685 - RNA, 78 nt, Homo sapiens
gagaaacacccaagagacaccagacgaaagcgcgcgcgcagggagcagcacccccaccgcaggggcagaagggagcgg

SEQ ID NO: 34686 - RNA, 64 nt, Homo sapiens
acagaccaaagaccacgaccgaccgcaaaaaccaagaggccaacggccccaacccgcccggggg

SEQ ID NO: 34687 - RNA, 70 nt, Homo sapiens
gaaaagcaacggccgacagagaaaacaagcaaagcgccccgggagcacaggaggaggcaaaacagacaga

SEQ ID NO: 34688 - RNA, 79 nt, Homo sapiens
gcaaacggccgacccgcggagccaccagaaagcagccagcagcagccgcccaaaacacaaaccaaagaagaaacccgaa

SEQ ID NO: 34689 - RNA, 51 nt, Homo sapiens
gcccccaagagcggcaacagacccggaaaagcagaagcagaggacaaggaa

SEQ ID NO: 34690 - RNA, 39 nt, Homo sapiens
gaaagcacggggaggcaacaggcggagacagggcgcaac

SEQ ID NO: 34691 - RNA, 70 nt, Homo sapiens
aacgccccaacgggggacccaccgacgagcaaggcccaagccacgggagccgccccaagggcagaagaag

SEQ ID NO: 34692 - RNA, 47 nt, Homo sapiens
gggacgcccaccacgggaaggggggcccgcgggaccagcccggccgg

SEQ ID NO: 34693 - RNA, 80 nt, Homo sapiens
cgcgcacccggagcaccgcggcagccacccaagaaaacccaggccgcgaaggagaagaccggacaccaaccgacggccgc

SEQ ID NO: 34694 - RNA, 52 nt, Homo sapiens
gaagcaccgaaagaccagggccaggccccaggaggggaggacgagaaacaag

SEQ ID NO: 34695 - RNA, 86 nt, Homo sapiens
agaccggcaccgcggagcaaaaaaagagcccgcaagaagaacagagacagcagccaaacccccaggggagccgccaccaaaagcag

SEQ ID NO: 34696 - RNA, 79 nt, Homo sapiens
cgaagaaggccggcaacccacacaagcgaaggcgcgcaccggaagcaccagcgaggaagcaccacccaacccaccagac

SEQ ID NO: 34697 - RNA, 77 nt, Homo sapiens
gcggcgacggccacaggggcggcgacggcgcaggcgaagcgaaacaggccacgaacgacggcacgaagcagaagagc

SEQ ID NO: 34698 - RNA, 119 nt, Homo sapiens
agaaagaccccaaagaaaaaaaccgagagagaagaggaggaacgaggagaaagagagaccgccgagcagaccgggaaccgcaccgggaaagaggaggagcagagacacccagcaagccg

SEQ ID NO: 34699 - RNA, 75 nt, Homo sapiens
cacaccagaagaggcgcccgcacgacacgcagaccccaccaagaggcggagcgacccggcccaaggacccaacgc

SEQ ID NO: 34700 - RNA, 75 nt, Homo sapiens
gaaccacaaagaagacaaagcacgcgaaaaaagcgaacgcaaggggccaagaagagcagagcccgagcaagaaga

SEQ ID NO: 34701 - RNA, 82 nt, Homo sapiens
cagcccaggccagagccgcggccccgccaccagccgcagaaaggagccaacccagagggggccgcaaggccaggcgcgcaga

SEQ ID NO: 34702 - RNA, 77 nt, Homo sapiens
agaagaaaagcgagaaccagcagcagcaccaaaaccccaagcaagaaagaacaggccagacaaacagcgaagagcag

SEQ ID NO: 34703 - RNA, 54 nt, Homo sapiens
accagccaacaacgggaccagggaaagcaaaaaaggagaaggggaccagggaag

SEQ ID NO: 34704 - RNA, 123 nt, Homo sapiens
gaggcccaacggcgcagggggggggcagcgccagcgccgagccacgcgcagcagaacacaaaggaggagaaggggcccgacgccggagggcaaggcaaagaaaagggaccagccccgaggaag

SEQ ID NO: 34705 - RNA, 79 nt, Homo sapiens
caccacggagaaaaagacgagcggcacgcagaggggagcgaagaagggagccacccaaaacacgcggaaacgccacagg

SEQ ID NO: 34706 - RNA, 70 nt, Homo sapiens
ccccccgccgggagggccacaggaggcggcgggccccgcccgccgaaggaccaaagcccaggagaggaca

SEQ ID NO: 34707 - RNA, 88 nt, Homo sapiens
cgccgacagaaaaaagaaccagagcaaaacgacagaaagcaagaccagcacaaagagccaaaacaaggcacagaagagaaggcacgaa

SEQ ID NO: 34708 - RNA, 79 nt, Homo sapiens
gagcccacggacaccacccaacgaacagaaacgggaggaggcacgagaccaggacgaggagaaaagaagaaacgaagcg

SEQ ID NO: 34709 - RNA, 76 nt, Homo sapiens
gacgaagagaacgcccgggaccgagcacccgccccgggcaccaacgccgccgacccagcggaacaagaggaaacca

SEQ ID NO: 34710 - RNA, 68 nt, Homo sapiens
ggaggaacggcccggaaacaggaggacgggggcaacaacgccggccacacggggggggagggaaagag

SEQ ID NO: 34711 - RNA, 83 nt, Homo sapiens
ggcacccgcagcgcagaaggaaccggcaaagcgcaggaacgggaacgcaggagcgaccaggcaacccagagacacacaccaga

SEQ ID NO: 34712 - RNA, 64 nt, Homo sapiens
cccagcccccagcccagcgcagacccgaccagaggcacaacgcacagagaacaaaagaaaggcc

SEQ ID NO: 34713 - RNA, 60 nt, Homo sapiens
gaagaggaagaaaccaacaaacgagacagagggcaaaacggcaaaggcagagaccaaacc

SEQ ID NO: 34714 - RNA, 79 nt, Homo sapiens
agcgggccgcagccacaccggccaggcccaggagcccgaggagaaccacccccggggggaaacgaaagaggaaagaaaa

SEQ ID NO: 34715 - RNA, 69 nt, Homo sapiens
ccgcacgaaaccggccggcagaagaggcaggaaccgcagaacgaagccacaaagggacggagacacaaa

SEQ ID NO: 34716 - RNA, 79 nt, Homo sapiens
accagacgggaggacacaggcaacaccgggagccacagcgggaccagaccccaccaacaacgaacgcggcaggcgcaca

SEQ ID NO: 34717 - RNA, 84 nt, Homo sapiens
aggcccgggacccgcagcgccgcccacgcccagcgccgcccccccggccagcaacagcgaggcggaaaccccaggcacccgcgg

SEQ ID NO: 34718 - RNA, 59 nt, Homo sapiens
cagacacagagcagcagccccacaaggccgcacaccagaggacgggaacccagccagcc

SEQ ID NO: 34719 - RNA, 55 nt, Homo sapiens
ggcgcggcggcccaggcgggggcacagagaccccaaccacaaggccccacgcaga

SEQ ID NO: 34720 - RNA, 84 nt, Homo sapiens
cagcgaccaggcaagcaacccccaagagcggcaggggaagagggcaggacagagcgggagccaccagcgccaaagggaagccag

SEQ ID NO: 34721 - RNA, 76 nt, Homo sapiens
gggcaggggggcccggccggccgcccagccggcacagccagggggcgacggggagccgggcccgcagggccccgga

SEQ ID NO: 34722 - RNA, 67 nt, Homo sapiens
agacgaccagccacagcaagcaggaccaaaggccagaagccaggggaacgacacagccgcacagagc

SEQ ID NO: 34723 - RNA, 85 nt, Homo sapiens
ccggaggagcggagagcgagcggcaacccggagacccacagcggggccgggccccgaccacccagagaaaggaaaggagccagag

SEQ ID NO: 34724 - RNA, 55 nt, Homo sapiens
ccacagaggggcgacggccaggggaaggggcagcaggacagaaggagacacaagc

SEQ ID NO: 34725 - RNA, 72 nt, Homo sapiens
cgagaagcccagagacacagcacaggaccagaagggaccccagaaacaacgggaagcgagcaggagcacgaa

SEQ ID NO: 34726 - RNA, 60 nt, Homo sapiens
aaaagagacggagcaagagaacgcaagagacgcgcggcgagagacccaggaggcagagcc

SEQ ID NO: 34727 - RNA, 67 nt, Homo sapiens
ggggaggcgcacacacaccaaaggagacaaaaacaggaagagaaggagggagccccaaggcaggaac

SEQ ID NO: 34728 - RNA, 76 nt, Homo sapiens
gccaaggggagggacaccacgggccagcccagccacccggcccgcagaaccgcgaccgggagagcgcgacagaggg

SEQ ID NO: 34729 - RNA, 81 nt, Homo sapiens
aaggagcccgggaaccggacaagcagggcggagggaaaaaagaacgaaggggccccagcaggaacgaggaagcggcaacac

SEQ ID NO: 34730 - RNA, 101 nt, Homo sapiens
gacccgagcgccggagggagacaaccggcagaaaaacaccagggaaagggagagacggcaccgggcaacccaacgcgggcgcaccaaccacaccaagcagc

SEQ ID NO: 34731 - RNA, 76 nt, Homo sapiens
cacagacggaacccagagcccccaaacggaggcccccggaaggaagggggaacggcagcgggagagaagccgaccc

SEQ ID NO: 34732 - RNA, 72 nt, Homo sapiens
ggcgcgcccccgccccccgcgcgcgcaccgcaccgggcccggcccgcgcaggggcgggaaccgacgaggacc

SEQ ID NO: 34733 - RNA, 55 nt, Homo sapiens
gccacgcgcggaaggcagcgcccagcagcgcagacgccacacacagaacgacacc

SEQ ID NO: 34734 - RNA, 79 nt, Homo sapiens
caacgaaaaggagaggaacggcaagaaagcaagcagaacccgacggagcagcagcgccgggaaggaaagcacacaggac

SEQ ID NO: 34735 - RNA, 73 nt, Homo sapiens
gaaacccgaagcgcggaaaacccagggggcgaacacggaaggcacggagcgcggacgcccaggagcgggcgcc

SEQ ID NO: 34736 - RNA, 55 nt, Homo sapiens
cagccaccagagccggcagcaaagagggaacagccaccagcaggaagacaagagg

SEQ ID NO: 34737 - RNA, 81 nt, Homo sapiens
aagcgcccagaagcaaccgcccacagcacggcggggccgcccagcgcaagagaaagcggggagcagggaggagcccggccc

SEQ ID NO: 34738 - RNA, 65 nt, Homo sapiens
aggccccggccaccagccaccgcagaggacagacaggcaagcggacccaggaaaaaaaagccaga

SEQ ID NO: 34739 - RNA, 67 nt, Homo sapiens
ccgcgcgccagcccaggaaaggcgccgaagagaccggagggaagacaagggccggcgagaggaggaa

SEQ ID NO: 34740 - RNA, 68 nt, Homo sapiens
gcagccacccacacagagacggaacagagaagcaacccaacagacaggcaaaagaaacagggaagaca

SEQ ID NO: 34741 - RNA, 71 nt, Homo sapiens
aaaagagcaaagacaaggaaaaaaccgggagacacgggaccaagaaacagcaaagagcgaaggacaacggg

SEQ ID NO: 34742 - RNA, 83 nt, Homo sapiens
caagagcccgcaggcaccccccgggcaggggcgccaacccaaccggcccagggcacggcacacacggcagccgccagagaacc

SEQ ID NO: 34743 - RNA, 74 nt, Homo sapiens
aagagcgggaagccacccgggaggaggaggggacacaacagcaggcagcccgcccagcggcacgccaccccgag

SEQ ID NO: 34744 - RNA, 63 nt, Homo sapiens
aaggcaacgcgccgcaaaacagaacgcggacagggacaagcgcacagcggagaaagcagcgcg

SEQ ID NO: 34745 - RNA, 72 nt, Homo sapiens
gagaagggaaacaaagagagcaaggaaggaacacaacaaaaacgcaccagggacgagcggggggagcaagac

SEQ ID NO: 34746 - RNA, 81 nt, Homo sapiens
aaacaaaagacaggagaaaaggccacagacgcaaagcggcccccggcaacgaaggcaggaaaagaagcaggagcgcaccca

SEQ ID NO: 34747 - RNA, 87 nt, Homo sapiens
gccgcccgaagaggagagagcgcgggcccaggaagccacaagggcgcagaagccggcagagcccaagagacaacaagccgaaaagag

SEQ ID NO: 34748 - RNA, 80 nt, Homo sapiens
gaggcacagcacgccaagaggaaaccagggggggccgaagaagccagggggaggaaagcagacagacccaccaagagggc

SEQ ID NO: 34749 - RNA, 65 nt, Homo sapiens
gagcaaagagcggacccagcaggccccacgccaagacggcaccaaacggcaaggaggaaaaaacc

SEQ ID NO: 34750 - RNA, 64 nt, Homo sapiens
cacagaccaagccccacagagggcgagccagggggagaagagccagcccaggggaacggcgagg

SEQ ID NO: 34751 - RNA, 69 nt, Homo sapiens
gacagagaggagggagaacaagcaacggcgggacgggagaacagaagagcagacagagccgagccagga

SEQ ID NO: 34752 - RNA, 70 nt, Homo sapiens
ggaccaccgaaaaaccccaaacccacaaggccgagaaggagggccagaaggaaggaaaaaggaagacagg

SEQ ID NO: 34753 - RNA, 58 nt, Homo sapiens
gaggagcgagcccaccacagcacggggcgccggccccagggcagacagggcaacggcc

SEQ ID NO: 34754 - RNA, 71 nt, Homo sapiens
cgggaggccgccggcccccgcgccggggggccccccgcggcggcggccggggcagcgccgcgagccagcaa

SEQ ID NO: 34755 - RNA, 56 nt, Homo sapiens
cagagagagagagggaggggcgcgagccggcacgaaacaaaggagcgagacagaag

SEQ ID NO: 34756 - RNA, 78 nt, Homo sapiens
ccaagaaccaacccccaaaggcgggacagaagcacaccagcccgaaacccgacaggaaggaaggaaccaagcacccag

SEQ ID NO: 34757 - RNA, 83 nt, Homo sapiens
cgagccaagagggcagccgccgaaggaacgcgacggcggcgcccgcagggggggccccagcccggccgaacgggcgcacgaca

SEQ ID NO: 34758 - RNA, 83 nt, Homo sapiens
aagagcacaaccgggcgcccggacgggggcaagcggaagggagcccaagaggaccaggaaaccccccaggcaagaggcgcagg

SEQ ID NO: 34759 - RNA, 74 nt, Homo sapiens
aaggagcgggccgcccgcgcgaggagccccgcgagacaggccgaccgggaaagcccagacgagcgggagcaaga

SEQ ID NO: 34760 - RNA, 40 nt, Homo sapiens
gaaagaaggcagaagaaacgagaggaccggcagcagagag

SEQ ID NO: 34761 - RNA, 76 nt, Homo sapiens
gggagggaaccccaggccccgaggcggacgggagagccaggagcgagcgagagcagagacaaagcaaggacaggag

SEQ ID NO: 34762 - RNA, 74 nt, Homo sapiens
aaggaccaagaaccagaccgcaagccgccacccgagaccgcgcgccccaccggccgcagaagacaagggcccgc

SEQ ID NO: 34763 - RNA, 83 nt, Homo sapiens
agacgcagccgagacaccagcccgaaacaccaccaagaacccagcggggccgccccacccgaggcccaccccaacgagccagc

SEQ ID NO: 34764 - RNA, 59 nt, Homo sapiens
ccgcagcgaccacccacacaaacccgggacgggccgagagagcgagcccagaggaagcg

SEQ ID NO: 34765 - RNA, 81 nt, Homo sapiens
cgcgaccagcaagagcaggagggcccacaccaaacagcaccagcacccaaagcacagagcacagcacggagaacgaacgca

SEQ ID NO: 34766 - RNA, 64 nt, Homo sapiens
ggaaccccggccgcgagacgcggcgcgcgcggcaccaggccgaggacccaagaagaccagccga

SEQ ID NO: 34767 - RNA, 98 nt, Homo sapiens
gggagacgccaccgaccccaacggcaccagcccgcacccgcagcaaaaacggccacacgacacacaggaacagagacagacccgggggcccccaagga

SEQ ID NO: 34768 - RNA, 76 nt, Homo sapiens
ccggacccagcgagcgggcggcacgcacgcagcagaagaagagggggagacccgcgcacacaagcggcagggccgg

SEQ ID NO: 34769 - RNA, 55 nt, Homo sapiens
gacccagcggcgccgcggagggaccccagggacagcccaccacaagcaggcccca

SEQ ID NO: 34770 - RNA, 70 nt, Homo sapiens
gaaacgcacaaaaaacaggaccagccccgaaaacacgcacgagaacccccagcaacccaaccgaccggag

SEQ ID NO: 34771 - RNA, 59 nt, Homo sapiens
gggcacccacccaagggaccggagacaagagggcccaacagcagaccaccgaaagagcc

SEQ ID NO: 34772 - RNA, 53 nt, Homo sapiens
cagcccccgagggcgggaacaggggacacaccggaagacgcaacacaggccgc

SEQ ID NO: 34773 - RNA, 73 nt, Homo sapiens
gccaggcagggggaggccaagagaagaagaaggaggccgcggccagaaacccaagaaaaagcgaaggaacgca

SEQ ID NO: 34774 - RNA, 75 nt, Homo sapiens
cagggaacccacacagaaggagaaagacagcaaagaaaaggagaagaaaggaaaaaaacaaccccgggcaccccg

SEQ ID NO: 34775 - RNA, 80 nt, Homo sapiens
ggcaagcggaagggagcccaagaggaccaggccggaaaacaaccagagggcacagcgaccaaccggaaacccaagacgca

SEQ ID NO: 34776 - RNA, 77 nt, Homo sapiens
gcggacggacacggagaccgggcggagccggacgagcgcggaacaaaggagccggcagacagcaacacagggcaggg

SEQ ID NO: 34777 - RNA, 61 nt, Homo sapiens
ggcgccgacggaagccggaggcacacccagaagccacaggagaagcaagaggcggcccccg

SEQ ID NO: 34778 - RNA, 56 nt, Homo sapiens
aaagcgggggaggccaaagcgcagggaaacaggccagccacgcagcagcagaagcc

SEQ ID NO: 34779 - RNA, 75 nt, Homo sapiens
ggccaaagccgcccagacggccaccggcgggaggaacaaaagaccccgaccgccacggacccgggcgccaccccg

SEQ ID NO: 34780 - RNA, 80 nt, Homo sapiens
cgccgcccgccggacccccggaccccccgaccccaacaccggggaacaggcagcagaacgcagggggcgccccccacccc

SEQ ID NO: 34781 - RNA, 80 nt, Homo sapiens
gcgagacccggggcaaggacccccgagccagagagccacgacagagcacacgccgcgcggaggcgcacacacagcagaag

SEQ ID NO: 34782 - RNA, 77 nt, Homo sapiens
gcaccccccaggggaagccgaagagaggaagaacacagagggaaacgcggccgaaacacagaaggaaaacgcaccac

SEQ ID NO: 34783 - RNA, 77 nt, Homo sapiens
agagccgcgccgccgcgccgcccgcgaaaggggcccgcagggaaaccaaagaaaaagaagacggggaaaacgcgcgg

SEQ ID NO: 34784 - RNA, 75 nt, Homo sapiens
caaggagaccggcggcgcccgggccacggcacgcagagaacaaacacccaaagcagccaggagccagcaaaaaga

SEQ ID NO: 34785 - RNA, 80 nt, Homo sapiens
gggaggccggccgggccagcacccggccgagacggcggcagcagcggcacagcaaggcgccaccggaagaaacgggaggg

SEQ ID NO: 34786 - RNA, 58 nt, Homo sapiens
gggaaaggcaccaggacaagcaaaggcacccagggagaggaagggcccgcaaagaagg

SEQ ID NO: 34787 - RNA, 67 nt, Homo sapiens
gaaagacccgagcagaggagcagggagaagagaaagagacgcagggcccgagggcaggacagcaggc

SEQ ID NO: 34788 - RNA, 87 nt, Homo sapiens
caggagcagggcgcagagagcgcagaagccagacagcccacagccgacgccgacccgcaggcaaacgaacacgcgcagcgcagaggc

SEQ ID NO: 34789 - RNA, 61 nt, Homo sapiens
ggagcggaaaacacgggccaacacggcgcgaaagccagggaagacaagcagaccggaagac

SEQ ID NO: 34790 - RNA, 81 nt, Homo sapiens
gccccaaggagcccggccccacaccggcacacagcaggcagagacagggcgagaagagcaggggggaggacagcaaagaag

SEQ ID NO: 34791 - RNA, 74 nt, Homo sapiens
aagaggaagagcaaggagaggcccagcaaacaaaggcaggaagagaaaagaggcaagaaagacacaaagacgag

SEQ ID NO: 34792 - RNA, 75 nt, Homo sapiens
gcaccccaacaacaccgcgagacgagggaagacacaaacggccacgacaggcaagacagcagaaaaggaccaaag

SEQ ID NO: 34793 - RNA, 76 nt, Homo sapiens
ggggggcccagcgcccgggcagggaagcagaggcacccacgcccacaaggccccgggcgcgggagccagccgaaga

SEQ ID NO: 34794 - RNA, 76 nt, Homo sapiens
gggcggaggaagccacaggcaacggaggggccaggcacgggacggaagggagccgcgccgcgaaacccgggaacga

SEQ ID NO: 34795 - RNA, 58 nt, Homo sapiens
agccacggcagacacacaacccgacccgacgaagccaagaagaaggagaaagaacgaa

SEQ ID NO: 34796 - RNA, 69 nt, Homo sapiens
cagaccgcagaaggccggagacaccagcaggacaaggcacgaggcgcggcgaccaccacagcagagccc

SEQ ID NO: 34797 - RNA, 80 nt, Homo sapiens
cgagggccgcggccaggacacgaggaccagccagcccaggggcaccgccagcacgcccagcaccacagacaagcccccaa

SEQ ID NO: 34798 - RNA, 68 nt, Homo sapiens
agcaacgcccagcacgacggcaaagcggagcggaggcagacacacacggggggagagggaggggggga

SEQ ID NO: 34799 - RNA, 67 nt, Homo sapiens
gggaccgaggccgggccccggaggcaaagagccggagcacaaacgggagccacaggcgggcaaccca

SEQ ID NO: 34800 - RNA, 75 nt, Homo sapiens
ccaaagacacaagaacccaccacgggcaaagaaagacccagggcaggaggggcacaccccgggacacggggcgag

SEQ ID NO: 34801 - RNA, 112 nt, Homo sapiens
gggacaggcgccaacaccaagagaaaccgacgcgggaaaaacgaccgcaagaccagggggaacaagcaagaaaagccccagaagggccgaaccgaaacccaagcccccccaa

SEQ ID NO: 34802 - RNA, 56 nt, Homo sapiens
gagagggcggggagccggagaaaacagaacggacgggccgagggaggaccgggaac

SEQ ID NO: 34803 - RNA, 87 nt, Homo sapiens
gagaggccggcgggacgcgggcgccaggaccggccgaacgcagagggcccggccaggccccaccgccacaagcaggggaacaccgcc

SEQ ID NO: 34804 - RNA, 73 nt, Homo sapiens
gcgggccccgggacggaaagacggccgagccaagaggggaggaggcacccaggaacagccgcaacgccgcaca

SEQ ID NO: 34805 - RNA, 76 nt, Homo sapiens
cggaaagcggcggacagccgaagcaaggaccgggacacccagaggccggagcccacccagcaacaccagagaaagg

SEQ ID NO: 34806 - RNA, 60 nt, Homo sapiens
gagcccccaccaagccccagagcgggaggggcaggacggggcagaggcagcgagaagaaa

SEQ ID NO: 34807 - RNA, 84 nt, Homo sapiens
gccaagagaagccgagagaggagacgaaggagaaacacagacccaagaagccaccgccccaccgcccgcacaaacaaggggcag

SEQ ID NO: 34808 - RNA, 105 nt, Homo sapiens
gccggaacgccggagcgcccccacgcagacgcgccgccccagccgcccccgacggagcgccccggccacgaacgcgcgccaggcgcagacccgcagggaacaccc

SEQ ID NO: 34809 - RNA, 68 nt, Homo sapiens
ccgccggagccgcgggcaaagccagaggccccccaagcgccaacggccgacaagcccgacgaagaccg

SEQ ID NO: 34810 - RNA, 76 nt, Homo sapiens
cgcgaccagacaggcggcgccaccgaacagacccggaaggacggcgaggaacagagaaaaggaggccggacaaaaa

SEQ ID NO: 34811 - RNA, 69 nt, Homo sapiens
gggaacgaagaagcccacgcagaaacccaccagacggaccgcacaggcgcaggcgcaaggggccagggg

SEQ ID NO: 34812 - RNA, 77 nt, Homo sapiens
accaggcccagaggcagcccaaggaggccaagacaaagggccccacacaccagacagagcgcaccccggaagccaac

SEQ ID NO: 34813 - RNA, 111 nt, Homo sapiens
caggacccagcccacgaacagagccagaaaaagacaacaaaaagaaagccacggaccccaaacgcgaaaggaaaagaaaaaaagagggaagagacagaacaaggagagaaa

SEQ ID NO: 34814 - RNA, 72 nt, Homo sapiens
cacgaagcaaaaaaacacacccaagcaccgggaccgcacggaagaacacgggaaagcagcaaaaagaaaaaa

SEQ ID NO: 34815 - RNA, 75 nt, Homo sapiens
agcccaaacaccgacggcagcagcacggccagggcagaaggaaaacacagaggaaagcacacacacaccgcaagg

SEQ ID NO: 34816 - RNA, 51 nt, Homo sapiens
caggcagacaaaagggccaaagaagggagagagcggaggacccggacccga

SEQ ID NO: 34817 - RNA, 79 nt, Homo sapiens
gcaccgggggcgggggcgccagcccaccaagaagggccgagcacagcaagcaagaacccaaggaccgcaaagaaaaccc

SEQ ID NO: 34818 - RNA, 69 nt, Homo sapiens
aacgcagcggaaggcggagagagcagggaaaccaacccaggcaagaaggccagaccaaagaaaagggag

SEQ ID NO: 34819 - RNA, 80 nt, Homo sapiens
acaaggacacacgccggggccacccaacaggagacggggacacacaaaaaagccagggaccacgccggaacacgccccgg

SEQ ID NO: 34820 - RNA, 66 nt, Homo sapiens
agaaacaggacagacggcaaaaaaaacacagcgccgaggccaccacagaagaaacgacacagccag

SEQ ID NO: 34821 - RNA, 85 nt, Homo sapiens
gggcgggccagcccgggcgggccgcgcgggagagggccaggccgagggcccgcccggccccaggagaagaaccagccgcagagga

SEQ ID NO: 34822 - RNA, 68 nt, Homo sapiens
caaacagggcgaagaaggaaagaaaaggccccgaggagcaggaaagcagcaaaaacagagaaacacga

SEQ ID NO: 34823 - RNA, 79 nt, Homo sapiens
aacgagggggaacccccgcggaacccacggagagacgccacccacaaagaagacaacagcaaacccagaggcacgacaa

SEQ ID NO: 34824 - RNA, 71 nt, Homo sapiens
ccggacaaccagaggcagccagcagggggagccagagcaagacccacgaagggcacacaaaggacccaccg

SEQ ID NO: 34825 - RNA, 78 nt, Homo sapiens
aacggccaggcggccccgagcggaacggagaaagcgaggcggagcggaggcagacacacacggggggagagggagggg

SEQ ID NO: 34826 - RNA, 70 nt, Homo sapiens
ccaggcccagcagccgccaccgggcccgagggcaggacagcaggcaccggcgaagcacagagaggcgcga

SEQ ID NO: 34827 - RNA, 90 nt, Homo sapiens
aaggcgcgcgcaagcacgcgaggagccgcggcccaggagcccgccggcccggcccccggccgcccgggccgcgccgccgcgccgccgcgc

SEQ ID NO: 34828 - RNA, 70 nt, Homo sapiens
cggggacaagaaacagagcaaaaaccggaaaaacgccaggagccagaaccccgaggaaaggggaaaagcc

SEQ ID NO: 34829 - RNA, 71 nt, Homo sapiens
cccgaaccagaaacaggcacaggcggcagcgcgggcagcgacaggagacgagacaagagccgaaaaacagc

SEQ ID NO: 34830 - RNA, 70 nt, Homo sapiens
cccaaaaaaaaagacgccaaccacaaaccaccccgggaaaagccacgccggagcacccaaagggagagca

SEQ ID NO: 34831 - RNA, 72 nt, Homo sapiens
aggcgggccagacgggacgcaacgaaagcagcgaaaaagagaagcggaagagagggcgaggcaggaagcggg

SEQ ID NO: 34832 - RNA, 75 nt, Homo sapiens
gacagcaagcaaacaccagcccgccaaggaacccgcggggcagaccacaccagcacacccagcacggcaaacaaa

SEQ ID NO: 34833 - RNA, 51 nt, Homo sapiens
aaccggagagcacccaacagagcgacagacagcaccaagaagaagcaaacg

SEQ ID NO: 34834 - RNA, 64 nt, Homo sapiens
acggacagcccacggaggcacagcggccccccaaaaccaaaaccacacaaggggaaggcagccc

SEQ ID NO: 34835 - RNA, 80 nt, Homo sapiens
agcccccaagagcgggaacagcaccacccggggacacccggagccgacaggaggaagaggaggaggcgccgaagacccga

SEQ ID NO: 34836 - RNA, 70 nt, Homo sapiens
gaaaagcacccacagcagagcgcaggaaagacaagccgggagcagacaagagggggcggcggccggcggg

SEQ ID NO: 34837 - RNA, 39 nt, Homo sapiens
agacccaggaaagggacacccggacgcaggcccggccag

SEQ ID NO: 34838 - RNA, 82 nt, Homo sapiens
cagcagcgacggggcccgcaccccagagccgaggaaacccagacccaagaccaaccgaggaggaggaggagggagacgcgcc

SEQ ID NO: 34839 - RNA, 79 nt, Homo sapiens
gcgagcccgaggacaggagaggaaggcacccggaccgaacagcgccgacgccgaaaggggagggagaccggcggagccc

SEQ ID NO: 34840 - RNA, 76 nt, Homo sapiens
gaaggcggcgcccaccccccccggacccgcggggaggagcgcggcaagacaaccacgaaaacgaagaggggagaag

SEQ ID NO: 34841 - RNA, 82 nt, Homo sapiens
ggccgagcgcgccgcggcacagccacagagggccgccagcacaagaccggaggaagaagcgcgaggcggaccgaaaagagcg

SEQ ID NO: 34842 - RNA, 68 nt, Homo sapiens
aaggggagaagaccgaaaacgacagcagacccgggagaacacaaccggaggacacaggaacgccacaa

SEQ ID NO: 34843 - RNA, 78 nt, Homo sapiens
ggaaaaggaacagagccaaaccagaagaggagggcccagaagaaaaaggcggggaacggcagccgaggagaagggacg

SEQ ID NO: 34844 - RNA, 81 nt, Homo sapiens
aagaggacaagagacgacacgcaagcaggcaaccgaaacagaggaggaacccgcacagacaagacagcaacgcaggaaaag

SEQ ID NO: 34845 - RNA, 75 nt, Homo sapiens
cgcggccaacggggccacaagagccaaaccccagccaccggaagaagaagagaacaccgagacacaggggcgaac

SEQ ID NO: 34846 - RNA, 81 nt, Homo sapiens
cggcgacggcggcgggaggcgggcgcccgggccgcgcggcgccgcgccggcggccgccagcaggcggaggcagggcacagc

SEQ ID NO: 34847 - RNA, 66 nt, Homo sapiens
gcacaccgcggaagcaaaccaagcgcgggggaagaagagaaagaaaaccagaacaaagaagccaca

SEQ ID NO: 34848 - RNA, 79 nt, Homo sapiens
ggcgagaaacgggaccgcaaagaacaggagcccacagaaggcagaggcagaaccacagaaacggcgaggaaagagagga

SEQ ID NO: 34849 - RNA, 126 nt, Homo sapiens
ggccgggagaagcagggaaggaggccgagccgggaccaggcccgggggcggcggccacgccaaggacggagccgcgaagcagccacggaccccagcacgaaaagacgggagaaaaaggggccaggg

SEQ ID NO: 34850 - RNA, 75 nt, Homo sapiens
cgacagcacagacagaacccgcaccaaaaggaagcacgcgcgcggacaagaccagaaagaaaagaaccaaggagc

SEQ ID NO: 34851 - RNA, 73 nt, Homo sapiens
acgcacggacaacaaaggcaacacaggggagagagccggcaaccagcagaaaagcggcaggaccacgccgaac

SEQ ID NO: 34852 - RNA, 83 nt, Homo sapiens
gcagcgagccgggcccaccaggccgcgaagccgccccagaacacagcgcacgcacagagacgcacagcggaggccgcacagag

SEQ ID NO: 34853 - RNA, 35 nt, Homo sapiens
caaaaagacgggagccaagagcgccggcccaggcg

SEQ ID NO: 34854 - RNA, 47 nt, Homo sapiens
gccacacccgcgcaggcacgcggcagaacgccaaaaggaagcccaag

SEQ ID NO: 34855 - RNA, 63 nt, Homo sapiens
agcggccgcgcacccccggccggaggcaccagcgacagaaagcgggacacaagcaggagcaca

SEQ ID NO: 34856 - RNA, 79 nt, Homo sapiens
ccaaaggggcggcgcgcagaggggcgagcagccggagcgcggcgggcaaggcaggcgccagacccgagaagggggggga

SEQ ID NO: 34857 - RNA, 52 nt, Homo sapiens
gccaagccaaccagccagcaggccgggcggggcaaaccagccggcgggcgcc

SEQ ID NO: 34858 - RNA, 81 nt, Homo sapiens
cgccgaggcacggggcggacgacccagccggggggcacagccgggccagaagaccgaagacagagaagaaaaaaaaagagg

SEQ ID NO: 34859 - RNA, 85 nt, Homo sapiens
cacgaggagcggggacggcgggcgcagacaagcggagaaaggcacagcagaagaagaaacagaagaagaagagcagaggaggcca

SEQ ID NO: 34860 - RNA, 53 nt, Homo sapiens
cccaagaaacagaccacagaaggagcaaaacccaaagcaaagccagggaggga

SEQ ID NO: 34861 - RNA, 67 nt, Homo sapiens
gacgcacggggccaaaacagacccacaacagacaacgaagagaggaaagaagcggaaaggagggagc

SEQ ID NO: 34862 - RNA, 56 nt, Homo sapiens
cggccggaaaaacgaacagacgcacaccacgcagcgaacccaggccacggcccaac

SEQ ID NO: 34863 - RNA, 75 nt, Homo sapiens
ggggcgcccgccgcgccgccacggcgaaacagaccccgaaaagcccggaaggacaagccagcccaaacgaacaac

SEQ ID NO: 34864 - RNA, 53 nt, Homo sapiens
cagaaagagaggagaagggaacaaccgaaaagcgccaagcccacgggcgcacc

SEQ ID NO: 34865 - RNA, 73 nt, Homo sapiens
caagcacagagcacaccaagcaaaccgacaccagcgacacaagcgcgagggaaccacagaggacaggcgaggg

SEQ ID NO: 34866 - RNA, 72 nt, Homo sapiens
gcccaacccggcaacggaaaacaccgacggaaaaccgaggaagccaaaggcgggagaagacagaggagccag

SEQ ID NO: 34867 - RNA, 82 nt, Homo sapiens
ggaagcggagccccccccacaggcaaggaagacgccgaggcgaaagacaccagcacccgaggccagcaacaacaccgccagc

SEQ ID NO: 34868 - RNA, 72 nt, Homo sapiens
agcagacggaacgaaccaggacgcgcgaacaaaaagaagggcgaggaacgaaaaggcacaaaccgaaaaaga

SEQ ID NO: 34869 - RNA, 84 nt, Homo sapiens
ggacgcgggagacgccagcgagcgggaggagcccgcggagaagacgaccccgacgcaggccaggagccgcggacagaagccgag

SEQ ID NO: 34870 - RNA, 60 nt, Homo sapiens
gggagcagcacacccgacgcgcagggcgacaggcagagcggaaacaccccccaccccgaa

SEQ ID NO: 34871 - RNA, 86 nt, Homo sapiens
aaagaaacgaaacaaagaacccccaaacccaaaccgaggagcgcccgccccagggagagaagcgccccagcagcaagccgccagga

SEQ ID NO: 34872 - RNA, 82 nt, Homo sapiens
cgcgaccgcccgcgccggcaccggggcggccggccaaagccaggagacccgaaagaccaccggggcaagcacagcgcacccc

SEQ ID NO: 34873 - RNA, 72 nt, Homo sapiens
cgccgggcgggcggaacgccaaaagacgaacacaaagggaaagaggagaggcacccgaaagccaggccagaa

SEQ ID NO: 34874 - RNA, 82 nt, Homo sapiens
ccgcggcaccgaaccacaaggaggacgagggcggaaacagcagaagagcgcggcaagcggccacgacgaaggggcaagccgc

SEQ ID NO: 34875 - RNA, 51 nt, Homo sapiens
cggaagacggggcagcacaaaaagagggggcgaggaagagacaggcggggg

SEQ ID NO: 34876 - RNA, 71 nt, Homo sapiens
cgcacgacaaagcgaccggacggggcaccccacggcggacacaggccaagaggaggacaggaaaagccaga

SEQ ID NO: 34877 - RNA, 39 nt, Homo sapiens
ggccaggcccagaggcgggaaggcacccaccagagcgcc

SEQ ID NO: 34878 - RNA, 74 nt, Homo sapiens
ggagaaacaaaccagccgaaaagaagacgcaaggccggaaaaggagacgaagaaggaacccccacggcgaagcc

SEQ ID NO: 34879 - RNA, 72 nt, Homo sapiens
gacggcaccaggggcaggccagcacccgagccgagccccagcgcagcgggaacagcccgggccgccgcaccc

SEQ ID NO: 34880 - RNA, 52 nt, Homo sapiens
cccacgacacaggaagaagacaggacagagggcaggaaccccacaaacggaa

SEQ ID NO: 34881 - RNA, 72 nt, Homo sapiens
cgcgcaccgcagccgcgcccgggcggagaacggaaaagcaccaggaagcagagaggaccgcagaagggaagg

SEQ ID NO: 34882 - RNA, 80 nt, Homo sapiens
ggagaaccaagggcccaccggagcagcccgggaaaggccaggacaggagaagaaaggaagagacgacagccagcaggcag

SEQ ID NO: 34883 - RNA, 80 nt, Homo sapiens
ggaaggacgaggaagggacgaacaggaagcggacgcgcagcggaacagcggccaagagggcggagaaggaacagggagag

SEQ ID NO: 34884 - RNA, 67 nt, Homo sapiens
aaacggcggaaaaaagcggagaagagcgaacaccacaccccagcccagccaccacagaacccccagc

SEQ ID NO: 34885 - RNA, 56 nt, Homo sapiens
acccagcccagaagaagcaggggccacaggggcacgggaggaagaccgcaggaaag

SEQ ID NO: 34886 - RNA, 73 nt, Homo sapiens
caccaacaccgccgacccaaccgagaaaaaaggaccagagcgggcggaacacgccgcgggaggcaagcgcaga

SEQ ID NO: 34887 - RNA, 61 nt, Homo sapiens
gcagcacaccccacaccagaacccagcagcgccagcacggcagccaccagggagaagagga

SEQ ID NO: 34888 - RNA, 76 nt, Homo sapiens
cagagcgcacggcgacgccccaggggaaaacccccgggaccagaaaagcacggcgccgagaggaaggacacaaggc

SEQ ID NO: 34889 - RNA, 55 nt, Homo sapiens
caagaacccgaggaacaccgagacgggggccacaggccaagcgaccgaacccggc

SEQ ID NO: 34890 - RNA, 67 nt, Homo sapiens
cccagcggacacagccccggaggcccacagacaagccgcccccccacccgacggagcggcgagcgac

SEQ ID NO: 34891 - RNA, 79 nt, Homo sapiens
acggcggccgcagggcgccggagccccccagagacacacaaaagggaagaagaagaaacaggcagaagcagaaaaacga

SEQ ID NO: 34892 - RNA, 78 nt, Homo sapiens
gaacaggggccagggaaaggagcagagagagagagcagaagaccccgagagaaacggcgagaaaaccaaacaggagcc

SEQ ID NO: 34893 - RNA, 86 nt, Homo sapiens
gcggccccggcgagaccccaccaggcgccgcgcccggcccggcggggaacgcagaggagaggccgagagcaaaccgcccagccgcc

SEQ ID NO: 34894 - RNA, 72 nt, Homo sapiens
agaaaccagccacgggccggaggcaaaaaagacagcccagacccggaacagggcgcgcacgagcgaccaggg

SEQ ID NO: 34895 - RNA, 52 nt, Homo sapiens
gagccaacaaaaagcaccggacggcaagcacaacgcaaaagcagaccggaaa

SEQ ID NO: 34896 - RNA, 71 nt, Homo sapiens
acgaacagacaagcacgccggagggaagagcgagggagagggaacgaccggagaaacgcaaagaagaagac

SEQ ID NO: 34897 - RNA, 74 nt, Homo sapiens
cacccagagcgcacggcgacgccccaggggaaaacccccgggaccagcggaggcacccaccacgggccaggcgg

SEQ ID NO: 34898 - RNA, 81 nt, Homo sapiens
acacccgcgagcacagccaaaaacccgggacacaacgacgacaacagagagcggaagccggcagaagaagacccaccaagg

SEQ ID NO: 34899 - RNA, 76 nt, Homo sapiens
aagcacaggcggaacgacgaaccgcaccaggcagaagaacggccgagcgaccaggagaggagcccccgcccgaaga

SEQ ID NO: 34900 - RNA, 130 nt, Homo sapiens
gacgagagcgccgaggcgagaacgcacaggccgcgcagagcgggaccacccgggcacagcaggcacggagcaaacggggacagcgccgaccggaacagggaccacggaagcccaggaccagccccgacaa

SEQ ID NO: 34901 - RNA, 83 nt, Homo sapiens
ggagccgcagcggccgagcggggcccaacaggcggagagagaggggagccggcccccgaaagagggacagaaagcgggacaca

SEQ ID NO: 34902 - RNA, 77 nt, Homo sapiens
agaaaaaggcgagacacaagcgaagacccagccagagaggaagcacgagacgacggagagggacaaacaaccaaggg

SEQ ID NO: 34903 - RNA, 58 nt, Homo sapiens
caacaagcgcggaccgccagggccccgaggacccagaaaggccagcagcagcgaggcc

SEQ ID NO: 34904 - RNA, 51 nt, Homo sapiens
cacagacgcaggcaccaacaaacgcacaacaaaggcacagcgaagaacacc

SEQ ID NO: 34905 - RNA, 66 nt, Homo sapiens
ccccggaccccggagccgcgggcacaggcagggcaagaacccgccacacaaggcgaacagagggca

SEQ ID NO: 34906 - RNA, 70 nt, Homo sapiens
gcggcggcgcggcccaaaagaacggagaagagagagaggacccagagaagaagaagcagaaaaggggaac

SEQ ID NO: 34907 - RNA, 50 nt, Homo sapiens
ccaacgcaaaaggagaaaacacaaggggagcggcaggggaggcgaagaag

SEQ ID NO: 34908 - RNA, 78 nt, Homo sapiens
aaggcccccaggaggagggacacacggacaggccgggccagcgcaccaggcaggcgccacaacaaacgcagcaacagc

SEQ ID NO: 34909 - RNA, 69 nt, Homo sapiens
aaccagccacgggccggaggcaaaaaacccagggccacaaaggagaacacgagagacacaagaaggcca

SEQ ID NO: 34910 - RNA, 86 nt, Homo sapiens
caggcagcagcccgcgagccggcagcgggaaggacagcgccgcaacccccagaggaacaccaccccagagcaagcccaaggcacga

SEQ ID NO: 34911 - RNA, 54 nt, Homo sapiens
ccagcacggaccaggaggcgagcaacagcagcagggacgcaccaaaacggacag

SEQ ID NO: 34912 - RNA, 67 nt, Homo sapiens
gcaaaggcggcggaggggcaggaggcgcggacacgcaaaccacacaagaagagaagagacagagcga

SEQ ID NO: 34913 - RNA, 72 nt, Homo sapiens
caaccaacagcccaggccgccgacgcacgagaagacgacgcagccagagcagcaagaggccaaggggacgac

SEQ ID NO: 34914 - RNA, 78 nt, Homo sapiens
ggaaacaacgcagcggagcgagggaccgacaagagaaaaccagagccggaggagccaccaacagaagcaggagccagg

SEQ ID NO: 34915 - RNA, 69 nt, Homo sapiens
gcaacaggaaagcaagggaaggcgccccaacaaaggacaacaaagcacacggagagagagaagaaccga

SEQ ID NO: 34916 - RNA, 74 nt, Homo sapiens
ggagacagaaggaagaaagagaggccggagaaaacaccaagcacggagagaagagaggagccagggccagcacg

SEQ ID NO: 34917 - RNA, 75 nt, Homo sapiens
aaagcagcggggacgaccagcaagagcgaagccaagaaaagaggaacaacgccagagcaagccaccaacaacaag

SEQ ID NO: 34918 - RNA, 71 nt, Homo sapiens
gaaaccacacgccaagaagcccaccagccggacacccgaagcagaagcgcggccaaaagaggggaaggccc

SEQ ID NO: 34919 - RNA, 66 nt, Homo sapiens
caccaacaccggccggaacaaacccgagcacaggaaccaaagggaaaggacacagaggagcgggca

SEQ ID NO: 34920 - RNA, 79 nt, Homo sapiens
agagaaacggagagaagaaaaaacacgccagagaaaccgcgaggaaaaccaccacacaggggaaacacccagacaacac

SEQ ID NO: 34921 - RNA, 75 nt, Homo sapiens
aaacgggcccaaaccgccgcgcaagcagaccagcggggagacgacacgccaggaggaagagggaggggaccaaag

SEQ ID NO: 34922 - RNA, 74 nt, Homo sapiens
ggcgggggcaaagcggagaccgaacggcggccaaagcgccagacaagggccgagccccggagagccccccgcaa

SEQ ID NO: 34923 - RNA, 69 nt, Homo sapiens
acagccgggcccgcacggacaacagcaccaggacaaaagaagggcagcacaaaggaaagccccaaaccc

SEQ ID NO: 34924 - RNA, 68 nt, Homo sapiens
caccgagaaaggaaggaaaaccgacgagcacacagagaaaaaaagggaacaaaacacagcaagcagac

SEQ ID NO: 34925 - RNA, 96 nt, Homo sapiens
aaccaagaggaagcggcagaacgacaacaaaccaaaggcaagggagggcccagaccacaagcccaccaacacgggaccacagagagacccccaaga

SEQ ID NO: 34926 - RNA, 74 nt, Homo sapiens
ccacgacacgcggcccggcgggccagcagccacaggcagaccagcaggacagcacggccaaacagcagcagaag

SEQ ID NO: 34927 - RNA, 58 nt, Homo sapiens
aaagggccaaagaagggagagaggcaggaaaaacaagggaccccaagaaaaggccccc

SEQ ID NO: 34928 - RNA, 77 nt, Homo sapiens
ggcccgaaagccaccaaaacgagacgagacaggacgcaaagaaaccccacgaacccacgaaacccaaagcacgaagc

SEQ ID NO: 34929 - RNA, 83 nt, Homo sapiens
gaagccaagaacacggagcaacacgcagaggacagccgagaagggagaaggccggacaaaggagggacccaaaaggggacaaa

SEQ ID NO: 34930 - RNA, 82 nt, Homo sapiens
gagacacacggccgagcaggggcaggaaacacagggagagccgcagaggccgcccaccacgcccgaaggagcccggggaaga

SEQ ID NO: 34931 - RNA, 63 nt, Homo sapiens
agaccggaaaggccacaccaaaagaccgaggaggaaaagaaagcagagagaagaccaccagcg

SEQ ID NO: 34932 - RNA, 63 nt, Homo sapiens
agaaaggaagagaaggagaaggcaacgagggccaaccgccgcagcagccaggcgaacacacac

SEQ ID NO: 34933 - RNA, 101 nt, Homo sapiens
cgcaacagaagcacccgccaccaagagaaagcgggacagaggagcgggcagcaagcggaaaccggacacagacaggcaggagaagaaggagcggcagaagg

SEQ ID NO: 34934 - RNA, 86 nt, Homo sapiens
caagccaacccaggaggaaaaacgagggaacaggcacgccccacccgccagccgagcccccgacgcagcacaaagcccccacggag

SEQ ID NO: 34935 - RNA, 77 nt, Homo sapiens
cagggcacggaaggggcccagcacaggccggggggggcacagagccccggaagacagcccccagcgaccagacccag

SEQ ID NO: 34936 - RNA, 92 nt, Homo sapiens
aaagggagccgccagcgcgggcggaccgacggagacggaaagccgggacaggaggaggaagaagacagaagagcccgcgaacggaagcggag

SEQ ID NO: 34937 - RNA, 78 nt, Homo sapiens
caagacggggaacaaggagaaagagaacacgcagagccggcgcagcgcgcccccagacacagaaaccaacaagacggc

SEQ ID NO: 34938 - RNA, 75 nt, Homo sapiens
gcccggagcagaaagaggacagacaaagcgggggaaaggaaggacaaagagaaggcaagccaaagccggaagacc

SEQ ID NO: 34939 - RNA, 82 nt, Homo sapiens
ccggaaaagggaagaaaagaaacagccagcacgccaagacacgcccgggcaaaaccgccgaccaggcacgcccaaccccgcg

SEQ ID NO: 34940 - RNA, 97 nt, Homo sapiens
accccccccggagccaggcggcggaaagcccacagcagcagaaaagcaccgagcagaaggcccgaacaggcacgaaaaaacccagcgaagaccacag

SEQ ID NO: 34941 - RNA, 79 nt, Homo sapiens
gccggggggggagccgcggccagcgcgggcacagaggcgcacacgaacaacagaccccgccccccgaggcgcagcccga

SEQ ID NO: 34942 - RNA, 83 nt, Homo sapiens
agagaaggagaagagagagacgcgccgggagagaaacacaagccgcccgaccccaggccgaggccggagaagggaagaccggc

SEQ ID NO: 34943 - RNA, 66 nt, Homo sapiens
ggacgccgggaacgcaggaacggcaagggccgggggcaccaagggaaggaggacccaaggaccgag

SEQ ID NO: 34944 - RNA, 85 nt, Homo sapiens
gagccggaggaaggagagacaggcgcgcaccagcagcacccgccaccccaaggggggacagcgaaggaccccaagccagaacgga

SEQ ID NO: 34945 - RNA, 85 nt, Homo sapiens
cgaggacgccgagaagaccccaggccaccgcaccaaggcgcccaagaagcggcccaccaccgccgcccggaaacacagaccaagc

SEQ ID NO: 34946 - RNA, 79 nt, Homo sapiens
aagacacagaaggggaccccaacgaagagggagaacggcaacccaccagacaccagccgggcgacgccaggagcacacc

SEQ ID NO: 34947 - RNA, 73 nt, Homo sapiens
cccaaaaacaagaaccccagcaggaaacagacgaaaaccggggaagaagggagggccagaggggaagaaagag

SEQ ID NO: 34948 - RNA, 81 nt, Homo sapiens
gcgccgccgccaccagcccaagagaaagaacccaggacgagaaaaaacagagcggaacaagcggcccaagagaaagcagcc

SEQ ID NO: 34949 - RNA, 78 nt, Homo sapiens
accagccaccaaggccacgacaccagaacgcagaagagcaagcgcgcggacccgcagcggagcgcaaaaggagagaca

SEQ ID NO: 34950 - RNA, 64 nt, Homo sapiens
agagaacacacggaccgagagagcacacaaaagagggacaacacaagccacagcgcccaggccc

SEQ ID NO: 34951 - RNA, 81 nt, Homo sapiens
caggcaccgccagcacgcgccgccccgcgcgcgagccacgcagcccccaggacacagacggaagggagggccacccacggc

SEQ ID NO: 34952 - RNA, 84 nt, Homo sapiens
ggagcccggaaaggagaaggaaaagacggcaggaggaagagagagagagggcgccaacgcaaagccacacgggcacggcccacc

SEQ ID NO: 34953 - RNA, 69 nt, Homo sapiens
cacggcgagcaccccacgccaggagaaagcgccggagaggacacagcaggcaaagaagacgacccggac

SEQ ID NO: 34954 - RNA, 110 nt, Homo sapiens
ggaaaaaaacagagaaaccaagaccgaacgaaagacacaggagcacacagaggccgcccacgcagcccacccacgacgccgaaaacacccagacgcccccggaaccccgg

SEQ ID NO: 34955 - RNA, 77 nt, Homo sapiens
caaacgagaaaaacccagcgaccgacgaccggcccagcacgacagagacccggaaagcgagcagcaaagacccagca

SEQ ID NO: 34956 - RNA, 78 nt, Homo sapiens
ggaccgggaagcagaggcggaggaaccgagcgggccgaccaccgacaggccagagacccagcaggagccaggaagaga

SEQ ID NO: 34957 - RNA, 76 nt, Homo sapiens
cggaggaccggcagccggggggaagacaaggaggcggagggaggcgcccggccaccccaagccccggcgccacggg

SEQ ID NO: 34958 - RNA, 73 nt, Homo sapiens
acaggggacaccagcccccaaggagcccacagcgcgacgcaccgcgggggaccaaggacccccaggcaaaccg

SEQ ID NO: 34959 - RNA, 97 nt, Homo sapiens
gcaacccgggccccccagccgagcaccaaaggggaaagccgaagaaaccaggggggaaggagggcgaaacaaaggaccagcacgggaaccggccgcc

SEQ ID NO: 34960 - RNA, 65 nt, Homo sapiens
cggcgggccgcgcgaaaaccagagagcgccaacagcaggccagcagggggaagcagcacggagga

SEQ ID NO: 34961 - RNA, 65 nt, Homo sapiens
ccggggcgcccggcgccggccgagaaggcagaggcgggaccaaacaaacaacaccgaaacgagaa

SEQ ID NO: 34962 - RNA, 43 nt, Homo sapiens
aagggcggagccacggcccagggaaccaggagccgacaacaac

SEQ ID NO: 34963 - RNA, 73 nt, Homo sapiens
accggagggaaaagaacggagcccaccgcaggacaccgggcccacaagacccggccccggccccacacaacgg

SEQ ID NO: 34964 - RNA, 109 nt, Homo sapiens
gaagaggccggcgacaggaaagccaagaacaaccaaagagacagggaaacaaacagcaacagagacaaaaggacccaggaaaggaagacagcagagacaaagccgcccc

SEQ ID NO: 34965 - RNA, 75 nt, Homo sapiens
gacgaaggaaaaggaacaaagcaaggacaaacacccgggaagacacacacaaggagcgccgcagccgcaggaagc

SEQ ID NO: 34966 - RNA, 69 nt, Homo sapiens
cagccccccgacagcccgggaagaagcagacacaagggacaaaggaaaaagaggaggaaaacagcaggg

SEQ ID NO: 34967 - RNA, 73 nt, Homo sapiens
ccgcaacaccagaagggaaagaaaccaggcgaaaggacgacacgaggggcagagacccagagaacccaaacaa

SEQ ID NO: 34968 - RNA, 78 nt, Homo sapiens
ccacacccacaaccccaccaacgccacgccagcacccagagccccaccagcacggaagcccgccccgacggcagagag

SEQ ID NO: 34969 - RNA, 101 nt, Homo sapiens
ggaagaccgcgcgcagggccgcagcgggagcggacggcgagcgcgagcggcgcgagaaacaagaggagccaggagcacggggggaacaagaccgccgggac

SEQ ID NO: 34970 - RNA, 88 nt, Homo sapiens
gggaagacaggcgacaagcaaggggaggagcagcagcgcggcagagcaggggccggccaggggcaaaggagaggaagaggaagaggaa

SEQ ID NO: 34971 - RNA, 75 nt, Homo sapiens
gaaagaacagaaggcgcgcagcaccggagcgccaagccccgggagagcgagacagaaccagaaagaggcgcacgc

SEQ ID NO: 34972 - RNA, 69 nt, Homo sapiens
aggaaaaaccaaaggaaccaggacagggacaagcgcacagcggagaaagcagcgcggccaggaggcggg

SEQ ID NO: 34973 - RNA, 71 nt, Homo sapiens
cgcagaaccagcgaggcaaaccacggaacaagaagggcagcagcagagaacggaagacgggagcaacgcca

SEQ ID NO: 34974 - RNA, 75 nt, Homo sapiens
cagccaagagccgggaccccagaagccagaaagggggcaacaaccacccccaagcacaaggaagaaggccacgcc

SEQ ID NO: 34975 - RNA, 74 nt, Homo sapiens
gaaaccgaaacacgcagaaagagaggccacgagcggcacaggacagaaccgcaaacaacggagccagaaacggc

SEQ ID NO: 34976 - RNA, 55 nt, Homo sapiens
ggaaaccaagacagcccaaacgccccacgaccagcggagggaggcgcccggccac

SEQ ID NO: 34977 - RNA, 52 nt, Homo sapiens
caagggccaaagcccaagaacgagcaaaagaacagaagggagaagccacaac

SEQ ID NO: 34978 - RNA, 76 nt, Homo sapiens
cgaagaaacggcgcgcccagaagaagggaaggcgcgaggaggaaaggaggacgagccccgccagacaacccgcggg

SEQ ID NO: 34979 - RNA, 72 nt, Homo sapiens
agcaagccacgcaacccagccccacagaagaaggaaccagcaaagcgccacgaagcacaagcaagaggacca

SEQ ID NO: 34980 - RNA, 34 nt, Homo sapiens
aagcagaggcagaaccaggagcgaaaagagacaa

SEQ ID NO: 34981 - RNA, 81 nt, Homo sapiens
ccggccccggcccacaggggggggcaaacccgagagaacgggccccgaaacaacagaaccaccccggggcacacagccccc

SEQ ID NO: 34982 - RNA, 74 nt, Homo sapiens
ccgcgggccccaccaacggccacccaagcacagaggaagaagaagcgggaagcgccacccagagcccggagccc

SEQ ID NO: 34983 - RNA, 53 nt, Homo sapiens
cccaagcaccgcgcacgcacgaacagcagcaaacggaggcaagcacacacgga

SEQ ID NO: 34984 - RNA, 77 nt, Homo sapiens
cgccagcaccggccccaccacagagacacaagcagcgaggaccaggaacaacagagacaagaacaagcaggaaaaaa

SEQ ID NO: 34985 - RNA, 76 nt, Homo sapiens
gggaaaaacaagaggagggagcaaaggaggcgcgcccaccgcgagcggaaaagaccccaccaaaacgccaggaggc

SEQ ID NO: 34986 - RNA, 67 nt, Homo sapiens
accagggccggccccagcccggcgcgccaagggcgcagcggcccaaaaaaggaccaagccccagaag

SEQ ID NO: 34987 - RNA, 78 nt, Homo sapiens
ggaaacccaccgggaaaaggcacgaaggagggaacaggcacgccccacccgccagccgagcccccgacgcagcacaaa

SEQ ID NO: 34988 - RNA, 83 nt, Homo sapiens
ccagccgcccaagccgcacagccgcggcggcagcagcaggagagacgggcggaccccggcaaaacgcccgagggagcgcgccc

SEQ ID NO: 34989 - RNA, 79 nt, Homo sapiens
cgccccgagccgaccgcgccgcacgggagccagcggggaaggaaccaaggcagccccaaccagacggaacaaaccaagc

SEQ ID NO: 34990 - RNA, 77 nt, Homo sapiens
agaagagacacagaggagccacacccccaggacaaacgagcgcaacccccgaaacggaacgagcgaaagacgagcga

SEQ ID NO: 34991 - RNA, 74 nt, Homo sapiens
aaagccccaagaacccacccgggccgggccggaccaagccgacccagagacagacaccccaaacaaagcaggcc

SEQ ID NO: 34992 - RNA, 78 nt, Homo sapiens
ggaagccagagaccaacgagaccgcacagcaggagaagaagagacggccacaaaccaccccagcaaagccggaaagaa

SEQ ID NO: 34993 - RNA, 84 nt, Homo sapiens
caccacgagagccgagccggaggaggaccccaagagggggagcgggggagagccaggaccgaaaagacgcggccccaaaggaaa

SEQ ID NO: 34994 - RNA, 73 nt, Homo sapiens
cagacgaggagcaggaacagacgcaagaggaccggaagggagaggcgggcaccacagggccaaccggagcggg

SEQ ID NO: 34995 - RNA, 68 nt, Homo sapiens
ccacaaggaaaacaaggcgcagcgaacagcaggaacaggaacaccacaagaaacacagaaagcggaaa

SEQ ID NO: 34996 - RNA, 86 nt, Homo sapiens
acaacccaaaaccaaaaccagacacagcacaagcagcggccacagggaaagcacgaagggagcccagcgacacaccagcagcagcc

SEQ ID NO: 34997 - RNA, 70 nt, Homo sapiens
cagcaagaccccaaaccagaacacagaaggacgcagcgcagggacacggcgacccagaagaccagagggc

SEQ ID NO: 34998 - RNA, 83 nt, Homo sapiens
gaggaggcgaagaggacgagaagaagaagaagaagagagagggccagggaggaaggcaaagaggaggacccgccaaaacggcc

SEQ ID NO: 34999 - RNA, 79 nt, Homo sapiens
gaaggcccacgggagaaaaccgggcgcaagaggggaccacaaacaggcccaccggagcagcagcccgacccgaccagca

SEQ ID NO: 35000 - RNA, 85 nt, Homo sapiens
agacgcggcacagagagggccgggagcgcgcagccaggacgccccgggccgccaggagcagacgaagcccgcggagcaagccgcg

SEQ ID NO: 35001 - RNA, 78 nt, Homo sapiens
acaaggaaacgaaccacccaaccaagaccagcgcggaaaaggaacagaagaggaaccgaaacccaagaaaaaccaccc

SEQ ID NO: 35002 - RNA, 71 nt, Homo sapiens
agaagcaagccaccgaccacaccgcccggggccgggcagcgagcccacacaggcagcaggcaccagaacgg

SEQ ID NO: 35003 - RNA, 76 nt, Homo sapiens
ggaaagccgaacccgcacagagggcaacagggccggagggagaacacaggaaccggagcgggggcaagaggaaaac

SEQ ID NO: 35004 - RNA, 93 nt, Homo sapiens
gagcgagcggcaaagaggggccggaccacaaggcaagagcagccgagaagaaaccgcaagaaagaaagcgggcacaacaacccaaaaccacca

SEQ ID NO: 35005 - RNA, 70 nt, Homo sapiens
cacagcgcccaggccagagaaggggaaggaggggcagcggcgcgggccccggggccgcggcgaaaggacg

SEQ ID NO: 35006 - RNA, 78 nt, Homo sapiens
ccacgaccggccccaaggaaaaccagcccagacagcaaccacaacagcaagccaccgggccggacgccgcaccgagag

SEQ ID NO: 35007 - RNA, 95 nt, Homo sapiens
gagaaaaccagcgggcgagcacacggaacaaagccccaggagccaccacgcaccggaagcgagaccaggaggagcgccggaagcagcgagggacc

SEQ ID NO: 35008 - RNA, 61 nt, Homo sapiens
cccaccgcccccacagcacggaagaagacgacacagagaagcaaaccaaggaggaaaccga

SEQ ID NO: 35009 - RNA, 61 nt, Homo sapiens
caggccgccaccgcaaccacacggacccaggggcagagcccggaggaaccaaaaaaaggaa

SEQ ID NO: 35010 - RNA, 69 nt, Homo sapiens
ggccaaagaaagcagaagagagaacgggcgaaaaacgaagaaggaagacgcgaccgaacaaacagccaa

SEQ ID NO: 35011 - RNA, 84 nt, Homo sapiens
cgccgcagccccccaagcggccgcgagaagcagcgggggggcaggcgacgaagaaccacccggcagaaaagcaaccaccgccac

SEQ ID NO: 35012 - RNA, 76 nt, Homo sapiens
ccagcgaacaccggcacggcacggcagaacaacggggaacgcacgcggaggaagaaaccggagagcggggccagga

SEQ ID NO: 35013 - RNA, 69 nt, Homo sapiens
ccagacgaagaaagccaacgaaccacaacaggagccagggacacagagcagaagcgcggacacccagaa

SEQ ID NO: 35014 - RNA, 55 nt, Homo sapiens
ccgacgcccagggaggaaggccaggaccccacaccaagcacgcccggagagcgcc

SEQ ID NO: 35015 - RNA, 70 nt, Homo sapiens
gacgaaccggcagggaaaaagcaggaacaaccaccgagcggaacgcacgaccagcagggccaccgcccca

SEQ ID NO: 35016 - RNA, 77 nt, Homo sapiens
gcagcggagggacacggaccgaaggaaggagggccccggagcagccacaccaccgaggccccacccagcacgagcac

SEQ ID NO: 35017 - RNA, 74 nt, Homo sapiens
ggagcacacaagcaaagacgggccaccagacccaccagcgcgcgaccggccccaacgcacaccaccaccccgaa

SEQ ID NO: 35018 - RNA, 79 nt, Homo sapiens
caccaaacgaaaagaggacaccagagaccaccaggacaaccaaagcaaaacaaccgaagagaagacacgaaggcgaaag

SEQ ID NO: 35019 - RNA, 34 nt, Homo sapiens
gggccaggacaccagacaaaaggacagcgacaga

SEQ ID NO: 35020 - RNA, 80 nt, Homo sapiens
aggaaaaacgggagggaggaccggccagcccccccaaaaaggaaagacaccggcggacggccaggggagcccccaagcgg

SEQ ID NO: 35021 - RNA, 73 nt, Homo sapiens
aacaggccccggagaccagcacaccagcaccaggagagccaagacccaccccgcggggccccagccagaggcc

SEQ ID NO: 35022 - RNA, 56 nt, Homo sapiens
cggcgcgaagccacaagaaagggaaacgcagcggaacgacggggggcagggacgag

SEQ ID NO: 35023 - RNA, 65 nt, Homo sapiens
aagagcccgccaacgaggggacgagccgcaggagccccgggcagacagccccgcaagcccaaggg

SEQ ID NO: 35024 - RNA, 113 nt, Homo sapiens
cgccccccgggagcgcggcggacgagggagcccgggggccgcgcgcgggagccgcacgcccaggaccgacagcagaggagcgcaagaacggagaacaccgacggagaaaacag

SEQ ID NO: 35025 - RNA, 70 nt, Homo sapiens
cgagagccgcccgggccagcggccgcgcacccccggccggaggcgggcgggcgagacccgaaaggccacc

SEQ ID NO: 35026 - RNA, 79 nt, Homo sapiens
agcaagagacgaccgcaacacgggaggacggggaaaaagcggccaaagaaggaagcgcgcaccggggcggcagggggac

SEQ ID NO: 35027 - RNA, 64 nt, Homo sapiens
cacggccgaaacaagacccacacgcggagcagaaagcaaggagagcgcgcgccgcgcgcccgca

SEQ ID NO: 35028 - RNA, 72 nt, Homo sapiens
gacaggcgggaacccgaagaagaccaccgggagagagggaaaaaacaaccccgccggcacgcagaaaagaag

SEQ ID NO: 35029 - RNA, 71 nt, Homo sapiens
cggggaaggccggggcgcccggcgccggccgagaaggcagaggcggcccagagggggaaggagccaggacg

SEQ ID NO: 35030 - RNA, 78 nt, Homo sapiens
gagaggacacaggaaacgccgacaggcccggggagccaagcagcccggaggagacgacggcccgggacccgaaggcac

SEQ ID NO: 35031 - RNA, 37 nt, Homo sapiens
cccgggccgcgcccgaggcaaaagcagaccggaaaac

SEQ ID NO: 35032 - RNA, 77 nt, Homo sapiens
ccgcagacggcgggggcacgacagcgcaaggaggccgcacccaaggccgcagacaagaagccggcacgacacaacca

SEQ ID NO: 35033 - RNA, 56 nt, Homo sapiens
cgcgcaagcggcacaaaggaggaaacagaaacaggcaacgcccgcgcggcggcggc

SEQ ID NO: 35034 - RNA, 60 nt, Homo sapiens
caagaagaccccagaggaaaagcaaaccagccggcgggcgccacaacggacgacgaaaac

SEQ ID NO: 35035 - RNA, 82 nt, Homo sapiens
aggaaaccccagaggaaaggcgcaaccccaagagagggcggagaaggaacagggagagaaacaacgggaacagaaaggagcg

SEQ ID NO: 35036 - RNA, 73 nt, Homo sapiens
cagcaagcacaagggagcaaaggggccaggacgcaaacagcagacggaagaccccacggcaaaaccacacccg

SEQ ID NO: 35037 - RNA, 80 nt, Homo sapiens
caccagggggaaggacagcaaaaaaaggcacaaacccagcacagagaagacggcgacaagcaaaagacgacgcagaaagg

SEQ ID NO: 35038 - RNA, 50 nt, Homo sapiens
agggcaagacagcgagggacgaaggagaccgcgcagacaaccaaaggagg

SEQ ID NO: 35039 - RNA, 57 nt, Homo sapiens
agcagaccacgaagaggacccgcacgaacgaaagcggcacggagaagaaggaaaaga

SEQ ID NO: 35040 - RNA, 79 nt, Homo sapiens
aaggaaaagggagcgaacccaccaaagcagaaaaacgaccggcccaggaccaaaaaaggaaccaacgccaagaggccca

SEQ ID NO: 35041 - RNA, 62 nt, Homo sapiens
ggcaccgacccgcggcccccgaccgcccagaggcaaggcgcaggccagacgacgaacccgac

SEQ ID NO: 35042 - RNA, 70 nt, Homo sapiens
gccagagccgcacaggagagggacagccgaagcagcccggggcccaaaaaagagagccacgcgcccaggc

SEQ ID NO: 35043 - RNA, 79 nt, Homo sapiens
accgaagaaagagccaaacgccaaggcggcagaaggaccaacgaccgcgaaacagacggcagcaggagagaagagccag

SEQ ID NO: 35044 - RNA, 84 nt, Homo sapiens
ggcagcaacagaggggacagcagcgaaagaaaggagagacccaggccaaagaaggagcgacccagaaaaacaaaaagggacccc

SEQ ID NO: 35045 - RNA, 73 nt, Homo sapiens
gccgacccacagggaagaaaacagggagagaagcacgagaccggagggacaggcaagaaggaagaaggcagag

SEQ ID NO: 35046 - RNA, 56 nt, Homo sapiens
ccacagaaggcgcgacgccggggaagaaggaaggcgggccaaggccagcggcaaag

SEQ ID NO: 35047 - RNA, 86 nt, Homo sapiens
ccgcgcggaccagccaagcagcaccaccgggggccgacacgggcgacccacgcaccggccacacacaggacaagagcgaagccaca

SEQ ID NO: 35048 - RNA, 74 nt, Homo sapiens
cagggggaaggagaccgaaaagaccgaagaaacggacgaaagacacagaagaacgcagcccggggagcagcacc

SEQ ID NO: 35049 - RNA, 75 nt, Homo sapiens
agggggccgccgaggagccccggccgcagccgggcccgagagaacaggacaggcccagacggacagcaaccagag

SEQ ID NO: 35050 - RNA, 78 nt, Homo sapiens
gaaacaaaccccggcggggacagagcaacaagccaagggaccaagaaaggcccagggaccaaagcccggacaaggccc

SEQ ID NO: 35051 - RNA, 60 nt, Homo sapiens
aacgcgaacccccacccccccggccgggagcggggaccaggccggcacgacaagacccag

SEQ ID NO: 35052 - RNA, 94 nt, Homo sapiens
gaaaagacgcaggaagaaccacaacaagaaagcagaaacgaaagaaagcaagagcggggagagcacgaccagcgcgcaccgcccagagcccaca

SEQ ID NO: 35053 - RNA, 82 nt, Homo sapiens
gacacaccggccgagggcccaccaggaccccaacgcagacacgaaggaagacacacgcaaaaagggacaccccccaaggaaa

SEQ ID NO: 35054 - RNA, 57 nt, Homo sapiens
caccgggggagcgggagcgcggaaagagcccaagagaacgaaagcacagaaaacaac

SEQ ID NO: 35055 - RNA, 81 nt, Homo sapiens
cccaccgcagacaccagagacgaagaagaaacggacgccagcagcccggacgccaccaagccgagccacgggcagcgggcg

SEQ ID NO: 35056 - RNA, 64 nt, Homo sapiens
ccgggcgggcgagcacaggcacacacacaccccgagagaaacggcgagaaaaccaaacaggagc

SEQ ID NO: 35057 - RNA, 88 nt, Homo sapiens
agcagggcaacgcggacccgggagaacaccagggccggaggaaccacaccggaagccccccccaaccaagcggcagcggcggagcggg

SEQ ID NO: 35058 - RNA, 77 nt, Homo sapiens
caacaccgaagaaagagccaaacgccaaggcggcaggcgcgcaaacgaaggaaaaggaaaaccaacagcgccacaaa

SEQ ID NO: 35059 - RNA, 70 nt, Homo sapiens
gaccgagagcggaccgagagcgcgaaacgcacgagaagcaacacccgcgcggagggggagggccagcccc

SEQ ID NO: 35060 - RNA, 79 nt, Homo sapiens
aaaaacgagacgggcggcgaacggcggaggcagaaagccaacaggcagaccagagacagcgccacgcacccggggagca

SEQ ID NO: 35061 - RNA, 81 nt, Homo sapiens
cccgacccgcgagagacacacggcagggaaccccaccccggaaggcggggacacagacgagaacacgaagaggacccggga

SEQ ID NO: 35062 - RNA, 87 nt, Homo sapiens
gaggccggggggcaccagacggcaacagagggagaagcaaagcaacgccaagaacacaagcccccaccgcacaccaaagagacgaaa

SEQ ID NO: 35063 - RNA, 71 nt, Homo sapiens
aaaaaaaaaaacaaccgaggggccgacccaagcacaccagaaagaagagcccacagagaaaaaaccacagg

SEQ ID NO: 35064 - RNA, 77 nt, Homo sapiens
caccaccacagacccagacagcagaacaacagaggcagcaggcacgaacgccaaaacccacaggaacagcgaagagc

SEQ ID NO: 35065 - RNA, 68 nt, Homo sapiens
agagaacaccggcgagccgaagcgagcaagacgccaagcacaggcggcgaacggagaccgaccagaga

SEQ ID NO: 35066 - RNA, 54 nt, Homo sapiens
acaacagaaccgggagcgacgagggaaaaaccaggaacgaggagcaccagacag

SEQ ID NO: 35067 - RNA, 75 nt, Homo sapiens
accgacccaacagaggcaagggaacaagagccaacaaggccccaggcaggggggccgcggacagaaaggcagggg

SEQ ID NO: 35068 - RNA, 75 nt, Homo sapiens
acccgggagagagaaaaaccggacgagcgagcaaggagcaccagaccgcaacaggagcagacggagaaagagacc

SEQ ID NO: 35069 - RNA, 74 nt, Homo sapiens
gaggaacagggcaaagagaggacaaagacccccgagcagcacggcagcccagaaacacccaacgaaaacacgag

SEQ ID NO: 35070 - RNA, 58 nt, Homo sapiens
gcaacggcgggggaccacgagagcggggaaggagaaaagccaagggaagaggaagaca

SEQ ID NO: 35071 - RNA, 73 nt, Homo sapiens
caggacacggccacaacaccaagaggcccggagaggaagccgccagccaccaaggagaccaggcaaaacagca

SEQ ID NO: 35072 - RNA, 94 nt, Homo sapiens
ccggaagcaccaggagccacagacgaccggcacacagcagagaggcggagaaagacgacaacccccagagcgaaccccagaagaagccaccacc

SEQ ID NO: 35073 - RNA, 62 nt, Homo sapiens
cgggcgagcggcggggagcggcgaagccgcgggcgagggacgaacagcggggacgccccagc

SEQ ID NO: 35074 - RNA, 100 nt, Homo sapiens
ccccaacagcagcaagcaccacccaggcagcaacgcccccggcccagcaacccccagccacaacgcgaaccgggcggacgaaggaggcggcaacaggacg

SEQ ID NO: 35075 - RNA, 66 nt, Homo sapiens
gcagcccgaaaagaagcaggaaaaggcggggcagcgaaagagaccagaaaaaggaaaagacaacag

SEQ ID NO: 35076 - RNA, 68 nt, Homo sapiens
ccaggggaagacagccgacgacgcaaaaaagagaagacaaacagaccccagaaagaagaagaggaaag

SEQ ID NO: 35077 - RNA, 77 nt, Homo sapiens
gccagcgacaacccccagaagagaccaacgccaccaaccaaccggagggagcaacaacaaggagcaagcacagcgcg

SEQ ID NO: 35078 - RNA, 71 nt, Homo sapiens
agaaacacacagcgcaggagaagaagagcagaaggagagaaccaggagaccgaagcaaccaacaagcgagg

SEQ ID NO: 35079 - RNA, 64 nt, Homo sapiens
ggcggcaaagagccggacaaaaacgcaagggccccgaaacaaacagacagacgaacgcaacccc

SEQ ID NO: 35080 - RNA, 47 nt, Homo sapiens
gcaaccgacggcgacgacgggaaaagacaagggcaggcaccgaccag

SEQ ID NO: 35081 - RNA, 68 nt, Homo sapiens
ggcgcacgaagggcgggaagaccgcaggaaagcaggaaggcaagaaagccaaggacgaaacccacacg

SEQ ID NO: 35082 - RNA, 69 nt, Homo sapiens
ccacgcaccaaaaacaggcagaacaaccgcacccccaggacagaagcagagcgccgcaaggcacagcca

SEQ ID NO: 35083 - RNA, 90 nt, Homo sapiens
gaggcgcccggcggagcagaggaaccacacgcgacaggagaaggagaggaacgcgcggaggaagaagaagaaagcgccggcggcggccag

SEQ ID NO: 35084 - RNA, 52 nt, Homo sapiens
ccgcggaccccaacccgaggagccgaagccaggcggaaagcaaaagacgaaa

SEQ ID NO: 35085 - RNA, 59 nt, Homo sapiens
gccaccaccgaggcagcccgcaaacccggaaccaggagagaagggagggcccaacccca

SEQ ID NO: 35086 - RNA, 78 nt, Homo sapiens
gcggcaggcgaagccccggagaaccacccggaggagacggggcagacaacggagcccgggggaaaagcacagggccag

SEQ ID NO: 35087 - RNA, 84 nt, Homo sapiens
cgcccgccggagcagcgagggcccccagccagcccgacagccgcaaaaccgcggaggagggaagggcacgagcacgaaaagcac

SEQ ID NO: 35088 - RNA, 68 nt, Homo sapiens
aaaaaacgaaacaagaagcgagccaaggcgaaagggaagccacgaagagacggacgggaccgaggagc

SEQ ID NO: 35089 - RNA, 62 nt, Homo sapiens
cgggcgcgggggggggggggggcggacgcgcaccgaccgacgggcgaagcgccaagagaaac

SEQ ID NO: 35090 - RNA, 80 nt, Homo sapiens
ccacccggccaggcccaggaaggcccggccaacgcaacagggagcccacgcaagaggggccggggaccgcccagcagcgg

SEQ ID NO: 35091 - RNA, 74 nt, Homo sapiens
gaaaccgggaaagccaccgaaaagagcaaacacgaaggagagaaagagaaggagcacaaagaacaacagccgcc

SEQ ID NO: 35092 - RNA, 71 nt, Homo sapiens
gcaggggcggaagccacacaggccagaacgagggcagagcccccgccaggcccccaaaccaaccgcggccc

SEQ ID NO: 35093 - RNA, 71 nt, Homo sapiens
cgaacagcaaggcacaaggcagacagccaagggaccggccggcagcacagaagacccggaaagccaagggc

SEQ ID NO: 35094 - RNA, 70 nt, Homo sapiens
agacacccaacggggaaccccagcggcggggaagccaaaacagaaacggaaagaaaaagacagcacgaag

SEQ ID NO: 35095 - RNA, 65 nt, Homo sapiens
gccggcgaccaggaaccgggcgagcagcggcgggggcccgagggacaacaggcacaaagagagaa

SEQ ID NO: 35096 - RNA, 69 nt, Homo sapiens
ccaccacagggccaacaagcagcgagcacccagccaaacccaggcccgagaagaagaggaaaacccacc

SEQ ID NO: 35097 - RNA, 76 nt, Homo sapiens
gggcaagagccacgcgcaacgagaggaaaccaccccacccaacccccgacacagaagaggagaaaacggaacaaca

SEQ ID NO: 35098 - RNA, 79 nt, Homo sapiens
ccgagggaggcgacgggggcgaagagcgcgccgcccccgcccacccagggggggccccagcccggccgaacgggcgcac

SEQ ID NO: 35099 - RNA, 78 nt, Homo sapiens
caggaggacgagcggaaaaacggagccacgggccacccccaaccaggaccaaagacgaccaccaaagccagcccccag

SEQ ID NO: 35100 - RNA, 87 nt, Homo sapiens
cggccggacccacggagccggcagcccagcacccggacaaccaaacccaccacaagaggaaaaaagaggcccccgcaccaagaaaga

SEQ ID NO: 35101 - RNA, 81 nt, Homo sapiens
aagaggcgcgcaacgcggccccggcacgcaccacggccacccggccggccgaggccagcagggcagcgggcccacggcggc

SEQ ID NO: 35102 - RNA, 60 nt, Homo sapiens
caagaagcagccgccaggggacaaaggagccaggacaaggacacgggggacaaggaaaaa

SEQ ID NO: 35103 - RNA, 78 nt, Homo sapiens
gaaaaagaggacccaaaaaagagagaaaaggccaaagagagggcgaacaagcaagaacagaaggagcggcggacacac

SEQ ID NO: 35104 - RNA, 80 nt, Homo sapiens
agacccagaaaggagaagccgcacagcccgcaagggggcacagggagcgggggacaacgaccacggccagcagggcaagg

SEQ ID NO: 35105 - RNA, 62 nt, Homo sapiens
ccggcaggaaccaccaggacagagagccagagaccaggagccccagagagcagagcccccca

SEQ ID NO: 35106 - RNA, 79 nt, Homo sapiens
cggaccgcagcacaggacacgggcggccgccgggcaagcagaacgggcccaccaggcggcaccagcagcagcgccggcc

SEQ ID NO: 35107 - RNA, 83 nt, Homo sapiens
ccacgcccagaaccagcgacccgccgcggccccagccagggccccgcacacggcccccccagcgcccaggaggcccgcaacaa

SEQ ID NO: 35108 - RNA, 72 nt, Homo sapiens
acaggggggccgacacaagagcgcgagaccaacaggagcacccgaagaagacaagacaggggaaagacagcc

SEQ ID NO: 35109 - RNA, 72 nt, Homo sapiens
gaaacgacacagagggaaggagaagagacaaagaggcaacccaaggagaaccaaggaacaccagaaaacagg

SEQ ID NO: 35110 - RNA, 69 nt, Homo sapiens
cgggccccggaacagccgggaacacaagccagaaaaagggggaagccagagagagagaaaccgaacgag

SEQ ID NO: 35111 - RNA, 73 nt, Homo sapiens
gcggggggacccaaaaagggcagaaaggaaacccagcggcggcagaaccagccggcacaaagccgaaccagag

SEQ ID NO: 35112 - RNA, 75 nt, Homo sapiens
ccagcagaagaccccgagaaaggcccagacaaaagaccaccaaaccgcccagaagccagacaaaacagaggagac

SEQ ID NO: 35113 - RNA, 64 nt, Homo sapiens
ggaggggaggagggccacgggccccagcagcccaggcaggagcaaccagccagaggcaggagcc

SEQ ID NO: 35114 - RNA, 76 nt, Homo sapiens
ccggaagggcggaggccccggcggcaggaggcagcagccaaaccgcagaccggacgaaggggcggaagcccgggac

SEQ ID NO: 35115 - RNA, 76 nt, Homo sapiens
agccccggggacgcgaaggccgacggcacacaggacgacagaaagacgaacaagggagagaaagagaccagaaagc

SEQ ID NO: 35116 - RNA, 39 nt, Homo sapiens
ccccacccgggccgcccgaagggggagaggcaccagcaa

SEQ ID NO: 35117 - RNA, 54 nt, Homo sapiens
gcgcggacgcgcggcacccacacaaaacgaaggaaggaggacccgaggagagag

SEQ ID NO: 35118 - RNA, 77 nt, Homo sapiens
gcagggagcgacgccaggaaaccgccggcacaccaaacggcagagacggagccaccaccaccccgagagacggaccg

SEQ ID NO: 35119 - RNA, 75 nt, Homo sapiens
cgcggccgacccacccgcagggaacaacaagccgcccacaccaagccagcaccaagcaccacgacaagggggaac

SEQ ID NO: 35120 - RNA, 71 nt, Homo sapiens
gggggaggcaagaccgccccgccgcccagaggacgcccaacaccacccacccaccacgccagacgcggcaa

SEQ ID NO: 35121 - RNA, 88 nt, Homo sapiens
gaaaccggaccagcgaacccacaggaaagaaacaggcccccggagggacccagaagcccaggccaaggcaagcaacagaaagagagca

SEQ ID NO: 35122 - RNA, 79 nt, Homo sapiens
gcggagggcacgcgacccccaacgccaagcagcccaccgacaggcccggaggcagcagaaggaaggaagggaacacgga

SEQ ID NO: 35123 - RNA, 81 nt, Homo sapiens
caccaagccggggcagggccgcgcgagcaggcacgccgaggagacggcaccagaagagaggagcccgagccggcagaagga

SEQ ID NO: 35124 - RNA, 68 nt, Homo sapiens
aaagggacccaggaagagaagaaagaggacaacagacgaaaccgaagagggaagagccagaagaacag

SEQ ID NO: 35125 - RNA, 70 nt, Homo sapiens
cgcgcgaagcccacgccgagccgagaggggacggccgccccgcgggcagagcccccgccaggcccccaaa

SEQ ID NO: 35126 - RNA, 79 nt, Homo sapiens
gccggagcccccgcccaaggagaagcgcccaagcggacgaaggggggagagaacaagcccgggccaccggcccagcagc

SEQ ID NO: 35127 - RNA, 71 nt, Homo sapiens
cgccgggacccggccaccagcaagccggaaggaagaaagacggaacagaccagagccgccccgcgcacagg

SEQ ID NO: 35128 - RNA, 63 nt, Homo sapiens
ggaacaccgacagccacaggcaccaaccagcggacacacggaaaagggacgggaaaagccgag

SEQ ID NO: 35129 - RNA, 63 nt, Homo sapiens
ccggcggccgaggagaagaggggggcggaagggggacagcaaggaaacgccgcacaggcacaa

SEQ ID NO: 35130 - RNA, 72 nt, Homo sapiens
cgaaaagaaaggaacagggaaagaggcacaagcagggggagagaaaagaaacccagccgaaccagagaaaga

SEQ ID NO: 35131 - RNA, 82 nt, Homo sapiens
acgccgaccgcgcaaacggcgcagaggcggcccggacggagcccccccggcgccggcagcgcccgggagaacgggagacaga

SEQ ID NO: 35132 - RNA, 77 nt, Homo sapiens
accgagaccacagcccgaaagccaacgagcacgggccaaggagaggccagaggagaaaaggacgacggaaccaccac

SEQ ID NO: 35133 - RNA, 81 nt, Homo sapiens
agaccagagccgggaccccagccaggaacaagcacacagagacggggacggcaacaacaacaagaaacgggccaggaggac

SEQ ID NO: 35134 - RNA, 87 nt, Homo sapiens
gaaggacccaaggcggagcaggccaaaggaagaagggaacacaagccgagaacagccgagcccagccccacagagcccagcccaagc

SEQ ID NO: 35135 - RNA, 77 nt, Homo sapiens
acccgaagaagaaaggacgacagccagagagcggcgccgacaccggaacagcgcccggaacagaaagaaaggccaca

SEQ ID NO: 35136 - RNA, 81 nt, Homo sapiens
gcgcgccggccaggagcacaccaggccagaccaagaagccaggcgggcaggaacagccagcaccaacaggggcggaggcca

SEQ ID NO: 35137 - RNA, 73 nt, Homo sapiens
agaccccgaaggcgcaaacgacaccacccgaccgcagcaggcgagaggcagaacccggaaagaaggaagggac

SEQ ID NO: 35138 - RNA, 80 nt, Homo sapiens
ccccaccgccccaggacagcaccagcgggccggaggagccagagcgcagaaagaacccaaggacgcagcaaagccaaaaa

SEQ ID NO: 35139 - RNA, 69 nt, Homo sapiens
cacggggaggcgcagcccgaaggccccgggcaaagcggacaccgggagcggaaccagcaaagaagaaac

SEQ ID NO: 35140 - RNA, 33 nt, Homo sapiens
accgggacccacaggcccccagggaggccgaac

SEQ ID NO: 35141 - RNA, 67 nt, Homo sapiens
gcacgggcaggcccgcaggcagggaggaccagcgaaaagcagggaccaacacccaggaggaggacgg

SEQ ID NO: 35142 - RNA, 77 nt, Homo sapiens
acgcaaggcggggaagacagccagagcgcagcaccccgccgccgagggaggcaggagaaccccgccagggaaggaaa

SEQ ID NO: 35143 - RNA, 61 nt, Homo sapiens
gacagaacgagagccagacagaggagagcaggccacaggaaaccgaagcccccccagccag

SEQ ID NO: 35144 - RNA, 68 nt, Homo sapiens
acacgacacccaaccggggaagacacagccccgaagcgaaagagagccaaccgagcgcacacggacaa

SEQ ID NO: 35145 - RNA, 83 nt, Homo sapiens
ggcaagagcggcagccacaccggcagagcagaacccggacgcacaaggagcaaagaccgcaggagggcagccacccagagaag

SEQ ID NO: 35146 - RNA, 58 nt, Homo sapiens
gcaacgccgacccgaagacccggacggcaggcggaaccaacgaaagccaaagagaggg

SEQ ID NO: 35147 - RNA, 75 nt, Homo sapiens
gaccggaagcacagcgggccagcacaccgagacagagacgccacaccggccacgcggcaggggggaagggcccac

SEQ ID NO: 35148 - RNA, 84 nt, Homo sapiens
cccggaccgaccagggcagacccagaccagcaccagacagcgaaaaagaggacccaaaaaagagagaaaaggccaaagagaggg

SEQ ID NO: 35149 - RNA, 73 nt, Homo sapiens
gaagcccagggcggacagaaagagccccagggaaaagacaaagcacgagaacgaaaagagagcaaagagacaa

SEQ ID NO: 35150 - RNA, 77 nt, Homo sapiens
gagccaacggcggccgccccgggcacacccggcccccggacgcccggcaccaagcacaccaaagaacaccggagcga

SEQ ID NO: 35151 - RNA, 61 nt, Homo sapiens
ccaggcacccggaagagcgcggccgaaggcacaggccgccccagaccccggaagcccaaga

SEQ ID NO: 35152 - RNA, 81 nt, Homo sapiens
cagacaggcgccagagccccaggcaggaggcagcagagaaagccacagaacacgcggcccagcaaggcaagcaggagagca

SEQ ID NO: 35153 - RNA, 81 nt, Homo sapiens
ccgccacccggaacccacaaccagaccaggcagcccaggaggacaggcaccaagaaaaaccgaagcaccgaagacggccag

SEQ ID NO: 35154 - RNA, 109 nt, Homo sapiens
ggaggcaggaagagacccagaagcggcggggccggagaagggcaaggacaagaaaacccagggaccagcggagcccagccgcaacacccccccacacaacaaaggggac

SEQ ID NO: 35155 - RNA, 65 nt, Homo sapiens
acgccaagcccgcgagacagagagacgaaagagccgcacccaagggccagacgcgaggaggaagg

SEQ ID NO: 35156 - RNA, 102 nt, Homo sapiens
cagaggaagaagcagcgaagacggaggcagcccacacggaacaaaagacgaccccgacgcaggccaggagccgcggacagaagccgagcacggccgagacaa

SEQ ID NO: 35157 - RNA, 75 nt, Homo sapiens
acaaggcgccgcggcgaccaacaagcggcgccccggggcgcggcccgggcacagaaaaggggaagaaggccaacc

SEQ ID NO: 35158 - RNA, 68 nt, Homo sapiens
acaccaaccacggcaccacgcaaaacggaggcccaccagaagcagaccaaagagggaagaggccccac

SEQ ID NO: 35159 - RNA, 52 nt, Homo sapiens
accccggagaaaaggccaagaaggcagcggcggcaagaagaacacacgaaac

SEQ ID NO: 35160 - RNA, 50 nt, Homo sapiens
ccacaaagagggaccgcaggaagggggaaggccacaccccaaaagaaccc

SEQ ID NO: 35161 - RNA, 56 nt, Homo sapiens
aagaaaggggaaccccggagaaaaggccaagaaggcagcaaagcccagacaagcca

SEQ ID NO: 35162 - RNA, 82 nt, Homo sapiens
aaaccggaggcccggggggcccagccccgagggagccggggcgccgggcccgggccgggcagggagggccacggcgcgcccg

SEQ ID NO: 35163 - RNA, 76 nt, Homo sapiens
aaggagccacaggaggaccggccccaaaaggaaccggagaggaggacaggacaacagcacccacaaaagcgaaaag

SEQ ID NO: 35164 - RNA, 69 nt, Homo sapiens
cgagaagaagacaagagacagaccaggacacaggcaccagagcaacccaggcacccaagaccgaagaac

SEQ ID NO: 35165 - RNA, 82 nt, Homo sapiens
agcaacacaaggaagcaagggccaccgcccagccaaccacagggaagagaagaggcagaccacggaccgggaccagcagcca

SEQ ID NO: 35166 - RNA, 75 nt, Homo sapiens
agacgcagggcgcccccgagacgggccgagacccaaggccaagggaaagggggagcggagcagggggagaggaag

SEQ ID NO: 35167 - RNA, 79 nt, Homo sapiens
agagaagaggaggccggcacggaaacacccgaccacccaaccacgcgcccagaccaaggcagcggacaaaagcaagagc

SEQ ID NO: 35168 - RNA, 73 nt, Homo sapiens
agagggacaagccaaggccgcgaggaccggggcgacaggcacggcaagagaacagcccgaacaccacagagga

SEQ ID NO: 35169 - RNA, 78 nt, Homo sapiens
ccgccgccccacgccggaggaaccgagaagagcagagcggagggagccccagacacgcacgagaacgaagaccagcgc

SEQ ID NO: 35170 - RNA, 37 nt, Homo sapiens
gcgcggcggcccgcgcacaggacacccacaccaggcc

SEQ ID NO: 35171 - RNA, 39 nt, Homo sapiens
agagcgagcggcaacccggaggaccagccgcccggagaa

SEQ ID NO: 35172 - RNA, 74 nt, Homo sapiens
caggaaggacacagcgagccaaaaagggggaagaggagagcgccgaacaacgaagaagggcgaagggaggaggg

SEQ ID NO: 35173 - RNA, 68 nt, Homo sapiens
aaccaacagaagggcaaccagggaggcggggggcaacggaaggaacgcgccgccaaaaaagggcgccc

SEQ ID NO: 35174 - RNA, 76 nt, Homo sapiens
gcggccagcgaaaacgcccagaaaagggaccaaccgagagcaccaggaagcgcagagagacaccgaacagaacgag

SEQ ID NO: 35175 - RNA, 80 nt, Homo sapiens
gccaccaaacacgacaggagggcaagaccgcgaagccagcccggagggagagaagggaacgagaaagaaaagacaaccaa

SEQ ID NO: 35176 - RNA, 78 nt, Homo sapiens
cacagccggaggaacccaggcccagaacaaaagagccaacacccaggccaggccgcccggaaggaggccgccacgccc

SEQ ID NO: 35177 - RNA, 71 nt, Homo sapiens
aaggaccaagaaccagcggagagcggccgggaggaagcagagggaaccaggacagagcgaaacgggacccg

SEQ ID NO: 35178 - RNA, 76 nt, Homo sapiens
gcggagcgggggcccgagaagccgacggggggaaaacaggaagagaacgaggagcaacccaaaggcgaaacccgga

SEQ ID NO: 35179 - RNA, 58 nt, Homo sapiens
cgccgccggccccgccgccaagaggagcgagcggacccgcgaggccccaaaagcacgc

SEQ ID NO: 35180 - RNA, 80 nt, Homo sapiens
cgcgccaaccagacgcgcgggagcaaagcccagcacaccagggggggaacaaccaacagcaccgccacaacaacacaggc

SEQ ID NO: 35181 - RNA, 55 nt, Homo sapiens
cgcccgaagaccaagaggacagggagagaaacaccgaaaagacagggcacagggc

SEQ ID NO: 35182 - RNA, 81 nt, Homo sapiens
cggagaggaccacacaaccgagcagcacaggaaacagaagcgcccagaggaccgcccgagcagaccccgaaagccccaccg

SEQ ID NO: 35183 - RNA, 79 nt, Homo sapiens
ggagaaaaagcagagcagcaaaacggggaccaaagaacccgcgaagcagaaggccaagagaggccaacagaggaacaag

SEQ ID NO: 35184 - RNA, 42 nt, Homo sapiens
ggaccaggcgcacgaagggacagagacaagccgagaccacca

SEQ ID NO: 35185 - RNA, 33 nt, Homo sapiens
agcacaggccgagggagaccaggagcgcaacac

SEQ ID NO: 35186 - RNA, 86 nt, Homo sapiens
ccgagaggaagacgagccgggaggaacggcccggaaacaggaggacgaccgaaggagaagaaggagaaggggaggagaaggcaagc

SEQ ID NO: 35187 - RNA, 72 nt, Homo sapiens
aaaagagaagcgaacccaagagaagagagaggaaaaagagaagccaacacagccaaggccaccgagccacaa

SEQ ID NO: 35188 - RNA, 77 nt, Homo sapiens
cgcccggcccggccccccagaggaggaaccacaagagccagaagaagcaacccaggcacccccaacaggcacccacc

SEQ ID NO: 35189 - RNA, 73 nt, Homo sapiens
gaagagaaaaaggagaaaacaagacaagcccacacagagcaagcaagaagaacacagacaagaagagaaaccg

SEQ ID NO: 35190 - RNA, 73 nt, Homo sapiens
gaaggggaaacccaaacaacacccgcaccgggcgccccgcagcggcagagcgagagcagccggaccagcgcga

SEQ ID NO: 35191 - RNA, 74 nt, Homo sapiens
gcaggaaaaacaaagaagacccagccccccacacaagaacggagcacgagaaaagcacccagagaggaaagccc

SEQ ID NO: 35192 - RNA, 73 nt, Homo sapiens
cacacaaagacaagcacacccgccaaggcccgccaagcgcccccgggcacgagagcggacgagccaaggccgg

SEQ ID NO: 35193 - RNA, 54 nt, Homo sapiens
gagagaggaacaagacaagagccgaggcagaaacgcaaaaggccaagcgagaag

SEQ ID NO: 35194 - RNA, 48 nt, Homo sapiens
gcgggaagagaaacaaagagagacagggcccgagggcaggacagcagg

SEQ ID NO: 35195 - RNA, 75 nt, Homo sapiens
cgcggaccagccagaaccaagaacaggaagggccgacgcagagaacaagaggagaaacacgggacaacgcaggac

SEQ ID NO: 35196 - RNA, 55 nt, Homo sapiens
ccgacacaacaccaccagcccagagcgcggcccaggggccaacggacagaggccc

SEQ ID NO: 35197 - RNA, 63 nt, Homo sapiens
gccaggcaagcacaaaaggggccaggccgggccaggcggaaagcaggagaagcccaacgcgag

SEQ ID NO: 35198 - RNA, 76 nt, Homo sapiens
cagggcgcaggagcagcagcacagaggcccacgcggaccggcagcgccaccggaccaccagacaaggacacggccc

SEQ ID NO: 35199 - RNA, 75 nt, Homo sapiens
cgggccgccagcagccaccagcggcggcaccgcggaggggcacagggaaggggacacgacacccaaaggacggcg

SEQ ID NO: 35200 - RNA, 79 nt, Homo sapiens
cagcggagaagagcgccggcccgggcccaggagcgaaggagggcagcagaccgcgcgccagacgccaaggacgcccaca

SEQ ID NO: 35201 - RNA, 61 nt, Homo sapiens
ccagcggcccgccaggcccgggcggagaacggaaaagcaccaggaagcagagaggaccgca

SEQ ID NO: 35202 - RNA, 76 nt, Homo sapiens
gaaaccccaggacccagacacaaggcggggaaaaaggagaagccagaacaaagagaagaaacccgaagccaagaag

SEQ ID NO: 35203 - RNA, 82 nt, Homo sapiens
cggcgaaacgcgaggcgcggcccgcggggggggaccacaagaccgacgcaagaggaagaggaggcgcaaaagggcccgggaa

SEQ ID NO: 35204 - RNA, 114 nt, Homo sapiens
gacaagagaagcacaaaacagcagacccaagagcagcggaaaagaccagcacaggcaagaggaggaacgacgagaagagaggaagagagagacgcaacggagaggaagaacaaa

SEQ ID NO: 35205 - RNA, 69 nt, Homo sapiens
cacgaacacgccggagccgccagagcagaaagaacaagggaccccagagaaagcagcagggaaggacgg

SEQ ID NO: 35206 - RNA, 82 nt, Homo sapiens
acccgcacggacccgggcgcagggaacgcagggaggccgaccagaaccaggggggggccggaagacccgcacacacacaacg

SEQ ID NO: 35207 - RNA, 85 nt, Homo sapiens
cacgcgcgcgggaggcccaggagccagccggagaagcgcagcaggccggaggcaggaagcaagaaacagaaagcaagagaaggga

SEQ ID NO: 35208 - RNA, 57 nt, Homo sapiens
gcccagacgccacaacaacccgaggacgagagggaagagcacgaacccaggagccgg

SEQ ID NO: 35209 - RNA, 86 nt, Homo sapiens
cggaccaagaaggggaggcccgcggcaggcaaaagcagaccggaaaacccaccggcaagaccacacccgaggggagcccaggacac

SEQ ID NO: 35210 - RNA, 69 nt, Homo sapiens
acgagcgggcagccgcccaaggggagaagcagaccgcaccaggcgggaccccgaaaaagcccaaacaga

SEQ ID NO: 35211 - RNA, 84 nt, Homo sapiens
ggacaagcccacggaaaaaaaagacggggcaaaggacaagccggaacgcgagacccccgcaccaggagcggggaaggggcccac

SEQ ID NO: 35212 - RNA, 53 nt, Homo sapiens
ggggccggcccaggggccaccaaggagggcggggagaagagggggcggcgagg

SEQ ID NO: 35213 - RNA, 69 nt, Homo sapiens
gcgacgaaagcagagcccacccgcaaaacggggcgcccagacgagcccaccacggaccacccgcagcca

SEQ ID NO: 35214 - RNA, 71 nt, Homo sapiens
acccaccggacggggcaggacagcagaggcacacaaacggaaccgcacaaagcagacaacaaaaagcagcc

SEQ ID NO: 35215 - RNA, 80 nt, Homo sapiens
cgaccgcggggcaccagcgcgcccagaccacacaaagaggggagcgaccaaacagaacaacaccagcgacaaaaaggaga

SEQ ID NO: 35216 - RNA, 74 nt, Homo sapiens
aacgcagccaacagcagcaaagcaagcagcagccagcagccacaaagggcgagcaacggcccaaccaacccccg

SEQ ID NO: 35217 - RNA, 65 nt, Homo sapiens
gggccgccggcggccacgggcaaacaggccccggccagcgccgccggaggagcgcccagggcccc

SEQ ID NO: 35218 - RNA, 78 nt, Homo sapiens
ggcgccgcgccccgggcaggcccccaagagccgaggcgcggcgcgccgaggcgcccaccagagagacggagcaccgga

SEQ ID NO: 35219 - RNA, 72 nt, Homo sapiens
acgggccaaacaaggcaaggcaccggagcggaaaaaccgaacaagggggaagaacacgagggaagaaggccc

SEQ ID NO: 35220 - RNA, 69 nt, Homo sapiens
aagccaggccgggaaaggccaacagaacaagagagaccagggggaagaccgaggagcagggagcaacca

SEQ ID NO: 35221 - RNA, 76 nt, Homo sapiens
aagggaaaacccccacacggaggggacgaagacaaaaaccagggaaagaaaacaagccacccagacaagaggaaag

SEQ ID NO: 35222 - RNA, 72 nt, Homo sapiens
gccggaaaagccaacgccggcgaagccggacccggagaccacccagagaggaaggaagcacaagaagagggg

SEQ ID NO: 35223 - RNA, 66 nt, Homo sapiens
gaaaaacaggaaaggagggacggcggcaggagaccagaggcaaacgcacacaggaccccgcgagcc

SEQ ID NO: 35224 - RNA, 80 nt, Homo sapiens
ggagccaagcggagggagaacgcaagagcagcgagaagggaggaaaaaaccagaagagcaaaacaccacaacgaaccaga

SEQ ID NO: 35225 - RNA, 68 nt, Homo sapiens
gacaagggcagaacgaacaggaacaaagccagacggaacgaaagagaaccagagcaccccaggaagaa

SEQ ID NO: 35226 - RNA, 83 nt, Homo sapiens
ggcgcagaagaaacccgcggcgaccacagccaaagcgggcaagagaccgacccaaacccacccaagggcaggacgggaagcag

SEQ ID NO: 35227 - RNA, 80 nt, Homo sapiens
aagggggaggaggggacgcagagcagcgaccaggaagccgcggagcgccggagcagcgggcccgaggacgagaagaggac

SEQ ID NO: 35228 - RNA, 68 nt, Homo sapiens
caagaacgccgccgccgcacaagggggcacccgaggaggaagagggcagggcccacggaaagaaggga

SEQ ID NO: 35229 - RNA, 71 nt, Homo sapiens
cgagccgggaagaaccccgcgggcggccgccgacgcacccagcaagaacccgaaaaccgccgcgcccaggc

SEQ ID NO: 35230 - RNA, 77 nt, Homo sapiens
acgacgcgacacaaacaaaagggacaacaccccaccacaagggacgccagaccaaacacaccccccagcgcgggccc

SEQ ID NO: 35231 - RNA, 82 nt, Homo sapiens
ccccccagcacccaccccgcccgggccccacgcgacaaggcaccagacccggaggagcagcaccccggcaggcagaccagcc

SEQ ID NO: 35232 - RNA, 77 nt, Homo sapiens
cggacaaaggaacaggaccaggggaacagacaagagggacacaggcgaaacagagaggaagacaagccaagcgagga

SEQ ID NO: 35233 - RNA, 83 nt, Homo sapiens
aaagaccaagcccgcgccaccggcccccagggacgccgcaggacccagcccccccaccccccggggaacgaagagccggccgc

SEQ ID NO: 35234 - RNA, 44 nt, Homo sapiens
ggcagccacgccgacgagcgcaggacagagcgggagccaccagc

SEQ ID NO: 35235 - RNA, 83 nt, Homo sapiens
cgcccccgccccagcccaccccaaccaaggagggccccgggggacaaggggggacggcgccgagccggccccgagacagcccc

SEQ ID NO: 35236 - RNA, 63 nt, Homo sapiens
cgcggccgggcgcgcggcgccgccacaaggcgcgccgcgacgaggacccaaagacaggaccac

SEQ ID NO: 35237 - RNA, 77 nt, Homo sapiens
accgcgggagaggcgagcagaagcaggaagggcaaggaccggcaaagccgaagagggcgcacccccgagagagccac

SEQ ID NO: 35238 - RNA, 71 nt, Homo sapiens
gccggcccacgcgcggccaagagaacaagcagaggaaagacacgccagagaagaacaggacacaacaggag

SEQ ID NO: 35239 - RNA, 64 nt, Homo sapiens
cgacaaggccaagaccgccagcaaaggaagacgagcaccaaaaagcccgggcaccgcccagcgc

SEQ ID NO: 35240 - RNA, 114 nt, Homo sapiens
agggccagcccacagagcccgaagggcgacgacaacgggggacacaggggcaacggccgggcccagagcagccccccggcaggggcggaggccagaggcgccaggggcgaggag

SEQ ID NO: 35241 - RNA, 77 nt, Homo sapiens
gcaacggcacagaaccgcagcagggacgcgggcacgggaccggcgaggacggagacaggagggaccgggcagaagaa

SEQ ID NO: 35242 - RNA, 60 nt, Homo sapiens
gccccagggcagaaggaaacaccagccgggaagagccaccaggcagcgacgacgccaagg

SEQ ID NO: 35243 - RNA, 39 nt, Homo sapiens
gagggaccccagccccacaggccccagccccagccaaac

SEQ ID NO: 35244 - RNA, 37 nt, Homo sapiens
cccggacggcacagggggggccacggacggggccgag

SEQ ID NO: 35245 - RNA, 71 nt, Homo sapiens
aaggaaaggaacagcgagcggaccccgaccccgaggcgagacggaaaggaagaaaggaaggggcaccacaa

SEQ ID NO: 35246 - RNA, 82 nt, Homo sapiens
agaccgcaaggccgcccgggaacgcgacgcgagagaaggacccacggcgcgcgaaggcccgcggcggaagccggcaggacac

SEQ ID NO: 35247 - RNA, 76 nt, Homo sapiens
aagaggagcgagcggacccgcgagggagaccacggggggaaggaagcgagacccggcgcgagaaggaacgcggagc

SEQ ID NO: 35248 - RNA, 69 nt, Homo sapiens
cacggccggaccgaagggcggcggcggaggggagccagggcgccccagcaggcacccaaccgccgcaga

SEQ ID NO: 35249 - RNA, 64 nt, Homo sapiens
acccacagaccagccggaacaagagacccggcaccgaaggacagaagaggacccagccaacgac

SEQ ID NO: 35250 - RNA, 66 nt, Homo sapiens
ccaggaacaaaccgggggcaaggccaaaaagaaggcgggagaccagggccagcccggccacacccc

SEQ ID NO: 35251 - RNA, 78 nt, Homo sapiens
ggcgaccgccaccgggagggggaagagccggagcgcccccgagggaagcaaggggccgagaacaagaagagaagaccg

SEQ ID NO: 35252 - RNA, 85 nt, Homo sapiens
aagaagaggagcaggccgggacgcccaccgccacccgccacccgggcacccagccccacgccagggaaccccacgccacccagac

SEQ ID NO: 35253 - RNA, 68 nt, Homo sapiens
acccgacaaagcgaaagcacaccaaggcaaaaggaaagaagaccaaaaacaggcggagaaacgaacca

SEQ ID NO: 35254 - RNA, 68 nt, Homo sapiens
cagaccagcaagggcccagggacaagagggaaaggagagggacagcccccccagcccaccccaaacgg

SEQ ID NO: 35255 - RNA, 104 nt, Homo sapiens
ggaggaacaaaagcgcaaaccggagccagaaacaaccgcaaccacccaacaagggcaacgacccgagaaggcggaaaccccgaggcgcagcccaccaaaaggga

SEQ ID NO: 35256 - RNA, 64 nt, Homo sapiens
caaacgcgaaccgcgcaggacgccaaaccaagccgcagggggaaggacgcgggccagacacaaa

SEQ ID NO: 35257 - RNA, 73 nt, Homo sapiens
cggaaacagcaacacaaaggaaaccggaagagaagacggagccgagccacgcggagcgccgggggcccaggga

SEQ ID NO: 35258 - RNA, 74 nt, Homo sapiens
ggacaagcgcgggaacggcgcggaaggccccgagccccggccccaaagacccaaaacagagacaccccccagcc

SEQ ID NO: 35259 - RNA, 54 nt, Homo sapiens
accaccaggccggagaacgccccaaggagcaagcaaggcagcaagccgcggggc

SEQ ID NO: 35260 - RNA, 82 nt, Homo sapiens
gccagcgcaacaaccccgggcgcacccacaaccgaaggagacaaccgaggccgcagagcccaggagcccccaggacaggcac

SEQ ID NO: 35261 - RNA, 79 nt, Homo sapiens
gacgagggagagccggacccccagaagaagagaagagcggacacagacaggcaggagaagaaggagcggcagaaggggc

SEQ ID NO: 35262 - RNA, 56 nt, Homo sapiens
cagcaaagccagcgacagaagccagggaagcgggagaggccacccgcccacgagcg

SEQ ID NO: 35263 - RNA, 80 nt, Homo sapiens
acggagcacaaagacaccccggcacagggcgaagggcgcgaagagccacccaggcaccagaaggccagcggacaaccgac

SEQ ID NO: 35264 - RNA, 57 nt, Homo sapiens
acgggaggggggagaagccgacgaaagcaaaccccacgagaacaaagcacggcagaa

SEQ ID NO: 35265 - RNA, 41 nt, Homo sapiens
ggcgcgcccggcgggccggaccaagagacggggcgccaggg

SEQ ID NO: 35266 - RNA, 76 nt, Homo sapiens
gcccgacagcaaacgggcacaagcaggagagcagaaaagcaacaggcccaggccaggcagagcagcccaccaggga

SEQ ID NO: 35267 - RNA, 73 nt, Homo sapiens
agaaggccacaaccaagagaaacaaccggcggagaacggaaaagcaccaggaagcagagaggaccgcagaagg

SEQ ID NO: 35268 - RNA, 64 nt, Homo sapiens
gcagggaaacaggaaccccacgacagaggaaagagggcaccgggagaagacaaaggccccagag

SEQ ID NO: 35269 - RNA, 75 nt, Homo sapiens
acaaccacaggggcccgacaagggacccagggccggcacgggcagcgagcagccacccggaggagggcgcccggg

SEQ ID NO: 35270 - RNA, 77 nt, Homo sapiens
acaccgagcccccgagaaacacgcagcggccgaggcaggggaagagagcggccccggacacgcgagcggcggaaccg

SEQ ID NO: 35271 - RNA, 72 nt, Homo sapiens
cagaagcaaaagaaaaggagccgcggggaggaggcgaagccacacagagggcaaggaggaacgagacagcgc

SEQ ID NO: 35272 - RNA, 73 nt, Homo sapiens
cccaaagaagcgcaggggaaacaaaaccgaggaaacagacgcaaaacaaaaggggccaaggacgcacacacca

SEQ ID NO: 35273 - RNA, 73 nt, Homo sapiens
cccccgaaaccacccccaggggagaggaagcacggcgcccccgacccggggccgggggggcggggaggccaga

SEQ ID NO: 35274 - RNA, 85 nt, Homo sapiens
acgcggccacggaacaaccgaacgcaccgaggagaagaccaggaggcgggccaagggaaaacaaagagggaaaacggagaaaagc

SEQ ID NO: 35275 - RNA, 84 nt, Homo sapiens
gcgggcgcgcacgacgacggcggacgcagcggcgggggcggacagagaaagaagcaagaaaaaccagccaaaagagagagaaag

SEQ ID NO: 35276 - RNA, 81 nt, Homo sapiens
gccaaccgaccgggcacgaggagaagggacacggcccagggagagcgaagagagaggacccgcccaccaaccgggcccacc

SEQ ID NO: 35277 - RNA, 86 nt, Homo sapiens
ccgaagcagccgggagccggagcgggcgcggacgccgaggcaccgaggcaccagaggagacccgggaggcccccgggagaagaaga

SEQ ID NO: 35278 - RNA, 42 nt, Homo sapiens
cacaacgaggagaggaaacaaagagacccagggcccgggagc

SEQ ID NO: 35279 - RNA, 62 nt, Homo sapiens
ggcagcgcggaccgaggaaaagaagagagacgcccggagagcgcgccgccgccgccgccgcc

SEQ ID NO: 35280 - RNA, 80 nt, Homo sapiens
gccgggccagcacccggccgagacggcggcagcagcggcacaggccagcggcggggcagccgagggcaggagcaagaagg

SEQ ID NO: 35281 - RNA, 68 nt, Homo sapiens
gggccaaacgcagcagcaccgccacaagaagaagggcgcgcaggaacaagaagaagggcaaccacaga

SEQ ID NO: 35282 - RNA, 79 nt, Homo sapiens
gcaagagcaccgccaagaccgccccccagcgccagaccagacaaagggagcaccagccagaccgggaagaaacgaaggg

SEQ ID NO: 35283 - RNA, 81 nt, Homo sapiens
gaccggggcccggggaaggcccgccgcccgccccagaaacggcgaggaaagagaggagccccggaaagaaaaggacagacc

SEQ ID NO: 35284 - RNA, 74 nt, Homo sapiens
cggcggagcgacagcggcaaagaagacaacgaggggcacgcgcccacccaggcgcagacgaccgcgaggaaaac

SEQ ID NO: 35285 - RNA, 73 nt, Homo sapiens
ccaagggggagcaagaaagaaccagggaccggagcaagccgaagaaaggacccgagaaccagccccgggccca

SEQ ID NO: 35286 - RNA, 60 nt, Homo sapiens
gccagaggcagacccccgaccggaccccagcccccagaacggagagcaggaggagaccaa

SEQ ID NO: 35287 - RNA, 75 nt, Homo sapiens
aaaacagaagcacagcagcaaaagcaaagacccccggggcgccaccggacagacaacggcaagcggagaagagca

SEQ ID NO: 35288 - RNA, 70 nt, Homo sapiens
aagacccccgagcaggggcgccagccccgaaaggagaacggaaaacagccagaacaccagaggccgaaca

SEQ ID NO: 35289 - RNA, 40 nt, Homo sapiens
caagggggggggcagggaggaaagccaggagcccaaaaag

SEQ ID NO: 35290 - RNA, 56 nt, Homo sapiens
acgaaggacaaggggagagcggcccccgcagaccacaacacagagccaaaagagga

SEQ ID NO: 35291 - RNA, 72 nt, Homo sapiens
agaggaaccacacgcgacagggaaacacaaagaagacaccagaagggccagcaccacgacaacacggcgaca

SEQ ID NO: 35292 - RNA, 62 nt, Homo sapiens
cacacaagggccgaagcagggcacaaaaccaaggccaagcaaggccgcaaaccgggaaccag

SEQ ID NO: 35293 - RNA, 60 nt, Homo sapiens
agggacaggcgcaggaagaagaagggacacccacagcacagggaagaggagaagcaaggg

SEQ ID NO: 35294 - RNA, 77 nt, Homo sapiens
caaacgcgcaagggccgggaagaagaaagacgagagccccacacacagccacacagaacaccagaaaggcccagaag

SEQ ID NO: 35295 - RNA, 77 nt, Homo sapiens
cgcacgagaagaccccacagcggggccacagcaagcccaggcaggcgaggaaaaccaccacacaggggaaacaccca

SEQ ID NO: 35296 - RNA, 77 nt, Homo sapiens
gggcgccgggccgccggcgaaccgcccgcggcccaaggacgcaggacccagcgggagagaggaaggaggccgaaggg

SEQ ID NO: 35297 - RNA, 91 nt, Homo sapiens
gcgggcgagcggccggcggcgcgggcccggcggcggcggcagcggggccgggccggagcgccacaccggggccaaagcgaccaacccccca

SEQ ID NO: 35298 - RNA, 74 nt, Homo sapiens
ccagacacagggacaaggcaccggaacacccaccccaccaggaaaaaaagagggcaacagaaacaacgggacgg

SEQ ID NO: 35299 - RNA, 93 nt, Homo sapiens
aaaagaaaaggcacgaagccggccagccccaggacagggcacagacaggaaggccggggaaaggcaggggcgcaagcaagcagaggagggggg

SEQ ID NO: 35300 - RNA, 88 nt, Homo sapiens
ggagcccgagcccaggcagcccagcccgcccccagaaaccagaacgagcaaagccaaacaaaaacagcaaagcgccacagaagaggca

SEQ ID NO: 35301 - RNA, 79 nt, Homo sapiens
ggacagggagagacgacccagcggcggccgcgacgcggggcagccgagcacagcacgggacgacacagcaagcaaaaga

SEQ ID NO: 35302 - RNA, 71 nt, Homo sapiens
cccaggccacacacagaaccgacccaaggaacccaaaggcaacagagggaccaaacaacaaccccgagaga

SEQ ID NO: 35303 - RNA, 100 nt, Homo sapiens
gagcgcgcgggagcccgggcaccagagcgacgggcaggaaggagggggcgcacaaacgagggggggccccagcccggccgaacgggcgcacgacacaaac

SEQ ID NO: 35304 - RNA, 77 nt, Homo sapiens
cgcccgggccagcggccgcgcacccccggccggaggcaccagcgcggggaaaacacacacgccgcgggagcccaagg

SEQ ID NO: 35305 - RNA, 57 nt, Homo sapiens
ccccgagagcggaacacagaaggacgcgaaagaagacagacccagagagaacacacc

SEQ ID NO: 35306 - RNA, 80 nt, Homo sapiens
gggaagaagcggccgaagggagccgcaccggcggcaaccaggccccgcccgaacgacggacccacagcgagccccacggg

SEQ ID NO: 35307 - RNA, 87 nt, Homo sapiens
gccaccccagcccgggccgagccaacaggaccagcagggcgggcaggcccacacagcagggagagcaacaagccccggccccagagc

SEQ ID NO: 35308 - RNA, 68 nt, Homo sapiens
cagggaagcagaagggccgccaaaagcagcgccacaagagcaggagccaaggaacaaccagcccagga

SEQ ID NO: 35309 - RNA, 37 nt, Homo sapiens
gccgcacggacgggggggggaaggcccgccgaaggag

SEQ ID NO: 35310 - RNA, 77 nt, Homo sapiens
cgagaagcacccgcgacccagaagggcgaagaagagcagagcagccgaagcggggacgacacgaggccacgagcccg

SEQ ID NO: 35311 - RNA, 75 nt, Homo sapiens
gcccgcagaaaagacagaaacagacagacagagagaaccaggcgcaacaggaccgaggaaccgagacccccacga

SEQ ID NO: 35312 - RNA, 57 nt, Homo sapiens
ggaccagcagggagaagcaaaagaaccgaaaaggacgaaaagaccccgcacaccccc

SEQ ID NO: 35313 - RNA, 76 nt, Homo sapiens
gaagaagcgaaccgggggagaaagaacgggcaaggaaacagccgcaaaccgggaaccaggacaaagaaaaaagaga

SEQ ID NO: 35314 - RNA, 76 nt, Homo sapiens
accacaggcgaaccaaaccgaaagccgacaggaagaaggagaaagacaaagccccgagaaagaccagcaccgccga

SEQ ID NO: 35315 - RNA, 72 nt, Homo sapiens
cggaaagaccgaaacaacacgcaacccggccaaggaagggaagaaacgaagcgcaaggggacaggcagaaga

SEQ ID NO: 35316 - RNA, 75 nt, Homo sapiens
gcaaaggcagaccaacaagaggacccaggagaaacgccccaaaaacgcggcagaacggaggcaggcagcacgaga

SEQ ID NO: 35317 - RNA, 80 nt, Homo sapiens
caggacgcgccgcgccccaagaagcccagcccaccgggaggcagaaagccagggcgcaccacccgcggccggaccgccgg

SEQ ID NO: 35318 - RNA, 83 nt, Homo sapiens
gcgaccacgacggagaagcagggccaagaggcaaccagaacaagagcgggacgaggaagcaacggaggacggacagccaccgc

SEQ ID NO: 35319 - RNA, 85 nt, Homo sapiens
aacaaccgcgggcacccacggaaaagacgcccagcggcagcaggagaggcggaggcaagcgcccggcccgcggggggccccggag

SEQ ID NO: 35320 - RNA, 73 nt, Homo sapiens
acaagagagcaccgagcccagaaggagcccaggaagcgaggaaagcgcggagagcgaagccagcgaacggacc

SEQ ID NO: 35321 - RNA, 65 nt, Homo sapiens
aaaacgaccaagccagagaacagcccccacgcagcccagaagggaccaagaaaggcccagggacc

SEQ ID NO: 35322 - RNA, 48 nt, Homo sapiens
ggagaaccgcaggcccagagggcgggaccgaggacacgccaacccaca

SEQ ID NO: 35323 - RNA, 69 nt, Homo sapiens
gccacgcaccagaccccgacgaaggcgggccagggcagggagggcaggaggcaaccagagggacgggaa

SEQ ID NO: 35324 - RNA, 81 nt, Homo sapiens
cagcaagggcggcggggcggcggcggcagcgcaggacagccagcagaacccgaaacaccacgggagcgaggcgacagaaga

SEQ ID NO: 35325 - RNA, 70 nt, Homo sapiens
aacagggagggaaaaacaagaacaaacgaaaagaagagccagcaggagaacaaacgcgaccagaaccgaa

SEQ ID NO: 35326 - RNA, 63 nt, Homo sapiens
cagcagaggcgacgcgagaggcggcagccagcggcggcgaccaggcggaggcagggacacacg

SEQ ID NO: 35327 - RNA, 77 nt, Homo sapiens
gaccaaggggcgagagcccccaccccagacaggggaacagggcacagcccacccagacgcaagaacaaacccaaaaa

SEQ ID NO: 35328 - RNA, 81 nt, Homo sapiens
ggaagaaaacaaccaacagagcccgcagagcaccaggcccaccggaaaggcacaccagacacgcagcagacacccagaaag

SEQ ID NO: 35329 - RNA, 80 nt, Homo sapiens
aaaaccggaacagcagcacagcaaagagcggcaaggagacagcaacgagaaaaaaacgagaaccgcgcagccgcaagaag

SEQ ID NO: 35330 - RNA, 73 nt, Homo sapiens
cacacgccaccgccacaccacacaggacccaccaggcaagcgccacgcagagccccgccaggaagacacgccg

SEQ ID NO: 35331 - RNA, 38 nt, Homo sapiens
agaaccacggaggcaaaaagcccccacccaggaaggaa

SEQ ID NO: 35332 - RNA, 80 nt, Homo sapiens
cacgaaaggagcaagagcaagacaccggacaccgagggcccccaaaagccgggcccagaacggcgccggcacgagggcaa

SEQ ID NO: 35333 - RNA, 76 nt, Homo sapiens
cagagcacacaaccagaagccagggagaaggaaggaggaggagaacacaggggagacacgcagaaagggacaacaa

SEQ ID NO: 35334 - RNA, 38 nt, Homo sapiens
gcggacaccagacgagagcgcccgaagggccgaggaca

SEQ ID NO: 35335 - RNA, 49 nt, Homo sapiens
ccaggcagcaggccaacgcagccgcccaaaaaagacccacaggcgaaga

SEQ ID NO: 35336 - RNA, 85 nt, Homo sapiens
cgcccggaccggccgagaggaagacgagccgggaggaacggcccggaaacaggaggaccaccacgccacgggaaggcaggcaaga

SEQ ID NO: 35337 - RNA, 76 nt, Homo sapiens
ggaagagagggagcagagggaaagggaaggagaaggagggacgcaggcgcaggccaggcaaaaggaaagaagacca

SEQ ID NO: 35338 - RNA, 86 nt, Homo sapiens
gcagacggcgacagggcggcggcgccaggcagggcgcaggaaagagaagggagggcgacgagagccgaagcagaggccaagaccaa

SEQ ID NO: 35339 - RNA, 71 nt, Homo sapiens
gaacgcccgcggaacggcgcaggggccagaagagaccaagaggaccccagaccaagaaggaaaccgggaag

SEQ ID NO: 35340 - RNA, 37 nt, Homo sapiens
gaagcaagcggaagcgagcagcaggagagagcccacg

SEQ ID NO: 35341 - RNA, 79 nt, Homo sapiens
ggcgagccgccaagaggcggcgcagccaccccgcgggaacgcccagcgcgaggccagagaaggccccaggcgcaaccaa

SEQ ID NO: 35342 - RNA, 71 nt, Homo sapiens
ggcagagcaaaccgcaacagcacacagggaagaccagaaacagggcaagagaacaaaggaagaaaaaaaga

SEQ ID NO: 35343 - RNA, 83 nt, Homo sapiens
cagcgaggccaggaacccggggagaccccgacgggaggccgagggggaccggacgacaccagccaaccccaggaaaacgcagc

SEQ ID NO: 35344 - RNA, 76 nt, Homo sapiens
ccgcaggagggagaacggccacaagaacggaagcagaagcacgcaagcagagacagagaggaagacacggcaaagc

SEQ ID NO: 35345 - RNA, 72 nt, Homo sapiens
gaaggcagcagcgcaaggaggacccagaacgcggacaggagacgagcagagagaggaggcgcgagagacaga

SEQ ID NO: 35346 - RNA, 59 nt, Homo sapiens
ccggcgagcgcagcgcgaccgggaggcccagagacaaggaagcccccgagacaagcagc

SEQ ID NO: 35347 - RNA, 77 nt, Homo sapiens
cggcgccgcgggcaggggcgacagggcagcccgcagaggaccgcacgaacgcaagaaccacagcagagccgcgcgag

SEQ ID NO: 35348 - RNA, 77 nt, Homo sapiens
ccgaccggaacccaagaaagaggcggccgaaagggaaaaaagagaaaggcaccggagagggcaccaacccaaaaccg

SEQ ID NO: 35349 - RNA, 77 nt, Homo sapiens
agccacggaagccgacagacaaccagaaaaggccagacggccagcagccacgccaggcaccgcccaggccaggaaca

SEQ ID NO: 35350 - RNA, 79 nt, Homo sapiens
gcccgccacacgagcgcgccgcagcgcgcgacccggaggcacccgccgcccagagacgagccggcgcagaagggggccc

SEQ ID NO: 35351 - RNA, 81 nt, Homo sapiens
gggacacgcgccggaaggggcccgaagcccccgcaggaaccacaacccaaccagcgcccacggacacaagcacgacggaga

SEQ ID NO: 35352 - RNA, 77 nt, Homo sapiens
aacaccgggggaccagcagcaggcggacaaagcagagcccacagacaaggccaaaggcaaagcgcacagaggggccc

SEQ ID NO: 35353 - RNA, 75 nt, Homo sapiens
cgacaggcaagggaccagcggagggagcgaaacagcgcacacgaccgcagaagaggcagaggacagacacaaaaa

SEQ ID NO: 35354 - RNA, 78 nt, Homo sapiens
gggccgggcggagcggagacggggagcgcgaggaccgcgggggcagggaccagacaggcaaaacaccagagaaaaacc

SEQ ID NO: 35355 - RNA, 77 nt, Homo sapiens
gcccacggcccggcgcacaaagaagcaacacgagcagcgaaggcgaagcggcacaaccggaggacaaaaacccgagg

SEQ ID NO: 35356 - RNA, 78 nt, Homo sapiens
ccgagcgggccagaagaccagcggaaaagcgaagccgagcccaaacaaaggacggcggaaaacccgaagcagaagccc

SEQ ID NO: 35357 - RNA, 80 nt, Homo sapiens
cggggaggaccccagaccacgcagccccgcaaagggaacaggaagcagccacggaggggacgcccagacccaccgcaccc

SEQ ID NO: 35358 - RNA, 87 nt, Homo sapiens
ggcccacagcggaccaaggcaccagggcggaccccggggccaggccggaagcagaccccagcagcagggaaaggggcccagacagcg

SEQ ID NO: 35359 - RNA, 72 nt, Homo sapiens
gacagaaaggcaccgaccaaacaagccagcagcaacagaaccccagccgcgaggcagaaacgaagggaagaa

SEQ ID NO: 35360 - RNA, 81 nt, Homo sapiens
aacggaacagacaaagacaaacggaacaagcccaaaagaacgaggccggaagacgccgaagcagacgacgcccgaagcaaa

SEQ ID NO: 35361 - RNA, 73 nt, Homo sapiens
ggcgccaggacgaaggcccacgggcaaggagcaaggccgcaagaggacgaaggaccaagacgacaaagcggac

SEQ ID NO: 35362 - RNA, 72 nt, Homo sapiens
aggagccgcgcgggaggaagaacacccaaaggagggcggacgggccacgggccggcagagcgacacaaagaa

SEQ ID NO: 35363 - RNA, 79 nt, Homo sapiens
cagaaccccaaaagacggaagggaccgggaaggagggcggagaaagacgccagaagaagaggggggacaaagcgagaac

SEQ ID NO: 35364 - RNA, 59 nt, Homo sapiens
cagggcacaccaaacccacgcgccgaaaagcgaaaagaaacaagccgcggcaacagcga

SEQ ID NO: 35365 - RNA, 80 nt, Homo sapiens
gcggcgagacccaccgcaggacccacagaggacaagacgcagaggaagggggcggcgggaggcccagccgggacagcacg

SEQ ID NO: 35366 - RNA, 83 nt, Homo sapiens
agcgcggagcaggcgcagagcaggggaggaagcagccaggggaagacgcccccaccacagaacggaggaggggcaggaagggg

SEQ ID NO: 35367 - RNA, 76 nt, Homo sapiens
gaaaagcggggcgcggcccgagagaaggcagcaggaagaaacagcgaaccaaaaaccagcagaagcagagaagccg

SEQ ID NO: 35368 - RNA, 57 nt, Homo sapiens
cgaaccgaaaaacacccagacagcgaggaacaaaaagacccgggaagaaggaaggcc

SEQ ID NO: 35369 - RNA, 71 nt, Homo sapiens
caagccaaacgcagaaaccagacaaaccgagccagacaacaggacggcggcccaaacacaaaacaggacca

SEQ ID NO: 35370 - RNA, 60 nt, Homo sapiens
aagccacggcagacacacaacccgacccgacgacagagagcgcagaagacaggacaaaaa

SEQ ID NO: 35371 - RNA, 77 nt, Homo sapiens
cgaggaagaagaggacgacgacgacgaggaagaggaggcgagacgaaaaggggaaaggagaaagaagggagaagaaa

SEQ ID NO: 35372 - RNA, 66 nt, Homo sapiens
ggaggcacagcgcgccaagcgaacggagagccagccgggaggggcagaacggggagccaaccaggg

SEQ ID NO: 35373 - RNA, 86 nt, Homo sapiens
cccagcccccgagggcgggaacaggagccgcccggcaaagcgaaagcgcaggaccgaggagaaggagccgccggagcagccgcagc

SEQ ID NO: 35374 - RNA, 73 nt, Homo sapiens
gccccgcgcgcggcgccgccgccgccagcgcgcccaaagacggggacgaagccccagagagacgaggcccagg

SEQ ID NO: 35375 - RNA, 83 nt, Homo sapiens
gcacccgccaggcaccagaaccgcaaggagacgccaaccaccacccaggagacaaaggacaggcagaaaccagaacaggcaaa

SEQ ID NO: 35376 - RNA, 83 nt, Homo sapiens
acgacggcggacgcagcggcgggggcggcacaggagcgcaaggacgaaggcaacaagaccagaacggagaacaagagcagcga

SEQ ID NO: 35377 - RNA, 70 nt, Homo sapiens
aggaccccagccgcgcccgggagagcaagcaccacgccggaacgggccacaccgcaacaccgcccagcaa

SEQ ID NO: 35378 - RNA, 66 nt, Homo sapiens
ggggggagcggaaaagggccaagaacacggaggcaacacagagggccacacggggaaacggccaac

SEQ ID NO: 35379 - RNA, 70 nt, Homo sapiens
ggcagcccgcggcagcaggacacagacaggaagggaaggggcggagacgggcggaacgcaggaggccaga

SEQ ID NO: 35380 - RNA, 85 nt, Homo sapiens
ggaggcgggggggcacggcccgacaagaggcgaggaaggccgggggcgcccccccccccaggggcacaacgccaagagagaacca

SEQ ID NO: 35381 - RNA, 81 nt, Homo sapiens
cggcgcgagggagagggacaagccaaggccgcgaggaaacggaaacggccagaagcaggacaaagcagagaacaacccggg

SEQ ID NO: 35382 - RNA, 66 nt, Homo sapiens
agaacagcgaggggacacagaagaaaccccgaacgcacacaagacgcacaaagcaagggaaaaaaa

SEQ ID NO: 35383 - RNA, 83 nt, Homo sapiens
cggagcggcccagcgcaagcacgcagcccaccagcccagcggccaccagggaacaaacagcagccagacgacagcagcacaca

SEQ ID NO: 35384 - RNA, 69 nt, Homo sapiens
acaaacggagaaggaaacaaccccaaggaccaggggacaaagccgcgaaaaggaacccacaaacaccac

SEQ ID NO: 35385 - RNA, 80 nt, Homo sapiens
gcccccaggaccccgcacgggagaaaacccggaaagacacaccgaccgaccggccagagagaggccacaccccggggcag

SEQ ID NO: 35386 - RNA, 74 nt, Homo sapiens
agacaggaagcagagggcagggggcaaacaagccgaccggaaaaagggcacaagacaagaaagacccagcggag

SEQ ID NO: 35387 - RNA, 74 nt, Homo sapiens
ccacacccccaaagagcacagaacacaccggaaaccgacaaaagggagaggccacaacagcagccagaccccga

SEQ ID NO: 35388 - RNA, 41 nt, Homo sapiens
ccaaagagagagaggggagccccgccaagacagccacacga

SEQ ID NO: 35389 - RNA, 72 nt, Homo sapiens
cccggccagcgacgcaccgagaaaggaaggaaaaccgacgaaaacccacagacaaagggaagaacaaaccca

SEQ ID NO: 35390 - RNA, 76 nt, Homo sapiens
aacaaagggaagcaaaccaaacagggcaggaccacacccagcggaacccacagaggaacacaaaaaacaggcgacg

SEQ ID NO: 35391 - RNA, 60 nt, Homo sapiens
caagccaggcacccaaaaaaacaaccgagcaggagcaaggaggaaaacgcacaggacaaa

SEQ ID NO: 35392 - RNA, 74 nt, Homo sapiens
gcgggccgccaaggcccccggccggccccgcccccggccgagcgacggggaaaaccagaaccgaaaacccagac

SEQ ID NO: 35393 - RNA, 91 nt, Homo sapiens
cacacagaccgccgggaagaaaacacacgcccaagggccgggccaaaacgcacaccaccaggggcagaagcccccgcaggcccgaaaggaa

SEQ ID NO: 35394 - RNA, 79 nt, Homo sapiens
ccacgggacccccaggagggacccgcagcaaaagcggcaggcgacagaggcggcccaggacggacccggcacgaccggc

SEQ ID NO: 35395 - RNA, 70 nt, Homo sapiens
acagggacaggacagcgagcgaggacgaggaacggcgaaagcagggcgcaggcgaaaccgggccccaaca

SEQ ID NO: 35396 - RNA, 101 nt, Homo sapiens
ggaccaacgaaggcacaccgcccgagcaagcaacagggagaaacaggaggcgaacgaaggcaacgagcagaccacaagagccccccacgaccagcagccgc

SEQ ID NO: 35397 - RNA, 69 nt, Homo sapiens
ccaggagggaacccgaagcgggcgcgcgcacggcaggacggaggcgaagcaaaaacaccggagagccgc

SEQ ID NO: 35398 - RNA, 77 nt, Homo sapiens
gcggcaggccacaaagccacagaggaggaggagcacccagccgaggggaaagaacggaaagcacagccggcgcaaaa

SEQ ID NO: 35399 - RNA, 81 nt, Homo sapiens
gaccgacccccgccgcggccgcgccgagaagagagcggaggaaggacagagagcggcagcgacaccggcgcagcgcccggg

SEQ ID NO: 35400 - RNA, 74 nt, Homo sapiens
agaacaccagaaacccggcggaacccaagaaaccgagagacacaccacaaccacaggccgacggagcccgaaca

SEQ ID NO: 35401 - RNA, 75 nt, Homo sapiens
caggagacccggagacagagcccggaagcaggaagaggagggcaggcacgcagccagcagcagcgcagggaacac

SEQ ID NO: 35402 - RNA, 81 nt, Homo sapiens
gccacggcagcaggaacgggcacgcgccaccgggccgacgggggcagccaccagggaccaaccaccccggacccaccacag

SEQ ID NO: 35403 - RNA, 75 nt, Homo sapiens
ccaaaaggaaaagccgaaagaagcgacacagcccggcacgagagaagagaaaaaggagccagggagacagggaag

SEQ ID NO: 35404 - RNA, 43 nt, Homo sapiens
caaaggagaaaggaaccgacaggggcccagcacccaggagccc

SEQ ID NO: 35405 - RNA, 75 nt, Homo sapiens
gcgaccccagcaaaacagaccaagccacccaagcggggccagaggggccgggaaggagcgcagcagggaaccaag

SEQ ID NO: 35406 - RNA, 74 nt, Homo sapiens
agaaacaaaagcaacaaagaggagcgggacaaagaaggacaagaacacacggagaagaggaaaggaaagggacc

SEQ ID NO: 35407 - RNA, 80 nt, Homo sapiens
cggcacagcccggcggcagcagcggaggaggacgcacgccacggccacacaacacaacgccagggaaccgagagacacag

SEQ ID NO: 35408 - RNA, 75 nt, Homo sapiens
gaccagccaaggccggcagcgagaccccggggccaagaagcggggcggagagaaggagaaagcgccacaagaacc

SEQ ID NO: 35409 - RNA, 74 nt, Homo sapiens
gggcggggcgggaggcaagggcggcgaacccgcggcggacacgcacgccccggcacaggccgcaagaccgaagc

SEQ ID NO: 35410 - RNA, 68 nt, Homo sapiens
gcaaagaggaccacaccagggcggagaaagaagggagcacccacgggaacagcccagaaacgagggaa

SEQ ID NO: 35411 - RNA, 72 nt, Homo sapiens
gcaaaacccggaccccccagaagggaaacgaaaagagacagcagggcaaaacgggccacacacagggcaaaa

SEQ ID NO: 35412 - RNA, 78 nt, Homo sapiens
aagggaggcaaaacgagcagagaagcccacggcacgaacacacagaaagaggccgagcccagacagccagccacgcaa

SEQ ID NO: 35413 - RNA, 63 nt, Homo sapiens
cgcggacaaaagagaagaaccaaaacggccccgccgccccagcggaccgccagagaaggcaaa

SEQ ID NO: 35414 - RNA, 62 nt, Homo sapiens
gccaagcaccggcagcccacacccagagcaccagcaaggaaacgaagaccgagaccaaacaa

SEQ ID NO: 35415 - RNA, 55 nt, Homo sapiens
ccccacgagagccaaagccaggccagaggcagaggcagcaggcagcacaacagac

SEQ ID NO: 35416 - RNA, 76 nt, Homo sapiens
cagagcacgggggacacaggaacccgccaccgcggggcgccgcagccagcaacacaggaaaaagccagcggggaca

SEQ ID NO: 35417 - RNA, 69 nt, Homo sapiens
ccgcacagagcaacgcgccccagcacaggaagcggcgcgggcccccccacccccaagaacccacaaccc

SEQ ID NO: 35418 - RNA, 78 nt, Homo sapiens
aagggagccgaagggacaggcgcaggaagaagaagggacacccacagcacagggaagccggcagaacacagaggcaga

SEQ ID NO: 35419 - RNA, 91 nt, Homo sapiens
cagggccaaccgaaacagcaagaacacacgaaccacagcgaaacagggcaaggagagccaagcggaccaagaaggcaagagaggaagcaga

SEQ ID NO: 35420 - RNA, 60 nt, Homo sapiens
acgcgagaagccacacggaggccacacgggaacaaagggaacagaagagccacgccagcg

SEQ ID NO: 35421 - RNA, 70 nt, Homo sapiens
caagaaccaaaaaggaccacgaagagaggaaaccaaaagaagacggaaaaaggccaaggaacacaaaaag

SEQ ID NO: 35422 - RNA, 79 nt, Homo sapiens
accacgagagccagcacacaccgcgcacgccggaaaaaaccacagccagaaggaggggggaggcacaggacagagaacg

SEQ ID NO: 35423 - RNA, 88 nt, Homo sapiens
gacgaccaagcgggagcgggagcgggagcgggagccggagcgagagcgcgcgggcgcggccgacaggaaccgaacaagacagaaagcg

SEQ ID NO: 35424 - RNA, 53 nt, Homo sapiens
gaaaacaccgacggaaaaccgaggaagccaaaggcggaccacacgaaggggca

SEQ ID NO: 35425 - RNA, 74 nt, Homo sapiens
gccggacaggcgcgacggagacccacgcagagaggccacgccagcaaggggggagcagcacaagaccggagcag

SEQ ID NO: 35426 - RNA, 82 nt, Homo sapiens
gcaaccggaaaaggccggaacccgcgaaacccacagaccgggaagccaccagcaggaaaaaaccacacacgaacagccagaa

SEQ ID NO: 35427 - RNA, 46 nt, Homo sapiens
acagcagacgcaccaaagggacagaaccaaagagcaagaacccaac

SEQ ID NO: 35428 - RNA, 51 nt, Homo sapiens
gagagggcaccgcggacggggccgcccagagaagacgcgcaagaccgagca

SEQ ID NO: 35429 - RNA, 69 nt, Homo sapiens
aggcgaagggggggccgagacccacggcagggggaggccgggcgggggcagccccccccgccacgacac

SEQ ID NO: 35430 - RNA, 77 nt, Homo sapiens
agaagccgagccgcgaggagcgcacccgggccccgaggagcggacaaagacccaggggcacaacggcagaaagcagg

SEQ ID NO: 35431 - RNA, 70 nt, Homo sapiens
gaaagccagaaggagagaacagaaacgggccaaggaagagcgcccggggccgccagaccgagacgccccc

SEQ ID NO: 35432 - RNA, 79 nt, Homo sapiens
cgccggagaagaacaaaccaaaacgaaggaggcccaaccacaaaaggagccgacggaacccagacggagaacaaaagga

SEQ ID NO: 35433 - RNA, 74 nt, Homo sapiens
cgcacaacaagaggccggcggggcgacaggggcccggcgaacagccgaggaagcccggcaccagccaaagaaga

SEQ ID NO: 35434 - RNA, 61 nt, Homo sapiens
agcccccagagggcacccaggacggcggaaggcagggcgggaaccggcaaagccagccagg

SEQ ID NO: 35435 - RNA, 80 nt, Homo sapiens
cgcgccgcaacgccgagcgcaccgacacgccgccaaaggggaagaagacggacagaagcaacaaaggaaaaacggggagc

SEQ ID NO: 35436 - RNA, 75 nt, Homo sapiens
gggggggaagcggcagcgaggggccggagagggccggaccgagcggccggccccagcggcgcacagggagcaggc

SEQ ID NO: 35437 - RNA, 78 nt, Homo sapiens
gcgcaacccgccgggccaggcagccgcacccacaccgcagcgggcgggcgcggcggggagcccgccagcgcccaggcc

SEQ ID NO: 35438 - RNA, 81 nt, Homo sapiens
aagccaggagaagacaagaaaacgacagcagccaaaaacagagccggacaaggcagacggcagccacacggccgcagcgcc

SEQ ID NO: 35439 - RNA, 73 nt, Homo sapiens
cggccgagacggcggcagcagcggcacagagaggaagaagacacggaccgacggacgggaaacccagcgaaac

SEQ ID NO: 35440 - RNA, 83 nt, Homo sapiens
agcaccccccccaccacccggcagaaccggaaggccagacaggacccagaccagccaaagagaagaagaaaggaagcaaaaca

SEQ ID NO: 35441 - RNA, 81 nt, Homo sapiens
acgcccgagcggcccgccgagcccgggggcgcgccccgcaggcaaagcgggccagacacgaagaggccggcgaaggaagaa

SEQ ID NO: 35442 - RNA, 76 nt, Homo sapiens
acaccacagacacgcacaggagaagggcccggagagaaggggagaaaagaccaaacgaaaccacaccacgaccgga

SEQ ID NO: 35443 - RNA, 87 nt, Homo sapiens
cccacacacagcacaaacagccacgcccggagacgcgccgcccccgggagagccagaaagaggacaggcgcgggcagcgggaagcga

SEQ ID NO: 35444 - RNA, 85 nt, Homo sapiens
acccggggcgcagaaaagcgagggcggcagagaggacacaggacacaccagcagacacccagccagagaagcgcccgcgccagac

SEQ ID NO: 35445 - RNA, 72 nt, Homo sapiens
cggcgcgggcacgccgaggacagagacgccaggcggccaggagaccaaccggagaggcaagacacgggcgag

SEQ ID NO: 35446 - RNA, 76 nt, Homo sapiens
aaggaaggcaggaaagccagccggcgagagcagccaccaggagagaacgccgcgccgcgcgacaacggcccggcag

SEQ ID NO: 35447 - RNA, 66 nt, Homo sapiens
cccccacgcggaacacaggcaaaagggaaagaggcacaggccagacgaaccccagaggcaacgaga

SEQ ID NO: 35448 - RNA, 80 nt, Homo sapiens
aaaaacacacaaaaggaccacagcgaacagaaaggcgaaggcgcgaaagggccagagagcaaggagggaacagaaccaag

SEQ ID NO: 35449 - RNA, 66 nt, Homo sapiens
gaaggaccaagaaccagagcccacggcaagaagacaaaagacggcaccaagaagagcaaggaaacc

SEQ ID NO: 35450 - RNA, 79 nt, Homo sapiens
ggagacggagcacggcccccgaggacggaggcacagcgcagcgacgagagggaggagaacagaagcggagaacacaaag

SEQ ID NO: 35451 - RNA, 79 nt, Homo sapiens
cacaggggaagaaggaggacaacaggggagggaaaacaaggacaaggccacccaagaagcccaccgaaccgcagaccaa

SEQ ID NO: 35452 - RNA, 68 nt, Homo sapiens
gaacccaggcccgcgacagggcgccggcgaaagcaacgaagggacgccagaacaagagaaggagagca

SEQ ID NO: 35453 - RNA, 78 nt, Homo sapiens
ggaagggggcagcgcgggcgcgcggccggccggagccagcagcaggggcgccggccgaaggcagagagggccggagca

SEQ ID NO: 35454 - RNA, 52 nt, Homo sapiens
cagcaccaggagagagggggaagagggaaaggggaggcaccacgagggcagg

SEQ ID NO: 35455 - RNA, 75 nt, Homo sapiens
caacagcgcaggaggccccagcccgggccggccaacgagagaggcccgcaggagcaaaacaaaaccagcgacaca

SEQ ID NO: 35456 - RNA, 67 nt, Homo sapiens
acaagagacgacgggaagaccagaaggaaaacacaccaggcacagaaaggccccccgccaagccaag

SEQ ID NO: 35457 - RNA, 64 nt, Homo sapiens
agaaaccacaacggccacagcggccgaggccaaacacaggaaacaaaacagggccagcgaagac

SEQ ID NO: 35458 - RNA, 44 nt, Homo sapiens
cgcagcaacaacagagagcacgggcccgcgagccccagcccggg

SEQ ID NO: 35459 - RNA, 74 nt, Homo sapiens
aaaaccagccagccccaccagaggagagcccagggaaggcgccggcgaaagcaacgaagggacgccagaacaag

SEQ ID NO: 35460 - RNA, 59 nt, Homo sapiens
acacccccccccaccgaaccgcgccgagggaagacccaaaccagacccaacaggaaaca

SEQ ID NO: 35461 - RNA, 74 nt, Homo sapiens
gaaggagaacgggaggcgggaacacaagagggggggccgcccgcccaaggcaggaagaggggccgcaaagaaga

SEQ ID NO: 35462 - RNA, 74 nt, Homo sapiens
ggcaaacaaaggcggccacgcgcggcgccgccgcaaagggcacaagcccccgaagacaagaggccggggagacc

SEQ ID NO: 35463 - RNA, 67 nt, Homo sapiens
gaagggaagcggcacaaaggacaaacaggacgacccggacaaccacccacaagcggccaggcgcaca

SEQ ID NO: 35464 - RNA, 61 nt, Homo sapiens
gcaaaaacaagacggggcgccccacagaggggcgacggcgggaacacaagcaagggaggaa

SEQ ID NO: 35465 - RNA, 74 nt, Homo sapiens
cccaggcccccagcgagggcagcagcgcccaagaggagcaggcacgacgacggagagaggaagaagacggggcg

SEQ ID NO: 35466 - RNA, 77 nt, Homo sapiens
gaaaacagggggagaccggaagacaggacgcgagaaccggaacgggagaaagaagacagaacagaaaagagagacac

SEQ ID NO: 35467 - RNA, 78 nt, Homo sapiens
cccacggccccggcggccaaacaccgagcccacaggcggggagcgcccccaggagcagcggagcgggagcgcaccggg

SEQ ID NO: 35468 - RNA, 68 nt, Homo sapiens
cccggggaaacgcaaacacagcccagccggccacggggcaggcccccccacggcgcgagacgcgggaa

SEQ ID NO: 35469 - RNA, 74 nt, Homo sapiens
gcggggagcgcgacgggggacgggggcaaggcggcccggcacgcacacgggcagaagagcccgaggcgggaccg

SEQ ID NO: 35470 - RNA, 55 nt, Homo sapiens
aaaccaaaccgggcccaccccagagcacaacaaacccccggggcgcccaagagcg

SEQ ID NO: 35471 - RNA, 79 nt, Homo sapiens
ggcgaggaggacgcaggagcgcaccccccggccccccggagccaggagcaggggcgcggcagaggcgcggacgagcagc

SEQ ID NO: 35472 - RNA, 57 nt, Homo sapiens
gcggccgggcggagagaaccagcgaggacgaggcccccgggccacgggcaccagggc

SEQ ID NO: 35473 - RNA, 77 nt, Homo sapiens
gcccaggaagcagaggcaggcacacgccaagggcggcgcgcacaaggccgaggaccaccacacaccggaaggcaccg

SEQ ID NO: 35474 - RNA, 76 nt, Homo sapiens
cgaaccaccccgcgccagcagcacagcacggggaagcgacgaggaagccaagcaggccggaaggggaaagggagag

SEQ ID NO: 35475 - RNA, 75 nt, Homo sapiens
caacacaggacggcgggacggagccgacccacccgggagcaaaaagcggaaccacaagaagaaagcaacgacaag

SEQ ID NO: 35476 - RNA, 72 nt, Homo sapiens
gaagagcccagaaggaaacaaggaagggcaccaaaacaagaaaccggccaaacagaggaccaggagaaaaac

SEQ ID NO: 35477 - RNA, 69 nt, Homo sapiens
cgagccccagccaggcccgggaacggagggaacggcaccacggcaaggagcaccccgaaggcaggcgcc

SEQ ID NO: 35478 - RNA, 54 nt, Homo sapiens
ggaccacccagaggagcaacgccccccccgagcccacacaaagcgaggggaagc

SEQ ID NO: 35479 - RNA, 61 nt, Homo sapiens
gggcgagaggggaagaggcgccgggacagggcgagacccaggagcagccaggggccacgac

SEQ ID NO: 35480 - RNA, 39 nt, Homo sapiens
gccaccgccgcacgaccgcaagagcagccccgcgagccg

SEQ ID NO: 35481 - RNA, 72 nt, Homo sapiens
ggacacaaaagaaagcgacaaggaacaagacagaggcacaaaaggagaaagcagaagaaacaggagaaagca

SEQ ID NO: 35482 - RNA, 52 nt, Homo sapiens
gcgaagacacaaagaaaccgagaacaagaggcaacagacagccaccgaggaa

SEQ ID NO: 35483 - RNA, 80 nt, Homo sapiens
cgaaagccagcacacaccccgcaggacccgccagcaggcagagcagggggcagagccgcagcagacaagcaagagaagaa

SEQ ID NO: 35484 - RNA, 78 nt, Homo sapiens
gcgggacgcggcggcgccggccccggggagaaacgacagcaggcaaggagacaaacagggaccacgcaggaagaacaa

SEQ ID NO: 35485 - RNA, 60 nt, Homo sapiens
ggcacccgccaagcgcaagagaaagggaccgacagcaagaaaaggagaaaacaaggccgc

SEQ ID NO: 35486 - RNA, 70 nt, Homo sapiens
cgaagcagaaagcaaggaaacgagcagaaggcgaacaagaggcgccagcgggcgcgccggaagaacagcg

SEQ ID NO: 35487 - RNA, 79 nt, Homo sapiens
cagaccaggaacaagagagaaagagggacagccgcacggaggcgaaacacaaagggggagaggagacgaagaagcgaag

SEQ ID NO: 35488 - RNA, 96 nt, Homo sapiens
ggagcagcaagaaccgcgcgcaaaccaccccaaaccaccagcgaagaagcacacagcaagaaggaggccacagcaaacgggaagaggaccccacca

SEQ ID NO: 35489 - RNA, 65 nt, Homo sapiens
caaggcaacgaagagagggaccggagggccaagcccaaccacgcccagcacgaaacaccgggaca

SEQ ID NO: 35490 - RNA, 61 nt, Homo sapiens
ggggaagaggaagacccaggcgaggacaaccagaggaccagcacagcaggaggaggaggag

SEQ ID NO: 35491 - RNA, 68 nt, Homo sapiens
aacggagggggcccggaccggggcgcaggaccgggaagccagggaaggaggagaaagccggcggagaa

SEQ ID NO: 35492 - RNA, 85 nt, Homo sapiens
ggaccgggggacgccggcggcagagagagcaccaacggaaaagaccaggcacggacacggaggcgcggggggaccacgaagggaa

SEQ ID NO: 35493 - RNA, 76 nt, Homo sapiens
caagagggcaccagcagcgacggagccacccgcgaaaacggccagggccgccgagccaagacaggaaaaccaagca

SEQ ID NO: 35494 - RNA, 39 nt, Homo sapiens
acccgcgcagcggaccggcgccgccggcaccagaaacag

SEQ ID NO: 35495 - RNA, 82 nt, Homo sapiens
agagaacacaccaacaccgggaccaagggagacaccaaggggccggccagggaagggcacccagggagaagacggcagaaga

SEQ ID NO: 35496 - RNA, 79 nt, Homo sapiens
accgccgggcacaacccaacaggccgacccaaagaagacccagagaaacacagcccgcgaaaccacgcggaaaccaagc

SEQ ID NO: 35497 - RNA, 35 nt, Homo sapiens
cccagaaaggcagaaagcagaaaggacacgcacgg

SEQ ID NO: 35498 - RNA, 66 nt, Homo sapiens
ggcaggaacgcacgaaaaggaaccaggcgccccaggagaaggaccgaagaaccagaggcagcagac

SEQ ID NO: 35499 - RNA, 82 nt, Homo sapiens
acaggagcacggacccaccacagggccccgccagccccagccccggagaggagcaggaagccgacggccacgcggacggagg

SEQ ID NO: 35500 - RNA, 83 nt, Homo sapiens
ccagcaccgcggccagaagccagacccgcggcccggccggacccgcagcaggcacaagggacaaaagggcacgcccggacaac

SEQ ID NO: 35501 - RNA, 73 nt, Homo sapiens
agagaacgaagcgaccaaagcgcacggcagcgagaggaacaagaggcagaaacaacagcaagaaagaggcccg

SEQ ID NO: 35502 - RNA, 93 nt, Homo sapiens
aagcccccacggagggagccgggcacagaaacacagcagcgggagcagcaacaccagcacgccaacaggaaaccagaaccgggcaaggaaagg

SEQ ID NO: 35503 - RNA, 59 nt, Homo sapiens
ccagcacggcgcaacaggaccacagcaagacgacaagcacgcgccgaggccccacaggg

SEQ ID NO: 35504 - RNA, 85 nt, Homo sapiens
ggagcccgcccccggcggccccccgcgcacagaacgacccaaaaagcgccagcgcccgggagcgggcgggagcgagccgggagcg

SEQ ID NO: 35505 - RNA, 73 nt, Homo sapiens
gaagacggcgggccagccgggaggggagagccccgcaccccccccagaaacagccaagggaagaagcagaagc

SEQ ID NO: 35506 - RNA, 70 nt, Homo sapiens
cacgggaacaagaggggacagaaagaacaaaaaacagccgaccgcaaaaggcagaaaagaacagccagac

SEQ ID NO: 35507 - RNA, 65 nt, Homo sapiens
agacgaaccaggccacccaagaaacaaacagggaacccaaaaaggccacacccggcggggacggc

SEQ ID NO: 35508 - RNA, 75 nt, Homo sapiens
cgcacgcagggagagcggcccacggggaggcagggagcccagccagggaagaacgggacaagggcagcaccgaca

SEQ ID NO: 35509 - RNA, 76 nt, Homo sapiens
ggaccggggcagaccaaacggcaagaggaaaccggaccacgagcagcaggagaaggaggaaagaaggcagagcgga

SEQ ID NO: 35510 - RNA, 75 nt, Homo sapiens
accgcaaggaccccaaccacaacaagggcggcaccccgaaccaaacaccgaagcaagagcagcaaggcgaaccgg

SEQ ID NO: 35511 - RNA, 71 nt, Homo sapiens
gaaccccgcacacgaggaagaggcccccgcgcgcggccaagggaaccaggaagcccagccggaccacacaa

SEQ ID NO: 35512 - RNA, 78 nt, Homo sapiens
cagagcgggagagacagaaagaaagagccgcagacgcacagcaaccaccggacccgaaggccaccacccagaggggcc

SEQ ID NO: 35513 - RNA, 71 nt, Homo sapiens
cgagcaacgcgcgggagcgaggacgacagaaggagagagcacgaccaccgccgagagacccacagagggag

SEQ ID NO: 35514 - RNA, 115 nt, Homo sapiens
gggaaaaggccggagaagggaaacgggccccccggcgagagacgcagccccgcacagaacgggcaggccagcggggggagcgcaaaaggccgggacacacccgggaacacaccaa

SEQ ID NO: 35515 - RNA, 83 nt, Homo sapiens
cggacccggaacagcaagaacgcaccgaaccagaaacagaagccacaggcgaagaaggccaccccaggaaaacaaacaaacga

SEQ ID NO: 35516 - RNA, 72 nt, Homo sapiens
ccaacccgcgcaggacgcgaacccgccacgcggccgcccgagaacacccgagggggacggaagccaggggca

SEQ ID NO: 35517 - RNA, 82 nt, Homo sapiens
ggagggagcacagcggaacaaccacagccacccaggacccagggcacgagcagccgggggaagcagcggcagaaccacagca

SEQ ID NO: 35518 - RNA, 70 nt, Homo sapiens
agaacaacagccagacgaaagcaccagagagagcacaggaaagcccggaaggaaggagagaacggcgcaa

SEQ ID NO: 35519 - RNA, 72 nt, Homo sapiens
gagaacccgcggaaaccccgcacagcccagaagcccgaggcggccacgaaccaagcaccgcgggggaaagcc

SEQ ID NO: 35520 - RNA, 77 nt, Homo sapiens
acaggacccccgcgagccaccagaacgagacagcccccaaagcgccagaggaagaaaaaagcccaccgcccagaggc

SEQ ID NO: 35521 - RNA, 77 nt, Homo sapiens
ggggaaggaggcgcggcccgggcagcagggcggcagcgcccgagagaggcggggccggggagcccgggccagacccc

SEQ ID NO: 35522 - RNA, 79 nt, Homo sapiens
gcgcccggaggggagagagcggaggacagccgagaggagcccacagcccccacccgagcccccggacggagagagcagc

SEQ ID NO: 35523 - RNA, 84 nt, Homo sapiens
gagaacagggaagagcagcggaggaccaccacaaagaaaaagaaagaaaaggccggaggccgcccagaaggacacaacagccaa

SEQ ID NO: 35524 - RNA, 71 nt, Homo sapiens
ccacgacagggaaaaccgggacaggagccaaggaaaagagcacgggccaggacccagaggacacgcgggcc

SEQ ID NO: 35525 - RNA, 79 nt, Homo sapiens
ccagccagccggcaccgccaccccacaggcccccaccaggccgcggcaggacacagcgagaagaacaacacagcgcagg

SEQ ID NO: 35526 - RNA, 94 nt, Homo sapiens
caagcgaagacacaagaagaccgagcaaagagaccccggaacgaagcagaagcagaaacccagcccaccagaggacccagaaaggagccagaac

SEQ ID NO: 35527 - RNA, 78 nt, Homo sapiens
cccaaccccagccgaccgagcccaggagcgccacgcgcggaaggcagcgcccagcagcgcagaacaagcaaagagcgg

SEQ ID NO: 35528 - RNA, 55 nt, Homo sapiens
cacccaggccccgacgccccgaggaaggagggccccggagcagccacaccaccga

SEQ ID NO: 35529 - RNA, 75 nt, Homo sapiens
caaaaccggcgcacagagaagaaggggggggggacaaagcccccgcaacgccggggagcggaagaaggaccagca

SEQ ID NO: 35530 - RNA, 87 nt, Homo sapiens
aacgcagcgaacacaggcaggagccggaagcaagagggcccgccaaagccgcaggcccaccggaggaccaggccgcagccagcagcg

SEQ ID NO: 35531 - RNA, 80 nt, Homo sapiens
gaaccccggagaaaaggccaagaaggcagagcacacagcgaacagaagccacaaccagcaagaagacccaagccagaacc

SEQ ID NO: 35532 - RNA, 76 nt, Homo sapiens
acgcaacaggagaagccaagcacgcgacgaggcggagagcaggaaaagcacagggccaggaagcagagggacagcc

SEQ ID NO: 35533 - RNA, 77 nt, Homo sapiens
caagaaacccaggacgagaacagcaacagagaagaccaagagacagaagggacgggacgaggacccggggaagacag

SEQ ID NO: 35534 - RNA, 72 nt, Homo sapiens
acggggccagggaacccggcaccgccccagggcgacgccaggagcacaccgaaaagaaaggaaaaccgggag

SEQ ID NO: 35535 - RNA, 64 nt, Homo sapiens
acacaccaggagagaaagacaaagaaacgggccacaggaccgcagcaaacagcaagagacaagg

SEQ ID NO: 35536 - RNA, 75 nt, Homo sapiens
aaggggaaggaggggcagcgggcagacacaaggaacagccagccaggagaaaaacgaacccaacagaccacccca

SEQ ID NO: 35537 - RNA, 41 nt, Homo sapiens
cccccgagggcgggaacagaaaagcgccccacaagagccaa

SEQ ID NO: 35538 - RNA, 75 nt, Homo sapiens
ggacgaaagggagaggaccaaacagcagaaacaagaaagcacaaccccaagaagaagagacggaaaagaggaaag

SEQ ID NO: 35539 - RNA, 72 nt, Homo sapiens
gagcaagccgagggaagagcagccggcacccgcacaacccagggggccgaacccagaccaacaaaaggaccc

SEQ ID NO: 35540 - RNA, 80 nt, Homo sapiens
cggcccggaccacggcgcaggggacgggacggggacggcgggcacacaggccccgagaaccaagagaacccccaccaacc

SEQ ID NO: 35541 - RNA, 71 nt, Homo sapiens
agggagcagcccgggggacacgcaaaaaaaagggagcggcccaacggcacccagaaaacgcagaagcccag

SEQ ID NO: 35542 - RNA, 76 nt, Homo sapiens
ggcccccaggcgaagaagcgcagccgcaccggccaaggagagggcaaaaaacacagacaccggcgaacaacaagaa

SEQ ID NO: 35543 - RNA, 84 nt, Homo sapiens
gcaaagcccacggccgccgagcagcaccaggagacaaagccacaaaaacaccagaaaaaccaagcagaaaaggagcggcagcaa

SEQ ID NO: 35544 - RNA, 63 nt, Homo sapiens
cgccccccgggacaaccccaggaccaccaaaaaaacggcggagaccagcgcgaagaaaaagaa

SEQ ID NO: 35545 - RNA, 68 nt, Homo sapiens
accgacagacaggaagggacggcacgaaccaaaagcgcaaagccccagggcaggggcccggagagcgc

SEQ ID NO: 35546 - RNA, 72 nt, Homo sapiens
ggcggcggcggggacggcggcagcggagggggccgggaagagggcgacaaggaaggaaacccagacgacaag

SEQ ID NO: 35547 - RNA, 79 nt, Homo sapiens
cagaggccggagacagacaaaacaggagcggaacggaagccgcccccaacagaagcaagaggccaacacagcccagaag

SEQ ID NO: 35548 - RNA, 74 nt, Homo sapiens
gaaggaacgggcggaccagggcgagcacgagcacccgccccaacgagcccagagcaggggaccccaccggcgcc

SEQ ID NO: 35549 - RNA, 54 nt, Homo sapiens
accaaaagcggggagaagagggaccgagggggagagacaaccagagcggaaagg

SEQ ID NO: 35550 - RNA, 57 nt, Homo sapiens
ggaaacgcacagaagaaacaacagagagccaccagaacgagagaagaagagacggaa

SEQ ID NO: 35551 - RNA, 72 nt, Homo sapiens
cgaaggcggccgccagcaccaacgggcacagggcggaggaagaaagagacaaagaacccccagggaacccaa

SEQ ID NO: 35552 - RNA, 74 nt, Homo sapiens
gcgggagcagacccggagcaagggcccacgagacgcgaacaaacgccgcgccgccagaagaacagaccgggaga

SEQ ID NO: 35553 - RNA, 95 nt, Homo sapiens
gcagcgacggcgcgggagagcgcgccagccggccgcgagagagcccgcgagccagaccaacacggagcaggagggggaccaaaaccaggcccccg

SEQ ID NO: 35554 - RNA, 76 nt, Homo sapiens
aacaaacacccagaaacaagaggacagagaacgacacccagaacacagaaacagaggccaggaaacggcaagcaga

SEQ ID NO: 35555 - RNA, 70 nt, Homo sapiens
agcaaacgggccaaaggacagagaagacagaggcacaaaccagcacacaaaacagcccaacagagacacc

SEQ ID NO: 35556 - RNA, 61 nt, Homo sapiens
accggaccaggaaacggaggcggcgccaaccgaagaacagggacacaaacggccagacgag

SEQ ID NO: 35557 - RNA, 69 nt, Homo sapiens
gcgagaaaccaacccccggaggagacagcacacgaccgcgagagggcgaagaacgccaaaacccaccaa

SEQ ID NO: 35558 - RNA, 67 nt, Homo sapiens
cacccgcgcgccgccgccgaggagaaagggacccaccaggccacacccagcggaaaagaccgccagc

SEQ ID NO: 35559 - RNA, 75 nt, Homo sapiens
cgcccccaccccaccccgggagacaaaggagagaggcaccaccagaccaaagagagcgagaaccaaagaggccgc

SEQ ID NO: 35560 - RNA, 85 nt, Homo sapiens
aaaaggaccaaagggacgaaggggcaccggacaggcaaagaacggcaccaggcagcagggaggaaaccaggcaacaggaaggaca

SEQ ID NO: 35561 - RNA, 79 nt, Homo sapiens
gaagaggagacaccccgggggccccgagcaaaccagggcgaaagcaaagagagcaacaccaagcgagaggccaaaaggc

SEQ ID NO: 35562 - RNA, 63 nt, Homo sapiens
gcggccacagccgcagggagaacccgaggcggggaagacccacaaaaaaaaaaggaagagagg

SEQ ID NO: 35563 - RNA, 90 nt, Homo sapiens
gagcgcggaacagcaggcccgagcccaccgcgccgggccccggacgccgcgcggaaaagaaaaacaaccaccagcgagcaaaaaggcaaa

SEQ ID NO: 35564 - RNA, 80 nt, Homo sapiens
gaaaggccggccgcagcacccgccaccgcgccggccgcccgcacgccgccgaccgaaggaaaagaagccccaggcaggcg

SEQ ID NO: 35565 - RNA, 70 nt, Homo sapiens
agccacagggggccagggaacaccgaggagcaacacccccagggagcccagaccgacaggacgcaagggg

SEQ ID NO: 35566 - RNA, 64 nt, Homo sapiens
ccggagcggggggcggagcagacacagacagcagagggagagagggcagaaggcaggaccaagc

SEQ ID NO: 35567 - RNA, 85 nt, Homo sapiens
agaaagcaaaggcgccgaagcgcacgaccccgacacccccaaggaccgaaggagaagaaggagaaggggaggagaaggcaagccg

SEQ ID NO: 35568 - RNA, 81 nt, Homo sapiens
aagggcagaaaagaaaaggccaaacccacccacagcccgcagacacaaggcggcacaggcaccaagagccaaccgagggcg

SEQ ID NO: 35569 - RNA, 86 nt, Homo sapiens
gcgccgaagcagccgggagccggagcgggcgcggacgccgaggcaccgaggcaccagaggaggcccacggagacagaaccagcccc

SEQ ID NO: 35570 - RNA, 66 nt, Homo sapiens
cgccaggaaagaaaccaggaacagacaccgacccacgccagaccaggaacaaccgcagcgccaaca

SEQ ID NO: 35571 - RNA, 76 nt, Homo sapiens
cgcgggacaagcgccggcggcgcccgacggagcagagagagaggcccagggcaggcggccgaacccgacccaggga

SEQ ID NO: 35572 - RNA, 82 nt, Homo sapiens
accagaaggaaacacgaaggcaggaagcgaagaaaaggacccagaaagcaggaaaagaaggaggccagcgggacacacaaag

SEQ ID NO: 35573 - RNA, 55 nt, Homo sapiens
cagccgcaacggcacccggacacgaccaaaacccccaaagccaccagaaagccgc

SEQ ID NO: 35574 - RNA, 75 nt, Homo sapiens
ggaaccaccagaagccagcccccaggcggaacgcccgccccgcagagagacagccagcaggggcagaagcagcag

SEQ ID NO: 35575 - RNA, 119 nt, Homo sapiens
ccggggccggcggcgacagcgggggaagcagacgcggggccgaagggccccgcgcggggcccgaggggcaagcggaaagaccggagagagcagagaggagcagaggagcggccgcggcc

SEQ ID NO: 35576 - RNA, 74 nt, Homo sapiens
ggaggagcgcagcccggcccgacaccggagacaggcgcgagaagacacccgcaaggcagccaagcccgagaaga

SEQ ID NO: 35577 - RNA, 70 nt, Homo sapiens
caccggcggcggcgcccccagccggagccccagacaacccggacggccggccaaaggcccgggacgagcg

SEQ ID NO: 35578 - RNA, 55 nt, Homo sapiens
aagcaagccgccaggaacacaaagaagaggcaggagaggagaaccaaggaagagc

SEQ ID NO: 35579 - RNA, 72 nt, Homo sapiens
ggccagcggcccagcaaaaggaaaagccagagaaagccaacagacgggccccacaaagggacgaacccaccg

SEQ ID NO: 35580 - RNA, 69 nt, Homo sapiens
gcagccaaccacccacgacaccagcaacgcccaggagcaagacaggggaggagaagaggacaacggcga

SEQ ID NO: 35581 - RNA, 86 nt, Homo sapiens
agcaggaggggccgaacagcaagggcacggccgagcagagaggacggggacgaccgggccagacaccgggaggaacggcgccgggg

SEQ ID NO: 35582 - RNA, 75 nt, Homo sapiens
gaagagaagcagcgcagccaaccagcgaaggagcaagccggaggacaaggaggcgcaaggacagacgagaacgga

SEQ ID NO: 35583 - RNA, 74 nt, Homo sapiens
agcgacagcgcagaggggcaggagccgggagccaccgcgaaggagaagacagaggagccagaccaagagacagc

SEQ ID NO: 35584 - RNA, 84 nt, Homo sapiens
cgagcccggcgagcaggagaggaggcccgggccgcggccccgagcgcgcgggagcagggccaggacacacggacgaaaagagca

SEQ ID NO: 35585 - RNA, 76 nt, Homo sapiens
gcaccccccgggagccgggccagggagacgacgagggacaaagcccccagaggaaccggggcacaccaagaaaaac

SEQ ID NO: 35586 - RNA, 65 nt, Homo sapiens
gaacgcggaccacacacacacggaccacccaccaccgaggacccacagaagaggaaagggaaacc

SEQ ID NO: 35587 - RNA, 90 nt, Homo sapiens
cgacaaagaggaccacaaacgccgcgcggaaggcagccaaaaggacggacaaccaccagagccagggggccaagacaaaaccaaccagga

SEQ ID NO: 35588 - RNA, 81 nt, Homo sapiens
aaagggacagggacgcgcaaccacgggggacgggaacgagggggaagcggcccagggaggccgccccggggccccgacccg

SEQ ID NO: 35589 - RNA, 36 nt, Homo sapiens
aggaagaggacaggagaaagggggggaaccaaggcc

SEQ ID NO: 35590 - RNA, 78 nt, Homo sapiens
gacagaccggcaggcaggaaaacgggagaacacgacaccggcgaggaacggcagacacagagagagagagcccgggaa

SEQ ID NO: 35591 - RNA, 77 nt, Homo sapiens
caaggaccgagcagccccgccacccgggagcagaaggcaagaaagggagaagccagaaaagcagaaagagacagcgg

SEQ ID NO: 35592 - RNA, 75 nt, Homo sapiens
gccaaaggaggaagacaggcagccacgccgagcggcacccaggggcgccacagccccaccagcagccgcaccgga

SEQ ID NO: 35593 - RNA, 73 nt, Homo sapiens
caccccaggcaaaaaaaaggagcgggggagaaggcaaaaagagggccgaaacaaaagagaaagaaaccccaga

SEQ ID NO: 35594 - RNA, 84 nt, Homo sapiens
aggagggaggaacagacaccgagccagcaagcccccaacgagggagaaccgaagaacaggaggccagcagaggggaacaagaga

SEQ ID NO: 35595 - RNA, 74 nt, Homo sapiens
cgggccgccgcgaccggggaggccaggccaggaaaacacgacgacccagcaagccacgaaggagccccccaccc

SEQ ID NO: 35596 - RNA, 67 nt, Homo sapiens
cgccgaggcacggggcggacgacccagccggggggcacagccggaccgaaccagaagcgaggacaga

SEQ ID NO: 35597 - RNA, 82 nt, Homo sapiens
gcaggcggagacaggcagggaagagagaccagaaaggacaggacggcggcaacaaacaacaggcagacgaaagaacggccag

SEQ ID NO: 35598 - RNA, 73 nt, Homo sapiens
agaagcgggacaccgcacggggaccagccggaaggaaggacaaacacaaaaagccggaccaccaaccagcccc

SEQ ID NO: 35599 - RNA, 72 nt, Homo sapiens
ccaagcccgaaggaggcgagacacagcaggacccaagcagccgagcccggcgaccacaagaacaccaacaag

SEQ ID NO: 35600 - RNA, 72 nt, Homo sapiens
gcggagacaggaagagcaggagcgcgggcggccagcggaacaccccagccccgacgcaaaacagaccaggag

SEQ ID NO: 35601 - RNA, 85 nt, Homo sapiens
aaggaggggaggagacaagaaccggcccgacgaccccacccgcaaaaccaaagcccgcgcaacaccagaaccacgcgccaccagc

SEQ ID NO: 35602 - RNA, 65 nt, Homo sapiens
caccaaaaagcaaacggaccagaccgaccaccaaaagacagcccaaggcggaaaagcgaaggaag

SEQ ID NO: 35603 - RNA, 79 nt, Homo sapiens
gcaagacagcggcagggccgggaagaacagcaagagaggcggagaagaacccaaccaaaaccaggcggcaaccccgggg

SEQ ID NO: 35604 - RNA, 79 nt, Homo sapiens
gccaggcccaaaagcgggaagcgaagacaccccccaaagagaccagcaagcgccagggagggcgcaaagggaaaacccc

SEQ ID NO: 35605 - RNA, 78 nt, Homo sapiens
ccgggcggcgggcgcgcaagggcagccgcggccaccccggaagggccgccggcggcgggaggagacccccgcaacggg

SEQ ID NO: 35606 - RNA, 85 nt, Homo sapiens
gcccacgaaaggcagccgcggacgccgcgccagcgacaaacaacaagaggagccaggagcacggggggaacaagaccgccgggac

SEQ ID NO: 35607 - RNA, 84 nt, Homo sapiens
caaaaacgaagaagaggggaaagcccacccaggcccgccgccccggggcacgccaggcaaccaagacaacaagccaaagccaca

SEQ ID NO: 35608 - RNA, 79 nt, Homo sapiens
ggaggagcagacggccagagacacaaggccccggcagcagcagcaagggggggacagagagaacggcaggacaaccccc

SEQ ID NO: 35609 - RNA, 72 nt, Homo sapiens
aagaccccgccgcacaacgcaggccggcgccgaccagcaggcaccgaagaggaaaggaagcagggggaagcc

SEQ ID NO: 35610 - RNA, 83 nt, Homo sapiens
gggcacgacacacacacggcgcaccccccgagacccccggacccggccgcccagaagaagccaccagccaaggacagagggca

SEQ ID NO: 35611 - RNA, 86 nt, Homo sapiens
ggcagagccgaacgcgagggcggcgcccggggacggagcgcgcgcaaaggccgcaccgcgaggaacccgagcccaccggcagcacc

SEQ ID NO: 35612 - RNA, 57 nt, Homo sapiens
ccgcagagcccaggaggccaagcaaggcaggcagagacgcccccaaagggacacgcc

SEQ ID NO: 35613 - RNA, 78 nt, Homo sapiens
cacagcccccccgggccacgaagagcacagagccacgggaaaaggagggccggcgcgacagcagcagagacagccaag

SEQ ID NO: 35614 - RNA, 92 nt, Homo sapiens
ggaccagccccggacagccaagcagaagaaggaggaggagcggcgggcggcaccaagggcagcagcaagaaggcgcggcggcgcagcgcgga

SEQ ID NO: 35615 - RNA, 75 nt, Homo sapiens
aaagagcaaacaaagaagcaggagggaagaaagaagcaagaaggggaaaagacagcccaggccgcccagacaccc

SEQ ID NO: 35616 - RNA, 53 nt, Homo sapiens
acacagggagaaaagcgcacacccaaagcacacaagacaagggaggcgaggac

SEQ ID NO: 35617 - RNA, 74 nt, Homo sapiens
acgccccaggggaaaacccccgggaccagggggcacccgaggaggaagagggcagggcccacggaaagaaggga

SEQ ID NO: 35618 - RNA, 85 nt, Homo sapiens
gcgcagcgcgagcggggccgggcgaagaagcagccacaaagccagccagggcgaaaagcggcgcacaaagcagcgaagccgcggg

SEQ ID NO: 35619 - RNA, 90 nt, Homo sapiens
cgaccgcagcccccgggcacgaccccggacacgggcaggcagcaggaggagcaagcacaacaggccgaagaggccggagaaggacacgcg

SEQ ID NO: 35620 - RNA, 73 nt, Homo sapiens
ggcgaaaaggagcagggaacagcaggacccagcccaaagccggacagcagacaggacaaagagggaagacagg

SEQ ID NO: 35621 - RNA, 74 nt, Homo sapiens
ccaccccgcgcgcaaggagcccgggacggagaggccgcaggagcacgccagcgcagcgcgacagccaggaaacc

SEQ ID NO: 35622 - RNA, 74 nt, Homo sapiens
cgccgcgggagagaggacccccccccccccccaagggcaggcgcccgcaggacccacgacggcgaaccagacgg

SEQ ID NO: 35623 - RNA, 71 nt, Homo sapiens
gaccagcccagggagaccagcgaagccgcccggccccagaaccacacgacgccaccagaaggcaccagagg

SEQ ID NO: 35624 - RNA, 77 nt, Homo sapiens
cagagaaggcccggaaaagaaaggcaccccccaaagggcgaaggaccgcaaagaggcggaaagaggagacagagagg

SEQ ID NO: 35625 - RNA, 80 nt, Homo sapiens
cccggggagccgggcgggaccggcgcggcgccgggggcaccgcgccgccgagcgcgccgggggcccggaaagggacgcgc

SEQ ID NO: 35626 - RNA, 77 nt, Homo sapiens
gaggccccccagccagggaacgcgaaagcaaagagagcaacaccaagcgagaggccaaaaggcagacgacagcacaa

SEQ ID NO: 35627 - RNA, 74 nt, Homo sapiens
cgagagggacacgcaggacgagcggccgaagcagcgcggaccacaggcaaacaaagaaccacggcaagcagaga

SEQ ID NO: 35628 - RNA, 40 nt, Homo sapiens
gccagggagggggagaggacgcaccaaagaagacagacac

SEQ ID NO: 35629 - RNA, 57 nt, Homo sapiens
accaagaaccagaccgagcgcccagcaagccaagaccagccaaggcaacacacaggg

SEQ ID NO: 35630 - RNA, 74 nt, Homo sapiens
ccccgacccagcgacaggacccggcgccgggcacgagcaccgccaccaggggaagggggaagaagagagggcga

SEQ ID NO: 35631 - RNA, 75 nt, Homo sapiens
gaaggagcacccgaaagcggcgagagcgaagacccaacccaagagccacgggaagaagagccaccacgggcgccc

SEQ ID NO: 35632 - RNA, 79 nt, Homo sapiens
gagcacaccaggcacccgggcccagccgggaacccccacgcggccagcgaaaacgcccagacgaaagaggcggacgaac

SEQ ID NO: 35633 - RNA, 63 nt, Homo sapiens
gcccacagagaggaccggaggaggaacagaccacaaacaaaccgaaaaggccacgacgccagc

SEQ ID NO: 35634 - RNA, 73 nt, Homo sapiens
gggaacgaggcgacgggggacacaggacgagcagacaagggcccacaccaaagccaccagagcaagacaggga

SEQ ID NO: 35635 - RNA, 59 nt, Homo sapiens
ccagcccgggcagcgagcgcaaaaaggggcaggccacgcccaagcgaagcacgaacgaa

SEQ ID NO: 35636 - RNA, 77 nt, Homo sapiens
cccaacacagagccaagcgccaagcaccgggaaaacgcagaggaacgagggggagccacgaggagaaggccacgcgg

SEQ ID NO: 35637 - RNA, 78 nt, Homo sapiens
aaacaaccacacagaccgcaaaaacagcgacaacacagggcccgaggcgggcaagaaaacgacaccccgaagagcgac

SEQ ID NO: 35638 - RNA, 76 nt, Homo sapiens
cggcggcggcgggaggccccggcgggggcgcgggcggcgggcagcccgcgggcgcccagaacaccgcggaacgggg

SEQ ID NO: 35639 - RNA, 42 nt, Homo sapiens
cagcaaggagaacaccagagccagcgacaaacgggccacaaa

SEQ ID NO: 35640 - RNA, 82 nt, Homo sapiens
acagacgcccagccaaacaaaaaggaaaggagacaagcagagacgaaccaggcaaaggaagaaccacaaacagaagcaaaga

SEQ ID NO: 35641 - RNA, 75 nt, Homo sapiens
gcacaacgccaggcggagggggcgcggccggacaccagagaggacagggaacaaaggcagagaaacgcaccccag

SEQ ID NO: 35642 - RNA, 85 nt, Homo sapiens
agaaccagcccccgaagccgcgggcccggccggcggcggcggcggcggcggcggcggcgcaggcgcaagaacacaccaacgcgca

SEQ ID NO: 35643 - RNA, 77 nt, Homo sapiens
agagggggaggcaaagccgaaagggagaggcaacggcagcaggaggaccaggacacaccccagaagaagcccacaga

SEQ ID NO: 35644 - RNA, 74 nt, Homo sapiens
ggggcccagccaccgagaccaaaaagacagccaaaagagaggacggaggagcacccggagccagaccgccacgc

SEQ ID NO: 35645 - RNA, 66 nt, Homo sapiens
gacacacccccaggaggcccggcagagcagggccaagaacggcggcagaaagcaaaggcagaaaca

SEQ ID NO: 35646 - RNA, 82 nt, Homo sapiens
cagccccccagagcgggaacaggacagcccgggggaacagcaagaccgccaggggcacggagccgcagcgaaacagagaaac

SEQ ID NO: 35647 - RNA, 80 nt, Homo sapiens
aggccccagacacagacgagcaggggaagaagaagaccggaaaccaacccgagagaaaaagggaaggaaggcccgcacac

SEQ ID NO: 35648 - RNA, 42 nt, Homo sapiens
gccagcgcgccggagccgccgagggaccaaaccacagcaaaa

SEQ ID NO: 35649 - RNA, 74 nt, Homo sapiens
gaacgggagaacagcagcagcccacgaacagaaaggggcagcagcaggaacaggaacagccaggagcacaaaca

SEQ ID NO: 35650 - RNA, 76 nt, Homo sapiens
agcacggggaaggaccggacccggcccgggagcaaagcagaagcggccagcccgaagccaacggggggcaaggcgc

SEQ ID NO: 35651 - RNA, 77 nt, Homo sapiens
aagcaggcccaccagagcggggccaggcgaaggacacgaggaaggggaaggggcaaagcagggaagaaagcacggga

SEQ ID NO: 35652 - RNA, 81 nt, Homo sapiens
gccccggcgagccgcgacggcgccgcccacggcgaggaaaagaggcggaccacacggggagcaccgagagagaaagagaac

SEQ ID NO: 35653 - RNA, 80 nt, Homo sapiens
ggaccgagcggagaggagagcacacggcaccgagggagcggaagaggagaaccggaaccgggagcacaggaggcgcgaga

SEQ ID NO: 35654 - RNA, 54 nt, Homo sapiens
aaaaaacaagaaccacggcacgaaagggccccgagccacacagaaaaagcagga

SEQ ID NO: 35655 - RNA, 76 nt, Homo sapiens
ggaaagaaagaaaacaagagcacgcagggagaacggagaagaaacagccacggagaacaacagacgggagacgaac

SEQ ID NO: 35656 - RNA, 87 nt, Homo sapiens
acaaggggcgaaaaagccggacagcaccaggaagcgcaacggccaagggcaaaaggaagcaggaaagaagggcccggcaggccaaca

SEQ ID NO: 35657 - RNA, 101 nt, Homo sapiens
aagggcaagaccaacgccccgccaccgcacaacgggcaggcgaacgagggaccaagcacgccagaaagaggggccgaacaagccgagacggggccggccga

SEQ ID NO: 35658 - RNA, 74 nt, Homo sapiens
acaaagccccccggagacgcaaccaagagaggacaagcgcaagccacaccccagggaaaagggcccggaaagga

SEQ ID NO: 35659 - RNA, 84 nt, Homo sapiens
ggaagaggggcaccggagccagaggagaagaggaggaacgggaacagaaggagacagcggcacccaaaggaacaaagacagcaa

SEQ ID NO: 35660 - RNA, 49 nt, Homo sapiens
agcaaggaaaacaagacagccaagcaccgaacaggacaacacaaacaaa

SEQ ID NO: 35661 - RNA, 70 nt, Homo sapiens
agacaggaacaaaggcagcggaggcacggacaccacacacacacagcgggcgaagcgaggaacaaggccc

SEQ ID NO: 35662 - RNA, 70 nt, Homo sapiens
ccggaaaaaacagcccagacaagcaccccgcccagaaggggaagccggccgccaagaggacggagaagca

SEQ ID NO: 35663 - RNA, 71 nt, Homo sapiens
gcgcgcgaagacgggaccgagaaaaaccagacaccaaaggaagcaggaaaagccgaacaaacgagcccgca

SEQ ID NO: 35664 - RNA, 77 nt, Homo sapiens
ggagaggggaacagacgcagccccacgccggcgcccaccagcggcgccaccacgagcagagccgcccggccacgggg

SEQ ID NO: 35665 - RNA, 54 nt, Homo sapiens
caaagaaacaggacgcgccacagaggggaggccaagccaagcaccaggcgccac

SEQ ID NO: 35666 - RNA, 75 nt, Homo sapiens
caccacaaaaccagaagaaaacgggagccaaacccacgagggccacagaagaagagacgcagaacgggagggcca

SEQ ID NO: 35667 - RNA, 56 nt, Homo sapiens
gaggcggacgcgcggcgcgcagggaaaaaagcacaaagaccaaccaacagaaccag

SEQ ID NO: 35668 - RNA, 86 nt, Homo sapiens
gcagaaagcaggcgaacccgcggcgcaaaacggcaaccacaccccaaacaaggaaggccagacccgcagcaacccaagaacgaaaa

SEQ ID NO: 35669 - RNA, 86 nt, Homo sapiens
ggcggggaccggggaccagggacccggcggggccaagggcacgcaaaaaaaccaagggaaaagagacaagaccgagacacaaaaaa

SEQ ID NO: 35670 - RNA, 81 nt, Homo sapiens
gcaaaagggacagacaccagacgaaaaaacgggccgagcagcaccaaaaagccaaggaaagcagccagagcagcagagcag

SEQ ID NO: 35671 - RNA, 83 nt, Homo sapiens
ggaagcggcaggccaccccaggccccgggacgccagacgggacacgcacaggggcgaggccggcccgagcaagacaggcgcca

SEQ ID NO: 35672 - RNA, 81 nt, Homo sapiens
aggcgacaaagagaaggaaagcagaagccaccgggaaggggggaggggaacagcagcggagaacacggcagagacaaaacg

SEQ ID NO: 35673 - RNA, 74 nt, Homo sapiens
ccgaggggcacaccgaccagccgcacgccgaccggcgccgggagaccgggcggcaaagagccggacaaaaacgc

SEQ ID NO: 35674 - RNA, 59 nt, Homo sapiens
ccaaaacggaccacgaggagggagaaggccacaggaaccaacccgccaccaagaaagcc

SEQ ID NO: 35675 - RNA, 62 nt, Homo sapiens
agaagaggagggaccccgaaaaccaagaaagcggagaagggcagcagcgaaggcaggaacgg

SEQ ID NO: 35676 - RNA, 84 nt, Homo sapiens
cccagcccagcgcccggccgaaccccccgcagcagacaaagggagccaaaggaaaaaagaccccagacccgcagaaaaccacag

SEQ ID NO: 35677 - RNA, 60 nt, Homo sapiens
cgcagggcgcccccgccccccaaagccccgggaccccagggacgagaacacagccaccag

SEQ ID NO: 35678 - RNA, 73 nt, Homo sapiens
cagaacagccccccgccacaacggccgcagggccgaggagacaggagaaggacaaacccacaagcgaaagaac

SEQ ID NO: 35679 - RNA, 76 nt, Homo sapiens
agaggcggaaaggcaccggagacagaggcggaaccaaaagcagggaaaccgaacacggccccagggccacccagca

SEQ ID NO: 35680 - RNA, 72 nt, Homo sapiens
gcaccgcacaacccccggaaaccgggcagcgaaagaaaaggcgacggaacgcgaaaagaccaggagaaggaa

SEQ ID NO: 35681 - RNA, 58 nt, Homo sapiens
agaaggaggcaggcacgggagccgaagcgcgaaaagcagggccgacgggccgggggga

SEQ ID NO: 35682 - RNA, 84 nt, Homo sapiens
gagagcgcgaaacgcacgagaaggggggaggcaaagaaagaagcccggaaacgggcggaagccagccaaaagacgaaagcaaaa

SEQ ID NO: 35683 - RNA, 77 nt, Homo sapiens
gggcccgcgcgagccccgggaaagagcagcgacgggagacagccgggcgcgcaagggaccagaccaccacagcgccc

SEQ ID NO: 35684 - RNA, 72 nt, Homo sapiens
ccaaccacggcaaaccaacaagaaaaccagaaggcaccgacaggaaaggaaaaggagaaccaggcacccggg

SEQ ID NO: 35685 - RNA, 74 nt, Homo sapiens
cagccaaacggaaacacccacagacgccaaggggacaaccggcgaaaggcccccagccagcgccagcagcaaag

SEQ ID NO: 35686 - RNA, 82 nt, Homo sapiens
gaggcaacgaggccgagcgcgcggcgccgcaacaaagcagacaccagaccaacacgccccgcagaaggccaacaaccagcag

SEQ ID NO: 35687 - RNA, 72 nt, Homo sapiens
ggcgccgccgcccgggaccggcgagaaggccacaaccaagagaaacaaccgagcagggccgccccgaggaga

SEQ ID NO: 35688 - RNA, 73 nt, Homo sapiens
agaggggggcggcagcggaagacaaaccacaacaacacagcagaggccccaacggaaccaccaggccacggag

SEQ ID NO: 35689 - RNA, 82 nt, Homo sapiens
aggaagagaaaaagcaaacgaccagacggcagggaggcacaaaggggaacacaggagaacgcccaaaaaggaacgccaccaa

SEQ ID NO: 35690 - RNA, 72 nt, Homo sapiens
ccgagacacggggcacgccaccaccaagcaaacgaaaccggcagcagccggaggggaaggggaaaacacgac

SEQ ID NO: 35691 - RNA, 78 nt, Homo sapiens
accgagaccggaccgagagcggaccgagagcgcgaaacgcacgagaaggcaagagggcagaagaaagaaaggaaagag

SEQ ID NO: 35692 - RNA, 50 nt, Homo sapiens
aaccgacggacaagacacgggacagagcgacagaggcgccacaggagccg

SEQ ID NO: 35693 - RNA, 72 nt, Homo sapiens
gcccaaggccaacgagaggaagaaagaccaccggacaggaacgcaaagaacagagcagcaccagcaaaagaa

SEQ ID NO: 35694 - RNA, 52 nt, Homo sapiens
cagggcggaaggacaacagcccgacaaccaggacaagcccccacgaggaaaa

SEQ ID NO: 35695 - RNA, 77 nt, Homo sapiens
gcaaagcgcagcccgcagacagaggggcgacgaccgcacaacagaaggcggagaacggaaaagcaccaggaagcaga

SEQ ID NO: 35696 - RNA, 79 nt, Homo sapiens
cgcccccgcagcagcgccagggaaagaacgccggacaacagcggcgaagaaggcaaaccgaaggcccacagagaagaag

SEQ ID NO: 35697 - RNA, 76 nt, Homo sapiens
ggaagggacagggcgcgggcagcaggaggaggcacagcacccgcccccagaaaaggaaagcagcggacaagcaacc

SEQ ID NO: 35698 - RNA, 76 nt, Homo sapiens
gacggagagaaccagaagggcacggaaagaaaggacagccgagccaacaacacagaagggaacaagcggacagaaa

SEQ ID NO: 35699 - RNA, 59 nt, Homo sapiens
gcggccaaaggagagaagacgagcacagcgaaccaaaaaggccgcgacagccaccaaag

SEQ ID NO: 35700 - RNA, 68 nt, Homo sapiens
acaccgacgcgccacgcggagcccgcacgaagcccagaaggcacgaagagggacggacaggagagcca

SEQ ID NO: 35701 - RNA, 67 nt, Homo sapiens
gcacggagcagaaacacaaggccccgggcaggcgaggagaggccaggaggcgggggggaggaggcca

SEQ ID NO: 35702 - RNA, 77 nt, Homo sapiens
cccagccaggcgggaccaacgagcgggacaagcaaggaaccaacaggaccagaccacaggacccagggggaggagcg

SEQ ID NO: 35703 - RNA, 82 nt, Homo sapiens
caaagaaacaagccgggaaagggacaagaagggcaaagccgaagggcccaccgaggagcgcagacaccgaccacggacacag

SEQ ID NO: 35704 - RNA, 73 nt, Homo sapiens
cggcgcagacggggccggcgcaggggccgaaaaccgcgccgggacacaagggcgcaaccaaagcaccagaccc

SEQ ID NO: 35705 - RNA, 53 nt, Homo sapiens
gccagcgaccaaaaacgaggaaagaacccggaaaccacaaggccagcaccgcc

SEQ ID NO: 35706 - RNA, 82 nt, Homo sapiens
gggccccggcagcagcccgacgcaaaccaaggacggggaccgcacacccaagggcggaaaacaccccaaaagccaaaaggga

SEQ ID NO: 35707 - RNA, 66 nt, Homo sapiens
ggaacaaagaccggagcagcaacgcaagacaccggcacgcaacagaggcgggagcaccagacagcg

SEQ ID NO: 35708 - RNA, 78 nt, Homo sapiens
ccgcaaccagacgccagcgggacgaggaccgagaccgcggccgggaccgagggaagaagagagggcgaaggaggccac

SEQ ID NO: 35709 - RNA, 50 nt, Homo sapiens
gaaaaggccaagaaggcaggcggagcaggagcaaaggagcaagaaaccag

SEQ ID NO: 35710 - RNA, 79 nt, Homo sapiens
gggaggcgacaggaaacccgccacgacaaccgcaccaacaaagacagcagcgcacccacaccagaaagcggcgggcaca

SEQ ID NO: 35711 - RNA, 62 nt, Homo sapiens
ggagcccccccaccacccccgacaccccacaccccaggaagcccaaaacgggccaaaagaga

SEQ ID NO: 35712 - RNA, 73 nt, Homo sapiens
aggcccggaccagcccgggcgcccgcacggacccccaggacagaaggcaggggagacacaagcgggcaccacc

SEQ ID NO: 35713 - RNA, 63 nt, Homo sapiens
accagagcaaagaagaaaccggccagaaacagccagagaagcacagaggacccgaaaccggag

SEQ ID NO: 35714 - RNA, 58 nt, Homo sapiens
gggaagaagcggaccagccgccaaggcaagaagagaaggggaaccgacgaaagaaaac

SEQ ID NO: 35715 - RNA, 75 nt, Homo sapiens
agcaccgggaggaaagagagccacacgaagaacacggccaaaggaggagagaccagcagcaaacccacgcggcgc

SEQ ID NO: 35716 - RNA, 76 nt, Homo sapiens
gagcacccacgggacgccccgccagaccgcgaccgcacgccagcccaagccgacaggggggccacgggccccgacc

SEQ ID NO: 35717 - RNA, 91 nt, Homo sapiens
ggagacgagaggacgggaccaggcgaagcggccgagcaggcgagcgaacgacgaaacggcgaggaaagagaggagccccggaaagaaaagg

SEQ ID NO: 35718 - RNA, 72 nt, Homo sapiens
acagggagaaaccccacccccaagaaccaacccccaaaggcgggacagggaagagagcaaggacacaggcag

SEQ ID NO: 35719 - RNA, 76 nt, Homo sapiens
aagcggggagcgcccgcgacagaggagggaggaaaacaaccgagggcagaaccgaggccaaaagaaaggaagaaaa

SEQ ID NO: 35720 - RNA, 85 nt, Homo sapiens
ccagaccaggaacccaccagaaggaaccaaccggacacaaacaagcagcaggaggacaccaaagcccgggcaacccagggggcag

SEQ ID NO: 35721 - RNA, 83 nt, Homo sapiens
caaacggaaaaaggaaaggcgagccccaaaaggcacgaagagaaaaggagcagccacggcgcagaggaacagccagcagaaga

SEQ ID NO: 35722 - RNA, 52 nt, Homo sapiens
gaaacgcgaaaaggaagcggaaggcaaagagcaaggaagaagcaccacgacc

SEQ ID NO: 35723 - RNA, 43 nt, Homo sapiens
ccaggagcgaagagcgccgacaagcagccacccacgcacccgc

SEQ ID NO: 35724 - RNA, 71 nt, Homo sapiens
aaccggcgcagccgccgcccacggccgcggccgcccggggagaggaaccaaccaccaaaccccaggaacca

SEQ ID NO: 35725 - RNA, 77 nt, Homo sapiens
agacagccaacacggcacccacagaaccagcacggagcaacagccagaggaaaaacaagacaaggccgaaaccaaga

SEQ ID NO: 35726 - RNA, 79 nt, Homo sapiens
agaaaaccagcaagaccaaggacagcaaaggcggggagacacccaagaaaacaaagaaggggcagagagcgaacacgaa

SEQ ID NO: 35727 - RNA, 62 nt, Homo sapiens
gcccccaaaaacgcaaggcgagagaggggggcccacgcgcccggaacccaccccacacccca

SEQ ID NO: 35728 - RNA, 75 nt, Homo sapiens
cgcaggcggacccgggggggggcgcgacagagacgggaggcggcagaagacaagcgcaggaagagcggagaacag

SEQ ID NO: 35729 - RNA, 72 nt, Homo sapiens
ggaggggcggaccggcgcccagaagccccgggagggcacccccaccagcgcggaaagcgccccagaacccca

SEQ ID NO: 35730 - RNA, 58 nt, Homo sapiens
gaaggaccaagaaccaggggagccgccaccaaaagcagacggaaaacccacggggaag

SEQ ID NO: 35731 - RNA, 79 nt, Homo sapiens
cggaaagaagagacacagaggagccacacccccaggcagccaacagccgaccgagcacgagccaccgagaaccgccagc

SEQ ID NO: 35732 - RNA, 83 nt, Homo sapiens
ggcccgggcgccgagccgcaggagagacacgcgggccgaccccagagaggcgcggacagcgacgccaaagggaagaacaccac

SEQ ID NO: 35733 - RNA, 76 nt, Homo sapiens
aagcagaaacccagcccaccagaggacccagaaaggagccagaacgggaaaacagagaaaaggaggccggacaaaa

SEQ ID NO: 35734 - RNA, 79 nt, Homo sapiens
cacacacacacagacagggcccagcggaaagccaggccagaagaaggaaggccggggaggggacaggaaagacacacca

SEQ ID NO: 35735 - RNA, 61 nt, Homo sapiens
ccgagccaagcacccgggggaacaagccaccaacaggagaggagagccagagaaggacagg

SEQ ID NO: 35736 - RNA, 78 nt, Homo sapiens
cacccccagggcggcacgcgcagggggcaccgaaacagccagggccccccacgcgagaacccgggccggggcccgggg

SEQ ID NO: 35737 - RNA, 65 nt, Homo sapiens
cccgaccggcgaggcggcgcggcagcggagggacggcagccgcgcgaccgggaaaaccggaggcc

SEQ ID NO: 35738 - RNA, 74 nt, Homo sapiens
ccagccgccgcccacggcgcccagccaccagagcgggcacacacaccagaccaggacaaccaggcacgacacaa

SEQ ID NO: 35739 - RNA, 78 nt, Homo sapiens
ggccgagacgaaaggcaggccacagaccggaggagagcggcggcggccccggccaacagccacacggagcccgcaggc

SEQ ID NO: 35740 - RNA, 80 nt, Homo sapiens
gagcagccgccgccgcagcgcgaacaggacgccgcaacgcccaaccaggaggcccaggaggcaagagcgagaagagcgca

SEQ ID NO: 35741 - RNA, 71 nt, Homo sapiens
aggccagcaacgcaggagaaaaaaaacagcacgggaaggagaagcgcgggagcgggaggggccaaccgcgc

SEQ ID NO: 35742 - RNA, 80 nt, Homo sapiens
cccgagccaggaagccaccagagccaggcagccaccgggagccgaggacgcagggcaacaacaaaggaccccccccacca

SEQ ID NO: 35743 - RNA, 83 nt, Homo sapiens
ccagggaccgcgacgcgggcccgcccgagggggccaggcccgagggagcacccggacagccgaggacagccccgaggcgaggc

SEQ ID NO: 35744 - RNA, 68 nt, Homo sapiens
agacgcaggggagcccaggaacaggaaggggaccaaacccacaaacaaaccaaagagcaccaaagaca

SEQ ID NO: 35745 - RNA, 76 nt, Homo sapiens
agcgagggagcaagagggcggaggccacgaacacgccggagccgccagccgagagcggcccaggaggaacaaccag

SEQ ID NO: 35746 - RNA, 85 nt, Homo sapiens
aaaaaagaaagagaaaaacagaggacaggacgacacagcaagcaaaagacaacagaacaaacagccaggaaaccaacaaaaaaac

SEQ ID NO: 35747 - RNA, 48 nt, Homo sapiens
cagagcaccgcagagaagggcgacaaaaggcagccgcagcccggggac

SEQ ID NO: 35748 - RNA, 73 nt, Homo sapiens
caggccgcacggacggggggggaggaagaagccaagccaagagacagcgcccccacagcgaaacacagcacac

SEQ ID NO: 35749 - RNA, 71 nt, Homo sapiens
agaagggaagggaaagcagaggaaggcagaagaaaaagccgcaggcaccaagaagaccaacaagcagaaga

SEQ ID NO: 35750 - RNA, 86 nt, Homo sapiens
caagcacccgccgcgggcggcgcgccgcagcgcccaggccggaccgggccgggcgcccgcagggccagggagcagaagacccaaaa

SEQ ID NO: 35751 - RNA, 82 nt, Homo sapiens
aagccccccccggcagcaggcccagcgaccaccccgcgcagccaccggacgccgcagcagccacagaagaccgggcccagac

SEQ ID NO: 35752 - RNA, 75 nt, Homo sapiens
gaagcgcggagccccaagagagagagaacccgagcgccgcagcggagaaagaaggaacgagcaagcaacccggga

SEQ ID NO: 35753 - RNA, 84 nt, Homo sapiens
gggagcagggacccgaaccgggcccaccagccgggccacgaagccccccccagcccccgggaccgggccgccgcccacagacca

SEQ ID NO: 35754 - RNA, 75 nt, Homo sapiens
agccaaggaaggaggccgcaaacagacaggaagaggcaggggcacaccagacagacaggaacaggaccaagaccg

SEQ ID NO: 35755 - RNA, 63 nt, Homo sapiens
acaggaccacaagggaaagggaacccagaagccgggagcggcaaaaggaggagcgccgccgcc

SEQ ID NO: 35756 - RNA, 87 nt, Homo sapiens
ccgagagccgcccgggccagcggccgcgcacccccggccggaggcaccagcgggggcaagagcagacggcggcagacaacacccagg

SEQ ID NO: 35757 - RNA, 77 nt, Homo sapiens
gcccgaaagcccagagccaaacagaaaagaagaggagaagcaagcagagccccggagccagcgggggccaagacaac

SEQ ID NO: 35758 - RNA, 57 nt, Homo sapiens
ggggcccaagagaagaccaccggcagagacccgcaccgccagaacacaaagcaggca

SEQ ID NO: 35759 - RNA, 66 nt, Homo sapiens
cgaggcgcgggaaaaacggaccccggaaaaaagaaccaagggaccccaaggcccggccaaccaagg

SEQ ID NO: 35760 - RNA, 70 nt, Homo sapiens
ccaccggcccaggaccccacccccagcaggaaaccggagaagacacaccacagagcacccagagcgacgc

SEQ ID NO: 35761 - RNA, 76 nt, Homo sapiens
cagggggaaccagggagggccccccggagaagaaggccgagaagagacaggcaggccggggcagcccagccgcgcc

SEQ ID NO: 35762 - RNA, 80 nt, Homo sapiens
aaaagaaagcgacaaggaacaagacaggaagcaccaaccccgcgaaacccaggacacacagggccacagcagccaccaca

SEQ ID NO: 35763 - RNA, 59 nt, Homo sapiens
cccgaggccaacgcgcgcgcgggcggaggcccggagggaaacccccggaggacaggcca

SEQ ID NO: 35764 - RNA, 76 nt, Homo sapiens
acccccggccggaggcaccagccacccgacaggaggacgcccgccaggggagcagacagaacacccgggcccagcc

SEQ ID NO: 35765 - RNA, 59 nt, Homo sapiens
gccagggacaccgcgcgcacacgcccaggacgagaaccaccgacggacgccgcccgaac

SEQ ID NO: 35766 - RNA, 82 nt, Homo sapiens
cgcaggggcagcccaggcggccgaacccgcggccggccgagccggaggccgacgcccgccgcggccggggaacaggccacag

SEQ ID NO: 35767 - RNA, 55 nt, Homo sapiens
aaaaaaacccacaaaaccgggccggggacacaagcaacagccagaacaagccgaa

SEQ ID NO: 35768 - RNA, 72 nt, Homo sapiens
agcccacacgccagagcgagcagcccacggcaaccgagagacaagcaccagcagaagcaaacaggcagaaaa

SEQ ID NO: 35769 - RNA, 75 nt, Homo sapiens
agacaccggaccccacaggccccaagggaaaaaagcccccccgcccagggcgaacaccagaccccagcgaagcga

SEQ ID NO: 35770 - RNA, 76 nt, Homo sapiens
gacacaggcgccccgcagaccagggagcgacgaaggcccagccgcgcccggagaaggcagaagaagagggccacga

SEQ ID NO: 35771 - RNA, 77 nt, Homo sapiens
caagaaggcaagaaaacacagccgacccaagacgggcgaacagagaggcgcagcagccccagccaggcaggaaacac

SEQ ID NO: 35772 - RNA, 83 nt, Homo sapiens
ccagaaaaccaagccggcagacgcgaaggagaaaaagcaggggaagcagcgcacgccagagcacccaccgaccaagaaaccac

SEQ ID NO: 35773 - RNA, 75 nt, Homo sapiens
ccaccccaaagccaccaggacccaagagcaggggggaggacccgcacgcacccagggaggccgacaccccccgag

SEQ ID NO: 35774 - RNA, 75 nt, Homo sapiens
ggcaggcggccagccaaagcccccccccgagaaaacaggaacccagagagcaagaccaggcgagagccacagaag

SEQ ID NO: 35775 - RNA, 50 nt, Homo sapiens
cgacacagcccaaagagagagaggggagcggacggcgccccccacagaac

SEQ ID NO: 35776 - RNA, 72 nt, Homo sapiens
gcagccgcccccacccacgggggcaggccaagaaaaccaggcccgacagcaagaaaaaaggagacggcggcc

SEQ ID NO: 35777 - RNA, 75 nt, Homo sapiens
aaccaaagacgggaacaagggagggggacagaccaaagaggaaaaagcggggaaaacaaaaaaaagaaggaggga

SEQ ID NO: 35778 - RNA, 75 nt, Homo sapiens
cccgggcgaggggcacagcaaaggcacggcaaccccaaagggacccgcaacagcccccacacggggagaaagaaa

SEQ ID NO: 35779 - RNA, 65 nt, Homo sapiens
ccgggacgggagcagcggggcggggcgaacccccaaggcacgggggcaaggacgacaagggagcg

SEQ ID NO: 35780 - RNA, 125 nt, Homo sapiens
cgcgaccgaggggacgccgcccgccgcccgccgcaggccacccgggaacggaggagggggacagggcggaccccgccaacagagcccaccgggccggaggagcagcgagagagcgcggacagccg

SEQ ID NO: 35781 - RNA, 37 nt, Homo sapiens
acaagcaggacgacagcagagggaaagaagaagcaag

SEQ ID NO: 35782 - RNA, 57 nt, Homo sapiens
aacgcccggagagacgaacccccagcggaccaggcccaggaagagcaagaaggcaga

SEQ ID NO: 35783 - RNA, 56 nt, Homo sapiens
aacaaagaagacccagggggaaaagccagccagaacacagaacagaacacacggaa

SEQ ID NO: 35784 - RNA, 75 nt, Homo sapiens
caggcccccaccccccacgccccaccacaacaaacgaggaaccagcacaagacaaaaagcagagagcgaagacga

SEQ ID NO: 35785 - RNA, 78 nt, Homo sapiens
ccaacaaacaccagcgcggcccgagaggaagggcggggggggggggccgagccggcccggcggagagggacgcggaac

SEQ ID NO: 35786 - RNA, 75 nt, Homo sapiens
gcaagagaaacaggcacacaagggaggaggcaaagccagacccagagaaaggccacgcgagccaggcagggagcc

SEQ ID NO: 35787 - RNA, 81 nt, Homo sapiens
caggcagcagccgccaagacggcgaaccccagacaaccagcccagccgggggacagggcagcacagaggagccgccggccc

SEQ ID NO: 35788 - RNA, 54 nt, Homo sapiens
gggaccgaggccgaggagcgaaggacagaggagaccgccagaggacaggagaca

SEQ ID NO: 35789 - RNA, 60 nt, Homo sapiens
ggcgcgagggaggcacacggcgcgccgcccgcgccaccggacccccgaccggcgggggcc

SEQ ID NO: 35790 - RNA, 79 nt, Homo sapiens
gcaaagggaaaggaggacgagcacagagccaagaaccacgggggcaaggcacggggagcgcaggacaagaaggaaaaag

SEQ ID NO: 35791 - RNA, 70 nt, Homo sapiens
aggcgagaaggggagaaggcggacccgggccaagacagcccacggacgaaacagccaagaaggcagccga

SEQ ID NO: 35792 - RNA, 80 nt, Homo sapiens
gacggccagagcgcggggacacaggagcccacagacacacacgcccgccccacaggaagcagccgacacgagcggcaaaa

SEQ ID NO: 35793 - RNA, 66 nt, Homo sapiens
cgccagaacaggcggcagcccagaaccagccccgcggcaggccaaaagagccccaaaaacccacac

SEQ ID NO: 35794 - RNA, 41 nt, Homo sapiens
accagacacggcccacggccaggggcgggcacaagggaaga

SEQ ID NO: 35795 - RNA, 79 nt, Homo sapiens
cacccaagaagggacggcgacagcaggccagggggaaccaaacccggcagggaagcgcccgggaggcgcaggaagaaga

SEQ ID NO: 35796 - RNA, 70 nt, Homo sapiens
ccgggggagccggcggcggaccccgccgaccaggcacgggaccccaaccaggacgcaggcgacaagaaga

SEQ ID NO: 35797 - RNA, 72 nt, Homo sapiens
ccccgaggcgcagaagggagaggacggaaaagaaccaacaggaggaagccacaaacgagggagcacaacagg

SEQ ID NO: 35798 - RNA, 63 nt, Homo sapiens
acccgggggaaaccgcaaaaggagccgggaacgacggccccagcagcggcccggacccggcgc

SEQ ID NO: 35799 - RNA, 74 nt, Homo sapiens
gcaccaccgggccgcgacgggagaaaaaccacaccagagaaaaaggagcacagcagggccaagaggaaaaggcc

SEQ ID NO: 35800 - RNA, 78 nt, Homo sapiens
gcggcccgccggcagagcgagacccggcaggcaccgcccggagccaacccaccgagcagagcgaccgcagcaccagga

SEQ ID NO: 35801 - RNA, 81 nt, Homo sapiens
accaagaaggccaaaaaggaaaagaagcagcaacccacccaagcagcgagggcgcgccgggcaccaaagcgaaccagacag

SEQ ID NO: 35802 - RNA, 70 nt, Homo sapiens
agaagcccggagcaggccaccggacgcagagcgcaccagcaacgaagccaacagcacgagggccgacagc

SEQ ID NO: 35803 - RNA, 85 nt, Homo sapiens
cgaaccgcccggcagcgccccaaaaagagcgcagggaccgacagcaagaaaaggagaaaacaaggccgcgggcacacagcaacca

SEQ ID NO: 35804 - RNA, 81 nt, Homo sapiens
gccaggccagcccagccggcacgccccccggcccagggaccccgcgcagaggggccccagacacgacgcccccggccggcc

SEQ ID NO: 35805 - RNA, 53 nt, Homo sapiens
cgggggcgggacacaaggacaccaggggaggcaagcaggggggcaaaggaaag

SEQ ID NO: 35806 - RNA, 65 nt, Homo sapiens
acccaagagcagcggcaggggcccgcaaaacggaggcgggggcacaggccccaagagggagaggc

SEQ ID NO: 35807 - RNA, 69 nt, Homo sapiens
aaacaaaagaaacgcccacagaacaccgagacaacgaagagaggaaagaagcggaaaggagggagcaca

SEQ ID NO: 35808 - RNA, 57 nt, Homo sapiens
gggaggcgccgccagcggccgggaccgaacaggcggagggccaaaaccaggcgagaa

SEQ ID NO: 35809 - RNA, 59 nt, Homo sapiens
agaaaacaagagaccacagaagagagcacagcagacgaaccgaaaaaaagaaaagcagg

SEQ ID NO: 35810 - RNA, 100 nt, Homo sapiens
agacccgcccaacagaaaaagagaggagggagaacacagaaacccgccccggacaacgaagagaggaaagaagcggaaaggagggagcacacaacaagga

SEQ ID NO: 35811 - RNA, 72 nt, Homo sapiens
gcaggcaaacaccacgacacccaaacgggacccgggaagggagggccgaacaggggggaacgacaaacaagg

SEQ ID NO: 35812 - RNA, 63 nt, Homo sapiens
ggcgcccgacacccgccagagacaggagcagaaaagcacgaagaacgagcggaaaggaacaaa

SEQ ID NO: 35813 - RNA, 87 nt, Homo sapiens
aaagccaggaccaagagacaggcagccaccagggggacaaacgccagagaggggggagacggaggaaccgaggagaagaagaagagc

SEQ ID NO: 35814 - RNA, 65 nt, Homo sapiens
gccaagggagccgcgcaaaggccccggcaagaaggggacacgcgcccaccagggggagccagcag

SEQ ID NO: 35815 - RNA, 97 nt, Homo sapiens
gggccacaccagccccccacggacccaaaccagaagaaaaccgaaccgaggaagggccgcgcggaaggggacaggcacggcgacaacggacgcccag

SEQ ID NO: 35816 - RNA, 85 nt, Homo sapiens
acagcgcgacgggcccgggacgcccgcgcccgcgggagcagcgccgcgcagccaagcagcagccaaacccaccaagggacgaagc

SEQ ID NO: 35817 - RNA, 71 nt, Homo sapiens
agccacggaagccgacagacaaccagcgccacagaaagggagaaggcagaagcgaccagggcaaagaagag

SEQ ID NO: 35818 - RNA, 72 nt, Homo sapiens
agaaagacacagcaggccaagcaaagagggaagcccagaggcacggggcagaacaccaacagagggccgacc

SEQ ID NO: 35819 - RNA, 75 nt, Homo sapiens
cgcgcgccaaaggagcacgaaaacaaacaggagcaagaaacgagagcacagggaggagaagagaacaacagacca

SEQ ID NO: 35820 - RNA, 43 nt, Homo sapiens
aagaccggccaccccgaccaagcaggccacgcaggcaagcagc

SEQ ID NO: 35821 - RNA, 74 nt, Homo sapiens
agagggaagagacagccagcacaccccgcgagcaaggacaggagagacaacggaggcaagaaagacggagaagc

SEQ ID NO: 35822 - RNA, 76 nt, Homo sapiens
ggaaggagcagcagaacgaaaaggcggccgggagaggagggacagcagcgggagaacaccccacggagacaggacg

SEQ ID NO: 35823 - RNA, 58 nt, Homo sapiens
gcagccacccgcagcagcgcggcagagggcaccacagacaagaaagcccccacggaag

SEQ ID NO: 35824 - RNA, 80 nt, Homo sapiens
ccgcgccgcccgcacgcgcgaccaccgggcgcccgcgcccccggagcgcagaaaccagagacgaccacaagaacccacag

SEQ ID NO: 35825 - RNA, 66 nt, Homo sapiens
ggggcagcggccggagggaccagggccacgcaggcagggcagggagagagaccggcagagcaacca

SEQ ID NO: 35826 - RNA, 73 nt, Homo sapiens
gccagggagggggagaccgaggcaggcgcccaggcaagagcccgcccacgggaaaccgccgggcagcagcaga

SEQ ID NO: 35827 - RNA, 58 nt, Homo sapiens
gaccggcgcccggacaacccggccgaaccggggcaggaggcgggggccacaagcaacg

SEQ ID NO: 35828 - RNA, 58 nt, Homo sapiens
cgggaaaggaccaggcgggggcccagacaccggccccgcacccacacacgcgaccacc

SEQ ID NO: 35829 - RNA, 59 nt, Homo sapiens
aagaacagcgggaaagaaggcaaaacacgggcaggaaagcaggaccagcaagcccaacc

SEQ ID NO: 35830 - RNA, 76 nt, Homo sapiens
agaggaaggccgccggcagcaccacaggaggggcaggaaacgaaggggccggccgccaagacacccccggcccggc

SEQ ID NO: 35831 - RNA, 81 nt, Homo sapiens
acgaaacggagccagagaaggcagaagacgacacccagaggcgcaacccagagagaggaagagacccccgaagccacagag

SEQ ID NO: 35832 - RNA, 70 nt, Homo sapiens
gcgcgaggggagacacaggccgggcacccagccaaaggaaagggaaagcaaagaagacggcaagagaaga

SEQ ID NO: 35833 - RNA, 73 nt, Homo sapiens
caccgaacaccgggggcgggcagccgaggccgggaaccagcgaggcccaggagaaggcaacaagcgaggccag

SEQ ID NO: 35834 - RNA, 81 nt, Homo sapiens
cgcgggcagcgcgcggcccgggcagcaggagacgacaaacggaagagagaaacgggcgcagcgagagagaggagcgcagaa

SEQ ID NO: 35835 - RNA, 84 nt, Homo sapiens
ccgcgccgcccacagcggagaccgcggagaggcggcggccgcggccccgcaagccgccgggagcccgacgaaagccaagcacac

SEQ ID NO: 35836 - RNA, 76 nt, Homo sapiens
ggaagaacgaccaagaaggaagcccgacaggaaccagcacaaggagaaaaccggaagagaaaggccgggaagcagg

SEQ ID NO: 35837 - RNA, 82 nt, Homo sapiens
aagcgcgggggcaacgggcccagcccgaaaccggacaacgcggcccacggagacggggccagggagaaaggaaggccaggag

SEQ ID NO: 35838 - RNA, 65 nt, Homo sapiens
gaccacccccaaccccacgccaccgaagagccaagcccaggacgcggcgcagcaacaaacagcgg

SEQ ID NO: 35839 - RNA, 70 nt, Homo sapiens
ccccccggaaaaggcccacgccgggcgagacacgcggcgcccacgcacaagaggccaaacgcacagcaag

SEQ ID NO: 35840 - RNA, 55 nt, Homo sapiens
cgaacccagccgcaccggccagcagaagaggaccagacgcccgggggggcggcgg

SEQ ID NO: 35841 - RNA, 78 nt, Homo sapiens
aaaaggaaaaaacaaggggaagacccaaggaaccaggcgaagagccgcccacccacgcaacccagacagaagagccgg

SEQ ID NO: 35842 - RNA, 72 nt, Homo sapiens
ggccgccccgcgggggacgcaccagcagacggaacaacgagagaaaacggggaaagacacccagaacacagc

SEQ ID NO: 35843 - RNA, 74 nt, Homo sapiens
gaaacaacgagcggaaagcaacccggagcggaggacaggagaccgaacaagacaagggcagagccaagcgccgc

SEQ ID NO: 35844 - RNA, 80 nt, Homo sapiens
cacaccgaagcaacccaaagcacgaacaagcaagcaccaaggaagagcccaagcgaaagaggggagcgaccaggaggacc

SEQ ID NO: 35845 - RNA, 76 nt, Homo sapiens
aaagaaagagcaggacacaacccacggcaaaccgcaggaacagacagaaccacccgccagccccacccagccgccc

SEQ ID NO: 35846 - RNA, 74 nt, Homo sapiens
gacagaaggagcaggaaccaaagggaccgagggcaccgcgcccgcagacacaccccaaacagaaacccagccaa

SEQ ID NO: 35847 - RNA, 69 nt, Homo sapiens
gaccaagaaccaggcggggacaaaacaagacggaggagaccgaaggaagaggagcagaaccgacagacc

SEQ ID NO: 35848 - RNA, 69 nt, Homo sapiens
agagaagaagaagcgcggaggccgaaaagaagcggcgaacaaggcggcacccccacaagcgggaggaac

SEQ ID NO: 35849 - RNA, 85 nt, Homo sapiens
gagcggcagcagcaccagcccaagagaagcagccgcgaacgcggccgggaggcagagcgaggcaccggcgccacaaggcaacacg

SEQ ID NO: 35850 - RNA, 68 nt, Homo sapiens
aaaaggaagcgaaagaagaggaaggaaacccagaagaggaaacaccagcggagacccaaccccaggca

SEQ ID NO: 35851 - RNA, 111 nt, Homo sapiens
cgcaacagccggccccggccacgaagcagcacgccaaagccaagaggagaagccacggcagcccagacgcgagaaggaagaagaacacaacagaaagagcggagaaaggca

SEQ ID NO: 35852 - RNA, 44 nt, Homo sapiens
cccccagcagagcccgccgcccggcgcgaccagcgacgaggagc

SEQ ID NO: 35853 - RNA, 72 nt, Homo sapiens
gaccacacagcagcccgaggaacacaggcgacaaggaagaagcacaaagcggcaaaccacaagaaacacaga

SEQ ID NO: 35854 - RNA, 76 nt, Homo sapiens
ccaggcccagggccggcccccccaggacaacccagaggcaacaaaggcgaggaagagcacgggacaggaagaagca

SEQ ID NO: 35855 - RNA, 81 nt, Homo sapiens
ccggaggagccaggacgcagcccggcggacgccggcacagaacggcccggccaggccccaccgccacaagcaggggaacac

SEQ ID NO: 35856 - RNA, 73 nt, Homo sapiens
ccagcggggcggagcgaccccgcggggcgcggcggaggagagaggacgcgagaaaaacgaagagaccggccga

SEQ ID NO: 35857 - RNA, 80 nt, Homo sapiens
ggaacagcgagcggagccggcaggaaggggaccgggcggcggagcggcggaagaagggccggcaaccgccagacaggagg

SEQ ID NO: 35858 - RNA, 40 nt, Homo sapiens
aaaagacggagacccaaaacggcaaggggaaaccagaagc

SEQ ID NO: 35859 - RNA, 69 nt, Homo sapiens
cgagcggaggggacacgggcggaaccccggaaccagagcccaaaaggcagagcgaggagagaagaagga

SEQ ID NO: 35860 - RNA, 75 nt, Homo sapiens
cacaaaggaagccacaaggcagacggagaacaggacacaaggacgacacccacacggagacagccaagaagcagg

SEQ ID NO: 35861 - RNA, 74 nt, Homo sapiens
cgcccacccccagcggcacagggccgagaggacgaaaaaagggccggcccgaaaggggaccagaccgaggcagc

SEQ ID NO: 35862 - RNA, 78 nt, Homo sapiens
ggaccgacccggaccccggagaggggcgcggagaaacaagaaccccccaggaacagccgagccggagcgacggagcgg

SEQ ID NO: 35863 - RNA, 34 nt, Homo sapiens
aaacggaacccgcaccaagaggagcaccgcgccc

SEQ ID NO: 35864 - RNA, 71 nt, Homo sapiens
aacaacagaaacgaacaaagaaagaagcagcagaagaaaacaagacgaggagaaaaggaagcgcaccagcc

SEQ ID NO: 35865 - RNA, 89 nt, Homo sapiens
cggaccagcagcgcgggagagcggaccccccgccaccgcccgagcccagagggggcccaccacaacacccacgccgcgagggaggcaag

SEQ ID NO: 35866 - RNA, 57 nt, Homo sapiens
cacagaaacacgccccgcaaaaagggaagagggaaagacaaaccaaggaacaggacc

SEQ ID NO: 35867 - RNA, 40 nt, Homo sapiens
agccccagaaaagagcaggccaagaacccaaagcaaggcg

SEQ ID NO: 35868 - RNA, 82 nt, Homo sapiens
ggcccgggccaccacccaccaaggcaccaggcggagaagcagaacagcacaccgagaggacacgacaacaccccaacgacag

SEQ ID NO: 35869 - RNA, 73 nt, Homo sapiens
ccaggcacccggggcgacggaaacaggcaaaggagcgacagacagcgagggaagcaccggaagacaccagaga

SEQ ID NO: 35870 - RNA, 75 nt, Homo sapiens
accccccaccgaggaagagcgggagaaaggagcaaacgagacggaagaaaaaaccgacggcccgaaccacagcca

SEQ ID NO: 35871 - RNA, 83 nt, Homo sapiens
agaacagaggcgagagcggcagcagcaccagcccaagagaaggacgacagacggaggcagagcgggaccggccaggagccaag

SEQ ID NO: 35872 - RNA, 77 nt, Homo sapiens
ccggcccgccggccgcgggaagcgggccgggggacccggaaacccgagcccagagaaaagacaagggcagagccaag

SEQ ID NO: 35873 - RNA, 77 nt, Homo sapiens
cgaggagaggcgcaccgccgggcagccgcggcccgccgagccgcaccccagccccaacgcagcccgggcggagagcc

SEQ ID NO: 35874 - RNA, 72 nt, Homo sapiens
caggggaacaaggcaagggggggcacaaaagcaacacgaaacaacgaagcaagcccaagggcgcaggggcaa

SEQ ID NO: 35875 - RNA, 79 nt, Homo sapiens
agacaagcccgcgcccaacacccagagacagaagcgaaggggacagggggagaaccgccagggaaacccgggggacaga

SEQ ID NO: 35876 - RNA, 59 nt, Homo sapiens
cgaccccaacaaaaaagggcacaagacaagaaagacccagcggagaagaaaacgaagaa

SEQ ID NO: 35877 - RNA, 61 nt, Homo sapiens
cgggaccaggcccgggggcggcggccacgccaaggacgggaagcgccacgcagagagcaag

SEQ ID NO: 35878 - RNA, 75 nt, Homo sapiens
gaagaaacccagcgaagggagcaggcccagaaagaacagacaaagaccgaaaaacacgaggaaagcagacccacg

SEQ ID NO: 35879 - RNA, 51 nt, Homo sapiens
gccggagcggcggccacggacaccagcagccgcaacggcacacacgcccgc

SEQ ID NO: 35880 - RNA, 81 nt, Homo sapiens
gggcgcgccgccggccacgaccccgccgagggcccggaccccgaaagacgcggaagccgcgcacaaaagaggagaaacccc

SEQ ID NO: 35881 - RNA, 84 nt, Homo sapiens
gccccacacaggcaagacaacgacacaagcggggcaggcgagggaggagcaggggaaaaagaaaagggcgaagacccgaagcag

SEQ ID NO: 35882 - RNA, 89 nt, Homo sapiens
cacgacggccagcgacccgcgcaagcgcgagaccgaccgcacggggaggaaggaccagcacccgcacgacgccccggagaagaacgccc

SEQ ID NO: 35883 - RNA, 75 nt, Homo sapiens
cggcgcgaggggacagagcccagcccgccggccagagacacccggagcgcggacaggaaaagagaggaacaagca

SEQ ID NO: 35884 - RNA, 58 nt, Homo sapiens
cgcgagagggccggcaggcccgggaagggcagccggcacccgcacaacccagggggcc

SEQ ID NO: 35885 - RNA, 79 nt, Homo sapiens
aacaaaacaggcaccaccagccaaaaagcagcccaagaagacacggcacaggccgagcccccgaggggcagggacaccg

SEQ ID NO: 35886 - RNA, 79 nt, Homo sapiens
gaggaaaagcaaaagaagacggagagggcccaccgaccacaagcaccggagcaagaggacccgggcccacacaggacag

SEQ ID NO: 35887 - RNA, 35 nt, Homo sapiens
gacgcaaggcaaaggaaggagggagaagcacagaa

SEQ ID NO: 35888 - RNA, 80 nt, Homo sapiens
agcagacgaaaacggggcgagcaccaaagccaaggaagcccagaagaaagagcaccccccggaagcagcagggaaacgca

SEQ ID NO: 35889 - RNA, 36 nt, Homo sapiens
caacacacaggacacaccagcaaccgcccagaggaa

SEQ ID NO: 35890 - RNA, 87 nt, Homo sapiens
ccccgcccaagggaacccgggacaagaacgcagccgccggccgaccaccggaacggacagcccccccagagaggacggggacgggcc

SEQ ID NO: 35891 - RNA, 81 nt, Homo sapiens
caagagagcccaaggccgcaacaagcccacgagaaaaggaagaccggcggcagcagaggagcccgggagcgaaggagaacc

SEQ ID NO: 35892 - RNA, 68 nt, Homo sapiens
ccaaccgggcggaaccgcccagcacagacacaagcgggacggaagaggcccggcgaccggacagaaac

SEQ ID NO: 35893 - RNA, 59 nt, Homo sapiens
gccaacaagaccaagcccgcggacgccaggggccagacccacggaaagaaaacaagcca

SEQ ID NO: 35894 - RNA, 70 nt, Homo sapiens
aaaaaaacgaagcagggaccaacagcccaaaggagaagcccgacacgggaagagaagaggaggccacccg

SEQ ID NO: 35895 - RNA, 73 nt, Homo sapiens
cacaacacaacacgccccgaaggcaggagacagagagaaagcaacagcaggccagccccagagcccggggagc

SEQ ID NO: 35896 - RNA, 57 nt, Homo sapiens
cgcgcagccaccggacgccgcaggcacaagacacgaagagcaccccagagcgggaca

SEQ ID NO: 35897 - RNA, 83 nt, Homo sapiens
ggaagagggagcaccacggaccccaaggaagccacggcagacacacaacccgacccgacgaaccgggaacaccaccaggaggg

SEQ ID NO: 35898 - RNA, 76 nt, Homo sapiens
cgggaagcggcaccaagaggaacggcgcgaagacccggggacagaggccccccccggacacgacggggaagacaca

SEQ ID NO: 35899 - RNA, 63 nt, Homo sapiens
ggccagaaacccccacagcggaacaaaaacacaccaaaggagggccagagaaaaacccaagac

SEQ ID NO: 35900 - RNA, 72 nt, Homo sapiens
cccgcgccgccgaccccccggcgccgcgccggcggcggagccgggcgcgagcagcgcgagaagacccccagg

SEQ ID NO: 35901 - RNA, 76 nt, Homo sapiens
caaaagagaagaaccaaaacggccccgccgccccaggcgagcacacagagaggggaagggcagcagcagcagagaa

SEQ ID NO: 35902 - RNA, 80 nt, Homo sapiens
cgcggggcgcgcgcgcaccacacaccggcccgggcgcgaacaaaggcaaaaccaaaaacaggcgggagagcaggagagga

SEQ ID NO: 35903 - RNA, 67 nt, Homo sapiens
ggacagggggagaaacacccgaacgaaggagaggagcaccgccccaggcggagacaaggcagaccag

SEQ ID NO: 35904 - RNA, 91 nt, Homo sapiens
cgccgccgccgccgccaagcgcccgcggacggggaggaggagcaggagcggaggaggagccgccgccgccaggcaggaagaggagaggcgg

SEQ ID NO: 35905 - RNA, 75 nt, Homo sapiens
cacgcgcggaaggcagcgcccagcagcgcagccagaacaacaggcagcggcaaggagagagcggcacggggacgc

SEQ ID NO: 35906 - RNA, 78 nt, Homo sapiens
caaaggcaccaggccaccacagaaacaaaagcaacaaagaggaacgccaaaaaccccgccacaacggggagcgaggag

SEQ ID NO: 35907 - RNA, 72 nt, Homo sapiens
cgggcaaccacggggcggcgccggccccaagaaaaaccacagaccaggacccaagaaaacccagcggggacc

SEQ ID NO: 35908 - RNA, 72 nt, Homo sapiens
gcagacccggagacacacggccgagcagaggcgaccagagaaagccaaagcaccgcccagaaggacgaaggg

SEQ ID NO: 35909 - RNA, 69 nt, Homo sapiens
aaagaacacgaccgaccgaggcaccagggacccgggaacgaccccgaagcccgccgcagaaaagaaacg

SEQ ID NO: 35910 - RNA, 74 nt, Homo sapiens
gcgggaaggccggaaaggaccagaccgcccaggaaacgacaaagaagggcacaccaccacagggaaccagcccc

SEQ ID NO: 35911 - RNA, 60 nt, Homo sapiens
gggcacacagaacaacaaggggagccgccggacggaaagcgggaagagacaaagggagaa

SEQ ID NO: 35912 - RNA, 62 nt, Homo sapiens
aaaagagaagcaccaaggaccagccgcacacacgaacaacagaggacaggcgccacacgagg

SEQ ID NO: 35913 - RNA, 76 nt, Homo sapiens
ggacggacccgcaccagccggacgcaagagggcccagggcaccccagggagacacgaggccaggaaagccacagca

SEQ ID NO: 35914 - RNA, 73 nt, Homo sapiens
ccaacccggcaccccacagcccagggaaggcaccaaaagggggggcaggaaagccaccgcccccggccgccgg

SEQ ID NO: 35915 - RNA, 40 nt, Homo sapiens
ccccaagacggaccgagagcacccacaaaagcgaaaagcc

SEQ ID NO: 35916 - RNA, 82 nt, Homo sapiens
ccaggagagagggggcgcggcaaccggaggcaagggagaaaaggggagcggcccaaagggcgaggccccggcaaagaggcgc

SEQ ID NO: 35917 - RNA, 70 nt, Homo sapiens
ggggagcaacccccggccagggcccacaggggagcgggaggggccaaccgcgcgagcggcaccagccacc

SEQ ID NO: 35918 - RNA, 83 nt, Homo sapiens
aggggaagaggagcagaggaccggcaagaggaagcccgcgccgggaggaggagaaaaaccaagggagaaaaacaccaggaaca

SEQ ID NO: 35919 - RNA, 71 nt, Homo sapiens
agaaccaggaaggcagacagggcccaccgagccacacgagaaacggacaaggcagccaaggccgaaacaac

SEQ ID NO: 35920 - RNA, 78 nt, Homo sapiens
accaggcccgggggcggcggccacgccaaggacgggagaacgcgacacacaccaagcgaagcccggagcccgagacgg

SEQ ID NO: 35921 - RNA, 70 nt, Homo sapiens
cgccggcacgcccagacagcccacaacagcaacaccagagacggccacggggcccagaaaccagggccac

SEQ ID NO: 35922 - RNA, 71 nt, Homo sapiens
cgcaggccgcggcccgcccccagaaagaaccggaacagaagacagggaaggacccaagagcggagaacccg

SEQ ID NO: 35923 - RNA, 76 nt, Homo sapiens
aggagcaccaccaaaacacagcacgaaagcaagagaacaaagcacgaacaacgacgaagcacaacaaggggacgaa

SEQ ID NO: 35924 - RNA, 81 nt, Homo sapiens
ccgggacgccgcgaccgccgcgcgcccgaaccggggccacagaggccccccagcagaccaggcaccccgccaggaagaggc

SEQ ID NO: 35925 - RNA, 76 nt, Homo sapiens
ggaaacgacagaacaccccaccaaacacagggacacgaaagcccaaaccgaaccaaccagagccaaagaacccccg

SEQ ID NO: 35926 - RNA, 67 nt, Homo sapiens
acagaccgacacgacgcagcacggaagcgcaagaaagcacagagagccaaagaaagacgaaagcaca

SEQ ID NO: 35927 - RNA, 78 nt, Homo sapiens
cgaagacaaagaagaaggcggacaaaggaaagccaaaacacgacaggacagcagggaagaacggaaaccagagaaaga

SEQ ID NO: 35928 - RNA, 51 nt, Homo sapiens
agccaacccaccaaacaagaaggggcaaacaacaggccgacacccacacgc

SEQ ID NO: 35929 - RNA, 38 nt, Homo sapiens
acacaggcaaaagggaaagagagcgcaagcagaacaag

SEQ ID NO: 35930 - RNA, 69 nt, Homo sapiens
gaaacaagcacccgccgggccgaaccggaagggcaagcagaaaaaaggccaggagacaaccagaccccg

SEQ ID NO: 35931 - RNA, 71 nt, Homo sapiens
aaccagaagacgagagccaacgcaaccaggcgcaggacacacagagagacgaaacgcacgcagagcacgaa

SEQ ID NO: 35932 - RNA, 81 nt, Homo sapiens
cgccggcgcgcggcgcggacaggcccaaacgcgggaggccaccgccccaccagcaggcaacgccacagaccgccagcgcca

SEQ ID NO: 35933 - RNA, 76 nt, Homo sapiens
ggaggaggaggaggacgacgacgaggggaacggcacgcgcgcgacacaaggaggaaaaacaagaccagcggcccgg

SEQ ID NO: 35934 - RNA, 48 nt, Homo sapiens
gcagacaaaagggccaaagaagggagagagagaggcgggcgagaggga

SEQ ID NO: 35935 - RNA, 81 nt, Homo sapiens
gccagcacgccagacccgcacgcaaaggggggcgcaagacaaccaggaagggaacgccacgacacagagaaccaacgccga

SEQ ID NO: 35936 - RNA, 80 nt, Homo sapiens
agccggggaccgcccggccgcgagccggcgcagacgccacacacagcaccgacgcagagcagggagccaggcgaggacgg

SEQ ID NO: 35937 - RNA, 72 nt, Homo sapiens
cgacgcgccaccggcggggggcgagcaacaccgggcggggcgcggaggacgcagcggaacgagacccgggcc

SEQ ID NO: 35938 - RNA, 73 nt, Homo sapiens
accaccaacagacaaagagccaccgcgcaaagcccaggcagaagacccccccaggcccaaccagacccccacc

SEQ ID NO: 35939 - RNA, 81 nt, Homo sapiens
gcggccgagcaggcgagcgaacgacggaccaagaacgcccagcccgcgggcaccggcagaaaggaggaggaaaacaccccc

SEQ ID NO: 35940 - RNA, 41 nt, Homo sapiens
aagaggagagcggaaccaacggcggacccggacgacaccaa

SEQ ID NO: 35941 - RNA, 71 nt, Homo sapiens
gagagggaggaggagaagggcagagacggagaagccgaagagggagggacagcgggccccagaccggggag

SEQ ID NO: 35942 - RNA, 80 nt, Homo sapiens
ggggggggccaagagacagggcacaccaaacccacggcaagccggaacggggcccaggagcaaggaaaagggccgcggac

SEQ ID NO: 35943 - RNA, 80 nt, Homo sapiens
ccaagacaagggcggcaaggaagggacgggggaggccggcccagcccggaaaaacggcgcacccagcaacacgggccccg

SEQ ID NO: 35944 - RNA, 78 nt, Homo sapiens
ggaaagaaacaaaaacgggaaagccggcaagagggagaaggacaccaggcagaggcaaggaaccgcggcgccaaggga

SEQ ID NO: 35945 - RNA, 77 nt, Homo sapiens
gcgaggagacgccaaccccagcaaaaagcccgcaacaagaagcagggagccaccaaacgccaacagcaacccccagg

SEQ ID NO: 35946 - RNA, 78 nt, Homo sapiens
ggagagcgacagaacgcgcgcgaagcccaaagggcccgaagggaagacacaggaagcgccgaggaaggaaaccagccc

SEQ ID NO: 35947 - RNA, 81 nt, Homo sapiens
cggcggccccacggcgcaccaccacaacaggggagaggcccagccgaccccaggagcgccagcccgagccccccacagggc

SEQ ID NO: 35948 - RNA, 59 nt, Homo sapiens
caggagcacggggggggccagggagcccggaaggccaggggcagccaaaggaagccccc

SEQ ID NO: 35949 - RNA, 59 nt, Homo sapiens
ccgggagacacacagcaggggagcccaagccccaaagcagaacgagaggcgaagccaaa

SEQ ID NO: 35950 - RNA, 86 nt, Homo sapiens
gcgacccggaccaccgggcgcggcgccccagccgaacagaaaggccccggagcagcgcgacccccaggaaacacgaggcagacggc

SEQ ID NO: 35951 - RNA, 79 nt, Homo sapiens
aagcagggggaaagaaggccgaaggacccccacaacgagcgcccggaggaaagcaccgggaggaaagagagccacacga

SEQ ID NO: 35952 - RNA, 69 nt, Homo sapiens
gcagaagcgaggaggggagaaagaaaaaggggccaagaaccgcaagccaaaaccaaccaacaacaacga

SEQ ID NO: 35953 - RNA, 54 nt, Homo sapiens
ggcagagacacacagcaaggggcggagacaagggcagagccaagcgccgcccgg

SEQ ID NO: 35954 - RNA, 79 nt, Homo sapiens
gcagacccggaagccgaaccaacggaggccgaagaccccaagaagagagagaagaaccagacacgcgaagaaaaaagga

SEQ ID NO: 35955 - RNA, 38 nt, Homo sapiens
aaccgcaggagccagagaaggagcggagaacggaccac

SEQ ID NO: 35956 - RNA, 75 nt, Homo sapiens
aaccggcaaaggggcggcacaccgggggagggaaacgaagcggagacccgagaccaggagcgcacaccagagggc

SEQ ID NO: 35957 - RNA, 70 nt, Homo sapiens
agcagggaaacccagcgagagaccaggcggaccaaaaccccagcaaggggcagccggcggccgaggcgca

SEQ ID NO: 35958 - RNA, 87 nt, Homo sapiens
gacacgcccgggcggggagggcagccgggcccgcccaggccgacggaaggcagcgggggcacagcgagggggcagaccccagcgcca

SEQ ID NO: 35959 - RNA, 81 nt, Homo sapiens
gaaggagaacagacgcacacggccgagcccacggggccacaccacgcagccggacaccagaaggccagaaggaacgaccaa

SEQ ID NO: 35960 - RNA, 72 nt, Homo sapiens
ccgcccacgaaggggcaggacgaagagcagggaaacaccacgaagcagccaaggaaccaagaacagagacca

SEQ ID NO: 35961 - RNA, 54 nt, Homo sapiens
agcgaaaaacaggcaaggacaacaggcacaaagagagaaggaacacccacaggg

SEQ ID NO: 35962 - RNA, 35 nt, Homo sapiens
ggccccgggaaagagaccaaggacaagcaccccca

SEQ ID NO: 35963 - RNA, 77 nt, Homo sapiens
gcggccgccgcgccgcccaggcccggaccagcgcaaaccagcaaaagcagaaagcacggaccaaaccagcgaaaagg

SEQ ID NO: 35964 - RNA, 70 nt, Homo sapiens
agcagccaagcccagagcggaaccagacaggggcaagaaaggagcagaacgaaaagcagaaaggaaaagg

SEQ ID NO: 35965 - RNA, 85 nt, Homo sapiens
gcggcggcagcggcggcggcggcggcccccggggagaggagaaacgcagcacccgaggaagaaagaacgaagaaacccaacacca

SEQ ID NO: 35966 - RNA, 77 nt, Homo sapiens
ggaaccggagcggaggaagccggcaaagccagagcagaaccggacagcaggaccacggccgagccgggacaagccgc

SEQ ID NO: 35967 - RNA, 72 nt, Homo sapiens
gggagcggaaaccccagaagcgcaaagggccagcccaaggcaagaaaaaaagaccaggagcggcagcgagaa

SEQ ID NO: 35968 - RNA, 72 nt, Homo sapiens
ggcgaggcacggacagcggcagcaggggaggcggaagccacaaacggacggccgacaagaaggagaagcgac

SEQ ID NO: 35969 - RNA, 72 nt, Homo sapiens
ccgggagccaaggaagacagagacggcaaaaccgggagaaaagaaggacgacggaaggcaaacgaggaggaa

SEQ ID NO: 35970 - RNA, 35 nt, Homo sapiens
gcaaggacaggaggagaggaaccaacgcagagccc

SEQ ID NO: 35971 - RNA, 59 nt, Homo sapiens
agaaccccacagccacaccagccaaaggagacgaaaaacgcaagacacagagaagaagc

SEQ ID NO: 35972 - RNA, 84 nt, Homo sapiens
gccggcacagagcgacaggacccagggcaagaccagacggaggagagacacacaccgggagcgcggcagagaacacggaaagac

SEQ ID NO: 35973 - RNA, 54 nt, Homo sapiens
ccggagaggcagcaggcccgaagcagccggcaagacagccaggaaggcaggaac

SEQ ID NO: 35974 - RNA, 75 nt, Homo sapiens
accggaaaggagcgccgcagagggagaccaaccgaaggacaagggaaggagcagaggcaaagagcgacgcacagg

SEQ ID NO: 35975 - RNA, 72 nt, Homo sapiens
ggaacaacaagcccggaaggaaagaaaacaaagacacagcgcaagcagccaagagagaaagcaagccagaag

SEQ ID NO: 35976 - RNA, 67 nt, Homo sapiens
aaggaccaagaaccaggcagagacccgcaccgccagaacacaaagcaggcaggaccaaccgcaaaga

SEQ ID NO: 35977 - RNA, 57 nt, Homo sapiens
gaacacgggacgccccagaggaccccggccggaggcaaggagcccacgccaccccca

SEQ ID NO: 35978 - RNA, 55 nt, Homo sapiens
acgaccacggaccagcccagggagaccagcgaagccgaggggaaagaaaaagagc

SEQ ID NO: 35979 - RNA, 74 nt, Homo sapiens
cggccgcccagggcagggagaacgcgcagaaaacaaaggcaaggcgacaaacacaagacgggaggaagagggaa

SEQ ID NO: 35980 - RNA, 55 nt, Homo sapiens
aggaccaagaaccaggccaaaacagaagaggcaaagcccagccacagcagcagcc

SEQ ID NO: 35981 - RNA, 84 nt, Homo sapiens
aacagaacaggaggggagagggcaggaaccaccgcccaaagggccccaaggagccccaaaggcccagcgacacccgaaacacag

SEQ ID NO: 35982 - RNA, 73 nt, Homo sapiens
gcgcacgcgccggcagccaccagcacacaccggccaaggccagggcagcagagcacggagggcaggagccaac

SEQ ID NO: 35983 - RNA, 79 nt, Homo sapiens
aggcgcgcgcacccaaacgcaaggaacggccagaggaacggcgaagagagcgcgcaaaaaccagcgggcacccggaaaa

SEQ ID NO: 35984 - RNA, 34 nt, Homo sapiens
aaaaacaccagacaagaagacagggccccgggcc

SEQ ID NO: 35985 - RNA, 72 nt, Homo sapiens
gcacaccaccggacaaccgacaaaagacaccgaggggcgaagcagaaaaagacggcccagccaagaaaaagc

SEQ ID NO: 35986 - RNA, 71 nt, Homo sapiens
gaccgaccaccaaaacgcggagccagcgcccggcaaggagcgagcgggagacaccggccggaaaggggggg

SEQ ID NO: 35987 - RNA, 55 nt, Homo sapiens
agccagaaaagggaacaagcaacaccgacagggcaggaaaagcaaacacaaaaag

SEQ ID NO: 35988 - RNA, 80 nt, Homo sapiens
aaaaacacaggaagcaaaagaagaggaccacacacagacgacaacaggcccaacccaagccagggggcccaggaacagca

SEQ ID NO: 35989 - RNA, 71 nt, Homo sapiens
gagacggagggacggcagacaaagcccgacaaggagcggcagaccgagacagagaggccgagaaggaccag

SEQ ID NO: 35990 - RNA, 68 nt, Homo sapiens
gaggcaacaaggcggaaaaagacaccaccaacggaaaacaacacaggcgaccaacgacgaagagcaga

SEQ ID NO: 35991 - RNA, 72 nt, Homo sapiens
gagaagcgaaaaggcgaaacggaaagcagacgaaggacaagccgagggaagacaggaagggcgggcaaacag

SEQ ID NO: 35992 - RNA, 86 nt, Homo sapiens
cccggcaacgccaaccgcccgcgcgcgcaggcgggcgcaggcccggcgcagcgcgggggaggagccccagccccgcgacgaggagg

SEQ ID NO: 35993 - RNA, 75 nt, Homo sapiens
gggaagaccagagcagaagacagacaaaaaccaagaaacaaggagcagggccgagagccaggggaaaggccagcg

SEQ ID NO: 35994 - RNA, 69 nt, Homo sapiens
ccgcgcgcccacccaacccgagagcaacagcagaggacaggaagaaccaacggcacgaacaagggcagc

SEQ ID NO: 35995 - RNA, 56 nt, Homo sapiens
gagaccagccggacaacagggggaaagggaagaagacagcggcaccgaacaagaca

SEQ ID NO: 35996 - RNA, 68 nt, Homo sapiens
ggcgccgccggacagcagagcccagcggaaccaaaaagcgcacacggaggggaccagagaaacgcacc

SEQ ID NO: 35997 - RNA, 68 nt, Homo sapiens
cggccccaaagacaggccaacaccgcacccagggacacacagaaaggaggagcccaggaccaccgaca

SEQ ID NO: 35998 - RNA, 104 nt, Homo sapiens
aggcggaagaccgcgcgcagggccgcagcgggagcggacggcgagcgcgagcggcgcgagaaaccacacccaccgcccgggcaggccacggcggagagggccgg

SEQ ID NO: 35999 - RNA, 73 nt, Homo sapiens
cagccaggccgacacccaaccgggcaggcgagacgcagaggaacgaggcaccggacacagggcaccgggagca

SEQ ID NO: 36000 - RNA, 79 nt, Homo sapiens
gggcgagcccggagaagaggaagggcaaacagaagacgggcaaaagagcggaagaaccaacgacagaagacggagccga

SEQ ID NO: 36001 - RNA, 81 nt, Homo sapiens
gcagagaaccacagcgacaccagccaccccagccaccccagccagggaaccaagaggggaaagaaccagacgacaggaagg

SEQ ID NO: 36002 - RNA, 72 nt, Homo sapiens
caggcacgcacggaagccggacaaagaagcccaaaagagcgggaacagacacagcagagcagaagaaaaaga

SEQ ID NO: 36003 - RNA, 48 nt, Homo sapiens
caaaagaaaaacaccacccagcgccggcgaaagcaacgaagggacgcc

SEQ ID NO: 36004 - RNA, 80 nt, Homo sapiens
gggaaggcggacccaggcaacgccagcaacgcgggcagaggagcggagcggagaagccaagggggccgagacaacaagaa

SEQ ID NO: 36005 - RNA, 81 nt, Homo sapiens
agcgggcggcgcgggggagagaaggagaagaagcaccagccgacgcgaacggaacacccgggaaaccccccaaaagcaagc

SEQ ID NO: 36006 - RNA, 51 nt, Homo sapiens
aaggggcccagcagacgcaaagacgcaacaggggagcacgccagacaccca

SEQ ID NO: 36007 - RNA, 80 nt, Homo sapiens
ggggaagcggggcggcaccggacaccaagacggaggcaggccgaaacaaccccaggaagaagagagcggagccagagaaa

SEQ ID NO: 36008 - RNA, 37 nt, Homo sapiens
ggggaaacacagaacgcaggccccgggcaaggggagc

SEQ ID NO: 36009 - RNA, 63 nt, Homo sapiens
cggcgccggcgaggaggcgcccggagcggccgccccagcgacaacccccaagaaagggagccc

SEQ ID NO: 36010 - RNA, 74 nt, Homo sapiens
gaccgcgggccggagccccacacgccaccacgaggagggacgcccggagccagcggaggcacccgacgaaccac

SEQ ID NO: 36011 - RNA, 74 nt, Homo sapiens
acggccgggcaggagggagagaggagcacccggagcagccgggagaaggacaggagacagagcgaaccccccag

SEQ ID NO: 36012 - RNA, 78 nt, Homo sapiens
agagggcacccacccacgaagggaggaaaagggcagggacagcgcaggcagcaggaaacccgaacccagcggagagcc

SEQ ID NO: 36013 - RNA, 94 nt, Homo sapiens
gcgacggggcaccgccacagcgcgcgcgccccccagagaaaccccgcaccaaggccaggaagggaggcgcagaggcccggccccagcccccggc

SEQ ID NO: 36014 - RNA, 78 nt, Homo sapiens
cgggaacaggagcacaccgagagaaagcaggggacacgcacccgacccaagagaagaaaggaacagagaacgaggaag

SEQ ID NO: 36015 - RNA, 70 nt, Homo sapiens
ccaaaacacgacagcgggccaaggaaagcggagggagccccagaggacggccacagccagaaaagagcac

SEQ ID NO: 36016 - RNA, 84 nt, Homo sapiens
ccggcgcacgcggcgcgcacagacccagaacggcggccaaagcgccagacaagggccgagccccggagagccccccgcaagggg

SEQ ID NO: 36017 - RNA, 67 nt, Homo sapiens
aaaggaaaacgcggaaaaccgacacaacagaccggagagagaagaccaaagacaggccaaaagaaac

SEQ ID NO: 36018 - RNA, 79 nt, Homo sapiens
gaccccaagaagaccacagagggacccggacaaccagaggcagccagcagggggagaccccaaggaagccgggcacagg

SEQ ID NO: 36019 - RNA, 54 nt, Homo sapiens
ccagccaaaacaggcgacaggggaacaaaaggcccccacagagagcacacaaac

SEQ ID NO: 36020 - RNA, 75 nt, Homo sapiens
accaaggaggagacaggccagcccaaggcagcagccacgacacccaagccgcacagcccagcccacggaaccagc

SEQ ID NO: 36021 - RNA, 72 nt, Homo sapiens
acagacgacaccaggcgaaggcaagagaggggagggagaaaaacccgaccccccagggcagagacaagaaag

SEQ ID NO: 36022 - RNA, 82 nt, Homo sapiens
gcccccagcagcacccaggcccgaggacgcgggccgggaccgaacacggaacggacaggcagagaaagcaagagacgcaacc

SEQ ID NO: 36023 - RNA, 62 nt, Homo sapiens
cacgcaagaaccagaacgacaaacacacagccaggaaggcgaggacagacgccccaaagcag

SEQ ID NO: 36024 - RNA, 75 nt, Homo sapiens
ccagacggaaaaagaggggaacggaagaacggacccaagaacagagcaaacagaacaaaaacaagaaaagcgaca

SEQ ID NO: 36025 - RNA, 74 nt, Homo sapiens
aaggaagcgaacaccagccccgaggcagacagccgagacaccggagccgcacaccggaacaagaggagaccaag

SEQ ID NO: 36026 - RNA, 69 nt, Homo sapiens
agaaaaagcaacaaaagaagaggcaaagacccaggaaagggcgaagaaaaaaccaacagaaccggaagc

SEQ ID NO: 36027 - RNA, 85 nt, Homo sapiens
gccccagccaagcaaagggcgaccgggagacccagccagaccgcccagacggaccggaggggaggggaccccaagaagcacagga

SEQ ID NO: 36028 - RNA, 83 nt, Homo sapiens
agcgggccggaggagccagagcgcagaaaggagacgggcagacaacgaacaagcgaagaaccagcagcaagacaacggagaga

SEQ ID NO: 36029 - RNA, 82 nt, Homo sapiens
ggcagagggaacgccacgcgagggccccgggcgggacggccggcgcgcccgcgcccggggcggccaagggcccagggcgcac

SEQ ID NO: 36030 - RNA, 74 nt, Homo sapiens
ggcaccagacacagggaaagccggagggcgagcaaggcaaccagcaagaacaggccacgccagcaagcgcgaaa

SEQ ID NO: 36031 - RNA, 88 nt, Homo sapiens
gagacgaagcgcccggggggcgagcccgccgcacccgggccgcgccggcacagacaagaggagcagcagcggcaccgcccccacccgg

SEQ ID NO: 36032 - RNA, 76 nt, Homo sapiens
ggggcagggacggacccggagccgggccagcaacagagcgggccggggacgacagcccaccgaggaagaccaaagg

SEQ ID NO: 36033 - RNA, 80 nt, Homo sapiens
aaggaggccaggcaccgaccgccagccggagcacccgcccagcaccgcaggcagcagaagaccggaggaccggggcgagg

SEQ ID NO: 36034 - RNA, 53 nt, Homo sapiens
caaaaagcaaacggaccagaccgaccaccaaaagaaggcggaacacggaccgg

SEQ ID NO: 36035 - RNA, 61 nt, Homo sapiens
cgcggacgccgaggcaccgaggcaccagaggaggggaacggcgagggaacccaggaaggag

SEQ ID NO: 36036 - RNA, 77 nt, Homo sapiens
gcagggcagcccgccgcgcccagaaggccgcagcagacccccccccccacccccgggaagcggggagagggggagag

SEQ ID NO: 36037 - RNA, 53 nt, Homo sapiens
agcggcgaagaggcaccggaggagggacaacccgccacaacgacaaaggaccc

SEQ ID NO: 36038 - RNA, 80 nt, Homo sapiens
cgcaggcccaggccgccccgccccgagcggcaggagagacagcccagaagcccagccgcacgaagcaaggggggcaacaa

SEQ ID NO: 36039 - RNA, 74 nt, Homo sapiens
acaaaagagagagcggaaacgagggaaagaacggccagacggagggagagcgccggaaacagcagcaggcaacc

SEQ ID NO: 36040 - RNA, 77 nt, Homo sapiens
agagaaaggaggaagcacgagccgacgaggcagggaacccaccacacagaaaccagccggagcagacagcgaagacc

SEQ ID NO: 36041 - RNA, 72 nt, Homo sapiens
acaaggcggagcacgacgaagacacgcacacacagggcgacccacggaacccaccgacacaacaacaaagaa

SEQ ID NO: 36042 - RNA, 33 nt, Homo sapiens
ccggggaagagccccaaggagcagacaagggcc

SEQ ID NO: 36043 - RNA, 75 nt, Homo sapiens
gcccaccacagcccccagcgagacgacgggaccgaaggaccccgccagagacaaccgagcgccaggagagagaca

SEQ ID NO: 36044 - RNA, 82 nt, Homo sapiens
cgacaacagagcgaacgccacccagcccaggacgggcgcgggcccaggccagggggacacgccagcggcgcagccgacggaa

SEQ ID NO: 36045 - RNA, 120 nt, Homo sapiens
gccagcggacgagggcgccaggccagggcagcggcccccgcccgacacgcacacccccgacaagcaagaaagacgacacagcagccacaaaaccaagcgacagggcaacccaggaagaaa

SEQ ID NO: 36046 - RNA, 78 nt, Homo sapiens
aaaacaaaggagaggaaaggaaacacagagacagaaaaacggcccggaggcaaggaaacaaaaccacccaaggacacc

SEQ ID NO: 36047 - RNA, 71 nt, Homo sapiens
cagcgcggcccgagaagcaaacaaccagcccgagcccccaaaccacagagggaaggggaacaggaccggcc

SEQ ID NO: 36048 - RNA, 40 nt, Homo sapiens
ggggcaaacccgagagaacggagccaaccggcgggcagca

SEQ ID NO: 36049 - RNA, 81 nt, Homo sapiens
ggagagagagccgcgcacgcacagacaaggcacacacccgggccgagcgaccagagcccagaggggccacagggcaccgca

SEQ ID NO: 36050 - RNA, 51 nt, Homo sapiens
caaagaacccccaagcaggaaggggggggaagacaacccggagaacaccca

SEQ ID NO: 36051 - RNA, 78 nt, Homo sapiens
ccgggccgcgcacacgccgggacgcgacgccagcacgacccaccgcacgcagaagcgggcgagccccaacagaccggg

SEQ ID NO: 36052 - RNA, 51 nt, Homo sapiens
ccggcaccaccaaaagacgccggggcccggcgccaccaccggggagccaga

SEQ ID NO: 36053 - RNA, 74 nt, Homo sapiens
ccagcccaccaaacacgccggaaaccccgcccacagcacgagcacagaagagcaacaagcggaagaccacaacg

SEQ ID NO: 36054 - RNA, 71 nt, Homo sapiens
cagacaacgcaagagaacaaaccaaaggggacaagggagcgcaaccccagaagacgcagagccagaagacg

SEQ ID NO: 36055 - RNA, 54 nt, Homo sapiens
cccgcgcggcgcggggaccgcggcccggaagccacgccacggaacggcagcccg

SEQ ID NO: 36056 - RNA, 96 nt, Homo sapiens
gcaggggcgccaacccaaccggcccagggcacggagggaggcagcacagacaggaggacgaagaagaggaggacgaggaggaggaggaagacgagg

SEQ ID NO: 36057 - RNA, 116 nt, Homo sapiens
caagcaaccacccaacgagacgcacaagaaaagcgcaagaagaggaggaagccagcgagggccagcaacagaagaaagcaagcaccggggaaagcggcccgaaacaagcagaaggg

SEQ ID NO: 36058 - RNA, 73 nt, Homo sapiens
cgggggcggacaccacaagaagggcgccagaaagagacaaccaaccgggcaagcgcccaccggacccaggacc

SEQ ID NO: 36059 - RNA, 82 nt, Homo sapiens
aggcaaagcccaggagaagaaaaggaggcaccggggacaaggaagcaagaagcagcgggaaaagccgaacaaccggacccaa

SEQ ID NO: 36060 - RNA, 74 nt, Homo sapiens
gagaacaggacgcaacgagccgaacgccagaagaaacaggacacacaaagagggggagagggacccaaccgagc

SEQ ID NO: 36061 - RNA, 66 nt, Homo sapiens
gggccccaacacccagagacgaaaggacgcggcgcagcaacaaacagcggcgacaaaccgagacag

SEQ ID NO: 36062 - RNA, 68 nt, Homo sapiens
aaagaacaacccgaacgcaaaagaaggcagagaacaaagcaagggcgcggccagaccaccagccaaac

SEQ ID NO: 36063 - RNA, 108 nt, Homo sapiens
gcgcacacgccgggacgcgacgccagcacgacccaccgcacgcagaagcgggacggaggggagagcaggagggggacgacgggccgaagagaaaggaaacagaagaaa

SEQ ID NO: 36064 - RNA, 80 nt, Homo sapiens
ccccaagcaccaaaaggggcacaccaggacaaaaaggacagggccaaagcggcaggagaaggaagggaccggaaacgaca

SEQ ID NO: 36065 - RNA, 71 nt, Homo sapiens
cgccgccaaagagcgcaccgccgagcagccagcccaagcggccaggcggaggcaggcggacccggccacgc

SEQ ID NO: 36066 - RNA, 81 nt, Homo sapiens
ggaagggcgcgagcggggacaaagcaacgacagcccgccaggagcacaacgccgagaaagccagcgacgcccaaaggagac

SEQ ID NO: 36067 - RNA, 86 nt, Homo sapiens
aagacggggcgccggcacggggaccgggccccggccacaacaagccgacacagccagaagcggaacagggccacacggcccgcagg

SEQ ID NO: 36068 - RNA, 75 nt, Homo sapiens
cgcagaagaggaaaccacaaaccacgagggaaaagcgcaagaacaggcaagggccaagacaagcccagagggccg

SEQ ID NO: 36069 - RNA, 76 nt, Homo sapiens
gaaccgaagaacgggggagaggggcagcgcccagccccgggccagccggaggccccgggccccaaccggccagccc

SEQ ID NO: 36070 - RNA, 80 nt, Homo sapiens
ggacacagccaggagagcaccgaaaagagcaagaaaacgcccagccaccaaggaagaagagagggcgaaggaggccacac

SEQ ID NO: 36071 - RNA, 63 nt, Homo sapiens
gggcgcgcgcaggccggggagcgccaggccacaaaaccgaggggaaagagaccgggccgacgg

SEQ ID NO: 36072 - RNA, 76 nt, Homo sapiens
ggggcaggagcgcccgcaccacaccccacggggaccccacccgaggagcagagagcgaggaccaccgaccgcccga

SEQ ID NO: 36073 - RNA, 67 nt, Homo sapiens
ccccagaagcgcgcccgggagggccaacaaaaagggcaggggacccacaggacgcagccacaccgcc

SEQ ID NO: 36074 - RNA, 82 nt, Homo sapiens
agcgcgagaaccgccgccacggggcgcgggaaaagccccgagagaccggccgcagagagaacagcccagaaaagaaagcccc

SEQ ID NO: 36075 - RNA, 75 nt, Homo sapiens
cgggcaccaggccgcaggaggcccacagaacagagaaaaggaaggcggcggaagcagcagaagaagagagggaaa

SEQ ID NO: 36076 - RNA, 82 nt, Homo sapiens
gacagacccagcaaacaggacgggaagaacagaagccgagacccacagcagaggggcgaaaacgcggaagcggagacacagg

SEQ ID NO: 36077 - RNA, 68 nt, Homo sapiens
gggaacggcgcggaaggcgaaggagcacgcaagcagggaaaagggcaggaaaacacccgaaaaaaaga

SEQ ID NO: 36078 - RNA, 62 nt, Homo sapiens
gacagcgccgaaagcaaacacggaagcacaggcggaaacaaacggcagccgggggagccggg

SEQ ID NO: 36079 - RNA, 76 nt, Homo sapiens
gaaccccgcgagggaggaacccagaacggagggcacgagcgggccgagaccaggaacagaaagaaccggaagggaa

SEQ ID NO: 36080 - RNA, 80 nt, Homo sapiens
accccaagccaagcccaagacaaaaacagcagcgcgaacacagcccaggcaaagagcagccagcgggagccgaggacaac

SEQ ID NO: 36081 - RNA, 53 nt, Homo sapiens
aacacacacaaaaaagacagaaaggaagccgaggggagcgggacgggcggcga

SEQ ID NO: 36082 - RNA, 98 nt, Homo sapiens
ccacacaagcgaaggcgcgcaccggaagcaccagcgaggaagggaacagggaaaagacgcgaagaagagaaagaagggagaagaaaacccaggagcac

SEQ ID NO: 36083 - RNA, 80 nt, Homo sapiens
ccaagaccaagcgcgaaagcgccaaaaggacagcagcgcggaaaaggaacagaagaggaaccgaaacccaagaaaaacca

SEQ ID NO: 36084 - RNA, 76 nt, Homo sapiens
agcacaccgaggaggcaaggcacgggacgcgggcggggcaccgggaaggagaagacagccaagcaccgccccaagg

SEQ ID NO: 36085 - RNA, 79 nt, Homo sapiens
gaaccggcaccgcacaccggaccaggaaacggaggcgggagaaaggacacgcaaacagacaagcagaaggagaccacgc

SEQ ID NO: 36086 - RNA, 73 nt, Homo sapiens
cgcacacgacagcaacaagacacggagcaaggaggaaaacacacggaaaggaaggcaaagccagccccgcacc

SEQ ID NO: 36087 - RNA, 47 nt, Homo sapiens
accgccaaggaacaaagagaccagcaaaaaaggagccacaacgaccg

SEQ ID NO: 36088 - RNA, 51 nt, Homo sapiens
cccaccccacaccacagcgggagacagcgcgccgcgcgccgggagaggccc

SEQ ID NO: 36089 - RNA, 79 nt, Homo sapiens
cccaggcgacagcaaggaggcggcaaaaaaaaagcgcacacacgacggacccaaggccagccagccccaggcaccagcg

SEQ ID NO: 36090 - RNA, 78 nt, Homo sapiens
aggagagcgacgagaagagacccagagaagacaggcccagaaaagagaagcgaagaggcaaacagaggcaagaaaagc

SEQ ID NO: 36091 - RNA, 82 nt, Homo sapiens
cacaggaccccgcagggaagaccggcccagcggaggggcgaccaccgaacggcggccaaagcgccagacaagggccgagccc

SEQ ID NO: 36092 - RNA, 69 nt, Homo sapiens
gaccaagaaccaggagccccgcgccccacccgaccggaacggggcaagcgaaaccccgcgagggaacgg

SEQ ID NO: 36093 - RNA, 85 nt, Homo sapiens
ccgcagaccaacaacaagccacagcaagaagcggagcgcaccgaagcggagcagaccgcagggacaccgagacccggcagcgcgg

SEQ ID NO: 36094 - RNA, 60 nt, Homo sapiens
gagggcaagcagggggaagagggcacacagggggggggaacaggacgcgccccgaaggag

SEQ ID NO: 36095 - RNA, 57 nt, Homo sapiens
aggggcccggcggcggggagaaggagacccaacaccccggccagacgggccaccagg

SEQ ID NO: 36096 - RNA, 71 nt, Homo sapiens
cccaggaaggagccaaagcacaagaagaagacgagggcgacgccaggagcacaccgaaaagaaaggaaaac

SEQ ID NO: 36097 - RNA, 65 nt, Homo sapiens
ggagcccccccaccacccccgaaacacacaggaacaaaagaaaaagcagcagaaaaccccaaaaa

SEQ ID NO: 36098 - RNA, 81 nt, Homo sapiens
gaaaaagcgcccgagacgggcccgccgaaagagcgcaggagaacaccaaccaccagggaagagcgggaaagaaagagaaag

SEQ ID NO: 36099 - RNA, 44 nt, Homo sapiens
gaaagagaaacccggagggcgccgggggaccaccacacgaaacc

SEQ ID NO: 36100 - RNA, 79 nt, Homo sapiens
cacccagcggcgacaggcaacagggaaacccagcggcggcagaaccagccggcacaaagccgaaccagagagagcaacg

SEQ ID NO: 36101 - RNA, 72 nt, Homo sapiens
caccagaaaagggcacacagcccaaaccgccaagaggggcaacgaaaagacaagggccgaacaccaacagag

SEQ ID NO: 36102 - RNA, 78 nt, Homo sapiens
gagagcaagagggagaggccaggaaccaagcacaggacggacgccccacaccccagagacagaaggcggggccccaga

SEQ ID NO: 36103 - RNA, 83 nt, Homo sapiens
gacccagggcaccggagggccccgaggcgagagggacccccggaacccagggaggagaacaccaaacagaggaacaggcggac

SEQ ID NO: 36104 - RNA, 80 nt, Homo sapiens
ccggagaggcgcaagacaggggcagacagagaggcagagcccagcaaggacgcgaggcagacagaaagaaaccgagcaaa

SEQ ID NO: 36105 - RNA, 55 nt, Homo sapiens
aggaggaaaggaggacgagccccaagagacgacagaaaggcagagaaggaaaaaa

SEQ ID NO: 36106 - RNA, 73 nt, Homo sapiens
agccacggcagacacacaacccgacccgacgagacaaaccggcgaccacacacggggacgacggggaagccgg

SEQ ID NO: 36107 - RNA, 79 nt, Homo sapiens
gacaaaggcaccaggccaccacagaaacaaaagcaacaaagaggggacgaaagagagagaggcaggggggaccagacac

SEQ ID NO: 36108 - RNA, 68 nt, Homo sapiens
cacaccagccaggccccaaaaggccagcgggaagaagcacaggggaggaagaacgaaaacgaacacga

SEQ ID NO: 36109 - RNA, 75 nt, Homo sapiens
aagaggcggacggaggagcaggcgagaagagaaggcacgaaagaacggaggaagcacaagggagagaaaacccaa

SEQ ID NO: 36110 - RNA, 81 nt, Homo sapiens
gcgggacaggagggcaggaagagcgcagcggggacaagcacagaaggaagacggaggaagacagcagagagagagagagag

SEQ ID NO: 36111 - RNA, 76 nt, Homo sapiens
ggcacgacagcgggaaaaggggcacaggagccaagaggggcaccaccacgaggcgaggggccaaccaaggaggcga

SEQ ID NO: 36112 - RNA, 75 nt, Homo sapiens
ccccggccaagccgcgacaagggggacggacgggccccgcggaagccgcgggcggcgccaggcggagcgacggcc

SEQ ID NO: 36113 - RNA, 74 nt, Homo sapiens
ccccgggcaggacccggacccggaagagaagagggggcaagaaaggaaacccaccagagaaggcgcggccaccc

SEQ ID NO: 36114 - RNA, 65 nt, Homo sapiens
gagccggagggcaaagcggggcgagcagacgcccaggcaggcgacgggagcggagaacacgccac

SEQ ID NO: 36115 - RNA, 80 nt, Homo sapiens
gcaagcaccgccaggaccccagcacacccagcagcacaccgcacagaccagggcaggagaaacccagcgggcccagagac

SEQ ID NO: 36116 - RNA, 91 nt, Homo sapiens
gccggcgcgcacaagggcagagggccagagcccagaaaagaacagcgaacccacccaacacggcaaaacaaagacaccacacccaaaagcg

SEQ ID NO: 36117 - RNA, 114 nt, Homo sapiens
ggagcgggggggcaccaagagcagccccggcccggacaccacgccgcggacgcaaggaaacggaaacggccagaagcaggacaaagcagagaacaacccggggacccccagcag

SEQ ID NO: 36118 - RNA, 39 nt, Homo sapiens
ccccgagagcggaaacaggaacgacgagcccgggacagc

SEQ ID NO: 36119 - RNA, 79 nt, Homo sapiens
cacaaaggccgggggcacaggagggaaaaaggagaggcccacgggaaggacggacagaagggccagcgaaccacacaag

SEQ ID NO: 36120 - RNA, 79 nt, Homo sapiens
aggaggcgggcccggagaggagcgcagaaagaccgaggaccagcaaacaagacccagccaaacagggagaggccgcagc

SEQ ID NO: 36121 - RNA, 86 nt, Homo sapiens
cagccccgccggagaaagagcagccacgagaggggaacaggcccggcagagcgggccgacccgaaaaccaggggcgcaagggaccc

SEQ ID NO: 36122 - RNA, 71 nt, Homo sapiens
gcaggcgccgccccagcccgcgaacgaggcggccccaggggggaccaacaagggagaaccaacagaacaac

SEQ ID NO: 36123 - RNA, 77 nt, Homo sapiens
gaacagagggaccagacgaaagcaaccagcaagagcgagaagcacgagaaaacgcggggaggaggaggaggaaggga

SEQ ID NO: 36124 - RNA, 55 nt, Homo sapiens
caaggcggacgccgggagccgcgcgcacagccgggcgcgggggggaccgcgcgac

SEQ ID NO: 36125 - RNA, 75 nt, Homo sapiens
cgcccgcggccagccgcaagacccgccacaagcaacgcgggaagagaaggggaagcgacgaggaagccaagcagg

SEQ ID NO: 36126 - RNA, 77 nt, Homo sapiens
agaacaaaccgcacgacacaggaaaggacaaaaccagaagcaggggggacacggaacccaaggagacgaagcgaagc

SEQ ID NO: 36127 - RNA, 104 nt, Homo sapiens
gagggagagagcgagcgagggggggcgcgccggaaaccggagcgcgcagcaggacccaaagacaggaccacgcaccagcagagaaggaaagcaaaccgaagcag

SEQ ID NO: 36128 - RNA, 74 nt, Homo sapiens
aaggaccaagaaccagcccaaagacaacaggcccccccgccccccgcggagccccgcccagcaccaccccgcac

SEQ ID NO: 36129 - RNA, 81 nt, Homo sapiens
acgggagcggacacgcccgggcagggcccaccccgcgcccgacagggcaagacggacgagacgcgcgggcagaggcagaac

SEQ ID NO: 36130 - RNA, 79 nt, Homo sapiens
cccacaggaaggaaccaaaccaaaaaccaagcagagagcagacaacaggcaggaggaaagcacagagaccccagccagg

SEQ ID NO: 36131 - RNA, 70 nt, Homo sapiens
cacagccgcgcagggcggcgcgggaggcagacagcccgcacagcagcaggagcacagaggagcagcgaaa

SEQ ID NO: 36132 - RNA, 71 nt, Homo sapiens
ggggaggccggggcagccgaaagaggcacgccagagcgaccaagccagaagaacaaccagaaacaaacaac

SEQ ID NO: 36133 - RNA, 44 nt, Homo sapiens
ccccgcccccaggggccggggaggcggcaggcagaagggcacgg

SEQ ID NO: 36134 - RNA, 87 nt, Homo sapiens
aaagccggagcgaagccaacccccgagcagcacacagcaagaaggaggccacagcaaacgggaagaggaccccaccaggaaccacac

SEQ ID NO: 36135 - RNA, 103 nt, Homo sapiens
ccgggccagccccccagcgacccacagcgacaaaggcagcagcaggacgcacgggaagaacggggcgggggaacgccccgcggaaccgggagaaccaccaagc

SEQ ID NO: 36136 - RNA, 79 nt, Homo sapiens
gcgacccggggccgagaagacacggagacagggaaacgaaaaccaccgggcaccacgagcccacgagagaggacagccc

SEQ ID NO: 36137 - RNA, 80 nt, Homo sapiens
aggcggaaaacgcagaacacagaagggaggcagaacagcccacaagacaccagacaccaacgaaaggaaaaaagcaaaga

SEQ ID NO: 36138 - RNA, 51 nt, Homo sapiens
cggcacaagcaaggaaaggaggccaacacgccaccacccggggccaggaac

SEQ ID NO: 36139 - RNA, 76 nt, Homo sapiens
gggaggacgcacccggggaaccagcaaacaagcagcccaaaaaacacagaaggaaggaaaaaacccaaggcaaggc

SEQ ID NO: 36140 - RNA, 78 nt, Homo sapiens
aacaccaagcccacagagggaaagaagaggccccagcacacgcggcaaacccccagaccgcgaggaaacggaaaggag

SEQ ID NO: 36141 - RNA, 76 nt, Homo sapiens
aaagacccccaagagcacagccggaagagaggcagcagcgccccgagccccggcggcaacaccccccaacgaggga

SEQ ID NO: 36142 - RNA, 75 nt, Homo sapiens
ggaagccagcgggggcagccagccgagggccaccgggaaggacagaaggggccgcaaggccaggcgcgcagaggc

SEQ ID NO: 36143 - RNA, 36 nt, Homo sapiens
acaccccggcacacgagggccccggacaccccgccg

SEQ ID NO: 36144 - RNA, 52 nt, Homo sapiens
cagcagacaggaacgacgcggcggggagggaaggaaagagagaaaagacaca

SEQ ID NO: 36145 - RNA, 77 nt, Homo sapiens
agaagaagaagcaggagaacgaaacggagccagagaaggcagaagccacggaaacagaagacaggaggagggccagc

SEQ ID NO: 36146 - RNA, 73 nt, Homo sapiens
cacacaccaccccgcaccgccgcaccaccaggccagaggaaccggcccgaagccgaaagcgcggagcgggcca

SEQ ID NO: 36147 - RNA, 87 nt, Homo sapiens
agcgccggccaaccgcaccgcacagcagccgcccggccccgcgcggagggggagggaacccccacccagcccgcgccgagaaagaac

SEQ ID NO: 36148 - RNA, 62 nt, Homo sapiens
aagggcacgggaagaccggaggggacgaagaacggacgacgacaacagggagacggacccag

SEQ ID NO: 36149 - RNA, 73 nt, Homo sapiens
acagcgcaggcagcagggcaccaagagcagccaggagccacacccgaccgaagacaaaaccccaaaccagccg

SEQ ID NO: 36150 - RNA, 67 nt, Homo sapiens
cgcggccggaggggccgccaagaccaaccggaaccaaaaagaagccccagagccggggccaggagcc

SEQ ID NO: 36151 - RNA, 69 nt, Homo sapiens
gcgagcgcgagcggcgcgagaaaaccgcgaccgcacaagcagccgccagcggaaccaagcggcgcggca

SEQ ID NO: 36152 - RNA, 84 nt, Homo sapiens
cagagagggccgggagcgcgcagccaggacagcggccgaagccagagccggggcggcgccaggccccacacgggcgcggcgcgg

SEQ ID NO: 36153 - RNA, 80 nt, Homo sapiens
caaaagaacagaaagcgagcagagcccgcgaacaagacaagagaaggcacgaaaacgcggagagaaggaagaacacgcac

SEQ ID NO: 36154 - RNA, 61 nt, Homo sapiens
cggcgcaggaagcacccacggcgcagccccgcccggaggcaacagagcaggaggagacacc

SEQ ID NO: 36155 - RNA, 71 nt, Homo sapiens
gacggaacgggagaagaggcaaagaaacaccaaggcacggggggagccgaagacagggcgagagagacaca

SEQ ID NO: 36156 - RNA, 75 nt, Homo sapiens
ggcgccacccgggaacaagcaggagggggcccccccacccccagcaccccaccggcggcccgaacggcccccccc

SEQ ID NO: 36157 - RNA, 81 nt, Homo sapiens
cggcggggcagggaaggacagcgcaggcccccgcccccgagcagccgaggagcagagcagaggacaacgagaagacagacc

SEQ ID NO: 36158 - RNA, 71 nt, Homo sapiens
agaaacaaaaagcaaggcggaccagaaaccccagagcgcgaccgcagagaaaccccaccagaaggaaaagg

SEQ ID NO: 36159 - RNA, 69 nt, Homo sapiens
aaccgaccagggcaacaccaaaaacaaaacgaaccaggacggcaagccaaggaaaaggaacagagagag

SEQ ID NO: 36160 - RNA, 56 nt, Homo sapiens
gggaagcgccggggaacgcagaaccgaacggcccaagcgaccgcccagaccggacc

SEQ ID NO: 36161 - RNA, 55 nt, Homo sapiens
caccgccccccaaccgacagggaaagggagcagcaccggccacacccacagcacg

SEQ ID NO: 36162 - RNA, 73 nt, Homo sapiens
cggccccagcaacacggcgcgaggcaaggccagcgaaggacgacccagaaggcagagagggcaacgggggcag

SEQ ID NO: 36163 - RNA, 83 nt, Homo sapiens
cagaccacagcacagccgggaaggggagccaccagccccccgggaggaggaggacggccagggaaggaggagcagaagcagaa

SEQ ID NO: 36164 - RNA, 75 nt, Homo sapiens
cccaggcccaaagcggcggagagaggcagaaccacaagagaaagagggacagagcagaagaggggacccaccagc

SEQ ID NO: 36165 - RNA, 79 nt, Homo sapiens
gcggagaagcagccgccagccagcagcccgccagccgccgggagggaaagacaaggagccgggccgagaaaccgaacca

SEQ ID NO: 36166 - RNA, 57 nt, Homo sapiens
gcagcgcgacgcccacgcaacggaggcacagagggccggagcggagagggccgggag

SEQ ID NO: 36167 - RNA, 66 nt, Homo sapiens
cccgggcgaaaccggaccgggcccggaggagcgaacaaggcgacaacacaggcaaaggccaagaag

SEQ ID NO: 36168 - RNA, 40 nt, Homo sapiens
aaccaacaggcccaaaagagcagaagggacaaacggagaa

SEQ ID NO: 36169 - RNA, 80 nt, Homo sapiens
accggaccgagagcggaccgagagcgcgaaacgcacgagaaggcaccggacgaagaaagaaccacagaaaacaacagaga

SEQ ID NO: 36170 - RNA, 56 nt, Homo sapiens
cagacgcagggcgcccccgaacgcgggccagaggaggagccacacagcccacgcag

SEQ ID NO: 36171 - RNA, 80 nt, Homo sapiens
cgcagcgacccccgccaggcaaaaggaagaaagccacaccaaaccagaaaagaacaaaacgacccggaagccgcggaaag

SEQ ID NO: 36172 - RNA, 96 nt, Homo sapiens
gaccaaacgcaacgagccgccagcccaaaggcgaccgacaccgcccagcgaagagaggacaaggcacgaggcgcggcgaccaccacagcagagccc

SEQ ID NO: 36173 - RNA, 71 nt, Homo sapiens
ggaaaaaggaaggccgccggacagcgcagagccaagacggagaaacaaagagcgagacacaggagaacgac

SEQ ID NO: 36174 - RNA, 78 nt, Homo sapiens
gacaacacacccagaagaccagcaccagacagcgaaaaagaggacccaaaaaagagagaaaaggccaaagagagggcg

SEQ ID NO: 36175 - RNA, 51 nt, Homo sapiens
gaaaccaaaaaagcaggggacgacaacccgacacgagaggcccaaccaaaa

SEQ ID NO: 36176 - RNA, 74 nt, Homo sapiens
agaacggaaaaaacaaagcgaaacagcggggccacccagaacaaaaagggccagaacagaaccagaggacagag

SEQ ID NO: 36177 - RNA, 68 nt, Homo sapiens
cccaccaccgccccaccaggcgggaaaacggcacaaggcgacgagggagggcagaccgccaggccagc

SEQ ID NO: 36178 - RNA, 74 nt, Homo sapiens
caccgacaccaaaggagacggaaccaagcccagcaaacagagacagcaagcggggcggccgcgcgccgggcccc

SEQ ID NO: 36179 - RNA, 74 nt, Homo sapiens
aagacgacaagaagacgggcaacccagaacacacagcacccaggaagaagaagaggccgaccaaaagaccacgg

SEQ ID NO: 36180 - RNA, 91 nt, Homo sapiens
cccgacgccccgccgccgccgaggaggcgagcagccgggagacaccgccaccgccagagagacgcgcaaggaccagggaaaagaacaacac

SEQ ID NO: 36181 - RNA, 72 nt, Homo sapiens
gaagcggcaaaccaaaagagcaacggagcgaagcagcaggggacgagaggcaccagaaacggcggacgaaag

SEQ ID NO: 36182 - RNA, 86 nt, Homo sapiens
cgccgcgaggggcgagaaaggcccacgcagcccccaagcaggcgcgggggcaggcagggcgcgcgggccaaggcccggccaacggc

SEQ ID NO: 36183 - RNA, 94 nt, Homo sapiens
agaagaagagcaggcaggcaggaaggaagccagagccgggcccacacccagacaagaccacgcaacacaacaaccgccagggaacagcaaaaaa

SEQ ID NO: 36184 - RNA, 67 nt, Homo sapiens
gcgcagagggaaccagcggacgcggaggcccaaccgaagaaaacaagacgccgaagcgcgggcgcca

SEQ ID NO: 36185 - RNA, 70 nt, Homo sapiens
cgcagaacaggagaggaaaaaaaaggccgcagaaccccaaaggacagaggagcgcccgccgggagcagca

SEQ ID NO: 36186 - RNA, 77 nt, Homo sapiens
caggaaaaaaggagcaagaaagcaaaggaacaacacaccaccaccaagaaggaggccaagacagcacagcagaagaa

SEQ ID NO: 36187 - RNA, 40 nt, Homo sapiens
acagccggacgcgggcgcagcggcggaggcaaggcacgac

SEQ ID NO: 36188 - RNA, 77 nt, Homo sapiens
aaggcagggcaaaccagaaagacggcaaaagcagaccggaaaacccaccggcaagaccacacccgaggggagcccag

SEQ ID NO: 36189 - RNA, 72 nt, Homo sapiens
gacggccacccccaggcaagcgacgcgcccgcccccgagcagcgggaccagggacagccacgccccagagaa

SEQ ID NO: 36190 - RNA, 79 nt, Homo sapiens
cgccaggagaagaggaagagggacaagaggcaggggaggccaggcagcaccgccccgaggccccaggccacaccacagc

SEQ ID NO: 36191 - RNA, 55 nt, Homo sapiens
gcagggcggcgcgaggaggcgagaagggaaaggacggaaccgggcgaccggaacg

SEQ ID NO: 36192 - RNA, 45 nt, Homo sapiens
gaaaagacaagagaccggaaggccagggggcagacagcgcgagaa

SEQ ID NO: 36193 - RNA, 80 nt, Homo sapiens
ccccgaaggaaagagaggccggggaaagccgggcaagacaaaccaagaaccagacggggccagagaagaaggaggagaca

SEQ ID NO: 36194 - RNA, 76 nt, Homo sapiens
ggccaagaggccaaccaggggaaaagagggggaaccaaaaccgaagaaaagggaagaagcaccacgcggaccagcc

SEQ ID NO: 36195 - RNA, 77 nt, Homo sapiens
ccccgagagaaccgcggagagacagccgaaggagagagggcaacccaggaagcacaaagcgggaagaacacgggcac

SEQ ID NO: 36196 - RNA, 71 nt, Homo sapiens
cgagcacgccaccggcgccagcgggcgagacggcccgccacgggccccgcagccgcgcccgagcgcccgag

SEQ ID NO: 36197 - RNA, 78 nt, Homo sapiens
ggggagcagagccggaagcggcaggccacaaagccacagaccaggagagaagacgaaaaagaagaagcagcgaacagc

SEQ ID NO: 36198 - RNA, 80 nt, Homo sapiens
gcagagagagaagcaccaagggccggggagaagcggaggggagcaggccccgagccccggccccaaagacccaaaacaga

SEQ ID NO: 36199 - RNA, 74 nt, Homo sapiens
aaaagcagcaaaccggaccaccccgaagaaagcacaggaaggaagggaacacggacgacgagacacgaccaaca

SEQ ID NO: 36200 - RNA, 70 nt, Homo sapiens
aagcgacggcccgaacgagcggaggccaacaaaaggcgagaggcccgggggccaagccgaccacaaagac

SEQ ID NO: 36201 - RNA, 69 nt, Homo sapiens
gaacacagagagagaagccaggagccaccaacaccaaaaagacgcgcgcacgcccacgcggaccgacac

SEQ ID NO: 36202 - RNA, 68 nt, Homo sapiens
gagaacagaacgccggagggcggccacgcgggaccaccggcaccaccaaaaagacgaccccgacgcag

SEQ ID NO: 36203 - RNA, 93 nt, Homo sapiens
aacccacacacacaccacaggaacagccaaagggagcagcaaagcacaagaccggcagggaggaagccaagaaaaagaaacaagaaaaaaccg

SEQ ID NO: 36204 - RNA, 74 nt, Homo sapiens
aaagacgacaagaggaaaggccaggccacagggcaccacaacacgcccacccaggaggcggccggccaagccca

SEQ ID NO: 36205 - RNA, 98 nt, Homo sapiens
aagacgacaaggaagggaaggagaaaaaccagacagaccaggccgaagcccaaggccacaacagccagcaggggcagaagcagcagacggaacgaggg

SEQ ID NO: 36206 - RNA, 81 nt, Homo sapiens
gaagcacgacacagaaggggaggggagggaaaggcccaggaaaaagggcccccccagggacacgaggccacccccgacacg

SEQ ID NO: 36207 - RNA, 88 nt, Homo sapiens
caacaacaaggagacaagcccccacgccaagcagaaacagaggcccagagagagaaagccgccggggcccccagcccagagcgcagag

SEQ ID NO: 36208 - RNA, 57 nt, Homo sapiens
gaagagcagggaaacaccacgaagcagccaaggcgccggcgaaagcaacgaagggac

SEQ ID NO: 36209 - RNA, 70 nt, Homo sapiens
aggggggccaggaaacgccaaaacaccagaaccaaccgggaacgcccccaagcccaaggaaacacggagg

SEQ ID NO: 36210 - RNA, 104 nt, Homo sapiens
gcagcacgcgaagccagaagaggcgcggaaacacagaccaaggaccaaggacgaccgaaaacccagccagacaaaagagaagcagaggagcgaagaaagagaga

SEQ ID NO: 36211 - RNA, 78 nt, Homo sapiens
gagacagcccccaccccggagcaccccacggaaggcccaccgcggccccgaggagaggggacccgcaggggcaagagg

SEQ ID NO: 36212 - RNA, 76 nt, Homo sapiens
gagggaccggaaggcacggggcgaaccacagaggagccgcggcaacggggacagaccgaggacccaaggaggaagg

SEQ ID NO: 36213 - RNA, 134 nt, Homo sapiens
gggggcagaccccggcgggcgggcaggagggcggcggcggcggcgcggcgaagaaggggacgccgacaagggacaaaagggcacgcccggacaacaccccagaggacaagacacgaccacgacagccggagacc

SEQ ID NO: 36214 - RNA, 73 nt, Homo sapiens
agggaaaggagacaaggaccgaaacagaaacggaacaccaagggcgaaccccgcacaaaccggccggagaaag

SEQ ID NO: 36215 - RNA, 77 nt, Homo sapiens
cggcgccggggagacaaaagagccgaggaaggcaccaggagaggaggaggggagacgcccaggcagaaagcccaacc

SEQ ID NO: 36216 - RNA, 61 nt, Homo sapiens
cccaacgagcggacaagcggaggagaagaacggaccacggagacacagggcgggcacgcac

SEQ ID NO: 36217 - RNA, 71 nt, Homo sapiens
cacagaagacagacaagaaaagcacgaaggacaggaaaaggcccaaaaaggaagggggaaggccacacccc

SEQ ID NO: 36218 - RNA, 75 nt, Homo sapiens
caacaagcgggagcccaacacccacacaacacggcaagggaacaagagaaaggggggcacagaagaagaagaaag

SEQ ID NO: 36219 - RNA, 81 nt, Homo sapiens
gccagagccgcacccccagggcggcacgcgcagggggcaccgaaacagcgggaagcggcagggcaggggaagccggaaggc

SEQ ID NO: 36220 - RNA, 75 nt, Homo sapiens
caaaacaaggacggaaccgaggaggcgcaaaggggaagaaagacccaaccagagagcgggcacgaacgcagaaag

SEQ ID NO: 36221 - RNA, 77 nt, Homo sapiens
ccaacacgcagcaccgcgggaacaaggcagaccggccagcaagagagccgggaaccaggccgccggcccgcccgggg

SEQ ID NO: 36222 - RNA, 60 nt, Homo sapiens
gaggagacgcagccgcccgggcgcaagaaagaagaaggagcacaacaggcagacagacaa

SEQ ID NO: 36223 - RNA, 68 nt, Homo sapiens
gaagaagcggaggccggcaaagccaaggaagcccaagagccaaaggaacaccaccacccaaaacgcag

SEQ ID NO: 36224 - RNA, 82 nt, Homo sapiens
gcaagaaacccaggacgagaacagcaacagaggcccccgccgcaccacacagccgggcggggaggaacaagaaaaccggccc

SEQ ID NO: 36225 - RNA, 81 nt, Homo sapiens
ggagagcaccggccacggaaaagcaaaggcaaaagcagaccggaaaacccaccggcaagaccacacccgaggggagcccag

SEQ ID NO: 36226 - RNA, 87 nt, Homo sapiens
accgcacaccaagcggcgcagcccagaggacaaccggagcccgcgggccccgaagcaaggaaggcaccccgggacagccgagcgggc

SEQ ID NO: 36227 - RNA, 57 nt, Homo sapiens
gaacaacggggacagaaggggaccacgggagaggaggaagagacccacagaagaagc

SEQ ID NO: 36228 - RNA, 61 nt, Homo sapiens
gaaccagggccgggggccagaacgggcaaccaaagcgggcaagcagaagacagcaaagagg

SEQ ID NO: 36229 - RNA, 41 nt, Homo sapiens
cccaggcccaagaaggcgccaggcgcggagcggacccggcc

SEQ ID NO: 36230 - RNA, 86 nt, Homo sapiens
ggaggcagcccgccgagcgcccgggggcgcaagcagacccgcaggacgccacgaccagcacccaggcaccacacagccccagaaaa

SEQ ID NO: 36231 - RNA, 40 nt, Homo sapiens
cccagagagcgggacacaggaggaagaagacagaagagcc

SEQ ID NO: 36232 - RNA, 66 nt, Homo sapiens
gcgccacaccggacaccacgaaaccaccagacaacacggagaaccacggggaccaagaagcgagca

SEQ ID NO: 36233 - RNA, 68 nt, Homo sapiens
aacaaaagaaacaagaaggagaacaaaagcaaagccccagacggacggcaggaggcagaaaagaaaga

SEQ ID NO: 36234 - RNA, 66 nt, Homo sapiens
gcccaggccagcgccccaggccaagagggacccacccggcggcaacgcacagaaacagaacaccca

SEQ ID NO: 36235 - RNA, 77 nt, Homo sapiens
gccgcgaggggaagaggaagcaaagccaaggacaaccagagggaaaaaacaaaggcagcacggccgagacagagcga

SEQ ID NO: 36236 - RNA, 70 nt, Homo sapiens
acgggaaagaacagagaagagcggcgcagccaggaccgaggggaaacaagcaacaagcaagaagcacagc

SEQ ID NO: 36237 - RNA, 80 nt, Homo sapiens
cacagcaaaggagaccaaaaccaggggacaagaggaggacccgcagacacaacggaggcccgaccgagcggcccccacag

SEQ ID NO: 36238 - RNA, 74 nt, Homo sapiens
cccgagagagaaggaccgagaacaggaagaacggaagaagcagaagggaacgacaggaaaagaacaaagaagaa

SEQ ID NO: 36239 - RNA, 63 nt, Homo sapiens
caaaaggaaacccaccaaggaaacaaaaagccaacggaaaaagaaacggcagagcacaggacc

SEQ ID NO: 36240 - RNA, 63 nt, Homo sapiens
gaacccagcacaccaggacagaaccaccggaacaaagaaggcggaaacccagaacgcagcacc

SEQ ID NO: 36241 - RNA, 68 nt, Homo sapiens
cgagcaaagagacaggaaagcgagacacgagagaacccacaggagggccagaggacaaagcacggcgg

SEQ ID NO: 36242 - RNA, 60 nt, Homo sapiens
caccgcgggccgccagacgggaaggggaaagggagcagcaccggccacacccacagcacg

SEQ ID NO: 36243 - RNA, 79 nt, Homo sapiens
gaagcggcggcaggggccgcggcccggagcgacaaagcagagcaacccaacagaggaaagccagacaccagcgaccacc

SEQ ID NO: 36244 - RNA, 50 nt, Homo sapiens
aggcaggcaccacaaaaaggacaggggcagcgaaagcaagacgggcacca

SEQ ID NO: 36245 - RNA, 62 nt, Homo sapiens
cccccgcggagaccagaaagcgggagcccgcgggagggccaaccgccccccagcagcaggca

SEQ ID NO: 36246 - RNA, 81 nt, Homo sapiens
caaagcccccgggccagccggcgacaccccagacacggccagcgaccccagaagaaagaaacagaaaaacgcggaaaccac

SEQ ID NO: 36247 - RNA, 97 nt, Homo sapiens
gcgccgccccgcgagcacagagcccgccgccgaccgccgcccgccacacccgccgccaggaggaccgcgccaacaggacgaggagaccgaccaggag

SEQ ID NO: 36248 - RNA, 68 nt, Homo sapiens
agcccgcgaaggcaacaacgggaggcaagaccaacaggaccgaggacgcccaggacaggcaaaaaaca

SEQ ID NO: 36249 - RNA, 80 nt, Homo sapiens
agggaaagaagaaccaggagcagcggccaaaggaagacgaccccgacgcaggccaggagccgcggacagaagccgagcac

SEQ ID NO: 36250 - RNA, 39 nt, Homo sapiens
ccccaaaccaggaaagacaggaccagagaagacacacaa

SEQ ID NO: 36251 - RNA, 73 nt, Homo sapiens
cagaaaaggcggagagggaagagaaagcaacagccaggagaccggcaggaacaacggggaagcgagagaccga

SEQ ID NO: 36252 - RNA, 83 nt, Homo sapiens
agaggagccaggagccgccagagcacaggccagagcaaacaaaggaggcggagaagcaggaggagaagcaaaggaaacggaaa

SEQ ID NO: 36253 - RNA, 65 nt, Homo sapiens
gaaagggaggcggaacagaagccgaggggcaccggcagaggaaaaggaagagacacaacaggacc

SEQ ID NO: 36254 - RNA, 72 nt, Homo sapiens
ccggccgacacggccaagcacgaacagaggaagagaccgagaccaggaaccaggcaggggaacggagcgaac

SEQ ID NO: 36255 - RNA, 64 nt, Homo sapiens
agcgccgagggaaggcgccgcgccaggccgggcgggcgcgccgcgccaggacggcagccagacg

SEQ ID NO: 36256 - RNA, 40 nt, Homo sapiens
gccccccagagcgggaacaggcgaggcaggagaaccgaac

SEQ ID NO: 36257 - RNA, 77 nt, Homo sapiens
cccggaacccgccggagccagccagccgcccgagcaccagcaggaaagacgaggccggaagccacaggagaaaggag

SEQ ID NO: 36258 - RNA, 76 nt, Homo sapiens
caccgggaaaaggcacgaagggggcaggagggggcaacggagcccagggcgaaagggcacgacagaaccaagccga

SEQ ID NO: 36259 - RNA, 85 nt, Homo sapiens
cacgccagcggccggacacacagcccagcgggaacgcggcccgcaagcgaagaacggccgcgccaggccgacaagaccgaacgag

SEQ ID NO: 36260 - RNA, 73 nt, Homo sapiens
gagcgacagaggagggaaacgcggagccaggccgagaggaccagccgcccggagaagacaggggaaaaaggga

SEQ ID NO: 36261 - RNA, 83 nt, Homo sapiens
ggagcgagccagcaagcggaagcgccccaccgcgggcgccaaggggagcagaaggaccggacacaggcagccagcacgagccc

SEQ ID NO: 36262 - RNA, 82 nt, Homo sapiens
gcggcggcggcggcagcgggcgggccccgagagcagcagcggcccgaagaggaaaggaggagacccaccgaaggcagggacc

SEQ ID NO: 36263 - RNA, 77 nt, Homo sapiens
caggagcagagcgacagcggcgagcagaacacggcgagcggaaaaccgagcgagcagccgacgcggcgggcacgggc

SEQ ID NO: 36264 - RNA, 81 nt, Homo sapiens
cgggaaggcgaccaagcggccgcgcgcggagccgcacagagacaggggcagcggcccgcccgggcaacacgcggcgcacgg

SEQ ID NO: 36265 - RNA, 69 nt, Homo sapiens
cagaaggaaagaacccaaagacagcagagaacggaaggacacagaaagggacaccagcacagggacgga

SEQ ID NO: 36266 - RNA, 67 nt, Homo sapiens
ggagagagacgagagaaacccacgaagacgcgcggagaaagagaccaccgagggccacccccaacca

SEQ ID NO: 36267 - RNA, 93 nt, Homo sapiens
agcagaccaaggcagcgcagcaggggagccccacccggagcagcgcggaccccccagcccaggacagagcgggagccaccagcgccaaaggga

SEQ ID NO: 36268 - RNA, 81 nt, Homo sapiens
ccggcgaggcaaccacccccaacaccaaggaaacaaaaccacaccgacagcacaaaggcagagcagcagcacaaaaccccc

SEQ ID NO: 36269 - RNA, 71 nt, Homo sapiens
gaagacggcccaaaacacagcgcaccacacacagagggaaacggaaagggccagggggacagagcaaaagc

SEQ ID NO: 36270 - RNA, 51 nt, Homo sapiens
cagcaaaccacccaaggggaacaaaacgacagacggggaccaggcagacga

SEQ ID NO: 36271 - RNA, 78 nt, Homo sapiens
cggcggcgcgcgcgcgacgcgcgcgcccggcccgggggagcgagaggaaggaacgggcagcgagccgggcgagccggc

SEQ ID NO: 36272 - RNA, 72 nt, Homo sapiens
gccccggggccgcccccgcgcccgggcccgccccggccgcggccgggcccagaacccaggagaaacgagagg

SEQ ID NO: 36273 - RNA, 76 nt, Homo sapiens
gccacagcaggacgcggccgaaccaaagagcccaaaagacacacccaaagacggcagaccacaggagaccaaggaa

SEQ ID NO: 36274 - RNA, 38 nt, Homo sapiens
caggcaggaaaagacagcgcagcccgaggaccagcagc

SEQ ID NO: 36275 - RNA, 75 nt, Homo sapiens
ggggcagcgccgaaccaggaccggacccggacccaaaggccagcaaagaaaggccacacggcccaggcggcccaa

SEQ ID NO: 36276 - RNA, 65 nt, Homo sapiens
gaaacgacagaacaccccaccaaacacaggaagccacagggaaaacaagggcgacagcaagaggg

SEQ ID NO: 36277 - RNA, 79 nt, Homo sapiens
caaagagccagaagaaaagacacagcgaagcggaacaaaaaaccggcaagggaagaaacccaagcagagagaggcggaa

SEQ ID NO: 36278 - RNA, 50 nt, Homo sapiens
ggcaccaaacacccagaacaacaaagagaccccacggaagaaccaaacag

SEQ ID NO: 36279 - RNA, 76 nt, Homo sapiens
gcgagcgccgcccgggcagcgaagccgcccccccggacacacacgcgcagaccacacacccaagccagaccgaacc

SEQ ID NO: 36280 - RNA, 61 nt, Homo sapiens
gaggaggcgcgcgcagaccagcaggggagccaagagaggagaccgcgcacacgcaccagcc

SEQ ID NO: 36281 - RNA, 71 nt, Homo sapiens
gacgaaccaggcagcccaaaggaaaagccgggccacagaagcaccaccacaagccacaccaacaaacgacc

SEQ ID NO: 36282 - RNA, 83 nt, Homo sapiens
gcagaccaggagacgaagcccagccccgagccccgccaggacgacccgccccacggccaccaagagccgccgcacccaggcgg

SEQ ID NO: 36283 - RNA, 84 nt, Homo sapiens
gcacagagggccccagagggcaggagagcagagccggagccagggcaggccaggagagaaggcccggcccaggccaagagagaa

SEQ ID NO: 36284 - RNA, 74 nt, Homo sapiens
cacccggaacgacaccaggaacccaaggagcgagagaccaacgggcaagcaaccgaggagaaaagagcgggcca

SEQ ID NO: 36285 - RNA, 78 nt, Homo sapiens
gaggaccaaaaagaagccgcgggaggggcagagggccggcagggccagagacccccagggacacccccagcaaagcag

SEQ ID NO: 36286 - RNA, 77 nt, Homo sapiens
aagcaggaaggaggcagaggcacaccgaaagacggaacaccaggaaaaagagagagagaccagaaccgcggcaaacc

SEQ ID NO: 36287 - RNA, 74 nt, Homo sapiens
cggggagacaacagcagaacgaagaaaagcgcgaagaaccagagcagaaacaagaacacaacaaagacaggaag

SEQ ID NO: 36288 - RNA, 56 nt, Homo sapiens
cgcgccaggaccccacaaggaccggagcgaaggcagagaccacacaagggggaacc

SEQ ID NO: 36289 - RNA, 72 nt, Homo sapiens
ggggggcgacgggaggaggggccagagcaaagacgaaaccgaggccacgcgcggaggccccggacgggcagg

SEQ ID NO: 36290 - RNA, 69 nt, Homo sapiens
accaagggaagaagggacccaaaagggggaggaacagagggacgcaagaacaggaaggggccccggcga

SEQ ID NO: 36291 - RNA, 84 nt, Homo sapiens
ggagcgcggcacggaggggaacagggcaaacagaggcccccccggcaggcagcgcaacccccaggcgcggcccaggacgcgcac

SEQ ID NO: 36292 - RNA, 50 nt, Homo sapiens
agaagcgaaaggaaccagaaacgccaaaagaaaaggaaggggaaccacag

SEQ ID NO: 36293 - RNA, 83 nt, Homo sapiens
agggggagcgcgcacagcaccgcggggggccaaccggaggagacgcccagggggccagaggacaaagcaggacccaaaggaaa

SEQ ID NO: 36294 - RNA, 78 nt, Homo sapiens
aaacaagagaacgggcccacacaacccaggcaaccaacaggcccccgaggagggaacaagccagaccaggaggagaaa

SEQ ID NO: 36295 - RNA, 73 nt, Homo sapiens
gaagccaacacaaaccacaaaaacaacaaggccaccaaacgagagcagccaacggaagaagaagcgcacaagg

SEQ ID NO: 36296 - RNA, 85 nt, Homo sapiens
gagacccggacagggcaggaaacaggagcgcagaggcggagacagaggggccaacccgcgagcgcggaaggacaccgggaccggg

SEQ ID NO: 36297 - RNA, 62 nt, Homo sapiens
cccgagccgaccgcgccgcacgggagccagcggggggcggcaccccaccgcccagccacagc

SEQ ID NO: 36298 - RNA, 69 nt, Homo sapiens
cagaagcacaaggacagagcacccaccacaggagacaacggcaagcggagaagagcaaggccgaaccga

SEQ ID NO: 36299 - RNA, 79 nt, Homo sapiens
cgcagaggcagcagcagccgcggagcagagccgccggggagggagccagaagcaacgaggcaccagaagaaagaagaga

SEQ ID NO: 36300 - RNA, 76 nt, Homo sapiens
agaaggggacgggcccagaggcccagggaggcaggggcagaaacagagaaggaacagacccccccagcgcccgccc

SEQ ID NO: 36301 - RNA, 77 nt, Homo sapiens
aggacagggaacagcaagggaacgccagacaacacacggacaccaaggaaacacccagggagaagcagaccgcacca

SEQ ID NO: 36302 - RNA, 70 nt, Homo sapiens
agcagaacgcgaccaaacgaagagagccacaggaacccgaacccaagaacgcgaggccggcgcgccacac

SEQ ID NO: 36303 - RNA, 56 nt, Homo sapiens
gcagcccgaggagagcacccggagcccaagacagggggcgacccagcaacgcggcc

SEQ ID NO: 36304 - RNA, 72 nt, Homo sapiens
gcggaccagcagaagaacgaaaaacacaacgaaaagcaccaaacaggggcacaacagcaggacgcccagaac

SEQ ID NO: 36305 - RNA, 80 nt, Homo sapiens
aaacaaaccagaagacccagagagacaagacagaggaggcgcagacaacaaagccggacgagcgggagaggacaccacac

SEQ ID NO: 36306 - RNA, 71 nt, Homo sapiens
agcacacagcgaccgggagaacaagacggaaagacgaggccggaagccacaggagaaaggaggagcaaacc

SEQ ID NO: 36307 - RNA, 76 nt, Homo sapiens
gcgcccgcggcggcagcgcgaccacgaaggccgcacccgaggcgggaacaagacagcaccaggcccgaagcagaaa

SEQ ID NO: 36308 - RNA, 80 nt, Homo sapiens
ggaacgaagcaagagcacaggggaaaaacgagaggcccaagccccgaagccgaagccacgccccacaggaacacccaacg

SEQ ID NO: 36309 - RNA, 78 nt, Homo sapiens
cagccaagcgacccagcaaccgcacgaaccggcacggagaagaaagccgcgcgcccaggcggagggcacgaccagcca

SEQ ID NO: 36310 - RNA, 76 nt, Homo sapiens
agcgggacacaggcgggccaccacgcccagcaagagcggaacaagaagaaacccagaccaggcccaagagaaaggc

SEQ ID NO: 36311 - RNA, 79 nt, Homo sapiens
gcgggcaagacagacaggcccggagagaaagcgcccaaccacgggaagcacggagagcaagagacaggccagacccccc

SEQ ID NO: 36312 - RNA, 84 nt, Homo sapiens
caagaacgcagcagcagccgccaagacgggaccaagaaaggcccagggaccaaagcccggacaaggcccgagcaccaggaccgc

SEQ ID NO: 36313 - RNA, 75 nt, Homo sapiens
aaaacaagaggggagacggacgagcaagcaccgcaggggaaaaacggagacgggagcaggaaagaaaaagaagaa

SEQ ID NO: 36314 - RNA, 66 nt, Homo sapiens
aagcgagaaagaaaaagaaacaaggcccaaccaacagacaggggacagaggcacaaagaccaagac

SEQ ID NO: 36315 - RNA, 66 nt, Homo sapiens
ggcccgacccgggcgcggccaagcacggacccccgggacaaagcaaacagaacgggaggcccacag

SEQ ID NO: 36316 - RNA, 59 nt, Homo sapiens
ggggagcggcggaggaaaggacaaaacccgggccaccccgacccaagacccggcggcca

SEQ ID NO: 36317 - RNA, 47 nt, Homo sapiens
ccggcaccccccgccgacaaggaggaagacaaaacgcaaggccaagg

SEQ ID NO: 36318 - RNA, 79 nt, Homo sapiens
gagaggagcagaaggagcaaaaggcggacaggcagaaagcccgcgccgaccccgccgccccccagcgcgcagggccccc

SEQ ID NO: 36319 - RNA, 71 nt, Homo sapiens
ggagggaacggagcgcccccacgcggggggacgcccacccgggccacgggagaaagaccccaccaaggagg

SEQ ID NO: 36320 - RNA, 76 nt, Homo sapiens
acagaggaacaaccccggagcgaaagagcaccaaggaagaagacggcacgggacccccagcacaggcagcaggccg

SEQ ID NO: 36321 - RNA, 73 nt, Homo sapiens
gcgacgaagcagccaaacaccagaggaggaaaagaaggaagcaagaaacacggaggaaagcagacgaggaacc

SEQ ID NO: 36322 - RNA, 66 nt, Homo sapiens
gcccaaaaagccagaaacaacgccaagcgggccgacaagaaagccgaggcggggcgggcagcaacc

SEQ ID NO: 36323 - RNA, 71 nt, Homo sapiens
accccaggaacagagggagaaagagcccaagagaacgaaagcacagaaaacaacgccccaggaccgcagag

SEQ ID NO: 36324 - RNA, 70 nt, Homo sapiens
gcacggcgaccccgagcccacgaccggcggcacacggacaaccgggcgaggggcagggaccaggcacacg

SEQ ID NO: 36325 - RNA, 73 nt, Homo sapiens
agagcgagcgagggggggcgcgccggaaaccggagcgcgcagcaggaggaagcccgacagaaaagggaaggag

SEQ ID NO: 36326 - RNA, 74 nt, Homo sapiens
gacgggccaaaccagccggcgcggcgcgccgcgcgccgggagaggcccggggcccgccggcgcccggagcccgc

SEQ ID NO: 36327 - RNA, 72 nt, Homo sapiens
ggcagaccaacaacggagaacaacccagagagcaagagggaggaagaagagaggacgggcaaagcagagaac

SEQ ID NO: 36328 - RNA, 70 nt, Homo sapiens
aaggacacagcagccgggacccgaaacacgaagccagcacacaaaagagggacaacacaagccacagcgc

SEQ ID NO: 36329 - RNA, 80 nt, Homo sapiens
cccccacgccgccaagcgggagcagaggggagagcggccgccgccgcgccgcccaccacaggagcaaaagaagagcagag

SEQ ID NO: 36330 - RNA, 62 nt, Homo sapiens
gaagaggcccagccggcccgcgggggagccccgggagccgcacggccacgacccgacgggag

SEQ ID NO: 36331 - RNA, 79 nt, Homo sapiens
agccgaggcgagccaacagcacggaagaaaacgccagagaagcagagcagcccggagcgaggggagaccggggaagcgg

SEQ ID NO: 36332 - RNA, 80 nt, Homo sapiens
cggagcgggcgcggacgccgaggcaccgaggcaccagaggagaggagcccaccacccccccacaaaaacaacagccaggc

SEQ ID NO: 36333 - RNA, 75 nt, Homo sapiens
gaggcgggcggagggcacaccagaggggaaacgaaaacaccacgacgaagacgggagaacacagcgccggcagaa

SEQ ID NO: 36334 - RNA, 83 nt, Homo sapiens
gacccaagagcagcggaaaagaccagcacagggcgcaaggaagcaaaaaaggcaagcaagcacaaaaagacgcaaggcgcgca

SEQ ID NO: 36335 - RNA, 51 nt, Homo sapiens
ggacgcagccacaaaacagaacgaaaagaaggggacaaagagagagaggag

SEQ ID NO: 36336 - RNA, 62 nt, Homo sapiens
caaagacgaggcaacacagaacgcccggcaagcggacgggggacggaagcggcagcgggcag

SEQ ID NO: 36337 - RNA, 111 nt, Homo sapiens
gcagggcgagggcacggagaagcgccgggacgccgagaggcgccagcccggagcagggcaggacccaaagcagcagaagacacgaccaccagaagccgagaaagaaggaag

SEQ ID NO: 36338 - RNA, 56 nt, Homo sapiens
gcgccgcagcacgcggaccagaaggaaaaccgcaccgaagcagccaaggccaagaa

SEQ ID NO: 36339 - RNA, 72 nt, Homo sapiens
ggacagagagacagcccccgaggcgcaggccgggccgagcccacagaccaccgccccacaccgcggagacac

SEQ ID NO: 36340 - RNA, 55 nt, Homo sapiens
cgcggggggacggcaacggagaaagcaggggcgcaagcgggaaaccggaccacgc

SEQ ID NO: 36341 - RNA, 55 nt, Homo sapiens
gacgggagaagaaaagacggccgagggccaggcaggaggggcacagcccagggac

SEQ ID NO: 36342 - RNA, 87 nt, Homo sapiens
ccgaacccgcacgcaggccaggggccggccagcacagagagagaaagggcagcaagacacgaagccgagaaagagcagcgacaacaa

SEQ ID NO: 36343 - RNA, 82 nt, Homo sapiens
agcaaaagaaaaggcaagacaaccacaggcagagaggaggcagcacccagggcaccggagcaaaacgacccgcagaacaggg

SEQ ID NO: 36344 - RNA, 79 nt, Homo sapiens
cagggacggagcggagaaaaggaaccggccccgggagcgaaaacgccacaacagagggggccagggcggggaagacaaa

SEQ ID NO: 36345 - RNA, 37 nt, Homo sapiens
gaaccagcagggaaggaggccacaccagaaaagaaaa

SEQ ID NO: 36346 - RNA, 35 nt, Homo sapiens
ggaaccagccacccagagggcgaaacaccacaccc

SEQ ID NO: 36347 - RNA, 49 nt, Homo sapiens
aaaccggaaccacacacaccacaggaagccagcgaaccacgggaagaag

SEQ ID NO: 36348 - RNA, 34 nt, Homo sapiens
gaccaagcaccagaggaagagaaacaccaaggaa

SEQ ID NO: 36349 - RNA, 68 nt, Homo sapiens
agacgcaagcgagggcacagagagcgaaggaccaagggaaacacagcagaaagaccaaaggcgaccag

SEQ ID NO: 36350 - RNA, 105 nt, Homo sapiens
gccgcgagcaccggagcgcgcgcgccgcgcgggcccggaggcccagggcccagcaccgacaggacccaaccccaggcccccccggggggcccggggcgggcgagc

SEQ ID NO: 36351 - RNA, 75 nt, Homo sapiens
ggacacagccaaggagccgcacagccggggccaccccgaaggccgaaggaagcacccaagagaggaagcaccgcc

SEQ ID NO: 36352 - RNA, 40 nt, Homo sapiens
gcgccggccccaacacggaccgacacacaacggacacgcc

SEQ ID NO: 36353 - RNA, 72 nt, Homo sapiens
gaggccgacgaacgagaaacagcaaacggcagcacagccccagggagagggcccacagagacaggagaggcc

SEQ ID NO: 36354 - RNA, 74 nt, Homo sapiens
cgacagagacaacgacagagcacggcagaaggcggcagggagcacgcaccaggagcccacggcccacccacagc

SEQ ID NO: 36355 - RNA, 68 nt, Homo sapiens
aaccgaaacgcacacaaacaagccccgacacagaagaagccgaaaagccagcagccgcacccacagga

SEQ ID NO: 36356 - RNA, 70 nt, Homo sapiens
ccgcgccccagaaggcagaggaacacaacaggcaagacccagagaaaggaacaagacccgcagacaaccg

SEQ ID NO: 36357 - RNA, 75 nt, Homo sapiens
gaagcaacgaaaaaccccggaaaagcagcaaccgggacacaaaagcaaccgagagggaaacaaccacgcgaaaag

SEQ ID NO: 36358 - RNA, 69 nt, Homo sapiens
ccggggggcggacgcgcgcggggcagcaaaccaaccaaaggaaacaaagcgaacaagagaagacgaaaa

SEQ ID NO: 36359 - RNA, 64 nt, Homo sapiens
gggcaaggagaaacgaagaggcggccccaggggggaccaacaagggagaaccaacagaacaacc

SEQ ID NO: 36360 - RNA, 70 nt, Homo sapiens
gacagggccccagggcgggagcgcacgcaaggaggacccaaggcgcagacggagcgccaggccacggaag

SEQ ID NO: 36361 - RNA, 77 nt, Homo sapiens
aggaacgccgaaacgagcaggcaagagacaggcggaaggaaaagcagaaaagagaaaagaagaagaacggccacaga

SEQ ID NO: 36362 - RNA, 57 nt, Homo sapiens
gagaacagcgcagggcacggaaggggcccagcacaggcagagggagcacacaaggag

SEQ ID NO: 36363 - RNA, 78 nt, Homo sapiens
aacagagaccaccagaaaacccagacacgagcaggaaaaggaagagcaaaaacaaaaacccagcagacaaaagacaga

SEQ ID NO: 36364 - RNA, 111 nt, Homo sapiens
acaccgccagacaacaacccgaaacccaacaccagccaagggaagagacccccagagaagaaaggagggccgcccccagggaacaaacccccagccggcccgcgggaccag

SEQ ID NO: 36365 - RNA, 85 nt, Homo sapiens
cacacccagggaccaaccccaaggaggacgagggccgggccgggcgcgggcgagaaagggaggagcgcggcaagacaaccacgaa

SEQ ID NO: 36366 - RNA, 77 nt, Homo sapiens
caccggaagagagcagaacaaccaagcggagggcagaagaagacagccagaacagcaagcgaggaccaccgcccgac

SEQ ID NO: 36367 - RNA, 76 nt, Homo sapiens
cgcccccccgccggcccccccacggaagggcggagaccacggcaaccagaaaccaaaacggagagaaggagggccc

SEQ ID NO: 36368 - RNA, 82 nt, Homo sapiens
ccacagaaacaaagaccagaccaaggagggacccaacagggacagcaaaagcgcacagccagaagaaaccgggaggaccgag

SEQ ID NO: 36369 - RNA, 74 nt, Homo sapiens
caaacagaaaaggaagaaagggacaaagagaggagcaggcaagcagaagaggaacagaagaagcagagcagaga

SEQ ID NO: 36370 - RNA, 74 nt, Homo sapiens
gccaagcaaccacacagaaagagcaaaagacggacggaaccacaaacaaggcgcagaggcgagcggccccggag

SEQ ID NO: 36371 - RNA, 69 nt, Homo sapiens
ccaggcccagcgagcgacggcaaaagcagaggagggaaaaaaaaagaccgcacaagaggcacgggagga

SEQ ID NO: 36372 - RNA, 81 nt, Homo sapiens
aagaaagagaggcccgaagaggcccaggggcccgacaagaagacacgggaaaaggggagccgggagaaggccccggggggc

SEQ ID NO: 36373 - RNA, 82 nt, Homo sapiens
gaaaagcgccgggcggaccagcaggcgaagccgacgagcccgaacagacgcaccagcgggaggaagagggacggcccaggag

SEQ ID NO: 36374 - RNA, 75 nt, Homo sapiens
gcaggcgcagaaaaacaaggcggaggaagcacacacgcacgagagaagcgcgcagccacccggcgcagcagagag

SEQ ID NO: 36375 - RNA, 85 nt, Homo sapiens
cagcaggcggggaggacgaggggcccgggcccagagcggaagacaagacggccagacgcgaggagacccacaagaccggccggag

SEQ ID NO: 36376 - RNA, 93 nt, Homo sapiens
caaaaacagcagcggcaggaggaggaccaccggcaacagggacagccgacagaagacaaacggaacagccgacaaaacgaagagggaaacagc

SEQ ID NO: 36377 - RNA, 75 nt, Homo sapiens
caccagagggccaggccagaagagccgaccacaaggggaggacaaccgcccgggaccagcggcaaccaagccggg

SEQ ID NO: 36378 - RNA, 72 nt, Homo sapiens
agaggaacacgacccccaacggacggggcgccggagaaggcgaaaagacgccagccagaccgggcaaccggg

SEQ ID NO: 36379 - RNA, 71 nt, Homo sapiens
ggaaccgggaaacccacaccacagacgagagggggacagacaacagagcaacgcaacagggcacaagacag

SEQ ID NO: 36380 - RNA, 75 nt, Homo sapiens
cccgccagccggaaacgcggacaagaagcaaggcacaaccacccccacccgaagggccccacaccgccacagaga

SEQ ID NO: 36381 - RNA, 81 nt, Homo sapiens
gcacacccaccccacaggcccggccggcgcggacgggcaggacgagggccggacagggcccagaccccagccagcagcccc

SEQ ID NO: 36382 - RNA, 75 nt, Homo sapiens
acaggaccagcaacgcagcgcgccacccagaccagccagaggccagagaaacagaagcggagagacagggacaag

SEQ ID NO: 36383 - RNA, 54 nt, Homo sapiens
gaaacggaacaccagaagaaggcgaaaaaaggaaacagaagacagccgaaccaa

SEQ ID NO: 36384 - RNA, 73 nt, Homo sapiens
gaagaacccaaaggggagggaccgcagccacggaagagaaggaacaggcaaggcgcaccacgagggcacgcag

SEQ ID NO: 36385 - RNA, 74 nt, Homo sapiens
agaagagggggaaaaagccaccaacgccgacgaaagggacacacagggcgaggggcggaccgccagagaaggca

SEQ ID NO: 36386 - RNA, 78 nt, Homo sapiens
acccgccacccccagacccccagcccaggaagagcaacgcaaggaaaaagaaaagacaaagagagcaggagccgcaga

SEQ ID NO: 36387 - RNA, 86 nt, Homo sapiens
cgacgaaccagcgagaggagagagcccgccccccaaagcgaagccaaagcgaaggcaaaggccaagaaggcagggaaagggccaca

SEQ ID NO: 36388 - RNA, 74 nt, Homo sapiens
gccagcacgagagacagcccggccaacacccagccgacgaccccagcccgggggcggcgaggaggagcggggga

SEQ ID NO: 36389 - RNA, 58 nt, Homo sapiens
agggaccacggcaccgccccagcagccacccacgcacccgcggccaaaacacgacagg

SEQ ID NO: 36390 - RNA, 57 nt, Homo sapiens
gacccaggaagagaagaaagaggacaacagacgaaaaggcgacggcggagacagaag

SEQ ID NO: 36391 - RNA, 109 nt, Homo sapiens
gcacaaacagcagaggggcgcagagcaagccgacgagaagcaagaacaacaccccgccaaagacccaacaagacaacaggccccaagaagccgagccaagaaggaggca

SEQ ID NO: 36392 - RNA, 88 nt, Homo sapiens
gagcccccgaaccgcaaagccccagaggacaaccaccccaggacaggagcagaggggcgccaggcacgaggaggcgagagaccacgga

SEQ ID NO: 36393 - RNA, 81 nt, Homo sapiens
cagcacccaccccggagggggaccacaagacccacgacagggaaaacaaaggcagagaagccagacggcaaaagcagcggg

SEQ ID NO: 36394 - RNA, 56 nt, Homo sapiens
cgcagcccggacagacccccgccccgagaaaagcgacaccaagcagggacgaaaac

SEQ ID NO: 36395 - RNA, 87 nt, Homo sapiens
agacaacaccgcgcggaccacaaaccgcgccagaaaacagagaggaagaggagcgaaggaaaaggcgccgggagaagaacaaagcgc

SEQ ID NO: 36396 - RNA, 86 nt, Homo sapiens
aagaccaaggcaacaaggacaacaagagacgggacaagacagggcaaaggacagaccagggaaagggagcagcaccggccacaccc

SEQ ID NO: 36397 - RNA, 79 nt, Homo sapiens
gagcaaagaagacagcaagaggcaaaaccggacaagaggccaaccaaccggagaacgggaccagacacacgcaaggaca

SEQ ID NO: 36398 - RNA, 83 nt, Homo sapiens
gccagacaccccaggagggaacaggacaacagggacagacagaccccagaaacccagaggagaggcaaggagaggcgaggaga

SEQ ID NO: 36399 - RNA, 77 nt, Homo sapiens
gagcacacgggccaggggagagagaagaaccgagcaggacgaaaggaacccggcacgccgccagcgcgccccaggcc

SEQ ID NO: 36400 - RNA, 57 nt, Homo sapiens
cgaacccaccgcgacccggccacgccgccccaaggaagcgcaacaggaaaggagaga

SEQ ID NO: 36401 - RNA, 60 nt, Homo sapiens
ggggcgcgcggcggaggaccaggcgcggcgcggcgcggcgaggggacacgcgccggagga

SEQ ID NO: 36402 - RNA, 62 nt, Homo sapiens
gagagaaacccacgaagacgcgcggagaaagagaccaccgaggaaaccccccaggcaagagg

SEQ ID NO: 36403 - RNA, 74 nt, Homo sapiens
cgcgccaagcaagggaggagaacccggagcagccaggcacgcaccggagagccacgagccggggaaaaagggga

SEQ ID NO: 36404 - RNA, 97 nt, Homo sapiens
caccagcaagcgcggaagaggaccggaggccggaggaagccaggaggccgggaacccaacacccgggaagagacaaccaggcacaggaaacaaagaa

SEQ ID NO: 36405 - RNA, 76 nt, Homo sapiens
cccgccaacaacacccccaagccacggaggcagagggcaggagcgagagcgacacacccaaccgggcaacagagcg

SEQ ID NO: 36406 - RNA, 92 nt, Homo sapiens
cagaaagagaccggaccagaaaccaggagccacggacaagaccaaaaggccaccccaggccaccagcaagaccaccccccgagaacgagggc

SEQ ID NO: 36407 - RNA, 52 nt, Homo sapiens
aaaagcccgccccagggcacgaagcaggccggaagagaagggacagcaggac

SEQ ID NO: 36408 - RNA, 83 nt, Homo sapiens
cgacacacacagagcacgcccacaggggggggccaagagcgcccagcggacacagccccggaggcgaaggggagcaagggaga

SEQ ID NO: 36409 - RNA, 66 nt, Homo sapiens
ccacaaaaggccaacgacagcccgaaaccaaaagaaaaagggcgaagaggaacagggcccagaaca

SEQ ID NO: 36410 - RNA, 78 nt, Homo sapiens
cacgcagccccaggcagcggaggaaacagcggaaggaagggaaaaaagaagaacaagcgagaagagaagaaggcccag

SEQ ID NO: 36411 - RNA, 78 nt, Homo sapiens
gagaccagccaagggcccggaccaccgggccagcagcccagcccaaacgaccggacgccaggggaaaagccccagagc

SEQ ID NO: 36412 - RNA, 82 nt, Homo sapiens
gcagcgaaggaaaacgacagaggcgaagacaaaaaaagagcggaggcccaaaggggcgaaccacagaggagccgcggcaacg

SEQ ID NO: 36413 - RNA, 66 nt, Homo sapiens
aaagccgcacaggggcagggaaccgaaagacaagcagcaaaagcagccgagaggaacaagagacaa

SEQ ID NO: 36414 - RNA, 71 nt, Homo sapiens
acagcgggcaagacagacaggcccggagagaaagcgcccaaccacggacagcccacaccggcaggccaaca

SEQ ID NO: 36415 - RNA, 74 nt, Homo sapiens
gcgcgcgccccaggagcaaggaggagaggcgccaacggaagagcggcagaaaagagaccacggcacgggaggaa

SEQ ID NO: 36416 - RNA, 75 nt, Homo sapiens
gccaaccccacacacaggagcaagcagggggcacccaagcaggagggaagaaagacccggggaggagacacagga

SEQ ID NO: 36417 - RNA, 62 nt, Homo sapiens
gggggccccgacggcaggcggcccgaagacaccccgccaaaaggacagaggaccacggagac

SEQ ID NO: 36418 - RNA, 75 nt, Homo sapiens
agggaggaaaagggcagggacagcgcaggcagcaggaccgacccaaccgaagaaagccaaaagaaaaaaaacaag

SEQ ID NO: 36419 - RNA, 79 nt, Homo sapiens
acagaccggggcaagccccgggcgggacaggcccccccaaagacccaaacgaacaaagcccggagacccaaggaagaga

SEQ ID NO: 36420 - RNA, 36 nt, Homo sapiens
ggcagccgacgaagaggggcggggcggcccaggaaa

SEQ ID NO: 36421 - RNA, 74 nt, Homo sapiens
cagcccccgagagcggaacacagagacagaggacacaaggaaaaaaaacagaggaagggcggaaggcaagccgg

SEQ ID NO: 36422 - RNA, 79 nt, Homo sapiens
cacgggcggccggagcccggaggccgcacccgccccggcggggcccagggaaaaggcgggagcgaagcagccgaggaaa

SEQ ID NO: 36423 - RNA, 69 nt, Homo sapiens
agggaaaccacaaacaggaagcagaaacaaggagggaacagggaaacacgccggcagcgagaccggcgc

SEQ ID NO: 36424 - RNA, 71 nt, Homo sapiens
cggagcgacggggaggcgcggccaacggggccacaagacaacggcaagcggagaagagcaaggccgaaccg

SEQ ID NO: 36425 - RNA, 61 nt, Homo sapiens
cgggcgccaccccaaaccaggaaagacagggacagaggacgcagaaaacaaccacccccag

SEQ ID NO: 36426 - RNA, 77 nt, Homo sapiens
gaagagcagcagagcaaccagagcacacgagagggccgggacaaggaagggggccaaagggcgagggcacaaaaaac

SEQ ID NO: 36427 - RNA, 75 nt, Homo sapiens
gaaaaaagcacccgaaaagagggaggaacgcaaaacgaacacaaggaaggaaaagggagacaacagccacacaaa

SEQ ID NO: 36428 - RNA, 79 nt, Homo sapiens
ggaccggagacggggccaacaggccaaacacacaggaacgccagaccccagccgagggaggcaacagcaaagggacagc

SEQ ID NO: 36429 - RNA, 84 nt, Homo sapiens
acaggacaagagagccacaacgaggaccgcaacacggccggagacgcgcaccagaaagcacacgggaagaacccaagacacaca

SEQ ID NO: 36430 - RNA, 78 nt, Homo sapiens
gccgacacgagccacggacccccacccacccagagccaacggaaccaaacccaagacacgaaacgaaggaggcccaac

SEQ ID NO: 36431 - RNA, 76 nt, Homo sapiens
cggacccagacccagaacacccacgagcacgcgagagaacaacagagacccgggagaggaggagagaaggaaagga

SEQ ID NO: 36432 - RNA, 59 nt, Homo sapiens
cgggccgcgaggggaagaggaagcaaagccaaggccggacccgacgacacggccgccca

SEQ ID NO: 36433 - RNA, 83 nt, Homo sapiens
gcggcgcggccgcgcgccacgcgccaggagcacgcacgggggcccgggccgaccgagcaccaggcgggcaaaacccaggaccc

SEQ ID NO: 36434 - RNA, 86 nt, Homo sapiens
cgccgccagcggcgcaggcccagagcgcgcgagcggaccaggagggcacccccgggacgggcagcgaggcacaggccccaccgcga

SEQ ID NO: 36435 - RNA, 84 nt, Homo sapiens
gcggaaccgggccagacgccgcaccagaaggccggccagggcagaagcgggaagcccgccggagaacgaggaaaggcggagcag

SEQ ID NO: 36436 - RNA, 72 nt, Homo sapiens
acccacgccgcagagagaaaggcgagcgaagaccaggccggaaggggagcaaagaagaaaacgcagccaccg

SEQ ID NO: 36437 - RNA, 79 nt, Homo sapiens
ccgccgggagcggaaacagcggcagccagagcgccggagaccaaggcacagccgaggcgaaaaacagagagagcccgaa

SEQ ID NO: 36438 - RNA, 78 nt, Homo sapiens
gcacagaagcacagccacagagcaggagggaaacaaaagcagcagggcagagaaccgcaagccagggccagcagcggc

SEQ ID NO: 36439 - RNA, 67 nt, Homo sapiens
aacgcaccaagccgggcaaggcgcccccccccaacacacgcgacacgaagaagagaggagggaaccc

SEQ ID NO: 36440 - RNA, 65 nt, Homo sapiens
cggcaacccccgacgaggggacacccagggcagcacaccagaagccacaaggaagcagggagccc

SEQ ID NO: 36441 - RNA, 61 nt, Homo sapiens
cgaggcccccgcacagcacgcgcagaacaaagggacaggcggagagagcagggacgccaag

SEQ ID NO: 36442 - RNA, 54 nt, Homo sapiens
cagccgaaagggcccaccgcaaggacggagaagggacggaccacaaaacccaac

SEQ ID NO: 36443 - RNA, 52 nt, Homo sapiens
ccccacgggaaggagagcagccagcagcgaagcacaagaggacccccgcgac

SEQ ID NO: 36444 - RNA, 81 nt, Homo sapiens
aggcaagggcaccccacaaaagggcgcggcggcggaccacagggggccggaggcaaccaccacacccccaggcgccccagg

SEQ ID NO: 36445 - RNA, 82 nt, Homo sapiens
agccggcccggcgcgcccggccccgaagaagcgcggaacgagcaccaggaaccccaccaacaagcagccgaagacgacccag

SEQ ID NO: 36446 - RNA, 40 nt, Homo sapiens
aaaccagagaagaagagagacggcaacggaaggaacaccc

SEQ ID NO: 36447 - RNA, 60 nt, Homo sapiens
gagaggccgagacccgagagacagccggacgccagccccgagcccgccagccccaccacg

SEQ ID NO: 36448 - RNA, 59 nt, Homo sapiens
ggagcagagaaagcagccacaggagacggaagaagccaagaaagcccgagacacacgac

SEQ ID NO: 36449 - RNA, 53 nt, Homo sapiens
gccgcgccggggcgcccggcacccgcgggccgaaagcagccagcaagaaaagg

SEQ ID NO: 36450 - RNA, 62 nt, Homo sapiens
ccccacaccaccgaccaggaccgggaagccgcaaccaaagccaacaggcagaccagagacag

SEQ ID NO: 36451 - RNA, 71 nt, Homo sapiens
cagcagccaaccacccacgacaccagcaacgcccaggagcaagacaggggaggccaagagcccagggcaaa

SEQ ID NO: 36452 - RNA, 76 nt, Homo sapiens
cgggcccacgacacccacccggcagggcaaccgcaccaccagcgaagggggagacgaggagcgcacgcccacacca

SEQ ID NO: 36453 - RNA, 79 nt, Homo sapiens
gagaaggaccaagaaccagcaaaccagccggcgggcgccacaacggacgacgaaaacacagcccaggcagcaggagagc

SEQ ID NO: 36454 - RNA, 78 nt, Homo sapiens
gcaccggagagggacaagaaagcggggaaggaaaacagcaacacagagcgaacaaaaaaccaggccggacgacacccg

SEQ ID NO: 36455 - RNA, 80 nt, Homo sapiens
ggaccaggcacccgggaagaaccaaaggacgcagacacaccaaggaaagcaagaagccggacagggagcaagccaaagga

SEQ ID NO: 36456 - RNA, 33 nt, Homo sapiens
agcgaagcaggcccccaggcgcagagccaaggg

SEQ ID NO: 36457 - RNA, 71 nt, Homo sapiens
gccggcgaggcagccacccgccgcggcgggggaggaccccccgccaggaggagagcaaacacacacggaga

SEQ ID NO: 36458 - RNA, 66 nt, Homo sapiens
caaaagcgggggaagaagagaggacgacaacgaagagaggaaagaagcggaaaggagggagcacac

SEQ ID NO: 36459 - RNA, 66 nt, Homo sapiens
ggcggacccgcaggcccgggaagcagccaacagagcagcagcagagcagccacgagagacagcagg

SEQ ID NO: 36460 - RNA, 91 nt, Homo sapiens
agcagcgcggcggaagcggcccacggcccgcgcgggccggagcgcgcaagagcgggcgacgcacgaggcacacaggaaggaggggagcagg

SEQ ID NO: 36461 - RNA, 80 nt, Homo sapiens
aaagcgaggagcggccccacggaagccaagcggccgagggcagagacaggcaacagacggcaacgaaaggcacaaaaacg

SEQ ID NO: 36462 - RNA, 58 nt, Homo sapiens
aacagagaaagaaggcggccaggccaaccgaaggcaaaaccacggaccaccaggggag

SEQ ID NO: 36463 - RNA, 79 nt, Homo sapiens
cccaaggccccagaaaggggagcgccgccgccgcagcgggaccgcgcgaccggcgcccgcccgcgaggaaaggcaaggg

SEQ ID NO: 36464 - RNA, 82 nt, Homo sapiens
gccgaccccccggcgccgcgccggcggcggagggcccccggacccgggagcggacccggggcgggaagcccgaggcggcaac

SEQ ID NO: 36465 - RNA, 72 nt, Homo sapiens
aacgaaagcaaagcgaagagcaagcaagagcaacggcaagaagacaagcgccacaggagagaggcaacagga

SEQ ID NO: 36466 - RNA, 69 nt, Homo sapiens
accaccgagaagacaaaacaagaacaggacagagccacgaccaggggacacccccgcccccaacccaga

SEQ ID NO: 36467 - RNA, 49 nt, Homo sapiens
caccacaaaccggccaaggcacaaaaggcggaggacgggccaggagaca

SEQ ID NO: 36468 - RNA, 70 nt, Homo sapiens
cacagacccaccagcagagaccacgaaaaacacacaacacgacgcagaccccaaaaggaagagggaaaag

SEQ ID NO: 36469 - RNA, 84 nt, Homo sapiens
cccggacggcgggccgggcacggaaccccaccgacaggaacacggccgcgggcggaggacagaacgcacccgggagaaaaaccc

SEQ ID NO: 36470 - RNA, 85 nt, Homo sapiens
gaaccaccgcacaagagccaagaacaagggccgcgagggaaaaccaagccgccacagggagaaaagagcagaggccgaccccagg

SEQ ID NO: 36471 - RNA, 70 nt, Homo sapiens
cacgcaaccccacccccagggagaagacaacacgaagaagaccacgacagggcaggcagcaccagacaga

SEQ ID NO: 36472 - RNA, 69 nt, Homo sapiens
ccgaccgcaacagaacggacccgggaaaggagaaaacaacggacgcagaacgaaccccaacccgggaca

SEQ ID NO: 36473 - RNA, 77 nt, Homo sapiens
cgaagaggagcaggaacagcacgacccagccgccccggccgcaggccagaaagccacacacgaggaggggcacggaa

SEQ ID NO: 36474 - RNA, 41 nt, Homo sapiens
ccagaagagcccgggacaaggagcggcgcgaagaagaggca

SEQ ID NO: 36475 - RNA, 64 nt, Homo sapiens
cgggccaggaaacaaggagggaagggcaacaacccaccgggggaaacaccagacgaagccaagg

SEQ ID NO: 36476 - RNA, 82 nt, Homo sapiens
cccccaaccgggagcggccacggcggaggacgacgcgccaaccagacgcgcgggagaaagccccacgaagagagaagcgcgg

SEQ ID NO: 36477 - RNA, 37 nt, Homo sapiens
aagcacgcgcacagaggacggccggagcagcagaaca

SEQ ID NO: 36478 - RNA, 71 nt, Homo sapiens
ggaaccacaagcaaaagccagagaagcaagaggcaggggaaaagccacggcaggacaaggggcagaccaca

SEQ ID NO: 36479 - RNA, 81 nt, Homo sapiens
agaggccgcaggaaaccgggaaggaggaagagcccacagacacacccaaagcagcccacacagggcagacagaccgaaaac

SEQ ID NO: 36480 - RNA, 74 nt, Homo sapiens
aagaaaacgccaaggaacgaaaccaggaaccgaagaagcgaagaaacagcggacaagacgaggaagagaaggag

SEQ ID NO: 36481 - RNA, 76 nt, Homo sapiens
gaaacgaaagcgcgacaggacacccagcacaggcggacaggccccaaacacggcaccgggggcggaaaagcagaaa

SEQ ID NO: 36482 - RNA, 85 nt, Homo sapiens
ggagcaaaagaggacgccgggacaccaagaagcagggaaaggacgaagacgaccgaagcagaacgagggcaaccgagcagggagg

SEQ ID NO: 36483 - RNA, 81 nt, Homo sapiens
cggggcgcccgggaagcggcggggccccgacccgacagccagcccccaagcaccgggccccagaggacgaggggcccccca

SEQ ID NO: 36484 - RNA, 68 nt, Homo sapiens
ggccgggacacacgaaacggggcgcgaggacgcggacccgcacggggagcgaaccgcaccggaccggg

SEQ ID NO: 36485 - RNA, 68 nt, Homo sapiens
cgccacgagagcaaccgacacagaagcacggagcccaaggaggagaaagagaaagaaaagcaacaccg

SEQ ID NO: 36486 - RNA, 63 nt, Homo sapiens
gaccagcacgaagggcgacgaaaagcgggcgccaacaaggaaaaagaagaccaccggacagca

SEQ ID NO: 36487 - RNA, 77 nt, Homo sapiens
gacaggccagcccacagcaggcgaccaggaggaacagaccggcggccgacgggacaccggacccaggcacagcgaag

SEQ ID NO: 36488 - RNA, 81 nt, Homo sapiens
gggcccagccgggaacccccacgcggccagcgaaaacgcccaggaggagcaacgggggaagccccgaggaagcaggagcca

SEQ ID NO: 36489 - RNA, 72 nt, Homo sapiens
gaacacccagaaacggcccgagagagacgcagcgcaaggccgggggaggccacaaaacaaagcgacaggaga

SEQ ID NO: 36490 - RNA, 79 nt, Homo sapiens
aacaacaagggaaaaggaaagcgggaaaaagagaaacagaaccggccaagaagcaaagaacggggccggaggacgcggg

SEQ ID NO: 36491 - RNA, 83 nt, Homo sapiens
ccaccggcccccggcgccgccagcccggagggaccgcagagaccgggaggcagcaacccagaggccaccgccaagcaaaacaa

SEQ ID NO: 36492 - RNA, 79 nt, Homo sapiens
cacggagcgcagaggccacgcgaccagacccaggacgagacgggcaagaaccggcaaaaacaaccaggcagagagacaa

SEQ ID NO: 36493 - RNA, 76 nt, Homo sapiens
acagggaggagagacggcggcggaaaaccccaaaaggacaaagccccacacaaggagagcaagcagggagggccca

SEQ ID NO: 36494 - RNA, 74 nt, Homo sapiens
ggaaagggacaagaagggcaaagccgaaggccccgggcgcgggagccagccgaagaaaggaaaagagaggcgcc

SEQ ID NO: 36495 - RNA, 68 nt, Homo sapiens
gcagaggccgcgagacaggggcgcgcccgggacacagaagccaggccagccgcaggaggcaccaaggg

SEQ ID NO: 36496 - RNA, 73 nt, Homo sapiens
aaaagggaggaacagcagggacgcaggagcggcaaacgagggaacggcaaaaccagcacgggaaaggcagcag

SEQ ID NO: 36497 - RNA, 71 nt, Homo sapiens
ggcaaaagacagaaaaccgaggcaccaagccggccagcaagacccgagcccaagcacaaagccggccgccc

SEQ ID NO: 36498 - RNA, 76 nt, Homo sapiens
agggacagccaagaaccaaaaaggaccacgaagagaaccaggagcggcagaccgccgccaggaggaggcacgcagc

SEQ ID NO: 36499 - RNA, 80 nt, Homo sapiens
acacaggaggaaacaagaagaaaaagggcagccacaagacgggggcaccgcccgggcgccagcagacgggcacagcaggg

SEQ ID NO: 36500 - RNA, 77 nt, Homo sapiens
ccaggccgagccccaccgcgagcgcggagaacccagaaaagccaaagggaaaagaagagaagcacagacagaaccac

SEQ ID NO: 36501 - RNA, 57 nt, Homo sapiens
cggccccccggacagacgccgacgcccagagagaaagaacgcacaccaagggaagag

SEQ ID NO: 36502 - RNA, 84 nt, Homo sapiens
ggccccccgcacaggggccgggcacagacgggaaggacaaagggaaccccagccaaagggaggacaaggacagccagcagggaa

SEQ ID NO: 36503 - RNA, 73 nt, Homo sapiens
aggagcacgaacagggagagcaggacaccagcacaccgcggaggcgcccagacccaccagccgggacaggcgc

SEQ ID NO: 36504 - RNA, 81 nt, Homo sapiens
gagcgagggggggcgcgccggaaaccggagcgcgcagcaggagagccggagaggaggaaggagaagcccgggagcgcgcgg

SEQ ID NO: 36505 - RNA, 63 nt, Homo sapiens
cgcaggcgcgggggacggccccggggggcgcgcccgccgacggaccagagaggagaagaagag

SEQ ID NO: 36506 - RNA, 79 nt, Homo sapiens
gggacgcccagcccaggcccgcgacagaaggaagagaccgcaccacgccgggaacggagaacacagaccaccgaagcag

SEQ ID NO: 36507 - RNA, 87 nt, Homo sapiens
ggccccagccgagccccagccaggacgagaggagcggagcccgcagaaccccacagcaagaggacgggggcacccgaggaggaagag

SEQ ID NO: 36508 - RNA, 68 nt, Homo sapiens
gagacggacgcacaggaaggaaaaagggcagccgggcggaggagggcagacaggccacaagccgaccc

SEQ ID NO: 36509 - RNA, 83 nt, Homo sapiens
cagcagaggccgaccgcaggagaagcccccagaaccaggcccccaaccagccacgcggaggcaaggaccagccacagcaaggc

SEQ ID NO: 36510 - RNA, 67 nt, Homo sapiens
agccccagcgacccaagaaccggccaagcccaaccaagccgggggcgaaagccaaagcagcagcgcg

SEQ ID NO: 36511 - RNA, 36 nt, Homo sapiens
cggaagacgcccaccaacgaggaagcagcacgaccc

SEQ ID NO: 36512 - RNA, 102 nt, Homo sapiens
aacaacggaacagacaaggcaaaaacaagcaccagaggcccgagcagccagcacggagcgaggggcacagaggcaggcacaaaaccacaagcgacaacagaa

SEQ ID NO: 36513 - RNA, 55 nt, Homo sapiens
cggcggacccgcaggcccgggaagggaaaagaaacccgaacccggaggacaagac

SEQ ID NO: 36514 - RNA, 79 nt, Homo sapiens
accgacgggccgcgaggggaagaggaagcaaagccaaggggcaaagagaaccaggagaccccaccaccacagaaaaagg

SEQ ID NO: 36515 - RNA, 68 nt, Homo sapiens
cacaaacacaccaaagcgaacccgggaagaaggccgcgcaaccggagcccgcgcggcacgggcgagcc

SEQ ID NO: 36516 - RNA, 79 nt, Homo sapiens
aggaccgaacgcagcacagcacccgccagaggagaggagcagaggacccgggccggaaagccggaagcgcacgagccag

SEQ ID NO: 36517 - RNA, 70 nt, Homo sapiens
aagcgccgaacggaccgggggaaacaaaaacgcacacaacgacccagcaaaccacacgaggaaaacagaa

SEQ ID NO: 36518 - RNA, 75 nt, Homo sapiens
ggccgaagccagcgcgcggaggcaccagggcggagaacggaaaagcaccaggaagcagagaggaccgcagaaggg

SEQ ID NO: 36519 - RNA, 74 nt, Homo sapiens
gagcggcggcggcggcagcgggcgggccccgagagcagcagcgcaaggcaacggggcccgccggcaaggagaac

SEQ ID NO: 36520 - RNA, 76 nt, Homo sapiens
ccccacccgccgcagccacaccaggcccagaggccaggcagacccagccaaaccgcgaagaaaagggacggccaga

SEQ ID NO: 36521 - RNA, 71 nt, Homo sapiens
cagacaccgccaccaccgagaagacaaaacaaggcgaacccaggcacccagagacggagcggaaaccaagg

SEQ ID NO: 36522 - RNA, 52 nt, Homo sapiens
aagcacccgcgacccagaagggaccaccacacgaaaccaaggaaaaaccggg

SEQ ID NO: 36523 - RNA, 66 nt, Homo sapiens
caaaccgaagagcggaagagaaagacaggggaacccaccagccggacccagggaaaaaacgcaaac

SEQ ID NO: 36524 - RNA, 73 nt, Homo sapiens
acgggaccaccccgcgccccgccagcaccggccccaccacaggagaggagccaagcccaacgggacgggaaaa

SEQ ID NO: 36525 - RNA, 69 nt, Homo sapiens
ggcccggcagccccgacgcagccgggaaggggacaagggaaaacaacagggaggaaaaaggcaaacgca

SEQ ID NO: 36526 - RNA, 81 nt, Homo sapiens
cagcccaccaagaagggccgagcacagcaagcaacggacggccaaccgccaggagaagccccaacgaaagcacggcagaag

SEQ ID NO: 36527 - RNA, 73 nt, Homo sapiens
gaaaaccaaagggggccggaaggaaaaacgccgggccaaagagagagggaagacgccgagcggggaagcaggg

SEQ ID NO: 36528 - RNA, 66 nt, Homo sapiens
cgcgcccaagaccagccgacgcaacagaccaaaccgcacaaacaaagccaaggaacaaagaaggcg

SEQ ID NO: 36529 - RNA, 75 nt, Homo sapiens
aggaacaggcggacggccacgcagccaggacgcggaacggaaaacaaagagggaaaacggagaaaagccccccca

SEQ ID NO: 36530 - RNA, 69 nt, Homo sapiens
cgggggggaggccggggcacccacaagcgcacgaccaccaagggaggcgggacaccaggacacaggaag

SEQ ID NO: 36531 - RNA, 85 nt, Homo sapiens
accggggaaggccaagggaagaaagaagacaacaacgccacaccggaccaagaaaggcccagggaccaaagcccggacaaggccc

SEQ ID NO: 36532 - RNA, 35 nt, Homo sapiens
caggaggcgagcaacagggcggaacagaacgacag

SEQ ID NO: 36533 - RNA, 75 nt, Homo sapiens
agaggcaaaggcgggaagagggaccggggcaaccgacggcagccgggaccacgcggagcgcggaggcccgggggg

SEQ ID NO: 36534 - RNA, 72 nt, Homo sapiens
cacccgacacacagccaggcccacgggaaaagcgcacaagaacgaagaagaaacaaagcccaaagaaccccg

SEQ ID NO: 36535 - RNA, 69 nt, Homo sapiens
gggggcaggaggaggacggcagcaaccgcagcagcagcccagaacaacagcgaccccaaggaagacaag

SEQ ID NO: 36536 - RNA, 86 nt, Homo sapiens
ggcagccaaaggcaagacgaaccaaccagcacaacaggagcacagaccagcgcgcgaccggagccccacagcggcacaggccccag

SEQ ID NO: 36537 - RNA, 76 nt, Homo sapiens
gggacccaaccagggggcaagaagaaggaggggaaccggagagccagaagagccccgcacccagccgaaggcaggg

SEQ ID NO: 36538 - RNA, 85 nt, Homo sapiens
ccgccaggccccggaccgccgcggcgcccgccagccggaggaggaggcgcccgcagcaggccaagacaaggggcgcagagcgggg

SEQ ID NO: 36539 - RNA, 62 nt, Homo sapiens
cgaaggcgaacaggaacaaagagagagaaggaagagagagaagcagaggaaaccagaaggag

SEQ ID NO: 36540 - RNA, 83 nt, Homo sapiens
gaccgcgaccaccaccaccagcaccagcacaccggaccaggcagcaagaagagaggaggcaaagacgccaaccccaggaagaa

SEQ ID NO: 36541 - RNA, 67 nt, Homo sapiens
gcccagcaccggcgaagccgggccaaaggacgaagaacccacagagacaccgccaggggacagaacc

SEQ ID NO: 36542 - RNA, 82 nt, Homo sapiens
gaagacaaaggcgcggcaagcggggaagcacaggaccaaacaagacagaacgagagaaggcgaccccggagcccgaaggaag

SEQ ID NO: 36543 - RNA, 79 nt, Homo sapiens
aacaaggcagcagagcacgaacacgaaccagggagggagcagcggacaagcagccggcgaccacgagcagccgagccgg

SEQ ID NO: 36544 - RNA, 77 nt, Homo sapiens
cggaagcagccagaaacccagcaagggacgccccaaggggacgccggcaagaggaaaaaggaacagaagaacaccag

SEQ ID NO: 36545 - RNA, 58 nt, Homo sapiens
agagggaaaccagacccacagccgaaacagacagaggacaagcaacagcagccgccgg

SEQ ID NO: 36546 - RNA, 90 nt, Homo sapiens
gacggggcgcgcgcgaagcgagcgagaaggcacggagcgccgcggagcgcagaaaaacaaccaccagcgagcaaaaaggcaaagaccaag

SEQ ID NO: 36547 - RNA, 70 nt, Homo sapiens
ggcgcacccaaacaacgggcagccaaagggcaccaggacacaaacggacaaaaagacccccagcaccaaa

SEQ ID NO: 36548 - RNA, 77 nt, Homo sapiens
ccgcggcaggggcagggaggaggaagcccagaccccggggcagaagcgagcaccaccccaccccccccgcccacccg

SEQ ID NO: 36549 - RNA, 73 nt, Homo sapiens
cgaaagggcgcggcaccagcagaacccccacccagcaacccacaggggggaaagacaaggccccagcagcagg

SEQ ID NO: 36550 - RNA, 87 nt, Homo sapiens
acagcgaggcgggccccggaggcagcacgggcgaccccccggcgcagcagcacacaagggagcagaagggcagcaaaccgaagagag

SEQ ID NO: 36551 - RNA, 65 nt, Homo sapiens
gcaagaacagcacgacacagacagcccacacagcccggaaacgccgaacaaagcaagaagcgccg

SEQ ID NO: 36552 - RNA, 75 nt, Homo sapiens
caaagggacgcagccccaggagcagaacaggaaggcagagcggccggaacaaaagccggaaaaagggaaacaaac

SEQ ID NO: 36553 - RNA, 78 nt, Homo sapiens
aggaccgcggggagaccgggcacacggacggcggggagccaggaacgggggacaaggagaggcacacacacagaacca

SEQ ID NO: 36554 - RNA, 42 nt, Homo sapiens
ccccagggcaccaaggcccgcggccccccggcccccggaccc

SEQ ID NO: 36555 - RNA, 78 nt, Homo sapiens
ccaagagacgggggggaaaaacccggacggcacaccccaggaaccaggaaaggaaaaggaaaaccagagacccagaca

SEQ ID NO: 36556 - RNA, 76 nt, Homo sapiens
aagagggacaccacccaccccgagccggagccaggaccaggacgcccaaaggaaccaaaaggcccggagccagacc

SEQ ID NO: 36557 - RNA, 77 nt, Homo sapiens
acacgaagggcaggcgccccgacccagaggagcccagccaaggccggggggggcacagagccccggaagacagcccc

SEQ ID NO: 36558 - RNA, 73 nt, Homo sapiens
acccagcgggcaaggggccgggccgagccccaagcccccagcaccggaccgcggacccccggacacagaggca

SEQ ID NO: 36559 - RNA, 38 nt, Homo sapiens
gacaagccgaccaaagcagcaaggaggagagaagagaa

SEQ ID NO: 36560 - RNA, 63 nt, Homo sapiens
aaccacgagcccagccaacagcgccccggacgcaccagagccaggcgagagacggggcgccag

SEQ ID NO: 36561 - RNA, 86 nt, Homo sapiens
ggaacagggaccacgggggggaggcaagcccagagcgggcagccaccgcagccggaagcaccaggggaagacagcaagagaaccac

SEQ ID NO: 36562 - RNA, 73 nt, Homo sapiens
ccggaccagcaccccaccacgacacgggaggacgaagcaacggggcaacagaggggcacaaacgggaaaaaaa

SEQ ID NO: 36563 - RNA, 69 nt, Homo sapiens
gaccaacaaacagaagggaagcaggagaaacacaacggaacaagcagaaaaagacagcacaaagacgaa

SEQ ID NO: 36564 - RNA, 78 nt, Homo sapiens
ggaggccaaggcaaggaagagagaggagagaacacgcacaggaggaagagaaaaggacagcagaaaaaggaaacaaaa

SEQ ID NO: 36565 - RNA, 86 nt, Homo sapiens
caagcgaagggcacaaggggagcgggggcagaaaggcggcgggccggagacacaggacccaggagcgggccagcccaccgcaaaga

SEQ ID NO: 36566 - RNA, 59 nt, Homo sapiens
gcagacaaccacacccacgggcagcccagcagcccggcaagcagacagcaaccaaaccg

SEQ ID NO: 36567 - RNA, 57 nt, Homo sapiens
gccacagaaggcgcgacgccggggaagaaggaagggaagaacgcgccgaacaccaag

SEQ ID NO: 36568 - RNA, 81 nt, Homo sapiens
cggagagcccaacgggacgggcaagacgagagggcccgacggaggggaggaaaccccaacgaaacgaagacaagacgaaga

SEQ ID NO: 36569 - RNA, 86 nt, Homo sapiens
cccacacacccaggcgcggagggaagacgcccgggccaccaagcaagggaaagggagcagcaccggccacacccacagcacgaccg

SEQ ID NO: 36570 - RNA, 80 nt, Homo sapiens
ccaaccagccacagcccaccgaggcaccacagggccggcccagggagaacgcaaaaccaccacccccacaaaaaacgcag

SEQ ID NO: 36571 - RNA, 78 nt, Homo sapiens
gagggcgcggagcggggggccagccgccgaggcgaaccacggagcaggacccaggcagaggaggccggagcccaccac

SEQ ID NO: 36572 - RNA, 75 nt, Homo sapiens
ccaagccgagccccaggccccgcccaggacacaggggcccagaaccaagccgccacagggagaaaagagcagagg

SEQ ID NO: 36573 - RNA, 83 nt, Homo sapiens
aaagaacgacgaaacggagaaagggcagcaagacacgaagccgagaaagagcagcgacaacaaggaggccccggcaagagcca

SEQ ID NO: 36574 - RNA, 75 nt, Homo sapiens
gacgaagagccccgaagcgagcgagcagggggagcgacagcggccaacaggcgcaaaacagagcccgggcggagg

SEQ ID NO: 36575 - RNA, 63 nt, Homo sapiens
ccacgaaaaggagggagccaaagggacaacggcaagcggagaagagcaaggccgaaccgagag

SEQ ID NO: 36576 - RNA, 73 nt, Homo sapiens
gaccagcagcggaagacacacaccaggcacaggagaccgagaagcaaagcgccgggcaccagcaagcagggca

SEQ ID NO: 36577 - RNA, 82 nt, Homo sapiens
ggcccgaccgcaggagggagaccacagccaagagccaggacccccagaagcagaaagaaagagccgcagacgcacagcaacc

SEQ ID NO: 36578 - RNA, 69 nt, Homo sapiens
ggccaccaccggccgcccagccaggacgcgcccggagaagcaaaccagccagcacgggggcccagccag

SEQ ID NO: 36579 - RNA, 50 nt, Homo sapiens
gccggaaccgacaagacgccagaaagagggcaacggccgacgaacaccgc

SEQ ID NO: 36580 - RNA, 72 nt, Homo sapiens
cgaaacggaggcccgcacagaagccaaaaggacacccagcagacgcgcgggcaaacagacagggaaaaggac

SEQ ID NO: 36581 - RNA, 66 nt, Homo sapiens
ggggacggagccggcaaacagggcccggcagccaacaacagccagacgcggccggagcccccccag

SEQ ID NO: 36582 - RNA, 82 nt, Homo sapiens
cgcgccgagcgcacgcccgaacgcgaggccaacagccccgaaccagaggaccggcaacaacccgaggacgaaccaccccgcg

SEQ ID NO: 36583 - RNA, 74 nt, Homo sapiens
cggggacaccacgcccaccccccaccgacggacggcccaccggcgccaccccagggaccgccccgagaccgccg

SEQ ID NO: 36584 - RNA, 82 nt, Homo sapiens
cgagggggggcacggaggagaccgaggggcaggaggcaaaagggaggaagaacccccacgaggaagaaaggccccggagagg

SEQ ID NO: 36585 - RNA, 76 nt, Homo sapiens
cggagccgaccaggccgacgagaggcggggagggggaagggcagggccccaggaagaaccagaaagggaacgacaa

SEQ ID NO: 36586 - RNA, 78 nt, Homo sapiens
ggcccgaggggcaccaagaccgccaacccaaccggagccccggaaggccgagaagagacaggcaggccggggcagccc

SEQ ID NO: 36587 - RNA, 74 nt, Homo sapiens
caaccacccgagcggcgcggacgaagaacccaagcaaagaggccaaccggggaaaaagccagcccggagagcgc

SEQ ID NO: 36588 - RNA, 74 nt, Homo sapiens
ggggccggacacgccgccgacaaggacgagcagaaggacgcaaaacgggagagcagagagagagcacgagcaaa

SEQ ID NO: 36589 - RNA, 79 nt, Homo sapiens
agcgcagggcgagccggagagccggccgagcgaggcggcgcggccagaagggagaagaaaggggaccggggacacaccc

SEQ ID NO: 36590 - RNA, 85 nt, Homo sapiens
cagccgcgccagcccccacggccgccccagggcaccaccagagaaggagaggccagaaagggaagaagcgcggagcacagagcac

SEQ ID NO: 36591 - RNA, 51 nt, Homo sapiens
cccagagcccagagccagcccggccacccacaaaccgagagagacaaaaca

SEQ ID NO: 36592 - RNA, 78 nt, Homo sapiens
acccagagccgccggagccagaggcggaagacacgaccagcggaccgaccagaccgcaggagaaccggacaacaacag

SEQ ID NO: 36593 - RNA, 65 nt, Homo sapiens
gaagcgacccggaggacaacggcaagcggagaagagcaaggccgaaccgagaggaagggcaacaa

SEQ ID NO: 36594 - RNA, 55 nt, Homo sapiens
gggcagaagccaaaacaggaaagacgaaagggcccccccagggacacgaggccac

SEQ ID NO: 36595 - RNA, 73 nt, Homo sapiens
acagagaaccgaccagaacgcagcaacaaaggccgcagccaagccggaacaggagcggcgagcccaaacgcaa

SEQ ID NO: 36596 - RNA, 80 nt, Homo sapiens
aaaaccaaccccccccaaaagagcagacagggaggagaagcaggaagagaggagcggagaccaagaagaacccccaggcc

SEQ ID NO: 36597 - RNA, 55 nt, Homo sapiens
ggagaaggcggaaggcccacaccccacccaggcgccgaaaagcgaaaagaaacaa

SEQ ID NO: 36598 - RNA, 77 nt, Homo sapiens
gccgcgcgaccgcccagaacgcgccggaggacgacaccaccgaggggcggcgaacaagaggcgccagcgggcgcgcc

SEQ ID NO: 36599 - RNA, 85 nt, Homo sapiens
aaggaccagaccgcgggaacagccagcaaaggcaggggaggaagccacccgaggggaaaggacaagggacagcagccgcagaaga

SEQ ID NO: 36600 - RNA, 79 nt, Homo sapiens
gggaggggaacaaggcaagaagaacagggggagccccagcagccaacagccacagagaaaaacaacgaaagacaagaag

SEQ ID NO: 36601 - RNA, 80 nt, Homo sapiens
gaggccggccgggccagcacccggccgagacggcggcagcagcggcacagaagcgcacacaacagaagagaagcaaaaag

SEQ ID NO: 36602 - RNA, 78 nt, Homo sapiens
gacaccaccgaggccacgggacccggccaacgacacagacagaccgaggggacgagaggaccggcacggcgccaccga

SEQ ID NO: 36603 - RNA, 78 nt, Homo sapiens
ggagaaggaccaagaaccaggcaaaagggaaagcaaggggaagggcccaagaagacaccccaccagaaaccgaacgac

SEQ ID NO: 36604 - RNA, 69 nt, Homo sapiens
gacgagcagaggagaccgaacgggggagcaaagggggagcgccaggagagaagagacccggccaaaaca

SEQ ID NO: 36605 - RNA, 69 nt, Homo sapiens
agcagggcacgagacggacaaacaagaccaccagcccacaccaccagaccaaaccagcgccacccaaca

SEQ ID NO: 36606 - RNA, 62 nt, Homo sapiens
gcaggacgcagaagacgcagggccaaggacacacccgcgcccccccgaccagggcaagccag

SEQ ID NO: 36607 - RNA, 79 nt, Homo sapiens
cccccacccaggccccgcaagaagggccgggggcgagccggagcgaccccggcagaacgagaaggaaaagcagaaaaaa

SEQ ID NO: 36608 - RNA, 67 nt, Homo sapiens
ccaagcacggaccaaaaaaagcgcccaggaagcggaaaaacaaaagagccgcccaacgacgccgaca

SEQ ID NO: 36609 - RNA, 55 nt, Homo sapiens
gagaaggcaaagagccagcccgaaggagcaacaggcgaaaaccgagacagcaccg

SEQ ID NO: 36610 - RNA, 73 nt, Homo sapiens
ggcggacaagagaagccgccagaagaacggacggggcggaggagaagagacccaggaaggcagcggccccaac

SEQ ID NO: 36611 - RNA, 62 nt, Homo sapiens
accccagagcgacagcccgggacaccaagaaagaacacaggagaacccagcgacgacagaag

SEQ ID NO: 36612 - RNA, 77 nt, Homo sapiens
gcgccccgccaggcgccccggcgcccacccgccgcccgccaggcaaacggcagaaggaccaaaggggaaaaccagag

SEQ ID NO: 36613 - RNA, 50 nt, Homo sapiens
gaaaaaacgggcggggggaacagacagccccagggcagcccgagccgaca

SEQ ID NO: 36614 - RNA, 80 nt, Homo sapiens
gacggaggagcgaccaccgcccggcgaagaagaggagcaccaagggcgggaagagaccgcccaggagccgccaaggaacc

SEQ ID NO: 36615 - RNA, 79 nt, Homo sapiens
ggggaccaaggccgagagccggaacaaacgagggcccgggaggaccgacgcagccaggagaaaaccggaagagaaaggc

SEQ ID NO: 36616 - RNA, 67 nt, Homo sapiens
cgcgggaccaccggcaccaccaaaggggcacccgaggaggaagagggcagggcccacggaaagaagg

SEQ ID NO: 36617 - RNA, 71 nt, Homo sapiens
cggccccagcgcaggaaggggagccgcacgacagcaaagcaagccaagagggcccagccaagaagcacggc

SEQ ID NO: 36618 - RNA, 60 nt, Homo sapiens
ggacccagcccaggcggcgcggacggggcggagagacaacacagacgaccaggaaagcaa

SEQ ID NO: 36619 - RNA, 85 nt, Homo sapiens
cccgcaccagcggggcgagagggggcaggggcagccgccagcccaaacaggcggcacagggggaacaccaggcaggaaaacaagc

SEQ ID NO: 36620 - RNA, 85 nt, Homo sapiens
gccgaccgccgcccgccacacccgccgccaggcgaggcccgggcagcgggccagcgggaggggccccggcccgcccagggagccc

SEQ ID NO: 36621 - RNA, 57 nt, Homo sapiens
aggaggaagacgaacgaacagccagaagaaaagggcaggccacaagaaaagagcaag

SEQ ID NO: 36622 - RNA, 55 nt, Homo sapiens
agcaccaacccgggaacaaccccaagacgggaacggagccccccgcacaggacaa

SEQ ID NO: 36623 - RNA, 72 nt, Homo sapiens
gggacgggaaccccgagagaagaggccaacaagccgaggagaggcccacccgccaagcgcacaacccccagg

SEQ ID NO: 36624 - RNA, 71 nt, Homo sapiens
agggcccaagcggcacgggggggggaaacacaccaccgcgaggccacgagagaagcagccgccggcacaag

SEQ ID NO: 36625 - RNA, 81 nt, Homo sapiens
gcgcgcgagggccggggcgggcgccgcgggacccccgggccaggacccgggaggcccccgggagaagaagacgaggaccag

SEQ ID NO: 36626 - RNA, 59 nt, Homo sapiens
caaggcgggaaaccacaggacggggcgccagggagcagaagagaaggcagaaacaaaaa

SEQ ID NO: 36627 - RNA, 84 nt, Homo sapiens
cgggggcaagagaaagcccaccacaagaagcggaagagagggggcgcccagcgccaacaccaaggaaacggcgcccacagagga

SEQ ID NO: 36628 - RNA, 53 nt, Homo sapiens
gcacagggaagcaaggccagcaaacagcagcaggcgcaaaaacgaacccacaa

SEQ ID NO: 36629 - RNA, 62 nt, Homo sapiens
aaggaacgcccccacccaacaccgaggcggccagacagagaagccaccaaacccagagggcc

SEQ ID NO: 36630 - RNA, 77 nt, Homo sapiens
ccgacagaacacgggcggaggacgggaagcaacaagccagagacgcaccccaccaggggcgaccagcaaggaccgaa

SEQ ID NO: 36631 - RNA, 81 nt, Homo sapiens
accacagggggcaccggaggccgcaaagccccaagaggaccaccagggagagaagagacgaggaggaggggagaccgcggc

SEQ ID NO: 36632 - RNA, 65 nt, Homo sapiens
gaccgggagaagagaggaaaaccacacagcaagaagagacaaaccgccccggaaagccacacccg

SEQ ID NO: 36633 - RNA, 79 nt, Homo sapiens
gcccggccagccacggccacggcaacgagcggggcaaccacgcgagacgccaccagcacccagagggccacacgggcag

SEQ ID NO: 36634 - RNA, 39 nt, Homo sapiens
caaagagaacaaccccgaagaaggcggaggcggggggac

SEQ ID NO: 36635 - RNA, 94 nt, Homo sapiens
gggaccccggagcccagaagacagagggcgagccccgacaagggaccgggcgggccccgcaggaaacccccaccggcccacacagacgcagcca

SEQ ID NO: 36636 - RNA, 72 nt, Homo sapiens
gagcaacgccggaagcaacagaaacggagacgcacgacccagccacagcgggccacacggcaagcagggcca

SEQ ID NO: 36637 - RNA, 74 nt, Homo sapiens
acagagcaacacaccaacccgggccggcccagggagaacgcaaaaccaccacccccacaaaaaacgcagggaga

SEQ ID NO: 36638 - RNA, 89 nt, Homo sapiens
gcgcagcaccacgccggggcggcggggacgagcgggcaaaggcgacgcccacccaggcagcacagccagcccacaggagcccagcagaa

SEQ ID NO: 36639 - RNA, 81 nt, Homo sapiens
ggcggcagcggcggcggcgcccgcgggggaaaaaggcggacgaagaggaggagaacccagccgggcaccagagggagggga

SEQ ID NO: 36640 - RNA, 72 nt, Homo sapiens
ccagaacacaaccccgggccgcccccccaaccgaaggcgcaagaaagagcggcgccaccccgggagaaggcg

SEQ ID NO: 36641 - RNA, 55 nt, Homo sapiens
aacagacaagcgaccacaggaaaagccaagaaagacccaaaagaccccagaccag

SEQ ID NO: 36642 - RNA, 81 nt, Homo sapiens
ccggcggggcgcgccaaggacacggcacaccgaccgacgcccgccagggccaccagggaccggccaaccccaccacgggga

SEQ ID NO: 36643 - RNA, 50 nt, Homo sapiens
cgccggcccagcaccccgagaaccgcaggagccagaggacaaggcacgag

SEQ ID NO: 36644 - RNA, 78 nt, Homo sapiens
gcagcggagcgcagaagcggcccggccgcccgccagcggccaagaagcccgcccaggccaagggccgccacaacaaca

SEQ ID NO: 36645 - RNA, 84 nt, Homo sapiens
cagggaaggaggccgagccgggaccaggcccgggggcggcggccacgccaaggacggagcaaccgagggacgagacaagccgcg

SEQ ID NO: 36646 - RNA, 109 nt, Homo sapiens
aaacggcaccacacccagcaaggaccccggccgggcaccaacgcaagagaacaacaagaccgggggcagcccacaaaaggagaaagacccgagcaaagaaacgaagaca

SEQ ID NO: 36647 - RNA, 72 nt, Homo sapiens
gcccaggggcgcccagcacggaccagagaagacacacaacaaccccacggagccccaccggaaggagaaaac

SEQ ID NO: 36648 - RNA, 70 nt, Homo sapiens
agggccaaagaagggagagagggcccgagggcaggacagcaggcaccggcgaagcacagagaggcgcgag

SEQ ID NO: 36649 - RNA, 84 nt, Homo sapiens
ggcggcgacagcggcggccgcggcgcgccccgcagaggcccccgacggagacaaggacgcggcggagaaaccaccacaaacacg

SEQ ID NO: 36650 - RNA, 68 nt, Homo sapiens
ccaagccaaccagccagcaggccgggcgggggaacagcacggcaggcaggcccgcagcccgaaaacca

SEQ ID NO: 36651 - RNA, 70 nt, Homo sapiens
gccacgcggccgcggaggaaagccagacaccacccgagccaggacaaaaccaggcagaaccaacacgaac

SEQ ID NO: 36652 - RNA, 76 nt, Homo sapiens
aaagaccacaccggcaggacaagagagggggacggaagacaagcaaaggccccagcggccaccaacaccggcggcc

SEQ ID NO: 36653 - RNA, 73 nt, Homo sapiens
agaacggagaaacacacgaagaagaagaccggaacaccagaaaccaaaagacacgaaggggggaggccgaggg

SEQ ID NO: 36654 - RNA, 56 nt, Homo sapiens
ccaacagcagcgagaagcaaacaaagcagagcccacagacaaggccaaaggcaaag

SEQ ID NO: 36655 - RNA, 81 nt, Homo sapiens
gcagacgcagccgagacaccagcccgaaacaccaccaagggggcacccgaggaggaagagggcagggcccacggaaagaag

SEQ ID NO: 36656 - RNA, 68 nt, Homo sapiens
cacagagaccccaaagacaaaccaggacccagggagcagcagggaagacaggaagcgaggagaccaag

SEQ ID NO: 36657 - RNA, 75 nt, Homo sapiens
cccaagccaggcccaagagccgaaccagcacggccagccgacgaccccagcccgggggcggcgaggaggagcggg

SEQ ID NO: 36658 - RNA, 78 nt, Homo sapiens
ggacagggagaaagggccccaagagaaccgacagaagccaggaccccagagagggccaagcccaagaacaaaaaccga

SEQ ID NO: 36659 - RNA, 88 nt, Homo sapiens
ggccggacgggaagaggacgcagggacgaacagcggggacgccccagcagaccgcccaggagaggaaagcaggaggaaagaccaccca

SEQ ID NO: 36660 - RNA, 59 nt, Homo sapiens
ccggccagcacccaccgagaaggccagcagcgcacaggagcgagagacccaccccaccc

SEQ ID NO: 36661 - RNA, 74 nt, Homo sapiens
gacaaagagccacccccagcaggacgaaagagaggcccacaacaggcagcaaagcaaaagagcaggacaaccca

SEQ ID NO: 36662 - RNA, 81 nt, Homo sapiens
ggcagacacacgaggcccacgcaccgcggcgcgccgcgaaccaggacccaaggccagccagccccaggcaccagcggacag

SEQ ID NO: 36663 - RNA, 89 nt, Homo sapiens
ggcgaagccccggagaaccacccggaggagacggggcagacaacggagcccgggggaggaaaaagcggccaacagggggacgggaaaga

SEQ ID NO: 36664 - RNA, 88 nt, Homo sapiens
cgagcacagagcccgccgccgaccgccgcccgccacacccgccgccaggccaagacaaggggcgcagagcggggggacaggcgcaaga

SEQ ID NO: 36665 - RNA, 80 nt, Homo sapiens
cccggcggcagcggcgcggagaaggcgagcgaaggcaagagccgcagagaaagcgcgcgacggacacccaaggaggacag

SEQ ID NO: 36666 - RNA, 82 nt, Homo sapiens
ggaaccgaaaaaagcagggaagaaggaaaacaacggagcacgcaaagcaagccggcaacgggacaagcaggacgggagagca

SEQ ID NO: 36667 - RNA, 79 nt, Homo sapiens
aaaaggggggaaggcacacaacgacccggacagcgaccgcaagaggcggcagacggagggaggaaaaagcgccaccccg

SEQ ID NO: 36668 - RNA, 65 nt, Homo sapiens
ggaggcgaagacacaaagcggcaagcagaaccagcaaacggcaagagcaccaacaagacaaggca

SEQ ID NO: 36669 - RNA, 67 nt, Homo sapiens
aacgcggcgacccgaggaggaaggcccgcgggcccaaggaccgcgagagggcgggaagagaagcaaa

SEQ ID NO: 36670 - RNA, 69 nt, Homo sapiens
ggggggagagccacaggcaaaaggcccagcaggaacacagagccagagaaaaaaaacacagaaaggccc

SEQ ID NO: 36671 - RNA, 84 nt, Homo sapiens
cggcgccggagacgagccgcccgggcgcgccaggcacagccaagagcggaccggcagcggccagcgcagcggccggagcagaca

SEQ ID NO: 36672 - RNA, 77 nt, Homo sapiens
gcggagggggccggcgccgacggcggcacggcggcagccaccggacagccaccggaggaggcgcccaccccacccca

SEQ ID NO: 36673 - RNA, 74 nt, Homo sapiens
gacgacaagcacacacaggcgcgaaacggaaaaagagccagagcagccagaccaaggcacgaaaagaagcaaga

SEQ ID NO: 36674 - RNA, 71 nt, Homo sapiens
gcaaccaggcagacccgaccccagcgggcagccacacaaaagggaagcgggcagaaccgagaaaaacagca

SEQ ID NO: 36675 - RNA, 80 nt, Homo sapiens
cgccacccaggagccacaaggcccagaccaggcacagcaaacaccccccaaggagcaggccaccagcaccacgccagcca

SEQ ID NO: 36676 - RNA, 88 nt, Homo sapiens
caggaagcaccccccaaagccagcacccacaggagcgagcacacagcaacaacgaaccagggccagaagagaccgagagggacgccgc

SEQ ID NO: 36677 - RNA, 55 nt, Homo sapiens
gcgacgcaggcgcacggagacccgccggcaagaccacaagcgaaccaaaggcaga

SEQ ID NO: 36678 - RNA, 54 nt, Homo sapiens
cgcaggaagaccaggaccgaagcgccacggggaaaaagcgggaccgcagccagc

SEQ ID NO: 36679 - RNA, 79 nt, Homo sapiens
agacagccacaccgagcgcagaagccagcgagaagaccgagaggccgcgacccaacaccgcaacgcgccgcagggacca

SEQ ID NO: 36680 - RNA, 76 nt, Homo sapiens
gccgccaccccgcggccgcacccccgccccaggaccaaagggacggcagcagacagcaccacaaccgaaaggcacg

SEQ ID NO: 36681 - RNA, 86 nt, Homo sapiens
gaggcggcagcaggcggggagcaggccacagaacgcaggcaacgacgcacacgcagggacggagggagcggccacggccgcccacc

SEQ ID NO: 36682 - RNA, 53 nt, Homo sapiens
gaccacccagaggagcaacggggcccccaaagggaagccaaacacaaaggaag

SEQ ID NO: 36683 - RNA, 83 nt, Homo sapiens
agaagccccccaccaccccccaagccccaccgaggaagaaaagaaaggagccgaagaaccacggcggagggaagcaggccagc

SEQ ID NO: 36684 - RNA, 48 nt, Homo sapiens
aacagaaaaagcacgaggaaacaaaaggagagaaccaggagaccgaag

SEQ ID NO: 36685 - RNA, 83 nt, Homo sapiens
gcgcgcaacgggcaggcgcaggcagccgaggacccgcggccccgccccggccggccggcaggacagagcgggagccaccagcg

SEQ ID NO: 36686 - RNA, 71 nt, Homo sapiens
cgcggacgcgcgagaagcagaccgggacgccagaacgccccccaggcccgaggaggagaggcccacgaggg

SEQ ID NO: 36687 - RNA, 72 nt, Homo sapiens
aggaccacaccacaggacccgcggcagcagacgaaaaggggaaaggagaaagaagggagaagaaacagagaa

SEQ ID NO: 36688 - RNA, 76 nt, Homo sapiens
agacaggagggaggaacagacaccgagccagcaagcccccaacgaaggagcgacgaaaggaagaagccaggggcgc

SEQ ID NO: 36689 - RNA, 110 nt, Homo sapiens
caccagccgacagagaggagcaccgcaaaggcaccggccgagccacggagcaaggggccaggggaggacacaaccccagagagcggaacgagcaacaaacagaggaacaa

SEQ ID NO: 36690 - RNA, 64 nt, Homo sapiens
ccagcacccagagacgcaccgcggaccaccacgcccgaaaaccagcccaggcccacaggggccc

SEQ ID NO: 36691 - RNA, 83 nt, Homo sapiens
cgagcaaagaagagcccgaacaaacaaacacccagaaacaagaggacgagcagggggaggaacaaagcgaggaagggaaggga

SEQ ID NO: 36692 - RNA, 77 nt, Homo sapiens
ccgacagccagggcggaagcccgccccagagcagggaacacaggccgagacaaagccagaaaacagcggcaccggag

SEQ ID NO: 36693 - RNA, 72 nt, Homo sapiens
caaggagaaccaggcgaccgggacacaaccgagcaaagccaaggggaagcagaccaagaagacagaaggggc

SEQ ID NO: 36694 - RNA, 59 nt, Homo sapiens
cccgaaacggaggaagaacgccgccaccagccaccaccaaggggggagaaaaggccaag

SEQ ID NO: 36695 - RNA, 76 nt, Homo sapiens
cagaggaaggagacaagaggagaaggagcggccgggaacggccaaaaaagcaaagcgacggaagaccgaaccaagc

SEQ ID NO: 36696 - RNA, 69 nt, Homo sapiens
ccacccggaccaccaccaggggccgcggagaagccccagcagacaagccccaaggcacgccccgaaccc

SEQ ID NO: 36697 - RNA, 81 nt, Homo sapiens
gagccaggaacgcgcagccccgagcgccgcggacgcgcacgagggacggggaaaggcgccggaccgaaggcgcgaccacga

SEQ ID NO: 36698 - RNA, 68 nt, Homo sapiens
gacagccggaagcaaggcagaagaggccgagccaccaacagagccaggagccaggaagcagcagccac

SEQ ID NO: 36699 - RNA, 83 nt, Homo sapiens
agaaggagcaaaaggcggacaggcaggacgggccaaaaggaagcccacgacaagagaccaggcaagaggggagaagcgcgaag

SEQ ID NO: 36700 - RNA, 73 nt, Homo sapiens
aaagacggacagcccacgggaacaagaggggacagaaagaaacggacaggcaggggacccacagccacccacc

SEQ ID NO: 36701 - RNA, 66 nt, Homo sapiens
ggacgagagcccaacagacgcaggagcgagaacccgagcagcgccagagcaacacaccgcgcccca

SEQ ID NO: 36702 - RNA, 78 nt, Homo sapiens
gcgagagaggagagggcagacggacaagagcgcggaacaggacgccccgaagggagacggggggcggccccggacacg

SEQ ID NO: 36703 - RNA, 50 nt, Homo sapiens
agggcggacagcggggcccgcggaaaacagacagaggcacaaaaggagaa

SEQ ID NO: 36704 - RNA, 90 nt, Homo sapiens
gaggaggcgagcagccgggagacaccgccaccgccaggccgaaacgcggagcggccaccggacgcccggagcaggagcagcagcagccgc

SEQ ID NO: 36705 - RNA, 79 nt, Homo sapiens
ggcaacggcccagaagaaggaacagaccaacggacaagggcgcaaaccccggccaaccggcccagacagaggcccgaga

SEQ ID NO: 36706 - RNA, 58 nt, Homo sapiens
aaaagcgaaaagaaacagaggggacagcccaccacaagcaggccccaagcccaacaga

SEQ ID NO: 36707 - RNA, 81 nt, Homo sapiens
cccccagaagagcggagagacgaaagaggggacggaaagagagccgcagcgcagaacaagggaaaaaagggcaaaaagggc

SEQ ID NO: 36708 - RNA, 39 nt, Homo sapiens
ccgaagggccgagagaggccgcaacagccgggccacgcc

SEQ ID NO: 36709 - RNA, 77 nt, Homo sapiens
gggccgacggcgacagacaagaagacgcacgagaacagggaagacgggaaagcggaagacccaggccaaaagaagaa

SEQ ID NO: 36710 - RNA, 76 nt, Homo sapiens
aacccgacccgacgagagccacagggagaagcagacacacagcgcgagacggcgacgacgcaccagccgacccgac

SEQ ID NO: 36711 - RNA, 70 nt, Homo sapiens
caccaacccagaagaagaacaaccagaagaaggcgaaaccgagggaggaagagagaaggcagaaacaaaa

SEQ ID NO: 36712 - RNA, 75 nt, Homo sapiens
agggggacgccccggcaacccaggggcggccacgaccaccaggcgccaggggagcgaacgaagaaaggccaagag

SEQ ID NO: 36713 - RNA, 80 nt, Homo sapiens
ccccccaagaagggcaaagccgccgagccccgaagggggcgcacccccgaccggaaacagggcggggggaaaagcggcgc

SEQ ID NO: 36714 - RNA, 80 nt, Homo sapiens
gaagaaagcaagacccaggacaccccgaagccgagaaaggacaccagaggaccagaacccacgagaaacagacgagccaa

SEQ ID NO: 36715 - RNA, 78 nt, Homo sapiens
gacaagagagccgaggcgcccccaccacccacaagaacaaggcccaggccaaggggaacgaggcaggaagaccggcac

SEQ ID NO: 36716 - RNA, 61 nt, Homo sapiens
aggaaaggggccggcacgccgccaggggcacagaagggaccacaaacgagggccaagagga

SEQ ID NO: 36717 - RNA, 73 nt, Homo sapiens
ccagaaggagagagagacagagggaaccggcagggcaagcggcgacacacgacgggggggagaaggaacaagc

SEQ ID NO: 36718 - RNA, 81 nt, Homo sapiens
cgacccaaagcgcggaaagggcggagccacggcccaggacgccaagaggccgaggagaggcccccagacacgggaaagcac

SEQ ID NO: 36719 - RNA, 71 nt, Homo sapiens
aggagaccgagcgcaagagacaggaggcaaggaccagaagaagcacaagggccagaggaagagaaacagag

SEQ ID NO: 36720 - RNA, 72 nt, Homo sapiens
acacaaggcccgaggagaggagcaccaacgggggaagaccgcccagacccacaggaccgcgaacaaggaggc

SEQ ID NO: 36721 - RNA, 65 nt, Homo sapiens
ccagagaaaggagcacgaaggaacaaagccacgaaaaccaaaggagaggggcaacggacacagga

SEQ ID NO: 36722 - RNA, 79 nt, Homo sapiens
gaggcgaagcagcacgaccagccaagcgccggagcaaggaaggaggaccccccccagaaaaccaagcgaaaccccaaag

SEQ ID NO: 36723 - RNA, 44 nt, Homo sapiens
cgccgcgagcagccaggcggcgggccagcagccacccacgcacc

SEQ ID NO: 36724 - RNA, 86 nt, Homo sapiens
cgggacggcggccagaggcgcggggcgccgccgcgcagcgccgcgcgggcaccgagagggcgcgagggcgcgcacaaccggcccag

SEQ ID NO: 36725 - RNA, 71 nt, Homo sapiens
cccgcagcgcagcaccaggcacaccaccgaacccaccccagccacaccaccacaagcgggccgccaacccc

SEQ ID NO: 36726 - RNA, 78 nt, Homo sapiens
acaaaggagaagaaggaaggggaagaggcagagaacaggcgaacgggcagcaagcaaaagggggaacgaaaaggaagc

SEQ ID NO: 36727 - RNA, 39 nt, Homo sapiens
agccacggaggcggagagaggggagaaccgccagcgacg

SEQ ID NO: 36728 - RNA, 59 nt, Homo sapiens
gcgcaaccggcacaacaggcagagggacagaccagccaccacgcccgcccacacagcgc

SEQ ID NO: 36729 - RNA, 53 nt, Homo sapiens
ccacggccccgccagcaaggcggcgcgcccaggagcgagacgacgggaccgaa

SEQ ID NO: 36730 - RNA, 83 nt, Homo sapiens
aggcccccgggcaagaggcgcaaacaagccaacccaggaggaaaaacggcagaggaggaaaacgagagggcaacggcaacaaa

SEQ ID NO: 36731 - RNA, 69 nt, Homo sapiens
gaaccagcagccacgacgcaaaggagcaaagaagaacgaggcagcacaacaaaaacaaagaaaacgaaa

SEQ ID NO: 36732 - RNA, 41 nt, Homo sapiens
ccaagaaggagcgcgacaaggcagccccacccacgcacggg

SEQ ID NO: 36733 - RNA, 39 nt, Homo sapiens
gaacacacacaggaggaaggacgaagaagcgaagaaaaa

SEQ ID NO: 36734 - RNA, 71 nt, Homo sapiens
gggaccaagcccaaagaggagaaagagccaaggccacgagagcgcaccacaagacaaacgccacaccgccc

SEQ ID NO: 36735 - RNA, 69 nt, Homo sapiens
ggacagcgggacaaggagaggaggaccacgcccgaaacgaacgcccaagcaaaaacagggacagacaaa

SEQ ID NO: 36736 - RNA, 42 nt, Homo sapiens
gcgcgggcgcggggccgaaccccgggaaccaaacaagacaaa

SEQ ID NO: 36737 - RNA, 69 nt, Homo sapiens
cccaggaggaagagcagcagcagcggcacaacaccgacacgggcagcaccgagacggcacgcaacccca

SEQ ID NO: 36738 - RNA, 74 nt, Homo sapiens
aagacgagcgcagaccaccaaacccaggaggagacccccggaaaaccccccccgggggcggggaagagacacag

SEQ ID NO: 36739 - RNA, 57 nt, Homo sapiens
acacacacacggcacgccgaacacgacagagcgggagccaccagcgccaaagggaag

SEQ ID NO: 36740 - RNA, 82 nt, Homo sapiens
cggcacgcaccacggccacccggccggccgaggccagcagcgaaccggagcagcggcacaaacaccaagagaagcgcagcag

SEQ ID NO: 36741 - RNA, 75 nt, Homo sapiens
ccaggccagagaaggggaaggaggggcagcggacaacccccaagaaagggagcccagaacgaaacaacccagcag

SEQ ID NO: 36742 - RNA, 72 nt, Homo sapiens
gccaagcagccagcccaggagaggaaggggagaagaagcaccaacagaacagaccagaacggccgcagagaa

SEQ ID NO: 36743 - RNA, 70 nt, Homo sapiens
aaaggcgaagcgacaggcagcaacgagacgacgggaccgaaggaccccgccagagacaaccgagcgccag

SEQ ID NO: 36744 - RNA, 84 nt, Homo sapiens
cgaagcccccgccgccgcgagaaggaaagccaggccagaagaaggaaggccggggaggggacaggaaagacacaccaccccacc

SEQ ID NO: 36745 - RNA, 67 nt, Homo sapiens
ccgggggggaccggaaggaagcaccaggaggggaacaggacagcacaaaagcgggaaggccccgaag

SEQ ID NO: 36746 - RNA, 70 nt, Homo sapiens
caccggaccaacggaaaagagcaaagcagcagaagggccagcagacagcaggcaaggagacagacaggaa

SEQ ID NO: 36747 - RNA, 64 nt, Homo sapiens
cgcgcacgcccacgagaaagacggggacccccaggaaccaccggacaaacaccggaaaccacaa

SEQ ID NO: 36748 - RNA, 73 nt, Homo sapiens
cccggcgggccagcggcggagccgggagggagacggcccggagagcggcgcgcagggcgggcacaggaacggc

SEQ ID NO: 36749 - RNA, 73 nt, Homo sapiens
gccacggcaaggcaagaacgggcccaggccaggacggcggaaggaggagcccacggcagccagcggaagagag

SEQ ID NO: 36750 - RNA, 78 nt, Homo sapiens
gcgcacccgggcggccggaagaaccaggagcggacccgcgaggggcagaggcgagaccgaggagccaccgcgccaggc

SEQ ID NO: 36751 - RNA, 75 nt, Homo sapiens
gaccgaacaaagacaaggcacacgccgagcgaagggcgccggggagcaaagaagcgacggaacccaaggagagca

SEQ ID NO: 36752 - RNA, 67 nt, Homo sapiens
caggccgcgaggacccacaagaaccgagaggaccaacaccgcagacgaagaagcgagagaaaacgcc

SEQ ID NO: 36753 - RNA, 58 nt, Homo sapiens
ggaagccaagcaaacgcagaaggacgcccacgagcaaccaagaaaccccacgaaacag

SEQ ID NO: 36754 - RNA, 51 nt, Homo sapiens
cgaagacgcacgccaagacaggggagcaccccccagacggcgccagccgac

SEQ ID NO: 36755 - RNA, 57 nt, Homo sapiens
gagcccggcgccggcaggccccgggccggagacagacccagcacggacccccccccc

SEQ ID NO: 36756 - RNA, 78 nt, Homo sapiens
gcagccagaaggcaggccgacagcccagagaaccggaaggcacagggagagcaacaagccccggccccagagccagcc

SEQ ID NO: 36757 - RNA, 79 nt, Homo sapiens
cagccgagcgcgccgagacccccagggcggccggggaacacccaggcaggccgaagccggcagcaaggcgcggcgaggc

SEQ ID NO: 36758 - RNA, 85 nt, Homo sapiens
ggcagcgacaggacgggaacgggccgggggaccccacgccggagacagggcgcagccagaaaacccacagagggaagccgcccac

SEQ ID NO: 36759 - RNA, 80 nt, Homo sapiens
gcagggaacgcccgaccagacaacaaggagggcgagcaaggggagccagggagccgcacaaacacgcagaggcaagaaga

SEQ ID NO: 36760 - RNA, 56 nt, Homo sapiens
aagacagcgcccgcccaacacccagcagccagggaaccccagacagggggcaggcc

SEQ ID NO: 36761 - RNA, 51 nt, Homo sapiens
caaaaaccagcgcggaccgaccacacagccagaaggacccgaagacaaaac

SEQ ID NO: 36762 - RNA, 78 nt, Homo sapiens
ccggagggaagcgcccggggccggccgccgcgggaccgaggaaaagccgcaccagggaagcacagcacagcagaagca

SEQ ID NO: 36763 - RNA, 71 nt, Homo sapiens
gagagagacgccagggcaagaccgggaagaaggcacagagacaaaaccgaacaaaaagacaccacacgcaa

SEQ ID NO: 36764 - RNA, 75 nt, Homo sapiens
gcagcgggaggagccgggagcaaccacagaccagccagagagccaaggcacggcaaccaaacaagcaggaacagc

SEQ ID NO: 36765 - RNA, 64 nt, Homo sapiens
cgcagggcgcccccggcgacgaagcagaaagggaacaagaagacaaaagcaagagaaaggaccc

SEQ ID NO: 36766 - RNA, 69 nt, Homo sapiens
gagcgagcaacgacaaacaccagccggccacacacggcacaagggaagagaaaagacacagggacaaga

SEQ ID NO: 36767 - RNA, 74 nt, Homo sapiens
ggcaccggaacacgaccccgcacaccgcacgagcggggaaagccacgggaagaccacgaaaacacccagaaggc

SEQ ID NO: 36768 - RNA, 37 nt, Homo sapiens
gacggcagacacccagcagcaagcacaaccaagcaga

SEQ ID NO: 36769 - RNA, 60 nt, Homo sapiens
ccacgcacaggcacacaaggccggcccccagcagggaccgaaacaacacgaagcgaaacc

SEQ ID NO: 36770 - RNA, 77 nt, Homo sapiens
acgcagagaacaaacaccacaaggcaaccagcaaacaggagaaagagcgcccaagacacccagccagaaagggcaga

SEQ ID NO: 36771 - RNA, 80 nt, Homo sapiens
cgacagcaggcaagagcccaggccaggacagcagacaagggggcagacacccaccggcgaggagacaagacgagggagag

SEQ ID NO: 36772 - RNA, 79 nt, Homo sapiens
agggaagcgcccggccggaggcaggggaaagcgagagccgcggcagcccaagcgaacaccgaagggagagcaagccggc

SEQ ID NO: 36773 - RNA, 76 nt, Homo sapiens
ccgagaagcgagagaaagagccccgcaccacaacggaaaccccggaggggaccaaagcaggaagcaggggagccac

SEQ ID NO: 36774 - RNA, 67 nt, Homo sapiens
ggcagccacaggccaggggagcaagaaggagaggaacgaccagaagccgccaggagagaacccacac

SEQ ID NO: 36775 - RNA, 37 nt, Homo sapiens
gacagccagccaccaacaaccgggcccagcaaccggc

SEQ ID NO: 36776 - RNA, 82 nt, Homo sapiens
caggcgcccgagcccaccacccagcacacgcagggaccagaagcagcagccccagaagccccgaagccggggcaccccacca

SEQ ID NO: 36777 - RNA, 70 nt, Homo sapiens
aacgccaacaacagcggacccggggcgacgccacagagcccgaccggcccacagccacccgacggccaca

SEQ ID NO: 36778 - RNA, 82 nt, Homo sapiens
ggaaaaggagaaacggcggcagaccgccacgcagggaaggagggccccggagcagccacaccaccgaggccccacccagcac

SEQ ID NO: 36779 - RNA, 79 nt, Homo sapiens
acgcgacaaaggagagaaacagccaaaacagcacaacagcgcggcaggaccacaccccaagccaagcgggcaccaacca

SEQ ID NO: 36780 - RNA, 79 nt, Homo sapiens
gacagccaacaacccacacgcaccccagaacagcaggacagccaaaacagagcgcgaagcgggccccgaacaggaaagg

SEQ ID NO: 36781 - RNA, 60 nt, Homo sapiens
gccgacccggcggggacagggggggcgaccgcgggaccgggcgcagacaaaacagaggag

SEQ ID NO: 36782 - RNA, 75 nt, Homo sapiens
cacggcagacacacaacccgacccgacgaacaacaggcacaaagagagaaggaacacccacagggcagacagaga

SEQ ID NO: 36783 - RNA, 73 nt, Homo sapiens
ccgagcggggggcggcggcggcggcggcagcggagagccgcccgaccaaccggcacggaaccccagagaaagg

SEQ ID NO: 36784 - RNA, 78 nt, Homo sapiens
acgcgccgagagcaaaaccgccggccggaccagaccggggggaaaggcgcccaggcggcgcgccgcagccgacccgga

SEQ ID NO: 36785 - RNA, 76 nt, Homo sapiens
gcccgcggaggagccgccgcgcagcccacgccggggccaaggacaccggagcacacggccacccggccagccccag

SEQ ID NO: 36786 - RNA, 51 nt, Homo sapiens
cgcgccgcccaggcccggaccagcggggacgagagccccggcacaaacgga

SEQ ID NO: 36787 - RNA, 79 nt, Homo sapiens
gcgggacccagcccaggcggcgcggacggggcggacagaggcacaaaaggagaaagcagaagaaacaggagaaagcaaa

SEQ ID NO: 36788 - RNA, 76 nt, Homo sapiens
agcgcgcaagaagggagcgggaagacagccaaaccaccaccagccaccacaccgcccacccaccaggcgagacgaa

SEQ ID NO: 36789 - RNA, 68 nt, Homo sapiens
aaaggagcagcccgggcaccacagaaaagaccagagaggacaaccaaaagcaccgaaccggaacaaag

SEQ ID NO: 36790 - RNA, 73 nt, Homo sapiens
accggcacccagggggggggaaaaacaagcgaacggaaaagaacgacacggccggccccaccagcaccgggag

SEQ ID NO: 36791 - RNA, 77 nt, Homo sapiens
gccacaggaggcggcgggccccgcccgccgaagggggagccaaccaaggagagcgaaggagacccacgggagcccac

SEQ ID NO: 36792 - RNA, 80 nt, Homo sapiens
ccacaaggggaggacaaccgcccgggaccaggggcagccagggggggcgaggaaccgcggggcggcaggcccgggggagg

SEQ ID NO: 36793 - RNA, 76 nt, Homo sapiens
ccgcaccggagagggacaagaaaagcaacaagaaggaggaaagaagagacaccggaaagccaacccggggcaacac

SEQ ID NO: 36794 - RNA, 42 nt, Homo sapiens
cacagggccggccggaacaggaccggcacggagagggcgccc

SEQ ID NO: 36795 - RNA, 116 nt, Homo sapiens
gaggaaccaaaaaacccaaaaaaacacgcccaccaagcccagaggagacagcacccgggacaacggcacaagcgccgcaaaaccgggggcaagagaaagcccaccacaagaagcgg

SEQ ID NO: 36796 - RNA, 76 nt, Homo sapiens
gcccagcgcaaaaacgaaacaggcacaccaaaaaggcaaggacagaacccaagcaggccggagaaaagaagagcag

SEQ ID NO: 36797 - RNA, 70 nt, Homo sapiens
ggagagggacaccggccaggagacaagcgacagagaagaagagaaccgcacgcacaggaacccggaacag

SEQ ID NO: 36798 - RNA, 76 nt, Homo sapiens
agcacacgccgccccgacgcgagggcagccccgccaggagcacaaagacaggggcggaaagcagggaaaacaccac

SEQ ID NO: 36799 - RNA, 84 nt, Homo sapiens
aaacaacaagagaaagacccaggaagcagaagaagcgaggagaagaagaggcgagcacacagagaggggaagggcagcagcagc

SEQ ID NO: 36800 - RNA, 76 nt, Homo sapiens
aacagaaggccacgcggaaacaaggcgaccccagaaagaagaaggaaccagcaaagcgccacgaagcacaagcaag

SEQ ID NO: 36801 - RNA, 73 nt, Homo sapiens
gccccggccaggaacacagacgggggcgagcggacccgcagccccaaagccccgacggcagcccaccccgagc

SEQ ID NO: 36802 - RNA, 77 nt, Homo sapiens
ccgacaggagagggcagaaaggacggacagagagccgggggagcaagaaagcaaaccaaccaaaggaaacaaagcga

SEQ ID NO: 36803 - RNA, 71 nt, Homo sapiens
aagcaccaaagacgagaaagaaacagcagcccgacaaagggaaccgacagaacggagaagcagaaacagag

SEQ ID NO: 36804 - RNA, 71 nt, Homo sapiens
gccgggacccggagcaagcaaagcgccaaaccaaggggagcgggacgggcggcgagcggaccgcgaggccc

SEQ ID NO: 36805 - RNA, 77 nt, Homo sapiens
gaggagggcgaggaaggccgccaccacggaggagggggccacagcacagcagggaaaggagaagaaggaacggcggg

SEQ ID NO: 36806 - RNA, 76 nt, Homo sapiens
aaggaccaagaaccagaacaccggaaacgccaggccacaagggagcaaacgaaaagccacgaagacgaaagagcac

SEQ ID NO: 36807 - RNA, 82 nt, Homo sapiens
ccggggcggcggaggcggcggaggccagggaggaagagcgaagagcgccaccagccaaggacagagggcaagagagacccag

SEQ ID NO: 36808 - RNA, 63 nt, Homo sapiens
cacgcccccggcagcaggggaccaggccacagcggcgggcaggcagagacgcgcgcaggccaa

SEQ ID NO: 36809 - RNA, 67 nt, Homo sapiens
aacacaagcagaaacagacaggaccacgcaagggccacgggcaaagacaccaaccgaaggaagaggc

SEQ ID NO: 36810 - RNA, 73 nt, Homo sapiens
agaccaaggggcaaggaggcggcagacgcagacaaacaaaacaagaagccgaagaagaccggggaggcgaaga

SEQ ID NO: 36811 - RNA, 86 nt, Homo sapiens
ccgcccgaccggagcaaaggggaggcgggagcaccggaggcccgaacagcagaggaaaagccggggcccccgggggaaggagggcc

SEQ ID NO: 36812 - RNA, 76 nt, Homo sapiens
acggaggcgggaaggccaccggcaggcgcacaggcccggccaggcacaagggcaccacaaagaccagaacacacaa

SEQ ID NO: 36813 - RNA, 74 nt, Homo sapiens
cgcggaaaaccgacacaacagcggcggagaaaccaccacaaacacgaggccagcaacgaccaacaagacagacc

SEQ ID NO: 36814 - RNA, 33 nt, Homo sapiens
cgcgaccgcacgaaaggcgaccaggcaccggcc

SEQ ID NO: 36815 - RNA, 73 nt, Homo sapiens
gccaccggcaggcgcacaggcccggccaggcacaagggcaccacaaagccgcagaggcagaaaacaaacagaa

SEQ ID NO: 36816 - RNA, 74 nt, Homo sapiens
gagaaggcaccgcgccgagggcggagaacggaaaagcaccaggaagcagagaggaccgcagaagggaaggagag

SEQ ID NO: 36817 - RNA, 74 nt, Homo sapiens
aagaccggaaccaggaagcagaagacgacgagaaacaaacgaccaccaaaaacgaaacgccaagagagaaacga

SEQ ID NO: 36818 - RNA, 59 nt, Homo sapiens
caaggaggcaccagacaagccaaggcaggaaaggaaagagacaaagaaaggccgacaga

SEQ ID NO: 36819 - RNA, 79 nt, Homo sapiens
gaggcccaagacccacaacaaaaggaaccaaagaaccccaaaacgaaacaagcaaacaggagaagaaggaaaaaccgaa

SEQ ID NO: 36820 - RNA, 89 nt, Homo sapiens
gcggaaaccgaaggggagccaggcggcgacagcgggaggagaaagggaagaggaagaacgcgagaaaaaaacgagcgacagagaaggcc

SEQ ID NO: 36821 - RNA, 59 nt, Homo sapiens
cacgccggagagcagaagaggagccaggaagaaaggagggccgcccccagggaacaaac

SEQ ID NO: 36822 - RNA, 88 nt, Homo sapiens
agcaacgcgcaaaagaacgaaaaccgacagaagaaacggagcacgccaaccggcaggccagaaacaggagccgacacccgcacgccag

SEQ ID NO: 36823 - RNA, 74 nt, Homo sapiens
ccaaggcacgcccagcacgacgagcaggacgcaggagccaaagggacccccccagaaaagacgagcacagggaa

SEQ ID NO: 36824 - RNA, 111 nt, Homo sapiens
caggacaaacaagcgcgccaagcaagggaggagaacccggagcagccaggcacggaggaccccccccagaaaaccaagcgaaaccccaaagggaagagacgcgaaagcacc

SEQ ID NO: 36825 - RNA, 64 nt, Homo sapiens
cacaaacgaaaaagggaggaaggaaagagaagaggagaaaagcagcccccagcagacaagccag

SEQ ID NO: 36826 - RNA, 79 nt, Homo sapiens
gaacccgcgcaaaaaggaacaagccagcacaagggacaccgaccagaccccggaaacagggaggacccagccgccggag

SEQ ID NO: 36827 - RNA, 69 nt, Homo sapiens
caaaacggaagacaggaaggcccccccagccccgcggggggacgaccaccagccaggccggggacaaac

SEQ ID NO: 36828 - RNA, 85 nt, Homo sapiens
gaggacgaagcagaaagcaaggaaacgagcagaaggccaccagcggacccccgggggccacccaaaacggccaccacgcccaaag

SEQ ID NO: 36829 - RNA, 81 nt, Homo sapiens
ccaagggaaaagcagcggccgcaaggaaagaccacagcaagaccacgcccccagccgggggaccaggccgaacgacccgga

SEQ ID NO: 36830 - RNA, 84 nt, Homo sapiens
cagacaaggagagcaacacaaggaagcaagggccaccgcccagccaaccacaggcacaggaaacccagcagcgccggacccggg

SEQ ID NO: 36831 - RNA, 40 nt, Homo sapiens
gacaggcacgcaggggcagagccaacacacagcacaacag

SEQ ID NO: 36832 - RNA, 73 nt, Homo sapiens
acgacaaagaaacaaaagaaacaagaaggagaacaaaagcaaagccccagacggacggccagcgcagaagacg

SEQ ID NO: 36833 - RNA, 98 nt, Homo sapiens
cagaacaaaagaaaaaagaggaaccaagaaacaagaccagaagagagggccggacacaagagggcaagaaaggcgcgacgggccgaaaagggacgaag

SEQ ID NO: 36834 - RNA, 80 nt, Homo sapiens
cggaggaggcgaccgcggcgcagcgacccccgccaggcaaaaggaaggaaggcccggcgggggcaacgagaaggacagcc

SEQ ID NO: 36835 - RNA, 81 nt, Homo sapiens
gaacagagaagggagccaagcggagggagaacgcaaggccggggggggcacagagccccggaagacagcccccagcgacca

SEQ ID NO: 36836 - RNA, 77 nt, Homo sapiens
ccagaacgcaaacgcagaaaccaccacccacccagccagaggaagcaaagcaccagacacaagaaggacggagaagc

SEQ ID NO: 36837 - RNA, 65 nt, Homo sapiens
gccagagcaaaaaaaccagagaagggcgccaaagaggcacagggcgcgcggaacccaaggaaagg

SEQ ID NO: 36838 - RNA, 76 nt, Homo sapiens
gcgcccaacagacgcaaaggacaaccagccaggaagggaggaacaagccaccgcacgagggcccaagacccaagga

SEQ ID NO: 36839 - RNA, 77 nt, Homo sapiens
agcccgcacgcgccacccacggagccaaccagaccaaggcagaagagcgagaagccaacggggccaaacaagagaac

SEQ ID NO: 36840 - RNA, 66 nt, Homo sapiens
ccaagggccccagcccgggcccccaacgaggcgcggggcacaagcgggccagaagcacacccgccc

SEQ ID NO: 36841 - RNA, 40 nt, Homo sapiens
ccccaggacccgccggcgcgagaaacgggccgaccaggag

SEQ ID NO: 36842 - RNA, 69 nt, Homo sapiens
ggagcacgggcagccccggacggggcaacggccccgacagcccaagacagaagccggaaagacccagag

SEQ ID NO: 36843 - RNA, 83 nt, Homo sapiens
agaggcgcacgcgagacgcagccccggccaaacggccagacgccgacgcgaccagcagagacgaggccccacagacaaaaccg

SEQ ID NO: 36844 - RNA, 72 nt, Homo sapiens
aagagagcgagcgcgggaagacagaacccggcgaccacaagaacaccaacaagagaaacggagagaagaaaa

SEQ ID NO: 36845 - RNA, 61 nt, Homo sapiens
cagggcagaccgacagcgacaggggagccgccaccaaaagcagacggaaaacccacgggga

SEQ ID NO: 36846 - RNA, 74 nt, Homo sapiens
caacaagcgaccaaggccaagagagaggggaccaccaccagaggacaaaagagccgcaagaccggggccaacca

SEQ ID NO: 36847 - RNA, 57 nt, Homo sapiens
cgcagggcgcccccgcccggacggagcccccccggcgccggcagcgcccgggagaac

SEQ ID NO: 36848 - RNA, 75 nt, Homo sapiens
agcgacaacagacaaaaacaaggccaaagacaagcagaagccagggggagaggcaccagcaacagaccaaccgca

SEQ ID NO: 36849 - RNA, 79 nt, Homo sapiens
cgagcagcgccacccagacgagcggagaaggcgcgcgcaggcaggcggaggagcaccacgcgcgcccgagcggacaaga

SEQ ID NO: 36850 - RNA, 81 nt, Homo sapiens
gcaggaggggagcagcgccgaccgccgcccggggcggggcccgccacacgaaggcacggaccaagacccaaaaaagggggg

SEQ ID NO: 36851 - RNA, 78 nt, Homo sapiens
cgcccgcgcggcgcggggaccgcggcccgcagcgcaaagcggagcccagcggccgaacaccgaaacaagaagcggaga

SEQ ID NO: 36852 - RNA, 86 nt, Homo sapiens
gagcgagcagacgcgcacaccggcgagccaagccgcagccggcaggccggggaccacgaggccccggagccagcgggggccaagac

SEQ ID NO: 36853 - RNA, 68 nt, Homo sapiens
aagaggaaccaaggaaaagaaagagacggacagggccccccggaaagacagaagggccgggcacgccc

SEQ ID NO: 36854 - RNA, 81 nt, Homo sapiens
gcgaaggccggaggagcaacggacgaggagcggaggcccccaaaacaaggaagagcccggagcaggaggagaaaggaaaca

SEQ ID NO: 36855 - RNA, 65 nt, Homo sapiens
ccgcgcccgccccggccagggccgccccgggagcccgcgagggaaagaagcccgaggaccagaag

SEQ ID NO: 36856 - RNA, 78 nt, Homo sapiens
ccaggcgcagagggggcggcgaccgagaggcgcggagccggggacgcggacacccggacgcaggcccggccaggagag

SEQ ID NO: 36857 - RNA, 55 nt, Homo sapiens
cagccacaacaccggcaggaaccaccaggacagagacggaccacaaaacccaacg

SEQ ID NO: 36858 - RNA, 109 nt, Homo sapiens
gccggcacgaggccccaaggccccgaaggcagcccaaagaaggcggcggcaggccccccgaaaaagccgaggaggagaggagaggccgagggaaccaggagcccgcgca

SEQ ID NO: 36859 - RNA, 77 nt, Homo sapiens
agcaaggcaggggccccaaaaccggaaaggacgcgaggacagcacaggagcagggagccaaccacaccagcacacaa

SEQ ID NO: 36860 - RNA, 69 nt, Homo sapiens
ggaagcacacaaggcccaggcaacaacgcccgaggcagagaacaagccgcacaggcgccacgccaggag

SEQ ID NO: 36861 - RNA, 88 nt, Homo sapiens
gcaaccagccggcccgaagaccgcagacacagaagcggcacagagaaggccaggaagacaaggcagaaaccggagaggcacaaagcca

SEQ ID NO: 36862 - RNA, 58 nt, Homo sapiens
gcagggggaggacaagcggcccacgccgaggaagaaccccgcagagcgagagcaccgg

SEQ ID NO: 36863 - RNA, 71 nt, Homo sapiens
caccacaagaccggcccaagccgagcagacggcacgaagggcggccgccgccgacaccgaaaacgagaaac

SEQ ID NO: 36864 - RNA, 79 nt, Homo sapiens
aaggggagacacaagggcacgaagggaaagggccgagaaagaagagaggaagaagaggaggaggaggaagaggaggaag

SEQ ID NO: 36865 - RNA, 78 nt, Homo sapiens
gaagcaaacaaccagcccgagcccccaaaccacagccaggagacgacaaggcgggcagggggagcggcgcggcagagc

SEQ ID NO: 36866 - RNA, 74 nt, Homo sapiens
ggggaggaggcaacgccgcgagagcagccaaagggaagcaagccggaaacaagccaaaaacaacggaaacccag

SEQ ID NO: 36867 - RNA, 84 nt, Homo sapiens
ccaccagaaaaaagagggagcggaacggaagagcagcgagaagggaggaaaaaaccagaagagcaaaacaccacaacgaaccag

SEQ ID NO: 36868 - RNA, 80 nt, Homo sapiens
cgacccacccagcaggagaacggacccggagaggacagcagcggacggccggaccaagaggcgccgccccccagcaaacg

SEQ ID NO: 36869 - RNA, 78 nt, Homo sapiens
ggacccggccccggcccacaggggggggcaaacccgagagaacggggccgaaagacaaaccgcggagaggagagaggg

SEQ ID NO: 36870 - RNA, 73 nt, Homo sapiens
ccgcgccgagcgcgcggagaaccagagaagccggggaaggcaaacagggggcaccgacccgcacgcaagaacc

SEQ ID NO: 36871 - RNA, 71 nt, Homo sapiens
cagaggagcccaccggcgcgagccggcacgaaacaaaggagcgagacagaagagaaccggaaggggaccag

SEQ ID NO: 36872 - RNA, 79 nt, Homo sapiens
ggaccaggggcccggaggagcagggcagagcacgcgcgcagcgaagcccagggaggccaccagggccggccggacgcaa

SEQ ID NO: 36873 - RNA, 72 nt, Homo sapiens
agcaccagaccaaaacaaggccaaacgcagaagagcagcacaggaagaacaacacacgcaggagaaacccag

SEQ ID NO: 36874 - RNA, 69 nt, Homo sapiens
cggggaagcgaggcaaagcggggaagcagcaagcagacgaacaaggaaaagggggcggcgcaaccggca

SEQ ID NO: 36875 - RNA, 70 nt, Homo sapiens
agcaccagacgagcaaaaccccagccacgagggaaagaagaaagcaccccgcaaaagaagggaaagaacc

SEQ ID NO: 36876 - RNA, 78 nt, Homo sapiens
acaggcggcgcgcgcggcgcgggacgcgcgcgggcacccacggagccccggggcggggcccccggagggccacaagcc

SEQ ID NO: 36877 - RNA, 73 nt, Homo sapiens
aagacaaagagaggagccgaaggagaagcagagacgaagaggagcagaaccagaagggacacacaggacggca

SEQ ID NO: 36878 - RNA, 76 nt, Homo sapiens
acggccggcaagcacccgggacccacccacagggacccagccagggcgagggggaaaaaccgaagcgagcggggac

SEQ ID NO: 36879 - RNA, 73 nt, Homo sapiens
cgggccggacggggcggggggaacgacagcagcgcccaaggacaagccaagcggcccaaaacccacgagcgaa

SEQ ID NO: 36880 - RNA, 88 nt, Homo sapiens
ggggcaccaggcgccggcaacggccccccgggcgacggaccgcaggaaccaggagcgagaggagagagagccagagcgacaacaccga

SEQ ID NO: 36881 - RNA, 84 nt, Homo sapiens
aacaacccaccaggacggggaggccaggaagcaaggacggggaggcccggcaggccccgggggggggaccagccagccccccag

SEQ ID NO: 36882 - RNA, 73 nt, Homo sapiens
gaccggcgaccgagagcccggaccagcagagggccgacgccagagacgcgcacgaaacgacgaagaggcccga

SEQ ID NO: 36883 - RNA, 64 nt, Homo sapiens
ccgaccgaacgcgccagcgcggggcaacagaggaacagcgcccccgggcccccacgacaggggc

SEQ ID NO: 36884 - RNA, 76 nt, Homo sapiens
ccgagaggaggaaggcggcaaaaggcggaccgcccccgccaacgaagaccgagaccagaggcagaacaggccgcgg

SEQ ID NO: 36885 - RNA, 88 nt, Homo sapiens
gagcccaggagcgccacgcgcggaaggcagcgcccagcagcgcagaagagagaagaagcaaaccgggaccggaagcaccaaggagaaa

SEQ ID NO: 36886 - RNA, 74 nt, Homo sapiens
aaaaagggcaccaggggaacaaggcaagggggggcacaaaagcaacacgcagacggagccgcccagaagccgcc

SEQ ID NO: 36887 - RNA, 76 nt, Homo sapiens
gcaggcgggggccacggggagggagaaccaggggaaccggaagacgcgaagacgggggcaagacgaacaggacggg

SEQ ID NO: 36888 - RNA, 74 nt, Homo sapiens
gaagacggcgcgccaggaagaaagaagaagcagagggaaccggaggaaagcaagaaacaaaggaacgaacaacg

SEQ ID NO: 36889 - RNA, 80 nt, Homo sapiens
gaagaagaaggcgaaggaccccaacggggaggccaacggaagaagccgccaggcacagagaaggcaaacgggagggcgag

SEQ ID NO: 36890 - RNA, 74 nt, Homo sapiens
ggcgaggcaaacggggggcgcggagggaccagcgagcgggggagagcacaagcgaaaccaggccccagcacacc

SEQ ID NO: 36891 - RNA, 68 nt, Homo sapiens
agaccggcccacaggccgcccgaaggaaccaggagccgacaacaacccgacgcaaggcagccacacca

SEQ ID NO: 36892 - RNA, 72 nt, Homo sapiens
cgccgacagacagcagccggggcagcccagcggccgcggaggcgaaagaagaggaggaagaggcgggaccga

SEQ ID NO: 36893 - RNA, 64 nt, Homo sapiens
ggacacgaaacggacaaacaacggcaagcggagaagagcaaggccgaaccgagaggaagggcaa

SEQ ID NO: 36894 - RNA, 76 nt, Homo sapiens
cgccaccgcagcgggcaacacgcccccccagagcggagacccaggaagcgcaccggggccggagcgcacgccccag

SEQ ID NO: 36895 - RNA, 74 nt, Homo sapiens
cgcagaccaaggacacccaagagggcgagcaggacgaagcgcccgccaccaagggagcccagacacccccccag

SEQ ID NO: 36896 - RNA, 54 nt, Homo sapiens
gagcccaaggccgcaacaacggaaggaaaaggacaggaggacccagacccagca

SEQ ID NO: 36897 - RNA, 67 nt, Homo sapiens
cccgccagaagaggagacgacggacggcgggcaccggccgacgggggccagcacagacacagccagc

SEQ ID NO: 36898 - RNA, 73 nt, Homo sapiens
agaaaggccacaggacggaaacccaggcagagacccccgaaggcgcggccgaacccagcgagaaaccaggaac

SEQ ID NO: 36899 - RNA, 52 nt, Homo sapiens
ggcagaggacagcggaacaagagaacccagagggaaacagccagacggggcc

SEQ ID NO: 36900 - RNA, 84 nt, Homo sapiens
aaccagagaaagaaacacccgaacagcgagagaaaaccggaagagaaaggccgggaagcaggaaagaaaaaaacaacagaggag

SEQ ID NO: 36901 - RNA, 81 nt, Homo sapiens
cgcccgccgagcgcaacagcggcgggcggggcaccccaggagaaagacagcaaagaaaaggagaagaaaggaaaaaaacaa

SEQ ID NO: 36902 - RNA, 60 nt, Homo sapiens
ccgggaagcagagggagaaaggacagggcagaccgccagcagcacagcaagccacagaga

SEQ ID NO: 36903 - RNA, 54 nt, Homo sapiens
ggcgccccacagaggggcgacggaccgcaagacaccaaccaggaggacgacccc

SEQ ID NO: 36904 - RNA, 72 nt, Homo sapiens
gcaagcccgccggggcccccacgcccaccgcccgcgagcaaaggacccagcgcacaacacccagagcgcccc

SEQ ID NO: 36905 - RNA, 73 nt, Homo sapiens
cgggcacgggaagaagcggaacgagaaggaagagagccaacccacacagcaggaaagaccacagcaagaccac

SEQ ID NO: 36906 - RNA, 58 nt, Homo sapiens
acggagcaagccaaggaggccaggcagcagacgacaggacggcagagccccaagaaag

SEQ ID NO: 36907 - RNA, 58 nt, Homo sapiens
cggcggccacccacagcagagagccgcaacggacagaccaaacgacccggagacgaaa

SEQ ID NO: 36908 - RNA, 69 nt, Homo sapiens
aaaaccaaaaggggcgcggaagggagagccccggaaaggggaaaggaagcggcaacaacgcaaagaagc

SEQ ID NO: 36909 - RNA, 60 nt, Homo sapiens
gagccgcgcggcgcggggccccgcggcggaggagacgggcccgcgcgcacggcgcgggac

SEQ ID NO: 36910 - RNA, 80 nt, Homo sapiens
gcgaggagaggagcgcaacagcagcaccagggcacccacacagaggagaagaagagccgagaagacacggcccagagcag

SEQ ID NO: 36911 - RNA, 78 nt, Homo sapiens
aggagcggacaagaagacaaccggcgaacggcgcagggagggccacccccaaccaggaccaaagacgaccaccaaagc

SEQ ID NO: 36912 - RNA, 63 nt, Homo sapiens
aacccagaagcagagcaagaaagggaacaacgaaagacaacgggggaaaccgacaagacacag

SEQ ID NO: 36913 - RNA, 42 nt, Homo sapiens
ggccggggagcaaggggagcggcggcggccaggagggcagcg

SEQ ID NO: 36914 - RNA, 71 nt, Homo sapiens
acagaagaagaagaagcaccgcacagcacccagcagagaacacaggaacaggaacgaaacagacggaggca

SEQ ID NO: 36915 - RNA, 83 nt, Homo sapiens
gacgccccgccgccgccgaggaggcgagcagccgggagacaccgccaccgccaggaaggaaggaacgaggcaaacagagggga

SEQ ID NO: 36916 - RNA, 71 nt, Homo sapiens
agcccaggagcgccacgcgcggaaggcagcgcccagcagcgcagccgggccccaaccgggaagagcggagc

SEQ ID NO: 36917 - RNA, 85 nt, Homo sapiens
ccgagaagcccgaggcgcaggggcggggaggagacggcggaaaacggagagacggggagaaccgaacacccaacaagaaggcaac

SEQ ID NO: 36918 - RNA, 79 nt, Homo sapiens
cgggaaggccaccggcaggcgcacaggcccggccaggcacaagggcaccacaaagaaaaccggcgcagagccaaaagga

SEQ ID NO: 36919 - RNA, 72 nt, Homo sapiens
ccgaagcccgaggaaagcaggccgaagaagagaagacagcacgaaaagcaaaaacacgcggacaagagagcc

SEQ ID NO: 36920 - RNA, 75 nt, Homo sapiens
cgccccgaccagacggacccccggggggacgagcgagacacaacagccgcaacaaggacagcggccagggcacac

SEQ ID NO: 36921 - RNA, 77 nt, Homo sapiens
ccaagcgcggagcgagcccacggacagagggccggcagaggccgcccagacagagcacagggagcgggagagccgga

SEQ ID NO: 36922 - RNA, 78 nt, Homo sapiens
ccgaaggccaggacgacgaaccgcaccacggcgggaggccgcgcagccagaggcacgaggaagaaagggaaaaagcaa

SEQ ID NO: 36923 - RNA, 84 nt, Homo sapiens
gccacgcgggcccgaggcgcaccaagggcgaaggagccggcccaagagaagggcgcccaaggagacaccagccgccagcccgac

SEQ ID NO: 36924 - RNA, 83 nt, Homo sapiens
gcgaggggcgggcgaggcaccggagacccgagcaccccaacgggcaggaagacaccggcggacagagcgagcagcaaacccag

SEQ ID NO: 36925 - RNA, 78 nt, Homo sapiens
gcccgccacgcgcccggacggccgggggcgcccgcagccgaaaggagaacccgcaacacaaaccccaccaacaaagac

SEQ ID NO: 36926 - RNA, 53 nt, Homo sapiens
agcagggaggcccccagaacccccaaagcagagaagagccacaacaggacaag

SEQ ID NO: 36927 - RNA, 62 nt, Homo sapiens
gacaacccccgaaggaggaggaggaccagaaaaacaagacacacggggagaagacgaaggca

SEQ ID NO: 36928 - RNA, 78 nt, Homo sapiens
ccccggcggcggcacgagcccgaccaggagggggcacccgaggaggaagagggcagggcccacggaaagaagggaaac

SEQ ID NO: 36929 - RNA, 79 nt, Homo sapiens
cgaggagggcgcaggagcacacgagaccgcaccgcacggcggagcccgcacgcggcgggcaggaagcgaggaggaaaga

SEQ ID NO: 36930 - RNA, 67 nt, Homo sapiens
gaacgaagcaggcccaggagaaagcacaggacagagcccaaaaggcagagcgaggagagaagaagga

SEQ ID NO: 36931 - RNA, 68 nt, Homo sapiens
gaggccacaaaccagggaaggccaaggacaaaggcccgcaagaagcccagcgcagcaagaccgccagc

SEQ ID NO: 36932 - RNA, 34 nt, Homo sapiens
agggacgggagcgaggagagagacggggcgccag

SEQ ID NO: 36933 - RNA, 36 nt, Homo sapiens
aaaaaccagaagacaagcagcgagagaggagcacgg

SEQ ID NO: 36934 - RNA, 74 nt, Homo sapiens
caaagcaagagggacacagccggccaggagaaacggggacgagagaggcaaaccaagggaaagaaaacaagcca

SEQ ID NO: 36935 - RNA, 82 nt, Homo sapiens
acaaaaacgggaaagccggcaagagggagaaggacaccaggcagaggcaaggaaccgcaggcggggaccagcccaacaccgg

SEQ ID NO: 36936 - RNA, 59 nt, Homo sapiens
cggcggagaagagcgccagagagacggaacagcgacgaacaaccgagaaagacaaagac

SEQ ID NO: 36937 - RNA, 72 nt, Homo sapiens
caggccacgcaaacaagcagcgaaacgagcagaaaggcaaacaggcgggcaacgcggcgcggaagaagacag

SEQ ID NO: 36938 - RNA, 73 nt, Homo sapiens
aggaccaagaaccaggaaaaagaggccacagaaggccagcagacaaagagcccaggacaccacagacagacaa

SEQ ID NO: 36939 - RNA, 74 nt, Homo sapiens
aaacgaaagggaagcagaaccaacagaagggcggaaaaggcaaaacagcgcaaccaagagagaggaagagagag

SEQ ID NO: 36940 - RNA, 77 nt, Homo sapiens
caggcgaggagagcgaacaaccccagaagaggacccacgaggaagcggccgcggcgaaccccagagccagcgggcag

SEQ ID NO: 36941 - RNA, 70 nt, Homo sapiens
ccccgggaaccagcgcccgccccccagccaagaaagcacaccgacccccaacgggccccaggggaagcag

SEQ ID NO: 36942 - RNA, 79 nt, Homo sapiens
gcacacgcccaggacgagaaccaccggccgcaggagggaagcgcacggaaaccgccccgggaggcacagagcaggagac

SEQ ID NO: 36943 - RNA, 82 nt, Homo sapiens
gggccgggcggggccccagcgcccgggcgcggggcggaaaaggccggcagaagggaggcacgagggagcccggggacgcagc

SEQ ID NO: 36944 - RNA, 79 nt, Homo sapiens
agaggaggcccacaggcccgcccggacaccgagaagcaaagccagggagggaaccgaagccacgggcgggggacgcgac

SEQ ID NO: 36945 - RNA, 58 nt, Homo sapiens
ccaacccaggacccccccacagaaagccagagacaaaggagagcagcccagcggagcg

SEQ ID NO: 36946 - RNA, 76 nt, Homo sapiens
gccaggcggggcccgggacaagaacaggcaaaggcaacccgaggaacccaaaagagaagaccgagacgaggcagcc

SEQ ID NO: 36947 - RNA, 61 nt, Homo sapiens
cagaaccaccgccagagccgaccagccaagaagaagagaagagagccccggccgccggaca

SEQ ID NO: 36948 - RNA, 75 nt, Homo sapiens
aaaccaagccaaggaccccacagcccacgccaaaaagggaaaaaagagagccacgacgaaagcaaacaccgacaa

SEQ ID NO: 36949 - RNA, 73 nt, Homo sapiens
acgggccccgaggccgcgggcggcagggacgagaaaggcccgcagaggagaggagagaggaggcggcagaaca

SEQ ID NO: 36950 - RNA, 54 nt, Homo sapiens
gaagacggacccaacacgggacagccagacaggaggcgggaaggggcagagggc

SEQ ID NO: 36951 - RNA, 84 nt, Homo sapiens
agaagaagaaggcgaaggaccccaacggggaggccaacggaagaaaaagagccgcagacgcacagcaaccaccggacccgaagg

SEQ ID NO: 36952 - RNA, 33 nt, Homo sapiens
gaccagcagccgccaaaggacgccgacacaaag

SEQ ID NO: 36953 - RNA, 56 nt, Homo sapiens
aggacaggacgcaccgagacggaccagacaccgaccccgaagcacgcagggagaag

SEQ ID NO: 36954 - RNA, 78 nt, Homo sapiens
acccagaacagagcgacagaggcgacgcaaccgcgggagaggcgcgccaaagaaaagggggggaggaaacggagagcg

SEQ ID NO: 36955 - RNA, 71 nt, Homo sapiens
acccgcggaaccagcagaagaacaggggagcagcggaggaagccacaggacgccggggaccgacaggccac

SEQ ID NO: 36956 - RNA, 74 nt, Homo sapiens
cgggaaacaggcgaccgagggaagaccacaaccacgaccacaaaccggcggagccacaggaccacccgagcagg

SEQ ID NO: 36957 - RNA, 57 nt, Homo sapiens
ggacaggcgggcggccggcggggacaggagccagcaccgccgaccgccagcgccaga

SEQ ID NO: 36958 - RNA, 88 nt, Homo sapiens
cccccaagagcgggacgcagaacagcagccaagaagcccaaagggagaccaaaaagaagaagaaagaacgaagcaaagcagacaacca

SEQ ID NO: 36959 - RNA, 59 nt, Homo sapiens
aagaaaggggaaccccggagaaaaggccaagaaggcagaagaggaaaaggggagcagga

SEQ ID NO: 36960 - RNA, 74 nt, Homo sapiens
ccgggggggaaaccagaaggaggaacagagggagggaagggcaacaacccaccgggggaaacaccagacgaagc

SEQ ID NO: 36961 - RNA, 66 nt, Homo sapiens
ggggcacaacgaacacaaagagaacgaaaaggcccaggcagggcgggcaccaggagcgaagcccaa

SEQ ID NO: 36962 - RNA, 74 nt, Homo sapiens
ggaggcgagcaacaggggacaagagccaacggcaagcagcagcgacaggcaaagaccccaccccagagcccacg

SEQ ID NO: 36963 - RNA, 83 nt, Homo sapiens
ccaaacaccacccaacgagggaaacaaaaaaaagaccagacagagaagccgcaacacagcacccggcggcaaaccaaacaaaa

SEQ ID NO: 36964 - RNA, 65 nt, Homo sapiens
cggagaggaaaacaaaagcgagaaggaggcacacccagaagccacaggagaagcaagaggcggcc

SEQ ID NO: 36965 - RNA, 37 nt, Homo sapiens
caaacccgcccaaccgagcaaggaaccaaggaaaaga

SEQ ID NO: 36966 - RNA, 77 nt, Homo sapiens
cgggaaaggcggagccaccggccggcgaagagggcaccccaggagaacagcagggcagaagcacacaaaaaaggcca

SEQ ID NO: 36967 - RNA, 81 nt, Homo sapiens
gccgcgcaccagccaggacgcacacggcgaacggaacccaccggggaccgccaccggccaaagaacgccaaccgaaagaaa

SEQ ID NO: 36968 - RNA, 40 nt, Homo sapiens
ccaggagaggcccaagcccagacaacaggcacaaagagag

SEQ ID NO: 36969 - RNA, 87 nt, Homo sapiens
ggggacagccagaccggagagcgccacccgcccagcccggacgaccaaagggacaagcagacgagaccggagaaggaaagacaagcc

SEQ ID NO: 36970 - RNA, 71 nt, Homo sapiens
gcacggaaaagccagaaaaggcgcgcacagcagagccacccaggagaggaagacgaggaagcagaagaaca

SEQ ID NO: 36971 - RNA, 57 nt, Homo sapiens
ccggggcccccgggggcgcccgcgggaagcgaagcccaggggccgaccaggggagga

SEQ ID NO: 36972 - RNA, 85 nt, Homo sapiens
ccccacccagcccacggacccgggcagaggcagggggggcagccagggcagcgcaagagcgagccagacagcaaggccacgggag

SEQ ID NO: 36973 - RNA, 81 nt, Homo sapiens
aaaaagaaggagaaaaaccccacaccgacacagagcccagggcggagaacggaaaagcaccaggaagcagagaggaccgca

SEQ ID NO: 36974 - RNA, 72 nt, Homo sapiens
cggaccacgggaccaagcagacaaaccaaggacacagccaggggagagaacaaaagcagagccaaagccagc

SEQ ID NO: 36975 - RNA, 78 nt, Homo sapiens
aacaagagagagggcgcggcagaccggggcacggcaggaaggcgaggcacaggcacgccaaccaagcagcccacgcac

SEQ ID NO: 36976 - RNA, 57 nt, Homo sapiens
ccggacacccgggcacccgagccacaggagaaggcgaggaagaaacagaagaaccga

SEQ ID NO: 36977 - RNA, 71 nt, Homo sapiens
gaaggagcaaaaggcggacaggcagccgcaggggaagcccagccagggggagacagcgggagagccaaacc

SEQ ID NO: 36978 - RNA, 79 nt, Homo sapiens
cgacccaccgggaggccaggacacgaggagccgaacccagcccacagggaagcagaggaaggacccccagaagcggccg

SEQ ID NO: 36979 - RNA, 77 nt, Homo sapiens
acccaccacaagaagaaaggccagcacgcagggcagaaaagaacagacccagaagaagcgaaaggggagaaagaaga

SEQ ID NO: 36980 - RNA, 71 nt, Homo sapiens
ggcagggggccggcccacagcacccggccccgcggggcgccagcccgcaggaagcccaagagggaaagccc

SEQ ID NO: 36981 - RNA, 55 nt, Homo sapiens
ccccagcacaggcagcaggccgggagagaaaaaccaacagaagggccgaaacgga

SEQ ID NO: 36982 - RNA, 74 nt, Homo sapiens
acgggccggcccagagccccgggcgccggggccgcgagaacggaaaggcgaagagaagagggaaagggaaaaga

SEQ ID NO: 36983 - RNA, 62 nt, Homo sapiens
ggacgacacgaccgccgcccgcggcccaagccgaaggacaagggccaggagaagcagagagc

SEQ ID NO: 36984 - RNA, 76 nt, Homo sapiens
aggggcagagcccgcacagcgggaaccacgacacaaggaagaaaggacagaaggaaaacaaggccaacagagaaag

SEQ ID NO: 36985 - RNA, 81 nt, Homo sapiens
gggaagacggacagcgaagccacccagcgccgagggaaggcgccgcgccaggccgggcgggcgaccaggaaaacaaagagg

SEQ ID NO: 36986 - RNA, 82 nt, Homo sapiens
aggacgaagagcgggacccgagcccggccccgacggcagcccaccccgagcgcggaaccgcaggggggagggccccgccaac

SEQ ID NO: 36987 - RNA, 114 nt, Homo sapiens
gagaccagaaacaaaagacagcacaaagaagccgagacaaacggcaccaagagaaaccaacccaggcaagaaggccagaccaaagaaaagggagagaccaaggcggagagcagg

SEQ ID NO: 36988 - RNA, 73 nt, Homo sapiens
cccggaccaagaaggggaggcccgcggcagaaaagcgcccaggaagcggaaaaacaaaagagccgcccaacga

SEQ ID NO: 36989 - RNA, 80 nt, Homo sapiens
gccccgggcacacaccccgacccgcccccccagacgcacccccagacgccgacccagaaagccagggacaccaaaccccg

SEQ ID NO: 36990 - RNA, 68 nt, Homo sapiens
gccagagcggccggcccccagacagggcgagaagagacaaacagaaaacaacccaaacgcaaacaagc

SEQ ID NO: 36991 - RNA, 49 nt, Homo sapiens
gggaaacaacagagcaaccccaggcaaagagagaaaacagagcaggaga

SEQ ID NO: 36992 - RNA, 73 nt, Homo sapiens
gggggaaccaaaaaaggggaacagaagcgaaggggacagggggagaaccgccagggaaacccgggggacagac

SEQ ID NO: 36993 - RNA, 79 nt, Homo sapiens
gccgccggagaccccgcgccgacggcgccaaacacagggcgcgggccccggggccgcggcgaaaggacggggcgaaagc

SEQ ID NO: 36994 - RNA, 78 nt, Homo sapiens
cacacgcaaagaagaagaaaacaaaggagaacaggaggacgcaggccaaacaaaacggagcaaaggaggccgggcaga

SEQ ID NO: 36995 - RNA, 68 nt, Homo sapiens
ggaggccaggacggagagggagaaggaagcaggaaaaaagaacaagaacgcaaggacaacaaggcacg

SEQ ID NO: 36996 - RNA, 83 nt, Homo sapiens
agcggcgggcggcggaggaggagacggcaggcggaggcggagaagaacccaaccaaaaccaggcggcaaccccggggcgacaa

SEQ ID NO: 36997 - RNA, 74 nt, Homo sapiens
cagcagagcaacaagaaggccaaaaaaacccagcggaaagcaacaaaagacacagggagccgccgccccaacag

SEQ ID NO: 36998 - RNA, 54 nt, Homo sapiens
ggccaggggcggaaacccgcaccagggagaccggccccagggccccccgacaca

SEQ ID NO: 36999 - RNA, 84 nt, Homo sapiens
ggcaaaggcaagagaacagcagcgccgcccgccgacagccaggcccgggagaaggccacgaccgccccagggccaccgccagcg

SEQ ID NO: 37000 - RNA, 81 nt, Homo sapiens
cgggggggcggcccggccccgcagggcacgcagacgcagcaggagggaagcgcgcagacgggcaggcgcgcggggggcgac

SEQ ID NO: 37001 - RNA, 82 nt, Homo sapiens
cccggacagccgccgacccggcgggggaggagacaagaacaaagcacaaaggaaccagagacagagagggcgcgaacaaaca

SEQ ID NO: 37002 - RNA, 90 nt, Homo sapiens
agacggcgacagggcggcggcgccaggcagggcgcaggaaacaaacagaagcgcacgagaacccaggccgcaaggaacgaaacccaacag

SEQ ID NO: 37003 - RNA, 68 nt, Homo sapiens
aaggaggcacaagcaccccaagggagacgccgcagcacgacccccagaaaaagaaagagccgcaagag

SEQ ID NO: 37004 - RNA, 63 nt, Homo sapiens
aaaaggagcaagggacacaacgcaagaggccacaacgcaggcagaaaaggggaaggaacaaac

SEQ ID NO: 37005 - RNA, 151 nt, Homo sapiens
aagcgccagcgaggggagcacacgcccgacgaggagagcacgacggaccaagacgagcccagcgcaaccccaagcgcccaaagaggccgagcaggagcgcccggcccgcacgcagccaggccccaccacaggaggaagaagcgaccccccc

SEQ ID NO: 37006 - RNA, 84 nt, Homo sapiens
ggccgggcgcggagggaggagggagcagcaccgaggccccccccaccccccgcccgcggcgccaccccgcggcgccaaaaagaa

SEQ ID NO: 37007 - RNA, 63 nt, Homo sapiens
agcaccccccggacccagccccgggcaccggaaggcaaccaaccagccgccgaaacaccacgc

SEQ ID NO: 37008 - RNA, 61 nt, Homo sapiens
gccccgcagcgcccacacggccaagcaccaccggaacaaggggccgggcccagcgcccgac

SEQ ID NO: 37009 - RNA, 72 nt, Homo sapiens
gacgaccacaagaccggggaagggaccccccgcggacgacaccgacggaagcggagaacagcgggggaggag

SEQ ID NO: 37010 - RNA, 72 nt, Homo sapiens
ggcgccgccgcgccccggccccccggccgcacaggcggcaaaccgacaacagagccgaagaagccccacagc

SEQ ID NO: 37011 - RNA, 115 nt, Homo sapiens
aggaacccaaagggcgagagcggcgcggagccagaacgcggcggcccggccccgccgcacccagcccaggaacgcaaggcggggaaaaaaaggcagcacacagacgcagcaacgg

SEQ ID NO: 37012 - RNA, 69 nt, Homo sapiens
aaagaaaaagacggcgagaagggaagggaaagcagaggaaggcagaagaaaaagaccgcgcacagaaag

SEQ ID NO: 37013 - RNA, 81 nt, Homo sapiens
cgaccgaccaaggagggaggggagacaggcagcacaagcagagcaaagcgaagggagcaagcacggaggagggcccaggag

SEQ ID NO: 37014 - RNA, 77 nt, Homo sapiens
ccagccagggcacggccgggacgaggcggacaacacgaaaacagaggacagcagcagacccccaggagcaggacccg

SEQ ID NO: 37015 - RNA, 79 nt, Homo sapiens
cgagacagaacaacgagagagagcaaaaacaccagacaagaagcccagaaccgccccagacaaggcccggcccgcggca

SEQ ID NO: 37016 - RNA, 65 nt, Homo sapiens
gcaagacaacggaaggaacaaacggacccaggacaaaacgacaccagccaaaccagcagccccca

SEQ ID NO: 37017 - RNA, 64 nt, Homo sapiens
cgggaacgacgcgagcagaagaggaggagagaagagaggaagcgagcagcacgggcaagcgggc

SEQ ID NO: 37018 - RNA, 81 nt, Homo sapiens
cccgcgcggcgcgggcgccgggggcaccgaggggcgcgcggagccaggacagcggagcagcgcggaccccgcgggccaggg

SEQ ID NO: 37019 - RNA, 78 nt, Homo sapiens
ggaagaggaaccacaagaaaacaaaagaaacgcccacagaacaccgagcaccagcagacggaacaacgagagaaaacg

SEQ ID NO: 37020 - RNA, 78 nt, Homo sapiens
gggcgggccaccgacaggccggacacaccccggccacaggcacgagcacagcgaccccgaggcgccaaccggaacaag

SEQ ID NO: 37021 - RNA, 79 nt, Homo sapiens
ccacccggacggcggcggggcggaggggaggaagacacagagagacggaaggccacaggccgaggagaaggcgcacaag

SEQ ID NO: 37022 - RNA, 64 nt, Homo sapiens
caggggaggcacgcgaggagacacagcaggcagacaagaggcagaacaaaagacaaggaacaag

SEQ ID NO: 37023 - RNA, 59 nt, Homo sapiens
aaccagccgaaccagggccaccgcgcaaggaagaagaccaaaggacaaaaaagacggag

SEQ ID NO: 37024 - RNA, 78 nt, Homo sapiens
ccgccggacccaggaggcaccaggagagcccaggcaggaccggcacggcgaaacccacccagacacgggcgcagcccc

SEQ ID NO: 37025 - RNA, 71 nt, Homo sapiens
ggaagcaggggaccccagagggcacacacgacacacaacaggggcaccgaaacacaggagcccagcaacag

SEQ ID NO: 37026 - RNA, 60 nt, Homo sapiens
gggaagggggaaaggcaccaggacaagcaaagaaaggggagcaagaagaaagagcaggga

SEQ ID NO: 37027 - RNA, 80 nt, Homo sapiens
aaaggcgggaacagggacacgcaaaggcagcagaggcgaaggacagcgccgaaaacggaaaccccagcaaagcaacagga

SEQ ID NO: 37028 - RNA, 81 nt, Homo sapiens
acagaaccgcagacgccgcagagcagcggaaagagccaggcagaaagccggggggagggaccgccccagaggacggaagca

SEQ ID NO: 37029 - RNA, 68 nt, Homo sapiens
gccccggccgcggccgggcccaggcaagagggagaagacagcgaccagggaggcaacaacaaggagcg

SEQ ID NO: 37030 - RNA, 66 nt, Homo sapiens
gaagcgagggagccggcagcagagcaaaacagagcggaacgaacaaggggaccacaggcaaacaaa

SEQ ID NO: 37031 - RNA, 71 nt, Homo sapiens
gcgcaggccggggagcgccagagacagaagacgaaaggcaagacaaccaaacacaacagcaagaaggccga

SEQ ID NO: 37032 - RNA, 77 nt, Homo sapiens
acaagaaccgaaacggggcgcagcaacggcacacagaggggagaccagacagaggacaccggcaaaaccaaaaaggg

SEQ ID NO: 37033 - RNA, 50 nt, Homo sapiens
gccaacagaacaagagagaccagggggagcacagaccaggaggaaaaagc

SEQ ID NO: 37034 - RNA, 66 nt, Homo sapiens
cacgggagaaagaaggagaaaaagaaaacgggcaaaggccagcaaagggccgagaagaaaccgcaa

SEQ ID NO: 37035 - RNA, 69 nt, Homo sapiens
agaaggcaacgcgccgcaaaacagaacgcggccgaaccggggcagcgcgcaaggaggagcagcgagagc

SEQ ID NO: 37036 - RNA, 112 nt, Homo sapiens
cacgcagcagccgcgccgccgccgcgggagccgcgcccgaaccccggcccgaacccagagagcggagggcgaaacacagaaaaccgcaacgaaaacagcccgaaccacaggc

SEQ ID NO: 37037 - RNA, 67 nt, Homo sapiens
gcgcagagcggagcagccgggggggcccgcacaacagcccagcccccggcgcccaagaacaaaccac

SEQ ID NO: 37038 - RNA, 51 nt, Homo sapiens
cccgagagagaaggggcgacgcgccaaggcgacacaacggagacggacagg

SEQ ID NO: 37039 - RNA, 82 nt, Homo sapiens
cgccgccccggagcacgggggggggggggaagccgcccccggcagcagaaagcaccgggaggaaagagagccacacgaagaa

SEQ ID NO: 37040 - RNA, 78 nt, Homo sapiens
cccaggcacgcaaccgcagaggccccaggagcgcgcggcgagcccgcacgcagggaccaggcgccgaccccgacagaa

SEQ ID NO: 37041 - RNA, 74 nt, Homo sapiens
agccacgggagaacgaagggaaaaacgagcccaaaaggcggacaaggcgcgaggcagaaggaccccaggaaaca

SEQ ID NO: 37042 - RNA, 59 nt, Homo sapiens
aggacccggaaagagcacagaagaacaggacaccaggccgagcacgaaccgaccaacag

SEQ ID NO: 37043 - RNA, 74 nt, Homo sapiens
aaggaccggagagaggacagggcaggaaccgcaggcccaggcagcgcagacgaaacagcgcgcagaagccaaca

SEQ ID NO: 37044 - RNA, 86 nt, Homo sapiens
cgagaggaagacgagccgggaggaacggcccggaaacaggaggacgcccagccgcgggggcgcgggaggggaccggagaccgaggc

SEQ ID NO: 37045 - RNA, 53 nt, Homo sapiens
ggaaaaccagcgacgaagggaacagcacgcaaaagggcaagcgccgccgcgcg

SEQ ID NO: 37046 - RNA, 69 nt, Homo sapiens
gaaccccgcaaaaaaggcacgcccacaccccgacggcacaccaaggccagaccaaaggaaccagagcag

SEQ ID NO: 37047 - RNA, 73 nt, Homo sapiens
ccagcccgaaagcccagagccaaacagaaaagaagaggagaagcaagcagagcacagaaaacgaacgagaaac

SEQ ID NO: 37048 - RNA, 67 nt, Homo sapiens
gccgcgaggacccacaagaaccgagaggaccaacaccgcagacgaagaaggacaggagaaacagggg

SEQ ID NO: 37049 - RNA, 82 nt, Homo sapiens
gagggagcccgccgcccgccccggcacacgcgcagccccggccccggcccgccggagaaacagacgagaaaacagcgagccc

SEQ ID NO: 37050 - RNA, 70 nt, Homo sapiens
cacggagaggcaccgcgggcaacaggcccacagccgacaagaacgaagaagagacaccaaaaaggacagg

SEQ ID NO: 37051 - RNA, 81 nt, Homo sapiens
ccaagcacaacggcggcacccacgcagacaccagccgcgccagggaacccgagcgcagaggggaagcagaggacccaggcg

SEQ ID NO: 37052 - RNA, 68 nt, Homo sapiens
cgcagaacagagaagaggaggggccgcaaggccaggcgcgcagaggcacccaacggcacagaccccac

SEQ ID NO: 37053 - RNA, 85 nt, Homo sapiens
gcgcccggccgcgccggacgacggaaggagaaacgacaggcaacaagacaagcggcggggccccgggccgccaaggcgagaagac

SEQ ID NO: 37054 - RNA, 102 nt, Homo sapiens
aacggggccgcgaggaggccggaggccgccgacgaccggacgcaaagaccacagcagcgcgcagaccggcccgggccccaaccaaggccagcgaggccaagg

SEQ ID NO: 37055 - RNA, 77 nt, Homo sapiens
gcacagggacaggaagccggaccccggacccgagcaaaggaacgccacaagcagaagacgaaagcaagaagacacac

SEQ ID NO: 37056 - RNA, 70 nt, Homo sapiens
aaaagcgggaacgcaggacccaaagcgagggcagcgggaacgaaacagagcagaagcaacgagcacaggc

SEQ ID NO: 37057 - RNA, 80 nt, Homo sapiens
cagcaacagacagaaaagacaggaagaccgcggaaaccggacgaggccagcggccaaggagggcgagacagcccgcccga

SEQ ID NO: 37058 - RNA, 72 nt, Homo sapiens
cccgaacgccggcccagaaggcacggcaggagcacagagagaggagaaggggaacgcgggccgagagccgcg

SEQ ID NO: 37059 - RNA, 74 nt, Homo sapiens
ccagccggcaccgccaccccacaggcccccaccaggccgcggcaggacgcaaaacagaacccccccaggacagc

SEQ ID NO: 37060 - RNA, 77 nt, Homo sapiens
cgggcgcagcgagaggaggcaccgcggcacgccccccgggccgggcgccaaaagaacacagccacaggaggagacgc

SEQ ID NO: 37061 - RNA, 66 nt, Homo sapiens
caaggccgcaggacgagcgccaaggacccacccaggaggcagaaacacgccgcgcgccacaccagg

SEQ ID NO: 37062 - RNA, 78 nt, Homo sapiens
cggagagcggccccggcacgccggcgcccgcaccccggggcccaggaagggcggcccaggaacaagcagaaagcacga

SEQ ID NO: 37063 - RNA, 68 nt, Homo sapiens
ccccccgcgccgccggcacgcgggccagaggggcacgcccgagagaacacaaacagcgaggcgcaaga

SEQ ID NO: 37064 - RNA, 74 nt, Homo sapiens
aagaacgcaccggaagacagagaaggaccacaccaaaccagcagaagaaacacggcaagacaaccaagacagag

SEQ ID NO: 37065 - RNA, 82 nt, Homo sapiens
gcacggagcagcaaacgcagagacaaaagaaacgggccccgacgggcagacagcaaaggaaacagaagccgcggcagccagg

SEQ ID NO: 37066 - RNA, 67 nt, Homo sapiens
aggcccagaacccggcacaaggaacgagggaaaccccaaaacggggaagcgaaaagaacgccaggac

SEQ ID NO: 37067 - RNA, 39 nt, Homo sapiens
ggcagcccacgaacaccgcaggcgccccggcaaggccac

SEQ ID NO: 37068 - RNA, 79 nt, Homo sapiens
gcggccgcgcacccccggccggaggcaccagcggagacgccagaccgggaggaggcagggcgccggcggggcggcaaca

SEQ ID NO: 37069 - RNA, 60 nt, Homo sapiens
cccgccgcgcgggcccgcccgacgcggaagcccacaagagagggaaggagaaaggcagac

SEQ ID NO: 37070 - RNA, 81 nt, Homo sapiens
aggaagagggacggaaccaccagaagccagcccccaggcggaacgcccgccccgcagagagggcagcggcaaggagcgaag

SEQ ID NO: 37071 - RNA, 50 nt, Homo sapiens
cacaagaagaacaaccaacccagaacaccaagagacccaacagggcggcg

SEQ ID NO: 37072 - RNA, 75 nt, Homo sapiens
gagaagccggggcacaggagcccacagggaagcgcaaggcccaaaagagccgcgaagccccagggcgaagacccc

SEQ ID NO: 37073 - RNA, 71 nt, Homo sapiens
gcagacccacccacaacaccaccgacagaggggcagggaacagcaagaggcccgcgcgccacgccccggcc

SEQ ID NO: 37074 - RNA, 73 nt, Homo sapiens
cgagacgggcggagaggagaagggcggagaacggaaaagcaccaggaagcagagaggaccgcagaagggaagg

SEQ ID NO: 37075 - RNA, 74 nt, Homo sapiens
agcagcgcaacaagagggagcagaggaggggcaccaggcccggccaaggaagacgcggaccagggaggcagaca

SEQ ID NO: 37076 - RNA, 70 nt, Homo sapiens
ggcggggagcgcggcgggcgcgcgccagcgccacagaccgggccaaacaacccaggaggaagagacacgc

SEQ ID NO: 37077 - RNA, 74 nt, Homo sapiens
cgacacgcggccgcggagaccaccgcggcgcggcagcgcgcccgagaccggagagaacagaaaaaaagcggccc

SEQ ID NO: 37078 - RNA, 75 nt, Homo sapiens
ccgaccagcgcaggaagaggaggacaggagagaagcgccacacccccgcaaccagcgacaaacccgaaggcgaga

SEQ ID NO: 37079 - RNA, 80 nt, Homo sapiens
cgccacgccccagacaggggaacgcggcgaccgccaagaaaggcagcgaggggagagcggaccgacccaaacggaccgaa

SEQ ID NO: 37080 - RNA, 70 nt, Homo sapiens
aagagggggacccaaggacgcgaaaggaaagcacacgagaacgcccggcgccacagggccgggccccgaa

SEQ ID NO: 37081 - RNA, 79 nt, Homo sapiens
gagaaaagcccccaaaagcagcacaggcacgcagaaaagaagagcgaaacgggaccacacggcgcacacagcgacagaa

SEQ ID NO: 37082 - RNA, 56 nt, Homo sapiens
gacccccccaaaaccaccaaggacccgcagaaaagaagacggaacgaagagccaca

SEQ ID NO: 37083 - RNA, 62 nt, Homo sapiens
gcggcgacggccgcggccgcccgaagaaccccgagacgagaacgggaggcaacagaagggga

SEQ ID NO: 37084 - RNA, 78 nt, Homo sapiens
gcaagcggcccacagcaggacggaagcgagggcacgggcggcagcccgagaccgcagcagaaacggcgaggaaagaga

SEQ ID NO: 37085 - RNA, 76 nt, Homo sapiens
aacaacccaaccacggggaaaaggcaaaaacccacaccgcaacccagcgagagaaaggcgcgagaacagacccagc

SEQ ID NO: 37086 - RNA, 71 nt, Homo sapiens
gccaggagccgaacaaggggacacagccagggcgcaggcagcgcccaacaacacgggaaagaagaacagga

SEQ ID NO: 37087 - RNA, 79 nt, Homo sapiens
ggggaccgcggcgcaggacgccgacacgggccgcgccaggcaaccagggaccaggaggaaggagcggagaggcaggcgg

SEQ ID NO: 37088 - RNA, 90 nt, Homo sapiens
gccggcggccgagcaagccgccgcccgacccagggcccgcgggccaggagagcgccggcggaaagcgcaccaaaggggacgaggcccccc

SEQ ID NO: 37089 - RNA, 74 nt, Homo sapiens
gacgaggaggagacggcagaacaccaaccgcccagagaggaaagcgaaacgaaacggaggaaaaaccaagcaaa

SEQ ID NO: 37090 - RNA, 66 nt, Homo sapiens
aacgaggcagcggggccaagcggagggaagcacaccggaaaacagaggacagcccgacaggacaac

SEQ ID NO: 37091 - RNA, 78 nt, Homo sapiens
gcccgccgcgcgggcccgcccgacgcggaaggcagaaccaaaggcaagaaggaaaaaacacgacacaccagagaagag

SEQ ID NO: 37092 - RNA, 77 nt, Homo sapiens
aaaaacccgccccccaacaccggacaccgagaggaaccacaagcagagacgaagaggagcagaaccagaagggacac

SEQ ID NO: 37093 - RNA, 65 nt, Homo sapiens
acgacgcccagacccggcaggcaagacggcagccacagggcagcagagagagacgaagaggagca

SEQ ID NO: 37094 - RNA, 54 nt, Homo sapiens
aagaaacaaggccagagaaggcaaagccaagaaccaaccgacacgagccaaaaa

SEQ ID NO: 37095 - RNA, 80 nt, Homo sapiens
cggaagcgaaagaaaaacaggagaagaaggccgacacggagggggccaggagcgcgggcgcggagacacagcggccagag

SEQ ID NO: 37096 - RNA, 82 nt, Homo sapiens
acgcacccccacagggcagaaggcaaccacgagaaaacggaaccgaaagcaagaggacaagaagaggggaaaacaagaaaag

SEQ ID NO: 37097 - RNA, 71 nt, Homo sapiens
cgggacaagaaagaccgcaaggggaaggcacagggaacaccagaggcgggaccacgggcagcgcccaggga

SEQ ID NO: 37098 - RNA, 51 nt, Homo sapiens
gaggacgcggagaaccggcacagcccccgggccaggaagggaggaagacgc

SEQ ID NO: 37099 - RNA, 70 nt, Homo sapiens
caccgacccccggcgcggcacggcacagggaaaccggcccgaaacagggcccaccagcccccgaccggaa

SEQ ID NO: 37100 - RNA, 83 nt, Homo sapiens
agaggaaagaagcacaaaaacaacagaagaggaggaaaaagaggggccaggccaaaacagaagaggcaaagcccagccacagc

SEQ ID NO: 37101 - RNA, 89 nt, Homo sapiens
caggagccccaggagcccagacaccagccccccaccaggacagaacgaagacagaacgaagaaggggcgccaggcaggcaccaaaccgg

SEQ ID NO: 37102 - RNA, 92 nt, Homo sapiens
aggagagagaaccgccaacggaccccgaggacaggaaaaacaggacccaggaccacccccacccccaacagggaaaccacgcagaagaagga

SEQ ID NO: 37103 - RNA, 71 nt, Homo sapiens
gcggaggaagaaggccagacggaacagcgaagccccagggcgaagacccccccccagggcaaaccaccagg

SEQ ID NO: 37104 - RNA, 82 nt, Homo sapiens
gaggacacgggggccacaaagccccccggagacgcaaccaagaagaaagccaaaaccaaagaggagaaaaaacaaagggaac

SEQ ID NO: 37105 - RNA, 73 nt, Homo sapiens
aacccggaagagcgccccaggagaaacaagcgacaaagaacagccaagagaccagggagggaaagcacagcca

SEQ ID NO: 37106 - RNA, 75 nt, Homo sapiens
aaagggggagccggacaaaagacgcggcaggaagagaacacagaagaagaggagaggaaccagcaagggcgacgc

SEQ ID NO: 37107 - RNA, 80 nt, Homo sapiens
gagcccaccaagcgcccggagaggggcgcaaaacgagaacaaagccaagcgggcaaacagaacaaagaagcgacgccaag

SEQ ID NO: 37108 - RNA, 78 nt, Homo sapiens
caaagaaacaaagaacggacccacaccgaggcacccgaagaagagaccaccaaccaggggaaaagagacgcaaaccac

SEQ ID NO: 37109 - RNA, 65 nt, Homo sapiens
gccgggagaaaaaaaaacgacccaggggggaagacaagacgccaaggccccaaaggacaaagcac

SEQ ID NO: 37110 - RNA, 56 nt, Homo sapiens
cgggcgccgcaccaggagcgaagagcgccgacaagaaaccgaccagagggcaaagg

SEQ ID NO: 37111 - RNA, 75 nt, Homo sapiens
gcacccagacaggggcgaaggcagaggagcccggacggagacacacggacacccaggaggaaggggcgcgagcca

SEQ ID NO: 37112 - RNA, 53 nt, Homo sapiens
ggagaaaaacggagggagaaaaagcaagaggaaagcagccgaaaaaagaggca

SEQ ID NO: 37113 - RNA, 81 nt, Homo sapiens
gaggagaagagcggaggagggggaacaggacgagaggaaaaggagccggcccagcgcgacggaaaccagacgaaacaacag

SEQ ID NO: 37114 - RNA, 124 nt, Homo sapiens
aaaccccaagggccacgagcgaagcacgggaggaacaccacgcgcgccagcgagcccgggcccagagacggacagggccccccggaaagacagaagggccgggcacgccccccagggcaaaaag

SEQ ID NO: 37115 - RNA, 69 nt, Homo sapiens
ggcgagggacaccacgcaacaaaagcgacaccggagagaaaggggcaaaagaacagcacccgcgagaac

SEQ ID NO: 37116 - RNA, 85 nt, Homo sapiens
caaagagcacgcagagagcccggcagaaagagccgcagacgcacagcaaccaccggacccgaaggccaccacccagaggggccgc

SEQ ID NO: 37117 - RNA, 67 nt, Homo sapiens
gacaaaagggccaaagaagggagagaggaaacgggcccccgcccaacaggcacaaccagagacaggc

SEQ ID NO: 37118 - RNA, 69 nt, Homo sapiens
gcacggagcccaacaggaccagaacagagaagaaagcaggagaacacgagacccgcacaaaaccccgcc

SEQ ID NO: 37119 - RNA, 66 nt, Homo sapiens
acggaggcagagaccaagcaggggcgaaacacgaagcccgggcaagacaacaaaacccgcgggcag

SEQ ID NO: 37120 - RNA, 76 nt, Homo sapiens
ccggagcggcccagaccccgcccgcgggagcgggcaggcgccggggaaggaaccagaacggcaccccccccccggc

SEQ ID NO: 37121 - RNA, 72 nt, Homo sapiens
ccaagagcgcacgggggaaacaagcgaaaaacaggcaaggagccagcgggccggcaccggcacgaggagcgc

SEQ ID NO: 37122 - RNA, 58 nt, Homo sapiens
ccaagaccacgccaccgacaggcccgacagccggaagagggaaagggccccaagagcc

SEQ ID NO: 37123 - RNA, 80 nt, Homo sapiens
aggcgagcagccgggagacaccgccaccgccagggcggagaacggaaaagcaccaggaagcagagaggaccgcagaaggg

SEQ ID NO: 37124 - RNA, 49 nt, Homo sapiens
ccgccacccccaccggaggcgacccccccaaggagcagggaagccaacc

SEQ ID NO: 37125 - RNA, 68 nt, Homo sapiens
acaagggaaaccacaaggaccaaacaccaaaacagaccacccaagaagaccaaggcccaaaaggaccc

SEQ ID NO: 37126 - RNA, 80 nt, Homo sapiens
aggacccaaaaggcgcagggacacagcgggcaggcggaacacggaccgcgaaggagcagagagagcgacaacacgcgaac

SEQ ID NO: 37127 - RNA, 64 nt, Homo sapiens
gccaggcgccggccggcgcgaagacgcgggggccgccccccgcagggcagaaaagaacagaccc

SEQ ID NO: 37128 - RNA, 81 nt, Homo sapiens
aaagaaacgcggacccccgccaggcagggggcgggcggacacaagcggaaggcccccggacggagcgacaccgagagcacc

SEQ ID NO: 37129 - RNA, 79 nt, Homo sapiens
cgacaggaacagggaccacggggccccccgaggaaccaggggacagcgaggccaggagaggaccgaagaggcaccggcg

SEQ ID NO: 37130 - RNA, 59 nt, Homo sapiens
cagcaggggggccgggaagcaggccggggacgaaaaaggccgagaggagggagacccag

SEQ ID NO: 37131 - RNA, 79 nt, Homo sapiens
cccgcccgaggcgacggccgcggcgcacagcgggcgccaggacccccccagagccaagacccccagaagggaccccccc

SEQ ID NO: 37132 - RNA, 72 nt, Homo sapiens
gacggaagcgaggaaaagcagccaccaacaacaccagggacacaacagcaaggagcagaaaccgaaacacca

SEQ ID NO: 37133 - RNA, 77 nt, Homo sapiens
ccggccccaagggcaaagggaacgggcagccggggaccgggcgcggcaaccgggcaaaggagaaagaggagccaaag

SEQ ID NO: 37134 - RNA, 54 nt, Homo sapiens
agaaacggagaaaaaggcccaggagagccagggacggcgcacaacccaccagcc

SEQ ID NO: 37135 - RNA, 62 nt, Homo sapiens
gacggcgacgaagcagccaaacaccagaaacagacagcgcccacaggcagccgaagaacccc

SEQ ID NO: 37136 - RNA, 86 nt, Homo sapiens
cgaagccgaccaagaagcagcgccgccgcggaggaagagagaagaaagaaggagcaggccggcagaccccccagagaccacggaca

SEQ ID NO: 37137 - RNA, 84 nt, Homo sapiens
cccagcgcggcgacgccaggagaccccaagcgcacgccgagggacagaagcgaaggggacagggggagaaccgccagggaaacc

SEQ ID NO: 37138 - RNA, 65 nt, Homo sapiens
gacccaagcaaaaggggcgcaaggcaagcaagaaggagggcccagacccacaaccagcaaccccc

SEQ ID NO: 37139 - RNA, 77 nt, Homo sapiens
aggcacagagaaccgaccagaacgcagcaacaaagcaaggacaacagcccagaacggacgcaccgggacggaccgga

SEQ ID NO: 37140 - RNA, 77 nt, Homo sapiens
caaagcaccaccgcgccggagcgcaccaggcaagaaagcgcaaggggaacgcacaacacagcaaaggaaccagggac

SEQ ID NO: 37141 - RNA, 56 nt, Homo sapiens
ccgcgccggagacaagggcacacacgcaccagaagaagagaagggagaggacgaga

SEQ ID NO: 37142 - RNA, 108 nt, Homo sapiens
gggaggcccgagaaggaggggagagccacacaccccgaccacgcggccgagaggacccaaagacaggaccacgcaccagcagagaaggaaagcaaaccgaagcaggcg

SEQ ID NO: 37143 - RNA, 50 nt, Homo sapiens
gagcagagaaccacccgaaggaagccgggaggaaggagagcccggaccca

SEQ ID NO: 37144 - RNA, 77 nt, Homo sapiens
gggccagccagaaccaagacacacagggagccagcaccgagcccccgggccagcagcgaagacacaaagcaaggcca

SEQ ID NO: 37145 - RNA, 75 nt, Homo sapiens
aacagcccgcagaaaagacagaaacagacagacagagagaaccaggcgcaacagggggcaggagggacagagacg

SEQ ID NO: 37146 - RNA, 70 nt, Homo sapiens
caagaagacgcggcgccagcgggaggcccgacccaaagcagcggcccaagggaggacggaggcacaggag

SEQ ID NO: 37147 - RNA, 84 nt, Homo sapiens
cccaggggcagggcagcaggcccaaacccccacagaaagcaaaccccacgagaacaaagcacggcagaaacggaaaaaaaccaa

SEQ ID NO: 37148 - RNA, 81 nt, Homo sapiens
gcagacggaaacgacagaagcagagcccgccccccaaagcgaagccaaagcgaaggcaaaggccaagaaggcagggaaagg

SEQ ID NO: 37149 - RNA, 68 nt, Homo sapiens
accacccagcagcagggcacaagggacacacaggaagacgaacacggaacgggcgagaagaaagcaga

SEQ ID NO: 37150 - RNA, 82 nt, Homo sapiens
ggcggacaaaacgccaggcggaccagaaggccagcaaagaaagagaagcccagcgagggggagagaagacggagaccagcgc

SEQ ID NO: 37151 - RNA, 91 nt, Homo sapiens
cgggcggcggcggcggcggcggcggccgggacccagcgggccaggaccaggccaaccggagcgcacccacgccacaagccggacggcggca

SEQ ID NO: 37152 - RNA, 76 nt, Homo sapiens
caccacagacaagcccccaagccagccccaggagaacagccaaggaagagccagcgggggggacaggcaagaaaga

SEQ ID NO: 37153 - RNA, 82 nt, Homo sapiens
cacccgcgcgcgcccgggaggaaggaacgaggcaaggagcaaagcagcggcgcagcccggggacacccgcaggagcaaacag

SEQ ID NO: 37154 - RNA, 34 nt, Homo sapiens
cagaagcgggaaaaaaagacagagcccacagaac

SEQ ID NO: 37155 - RNA, 39 nt, Homo sapiens
cgcagcgccccccgcccaggccagcaggagaggaacccc

SEQ ID NO: 37156 - RNA, 76 nt, Homo sapiens
gaacaaaggaagaggaacccgaccgaaaagacccaggcgaaggcaggcacaacaagccaccacggcgaacccgggc

SEQ ID NO: 37157 - RNA, 74 nt, Homo sapiens
gcgacacgcgcgacggaggccgcagggccagaacaacgaacagaagaccacggcgggcccagggggaggcggcg

SEQ ID NO: 37158 - RNA, 74 nt, Homo sapiens
cgagggagcccggcccaggcagaccgggcccagcgagagcccgcgaaggaagggagagcacccaaaggaaagag

SEQ ID NO: 37159 - RNA, 72 nt, Homo sapiens
cgcggccgggagaggcaaggacagccggaggggaggaacagcccgagaaccaacacccggccggggcgccag

SEQ ID NO: 37160 - RNA, 65 nt, Homo sapiens
agcgcgaaaaaaaaaccccaggaaaggaacacggaaaaagcgcgggggggcgaaacacaggaccc

SEQ ID NO: 37161 - RNA, 70 nt, Homo sapiens
ggcccggagcgcggcccgaggcccgcccagaggaagaaaacaccggagcccaagacaccaaaacagacgc

SEQ ID NO: 37162 - RNA, 76 nt, Homo sapiens
ccggagaagagagaacagggcgcaaacaggagccacggaaagacaaaagaagaacggcccaccgccaccacccaac

SEQ ID NO: 37163 - RNA, 61 nt, Homo sapiens
cgagaaagcgcgcagcggaagagcagagccgggcaggccacgcagaacaagacagggaaga

SEQ ID NO: 37164 - RNA, 75 nt, Homo sapiens
ggcggaaggagaacaaagggagaagaggaagcccgacaacgaaggacccaaggccagccagccccaggcaccagc

SEQ ID NO: 37165 - RNA, 74 nt, Homo sapiens
gcaccgccgacccggaagaccgccgccgacacagaccagcgcgagagaacaccaaggagccccaaaccaaagag

SEQ ID NO: 37166 - RNA, 73 nt, Homo sapiens
gaaaaaggccacacgaaaagcagcacgacaccgccaagaaggacaagaaggaaaaagggaaacgaagaagggg

SEQ ID NO: 37167 - RNA, 70 nt, Homo sapiens
aacagccaagaaacggcgaggggagcacagagaacaagccagaaaaacagaaaacgcacgcaaggcgcaa

SEQ ID NO: 37168 - RNA, 79 nt, Homo sapiens
gggagacacaggaagagcgggccaaccggggacgagccagacggggcaaagaacaggacagggaggaccaacgcaaaga

SEQ ID NO: 37169 - RNA, 88 nt, Homo sapiens
cggcgaaagcacccgggcgcagccggagccgggccgcagcgcgaggccgggccgggggagaccgcgcagcacaacaagacgcagcggg

SEQ ID NO: 37170 - RNA, 77 nt, Homo sapiens
agggcgcccggaaaggcgccgaagagagagccagaaaccacgaagaggcccgaaagcggagccacggcaaaaaaccc

SEQ ID NO: 37171 - RNA, 68 nt, Homo sapiens
gcagaagcagagaggaaggaaaacccacccagaccgccagggagaaaagacgaggaagcccaaaaacc

SEQ ID NO: 37172 - RNA, 79 nt, Homo sapiens
cggaagacccggaggaagagaaccaacgagaagcagccggcccacacagggggaaggcaacccgcgggaagcccagcag

SEQ ID NO: 37173 - RNA, 80 nt, Homo sapiens
aacgaagacgggacggagaacagcaaagccggaagcaagccgccgggagaaggaagaacggcgagaggacccaagaagac

SEQ ID NO: 37174 - RNA, 63 nt, Homo sapiens
gagcgagagccggacccaccggagaccgggagcccaggaggggaaagcaggaccgaccaagag

SEQ ID NO: 37175 - RNA, 63 nt, Homo sapiens
ggcgcaggacaaccggacaaggcaggcgacgggcccgggacacccagacagagagagcgcacg

SEQ ID NO: 37176 - RNA, 74 nt, Homo sapiens
agcagccgggcggccgcgcgagccggcggcccggagggggcggcgggggaagaacacggaaaccggacagggac

SEQ ID NO: 37177 - RNA, 69 nt, Homo sapiens
agagcccagaaaagaaagcaaagagaggagagagaaacaccccggagggcaagaagcagcggagaacag

SEQ ID NO: 37178 - RNA, 63 nt, Homo sapiens
agcccacgcaagcggcgagaagggaacggagcacagcagaagacaagaagaagccaagagaaa

SEQ ID NO: 37179 - RNA, 101 nt, Homo sapiens
aacgcgccgccccccgcgcagccagcccgacgagcggcccggaccgggcagcggcagcggaagagaaagggcagggcaggcccggcagaagggcacaccag

SEQ ID NO: 37180 - RNA, 78 nt, Homo sapiens
gagccggacgggcacgggcgaccggcccgcgaggaaaagaaacgaagccgggcacggacaggacagagaaagcaggcg

SEQ ID NO: 37181 - RNA, 72 nt, Homo sapiens
gcagagagcgagccaaggcgaacgcaaggagggacaggacggaaggagcggaggaagacacaagagcgagcg

SEQ ID NO: 37182 - RNA, 72 nt, Homo sapiens
cgaagcggccgagcaggcgagcgaacgacgagcagggccggggaccgggcgaccagcccagcacacccggcc

SEQ ID NO: 37183 - RNA, 81 nt, Homo sapiens
acagcagccaaaggaggccaacaaagaaccaaagcagcgaccccagcagcagcgacagaccgacaagggagcagccgcaca

SEQ ID NO: 37184 - RNA, 75 nt, Homo sapiens
acgcacgaccgcgcgaccgggccggaccagagaaaagcggagccgcggagcccgggccagaccacaggaaagcgc

SEQ ID NO: 37185 - RNA, 74 nt, Homo sapiens
gggcgggcagcggcgccgggcacaggagggaagagcaagggcccaaaaaagggaaccgcacagcgagacacccc

SEQ ID NO: 37186 - RNA, 81 nt, Homo sapiens
gacaagagcaaagaaaggggcccggaaaggaccaaggagcggcgcggggaccaaacccggagccagccaccccgacccaaa

SEQ ID NO: 37187 - RNA, 53 nt, Homo sapiens
caaaagcaccggacaaagaaaaggcggagccgagaagcgggaacagaggaagc

SEQ ID NO: 37188 - RNA, 57 nt, Homo sapiens
gacgcacgcgaggagcggcaggacgcgaggagcgggcaagggaggaacaggggcgac

SEQ ID NO: 37189 - RNA, 88 nt, Homo sapiens
ccggagcggagacggcaaaggcggaccgacaccacgacgacgggccacagcagccggcggcggcagaggggcagcagcaggaagagaa

SEQ ID NO: 37190 - RNA, 77 nt, Homo sapiens
gcgcagcacagcggggggaggagggggggcggcaccaggaaaaagaaagacggcacagaacaaggcccgacagggaa

SEQ ID NO: 37191 - RNA, 76 nt, Homo sapiens
aaaccacgagagcccgcccaacaaacagaggacaggacgccgaaaacaccgggaggaggaagaacacccagaaaag

SEQ ID NO: 37192 - RNA, 81 nt, Homo sapiens
cccccggcgccgcgccggcggcgggcagcgggggcagagacggggaacagggccacccacacggacgccaacgcgggggca

SEQ ID NO: 37193 - RNA, 76 nt, Homo sapiens
aacagccccgaggcgaccaacagcagagccagcccccagacacagcaagggacgacaccaggccaccaccgcgcac

SEQ ID NO: 37194 - RNA, 79 nt, Homo sapiens
gacgacacgcaagcaggcaaccgaaacaggcagagccacgggcccgggaaccggaccagaccggcccagaggagccccg

SEQ ID NO: 37195 - RNA, 74 nt, Homo sapiens
cgcccgcgcggcgcggggaccgcggcccgggaaagacaaggagccgggccgagaaaccgaaccagagaccagag

SEQ ID NO: 37196 - RNA, 74 nt, Homo sapiens
aagccggaacccccccggagggaaaacaccaaggagcgcacaggaaacaaccgcaaccagccaaggcacacaag

SEQ ID NO: 37197 - RNA, 76 nt, Homo sapiens
gcaacggcagccaacgagggggagggagaaaagacgcagcaagcacgacgaacaagcgcagggccacggcccaggc

SEQ ID NO: 37198 - RNA, 60 nt, Homo sapiens
ggaccagcagccaccgggaaggacaggagcccaacggcccgcgcgcccagggagaagggc

SEQ ID NO: 37199 - RNA, 71 nt, Homo sapiens
aagcggaggcacgggcggcccgcaggaccggaccgggggaggcgaggagagacggaggcccaacggagaaa

SEQ ID NO: 37200 - RNA, 75 nt, Homo sapiens
gagggacacggaccgaaggagcagggccgccccgaggagagcgacgcccgggcgcgccccggcagagcgagccaa

SEQ ID NO: 37201 - RNA, 70 nt, Homo sapiens
aggaggggaggcgcccccggagccgccccggaggagaagggggcggaacaggaacggggagccgcgaaaa

SEQ ID NO: 37202 - RNA, 89 nt, Homo sapiens
gcggcggcggcaccagcagaacaacagcgaggaagaagaggacgacgacgacgaggaagaggaggcgaggagcgaagaaaccgcaaagg

SEQ ID NO: 37203 - RNA, 78 nt, Homo sapiens
accacccccggggcaacaaagacacgagaaaaggccaccccaggcccaggaaacaccagaaacaggaagaaaaaaagg

SEQ ID NO: 37204 - RNA, 76 nt, Homo sapiens
gaaaaagaagacgccagcaccaaaacaacgaacgagcaaggaagggccaaggcagaccccacaccggagaacgcaa

SEQ ID NO: 37205 - RNA, 71 nt, Homo sapiens
cgagggaacccgaccggacccagccccagaaggcccggcaccaagggccggaacgacagaaccacagggcg

SEQ ID NO: 37206 - RNA, 75 nt, Homo sapiens
ccagacccaaggaaggaggaagaaagcaaggaggggccagacccagcgccaccccccaccagaagcgaggacaaa

SEQ ID NO: 37207 - RNA, 49 nt, Homo sapiens
acccacacaccaggcgaaagggacgcaacaaagcagccagagaaccagg

SEQ ID NO: 37208 - RNA, 42 nt, Homo sapiens
ggggggcaaacccgagagaacggggggaaaggagacccagag

SEQ ID NO: 37209 - RNA, 75 nt, Homo sapiens
agcgcccgcaaccggggcgaacaggcggccgccaaggaaacaggagaagggcacccaagaagaccgaaggggagc

SEQ ID NO: 37210 - RNA, 77 nt, Homo sapiens
gcaagaccgccccgccgcccagaggacgcccaacaccacccacccaccacgcgcggaaaccgcggccggcacaaaac

SEQ ID NO: 37211 - RNA, 75 nt, Homo sapiens
gcaagagcgacgcagggccgaggccacagaaaaacagccaagcagaagaaccgaaaaacaagaaggagaagaaag

SEQ ID NO: 37212 - RNA, 63 nt, Homo sapiens
gacaacgacccggggaccgaaccccggcgaacagcaaggcacaaggcaccacccgggaaccac

SEQ ID NO: 37213 - RNA, 75 nt, Homo sapiens
gcgcccaggcgggaagaggcgaaggccagagcacgagcacgggaagaaacaacgaacgagcaaggaagggccaag

SEQ ID NO: 37214 - RNA, 76 nt, Homo sapiens
cggagcccacgccaccaccccccagccacccgaaggccaggccccaacacgcggagggaacagaaagaggaaagaa

SEQ ID NO: 37215 - RNA, 70 nt, Homo sapiens
cgaagcaggaacacagaaaaaggagagaaaacgagcagggacacaaagcggaagaaaggaaaggccaaga

SEQ ID NO: 37216 - RNA, 61 nt, Homo sapiens
cccgagggcgggacacaggagaacggaggagaagaacgaaaacgagacgcgcagcccggag

SEQ ID NO: 37217 - RNA, 80 nt, Homo sapiens
aacagccagggagaaagccggagccaagggccaaacagccgagagcagagaagacaaggaaagaagaggcaaaagaaaca

SEQ ID NO: 37218 - RNA, 81 nt, Homo sapiens
agcagccgcagcagaacacccccgacagcagcacacccacgaggagcgccaggaaagaggcagagacgaagcagaagcgag

SEQ ID NO: 37219 - RNA, 83 nt, Homo sapiens
aagaaggcgaaggaccccaacggggaggccaacggaagaaccgacaaccccggaacgcgggcaaaaggccccaggggaccggg

SEQ ID NO: 37220 - RNA, 86 nt, Homo sapiens
gggcaggcggaagcgcgcgggcaaggaaggcgcggaagagacaaagcaggaggacacaagaagggaggaaaggcggacccaggaac

SEQ ID NO: 37221 - RNA, 57 nt, Homo sapiens
caaagaaagggaaggggaaaaagaagcagacagcccacaccacccaagaagaccaag

SEQ ID NO: 37222 - RNA, 82 nt, Homo sapiens
cagaaagccgggacaaagcacgaacgagcacccaccagggccagcacgggacgggccggagaacagacggacccaccgcagg

SEQ ID NO: 37223 - RNA, 83 nt, Homo sapiens
aaggccggacggcccaaagaggagggcgcacagcgcccgaggacagcaaagagcccgggaagggcgcggagcaggcaaccacc

SEQ ID NO: 37224 - RNA, 75 nt, Homo sapiens
cacaacggccgaagcgccgagccagagccagggaacggaggagcgagccacggcggcagaaaaccaggcccagca

SEQ ID NO: 37225 - RNA, 64 nt, Homo sapiens
gcagccacaaggcaggcccagccaggacggagaaacaccaccaaggggaggcgcaggcggaagg

SEQ ID NO: 37226 - RNA, 67 nt, Homo sapiens
cagacccgcccgccagaaccgcgcgccacccacaaccaggccccgggggcgccgagggcacaagggc

SEQ ID NO: 37227 - RNA, 65 nt, Homo sapiens
ggggcagcgcacaaggcagcggaggagcggacaacccagagagaaacgccagaccacagcggaga

SEQ ID NO: 37228 - RNA, 70 nt, Homo sapiens
gcgcgggccccccccaccgcgcgagaggggagagaagccggacagagagcacagcaaaaaaaaaacaacc

SEQ ID NO: 37229 - RNA, 81 nt, Homo sapiens
cagaaagcaggcgaacccgcggcgcaaaacgcaccgaggagcaacacccccagggagcccagaccgacaggacgcaagggg

SEQ ID NO: 37230 - RNA, 81 nt, Homo sapiens
gaccaggacgacacgaaggaggaagaagagacgaagagacagcggagaagccacgccccgagaagccggaggggagcgcac

SEQ ID NO: 37231 - RNA, 70 nt, Homo sapiens
gccaaggacccagccggagacggggccacgacgccccgggcgcaccagacgccgccgcggggagcgagcc

SEQ ID NO: 37232 - RNA, 74 nt, Homo sapiens
cggaagacgcccggggaggagcaggacgcagaaccaccaaaagccaagaaacggccgagggcaaaggcacaaag

SEQ ID NO: 37233 - RNA, 68 nt, Homo sapiens
aagagaacaggacagagggcacaacggcaaagggggccgcagccggccaggggacccgaagggggcga

SEQ ID NO: 37234 - RNA, 80 nt, Homo sapiens
acacggacggcggggacgacggcaaggccaggcacacagaaggccaaaacccgcaaacacgagagaaaagaaagagagac

SEQ ID NO: 37235 - RNA, 107 nt, Homo sapiens
gaagcacgaaggaccaacggcaacagaaaagaaaagaggggcacagaaaaacaaagcagagaagagcgaaaacagaaagaacggacacgaagcacaaagcgaaagcc

SEQ ID NO: 37236 - RNA, 80 nt, Homo sapiens
agcgaggaggaggcggcacagagaccggcagaccgccgggggacggaggcccagaaacgaggggcgcacccaacgcgcac

SEQ ID NO: 37237 - RNA, 77 nt, Homo sapiens
gaacccgcaggggccaagagcgcggcgagagacccaggaggcagagccaggccccggcagcagccaacaggagcgga

SEQ ID NO: 37238 - RNA, 74 nt, Homo sapiens
ccccgggggccccgagcaaaccagggagcggacccgaggagggcggacaacccaggaggaggggggcagggacg

SEQ ID NO: 37239 - RNA, 70 nt, Homo sapiens
cacgggaggcagaccacgagaagccaggcgaacaagaggcgccagcgggcgcgccggaagaacagcgcca

SEQ ID NO: 37240 - RNA, 66 nt, Homo sapiens
aggaagcaggggaaagcccgggccaagcgggaggcgccagagacggggcacccgagccaggaggcc

SEQ ID NO: 37241 - RNA, 82 nt, Homo sapiens
acagacacggggaagcgcaaaaacaagacggggcgccccacagaggggcgacggcagaagccccagaggagcccgaaacccc

SEQ ID NO: 37242 - RNA, 74 nt, Homo sapiens
gagagacggcccagacgggggagaccaagaccggccggagaccaagcaagccagacaaagggcaaagcgccaag

SEQ ID NO: 37243 - RNA, 71 nt, Homo sapiens
aagcggacgccgcaggggaccccgcccggaaagaccacagcaagaccacgcccccagccgggggaccaggc

SEQ ID NO: 37244 - RNA, 72 nt, Homo sapiens
aggggaagcaggaccagccagcagccgggagcagcgccccgggcccgcacagcggagcgaccccaggcacca

SEQ ID NO: 37245 - RNA, 85 nt, Homo sapiens
cccgccgccagggccccgcaaagcgcgagacccgggcgggggcaccgagggcaccacgcgcggaccaaagagaggcacaacacag

SEQ ID NO: 37246 - RNA, 73 nt, Homo sapiens
cgcccgcggaaaaacacgaaagaaagaacaaagcacagcagcagaaaacaaagaaggaaacaagacaaaccag

SEQ ID NO: 37247 - RNA, 75 nt, Homo sapiens
cccgaggcccgcgaccgccgagccgcagccgccccgcggccaacagagccgcgcaagccccggggcagagacaca

SEQ ID NO: 37248 - RNA, 72 nt, Homo sapiens
gaaacaaagccaccaggcgcacaccagcacccggaaacaagccacgaaggagagaaaaccagcagcagcgca

SEQ ID NO: 37249 - RNA, 80 nt, Homo sapiens
gagacccaccgcaggacccacagaggagaagcaaaagcagcggcaagaacgcggccggagcgacaggccgacgcgaaccc

SEQ ID NO: 37250 - RNA, 77 nt, Homo sapiens
agaagaaacccacgaaccaaaagggacggacaaaggaacaggaccaggcaggccagggccaggaaccccagagccgg

SEQ ID NO: 37251 - RNA, 84 nt, Homo sapiens
ggagcgcggaacagcaggcccgagcccaccgcgccgggccccggacgccgcgcggaaaagggggaaggagcggcgcgcgcaacc

SEQ ID NO: 37252 - RNA, 81 nt, Homo sapiens
acggcggcgccgcggaccgcgcgccccaagccccgggacgaaaaacggaaacgccggaccaaaagcaagccagagagaacc

SEQ ID NO: 37253 - RNA, 39 nt, Homo sapiens
acaggaaccggagggggggaacaagaggcggagacagaa

SEQ ID NO: 37254 - RNA, 60 nt, Homo sapiens
gccagaggccaacccaggggcccgacccaggcaagcgagcaggcgagcaggagcccacag

SEQ ID NO: 37255 - RNA, 91 nt, Homo sapiens
agcacccagaagagagaccgcaacgagaacaaagggccgggagcgagagggccaagagggcgccgagccaacaggagcagcgcaggccgag

SEQ ID NO: 37256 - RNA, 64 nt, Homo sapiens
aaaaaccacagaaccaaacggaccgaaaccagacagccggaaaaacagggagagccacagaggg

SEQ ID NO: 37257 - RNA, 79 nt, Homo sapiens
gcagagcaggggccggaagcaccaggacaggcgggagaccagggccagcccggccacaccccaggcggcacccgccgaa

SEQ ID NO: 37258 - RNA, 76 nt, Homo sapiens
cagcccacggggacagcagcaaggcggccggcccgcggaaggagggcgggcccacgagggacgaaaacccgaggca

SEQ ID NO: 37259 - RNA, 77 nt, Homo sapiens
gggcgccccacagaggggcgacgggaagaggaacagagcgccagaaaggggccagaaaggggaagagaccaagccaa

SEQ ID NO: 37260 - RNA, 81 nt, Homo sapiens
caaagagccacccccagcaggacggaagaggacaccagcccgggagaagaggcaacacccgagcggggcccgaaaacgcag

SEQ ID NO: 37261 - RNA, 76 nt, Homo sapiens
caagaaggacaacagcccccacgagaacaggaacagaagaaacggaaaggcagggaagaagacggcacgggacccc

SEQ ID NO: 37262 - RNA, 84 nt, Homo sapiens
ggggggcggcgcgccaagacccggagcaccgcacaaacacgccacgcgcaggagcacacacggagagagacggggaccggagcc

SEQ ID NO: 37263 - RNA, 83 nt, Homo sapiens
gaagaggacagggagccccggggagggccagagacgccacgcgcccagccacgcccaggccaggccaggcccgccgccgccac

SEQ ID NO: 37264 - RNA, 77 nt, Homo sapiens
ggaaggacagcgcaggcccccgcccccgagcagccgagggcagcgcaagaccccgcacggaagcagcaagcacaggc

SEQ ID NO: 37265 - RNA, 58 nt, Homo sapiens
gcggaagaaccccccgggagccagaccggcaccgaagaccaccagacccaggaggagc

SEQ ID NO: 37266 - RNA, 114 nt, Homo sapiens
cggaacgacgggggaccgggagccccggccagcaagacccgggaggggcaggcggggggcacgacacggcgacccgcagggcaggggcaagggagccggagaaacccaaagaga

SEQ ID NO: 37267 - RNA, 80 nt, Homo sapiens
gcaggaaggagagccccagcgaggaagcacaccaccaaggaacgggcgcagcgagagagggaaccagaggacagacaaca

SEQ ID NO: 37268 - RNA, 76 nt, Homo sapiens
ggaggcggggagcgaacgcaaagagggcgcccgcggagaacaacaaggagcagaccgagggaggccccggagagcc

SEQ ID NO: 37269 - RNA, 74 nt, Homo sapiens
accgcgaccgagcggcagaccagcgccagcccacaggagagggcgcagaaaccagggcgaaggacgaggaccga

SEQ ID NO: 37270 - RNA, 72 nt, Homo sapiens
gccccagcaaacgagacacgaaaacgaaacaaaacaggcgagaacgcggacaagcaaacaaagaggaaaaag

SEQ ID NO: 37271 - RNA, 99 nt, Homo sapiens
agggaaagaagaaaaagcccagacgggagggaccacagcccagcaccgaagggccagggcagaaaagaggaaaaaaggacaggcaccgccccaaagagc

SEQ ID NO: 37272 - RNA, 69 nt, Homo sapiens
aggagaaggcaggggggcggcggccgagccaagcggcccgcgcacacaccccacccagaacgccacgga

SEQ ID NO: 37273 - RNA, 75 nt, Homo sapiens
ggaaaacagcgcacaaggaggagaaaaaaacccgcccacggagcaaccaagagccaccccagacaccaagagaac

SEQ ID NO: 37274 - RNA, 79 nt, Homo sapiens
acccaaggacgggacgggagggcaaacaagcaggacagcaagacccaaagaggccagcccgcagcgggcccaggcggag

SEQ ID NO: 37275 - RNA, 83 nt, Homo sapiens
aagagcaccagcgcacggcagaagaaagcagcggccagaaaacaggccaccccgaagaggccaagcaacggaagacacacgaa

SEQ ID NO: 37276 - RNA, 81 nt, Homo sapiens
ggcgcagcccggaaagccggcaagacgagaaagcaggaaagcaacaggcccgcagaaacccagcaggacgaccaagggagc

SEQ ID NO: 37277 - RNA, 50 nt, Homo sapiens
gcggccgaaacagaaaacaagagaccacagaaggaggaagacgcacgccg

SEQ ID NO: 37278 - RNA, 80 nt, Homo sapiens
acgcccaccacaccgggagcaaggggaagagagcacaacaggacagggcagaccgccagcagcacagcaagccacagaga

SEQ ID NO: 37279 - RNA, 73 nt, Homo sapiens
cacaagaaacagggagcgcgaaccaccaagggggcacaccaggacagagcaaacagaaggggacccagaagcc

SEQ ID NO: 37280 - RNA, 73 nt, Homo sapiens
caaagaggacaaaagagcggaggagcggcgaggaaccaagaccggcagcgggggagaggggcggggccaacgg

SEQ ID NO: 37281 - RNA, 75 nt, Homo sapiens
gcaccagaccaggcggcacccgccccgaggaggggaccagacacagaaagaccacagcaagaccacgcccccagc

SEQ ID NO: 37282 - RNA, 83 nt, Homo sapiens
ccaacagcgccccggacgcaccagagccaggcgcacgagagacaaggaggggcgcgccgcccacccccaaagccacacgccgc

SEQ ID NO: 37283 - RNA, 86 nt, Homo sapiens
aaacggccgccgggaaacagaagcaaccaagcaacaggagcaaaaaggggccacaacacggacaccagccgaaagccggaaagcgg

SEQ ID NO: 37284 - RNA, 75 nt, Homo sapiens
caggcacgccagcagcagaacacaggcgacacaccaaagaaaaaacacaccaagcagaaacggagccaaggggca

SEQ ID NO: 37285 - RNA, 84 nt, Homo sapiens
gaaccacggacaacccagaggacaacgaaggcgggcggcacccaccccccgagcccgcccgccggccccagcccccaccagcag

SEQ ID NO: 37286 - RNA, 85 nt, Homo sapiens
caaggaagaagaagcagcagccagaaaaaaagaaaagaaaaccagcggcgagcccggaagagcaagagagacggggcacgagggc

SEQ ID NO: 37287 - RNA, 73 nt, Homo sapiens
acgaagaaagaaagaaccgagagaacgagcacccccgaagcacccaggaaggacacagacaaaagaccaggag

SEQ ID NO: 37288 - RNA, 32 nt, Homo sapiens
acagcgcccagagaggaacacaagaggacagc

SEQ ID NO: 37289 - RNA, 73 nt, Homo sapiens
gaggcagccggcaagaaaacgcgcaaacacaggacaaagagaaacaaaccgcaaggaagggacgacgaagaaa

SEQ ID NO: 37290 - RNA, 55 nt, Homo sapiens
gagagcacccaacaggcgaacaagacaccccccgcgaagcccaaacgccaagggg

SEQ ID NO: 37291 - RNA, 69 nt, Homo sapiens
ggacaaggaacaggcagggccaggaacaacgcggacagggccgaaagccacgagcccgaaacgggccga

SEQ ID NO: 37292 - RNA, 83 nt, Homo sapiens
ggcgcaaccagcccagggcggcggaggaccgcacaggacgagcgaagacagggaaaagaaaagggcgccgaagaagccacgag

SEQ ID NO: 37293 - RNA, 78 nt, Homo sapiens
agccagagccaccagcgcagcgcgccaggagcccagcagcaaggaaagacaagacaggcaaaacccccccaggagcca

SEQ ID NO: 37294 - RNA, 72 nt, Homo sapiens
ccgggcaagaggcgcgaggagggacaagagaaagagcaaaggcgccaagggcggagcaggacccaaagaagc

SEQ ID NO: 37295 - RNA, 73 nt, Homo sapiens
gcgcgcgggaccacccgacacgggaggggaggacccgggacaccgcacagccgggaaaggagggccacagcac

SEQ ID NO: 37296 - RNA, 56 nt, Homo sapiens
gaggggcaccgccccaggcacccacccccaagaccaagggaagggcgccggaaaac

SEQ ID NO: 37297 - RNA, 34 nt, Homo sapiens
gcgaaccacagcaaaaaagagaagaaaccagagg

SEQ ID NO: 37298 - RNA, 69 nt, Homo sapiens
acccaagcggccgggcccggcagccccgacgcagccgggaaggaaagggagcggccccaccaaacgaca

SEQ ID NO: 37299 - RNA, 59 nt, Homo sapiens
gcgggcagcggaagcgagggaaacacacagaagaccgcagaccaagggagcagggcggg

SEQ ID NO: 37300 - RNA, 53 nt, Homo sapiens
gaggaaaagggccagcggagcgaccagaaaacgaccaggacagaaaccaccga

SEQ ID NO: 37301 - RNA, 37 nt, Homo sapiens
aggacgacagccagagaggacgcccccgggccaaacg

SEQ ID NO: 37302 - RNA, 76 nt, Homo sapiens
gcggcaggaaggccaccacagggccaacaagcagcgaggaagggccaaaggaacacacagagcccagcaaggccac

SEQ ID NO: 37303 - RNA, 76 nt, Homo sapiens
caccagaacacaaaaggagaggggcaaagaccgcggcacggccaggcgaacacacacaaaagacaccacacggaga

SEQ ID NO: 37304 - RNA, 73 nt, Homo sapiens
gcacggcaacccaccaagcagagaaccgggccaagggcagggagaagggacaacacagaacacagaccagggc

SEQ ID NO: 37305 - RNA, 69 nt, Homo sapiens
agaagcagaaagaggagaaggagagcagacgcaaacaacggagacaagggcagagccaagcgccgcccg

SEQ ID NO: 37306 - RNA, 79 nt, Homo sapiens
accaccacaagcgcagccacaaccaacaagaaagacccccggaaagccagccccaacagacaacgaagagaggaaagaa

SEQ ID NO: 37307 - RNA, 86 nt, Homo sapiens
ggcaaaacagaacacgaagcaagcaggagagacggggccaagggaaccagccagcgccgccggcagcgaacgggcccggggcggag

SEQ ID NO: 37308 - RNA, 73 nt, Homo sapiens
aaggcacgagaggacgagcaaccgacgacccggaggggacccggcagcagcaaagccaaaaccaggggccggg

SEQ ID NO: 37309 - RNA, 78 nt, Homo sapiens
acggccgaggccgacgcaggggcccggaagggaaacgcgaggcgaagggaccggggaccgaggaagaccgcaggaaag

SEQ ID NO: 37310 - RNA, 75 nt, Homo sapiens
acacccgagccgagcccgacaaccgaggccccccccgacaggagagaaccgcggccgggccgcgccgggcgggcc

SEQ ID NO: 37311 - RNA, 75 nt, Homo sapiens
gagaacagaggcgagagcggcagcagcaccagcccaagagaaggcaaaacacgcagaaccaaccagcaacgccac

SEQ ID NO: 37312 - RNA, 74 nt, Homo sapiens
aacggggaacgacggcccagcaggcggggaagagaaaggaaccgacagaaaaagcaaaaggaagacagaagagc

SEQ ID NO: 37313 - RNA, 82 nt, Homo sapiens
gcgcgaggaggaaaggaggacgaggggccgggagaggaaagcggccgagaggaaaacagaagaaagagccaaaagacacagc

SEQ ID NO: 37314 - RNA, 85 nt, Homo sapiens
aaagccacaccaggggagcccggggacccccacccccaccccagacacaacagccaagcggagcgacaagagcgggaccgacaaa

SEQ ID NO: 37315 - RNA, 67 nt, Homo sapiens
agaacccaagccaggcacccaaaaaaacggcccagagagcaaagcccgaggacggacccggccacca

SEQ ID NO: 37316 - RNA, 85 nt, Homo sapiens
agcccggcgggaccagcaccagcaccggcccaggggccggaagaaggagaaagggccaaccccgaagaagcaaacagaaacgaag

SEQ ID NO: 37317 - RNA, 79 nt, Homo sapiens
gggagacgacgcgcgggccgcgagcggggcgacccgaggaccgcgcagacgcgcaggacggagcggggccaggcggcca

SEQ ID NO: 37318 - RNA, 75 nt, Homo sapiens
ggaaagaaacaaaaacgggaaagccggcaagagggagaaggacaccaggcagaggcaaggcgaaacagaaagcag

SEQ ID NO: 37319 - RNA, 76 nt, Homo sapiens
cccaaagagcgagacagaagacaacggcgaccagcccaccgaaaggagagaagcaggggaccgcccagggggagga

SEQ ID NO: 37320 - RNA, 86 nt, Homo sapiens
ccagcagcaaaaggggcaaggggaaaagacaggagagcaagcccacccgcgagaagcggaagagaagaacagccgagacccagcgg

SEQ ID NO: 37321 - RNA, 68 nt, Homo sapiens
cagaccgaaaacgaacgacgaccccaacagaagagagcaaaagcagcagggaaacagcagacagcccc

SEQ ID NO: 37322 - RNA, 71 nt, Homo sapiens
agaagcgcggcagggagcgcgggggcccgcgcagcagcgaccacgagcccaaaaggcagagcgaggagaga

SEQ ID NO: 37323 - RNA, 70 nt, Homo sapiens
cagagcacaacaccacacacgaagagaacacaagggaaagaaggacagccagcacgccgaggacccccgg

SEQ ID NO: 37324 - RNA, 87 nt, Homo sapiens
aggagcgagagcgggaacaggaccggcgggccggaagacggcagcggccccggagacacaccggaagggaaaaggccgaggcacagc

SEQ ID NO: 37325 - RNA, 67 nt, Homo sapiens
cccgcggcgagccaaaccccaaaacccgcagccggccggcggccggcggaagccagaaaagaaacag

SEQ ID NO: 37326 - RNA, 82 nt, Homo sapiens
agggcaaaccggaacccacccgagagcaacaaagcaggcgacacagccacggaaggccggggggggcacagagccccggaag

SEQ ID NO: 37327 - RNA, 82 nt, Homo sapiens
ggacacccccaggaccaaccgaaagcacgagagcccacgaacggcgggaacagaaagccagaggccggagagcgcagacaca

SEQ ID NO: 37328 - RNA, 78 nt, Homo sapiens
agcaaaaggcggacaggcagcccggagagagagaagagagaacaaaccggggcgccaacccgaaagcagcgagacaca

SEQ ID NO: 37329 - RNA, 82 nt, Homo sapiens
ggccagaggacagacaggccagggcggcgacggcggcgcgaggaccgaccgggcccgcggacgaagaaggcacccccccgcc

SEQ ID NO: 37330 - RNA, 77 nt, Homo sapiens
gaccgagagccgcccggaccacaccaaggggcgcggggggccaccaacacccccggaacaccagacccaaaagcagg

SEQ ID NO: 37331 - RNA, 79 nt, Homo sapiens
acaggccaagagagccgaacccaccgagccagggaggagaaagacagcaaagaaaaggagaagaaaggaaaaaaacaac

SEQ ID NO: 37332 - RNA, 77 nt, Homo sapiens
aaccagaaacggacacccggagcagggcggcaaaaaacaagcaaacagaaaaggcccgaacaggggccgagaaacag

SEQ ID NO: 37333 - RNA, 70 nt, Homo sapiens
accccacccaaccagaagcagaagaggcacggacaagaccgggcccggcagcaacggaccgaacaccgag

SEQ ID NO: 37334 - RNA, 65 nt, Homo sapiens
acaaaagaagaggcaaagacccaggaaagcgcacacaagagagggccgggcgggaagaaaggaaa

SEQ ID NO: 37335 - RNA, 55 nt, Homo sapiens
gaccggccagacgaccccacgcgaaggggcacacggcaaacaccagcaacacccg

SEQ ID NO: 37336 - RNA, 85 nt, Homo sapiens
gagcggagacagagaggaccgagcgcgggcaggcgggaggcaacggagcaccagccggagcaacacaagcggaaagaaggaaccg

SEQ ID NO: 37337 - RNA, 60 nt, Homo sapiens
cagccgcggccgggcccgagacgaagcgcagaaggaacaagggacagggggaagcaaagg

SEQ ID NO: 37338 - RNA, 62 nt, Homo sapiens
cccaaacgcgacgccaagcagccgggacaaggggcgaaggagaaagaaacacccaaaacagc

SEQ ID NO: 37339 - RNA, 78 nt, Homo sapiens
ggcggaagacagcggcgaggagaacgcccgcggacgacccgagagacgaagaggagcagaaccagaagggacacacag

SEQ ID NO: 37340 - RNA, 60 nt, Homo sapiens
cagaaaccccccccccagccaccaagagaaggcccgacgcagagacggaagaccaccggg

SEQ ID NO: 37341 - RNA, 79 nt, Homo sapiens
aggacagaccaaaaggcgcgccaaagcgccaaaaaccgcacgcgagggaaccagcccagagggacgccaaccgcacacc

SEQ ID NO: 37342 - RNA, 71 nt, Homo sapiens
cccgacggacagaccaacgggacaagaagcagccaaaggcagggaagaaaaagaagacaccagagaaacac

SEQ ID NO: 37343 - RNA, 53 nt, Homo sapiens
agggacaacacagacccaccagcagagaacgcaggagaaaagagaagagacac

SEQ ID NO: 37344 - RNA, 81 nt, Homo sapiens
cgcccggagggggccccaccgggcccgaaggcgcgagaagggagcccggacaggaccaacggagagcggagcgggaggacg

SEQ ID NO: 37345 - RNA, 69 nt, Homo sapiens
gaccaaccccccccaaggcggaagaagggacagcccaaaggaaacaggccggaacccaggaaggccaag

SEQ ID NO: 37346 - RNA, 60 nt, Homo sapiens
gcaaagcgcgaaagagccccgcggcagaaggaccacgggaggcagaccccgacgacacag

SEQ ID NO: 37347 - RNA, 73 nt, Homo sapiens
ccccggcccacaggggggggcaaacccgagagaacgggaccaaggacgagcacaaggcaagaccgaagcaggc

SEQ ID NO: 37348 - RNA, 72 nt, Homo sapiens
gagaccgccccagccagcccccccaccacccagccgagaacggccgaggaaggcgggggaggagacagcggg

SEQ ID NO: 37349 - RNA, 69 nt, Homo sapiens
gcgcccggcgccggccgagaaggcagaggcgaagagcccggaacgccagagcggaaaggaagagaacgc

SEQ ID NO: 37350 - RNA, 81 nt, Homo sapiens
cgaaaacgagggaccacacaaagacagccacaggcgggaccagcccacacccaaggagagaaggacaaaccggcgaccaca

SEQ ID NO: 37351 - RNA, 105 nt, Homo sapiens
cgggcccagacaaagacagcgggacagccggccaaggagaagcccaccagaaaaagcggggaaggggggcaaaaaaaagaagcaagcgaagcaccgagcacccac

SEQ ID NO: 37352 - RNA, 76 nt, Homo sapiens
gagggagacggagagacccgaaggagcgaggccgcccagaggacccagccaggccaccaaaaagaggaagcagcga

SEQ ID NO: 37353 - RNA, 106 nt, Homo sapiens
ggaaccccccgaggccggaccagcaaggggaaccacggaagacgcccaccaacggcccggcgggacagcaccccccgccccccagaagcccccgccacccgcaccg

SEQ ID NO: 37354 - RNA, 73 nt, Homo sapiens
gggcagggcagccggacgcaaggcaagagcgaaggagaaaggcaacaaggcccgagcggggaacacgagagcc

SEQ ID NO: 37355 - RNA, 86 nt, Homo sapiens
cggccgacaacacagggcgggggaggggcggagacaggcgaggaggaggcgcaccacggagaaaccaaccaaagccgcccaggaag

SEQ ID NO: 37356 - RNA, 83 nt, Homo sapiens
cgcggggagggggcgaacgcaggggagaggagaagagagcggcggaagggaagcagcgaggcccacagagacgagaaacgccg

SEQ ID NO: 37357 - RNA, 82 nt, Homo sapiens
acgacagggcagggcagaaagcaggaagggcaaagaagggggaacgcacggaaaaccacagccggaaaccaagaagaggccc

SEQ ID NO: 37358 - RNA, 75 nt, Homo sapiens
ggcggacaagagcacacgaggggaacccaggaagaccaggcaccgagccaggaaagcccaagagacacaggaaag

SEQ ID NO: 37359 - RNA, 78 nt, Homo sapiens
gcgcgaggagaacggcggggggacgccacacagcacaacacaacacgccccgaagagcgagccacccccggcgcccgc

SEQ ID NO: 37360 - RNA, 77 nt, Homo sapiens
cgggggcggccgggacggaggacgcgcagaacagccagcaaagacaagagcagaccagcagccgcagcgcgacagcc

SEQ ID NO: 37361 - RNA, 40 nt, Homo sapiens
ccaaagacgggcagaagcgcagcgcacagcccagcggagg

SEQ ID NO: 37362 - RNA, 72 nt, Homo sapiens
accaacaagacgagggcgcagcacagaccccaaaggccacgaaccgcgggcaaggaagagacaaggaaacca

SEQ ID NO: 37363 - RNA, 51 nt, Homo sapiens
caacacagaacgaagagaagaagcgagcgcagaaccggccgaaaagcacaa

SEQ ID NO: 37364 - RNA, 83 nt, Homo sapiens
gacaagcggaccaagccagacccaagcaaaccagccagcacgggggcccagccagccagcagcgaggggggacggaggcggca

SEQ ID NO: 37365 - RNA, 77 nt, Homo sapiens
ggccacagaaggcggaccccagccgagaggaccgggcagccagcacaagggggcagcccacaaaaggagaaagaccc

SEQ ID NO: 37366 - RNA, 74 nt, Homo sapiens
caaccgacgcacacaggaaacccagcacaggggaaaaggccaggccaggagcgaagacgcgaggagcgccagaa

SEQ ID NO: 37367 - RNA, 44 nt, Homo sapiens
gggacaggacccacgagcgagacaggccagagccagcacccacc

SEQ ID NO: 37368 - RNA, 75 nt, Homo sapiens
acacggaccgcgcccgccgggcacacaagaaggcacgcccgggggggaggcccgagggaccccacgaggggaacc

SEQ ID NO: 37369 - RNA, 62 nt, Homo sapiens
aagaagggaaggcgcgaggaggaaaggaggacgagagagaggaccagaaccagaccggaaag

SEQ ID NO: 37370 - RNA, 57 nt, Homo sapiens
cagagccgcgacaaacccaggagggcgcggcggagggccggggaagcaaagaaaccc

SEQ ID NO: 37371 - RNA, 56 nt, Homo sapiens
cgggagaaaggcccagagaaggaacccaccaaggggcgggcacaagggaagacagc

SEQ ID NO: 37372 - RNA, 73 nt, Homo sapiens
agacgccaacgcaggagcacccagagccgagcccggaagccggcaagacaagcgaggcgccagccgagaaaac

SEQ ID NO: 37373 - RNA, 54 nt, Homo sapiens
ggaacagcgggacccagcgaccaggcacaggaccagggcccgggccacagcggg

SEQ ID NO: 37374 - RNA, 73 nt, Homo sapiens
aagaacgcaggaaaagaacccaagaccccagccgggagaaacagagagcaggcggaaagcggccgccggggcg

SEQ ID NO: 37375 - RNA, 85 nt, Homo sapiens
ccgcccgagccggagcgccagccagcggcccacccggggggcagcaacggcgacaccagcaaggagagggccaagccggaagaag

SEQ ID NO: 37376 - RNA, 80 nt, Homo sapiens
gcgacagagacaagcgagcgccgcacaaaaagcagagaggagcgaaggcagccgggggaaggcacagaacagcaggcaaa

SEQ ID NO: 37377 - RNA, 61 nt, Homo sapiens
agaacgaaaaaagagaacggacaaagaggaggcaggacagaggggaagcggagcgacggac

SEQ ID NO: 37378 - RNA, 63 nt, Homo sapiens
agcacgcagacaaggcaccaacagaacggccccaaaggagcggaggaggagcagcaggccccc

SEQ ID NO: 37379 - RNA, 91 nt, Homo sapiens
gcgaccccggaccagcagcccccgaaccgcgcgcgcccagggcccggccgacccgcggcccgccacagcgcggagaggacaacccggacca

SEQ ID NO: 37380 - RNA, 62 nt, Homo sapiens
gcaggaaaggaaccaggagagagcagccagaggcaggagcgagaacccgagcagcgccagag

SEQ ID NO: 37381 - RNA, 74 nt, Homo sapiens
ccaccaaaaagccgggaacggggagaagcccgacagagaaaggagaaaaggccgacggagagaaccagaagggc

SEQ ID NO: 37382 - RNA, 78 nt, Homo sapiens
gccgcccccaccagacagacgcgcaaaacccagaacaggcaagggccaagacaagcccagagggccgaggaacggccc

SEQ ID NO: 37383 - RNA, 79 nt, Homo sapiens
cagaccgacagggagggagggacggaaacaaagacaggagaagccgcgggagcggaagacaggcccggagcccgacgga

SEQ ID NO: 37384 - RNA, 83 nt, Homo sapiens
acgaccggaccgaggaggcagcgcggggcagcgcgagccgggaagaggccacaagaggaagcgaagaagaggacgccgccagc

SEQ ID NO: 37385 - RNA, 73 nt, Homo sapiens
aacacacgggaagaaaagagaagcgcgagccaaagaacgcagaagcgggacagacaagccccagccggaaacc

SEQ ID NO: 37386 - RNA, 82 nt, Homo sapiens
cacgccaggaaaagaacgccaccccagagaaagcaggagcccggaaaggagaaggaaaagacggcaggaggaagagagagag

SEQ ID NO: 37387 - RNA, 73 nt, Homo sapiens
cagagcgaaaaacagggaggaggggacaccaaaaggagcacgcaaccccaccaccggagggcaggccccaccg

SEQ ID NO: 37388 - RNA, 71 nt, Homo sapiens
gaacgaagaaaagaaaggccaagaccaggaaaggaagggcaccaggcacgcagggcggaagagcaaaggac

SEQ ID NO: 37389 - RNA, 55 nt, Homo sapiens
cggagggccgcgccacaagcagcaggccaagaacgccaacggcaagaaagggaag

SEQ ID NO: 37390 - RNA, 73 nt, Homo sapiens
accggaggccagaaaaggaaacgaccccggccgagcgaggagcaaaggacccgaagacacccaggggaagagg

SEQ ID NO: 37391 - RNA, 83 nt, Homo sapiens
caacacccacaccagccacgcgggcgaggagggcacaaggccaggcccaagagccaggggccaagcaagaggagccaaccgcc

SEQ ID NO: 37392 - RNA, 77 nt, Homo sapiens
gccgccggcccccgacagcagcgggaggcgggcggcggggcggcacggcggccgccacacaggggagccgccacgcg

SEQ ID NO: 37393 - RNA, 63 nt, Homo sapiens
ccaggccgcccgacccaaagggaaaacagaaacagaaccagaagcggaaccggaagaagacga

SEQ ID NO: 37394 - RNA, 72 nt, Homo sapiens
gcccaagcaccgcgcacgcacgcggaaagggagaacgggagaggagcggaaacgcccgaggggacccaccag

SEQ ID NO: 37395 - RNA, 78 nt, Homo sapiens
aggaaccccggaagccagaaagggcccggcaggaaccggaacaacccacagggcagagcggagaagccgcacgaagga

SEQ ID NO: 37396 - RNA, 80 nt, Homo sapiens
ccgaggagagcggagaaaaggaggacacaaggccggaccggacaaaggccacgcgccccggccggccacaacggcggcac

SEQ ID NO: 37397 - RNA, 91 nt, Homo sapiens
gccgccaccgcagcaggcacagcccccgaggcgacagcggccccgccgcaccagagcagcaggcagcgccaacaaaaaaaaaccaagaaac

SEQ ID NO: 37398 - RNA, 70 nt, Homo sapiens
ggacggggcccgcagggcccggcccccgaaagggaccgacgaggagggccaagaacccggaggagagcag

SEQ ID NO: 37399 - RNA, 75 nt, Homo sapiens
aggaaaccacccagagacagaagagcaaaaggaaccgaggaaaagggagaagcccgacagagaaaggagaaaagg

SEQ ID NO: 37400 - RNA, 73 nt, Homo sapiens
aaacagccacgagagacgagcaacccccgggaagccaagccgcaggcagccacagggccaccaggagggggcc

SEQ ID NO: 37401 - RNA, 75 nt, Homo sapiens
cgcggagaccccaccgccggcgcgggaaacgggcgaagcgacgagccgcgaggaggagccgcccagcaaaaccca

SEQ ID NO: 37402 - RNA, 70 nt, Homo sapiens
agcacaccgaaagccacagcaagaaggccgaaagaagaaaacccgagcagagaaaacaacaaagcgccca

SEQ ID NO: 37403 - RNA, 74 nt, Homo sapiens
ccgcagaccgcagaaggccggagacaccagcagggccgggccagcacagaaggaagagaagacaagaagcccaa

SEQ ID NO: 37404 - RNA, 62 nt, Homo sapiens
gcgaggaaaggccgaggagccggagccgcaggcgggcaggaacgcaggaaaagcccccagag

SEQ ID NO: 37405 - RNA, 79 nt, Homo sapiens
ggccccagccgcaggggaaaaaacacaccagccccccgagcccagaagcaggcaccccgcaaaagcaaggcaaaccagg

SEQ ID NO: 37406 - RNA, 69 nt, Homo sapiens
aaggccgcccccaccggacgaggccccccaaccaggcaaacggacgcgcaccacagacccaggaacaca

SEQ ID NO: 37407 - RNA, 38 nt, Homo sapiens
cccgaccccccaagcagggaagcagccgagaggcgaga

SEQ ID NO: 37408 - RNA, 56 nt, Homo sapiens
gaccacagacagaagcaacagccgaccagacaggccgggaacccaacaagggagca

SEQ ID NO: 37409 - RNA, 71 nt, Homo sapiens
gaaaagaaagcagggaaaaaagcagcaaacacgggacaaaaaccagaccagggagaagccaaaggccaggg

SEQ ID NO: 37410 - RNA, 58 nt, Homo sapiens
gagggcggcccggaccgggagacacggccagacgcccccacccaaggggcgccgccaa

SEQ ID NO: 37411 - RNA, 78 nt, Homo sapiens
ggacgacgggaccaaccccgggggcccccccaggcagcaagccaggagccggccacccccccaccaggaggcagccag

SEQ ID NO: 37412 - RNA, 80 nt, Homo sapiens
agagcgacagcggcgagcagaacacggcgagcgggaaaaccagagacccagacacgcgaaggaacgaaaggccaaaaggc

SEQ ID NO: 37413 - RNA, 74 nt, Homo sapiens
cccgagaaccgcaggagccagaggcccgaaaagaaagcgaacacacaaaacaagaaaaggcacgcaaacccaca

SEQ ID NO: 37414 - RNA, 73 nt, Homo sapiens
cggaggcgaacagggggacgggggcagggaggaacaaaacgggggaaagacacccgcaccagcgccaaccgga

SEQ ID NO: 37415 - RNA, 34 nt, Homo sapiens
ggcacacggcacagaccaggaaccgcacaaacgg

SEQ ID NO: 37416 - RNA, 73 nt, Homo sapiens
ggagacgaggggcaacgaccgcggggaagaaggccgcgaaaagccagccaggagcccgcccaacagccgacac

SEQ ID NO: 37417 - RNA, 86 nt, Homo sapiens
cccgcacggacaccggcggccccaccagcagacgcagccgagacaccagcccgaaacaccaccaaggcccacgaagaggacgccag

SEQ ID NO: 37418 - RNA, 82 nt, Homo sapiens
gaacagagggaggaagaagaggaggacgggaggaccggaaaaaggaaaaggcgccagcggaaaccacgccaagaaggcgagg

SEQ ID NO: 37419 - RNA, 125 nt, Homo sapiens
cagcacacaagagacgggcgcagcgcccggcccgaggcccaggacagccaggcaccagcaccaagaggaaacacaagaccggaggccacggacccgcgaagagcgacggccccagggacaaggag

SEQ ID NO: 37420 - RNA, 46 nt, Homo sapiens
acaccgagcccaaccagaacgaagcacgcaaaagcggagcaccacc

SEQ ID NO: 37421 - RNA, 34 nt, Homo sapiens
cagaacaggaaaaagggccgagaaaccaccaggc

SEQ ID NO: 37422 - RNA, 61 nt, Homo sapiens
ggcaagcacaaaaggggccagccggaacccagacagcccagcagcccggccccagcggccc

SEQ ID NO: 37423 - RNA, 72 nt, Homo sapiens
acggcaagagcggaagcaagcacaggccccgcccgcccggcagccaggagccaccgggcgcacagagggaag

SEQ ID NO: 37424 - RNA, 34 nt, Homo sapiens
aacaagcgccagagggcacaaccaccccggccca

SEQ ID NO: 37425 - RNA, 68 nt, Homo sapiens
gcacgagccaagcaaggaaagccaaaaggcaaccgcacacaaggaggccccggcaggccacccggccc

SEQ ID NO: 37426 - RNA, 56 nt, Homo sapiens
gcggacggaggagcaggcgagaagagaagccccagaccagcgggccccgccgacgg

SEQ ID NO: 37427 - RNA, 76 nt, Homo sapiens
cggagaagccgcggcggcagcacgacagcgccggcaacacgcggcacaagacggcggagaacggaaaagcaccagg

SEQ ID NO: 37428 - RNA, 72 nt, Homo sapiens
acgccgcgcagcccggccgccggcccccaacagcgccggagacaaagaagagccagaggacaacagcggaaa

SEQ ID NO: 37429 - RNA, 81 nt, Homo sapiens
acgaaaggccaaagaaaaaggaaaaggcagaagcagaagacaagcacagccgggcagccacacaaaagggaagcgggcaga

SEQ ID NO: 37430 - RNA, 86 nt, Homo sapiens
ggaaccgggagacaccgagaaaccagaggaaggaccccagagaagacaggcagcagagaccacacggcggcgcagacgccccccgc

SEQ ID NO: 37431 - RNA, 80 nt, Homo sapiens
ggccgagaaccccagcggagaaccaccgcacaagagccaagaacaagggccgcgagggaacagagggacaaaaaaaacaa

SEQ ID NO: 37432 - RNA, 83 nt, Homo sapiens
cgaacgggaaggagacccgcgccaaaacagaagaggcaaagcccagccacagcagcagcccagcagcaaacaaccaaagagaa

SEQ ID NO: 37433 - RNA, 48 nt, Homo sapiens
cgcgcgcgaccaaagaaccacacccacaagcggccgaggggaagaagg

SEQ ID NO: 37434 - RNA, 80 nt, Homo sapiens
gcgccagcagcccaagagcccaaaggggcagggcccagggaccggaaagcaggacgaaccccaacaccagaaggggaccg

SEQ ID NO: 37435 - RNA, 123 nt, Homo sapiens
gggaacccggagccaccgagagagcagagaaccggcgccgccaaacagcccagccgcgccagcgcccggcgccgcgcgccacccccgagagggccgagccagcccggcgcagaaagaggagcg

SEQ ID NO: 37436 - RNA, 108 nt, Homo sapiens
aaaaaggagcaacccacgaaaaacaacagacccaggccaagaggccaaccagaggcaagcaccagcacccagagagaagacgcaaccaacaaacagaccgcgcagaaa

SEQ ID NO: 37437 - RNA, 77 nt, Homo sapiens
gccccaagcgacaggggagggacccaggccacaccaacaagacaagaaccaaacagaacccacgaagggagaccaga

SEQ ID NO: 37438 - RNA, 75 nt, Homo sapiens
acagggggcacgaaacgaaagacggggagaaacgaccgcaaagaccacacagacccgcaaccgacacacagcaaa

SEQ ID NO: 37439 - RNA, 76 nt, Homo sapiens
gcggcaagcagcggaagaggacgacgcgacacaaacaaaaggagagcgaaggacgagggcgcaccccacaccgcaa

SEQ ID NO: 37440 - RNA, 74 nt, Homo sapiens
gcaagggaaaaagccagggaggagccccggcggaagccacagcaggagaaggcagagagacccccgcacaaccc

SEQ ID NO: 37441 - RNA, 76 nt, Homo sapiens
ccccgccaagcagggcagaagaagagcagggcccaggagaaggagccgcagcccaaagcaagaagagcgaggcccc

SEQ ID NO: 37442 - RNA, 83 nt, Homo sapiens
acgacgccgggaccggccaagggcccacacaccaagaccaagaccccagaccccgcacaagagagaaaagcccgaagaaagcg

SEQ ID NO: 37443 - RNA, 67 nt, Homo sapiens
aaacagaacaagaaacagagacagaaaaaccccagcggccgaacagaggccccagcacacagaccag

SEQ ID NO: 37444 - RNA, 82 nt, Homo sapiens
ccgggaacgcagcgcgcaggaccacggggaaagccaagagacagggcagaccgccagcagcacagcaagccacagagagggc

SEQ ID NO: 37445 - RNA, 74 nt, Homo sapiens
aaagaaccccaccggacccggaagcagacggagaagggacccgaaagcccgaaggagacaaacaacaccccccc

SEQ ID NO: 37446 - RNA, 74 nt, Homo sapiens
gaaggaccagggggacccaccccagcccagaaagcccggaaagccacagaaaagcgccaggcaggcaggaaagc

SEQ ID NO: 37447 - RNA, 83 nt, Homo sapiens
gcgggcgccggagccgacgccgggaacccgccgcgcgccgcgaccccaagcaggaagcccggggcggcgacggagcacgaccc

SEQ ID NO: 37448 - RNA, 79 nt, Homo sapiens
caaccccccccggcccacgacccaaggacacaacccggccgcagagcccagagagcgggacgggcagaagaaaacccac

SEQ ID NO: 37449 - RNA, 65 nt, Homo sapiens
cggggcagccgaaagaggcacgccagggagaaaagaagcagcccacgaaccccgacaacagagca

SEQ ID NO: 37450 - RNA, 61 nt, Homo sapiens
cagcccccaggccagaagagacggcagggaagagggcaaggcagccggagcagcgcaagca

SEQ ID NO: 37451 - RNA, 63 nt, Homo sapiens
cagcagagagggcgcggaagccagaaggaagcccgccccccaaagcgaagccaaagcgaaggc

SEQ ID NO: 37452 - RNA, 68 nt, Homo sapiens
gaccccgcacagagagagaaccacaggcaacgaagcagcccaagagaacgaaagcaaaaagcgccgac

SEQ ID NO: 37453 - RNA, 38 nt, Homo sapiens
gcggcggccagggaccaaaacaaacagggaccccgagc

SEQ ID NO: 37454 - RNA, 76 nt, Homo sapiens
caggccaaagaaagagaacgggaagacaaccaaaccagagaaagacccaggccagccacgagcagaacaggagaac

SEQ ID NO: 37455 - RNA, 73 nt, Homo sapiens
ggcagggggggccgcggacgggaggaaagaaggaaaccagcagaaaccagggcgaaggacgaggaccgaaaaa

SEQ ID NO: 37456 - RNA, 71 nt, Homo sapiens
gcagggcgagccggagagccggccgagcgaggcggcgcggccagaaggacagggacaagcgcacagcggag

SEQ ID NO: 37457 - RNA, 72 nt, Homo sapiens
aaacaaaaggagcgcaaacagagaaagacagcaaagaaaaggagaagaaaggaaaaaaacaaccccgggcac

SEQ ID NO: 37458 - RNA, 44 nt, Homo sapiens
gggggcggcggccacgccaaggacggggggggccccagcccggc

SEQ ID NO: 37459 - RNA, 79 nt, Homo sapiens
aagcggcggcagcggcggggcggggcgagcagaggacccggcgggcggcccgcgggcagaccaaggaaagcggcgcggg

SEQ ID NO: 37460 - RNA, 77 nt, Homo sapiens
gggcacaaggccaggcaacgggaagagcgacagccccaggcccgggggggcgaaccgagagcgcagacagcgaagcg

SEQ ID NO: 37461 - RNA, 74 nt, Homo sapiens
gccgcacagacaacgaaaacagagcagaagggacagccagcacaacaaccaagacaggaccccggccagaccca

SEQ ID NO: 37462 - RNA, 78 nt, Homo sapiens
cgagacgagaccagccaacagcaacacaaggcagggccaccccagcccaggcggaggcagggcggacggccacgcaac

SEQ ID NO: 37463 - RNA, 80 nt, Homo sapiens
cacccaggaaaagaccaggacggacaagcacagccggaaggcagcagagggaaaccggacaaaagagcggacacccagaa

SEQ ID NO: 37464 - RNA, 76 nt, Homo sapiens
aggcagggaggacccacccccgggggaaaagaacgaggaagagagaaggccacgcccgaccccaagcaacaacggg

SEQ ID NO: 37465 - RNA, 69 nt, Homo sapiens
gccaccaagaaacaaacgaagccggaagaacgcggcaagagacgacaggaaagcaagcgccaacgaaaa

SEQ ID NO: 37466 - RNA, 69 nt, Homo sapiens
gcaaggacggaggacaaccggaaggaagcaacaacaagaggaaaagaaacccgaacccggaggacaaga

SEQ ID NO: 37467 - RNA, 74 nt, Homo sapiens
acccacaagcagcgaacgcaaggagggacaggacggaaggagcggaggaagacacaagagcgagcgaagaaggc

SEQ ID NO: 37468 - RNA, 83 nt, Homo sapiens
cccacgccggagagggaaaccaggaggggggcccgcgcgacacgaaggcggaagaaaagagacagaagcaggaccggcccacg

SEQ ID NO: 37469 - RNA, 61 nt, Homo sapiens
cggcccccacccaaggagaggccaagacagacgcgaagcaaagcgccacccagaagacgac

SEQ ID NO: 37470 - RNA, 82 nt, Homo sapiens
acccgcgggcaccccgcgcgaccggccgccgagcggcacgcgagaaggggagggggagaaagaagaggaagaagccacaggc

SEQ ID NO: 37471 - RNA, 100 nt, Homo sapiens
acgacgcaccgcaggcagacaaaagggccaaagaagggagagaggaacagggcgagacgaacaacgcgcgcaggagaccaccaagccacaggcacccagg

SEQ ID NO: 37472 - RNA, 77 nt, Homo sapiens
cggcccccccccagcccgccccaaaagaaacaacgaacgagcaaggaagggccaaggcagaccccacaccggagaac

SEQ ID NO: 37473 - RNA, 81 nt, Homo sapiens
cgaggcacaccagcaggaggcgccagaaagaacaacccgaacgcaaaagaagaacccaccagcgaagccagaagggaggga

SEQ ID NO: 37474 - RNA, 84 nt, Homo sapiens
gacgaaggaccgcagcacggagcgcagaaccggccgcgcccgaccaccgcgaaaccaccacacagaggcccccagaaacccaga

SEQ ID NO: 37475 - RNA, 32 nt, Homo sapiens
aggacacgcagcccaggccaaacgccgcaaac

SEQ ID NO: 37476 - RNA, 70 nt, Homo sapiens
caacaagagagggaggccccgaagaggagacggagcaccgacccgccgcaaagaagcagaaaccaccaga

SEQ ID NO: 37477 - RNA, 79 nt, Homo sapiens
cagggcagcagaagcgcaccccgacgccgaggaacgagagcgcgaagcaagaccaacggggagggcacgacgaaacgca

SEQ ID NO: 37478 - RNA, 40 nt, Homo sapiens
cagggaggcaggagcccacgacgaaggcccaccaccacga

SEQ ID NO: 37479 - RNA, 56 nt, Homo sapiens
gaaggcacaaggacaaacccacccacaaaggggcaccggcacggaccaccccaaca

SEQ ID NO: 37480 - RNA, 71 nt, Homo sapiens
agaaaagaccaggcagcaacaggcaagacgggggggccaaacacgggacagggggaagaggaagaagcaaa

SEQ ID NO: 37481 - RNA, 77 nt, Homo sapiens
cacgagggcagggcggaagagcacaagaagagcacagaggaagaaaaaaagaacccaagcaggccccgagcccaagc

SEQ ID NO: 37482 - RNA, 86 nt, Homo sapiens
cggcccggggccgcggacgaggaccagcagaggccagcacgagaacccagggggagggaagcagccaagcgggcagaagaggaagc

SEQ ID NO: 37483 - RNA, 70 nt, Homo sapiens
caggacagagggcacaacggcaaagaagcgggccaacggcacaaaaggcacgggacaaccaaaaaagcag

SEQ ID NO: 37484 - RNA, 67 nt, Homo sapiens
acaccacggacgagagacaaacgccgaaggaggaagaaccaacagagaaaaaaaccagaaacaaccc

SEQ ID NO: 37485 - RNA, 81 nt, Homo sapiens
ggcgcggcgcgcgaggagcaggaaaagacggacggccggcccgggcagaccagaccagacacacagggccgacagaaaggg

SEQ ID NO: 37486 - RNA, 84 nt, Homo sapiens
cacgcagggccagcgggaccagaggaccaaggagcggcgcggggaccaaacccggagccagccaccccgacccaaagaggagag

SEQ ID NO: 37487 - RNA, 85 nt, Homo sapiens
aacaaaagaggccagcccccagagggaggccaccgcgccccccccaacccaacggcaccaaggaagagagaagggaaaccaaagg

SEQ ID NO: 37488 - RNA, 54 nt, Homo sapiens
gaaggcggccaggccaaccgaagaacgcggcagaacggaggcaggcagcacgag

SEQ ID NO: 37489 - RNA, 73 nt, Homo sapiens
caaagcccaaaaggcaaggcacaagaaacgaggaaagaaccaaggaagacacccgccgacacaccaaacaaaa

SEQ ID NO: 37490 - RNA, 68 nt, Homo sapiens
cggaacgacgaacacggggccacccagagcccgacacggggcagacaaacacaggcgggcgcggacgg

SEQ ID NO: 37491 - RNA, 85 nt, Homo sapiens
accgcccaaccccaaaagagccaaaccagccgcccggccggcgaagacagcacagccacaacacagcagcccccaggagagcagg

SEQ ID NO: 37492 - RNA, 90 nt, Homo sapiens
gacaaggcggaacccagggagaaccgcggaaaggggaagaccaacacacaccccccagacagcccagcacgccagaaacggccacccgca

SEQ ID NO: 37493 - RNA, 83 nt, Homo sapiens
ggaaaaccccagaccaagccacccggcgggaagaagcaaaagggaacggccgccggcagagacgagcaaaacacacaaaggcc

SEQ ID NO: 37494 - RNA, 75 nt, Homo sapiens
aggggaagggggagcgagaggaggccgaaacgacgccccccagacacagacaagaggggggcaccgggggccagc

SEQ ID NO: 37495 - RNA, 87 nt, Homo sapiens
aaaaaccagggcccacagaggagaggacagggcaccccggggagcagggggcggcaggacaggcggccccaggccgggagaaggaga

SEQ ID NO: 37496 - RNA, 110 nt, Homo sapiens
cgagccagacacaagcacagcgagaccgcggcgcaggaggaggaggaggagaagaggagccggacggcacaccgcccgggcaccaacaaggcgccacggagacggaggac

SEQ ID NO: 37497 - RNA, 86 nt, Homo sapiens
cagggaaggaggccgagccgggaccaggcccgggggcggcggccacgccaaggacggaggaaccgcgcgcggccgaaccaagcccg

SEQ ID NO: 37498 - RNA, 77 nt, Homo sapiens
cgcgggaccaggccgcgggcacacggccacgccggcccgcccaccagcaagcgcacccaggaggagcacggcgaacc

SEQ ID NO: 37499 - RNA, 82 nt, Homo sapiens
aggaccggccagggacaggcacgcagggcgcacccgggcagaccccgcacaaggcggaaagacaccgccacagaggcgccag

SEQ ID NO: 37500 - RNA, 65 nt, Homo sapiens
acccagccgcagcagcgaggaaaagaagaaggagcgacgaaaggaagaagccaggggcgcggggc

SEQ ID NO: 37501 - RNA, 77 nt, Homo sapiens
agcggccaaaggaaggcgcagggaacacgcaccgaggcggagccccagccccacaggccccccccgcgaccaggcga

SEQ ID NO: 37502 - RNA, 80 nt, Homo sapiens
gacgagaccaccggccaacagaggagaaggagggcagacacaagacaggggcagacaagaaaaagcagccaagaacaaga

SEQ ID NO: 37503 - RNA, 69 nt, Homo sapiens
acccagggcgagaaaggcacccacccgcgagacccccaagagacaaaagaagggagaacggaaagaaac

SEQ ID NO: 37504 - RNA, 75 nt, Homo sapiens
agacccaccgcaggacccacagaggcccagccccccccgccggaaacccgccgcgcccggcccgccccccgcgca

SEQ ID NO: 37505 - RNA, 71 nt, Homo sapiens
cagaagaagagaaaaagcaccgccccagaccgcaaacaggcgcaaaggacgggcggacacagcaaggcaca

SEQ ID NO: 37506 - RNA, 58 nt, Homo sapiens
acccagaacaaaaagggccagggcggagaacggaaaagcaccaggaagcagagaggac

SEQ ID NO: 37507 - RNA, 69 nt, Homo sapiens
caggaaggcacaacgaccggaagaaacaggagcccagaggacagaaccccagcccagagccaacacccc

SEQ ID NO: 37508 - RNA, 46 nt, Homo sapiens
ggcccggcacacaagcgcagaaaagaacagacggaccagaaacagg

SEQ ID NO: 37509 - RNA, 112 nt, Homo sapiens
agcacacgcccgacgaggagagcacgacggaccaagacgagcccagcgcaaccccaagcgcccaaagaagcggaggacaggagcagcgggcccgacagccaaggagaggcgc

SEQ ID NO: 37510 - RNA, 74 nt, Homo sapiens
aagaggcggacggaggagcaggcgagaagagaaggaacaggccaagacaaccccagagagggggggcagggggc

SEQ ID NO: 37511 - RNA, 59 nt, Homo sapiens
gaggggcgcggaggagcggccaggaacgaagccagaggaggagaccccgaccaagaaag

SEQ ID NO: 37512 - RNA, 51 nt, Homo sapiens
agcacaaacgggccacggaagggaggcagccaagagacagcaagaggaaag

SEQ ID NO: 37513 - RNA, 73 nt, Homo sapiens
ggggagggacccaggggcccgacgacgcagcaggagcaaggcgcacaccacaccagagacggggcgccagggc

SEQ ID NO: 37514 - RNA, 89 nt, Homo sapiens
gagaaggccgcaggcagggaagaggcagcaaggaggagaaggcagagcccccccaggcagaagcccgagcgggaaccagcgaagccagg

SEQ ID NO: 37515 - RNA, 74 nt, Homo sapiens
cagaccgcagaggcggccgcgagaagacccggggacagcacaggagagcacaaaacagaggagaccagaccaga

SEQ ID NO: 37516 - RNA, 58 nt, Homo sapiens
cggagagggcagaagaggaggagaacaaggaaacacgcagaaggaaaagcgcagagac

SEQ ID NO: 37517 - RNA, 108 nt, Homo sapiens
caggcccggagaaaaagcgaaccaggcccggaccagcccgggcgcccgcacggacccccaacagccacaaccaaagcccggagaccggagaacaaggagagcgaacgg

SEQ ID NO: 37518 - RNA, 79 nt, Homo sapiens
gccgccgcgggcgccagaaggaagaggcggacggaggagcaggcgagaagagaaggaccagaacagagaagaaagcagg

SEQ ID NO: 37519 - RNA, 82 nt, Homo sapiens
aagagcgccacgcgcgggcggagcgcgcagaaggccacggcgcggcacaggcgccggaggcgccccggaacaaagaccagcg

SEQ ID NO: 37520 - RNA, 68 nt, Homo sapiens
gccagccgcaacgaggagcaagaggggggggcccccccgaagaaaggaaccggggagcggcgaaaaaa

SEQ ID NO: 37521 - RNA, 69 nt, Homo sapiens
cacagaggggagccacaccagccacacaagagaacgggccgacgacgggaaccagaagggagccaccga

SEQ ID NO: 37522 - RNA, 52 nt, Homo sapiens
agaagcggcacggccaaccggcacgggagaaagcagcaggcccgcgcgggag

SEQ ID NO: 37523 - RNA, 70 nt, Homo sapiens
gagcgaccagccgccaaagcccagagggaacccaccagaaaacgacacacaaacgcagccaacccaaaaa

SEQ ID NO: 37524 - RNA, 77 nt, Homo sapiens
gggcgccaaagcgagagagggaagcgcccggccggaggcaggggaaagaagacgaccccgacgcaggccaggagccg

SEQ ID NO: 37525 - RNA, 75 nt, Homo sapiens
cgacagccgcggccgggcccgagggggggaagaggagaaggcgcgacagacccaccacgccccaacggaagcgca

SEQ ID NO: 37526 - RNA, 73 nt, Homo sapiens
agaaaagcgagaccgcggcgaggaccgaacacaacacacacagccgggccgcaaccagcccccagcagagacg

SEQ ID NO: 37527 - RNA, 71 nt, Homo sapiens
gaaagaagagacacagaggagccacacccccaggaagcaagaccagagagcaaagggagaggaaaaacaaa

SEQ ID NO: 37528 - RNA, 70 nt, Homo sapiens
gcagaacgccgcggagaggccaggagccgccagaagaagcacgcagcacaaagaggaaggagaaaaaccc

SEQ ID NO: 37529 - RNA, 61 nt, Homo sapiens
aaacccagaaaacagcggaccagaaccgggccgacgccagggaaagagccccaagcccgca

SEQ ID NO: 37530 - RNA, 80 nt, Homo sapiens
cacagccccaaacaggacgaaggcggcgaaggacgagaacccccgcgaaccagaggaacccagcgagcgagagcggacca

SEQ ID NO: 37531 - RNA, 75 nt, Homo sapiens
gaaacacggagacagcaccaaacccacagaggcacgaggcagccgccgcaaagggacgacgaagggacagccaga

SEQ ID NO: 37532 - RNA, 77 nt, Homo sapiens
agcgagagaggcacggagcgcagcaggaccagcgagagccccgcccccgcccgcaggggcgcgcaggaggcggcacc

SEQ ID NO: 37533 - RNA, 41 nt, Homo sapiens
agacagagacagagcaaaaccagaagcacccaagccaggga

SEQ ID NO: 37534 - RNA, 71 nt, Homo sapiens
ccgaacagaggagcgagaaagccggccccagcaccaccaagggaagaagaacgaccagcaagggaacgaag

SEQ ID NO: 37535 - RNA, 75 nt, Homo sapiens
gcgccccaccagcaggaaccagggcgagccaggagcagcagcccaacgggcaccccgggcggaaaagagggaagg

SEQ ID NO: 37536 - RNA, 80 nt, Homo sapiens
ccaggagccccccgcccagacaaggggcgaccacgaccgaagagccagagacaagccccacgagacgcacagagagcaaa

SEQ ID NO: 37537 - RNA, 80 nt, Homo sapiens
cggcgcgcacagcccaaaccgcgcaccaggaagcccgggcccagagcgccccaggaaaaagcagcaaagggagaaaagaa

SEQ ID NO: 37538 - RNA, 78 nt, Homo sapiens
cagaggaaccaacaaagaaggagcggaaaaccaggaacggccaggaccggacaggaacagagcacgagagcagccccg

SEQ ID NO: 37539 - RNA, 81 nt, Homo sapiens
gggagcgaagcgagggcgaagcacgacacagaaggggaggggagggaaaggcccaggaaaaagaaagagccccaagcccgc

SEQ ID NO: 37540 - RNA, 66 nt, Homo sapiens
aacacaggggcgggcagccgcccaggaccagcaaaccccacacgcaacagaaacggagacgcacga

SEQ ID NO: 37541 - RNA, 88 nt, Homo sapiens
gggagaaggcgcaaaggaagggagcagcccgaacgccacagaaacaccggcccagacagacacaagcagcggcagggcaaagacagcc

SEQ ID NO: 37542 - RNA, 80 nt, Homo sapiens
cggagagagcaagaccgaggcgcgacgcaggccccggcggccacggcgcgcacaaccggacccggagaccacccagagag

SEQ ID NO: 37543 - RNA, 78 nt, Homo sapiens
ggggcagggggcccgggacaggaagacgggacagagggcggcccaaccagaaaggaacaagaagggagaccgcgcaac

SEQ ID NO: 37544 - RNA, 71 nt, Homo sapiens
accagaacccgcggagccacccaagacacgcagacgcagcccagacccggacacggaccgcaacacccaag

SEQ ID NO: 37545 - RNA, 76 nt, Homo sapiens
caccccaccacagacccagccagccaccagccggagcaaggcagcccacagcaagcacgccgacacaaagggaccg

SEQ ID NO: 37546 - RNA, 68 nt, Homo sapiens
cgcagggcgcccccggcaaaagggcaacaaggaccaaaggagaaaaagcgggagaccgaggcccaaaa

SEQ ID NO: 37547 - RNA, 76 nt, Homo sapiens
aagacaaaaaaacaggaacgcacaggaaggaccaccgacggccccggagagagaagcaggcccacagagagcagcc

SEQ ID NO: 37548 - RNA, 60 nt, Homo sapiens
gagagacgccccaggcggagaacaagaacaggaacaaacacccaaagcagccaggagcca

SEQ ID NO: 37549 - RNA, 73 nt, Homo sapiens
gaagagccagcgccaaggcggaaaagcccaagaaacaaacaaggagcaagaggggggggcccccccgaagaaa

SEQ ID NO: 37550 - RNA, 79 nt, Homo sapiens
ccccgggaggccaaaaaggcccggaggggaggagccaaccagaggacgaggcccccaagccgagaccaccaggccccgg

SEQ ID NO: 37551 - RNA, 72 nt, Homo sapiens
cggaagacccgcaccggagcaaagccaaaagaagaacccggacccgaccgaagcaagaacgcaaaaggcaca

SEQ ID NO: 37552 - RNA, 41 nt, Homo sapiens
gcacaagccacagcagaagggggcggaggcagggcacaacc

SEQ ID NO: 37553 - RNA, 54 nt, Homo sapiens
cggcaacccaggggcggccacgaccaccaggcgccagggcggggcgcgggccag

SEQ ID NO: 37554 - RNA, 87 nt, Homo sapiens
gagccagcggcgaggaggggccccagcagcccccgaaggcccacaggacaggagagaaagacgaaagaccagccgggccgcccaacc

SEQ ID NO: 37555 - RNA, 121 nt, Homo sapiens
gcgcggcgaagaggggcggaagcggggaagacgcagaagggaagggccacgggcacgggcgggaagaccgaggacccggagaagccacagagcaggggaaagccgccagcaggacgacgag

SEQ ID NO: 37556 - RNA, 79 nt, Homo sapiens
ggaacgggcgcaaccagcgacacaggaagaacagggcgaggacgaggcccagaaggggaagacccccagcgaacagaga

SEQ ID NO: 37557 - RNA, 82 nt, Homo sapiens
agaacaaagaaacccccaaggagcacaggacgaagaggaaggaaaaaacaggcgagcaaccaaaaagcgagaagccccggca

SEQ ID NO: 37558 - RNA, 78 nt, Homo sapiens
agaggcaggcgcggcccgcggggcgccaggcacgcgaggcccccagggccggcccagggagaacgcaaaaccaccacc

SEQ ID NO: 37559 - RNA, 77 nt, Homo sapiens
caccacgggcagccgcagagcgagcggcagcggcccggaaccgcaaacaacacccaacagcccaaagcaaaggagca

SEQ ID NO: 37560 - RNA, 79 nt, Homo sapiens
gccagagccggcgagccggaggaagccaccaggggaagaaagaaacgcgggaaaagagaagaagaagcagagcgaacaa

SEQ ID NO: 37561 - RNA, 73 nt, Homo sapiens
agaaggggggccaggaaacgccaaaacaccagaaccaaccggggaggcaagcaggggggcaaaggaaagaagg

SEQ ID NO: 37562 - RNA, 38 nt, Homo sapiens
agcgcgaccgggaggcccagcgaacgcccaagcaaaaa

SEQ ID NO: 37563 - RNA, 65 nt, Homo sapiens
gccacaggagaacgccgagccgagggggccaccgcgcccgcaaaacgccgccgcggcccccagcc

SEQ ID NO: 37564 - RNA, 68 nt, Homo sapiens
aaggacgccccagaacaaaaagcgggcaacaaggccgccgacccccggcaaagcaccagaggaagagg

SEQ ID NO: 37565 - RNA, 68 nt, Homo sapiens
caccccaccagaaacgggggaggggccggggacacaacaggacagaccgcgccaacccgacagggcga

SEQ ID NO: 37566 - RNA, 74 nt, Homo sapiens
aaggaagcaggcccgggaagggggacgggcacggagccgcagccaaaacagcagcaaacagagggcccaggggg

SEQ ID NO: 37567 - RNA, 75 nt, Homo sapiens
gaaaaaaacaacaaagacgaaaaaagaaaaaagagaaaagaccaacaagaaccagcaggggaaagaaccagacga

SEQ ID NO: 37568 - RNA, 84 nt, Homo sapiens
ccggaggccgggccaggccaccggacagggcggcccgccgccaaggccgcacgcgagggcgccaagcggagggccccgcagagc

SEQ ID NO: 37569 - RNA, 70 nt, Homo sapiens
cgggacgccacaggcgggaaggaacaccaagagcccaaaaggcagagcgaggagagaagaaggagggaaa

SEQ ID NO: 37570 - RNA, 69 nt, Homo sapiens
acaggcacaccccacacaagcacgccaagacaaggccgacgcgcacgaacacgggggcaaagacaggga

SEQ ID NO: 37571 - RNA, 73 nt, Homo sapiens
cggggcgcccggcacccgcgggggcggacggcagagggcccccaaaagcagaaacagcgcagacaaaaagagg

SEQ ID NO: 37572 - RNA, 77 nt, Homo sapiens
gcgaccgggcaaagggcacccgccaagcgcaagagaaagggggcagaaggagaggagagaacaagaagagagaaaac

SEQ ID NO: 37573 - RNA, 78 nt, Homo sapiens
gaaaccgaaaggacagacaagaaaaaagcacgagaggcccggcagggcagagacacccaagacacccccagcaaagca

SEQ ID NO: 37574 - RNA, 73 nt, Homo sapiens
cgacggggcggcgagcagcgcagcgaccggggaccggagcgacgccagcgggcccagcccgaaaccgggaaag

SEQ ID NO: 37575 - RNA, 57 nt, Homo sapiens
cagagcgacccaggcacaaaagcaccgggaggaaagagagccacacgaagaacacgg

SEQ ID NO: 37576 - RNA, 70 nt, Homo sapiens
gggaagcggccggaaggcggcgagaagcacacggccacaggaccaagaacgcccagcccgcgggcaccgg

SEQ ID NO: 37577 - RNA, 69 nt, Homo sapiens
agcgggaggccagaggaaggggagagaggcagaacagaacaaacggagaaacaccggagagcccaaaac

SEQ ID NO: 37578 - RNA, 37 nt, Homo sapiens
acaaagcggacacccgcccgccggcccgagaaccgga

SEQ ID NO: 37579 - RNA, 79 nt, Homo sapiens
cggccggaccgcagccgcaagcgcaggaccagcacacgcaagcccacgccgccacgacacacgggccgggagggccagc

SEQ ID NO: 37580 - RNA, 75 nt, Homo sapiens
gggaccacaccagcccagcggacgagcagccaaagcgacagagcaaggcgccaccggaagaaacgggaggggagg

SEQ ID NO: 37581 - RNA, 55 nt, Homo sapiens
ccagaaaaagacgacgcccggaagaggcgaaacggggagaagcagaccgcaccag

SEQ ID NO: 37582 - RNA, 93 nt, Homo sapiens
aaacggggcggggccggggaacacacagcccgagcgggaagaagccgcagcaagccgcagcggcgcgcaccgggcggcccaggaccgagcacc

SEQ ID NO: 37583 - RNA, 93 nt, Homo sapiens
ccggagcggcgccggaggcaggcccgggagagcggcgcggaggaccaacaggcggcgccgagccgagccgagacccgagcgggaagaagccgc

SEQ ID NO: 37584 - RNA, 70 nt, Homo sapiens
aggaaggcagggacgggaggggaggcaaagggaggaggaggaccggagggccggagaagacaacaaaaca

SEQ ID NO: 37585 - RNA, 85 nt, Homo sapiens
acaacaagagacgggacaagacagggcaaaggacagaccaggagggcccccggacccgggagcggacccggggcgggaagcccga

SEQ ID NO: 37586 - RNA, 75 nt, Homo sapiens
cagaggccaagagcccaacaccacccgagagccccaagggggaccaacggggacccgccaccgcagggccgcgcc

SEQ ID NO: 37587 - RNA, 78 nt, Homo sapiens
acacaggcaaacagacaaagaagagcgcgaagcaggccaacaagccgaggagaggcccacccgccaagcgcacaaccc

SEQ ID NO: 37588 - RNA, 77 nt, Homo sapiens
gaggccggacccagcgagcgggcggcacgcacgcaggccgaacgaggcggggggcccgagaccacaccacacccacc

SEQ ID NO: 37589 - RNA, 70 nt, Homo sapiens
cagggggcgaagaggacaccacgccagggcagcacaacaccagaaaagaaaacaaaaaaagacagaaaaa

SEQ ID NO: 37590 - RNA, 77 nt, Homo sapiens
gcccgagaaagcccgccagcagcagaccgaaaagggcggaaaaggaccaaggcccgcaaaagggcgcgaacaacaac

SEQ ID NO: 37591 - RNA, 54 nt, Homo sapiens
ggaagcaaacgcggaaaggaccacccgggcccccggaagccgggcccaaccgac

SEQ ID NO: 37592 - RNA, 71 nt, Homo sapiens
agggccaaagaagggagagagagcggcagcaacagccggcagggaaaacgcggcgcaaaaaggaccggcca

SEQ ID NO: 37593 - RNA, 71 nt, Homo sapiens
gcaaaaacccaaccagagcccggacacaaacaagacagggaccgaaacaacacgaagcgaaaccggggccg

SEQ ID NO: 37594 - RNA, 84 nt, Homo sapiens
ggaggaagagggggacgccccggcaacccaggggcggccacgaccaccaggcgccagacggccagcccccaggaaagagaaaac

SEQ ID NO: 37595 - RNA, 54 nt, Homo sapiens
cccggagcgcgacccgagaggagcaagaggggggggcccccccgaagaaaggaa

SEQ ID NO: 37596 - RNA, 48 nt, Homo sapiens
gcaccacccccagccgcaggcagaagagcccgccaaaagcaagagccg

SEQ ID NO: 37597 - RNA, 66 nt, Homo sapiens
agaccaacacacagggcaggaaaagaaaagaaaaggccaggggaggccaagcaaagcaaaacacag

SEQ ID NO: 37598 - RNA, 76 nt, Homo sapiens
ccgagacacgcgggaggcggcgacgggcccggggaccccaaggagggaagccaagacaggcagagacagaaagcca

SEQ ID NO: 37599 - RNA, 73 nt, Homo sapiens
cgacgaccccagcaacaggaaggggcagccgaagccagggcgaaggaggccacaaagggaccccccgagggcg

SEQ ID NO: 37600 - RNA, 37 nt, Homo sapiens
gaaaggagaccaaccaccagaaaagcgccaggcaggc

SEQ ID NO: 37601 - RNA, 56 nt, Homo sapiens
cgaccgcgcgggcccaagcaccgagaggcgagggaggcccagggcgcccgcacagg

SEQ ID NO: 37602 - RNA, 78 nt, Homo sapiens
gcgcgccgcgccccaccacgcagccagacccaacggacacgcagagagcagaacggagcccgcagaggaccggagaag

SEQ ID NO: 37603 - RNA, 58 nt, Homo sapiens
cagagaacacccccccagaaaccaacccaagacgccacagaagccagcccaaaagaga

SEQ ID NO: 37604 - RNA, 81 nt, Homo sapiens
gcccagggcgacagcgcgagagagcgcggccccaggagcaaggcggagcgaaaacgccacaacagagggggccagggcggg

SEQ ID NO: 37605 - RNA, 84 nt, Homo sapiens
gagcggagggcacggagaaacacaccgacagagaaaggggacgaaaaggaagccccgcccagggaggcggaaagacggcagaag

SEQ ID NO: 37606 - RNA, 77 nt, Homo sapiens
gacaaaaggaaacaaaacagaagacaacaagcaaggaccggaacggaaagagggccacggaagaagcagacgcaacc

SEQ ID NO: 37607 - RNA, 69 nt, Homo sapiens
accagccagggcgcagcagagaccagaagcaagcgaggacggaaccccaagaggagcgcccggcccagg

SEQ ID NO: 37608 - RNA, 77 nt, Homo sapiens
cgggcgccacaccaacaccacggaaccagccccgagccccggccccaaagacccaaaacagagacaccccccagccc

SEQ ID NO: 37609 - RNA, 73 nt, Homo sapiens
agccccaaccgcgaacggacaaaagacaggaagggcgaaagaggaagaagaaagacaaagagagcgaaaggaa

SEQ ID NO: 37610 - RNA, 75 nt, Homo sapiens
cagccgggacggacccagcacacagagccgacgggacacccacagcccggacgagaccagccagagagcgacccc

SEQ ID NO: 37611 - RNA, 55 nt, Homo sapiens
cacgcgacgggggagccgcggacaagaggcgcaagaagaaccagacgcggaagaa

SEQ ID NO: 37612 - RNA, 78 nt, Homo sapiens
cacacgggcggaagccacggaacgaaaacacagaaggcccgccacagaccccaccagcacgaagggacacgggggcag

SEQ ID NO: 37613 - RNA, 53 nt, Homo sapiens
caccacagaaacaaaagcaacaaagaggaggacagccccgagccgacacacgc

SEQ ID NO: 37614 - RNA, 74 nt, Homo sapiens
aaaggccagcgggaagaagcacagaccccaaaggccacgaaccgcgggcaaggaagagacaaggaaaccacacc

SEQ ID NO: 37615 - RNA, 120 nt, Homo sapiens
ggcccaccccaccgccagcggaacccggggacacgacgccccaaaccgccaggagaaaaaagggcgaaccgaccaagaacaacacccagagggccaggagaaggcgaagagagcagcgac

SEQ ID NO: 37616 - RNA, 57 nt, Homo sapiens
ccaacaacaggccacccaaccgaaaacggaccagaacccaccccagcacaagagaaa

SEQ ID NO: 37617 - RNA, 72 nt, Homo sapiens
ggcgggaccggaacaggcacaccccacacaagcacgccaagcaaggcgccaccggaagaaacgggaggggag

SEQ ID NO: 37618 - RNA, 52 nt, Homo sapiens
aaggaccaagaaccaggccaggccagccggcgcgaaaccacgggccagagac

SEQ ID NO: 37619 - RNA, 86 nt, Homo sapiens
ccgccaaagacggaaccgccacagcaccaaggaccagcgccagccagccagggggggcagagccccacacaaggcagagccggcca

SEQ ID NO: 37620 - RNA, 62 nt, Homo sapiens
agagggagagccaaagaagaagagagaagaagcaaaccgggaccggaagcaccaaggagaaa

SEQ ID NO: 37621 - RNA, 57 nt, Homo sapiens
cagccccccgcggcggcagccacagggccaaccgccccccagcagcaggcacgggcg

SEQ ID NO: 37622 - RNA, 81 nt, Homo sapiens
cgccgcgccgggaaccgacccgggcgggaaaagaccagaccagacaacaccagaaccagacgccgggcccccagcaggcag

SEQ ID NO: 37623 - RNA, 86 nt, Homo sapiens
agaagcaggagaccgcaacagccgccagcccccccagagccccgccggagaccccagcccggcgaacacccaggcacccagaaggc

SEQ ID NO: 37624 - RNA, 79 nt, Homo sapiens
gaggacaaggccacagaagaggacacagccagcagagaccccccacccaggagaagcaagaggaagaggccacacgacc

SEQ ID NO: 37625 - RNA, 60 nt, Homo sapiens
agcggcaaggagagacgcgcgaggggcgccgaagcgagggggggacgaccaccagccagg

SEQ ID NO: 37626 - RNA, 60 nt, Homo sapiens
caacaacccaagagaagacaagaaggaggggaccacgcggagggggaaaaacgcaacagg

SEQ ID NO: 37627 - RNA, 74 nt, Homo sapiens
aggagaggagcaccaacgggggaagaccgcccagacgaagggagggaaggaaggaagagccaaaggacagggag

SEQ ID NO: 37628 - RNA, 92 nt, Homo sapiens
aagcagcgaggaacacagggcagagacggaccagagaagccgaggagccccagccaagaagcaggaaggagaccaagaggagcgcagaagac

SEQ ID NO: 37629 - RNA, 84 nt, Homo sapiens
ccgggcccgcaggcgcgggcgcgcgcagccaggcagacggaggggccaaggacaggcgagccaagaacagcagagggagcgcgc

SEQ ID NO: 37630 - RNA, 79 nt, Homo sapiens
gaccggccccaggcgcgccacagccgagccgaaggcaggcccacgggagccgagacccccgaggggaccagacgaagcg

SEQ ID NO: 37631 - RNA, 79 nt, Homo sapiens
agaggcggacggcgggaccacaagacaacgcggagcggcgaagagcaaccagcaccagggcagcgcagccccaggacgg

SEQ ID NO: 37632 - RNA, 82 nt, Homo sapiens
agacaagcaggacagccaaaccacaccagaggccaccacgcaccaccacgggaacacagaggagcgcggcagaggcggccag

SEQ ID NO: 37633 - RNA, 76 nt, Homo sapiens
acagagagaaacagagaggagggagaaacagcaaccggcaagggccggagcaaggaagacagaacgaggccaggaa

SEQ ID NO: 37634 - RNA, 81 nt, Homo sapiens
caagcccgccgaggaggcaggacggcccggccccgcgcgcggcgccgccgccgccagcgcggaccagggagcagaaaaaaa

SEQ ID NO: 37635 - RNA, 69 nt, Homo sapiens
gccaccagccagcaagcccaagccaggccaggaagaggcgcccccgcccgccagacaagccgaggcccc

SEQ ID NO: 37636 - RNA, 69 nt, Homo sapiens
gaggcggccaaggggacgagcaaaggaagcgcgaacagcagcgcaggcacgcgagaaggggagggggag

SEQ ID NO: 37637 - RNA, 76 nt, Homo sapiens
gaacccagaggcgggaggggccgggaggcagaggggcaggggaaagaccacagcaagaccacgcccccagccgggg

SEQ ID NO: 37638 - RNA, 73 nt, Homo sapiens
aggccgcggcggccaggccccagacacagacgagcaggggaaggggacgaagggaacccgccgggcggcccgg

SEQ ID NO: 37639 - RNA, 79 nt, Homo sapiens
gaggccgagggccgggggccaggggcagagggccggggcaagggccgggccaccccagacggcaacaccggcacggccc

SEQ ID NO: 37640 - RNA, 50 nt, Homo sapiens
gaacggaggagcgccgagccagagaacaaggagggcaaaagcccgaaaag

SEQ ID NO: 37641 - RNA, 79 nt, Homo sapiens
cagggcccccacaccgcgccgccaaggcaagggagggagagagcaaaaccagggcgggacccgagagaacgcaagaccc

SEQ ID NO: 37642 - RNA, 81 nt, Homo sapiens
cccgggcgggagccaggagcgacgcaccgccaggcaggcacaaaggggaagaagacggacagaagcaacaaaggaaaaacg

SEQ ID NO: 37643 - RNA, 61 nt, Homo sapiens
cgccggcagaggaccaggcaccaccggccccggaagggcgggacgaccccacaacccgagc

SEQ ID NO: 37644 - RNA, 83 nt, Homo sapiens
cggaggcccgaggcccgcgccccgcgccgcgccccccgcccgcccgggccgccagagcgcccaaaggacgcggaacagcacca

SEQ ID NO: 37645 - RNA, 70 nt, Homo sapiens
gaaagccaaggaggagaggcgaggacagaacgaaggagaacccggaagaagaggaagaggaaggcaaagg

SEQ ID NO: 37646 - RNA, 87 nt, Homo sapiens
caccaaagacgaccagcgcagcacccggacagcacaacagcgagagccaaggacgcagccacagaggcgaaaagacaaacgacaaaa

SEQ ID NO: 37647 - RNA, 80 nt, Homo sapiens
gcgagccagccaccggaaaggaggaaggagggcagaaccaccacacgaagcggagggacaaaacaagagaagcacagggc

SEQ ID NO: 37648 - RNA, 72 nt, Homo sapiens
aggaaaaggaccagcgcagcgggagcaggcgaagcgagccagggaagcgaaccaggcgaacaagacgacacc

SEQ ID NO: 37649 - RNA, 64 nt, Homo sapiens
acaaccacagagcaggggcagacaggggacaaaagccaccaacaccggaaagggccaggaaagc

SEQ ID NO: 37650 - RNA, 83 nt, Homo sapiens
cagcagcaccaggaggccggccccgcgcagccccagccaacgggcaacgggcggcaggggacacgaggccgcgggccaaacaa

SEQ ID NO: 37651 - RNA, 70 nt, Homo sapiens
ggcccccgggggagccggcggcggaccccgccgaccagggcaggaaaggagggcgaaacacaagcaccac

SEQ ID NO: 37652 - RNA, 89 nt, Homo sapiens
ggaggaagccgagggcgaggaggacccaccaacaggccacccagaggagaaggccaccccgccggaggcacaggccagaggggcccagg

SEQ ID NO: 37653 - RNA, 70 nt, Homo sapiens
gaacggccgcgcagccacggggcccgggggcgagggcaacgggggaaagccggagcgcgcaccaggcgga

SEQ ID NO: 37654 - RNA, 83 nt, Homo sapiens
aagacagagagcggcaaaaggggagcggcacccgccgccacccacaaggcacaacaggaagaagaagagcgaggacagggagc

SEQ ID NO: 37655 - RNA, 81 nt, Homo sapiens
agacaagaaaaaagcacgagagggggcccaggaccacaacgcacgggccgaggaggagggagccgaggcacaggagaaggg

SEQ ID NO: 37656 - RNA, 78 nt, Homo sapiens
gccgccgccgccggcgaggcagaaagaagccggacaccagaccaacacggaggacagagcccaggaccaagagcacaa

SEQ ID NO: 37657 - RNA, 45 nt, Homo sapiens
aaggaaggacaccaccccaggaaaagaccgaggaacaccacacgc

SEQ ID NO: 37658 - RNA, 75 nt, Homo sapiens
ccacagcagagacaggacaagcgaagacccgaaggccgcgagaccgagaaggacacgcaggagaccagcaacagc

SEQ ID NO: 37659 - RNA, 68 nt, Homo sapiens
cagcaagaaaccgcccccagaacacaacagggcaaaggccccgacagggaggagagagcgaggccacc

SEQ ID NO: 37660 - RNA, 109 nt, Homo sapiens
agcgacaggccgccgggaggaggagaggacaggaccagggagcccacagcgcccaaaaaggagaggcaaaaaccaagggaaagaggagaggggccccgagaaggccgga

SEQ ID NO: 37661 - RNA, 78 nt, Homo sapiens
cggacggcgggaccacaagacaacgcggagcggcgaagagcaaccaggaacgggaagaagaaaggcgggaccagcagg

SEQ ID NO: 37662 - RNA, 80 nt, Homo sapiens
cacccaccacgacggaggacggaggagagggcggcaggaaaggaagacaggcgcgggggagcaagcggagccgacagcgc

SEQ ID NO: 37663 - RNA, 78 nt, Homo sapiens
gcggccccagcccccgggggggcccgaggcaacccccacccggacacgcgcaagccgagcacagagaggggccacgcc

SEQ ID NO: 37664 - RNA, 97 nt, Homo sapiens
ccaggagcggcccaccccaccagaggaagcccccagacaggacacaggccacgaaagaacgaacagcaaacacagcgacaaacagcgagccccgccg

SEQ ID NO: 37665 - RNA, 85 nt, Homo sapiens
gcggcggccgccaccaggcacccggaagagcgcggccgaagggccgggcaaaacccccgagccaccagaaaagggaagcaggaag

SEQ ID NO: 37666 - RNA, 82 nt, Homo sapiens
caagaacccacaaggaaagaggccacaacccaggaggaaccgagagggaggccagaccaccagcccaccccgagcgggaggc

SEQ ID NO: 37667 - RNA, 37 nt, Homo sapiens
acgcgcgcgccaagcagcagcgggcggaacgccgaga

SEQ ID NO: 37668 - RNA, 77 nt, Homo sapiens
acacaccccgaaaacaaagagccgaggaaggcaccaggagaggaggaggggagacgcccaggcagaaagcccaacca

SEQ ID NO: 37669 - RNA, 71 nt, Homo sapiens
gaacaaaggcagcggaggcacggacaccacacacacacagcgacaacggcaagcggagaagagcaaggccg

SEQ ID NO: 37670 - RNA, 62 nt, Homo sapiens
gagagaagacgcgacaagaagcgccaaaaaggggagaaccaggagaggacgcagaaggaccc

SEQ ID NO: 37671 - RNA, 75 nt, Homo sapiens
gaagacgggaggaagaagagaaagaaagagaaggccagaaaaggagcaccacgccgacgccagcagcgcaccgcc

SEQ ID NO: 37672 - RNA, 75 nt, Homo sapiens
aggagaagaagcgcagacaaggccaacagacggcggaaagcgacagcccaggccaagacagcagccacgaggaaa

SEQ ID NO: 37673 - RNA, 79 nt, Homo sapiens
cgcccgcccacagcgaaacgccgcgcaccggagccggcacggccggcggggaagaacaaaagcgcagagagccgccccc

SEQ ID NO: 37674 - RNA, 76 nt, Homo sapiens
ggaggcccccagccagggaacacacgagaaaggagaagaacacgggacacaagaggcccacaaggaagcagagagc

SEQ ID NO: 37675 - RNA, 78 nt, Homo sapiens
caggcaggagggacaagaccggaccagccagaggacgcgggccgaggagagcggaggagggggcagcgggagagagga

SEQ ID NO: 37676 - RNA, 57 nt, Homo sapiens
ggcaaaccaccccagaccgagagccaaacggaagccacaggagccgaagcgcagagc

SEQ ID NO: 37677 - RNA, 72 nt, Homo sapiens
cacagcgccgggcggcaggaacaaggccacacggaggcagcgagccgaggagcgccgacaccagggaccagg

SEQ ID NO: 37678 - RNA, 77 nt, Homo sapiens
ggcaggaagccaaggcaccgggacgcgcacccccgcgccgcacggggacgaggggcagaaagagaagacagaaagga

SEQ ID NO: 37679 - RNA, 81 nt, Homo sapiens
acccagaagaccagccaagagcccggccagcgccgaagcaagcccagcgaccagggaggagagcggggagccccccaaaga

SEQ ID NO: 37680 - RNA, 76 nt, Homo sapiens
acaccccgaggggcaggaggggccgcagccaggaaaaaaagaaggggagcgcgagaaggaaagcgccgcccagcca

SEQ ID NO: 37681 - RNA, 59 nt, Homo sapiens
cagcagccccgacagccacggaacaggggcaaggagccacaagccacgacccagaaggc

SEQ ID NO: 37682 - RNA, 68 nt, Homo sapiens
aggacacacaaaggacggagacagaaccgcagaaaccagagaaagcaccaaaaaaggccagacacggg

SEQ ID NO: 37683 - RNA, 67 nt, Homo sapiens
aaggcagcaaagaagagccgcccacaagaagcaaggggagacaaaacagcaaaagcagcaagagcag

SEQ ID NO: 37684 - RNA, 70 nt, Homo sapiens
gcccggacccgccccgaagacgggagcgcgcggcggcggacaacacaccccgggaggcggccaggacaag

SEQ ID NO: 37685 - RNA, 65 nt, Homo sapiens
cgggcgccggcgcgcacaagggcagagggccagagcccagaaaagagaagagaagaaaccagaga

SEQ ID NO: 37686 - RNA, 83 nt, Homo sapiens
ccaagccacaaggccccaccagaacccagccagggcagccgaccggaccacagccagcagaacagcaggggagcagcaagccg

SEQ ID NO: 37687 - RNA, 62 nt, Homo sapiens
gaacacacgggacaaccagcgacgccggagcagcccaacccaggcacaaaaaaacaggaaaa

SEQ ID NO: 37688 - RNA, 111 nt, Homo sapiens
agagaacggcaccccagaagggggaagccgcaaaccagcaaggcccaaaaaaggaagcgagaacggggcagagacaagccgacaagaaaaaagggaagaccacagaaaaac

SEQ ID NO: 37689 - RNA, 53 nt, Homo sapiens
aagaagcaggggagaagcggaaccacaggccacaaaacagcagagaaagcaag

SEQ ID NO: 37690 - RNA, 76 nt, Homo sapiens
agggagccaagcgccgcccggccgaagcgccacaggagccgcagaagcaaaggcaccgccaaaccgaaaacgcggg

SEQ ID NO: 37691 - RNA, 66 nt, Homo sapiens
ccaaaccgccagcgaagagcagggaagacacaacaaacggcgggaacccacccagcggaggccaag

SEQ ID NO: 37692 - RNA, 68 nt, Homo sapiens
cagaccaggcccggaccccaagaccaagcgcgccacgcgcggcgcgccgacccaaaggaacaccgggc

SEQ ID NO: 37693 - RNA, 75 nt, Homo sapiens
acacccacggaagagaacgcccgagccccaacccacgcgccccaaggcgggagagaagcaacgggaaccaaccaa

SEQ ID NO: 37694 - RNA, 84 nt, Homo sapiens
gcagcacagccccaccaggcccagggccggcccccccaggacaacccagaggcaacaaaggcgaggaagggaccacagaccagc

SEQ ID NO: 37695 - RNA, 36 nt, Homo sapiens
cccgacccgaagaacgggccccagagaaggagaaga

SEQ ID NO: 37696 - RNA, 70 nt, Homo sapiens
cagagaggggaaggagcccagcgacggccggagcaaaccagaggaagaaaggaaggccaggaagcaaaaa

SEQ ID NO: 37697 - RNA, 78 nt, Homo sapiens
acagaagaccagcaggccgcaaagccgcggccggcagaagccagggcacaacggcggagcaggagcaaaggagcaaga

SEQ ID NO: 37698 - RNA, 80 nt, Homo sapiens
cggagagggccggaccgagcggccggccggcgagaacgccgggagggaagaaagcaaaggagaaagaggacgcagcaggg

SEQ ID NO: 37699 - RNA, 84 nt, Homo sapiens
ggccccgccgcccgggggcgccgcccaccgcgcccgccggacagacaagcagacggggccgccacacgcccaaccagggcaccg

SEQ ID NO: 37700 - RNA, 44 nt, Homo sapiens
acccacgcagcagcgcacacacaggccagaccaaaggaaccaga

SEQ ID NO: 37701 - RNA, 85 nt, Homo sapiens
caacgagcagccacacccagacgagcgggagaaggcgcgcgcaagcacgcgaggagaccgccaccaggaagaaagagacaaagac

SEQ ID NO: 37702 - RNA, 70 nt, Homo sapiens
cagggacacccaaagcgaaaccacacaacaagaacgcgccagaagacccaccaaaggcaccagaaacgac

SEQ ID NO: 37703 - RNA, 68 nt, Homo sapiens
acaacgacaagaaaacagaaacgacggagagaaaccacaagggaggcccacgcggaccggcagcgcca

SEQ ID NO: 37704 - RNA, 76 nt, Homo sapiens
gaagcgacccaagaaagaccgggaggggacgccggaacgggggaccggagggccggaagcgggccgggacaacggg

SEQ ID NO: 37705 - RNA, 84 nt, Homo sapiens
cgagggcacgcgggcaagggcaaccgcggggaagcggggcggcaccggacaccaagacggaggaaagggccgagaaagaagaga

SEQ ID NO: 37706 - RNA, 80 nt, Homo sapiens
accgcggagccaagcacccagccccgaacacaaagagcagcccgaagcagcagcagcagcaccagggcagcagcacaaca

SEQ ID NO: 37707 - RNA, 77 nt, Homo sapiens
cccaaggggaggagagccacgcaggaccacagcgcagcaaagaacacagagccaaggagaccgggagagagacgaag

SEQ ID NO: 37708 - RNA, 88 nt, Homo sapiens
gagcgccgccacgccgcccgccgccacgggcccccagagccccagccccagagccggcagcggccaggcacagcaagaccccccggag

SEQ ID NO: 37709 - RNA, 93 nt, Homo sapiens
caagaagggacccaaaaagacggacagcccacgggaacaagaggggacagaaaggcaggggcacaccagacagacaggaacaggaccaagacc

SEQ ID NO: 37710 - RNA, 65 nt, Homo sapiens
caagcacaaaacgagcggccaagaacccaaagcagcacaccggacagggacaaggcccaggaggc

SEQ ID NO: 37711 - RNA, 70 nt, Homo sapiens
gcgcggagaaccagagaagccggggcagacgggagcgggccgagaaaaaccacagagacacacgcaagcc

SEQ ID NO: 37712 - RNA, 65 nt, Homo sapiens
aaagagcccgaggaagggcggaccaaccacggcaaaccaacaaggagagggccaaccgacaaagg

SEQ ID NO: 37713 - RNA, 79 nt, Homo sapiens
gggaagcgagaaaacagacagagcagaagaaaccaagacggcagagaggacaaaagggagacaccaccagaacaggccg

SEQ ID NO: 37714 - RNA, 81 nt, Homo sapiens
ccaggcagagcgcacccgcgccccagccaaagacacgagagggcgaagggcgccaacgcggaaaaacaagggcaacacccc

SEQ ID NO: 37715 - RNA, 54 nt, Homo sapiens
cgaacgccacaggcccgagcagagaagacaagaggagccgcgcgcccaggcgga

SEQ ID NO: 37716 - RNA, 74 nt, Homo sapiens
ggcggaagcgccagaggagccaccagggggcaaggcggcccggcacgcacacgggcagaagagcccgaggcggg

SEQ ID NO: 37717 - RNA, 79 nt, Homo sapiens
cccaccgccaccagcccggaccaccaggccaagaaccgcagggacagaaacagggggagggagaggcgcacacaggaaa

SEQ ID NO: 37718 - RNA, 40 nt, Homo sapiens
gggaccaccgagaaaggccaagcgcacccgaggaggccgc

SEQ ID NO: 37719 - RNA, 70 nt, Homo sapiens
agggcgacggccgccacgcaccccgggcgacccgaccgggaggcacaagggccgaccaagcagaacccga

SEQ ID NO: 37720 - RNA, 71 nt, Homo sapiens
aagacggcaaaaagccaacagagccgcagggccagaggccagacagagcgcaagcgagggcggggcgaaag

SEQ ID NO: 37721 - RNA, 76 nt, Homo sapiens
acacccaccggagacggcaaggaggagccagaggcaacaaggcggacaagagaagccgccagcaaagagacacagg

SEQ ID NO: 37722 - RNA, 72 nt, Homo sapiens
caaagcaaacaaggaggcacacaaagacagccgcacacaaggaacggcagaacccaggaacggaggaaaacc

SEQ ID NO: 37723 - RNA, 79 nt, Homo sapiens
ggaaaccagaaacaccaagagacaaaaagcgaaggacaagggcaaaaggagaggaccagaagcaccagaaacaggaaga

SEQ ID NO: 37724 - RNA, 53 nt, Homo sapiens
gccaaaggagagaaaccaaaccacgcccgggcaacaccagcagccccaaccac

SEQ ID NO: 37725 - RNA, 69 nt, Homo sapiens
aaaaacggagagccacaaaaaaggaagcgaaaaacaaaccaggggagggaaacgagaaaaacgacgcca

SEQ ID NO: 37726 - RNA, 70 nt, Homo sapiens
gccacccagagccacgcggaacaaaggagaaacccgggaaagcaaaagcgaagggaaaaaaggggaaaag

SEQ ID NO: 37727 - RNA, 69 nt, Homo sapiens
aagaagagacaggggaaacaaagggaacggaaaaagcaacaaaacacaccaagaaaagggaaccgaagc

SEQ ID NO: 37728 - RNA, 67 nt, Homo sapiens
cccagcaaccgcagccccaaggacaggccccggaacaagaggaggacagaaccaggcgaggaggaag

SEQ ID NO: 37729 - RNA, 110 nt, Homo sapiens
caccagaaaaacaggagcggacgaagaaggacgccacagggcacggggaggaaggaggaaacgcaggagggccggagggcacacaacaccaggacaaccagcccgggacc

SEQ ID NO: 37730 - RNA, 81 nt, Homo sapiens
ggaggaaacacccacgacaacggaagggacacaggcaagcaaagcccgagaaacagccaggcacgcaaagaacgcccacaa

SEQ ID NO: 37731 - RNA, 66 nt, Homo sapiens
gccaggcgggagaagaaccccccgaaaggaccccccagacaagacacagccaccgggccgccaccc

SEQ ID NO: 37732 - RNA, 68 nt, Homo sapiens
gaagacggccgcccgggcacaaaggccagggacccaaagcgcaagcccagcagcccaggccccacggc

SEQ ID NO: 37733 - RNA, 57 nt, Homo sapiens
cggggaaaaaaaccgcagggcggagagaccaggcaagacccagggggaacggccagc

SEQ ID NO: 37734 - RNA, 60 nt, Homo sapiens
cagaaaaggccagagaacaagacaagccacaagcaaaaaacagaaggaagagcgaacgag

SEQ ID NO: 37735 - RNA, 69 nt, Homo sapiens
caccccgggcacggacggcacggacacaggcccacgaggccgagaacaccaggcgggggagcaagagac

SEQ ID NO: 37736 - RNA, 82 nt, Homo sapiens
accacaagcaccagcacgccggcaagaccccccagggggcccgagcccaccccagggaaggagaccgccaggccaggaccag

SEQ ID NO: 37737 - RNA, 51 nt, Homo sapiens
aaagaaaacaccgaagggccaagcaggaagcacgccgggaacgaagcacac

SEQ ID NO: 37738 - RNA, 75 nt, Homo sapiens
ccaccaaagggacaccggagcgacagcgcagccaagaccgcagagcgagaagaggcgacaccagggcccaaagaa

SEQ ID NO: 37739 - RNA, 85 nt, Homo sapiens
ccaaaccaagaggcggccagcaggaggcgagaagggcggaaaacaccccaaaagccaaaagggaaaggaaaagaccaacaacagc

SEQ ID NO: 37740 - RNA, 81 nt, Homo sapiens
ggaaggaacacgcccgggacaagacaccccaggagcccagccacagccaccggacccccagaagcccaccagaggcgaggg

SEQ ID NO: 37741 - RNA, 87 nt, Homo sapiens
cggcggggaaaaggcggacgggaaggcgggagacgagaagccgaaaagcgcagcgagcggagccgccggagaagcaggagacaacga

SEQ ID NO: 37742 - RNA, 54 nt, Homo sapiens
acacagccgacacaacaagacagacgccaggggcagaaccaccagccggacagg

SEQ ID NO: 37743 - RNA, 42 nt, Homo sapiens
gacgcagccggccgcgcccccaccggggaggaccagagagca

SEQ ID NO: 37744 - RNA, 41 nt, Homo sapiens
cggggcccccccgcgaccccacgaggaccgccgcgccgacc

SEQ ID NO: 37745 - RNA, 41 nt, Homo sapiens
ccacagaggcaccaaaccagggaaaaccagacaaggaaaac

SEQ ID NO: 37746 - RNA, 80 nt, Homo sapiens
ggcacccgcacgagcaacagacgagcgcgccaggccgacagccgcggccgggcccgagccaaaagaagcaagggaaagac

SEQ ID NO: 37747 - RNA, 58 nt, Homo sapiens
agcggggcacgcggcaacaccgccaaggaaaaggaacagagagagcagaaccgaaacg

SEQ ID NO: 37748 - RNA, 75 nt, Homo sapiens
caagacggcaccaggggcaggccagcacccgagccgagccccagcgcagagcaaggcgcggaccaggcgggcgcg

SEQ ID NO: 37749 - RNA, 88 nt, Homo sapiens
cgccgcgcaccggagccggcacggccggcggccaggcagagcagcccaccagggaggggagggggggaggcgcaccccgcgcccaccc

SEQ ID NO: 37750 - RNA, 62 nt, Homo sapiens
agaacggggaccaaaaggaaggaaggaccccaaaccagcaaagaagaagaacaagaagaggg

SEQ ID NO: 37751 - RNA, 72 nt, Homo sapiens
ggacgcagccagaaaggaacaacccaaaaaacaacaaccggacacagagaacagccagcaaagacaagagca

SEQ ID NO: 37752 - RNA, 75 nt, Homo sapiens
cggcccggcggggcccggcaccaggaccaccgcggcagcacgcggcgcagccaggagccggacgagaaaccaggc

SEQ ID NO: 37753 - RNA, 79 nt, Homo sapiens
ccgcccgcacaggacacgaggcgcgacgccacagaccacggcccagagagccaacacccgaagcgaagggcggacagac

SEQ ID NO: 37754 - RNA, 82 nt, Homo sapiens
gcgcgcggcgccgcaacaaagcagacaccagacaggccgacggcgcaaggccacggcaagcaccgggagcagcagcgaagcc

SEQ ID NO: 37755 - RNA, 74 nt, Homo sapiens
gcccgcagggcgcggccgcgagacaccggcagaaggaacacaaagaggaggcagcgacaagacggagacaaagg

SEQ ID NO: 37756 - RNA, 74 nt, Homo sapiens
gcacacacgaggagacccagccccaggacgagccagccagacccgcgcgccaaagaagggacaagagaaaaaaa

SEQ ID NO: 37757 - RNA, 72 nt, Homo sapiens
ggccccccagcaggggacccaggacagaaaggagcgaaaaagaccaaaggcgagggcccacgcccaggcggc

SEQ ID NO: 37758 - RNA, 61 nt, Homo sapiens
aggcagcaaagaagagcagggagggggaagagaaaacgagagaagcaagggaaaaaaggga

SEQ ID NO: 37759 - RNA, 64 nt, Homo sapiens
ggacggaccgccagacggagacagacacagaccaggccagcaacgcacccgcccccaaagagag

SEQ ID NO: 37760 - RNA, 42 nt, Homo sapiens
cgggccgcgcgcggccgggacaaggcgaccagccagcccggg

SEQ ID NO: 37761 - RNA, 83 nt, Homo sapiens
cgcacacacacccaaggcgccgaagcggcccaggacacgggaggaaggccggaggcgccggcgacggagggcagcgggccggg

SEQ ID NO: 37762 - RNA, 82 nt, Homo sapiens
gagggagagaaccagcaccgggacgcacagagaccggaagaccaagcaggagaaccgaccggaaggagacccaggaagaaag

SEQ ID NO: 37763 - RNA, 65 nt, Homo sapiens
cgccccgggggcaccgcaccgccagagccgacaaccccgaaaccaaagagaagcagcgaagacag

SEQ ID NO: 37764 - RNA, 108 nt, Homo sapiens
agagagagcggggcagggcagaggacagcaagggacaacagaaggccgaggaccaagacaaaggacgggcagaggcggaccgcaaagggcggacaaaacaggcagcac

SEQ ID NO: 37765 - RNA, 73 nt, Homo sapiens
agacacaggagaacgggaggcgcagaaagaggaccgaaaagacgcggccccaaaggaaacacccgaagaacac

SEQ ID NO: 37766 - RNA, 67 nt, Homo sapiens
ccaagcgaaaacccgagaaagaaggaaagaaacgaaaagcacggaaagggcgagccccaacagaccg

SEQ ID NO: 37767 - RNA, 81 nt, Homo sapiens
gcacagaaaacggccacggaggcgaggccgcagacaagcagaccggaagaccgacggaagaccacaccccgagggagccca

SEQ ID NO: 37768 - RNA, 77 nt, Homo sapiens
aacaaggaccaaaaagccaaccaacaagcgccccggcaaggccaccgcagaagccacaggagaccggaggccaacgg

SEQ ID NO: 37769 - RNA, 67 nt, Homo sapiens
ccgcgcgcgcgccgggcggggagcgcgacgggggacgaacaacccgggaaccggaacaggcagacag

SEQ ID NO: 37770 - RNA, 65 nt, Homo sapiens
aaaaaggaaacaaagcagaacaggcacaagcaggacaagaagcccgagcccaggccccacgccgg

SEQ ID NO: 37771 - RNA, 81 nt, Homo sapiens
cagccgaaagcgagaagcgccgcccagaagcagaaaggcaaccaccccaaagagggccgcgggaagacccacaagcaccga

SEQ ID NO: 37772 - RNA, 80 nt, Homo sapiens
cgaggcacagggaagcgaacggcccaaggcaggagcagcccacgccccaggacagagaacagcgggaagggcccccccca

SEQ ID NO: 37773 - RNA, 39 nt, Homo sapiens
gaaggaccccaagaggagaggcagggacccgggcaggca

SEQ ID NO: 37774 - RNA, 91 nt, Homo sapiens
cacagacgcagcaacaacagcagccggcccgaacacaacagaccacggagcccacagaaccaaagcagccaagggaggaggaggggaagcc

SEQ ID NO: 37775 - RNA, 84 nt, Homo sapiens
cgcacccccgcgacacagagagggcagagcgaacccccccacgcagagggacaggaggaggaagaagaagcggaggggccgggc

SEQ ID NO: 37776 - RNA, 78 nt, Homo sapiens
gggagaacaccccacagggaagagggagccgggggggcgagcccgccgagagcgccaaggaggagacaacgggggaag

SEQ ID NO: 37777 - RNA, 86 nt, Homo sapiens
agacaggaggagagaagacccacggagccaggcccaggaacccaaccaaccacagagaaggaaagccacgcaagggggagaaaacc

SEQ ID NO: 37778 - RNA, 100 nt, Homo sapiens
gcaccgcggaggaggcggcccggcgcggggaagcaggggaaaacgcaaggaagccggacaggaagggaaggggcggagacgggcggaacgcaggaggcca

SEQ ID NO: 37779 - RNA, 80 nt, Homo sapiens
ggcgggagcgcgcccgccgagcgcaacagcggcgggcggggcaccccaggcaggcaggggcagaaggcgacccagcgcag

SEQ ID NO: 37780 - RNA, 81 nt, Homo sapiens
cgccaacgcaggaccgaaggcccgccacgcccggggcggagaacggaaaagcaccaggaagcagagaggaccgcagaaggg

SEQ ID NO: 37781 - RNA, 77 nt, Homo sapiens
aagagccaagacagaaaaagacaaagcccaggccaggagacaagcccaagcacagccgagaagaccgaagaacaagc

SEQ ID NO: 37782 - RNA, 76 nt, Homo sapiens
acacaagcggacgggcgagggcagagcagccgcccaacgaggaggcgcgcagaccgggcggagaaccaccaaggag

SEQ ID NO: 37783 - RNA, 67 nt, Homo sapiens
caaagccggaaacaagacaccgaaaggaaaacagccccgaggacagagaagagcggacccggcgacc

SEQ ID NO: 37784 - RNA, 39 nt, Homo sapiens
agcgaggccacggagccccaggccccgacggcagcccac

SEQ ID NO: 37785 - RNA, 76 nt, Homo sapiens
caggccaccacagaaacaaaagcaacaaagaggaaacaacgaacgagcaaggaagggccaaggcagaccccacacc

SEQ ID NO: 37786 - RNA, 73 nt, Homo sapiens
accccaaccggggaggaaaaccgacgaagagacaccggcaagcagacaccaccacccgacccagcaaggaagg

SEQ ID NO: 37787 - RNA, 67 nt, Homo sapiens
ggccggacagcgagcggcggcgacgccagaagccagccaggacggaacccgcaccaccacacaacca

SEQ ID NO: 37788 - RNA, 53 nt, Homo sapiens
gaaggcggagcagagcccagggggccccaggacccggacagacccaaaaggga

SEQ ID NO: 37789 - RNA, 76 nt, Homo sapiens
gccgagccgggagcgaacccagcaccccccgaaaaaaccaagggcaaaacggagcagcggggaacacagcagcgga

SEQ ID NO: 37790 - RNA, 77 nt, Homo sapiens
caaccccgggcggccgcaccgccaggaggccagaagcaaggaaagagcagggcagaaacagccgaacaacagccagc

SEQ ID NO: 37791 - RNA, 79 nt, Homo sapiens
gagggacccggcccggaggaagaaagccaaggaggggcggagaacggaaaagcaccaggaagcagagaggaccgcagaa

SEQ ID NO: 37792 - RNA, 67 nt, Homo sapiens
caaaaaaaacaggagaaaaagacgaggcccccaagcgggggggagacaacaacaagccgaagaggcg

SEQ ID NO: 37793 - RNA, 109 nt, Homo sapiens
cgccaaggaggagaaggccagcagcccagggaagagggaggcgaggagaagccggggcaaagaaaaaggagagaaaaagaggcaaaacaacaagaagaaaagagaaaaa

SEQ ID NO: 37794 - RNA, 72 nt, Homo sapiens
ccgggaaagccgcaaaggcacgcaaagaacgcccacaaggcccagaagaagagaaaaaagggaagaaacaaa

SEQ ID NO: 37795 - RNA, 54 nt, Homo sapiens
aggacaggaccgcaagcccgcagggacgaggccccaagcggaagccgcagaagg

SEQ ID NO: 37796 - RNA, 58 nt, Homo sapiens
gaacgcggacagacgaggaagaggcgaaaggcagcgagacacccgacagacaggggcc

SEQ ID NO: 37797 - RNA, 34 nt, Homo sapiens
cgggaggaggaggggggcccccggccaaggcgga

SEQ ID NO: 37798 - RNA, 93 nt, Homo sapiens
cgaaacgacagagcaagaagagcggacagcaaacaccagcaagacccgaaaacgagaaaaagcaacagggagacgcaagaaagaaggcgaagg

SEQ ID NO: 37799 - RNA, 66 nt, Homo sapiens
acgccccgcccccacaaggacccacagggaaagccaaagagaggaccggaccccacgcggcagccg

SEQ ID NO: 37800 - RNA, 69 nt, Homo sapiens
gagaagaacccaagccaggacaccagaacgaacaaggcgagaggggaagcgaaagggggcagacagaag

SEQ ID NO: 37801 - RNA, 83 nt, Homo sapiens
aggacagggcggaggacgggccagccagggcccgcaggcagagcggcaggaccggaaggaacaacaccaaacccaagagggca

SEQ ID NO: 37802 - RNA, 118 nt, Homo sapiens
aaaaaccaaggaacacggagaagaaaaacgcgcaacaagcaggaaaagagagaccagaaagagccgcagacgcacagcaaccaccggacccgaaggccaccacccagaggggccgccc

SEQ ID NO: 37803 - RNA, 100 nt, Homo sapiens
cgccgggccccgggggaggcgaggagcccgcgggcggccggcgggcggggcggcggcgcgacagggagcgccgccgcgagacgacacagcgacgaaggcg

SEQ ID NO: 37804 - RNA, 71 nt, Homo sapiens
gcgaccccgacagacgggaccccccaagggcggaaggacgacagccggacagcaaggaccagcaaaaggac

SEQ ID NO: 37805 - RNA, 59 nt, Homo sapiens
cggaaccgcgggcccgaaggccgggcagacgcccgaaccggcagaaaccggaccacgca

SEQ ID NO: 37806 - RNA, 78 nt, Homo sapiens
cagccaacaccaccgaggcaacggacaggaggacccaaaacgcaggaggggcacgcccggaagaccagacccgcagcc

SEQ ID NO: 37807 - RNA, 84 nt, Homo sapiens
agcaccacggaccccaaggaagccacggcagacacacaacccgacccgacgagcaccacaaaggcagcaccaagcaaaagagga

SEQ ID NO: 37808 - RNA, 98 nt, Homo sapiens
ccccaaaaggaccgccagagacgggagggacgcgcaaggaccaaggaagagagcgacaggacagaaggacacgagaagaggagcaggaagagcaacca

SEQ ID NO: 37809 - RNA, 57 nt, Homo sapiens
ccaaggggaagcagacccagagcaagaaggccacggccaacagccgaaaacagcaag

SEQ ID NO: 37810 - RNA, 79 nt, Homo sapiens
gacagggagagggacaggcacgcacacaacagaggaaacagagcaacacaccaggaagcagagcggcaacaaaaacgaa

SEQ ID NO: 37811 - RNA, 75 nt, Homo sapiens
cggcagcacgccaggacgagcagagccccccccaccagaggacgggaggagcagcaacaggcaagcggacacaaa

SEQ ID NO: 37812 - RNA, 69 nt, Homo sapiens
caggcagagcagaagcaccccagaaaggagcaaacaaccccacagccaacaagaagaggcacaaagaga

SEQ ID NO: 37813 - RNA, 75 nt, Homo sapiens
gcccagccccgaggagcgggaacagggcgcgagagagaaggggaggaaaagcagcaaagacgaccccagggagaa

SEQ ID NO: 37814 - RNA, 76 nt, Homo sapiens
cgccgccgccgcggagacccgggcagcgcccaccgcggagcgaaaaaggaggcggcaacagggaacgccgcgcaga

SEQ ID NO: 37815 - RNA, 80 nt, Homo sapiens
cgagcaaccgccccccgcaccaccagcagccaggaaccaagggagaagaaccaacaacggaaaaccagcgggacaaggca

SEQ ID NO: 37816 - RNA, 73 nt, Homo sapiens
cggccccgccacccacagggccgacccgggacggaggggaaaaggggcccgggcagcaagaagggggaacccc

SEQ ID NO: 37817 - RNA, 62 nt, Homo sapiens
cgcaaaagaggaggaccaaagaccggcccgcaggcaaaaggaccgggaagaggaaccagcca

SEQ ID NO: 37818 - RNA, 79 nt, Homo sapiens
cgaacgccaagcccggccccaggaccccaagcagggaaagccaggccagaagaaggaaggccggggaggggacaggaaa

SEQ ID NO: 37819 - RNA, 56 nt, Homo sapiens
ggcaccagaccgaaaaaccaagccagaacggccgagcgaccaggagaggagccccc

SEQ ID NO: 37820 - RNA, 72 nt, Homo sapiens
ccccaagcaagcaaccgaagccaagcagaaggagaaaacaaggaaacgcgagccccaccccaccgccggcgg

SEQ ID NO: 37821 - RNA, 60 nt, Homo sapiens
agggagacggcccggagagcggcgcgcagggagaagccggcaacgggagcggagcacgac

SEQ ID NO: 37822 - RNA, 80 nt, Homo sapiens
gccacgcacaccagccacagccagcaggccgcccacgcggagccgccagagcagcgacggacccagagccagggcggccc

SEQ ID NO: 37823 - RNA, 91 nt, Homo sapiens
gcggacgggaaggcgggagacgagaagccgaaaagcgcagcgagcggagccgccggagagagcccagaggaccggcggcccgaccaaagaa

SEQ ID NO: 37824 - RNA, 69 nt, Homo sapiens
ggaagcgaggcaaagcggggaagcaggaccagcgaagcgcggcaaacagggaaaaaaagggcgacaggg

SEQ ID NO: 37825 - RNA, 69 nt, Homo sapiens
ggccgccagcggggacaggcagcaagagagaagaagcaaaccgggaccggaagcaccaaggagaaaaag

SEQ ID NO: 37826 - RNA, 99 nt, Homo sapiens
gcagcacgggacgcacggcccggggggagacagccacgggaagggagaagcccaccacgcaacgggacggcgcggcggaaggcgcgccagacgagccac

SEQ ID NO: 37827 - RNA, 79 nt, Homo sapiens
gcgccacaccagcaccaccccaggcaggcaaccgcccggcagaaaaccccaagagggaacgcccgcggccacgcacaac

SEQ ID NO: 37828 - RNA, 69 nt, Homo sapiens
ccggaaggacggcgaggccaacccagaggaccgcaaagggcggaaagaagaggaaagaaaaagaaaaag

SEQ ID NO: 37829 - RNA, 92 nt, Homo sapiens
ccaagccccagccggagaaggagcccacaacaaccacaggcaaccgccacgccaggccgagccacacagacggaagggcaccagcaagaaaa

SEQ ID NO: 37830 - RNA, 49 nt, Homo sapiens
agccgcgcgccggcgcgcgccgaggcacgaagaagcccgccggagaagc

SEQ ID NO: 37831 - RNA, 77 nt, Homo sapiens
ggggccaagccgcgccggagcggagcgcgggcgccggggagccagcccgagagagacgcagcgcaaggccgggggag

SEQ ID NO: 37832 - RNA, 73 nt, Homo sapiens
ccgcacccagagaaagcgcggacaacaccaggaaaagacagagacggagaaagaagaacaaacacaaaacaca

SEQ ID NO: 37833 - RNA, 59 nt, Homo sapiens
acgcgcggaaggcagcgcccagcagcgcagagaccacagcagacacagagacgggcgga

SEQ ID NO: 37834 - RNA, 82 nt, Homo sapiens
cggcagagccccgacgccacagaacggcacagcaacggacgaggagaacaggaacccggccgcacgcccgcgaaggccaaca

SEQ ID NO: 37835 - RNA, 74 nt, Homo sapiens
cccgacgggagcggccccagagcgggaaggcaaagaagaagcgcccacagaaggaagcgcgggaaagagggccg

SEQ ID NO: 37836 - RNA, 84 nt, Homo sapiens
aaaacagccccagggcagcaggaaacaaaagaaggccagagagaaaggaaagaaaccaaaggaaacggacacacaaacgagaaa

SEQ ID NO: 37837 - RNA, 83 nt, Homo sapiens
ggcccgcggaggcggcgggcagcgcccgcccgccggagaacgaggaaaggcggagcagcggaaagaaggaaacgagaaagaaa

SEQ ID NO: 37838 - RNA, 86 nt, Homo sapiens
cagacaagaggaaccgcgccccagaaggcagaggaacacaacagcgaagaagcgcgaccgacccaaccaccggcagggggggccgg

SEQ ID NO: 37839 - RNA, 81 nt, Homo sapiens
gaaaagcacgccaacgaccgaaaccacagcgaagggaaaagaagggaccaagaaaggcccagggaccaaagcccggacaag

SEQ ID NO: 37840 - RNA, 58 nt, Homo sapiens
ggcccaagggcgaccccagccgggcccgcgaaggggcgcggggcagagcacggaggca

SEQ ID NO: 37841 - RNA, 75 nt, Homo sapiens
acagagagaaaagagacggagcaagagaacgcaagagacgaacgagaaaagggcgcccgggagaagaagcaaagc

SEQ ID NO: 37842 - RNA, 71 nt, Homo sapiens
ccaaaaaaccaccccccagacaccaccaagaggaaggaggccagaccaaggcaacggccgcaagcccgcgg

SEQ ID NO: 37843 - RNA, 72 nt, Homo sapiens
gcccaaagaacagaacggcaagccacagaacccaacacagagccaaaggaacgcaaggcggggaaaaaaagg

SEQ ID NO: 37844 - RNA, 71 nt, Homo sapiens
ccgcgaagcaacaaccgcaccaccaggcagaggaggagagaagagaggaagcgagcagcacgggcaagcgg

SEQ ID NO: 37845 - RNA, 72 nt, Homo sapiens
ggccgggcaaggccgagagcggcccacacgaaagacagcgcccgcgccgaccccacggacgggccagcgaga

SEQ ID NO: 37846 - RNA, 80 nt, Homo sapiens
agccgcggccgggcccgaggagaacccggaagccccgccccccagcccagccgaccagagccacccgcaccaggagagcc

SEQ ID NO: 37847 - RNA, 104 nt, Homo sapiens
agagcgagcgagggggggcgcgccggaaaccggagcgcgcagcagcgggagaacagagacccaccaagaaaccagaacccggacaagggaagggcccgaggagg

SEQ ID NO: 37848 - RNA, 84 nt, Homo sapiens
gagagcgaaccccgggacacgcaggaacggcccagcacaagaccgcgacagcggaagaagagcaccaaaaagaacagaaaagaa

SEQ ID NO: 37849 - RNA, 53 nt, Homo sapiens
agagaggaagaagaacgacccgcccggggcagcaggcacacgagcggccacga

SEQ ID NO: 37850 - RNA, 57 nt, Homo sapiens
ccagaccagggacaaagagcaaacagacagggccgcagggggagaagggaagcgcca

SEQ ID NO: 37851 - RNA, 74 nt, Homo sapiens
agggcaagacaagggaagaggaaagaggagcccaagacgaaggggccacggaagaagagcgcaggagccgcaga

SEQ ID NO: 37852 - RNA, 65 nt, Homo sapiens
gcggagcaggcacacagggaacgagaacccaagggcagaaaaacgcaagggaaaagagaaaaaga

SEQ ID NO: 37853 - RNA, 61 nt, Homo sapiens
cagcccgcagccccgccagccacccccagcaaagggaagcacggcgaagagaaccagacgc

SEQ ID NO: 37854 - RNA, 68 nt, Homo sapiens
ccgggaaccacaccaccccgcgcaggaagggggacggggagaaacacgccgaacacaacgcaaaccga

SEQ ID NO: 37855 - RNA, 64 nt, Homo sapiens
cccggccccggcccacaggggggggcaaacccgagagaacggaagacgaccccgacgcaggcca

SEQ ID NO: 37856 - RNA, 78 nt, Homo sapiens
cgaccccgcgcgacgacccgccgccgccgggcggagacacgaagggacccgaggccacacccgcagcccccccccaca

SEQ ID NO: 37857 - RNA, 72 nt, Homo sapiens
ggcacccggcaggggagcgggcgccagccacggagaacggccacaggacaggaagcccccagacacgaaaca

SEQ ID NO: 37858 - RNA, 83 nt, Homo sapiens
gggggcgccagcccaccaagaagggccgagcacagcaagcaaaggagccacgggacgaagacggaaacaggggacggcacaag

SEQ ID NO: 37859 - RNA, 71 nt, Homo sapiens
gggccgacccccaccggccccaggcggcggagccgaagcaacgcacaaagaaaaagggcggcacccaccac

SEQ ID NO: 37860 - RNA, 79 nt, Homo sapiens
gcggcgcggacaccacgaaacaagccggaacagagcggcaccggccgagcgggcggcagacgcagacaaacaaaacaag

SEQ ID NO: 37861 - RNA, 69 nt, Homo sapiens
agaaggccgcccccaccggacgaggccccccaaccaggcaaggaccccaacgagggaccacgccagccc

SEQ ID NO: 37862 - RNA, 67 nt, Homo sapiens
cagggccccacggcaacaacaaaaaggcggccgaggccagacaacggcaagcggagaagagcaaggc

SEQ ID NO: 37863 - RNA, 74 nt, Homo sapiens
acacaggaacaagcaccacagagcggagcagaccaccgcccagcaaaaagcggcggaaagaaagacaaaaggaa

SEQ ID NO: 37864 - RNA, 74 nt, Homo sapiens
cccgcgcccgccgcgggagagaggagcagggcgccaagcaggaccgaccaacagaggggggagaagggaggaag

SEQ ID NO: 37865 - RNA, 72 nt, Homo sapiens
gggccaaagaagggagaggggacgcggaagagacagcagaacaagagccaggaccggacaggaagggagccc

SEQ ID NO: 37866 - RNA, 74 nt, Homo sapiens
cacaggccaaaggagcggaagcagccagggcgaagcagagagcacaagagaagaagaaaaaaagagcacaaaac

SEQ ID NO: 37867 - RNA, 73 nt, Homo sapiens
caccacgggggaaaggcaccacaggcaaccacaggggcccaagcagagaccccccagaaaacaacccgcagca

SEQ ID NO: 37868 - RNA, 79 nt, Homo sapiens
cagccaaacagacaggggaagcgccagcaggagaggggaaagacaaggagccgggccgagaaaccgaaccagagaccag

SEQ ID NO: 37869 - RNA, 82 nt, Homo sapiens
cggaccgagagcgcgaaacgcacgagaagggcgccaagaggcagcagcagcgaccgccagaagggacagaggaacgcgccgc

SEQ ID NO: 37870 - RNA, 72 nt, Homo sapiens
gacacagaaaagcgaaagccagaaggaagcagcagaacccaaaaaagcagagaaagcaaacagaaaacaccc

SEQ ID NO: 37871 - RNA, 63 nt, Homo sapiens
cccagccaacgacggcgcaaaccaagagccggagcagaaagcgccggacagggcaaacacccc

SEQ ID NO: 37872 - RNA, 77 nt, Homo sapiens
ccccgagccccaggccaggcgacacacagcgagccagccccagcgccgggcgcagggggcgagaaagcgcgcacggg

SEQ ID NO: 37873 - RNA, 74 nt, Homo sapiens
agcagcgcaggacccaagacaccgggcagacacgcaagaggcgcgaacagggcccacccgccacgacacagggg

SEQ ID NO: 37874 - RNA, 71 nt, Homo sapiens
gagaacaagggaaaaaagaaagcacgggccgcagagccccgagccaggaggcagccagccacagcgagagc

SEQ ID NO: 37875 - RNA, 62 nt, Homo sapiens
cagggaggcgggcagggaccggaaggccgaaaggaagccacaaagaaggggacaccccaaag

SEQ ID NO: 37876 - RNA, 74 nt, Homo sapiens
gagcccgggagggcggccgcagagggcggaagaaacccggaccaagccgcaggagaaacgaagacagacaccaa

SEQ ID NO: 37877 - RNA, 73 nt, Homo sapiens
cgggcccagccgggaacccccacgcggccagcgaaaacgcccaggcaggcacagaacgaaccaaaaaggaaag

SEQ ID NO: 37878 - RNA, 74 nt, Homo sapiens
ccaccaaacacagggcagaaagccagacaccagagagaaccccagagggcgcggaagccccagcaaacaagacc

SEQ ID NO: 37879 - RNA, 80 nt, Homo sapiens
caccccaggcggcagcacacagaagcgacgaaggccccgccagcaggcgaagcagggagagcagacgcacacggagcgga

SEQ ID NO: 37880 - RNA, 60 nt, Homo sapiens
cgccgagagacccaagaaacagcagcagccgcccaaaacacaaaccaaagaagaaacccg

SEQ ID NO: 37881 - RNA, 75 nt, Homo sapiens
cacaaagggcagagcaaagacccagaacaccaagcaaagaagaggagcacaacaggcaggaaaggaggacacgaa

SEQ ID NO: 37882 - RNA, 62 nt, Homo sapiens
cgagaaagaacacccaacccagcccaccccacagcagggcggaaaacaccccaaaagccaaa

SEQ ID NO: 37883 - RNA, 90 nt, Homo sapiens
ccaggaccgagacaacacggggcaagcaagaacagaccgccacaccagaaagagaaggagagccaaaaggccaggcacagcaacgacaca

SEQ ID NO: 37884 - RNA, 69 nt, Homo sapiens
agacacggagaggagcggggagcacacaaaagagggacaacacaagccacagcgcccaggcccagagac

SEQ ID NO: 37885 - RNA, 40 nt, Homo sapiens
ggaccaggaaacggaggcggaaagcgaagacggcagcaaa

SEQ ID NO: 37886 - RNA, 102 nt, Homo sapiens
aggaaggccggacgacggcccggacccccagaagaggaccgcggaccgccgccgaacagcgagagccaaagcacacgacccgccaggcgacacgagccccgg

SEQ ID NO: 37887 - RNA, 68 nt, Homo sapiens
cgccggaggcggccgaaacgaaagccgcagcggggagaagcccacgcgaaaacaacaaggaaaaaaag

SEQ ID NO: 37888 - RNA, 108 nt, Homo sapiens
gaccaggagaacgcgagcacggaagagcgcgcaggagcgcccgcaggaccaggccagaccaagaccgagacggagaccgagagaccgcggcagcacacgggccacacg

SEQ ID NO: 37889 - RNA, 80 nt, Homo sapiens
ccagaggggcgaggcgagacccccgcccacgcaaacccaaagaccccgccggagacgagagagaggaggcagagagcccc

SEQ ID NO: 37890 - RNA, 63 nt, Homo sapiens
gaacggcgggccagagcggggcgaccaggaaaggaaagccaggccagaagaaggaaggccggg

SEQ ID NO: 37891 - RNA, 73 nt, Homo sapiens
gcgcccggccggaggcaggggaaagccagagaccaaaaaaccgaagaaggagcccaaacaacccagaggcagg

SEQ ID NO: 37892 - RNA, 81 nt, Homo sapiens
ccaaaaggcagcaaaggcgagcaaaacaagagaacacacggaccaaaggccaaggcagaggccccaggagaccacccacga

SEQ ID NO: 37893 - RNA, 81 nt, Homo sapiens
gcccggggcggcagcgcggacccgcccggagagaggacgggcgcacaacaccaacacgccaggaccaagaagaccccagcg

SEQ ID NO: 37894 - RNA, 75 nt, Homo sapiens
cgggccagccgccaacagaaacacaaaccagggagggaggacacaaaaaaacaaaagcacggagaccacccaagc

SEQ ID NO: 37895 - RNA, 69 nt, Homo sapiens
gaaagggcaaagagcggccacacaacggagagcgcaagcccagcgggacagggagaagaaggaagagga

SEQ ID NO: 37896 - RNA, 76 nt, Homo sapiens
aggcgccagggcccaaggcgagggcgaagcacacggcccgcccaccgcgggagggggcccccccgcacccgaaccc

SEQ ID NO: 37897 - RNA, 75 nt, Homo sapiens
gcaagcagcagaagagccaaggaaaaacagcaagaacccaaaagggcgaggccgccaaagggagcgaggagacac

SEQ ID NO: 37898 - RNA, 73 nt, Homo sapiens
gaccgaacgcaaagggaacgcaagaagagagccgaagaaacccacgaagaggccaagcaaacgcagaaacgcc

SEQ ID NO: 37899 - RNA, 115 nt, Homo sapiens
cagcgcgggcgcggagagacacacaggcgcgggcgaaccgcggagccggcaaggcagaccgaaaaaaagcggacagagggcgagagccagaagcagacggggggaaaagcgcaaa

SEQ ID NO: 37900 - RNA, 78 nt, Homo sapiens
aggaagcacggcgggcgaaacaggagcagacgccccgccagaccgaagccaccccaccccaccagacgacaccagaga

SEQ ID NO: 37901 - RNA, 51 nt, Homo sapiens
agcaggccagcagccaccgcggcccgggagggaacaaagaggaacaggcca

SEQ ID NO: 37902 - RNA, 83 nt, Homo sapiens
gacgcgcggggagcgcgccggaccaagcgggcccagaagcggggcaagccagccgacggagaccccgaggaacacgcagggga

SEQ ID NO: 37903 - RNA, 71 nt, Homo sapiens
agcggacccgcagccccaaacagggcagaaaagaacagacccagaagaagcgaaaggggagaaagaagaaa

SEQ ID NO: 37904 - RNA, 86 nt, Homo sapiens
gacaaccccacaccaacgagaggcaacgcgaggagggcaacgagacgggggcgaacaaagggcagccccgagaaccacagggacac

SEQ ID NO: 37905 - RNA, 67 nt, Homo sapiens
cacacgagagaccaaccaaaccgagaggaacccagcgaagaagggcaagacaggaacggccgaacac

SEQ ID NO: 37906 - RNA, 80 nt, Homo sapiens
agcagcggacgcgcccccaagaaagaacaacggcccaagagcacagagaagaccaagggccgccagcggggccgccagcc

SEQ ID NO: 37907 - RNA, 74 nt, Homo sapiens
gggagcaccaaagccaggagcagaggcagagacccagagaacccaaacaagaccaaaaccacgagcgaagagga

SEQ ID NO: 37908 - RNA, 75 nt, Homo sapiens
ggggggacgcacgagcccggcgccggcaggccccgggccgggcagaccagaaacgggggcagagccggccagggg

SEQ ID NO: 37909 - RNA, 53 nt, Homo sapiens
gcgccacccagcaagccaggcccccagagcaggagcaggaaaaaaacagacgg

SEQ ID NO: 37910 - RNA, 86 nt, Homo sapiens
cgcgcaagcgggcccagcgcccaaaggcccaaggagcgccggcccccacaaagacacagcgagccagggaggcggcccccagcagc

SEQ ID NO: 37911 - RNA, 77 nt, Homo sapiens
ccagccgaccgagcccaggagcgccacgcgcggaaggcagcgcccagcagcgcagagaaaacacaccagcaacaagc

SEQ ID NO: 37912 - RNA, 49 nt, Homo sapiens
cacgaggcaacgccccaggggaaggaaggaggagaacacacacagaggg

SEQ ID NO: 37913 - RNA, 79 nt, Homo sapiens
gagaggaagaagaacgacccgcccggggcagcagcggagaagagaacgcaggaccgggaagaaacagagagccagaggg

SEQ ID NO: 37914 - RNA, 89 nt, Homo sapiens
acagaggaaaagccccagcgcgcgcccggacagacaaggagaacgacacaggaacagaagggagggacagcaccaggcacggcccccag

SEQ ID NO: 37915 - RNA, 89 nt, Homo sapiens
aaagagaaagcaggccacgaaaacacaaggaccagcccaaaaccaggcccaaggaacgagagaggaagcaaagaagagccagaaggaaa

SEQ ID NO: 37916 - RNA, 70 nt, Homo sapiens
ggcgagagcccccacgggaaccaagaacagagaccagcacaaccagggaagaagacagaaagggcaaggc

SEQ ID NO: 37917 - RNA, 79 nt, Homo sapiens
ggacgcccagccccagaacaaacgagagggaaaccgggcagagcacaagcacagacccagacggcagaagaccaccccc

SEQ ID NO: 37918 - RNA, 70 nt, Homo sapiens
ccgacgacaaggggagggcaggggcgcagcggaagccgcagaaggaccggccagaagcaagccggagaac

SEQ ID NO: 37919 - RNA, 79 nt, Homo sapiens
aaaaaagaaggagccaagaggcaagaaagcagaggaagaacaagaagacagagaaggaaccaagcaacgcccagaaccc

SEQ ID NO: 37920 - RNA, 81 nt, Homo sapiens
cggcacgggaacagcggcgagaccagaccaggacaaagccccacccagaaagacaagcagggagaaagagaacacacaaga

SEQ ID NO: 37921 - RNA, 42 nt, Homo sapiens
ggccgggggccacggaagcgaggagaccaaaggcaccacagc

SEQ ID NO: 37922 - RNA, 51 nt, Homo sapiens
gcagcaaacaccaggagaaagagacggaccagcagcacggcacaaggccga

SEQ ID NO: 37923 - RNA, 70 nt, Homo sapiens
accaacggagcgcgaggcgggcgcggagaagcgcggagggacacaggacaaggagccaccggagaggaag

SEQ ID NO: 37924 - RNA, 73 nt, Homo sapiens
gaacgcgaacccgggaggcagagggcgaggaagcccaaacgaacagcaccagaaagacaagagcaaacagccg

SEQ ID NO: 37925 - RNA, 78 nt, Homo sapiens
cgacgaccgcccgacggcacccgcccgccgacacagccaccaagaaggcacaagcagaacgggaaaaggggcggaaag

SEQ ID NO: 37926 - RNA, 75 nt, Homo sapiens
gcggcgccggggggcgcgccgcgaccgcccgccggaggcgcagagggaccgagaggaaccgccaccccgcccgcg

SEQ ID NO: 37927 - RNA, 51 nt, Homo sapiens
ccccagcgccaccgccgaccgaagccgcaaaaacgaagccgagccgggacg

SEQ ID NO: 37928 - RNA, 83 nt, Homo sapiens
cagcgcagcccagccccacaagacacgagaccccagcaggcaccaccaccagccaagacacgaggcccaccaggaccgggaag

SEQ ID NO: 37929 - RNA, 68 nt, Homo sapiens
gccgaacagacagcgcacaagaccacacccgacaccgcaaaccgccacgagaggacacaaaccaccga

SEQ ID NO: 37930 - RNA, 75 nt, Homo sapiens
aaaccaacaaaaagaaggaaccaagagagaggcgcccaaagagcaacggggagccaagacagaccccagaacgca

SEQ ID NO: 37931 - RNA, 51 nt, Homo sapiens
cggacagacccacaacaccaggcgccagaccggcggcacacggacaaccgg

SEQ ID NO: 37932 - RNA, 70 nt, Homo sapiens
cgccggaagggcgcccgcagccccccacggaaggccgcggacccccccccccccaccccacaggagaaga

SEQ ID NO: 37933 - RNA, 76 nt, Homo sapiens
ggaggggacgacccgcagcagcgggaggagcagccaaacacacaggaacgccagaccccagccgagggaggcaaca

SEQ ID NO: 37934 - RNA, 76 nt, Homo sapiens
ccacacccaacaggcaaacaaggcagggcagcgcaagaccccgcacggaagcagcaagcacaggcagcgcagagcc

SEQ ID NO: 37935 - RNA, 75 nt, Homo sapiens
ccggcccgcagcaagaggcggacgagaaggacagggaagggaaacgagcacggagcgcccacggagccacggaag

SEQ ID NO: 37936 - RNA, 77 nt, Homo sapiens
ccccagccaccccagccagggaaccaagcgagcgggcggacaccagaacgaggaaagggaaagccaaccgcacaggg

SEQ ID NO: 37937 - RNA, 71 nt, Homo sapiens
gcggcgccagcaagaaagacagagcaccaggagggaacggcacaaaggaaccaagagccgcaggaaaagaa

SEQ ID NO: 37938 - RNA, 119 nt, Homo sapiens
agaggaggagaaacaagagcccgccaagccaagaacaagcagaggcaagacacgacggaagaaccacggacccaagcccgaaaccacacagcagaccgcacgaccgcaccaccaagccc

SEQ ID NO: 37939 - RNA, 80 nt, Homo sapiens
ccgggagcccggcccggcgccgcgcgagccagacggaaggcacgagggccgacacgccccccaacgcagacacccccgga

SEQ ID NO: 37940 - RNA, 105 nt, Homo sapiens
gcgagcccgaggccaggcgccggccggcgcgaagacgcgggggccgccccccgaggaccccagcagacaggcgaagggacgccgacacaaagaacggaagaaggc

SEQ ID NO: 37941 - RNA, 73 nt, Homo sapiens
ccacaggagcgcccgcggaggagcgccgggacagggcagaccgccagcagcacagcaagccacagagagggcc

SEQ ID NO: 37942 - RNA, 69 nt, Homo sapiens
gaacaaccgaaccccaaaacccccagcgcgacgggcgccacccagaggccccacaggcgcagagcccaa

SEQ ID NO: 37943 - RNA, 68 nt, Homo sapiens
cgcacaccggcagcaaaagaggacaaggccgggcggagccgcagccgccgcggagagcacgccaggag

SEQ ID NO: 37944 - RNA, 111 nt, Homo sapiens
cgcccggcggcggagagaagcgccaaaggaccggacccagagaagaggaaaaccaccgggcagaaaccagaggacggaaccggcacagacacaaaccacaagacacaacga

SEQ ID NO: 37945 - RNA, 57 nt, Homo sapiens
gaggcgacaaagcagcacaggaagaaagccccagggggcaccgaaacacaggagccc

SEQ ID NO: 37946 - RNA, 77 nt, Homo sapiens
caggaaggaacacacggagcagccaaaagccaaaagccgagaacgacgaagacggccaacaaggccccccaggcgac

SEQ ID NO: 37947 - RNA, 79 nt, Homo sapiens
cgacgcgcccgccgccagcaggggcgccccggacgagagcccggcgggggcgcaggaacaacggggaagcgagagaccg

SEQ ID NO: 37948 - RNA, 59 nt, Homo sapiens
gagaagcgcccgcaccaggacacaggagcggagaaaaaaaggcaggaaagagaaagaag

SEQ ID NO: 37949 - RNA, 72 nt, Homo sapiens
ggagccgcgagcgcgggaagacgccgcgaaagcagcgggagcacaggcagaacaggagggaaaacgacggaa

SEQ ID NO: 37950 - RNA, 76 nt, Homo sapiens
ggggcagccgccgcccccccagaccgccagcgccacccgacagagaaaaacaaaagggacagcgcacggagaaaaa

SEQ ID NO: 37951 - RNA, 104 nt, Homo sapiens
ccgaaacccagacacgcagcaggcacccgacgccgacccagaggaagaacggagcaaggccggagcagccagggcgggcacagcgcagagaacccccggccaag

SEQ ID NO: 37952 - RNA, 77 nt, Homo sapiens
ccagagcgcccacagagaggacccaagagcacagagccacccgacccaggacccaaagagcagacaacaccgcaaca

SEQ ID NO: 37953 - RNA, 56 nt, Homo sapiens
ggaaagccgacccgccccaacaccggggaggaaggcgcacaagagcagggacccca

SEQ ID NO: 37954 - RNA, 74 nt, Homo sapiens
gcccacacagaccgccccccaggaccacaggaaaagaccaaggagacagaggggggggagcaaaggccagagac

SEQ ID NO: 37955 - RNA, 84 nt, Homo sapiens
aaaaccaggccaggcaagagaaacgaggagacaccagaggaaaaccaccaagaccaaaggccaaaaaaaaccaacaacaggggg

SEQ ID NO: 37956 - RNA, 75 nt, Homo sapiens
cacaaagcggccgaaacagaaaacaagagaccacagaaggacaccaggggggaaaaaccacacaggcaaagaacg

SEQ ID NO: 37957 - RNA, 72 nt, Homo sapiens
gccagcaacaccagcggccaccgccaggcaacagagggaaaagacaaacggagcaggaaaaagaacaggagg

SEQ ID NO: 37958 - RNA, 62 nt, Homo sapiens
gaagcagagcaccagccaagcgggcgacaaaccccgggggaccacccaccgggggaggcagc

SEQ ID NO: 37959 - RNA, 108 nt, Homo sapiens
aacaagcgacaaccagaaggggaacgaaagacagaagcagagcgaacagagggcccacgccgcacgggccgagggcacggcgcaggcccacagcggaccagacccgcc

SEQ ID NO: 37960 - RNA, 94 nt, Homo sapiens
ccgaacccagagcgagggggggaccaccgccggccaggggcggaaacacccaccagccgggacaggcgcagcaccgccgcccggagcgagcccc

SEQ ID NO: 37961 - RNA, 64 nt, Homo sapiens
ggcaaggaggacacccggacaccggaagcgggaaagagggaacagaaagaggaaagaacaaagg

SEQ ID NO: 37962 - RNA, 74 nt, Homo sapiens
gacagggagcgggcaacacaaaggaagccaagaagaaggagcacagagacgggccccaagagcgaccgcagcac

SEQ ID NO: 37963 - RNA, 56 nt, Homo sapiens
gaacgccccacgaggcggcgcccgcgaaagacagaaccgcaaggccacaaaccaga

SEQ ID NO: 37964 - RNA, 76 nt, Homo sapiens
ggacggggaccagaccgaagggcagacccaacacacaaaaccaccgccagcccagaggaaagaagacaaggcggaa

SEQ ID NO: 37965 - RNA, 63 nt, Homo sapiens
agcacaaccggggccgaggcagaccccccgaaccgaagcaggcaaggaacgcaaagaaaccaa

SEQ ID NO: 37966 - RNA, 64 nt, Homo sapiens
cgccagcgcgggaggcgcccggaccaccaagcagcccccacgaaagcggaggacgaaacaagga

SEQ ID NO: 37967 - RNA, 73 nt, Homo sapiens
acgcacaggagaagggcccggagaccaaccgaggcaaaagaaacaaacacgcacaccaaaagccgcagaaggc

SEQ ID NO: 37968 - RNA, 79 nt, Homo sapiens
caaagaggagagcaaaggcagcaagagagcacaggagaggggcgagaaggagcgcagacacagacacaccaacggcaac

SEQ ID NO: 37969 - RNA, 77 nt, Homo sapiens
agagaggccacgacgcacagccacaggaggcccacccccacacaacgaaaccacaaaacgcccaccagcacagcggc

SEQ ID NO: 37970 - RNA, 66 nt, Homo sapiens
gggacgcggacgcacggaacgcaggagaaaagagaagagacacgccacaggcaggagagcacgcag

SEQ ID NO: 37971 - RNA, 75 nt, Homo sapiens
ggcccggcgcgcgcggcccggccggcccggcgccccaggccggggggggcacagagccccggaagacagccccca

SEQ ID NO: 37972 - RNA, 60 nt, Homo sapiens
aggaaacgccaaaacaccagaaccaaccggccaaggaaaaggaacagagagagcagaacc

SEQ ID NO: 37973 - RNA, 79 nt, Homo sapiens
ggacacacccaggaaaagaccaggacggacaagcacagccggaaggcaaccagagggacgggaacccccccgcagggag

SEQ ID NO: 37974 - RNA, 77 nt, Homo sapiens
cgaccagaccgaaccaccaccacagacccccaccagaaagcaaacgagggcacacggcggcgcgaagccaggggcaa

SEQ ID NO: 37975 - RNA, 65 nt, Homo sapiens
aacaggccggaaaaacagaagaaaccgggagaagcagaacacggacccaaggcaagacgcgcgag

SEQ ID NO: 37976 - RNA, 54 nt, Homo sapiens
acacaagcgaaggcgcgcaccggaagcaccagcgaggaaggccccaacggaacc

SEQ ID NO: 37977 - RNA, 71 nt, Homo sapiens
ggggaaggagcccagcgacaaaagccgcaacaacgggaacgacaagacaagcaaagagggggagaacagcc

SEQ ID NO: 37978 - RNA, 80 nt, Homo sapiens
caaggcaagaccgaacagaaggaacgacgcggaccagaagccagagcgaggacgccggcagagggaagaggcaaagacca

SEQ ID NO: 37979 - RNA, 84 nt, Homo sapiens
accacgcagcagacaaggggacagcgaggacagacagcgcaggacagccagaccagcccgacgcgcgcacaccgaaggacagca

SEQ ID NO: 37980 - RNA, 76 nt, Homo sapiens
aggcagaaaaagggcaaagacacggaccaagaagccaacaggcggccgggagaggagggacagcagcgggagaaca

SEQ ID NO: 37981 - RNA, 68 nt, Homo sapiens
gaggaacagacaccgagccagcaagcccccaacgagcccaaaaggcagagcgaggagagaagaaggag

SEQ ID NO: 37982 - RNA, 81 nt, Homo sapiens
aacaagccagcagcaacagaaccccagagcaacaaggagacgcgccgcccggcccaagcgaaccaacacgccgagagcagc

SEQ ID NO: 37983 - RNA, 81 nt, Homo sapiens
gagcacgcgaccagcgaggagcaacacaggagccggagaagaggacgcagaaggacgagaaggcacggacggaggagcaaa

SEQ ID NO: 37984 - RNA, 74 nt, Homo sapiens
agcccaaacacgccacacgaaacaagaaccgcagaacaagaacggcaggcgaaagaccgacagcaagaccggga

SEQ ID NO: 37985 - RNA, 60 nt, Homo sapiens
caaagccccagacggacggaagcagaacacagagagccagcagagacggcaccggagcca

SEQ ID NO: 37986 - RNA, 47 nt, Homo sapiens
gcccgcgggggagccccgggagccgcacgcaccaaccaggccagagc

SEQ ID NO: 37987 - RNA, 79 nt, Homo sapiens
cacagcggccgggaccaagcgagggggaaggcggcaaggacacccgaaacccaagagacagagcagacagacacagcag

SEQ ID NO: 37988 - RNA, 77 nt, Homo sapiens
cccccggagcgcggccgggggaaccaaggcccccgaggagccaggagcccaccgcggccagcgcgccaggcgacggc

SEQ ID NO: 37989 - RNA, 72 nt, Homo sapiens
cgcaagaagcaccagcaagggccccagggcaccccgcgcacccccgagcccccccgcccccaccaggagccc

SEQ ID NO: 37990 - RNA, 79 nt, Homo sapiens
cagccccccaggcagcaccccaacaaaggggagggagcaccccgccaggagcccaggaagcaccaccgcacaggcgaga

SEQ ID NO: 37991 - RNA, 107 nt, Homo sapiens
cagcccccgaagaccggccagccgcagaggacagcaggcccaagcgcacacccaggaggccggcccgccagagcaacaggcggagcccccgaccgaagcaaccacgc

SEQ ID NO: 37992 - RNA, 61 nt, Homo sapiens
acgaaggcaaaccaacccagcacaaacccgaaaaacgaggcaacgcggggcgagccacaga

SEQ ID NO: 37993 - RNA, 81 nt, Homo sapiens
gcccgcgcgccccgagcccgggcccggcccggaccgcagcccccaggggcgggaaggcgagcacgacaccaccgccggcac

SEQ ID NO: 37994 - RNA, 57 nt, Homo sapiens
gaaaggaccacacagcccagagggacagaaccaaagaggaggagcaagagggggggg

SEQ ID NO: 37995 - RNA, 89 nt, Homo sapiens
ccgggcccgggagacgcgccggcagccccggcaccgcagcggcgcaggaggccgaggggaccgagggaagggccaaaccaggaacggag

SEQ ID NO: 37996 - RNA, 75 nt, Homo sapiens
cgaggacagaaggaagagacaaagcaggaggacacaagaagggaggaaaggcggacccaggaaccaccacgggag

SEQ ID NO: 37997 - RNA, 63 nt, Homo sapiens
gcggacacgcaaaccacacaaggaggcgcagcccccaagacgggcccccccacggcaaggagg

SEQ ID NO: 37998 - RNA, 35 nt, Homo sapiens
ggcacaaccgcaaaaaaggcaagcgcacaccagac

SEQ ID NO: 37999 - RNA, 77 nt, Homo sapiens
gaacagagagaacaagagacgcagccgcacagagagcggagcacccaccacagagagcagaccgccaagcccacaga

SEQ ID NO: 38000 - RNA, 63 nt, Homo sapiens
acaaccgaacgcaccgaggagaagaccaggaggcgggccaagggcgacagccccaaagcggga

SEQ ID NO: 38001 - RNA, 76 nt, Homo sapiens
gacccaggcaaaagcgaaccagagagaccaaggaacaggcgagagaaaaggcagacgaagaagaagcaagcgaggc

SEQ ID NO: 38002 - RNA, 80 nt, Homo sapiens
caccggcggccgaagcgccccccgagaggaagcacagcgcacggcggcgccagcgcgcgccccccagagaagggcacccc

SEQ ID NO: 38003 - RNA, 74 nt, Homo sapiens
gcgccggccgagaaggcagaggcggggcaaggagccacaagccacgacccagaaggcagcggggaccaaacaac

SEQ ID NO: 38004 - RNA, 66 nt, Homo sapiens
ccaaaagcaccacaagaccacaagcaggcaaggggaagcgaagggaagcacgaaccccagggacac

SEQ ID NO: 38005 - RNA, 78 nt, Homo sapiens
acaacagcaccaccacgaccagggaagccgccaccgggacccggcagcaaccccaacaaacgccagaggcagcccccc

SEQ ID NO: 38006 - RNA, 87 nt, Homo sapiens
aaaagcagcaacgagaagaagccaccaaggagcaggaaaacgcaaaagaggcggcaaggcagcccaggcaaagaagaaaggcgaggg

SEQ ID NO: 38007 - RNA, 79 nt, Homo sapiens
ccgggacagggagcaccggaaagaggacgaagcagaaagcaaggaaacgagcagaagaccagaaagaaaggggccccag

SEQ ID NO: 38008 - RNA, 78 nt, Homo sapiens
acacaacaggcaaacccacccacgcgggaccgcaggcacacgcggaggagaagcaccgccgggcggcaccgggcaggc

SEQ ID NO: 38009 - RNA, 83 nt, Homo sapiens
ggccccagcaccacaccacgagagaagaaagaaaaagaaaccgccagcccagagacacgaaagggacagagagggggacagaa

SEQ ID NO: 38010 - RNA, 72 nt, Homo sapiens
acccggaagccgagagccagagagaaccagaggcaagccagcacaccggcaagacaaacagagaacaggaca

SEQ ID NO: 38011 - RNA, 83 nt, Homo sapiens
cacagcgccgcagaggaccaaggaggacccacggagaacaaaacgcaccggaaagagagcgaagaaggccaaacagacgaaac

SEQ ID NO: 38012 - RNA, 75 nt, Homo sapiens
cccgcgccccgccgagcgcacaaaacagagccccgggggccacgcaaggccggccccgagagccaaagccgcggg

SEQ ID NO: 38013 - RNA, 79 nt, Homo sapiens
gccgagccgcgggccggcgcgcggcgcacgacacggaccggcgcagggcggagaccacggggcggcggcagccaaggga

SEQ ID NO: 38014 - RNA, 62 nt, Homo sapiens
cccccagccacgggaaccccgcaggaagaaacgcagaaaaaaagggagccggcagagaagac

SEQ ID NO: 38015 - RNA, 81 nt, Homo sapiens
cgggagcaaacgggcagaaacaaaggacacgccaaccgaaagaggccggagggaagagcaggagcagaagagcgaagaagc

SEQ ID NO: 38016 - RNA, 75 nt, Homo sapiens
ggaaccggccccacccgggaggggggagcggcgggaggccaccgccagagcgggaccgccagcaccgccgcagcc

SEQ ID NO: 38017 - RNA, 66 nt, Homo sapiens
cccaaccaggacgcaggcgacaagaccggccgcccgcccccggggccgccccccggaacagacacg

SEQ ID NO: 38018 - RNA, 78 nt, Homo sapiens
gccgggcgaggcggcggagagcgaggccgaagacgaccccgacgcaggccaggagccgcggacagaagccgagcacgg

SEQ ID NO: 38019 - RNA, 59 nt, Homo sapiens
caggacagagcagaaggaagggaacgccaggagccagaaccccgaggaaaggggaaaag

SEQ ID NO: 38020 - RNA, 39 nt, Homo sapiens
gaggaccagaacagcaagaacacacgcaggacgaaagag

SEQ ID NO: 38021 - RNA, 76 nt, Homo sapiens
acagaaagcggaaggaaagaacggagcggagcccagaaggggaacggcggaccacaaagagagaaccgcagcgaga

SEQ ID NO: 38022 - RNA, 82 nt, Homo sapiens
aggcaccgggacggaccgagaccggaccgagagcggaccgagagcgcgaaacgcacgagaaggaggcccacccgacgcggag

SEQ ID NO: 38023 - RNA, 82 nt, Homo sapiens
cagagaaggaagcagagacggagggagcccacaccaaggacaccaggagcccccaaggagggaagaggaaggaagcggcaag

SEQ ID NO: 38024 - RNA, 84 nt, Homo sapiens
ggcgcgcgacggggagaaggacgcgagggggagcggagaggccggcggcaccgggccaacagcgaaaagcaaggcagcggacac

SEQ ID NO: 38025 - RNA, 39 nt, Homo sapiens
cggccgggagaagcagcagagaaaggcagaacagcgaac

SEQ ID NO: 38026 - RNA, 89 nt, Homo sapiens
aaggccccaggaaccccgcacagccacaccaaagcaccgggccggcggcgagcccccggcaccccccgcacggaagaggggccggacgc

SEQ ID NO: 38027 - RNA, 83 nt, Homo sapiens
ggacaccaccaggggacggcacggacgacagaagcgacgggagaccggaggcgaagagagaagcagccgaggcagcggcagag

SEQ ID NO: 38028 - RNA, 56 nt, Homo sapiens
cgacaggcagaaggacgcaacaagcccaaccagcagacacggaggacagcagacca

SEQ ID NO: 38029 - RNA, 61 nt, Homo sapiens
cgggcgccggaacccgggccccgccaagcggacagacgcagcggggcaggccccaccacgg

SEQ ID NO: 38030 - RNA, 70 nt, Homo sapiens
cgagccaggaacaaagagcaaggcacagcagaagaagcacacaaccacagcagcggggacgggcaaccac

SEQ ID NO: 38031 - RNA, 60 nt, Homo sapiens
ccggccggagcgggaggcgggccagcgacaaaaagaggggcaggaagaagcaaaggcaga

SEQ ID NO: 38032 - RNA, 96 nt, Homo sapiens
ggcgccggcggagggaagaagacggcgaagcaccaacgccaaggaacacagcagcccaacacagacaggaacccaagggcaagaagaaaaagagag

SEQ ID NO: 38033 - RNA, 69 nt, Homo sapiens
gccgccagggcgaagacaccaaaccaccagaacagacccaagaccaggagcaagaagagagcacacaag

SEQ ID NO: 38034 - RNA, 75 nt, Homo sapiens
gggggccacgaggaacaaagacagcccaccaggaagagcgaaaaccagccgagagcgacagaccccaacaagggc

SEQ ID NO: 38035 - RNA, 71 nt, Homo sapiens
acaggaaagcagcccgaaaaagacgcgagaagccacacgacgaagaaccaagagaaaagacccacagaagc

SEQ ID NO: 38036 - RNA, 73 nt, Homo sapiens
agacgggagccgggagccggcaggcccgggcccgccggccacaccacacgcccccgccgcccacaacgccgga

SEQ ID NO: 38037 - RNA, 75 nt, Homo sapiens
gggggggcgcgccggaaaccggagcgcgcagcagccaggcggcgaagagagcaggccgcccagaaggccagggcc

SEQ ID NO: 38038 - RNA, 76 nt, Homo sapiens
gccgccacaccgccgcgcccagcagccgagggaaggagagaaggagagagacccagcccaccaaaggaagcagcaa

SEQ ID NO: 38039 - RNA, 69 nt, Homo sapiens
caagagaagcgaggcgcggcacacaaccccgggacacacagagggcgcacccccgagccaaaggcagga

SEQ ID NO: 38040 - RNA, 44 nt, Homo sapiens
accagagaagcaagccggccagaggaaggaaggcagaagaggaa

SEQ ID NO: 38041 - RNA, 56 nt, Homo sapiens
aaggaaaagagacgcagagcgagagcgagaacacggcaaaaaccccacaaagcacc

SEQ ID NO: 38042 - RNA, 76 nt, Homo sapiens
acccacagcacaaggaaccaaagacggcgaagacaaacacccacagagggccacacaggaccaggcggacaagacg

SEQ ID NO: 38043 - RNA, 78 nt, Homo sapiens
agggcaccagacccgcggcggcagcagggcgggagcacgagccaaaggagaagggaaaagagcgaacaggcacaggac

SEQ ID NO: 38044 - RNA, 76 nt, Homo sapiens
agaaagagacacaccgacgaaaaacggaaaagccagggcggaaaccggcaagaggaagagaaagaaaaaaaaccca

SEQ ID NO: 38045 - RNA, 82 nt, Homo sapiens
gaaggacccggggaggccggccacgccccgcacgggcagccacacacagcaccgaagaaggagagccaaggaggaaaggaaa

SEQ ID NO: 38046 - RNA, 81 nt, Homo sapiens
ccacgaagaaacaccacaaaccgggcggagaacgggaagggagaaggcacgccgacggaaagccagaggaccagggcgccg

SEQ ID NO: 38047 - RNA, 73 nt, Homo sapiens
aggaccaagaaccaggggggaagaaggagccgggcccaggaaggaccacaccccaaggaaggcggggccacaa

SEQ ID NO: 38048 - RNA, 71 nt, Homo sapiens
ccaccggcgggaggaacaaaagagccggggaaaaaacgggaaggggaaagacaccgaggggaagaacagaa

SEQ ID NO: 38049 - RNA, 80 nt, Homo sapiens
gaggaccacggcgcacaagcaccaagcggcaacggccaaaccaaggagaagcaaagagaggagagagaaacaccccggag

SEQ ID NO: 38050 - RNA, 73 nt, Homo sapiens
cggacacgcgagcccgggggggaggccggggcacccacaagcgcacgaccaccaagagcggacggccaaggag

SEQ ID NO: 38051 - RNA, 58 nt, Homo sapiens
caaagcgcgggaacaaagcagcccaggcagaccccagacgaaggagcaagggcaacac

SEQ ID NO: 38052 - RNA, 76 nt, Homo sapiens
cgagggagagccggacccccagaagaagagaagaggaaacggccaccgcccaaggaagcagagaaaggggcagcag

SEQ ID NO: 38053 - RNA, 74 nt, Homo sapiens
ggacaccggcaagggacaggaagccacaagcagcggagaccgggccaaggcaggaagacaacaccagacagacg

SEQ ID NO: 38054 - RNA, 73 nt, Homo sapiens
aaagagaaggaccagacgcagaaacggagaagcgaacagcagcggcccagcgcaagccaaagcaggaggcaga

SEQ ID NO: 38055 - RNA, 77 nt, Homo sapiens
ggagacaaaccggagaaggagccaagaaagagaaggcccgaaaagaaagcgaacacacaaaacaagaaaaggcacgc

SEQ ID NO: 38056 - RNA, 63 nt, Homo sapiens
gcacgaagaaggccagcgggccaggaagcgcaccaggagccccaccaggcggggaagagccaa

SEQ ID NO: 38057 - RNA, 55 nt, Homo sapiens
cccccaaaaccacaaacgccacgcagaacagccaccaagagaggggccacaggcc

SEQ ID NO: 38058 - RNA, 79 nt, Homo sapiens
ggaaaccaccccaagcacggcaaagcaggggccgaccagagagggaaaggacggaaacagaacccacgcacccagcggg

SEQ ID NO: 38059 - RNA, 75 nt, Homo sapiens
acagacggaagcaaggaacaaaccgaagaacagcgggaaagaaggcaaaacacgggccaggccacacaagcccca

SEQ ID NO: 38060 - RNA, 58 nt, Homo sapiens
ccagccagcccaaccgcccgcgagacgcaaacagcagacggaagaccccacggcaaaa

SEQ ID NO: 38061 - RNA, 82 nt, Homo sapiens
ccacagacaccccacgggagggcaggacgagggcacagaaaaacaaaaagaaaagagagagaaaagagaagcaacagaaaga

SEQ ID NO: 38062 - RNA, 72 nt, Homo sapiens
gaccggcgcgccccgcccggaccgcgcagaaccagggcggcggccagcgccacgcgaagaaaacaggcgaaa

SEQ ID NO: 38063 - RNA, 85 nt, Homo sapiens
cggggcccgcggagcccaggccccccccggacccgccgcagagccagagcccagcaagaccacgacacgagagcgccgccagccg

SEQ ID NO: 38064 - RNA, 34 nt, Homo sapiens
gccacacccccggaagagcgcggggagcacaagg

SEQ ID NO: 38065 - RNA, 76 nt, Homo sapiens
ggagaggagcagaggaagcaaaagcagcgcgaagaacgaggaaagcacagcgacaaccgaacacaaccgagggcga

SEQ ID NO: 38066 - RNA, 77 nt, Homo sapiens
gagacacccacacaccaagacaaggagaggacggggaaggacaacggaccaaacgccgggaggacccaaggagcagc

SEQ ID NO: 38067 - RNA, 75 nt, Homo sapiens
cggccccccggacagacgccgacgcccaggcggaggcagagggaaccggccgcgcagcccgcccccacccaagca

SEQ ID NO: 38068 - RNA, 53 nt, Homo sapiens
cgcagggcgcccccgagcaaaaaggaggccaccaagcccgaaagggggagcag

SEQ ID NO: 38069 - RNA, 79 nt, Homo sapiens
ccgccaccgacacacgcgcggggaggcccagcccgccgcagggccaccccgcggcccaccgccgccgccccgaccccaa

SEQ ID NO: 38070 - RNA, 78 nt, Homo sapiens
cgcacggcccaggaccgcacaagcgggcacagagagacccagcgacgagcaaaaggccaaggaagcagggaaaagcag

SEQ ID NO: 38071 - RNA, 58 nt, Homo sapiens
gcgcggacaagagggccgacgaggaccacggcgcgggcagggacacaaaccaccaaag

SEQ ID NO: 38072 - RNA, 41 nt, Homo sapiens
gaacccgccacgcggccggccacgaggcccagggaacccgg

SEQ ID NO: 38073 - RNA, 70 nt, Homo sapiens
gcagaaaggggccggaacgcccgacacacagccgaacaaaacgaaagacggaaacccggaaagcaagccg

SEQ ID NO: 38074 - RNA, 82 nt, Homo sapiens
caacaaaagcccggagaccaagcagcccagccacccggaaagcaaggacagggaaaagaaacaaagggcacccagaaagaga

SEQ ID NO: 38075 - RNA, 72 nt, Homo sapiens
ccccacaaggaaagaagaaacagccaaacaagaagaagagaagggacgaaccagaacaagccaaaagaaaaa

SEQ ID NO: 38076 - RNA, 67 nt, Homo sapiens
gacaaagaccgaaagaaagcagcaaccaaacaaacaaaccccacggaaaagacagaagggaaacaaa

SEQ ID NO: 38077 - RNA, 77 nt, Homo sapiens
acgcgaggggacaaaggcgcaagcgagaggaaacgggccccaaggcgaccggagggacccccaaaggacacaaggaa

SEQ ID NO: 38078 - RNA, 76 nt, Homo sapiens
cagggcccgggcccgcggcggagccagacggacgcggggggccggcaggcgcccggggccagcccgcccccggcca

SEQ ID NO: 38079 - RNA, 65 nt, Homo sapiens
ggcccagaccgccgggcaagcaccagagagggaccgaaacagcaacaaccgcaacgagcggcacg

SEQ ID NO: 38080 - RNA, 73 nt, Homo sapiens
aaacccacccagcacaccccgcgaaaggaggaggcacagaaaccgccgccaaggaaaagaagaagcaaagcga

SEQ ID NO: 38081 - RNA, 42 nt, Homo sapiens
agggcgcagcccacaggacgacgggggacagaagaggaaaac

SEQ ID NO: 38082 - RNA, 87 nt, Homo sapiens
ccagcaggcaccccagggcccccaggggggccagccccagagcggagacaacagcaggagcaaggcaggaagaggagaggcggacgc

SEQ ID NO: 38083 - RNA, 80 nt, Homo sapiens
cgggccggagggaggagaaagccccgcggcacgcaaagaacgcccacaaggcccagaagaagagaaaaaagggaagaaac

SEQ ID NO: 38084 - RNA, 68 nt, Homo sapiens
caaggcaccggagcggaaaaaccgaacaagagacgacgccccagagagcacagaccagagcgagaaca

SEQ ID NO: 38085 - RNA, 55 nt, Homo sapiens
ggagaaagggaagaggacgagacagaccaaggccgcaaagaagagagacaaggcc

SEQ ID NO: 38086 - RNA, 65 nt, Homo sapiens
cggccccgaaggaggggaagggacggggggcggccacggcaggaccgaaggccaaaagaaaaaac

SEQ ID NO: 38087 - RNA, 68 nt, Homo sapiens
ccgaaggaccgcgaccaaagagagaagcacggcagaagaagaaggcccaacgaaaaagcggaaagaga

SEQ ID NO: 38088 - RNA, 79 nt, Homo sapiens
ccgggaccgacaccgcccggagggcgccccccccccgaggcgcccgcagggccaggacggacgggacccggaggacgac

SEQ ID NO: 38089 - RNA, 61 nt, Homo sapiens
gggaggcgcacacacaccaaaggacaagacacaccagaccgggagaacaccaagaaggaac

SEQ ID NO: 38090 - RNA, 78 nt, Homo sapiens
acacagcacaagggcagcaccagaaaggggcggcacagagagaagaccgaccaggacaggacccgcaggagagaccgc

SEQ ID NO: 38091 - RNA, 54 nt, Homo sapiens
aaaaaccggagaggaagagaagagacaaaagagaacgaacgcagaccgggaaaa

SEQ ID NO: 38092 - RNA, 80 nt, Homo sapiens
cgggcaacggcgggacagcaaaaagacccaccaaggaagcagcggccacgccagcaccaagagaaggagcagccgaagcc

SEQ ID NO: 38093 - RNA, 69 nt, Homo sapiens
gggaaggccggggcgcccggcgccggccgagaaggcagaggcggcacagggaaggacccagaacagagc

SEQ ID NO: 38094 - RNA, 77 nt, Homo sapiens
acaagaggaggacaccacccaaggagcagcagcgcggaagccaaacaggaaaagaaaaagaacaagcagagcgcaag

SEQ ID NO: 38095 - RNA, 90 nt, Homo sapiens
cagcggaagcggacgccccaagcccgggccgcaccacagaaacacccaaggaaccaaagcaggccagcagaaaaccccgcgcacagacca

SEQ ID NO: 38096 - RNA, 81 nt, Homo sapiens
ccacgcaccggacgacgcccggcgccagcacacgcaggccccgagcgcgccgccccggcccgcaggggaaggaggcccagc

SEQ ID NO: 38097 - RNA, 86 nt, Homo sapiens
agacccccggagcagggaaccaggccccacacaggaaggaggaggaccacaaaccccgcccagcagcagggcagccaaagcccccc

SEQ ID NO: 38098 - RNA, 80 nt, Homo sapiens
cacgaggggaagggcaggaggaggaggaggggcccggcggcggggaggaggcaagcgccaggaccgcggggggcgagccg

SEQ ID NO: 38099 - RNA, 68 nt, Homo sapiens
ccggagcagcggggacaggaaggggcagacaagcacgccgcccagacaaccgacccgggaagaccacg

SEQ ID NO: 38100 - RNA, 61 nt, Homo sapiens
ccaaacacagacggacagaaccccacccacaagagcagcacaaaaccagaaggaggggcag

SEQ ID NO: 38101 - RNA, 68 nt, Homo sapiens
cgaaacccacaagcccacaagaaagaagaacgagacagacacagggccaggaaaccgacggcgcacag

SEQ ID NO: 38102 - RNA, 78 nt, Homo sapiens
gaagggccaaggaaaaacgagcagaaagaagccagggcaaagagagccagcaagacggcagccacgaaagacgacaac

SEQ ID NO: 38103 - RNA, 86 nt, Homo sapiens
cggccgccggcccccagaacaagggagcgaacacagagcggcgacaagcagcgggcaggagaggcggcagcacgggcacaacaaga

SEQ ID NO: 38104 - RNA, 82 nt, Homo sapiens
aaagaacccacagggcacacagcaccgggcgaaaaggaggaaaagaagccagaccgaggggacacggaaaacgacagaacga

SEQ ID NO: 38105 - RNA, 75 nt, Homo sapiens
agcacaggcacagaaggccaaaaaggcaaccacagagagagagagggagggggggggaagaggagaaggcgcgac

SEQ ID NO: 38106 - RNA, 84 nt, Homo sapiens
ccgagcccgcggccggagagcggaggagaggcaaccgcgcccggaagaaaacaccggagcccaagacaccaaaacagacgcagg

SEQ ID NO: 38107 - RNA, 80 nt, Homo sapiens
cggaggacacgggggccacaaagccccccggagacgcaaccaagagggaacaggcacgccccacccgccagccgagcccc

SEQ ID NO: 38108 - RNA, 73 nt, Homo sapiens
ggacccggggcagagaggaagccaggaccacgaaaagaacgcccgcgccaagcgggggcagcggggacggcca

SEQ ID NO: 38109 - RNA, 55 nt, Homo sapiens
acgccgagcagcagaaggcaaagaacagaagaccccgacgacgccgacagcgcac

SEQ ID NO: 38110 - RNA, 79 nt, Homo sapiens
aagaaccggagagccggaaacagaaggggagccgccaccaaaagcagacggaaaacccacggggaagaccacaccccga

SEQ ID NO: 38111 - RNA, 77 nt, Homo sapiens
gggccccaagcgcacagggccggcccagggagaacgcaaaaccaccacccccacaaaaaacgcagggagaaaaggac

SEQ ID NO: 38112 - RNA, 79 nt, Homo sapiens
acaaagagagaggaaacccaagcagcgccgccagaaggaagcaacagacgggaccgaaagacaggccggacggagacag

SEQ ID NO: 38113 - RNA, 76 nt, Homo sapiens
gaggaggcggagcggacaaagggcgcaagaagaacggacagaccacgggccggcagggaggagaacgcaagccgca

SEQ ID NO: 38114 - RNA, 88 nt, Homo sapiens
cggggacaaggcgagccggagaccgagcccgaacagcaggacacaaggcacgaggacgaagaggaaaggggccacgaggaagacggga

SEQ ID NO: 38115 - RNA, 78 nt, Homo sapiens
aggcaacgcagcaccgaagaaccagacgaaaaggggaaaggagaaagaagggagaagaaacagagaaccccaaggaca

SEQ ID NO: 38116 - RNA, 70 nt, Homo sapiens
cccccccccccccaagcaaaagggagaccacaacagccaccaaacagaagaaccgcccaacggaaggaga

SEQ ID NO: 38117 - RNA, 78 nt, Homo sapiens
gccccgcggcccgaccaacagacaggggagcacacagacgcagccgcgcgggcaagggaccacggcaccgaagcacca

SEQ ID NO: 38118 - RNA, 78 nt, Homo sapiens
ccgggccagggccagagcaaaggaagcaggagacaccaaaggaaaagacaacacaccaagaaaccaaagaacaacgca

SEQ ID NO: 38119 - RNA, 69 nt, Homo sapiens
ggcggcccggggcgcgcccccccggaggaaacaagaagcgggcccacaaagggagaagccagaaagccg

SEQ ID NO: 38120 - RNA, 81 nt, Homo sapiens
aggacagcgcacacagcaagcacgagagcgccccaaacccaagaaggaagcccagagcccaaagaaaaacaggaaacaaga

SEQ ID NO: 38121 - RNA, 78 nt, Homo sapiens
ggccagcaggcaggccgaaccagggggagccaccccgcgggaaaaagaggaagcggagaccagggaaggaacgagcca

SEQ ID NO: 38122 - RNA, 78 nt, Homo sapiens
gaggaggggagaaagaaaaaggggccaagaaccgcaaggacagcagggaagaacggaaaccagagaaagaaacgcccc

SEQ ID NO: 38123 - RNA, 94 nt, Homo sapiens
cagcgcgcggccggcggcgggacggagcggccggggccggggcgccgccgggcggccgggcgcggcgagcccagaaccaaaggcagacccagaa

SEQ ID NO: 38124 - RNA, 72 nt, Homo sapiens
gcggcggccacggcaccggcggggggcacgaggaaagagggccacgaccggcgcgcgcgaaccgacccgcaa

SEQ ID NO: 38125 - RNA, 53 nt, Homo sapiens
ggccagcagggagacacaggccagggaaagcaacggcgcaagcggcggcggcg

SEQ ID NO: 38126 - RNA, 75 nt, Homo sapiens
ccagccagccagagcaccgaagagacgacaagacaccgcaggacaacacgacagaccggccaaaaagaagaccca

SEQ ID NO: 38127 - RNA, 72 nt, Homo sapiens
gccacaccggcgggccagcaggcaggccgaaccagggggagccaccccgcggacggagccaccgcgcccagg

SEQ ID NO: 38128 - RNA, 71 nt, Homo sapiens
acaccagcaggacagcagacccagagggacaagccgggggagacggagaacaaaaacaagacagggacacg

SEQ ID NO: 38129 - RNA, 58 nt, Homo sapiens
ggggcgcgccaaggacacggcacaccgaccgacggacccaaagacaggaccacgcacc

SEQ ID NO: 38130 - RNA, 68 nt, Homo sapiens
ggcaaagaagagggaccaggggccggggaaaggacaagcggacaacgccagaaaacgaaagagaacca

SEQ ID NO: 38131 - RNA, 72 nt, Homo sapiens
cgggaacggagacaaccaaggccgggccagcgcaccaggcaggcgccacaacaaacgcagcaacagcaacca

SEQ ID NO: 38132 - RNA, 75 nt, Homo sapiens
gggcggacggaacccgggcccacgcggcggccggggcagcgccgcgagccagcaacgggggaaggccacaacacc

SEQ ID NO: 38133 - RNA, 75 nt, Homo sapiens
cggccccagccggaggagaggaccggcgccgaacacgacggcacagggggggcaaaagcaacaaccagcaaggag

SEQ ID NO: 38134 - RNA, 76 nt, Homo sapiens
aaaagagagggggggaccgaccgcaacagaacggacccggaccgaccaccaacagcaggaccgggcagccaagacg

SEQ ID NO: 38135 - RNA, 77 nt, Homo sapiens
ccccggaccgagccgacgccgcggggcagcgggccggcgccggcgcgcccagaaagaagcagacagcgacggcaggc

SEQ ID NO: 38136 - RNA, 70 nt, Homo sapiens
agcaagggaagccagaagaggaggaaaaggccacgggaggaagacccaaaagggagcacggcccaggcag

SEQ ID NO: 38137 - RNA, 66 nt, Homo sapiens
aggagccgcacacaaggggagaagcagaccgcaccaggcgggaccccgaaaaagcccaaacagaca

SEQ ID NO: 38138 - RNA, 54 nt, Homo sapiens
gcggagaagacgacccacggcgcccgcgacgaaaaggaaaggagaagacaaagc

SEQ ID NO: 38139 - RNA, 73 nt, Homo sapiens
gggcagaagacaaaaagaagacggacagggcacacagaaccgaaaaagagcgggcaacacgcccaggacggga

SEQ ID NO: 38140 - RNA, 38 nt, Homo sapiens
ggaaaagaggacgagggaccagaaacagaacgccagac

SEQ ID NO: 38141 - RNA, 59 nt, Homo sapiens
gaaacccgcagaggaaaacaggcaacgcccgcggcaccagaacagaagaggaacgacag

SEQ ID NO: 38142 - RNA, 76 nt, Homo sapiens
cacgagaccgcgagaaggcggcacacaggacaccggcacaaggagccacgccgaccccaccgggccagggcccccg

SEQ ID NO: 38143 - RNA, 75 nt, Homo sapiens
aaaaaagggaaaggaaaacggaagccgcaaagaccacgccccacaaccaggaaaggaaaaggcaccagaagaaag

SEQ ID NO: 38144 - RNA, 80 nt, Homo sapiens
acccgccggagccagccagccgcccgagcaccagcaggccgaggggaagagcggggaccccgaacccagcgaagcaccaa

SEQ ID NO: 38145 - RNA, 60 nt, Homo sapiens
caagcgaaaaagcgggaacgcaggacccaaagcgacagagggcagccaggacaccaaaac

SEQ ID NO: 38146 - RNA, 59 nt, Homo sapiens
ggccaaccagcagaagacagagcgggagccaccagcgccaaagggaagccaggagcccg

SEQ ID NO: 38147 - RNA, 67 nt, Homo sapiens
gaaaccgacgcagacggagcgcacgcaagggcgcgcccggcacacgaaaccacgacccacagaaagg

SEQ ID NO: 38148 - RNA, 52 nt, Homo sapiens
cgcacaagcgggcaccagggccgaccgccgcaggacagagcagccaggccac

SEQ ID NO: 38149 - RNA, 72 nt, Homo sapiens
aggaaagaaaacaacgaagaaccggagcaagaggaaaagaacgcacgggccaccccccaccacggacacggc

SEQ ID NO: 38150 - RNA, 76 nt, Homo sapiens
acaggagagagcaagaccagccaggggaaacccggagggaaccaagaagccggacagggcgggagggccgggcaaa

SEQ ID NO: 38151 - RNA, 73 nt, Homo sapiens
cgcccgaggccgaccccgaaggaaacggggcccacgggaacgcacagggcggagaacggaaaagcaccaggaa

SEQ ID NO: 38152 - RNA, 81 nt, Homo sapiens
ggacaccccggacgaaccacaggaagcgcggggcggcggcgaaaggacgcccagggccggaaggaggcccgaaaaacaacg

SEQ ID NO: 38153 - RNA, 90 nt, Homo sapiens
gcaccggcaccgccgcggcgccgcggacaaagagccggcacgggagggcccagcgcacgccgagcagcagacgaaaaaagcagaccgccg

SEQ ID NO: 38154 - RNA, 79 nt, Homo sapiens
cgcccgccgcagcgccccggaccggagcgagcaagccgcgacaagcagcgagcaacgggggcagcagcggagcaagcag

SEQ ID NO: 38155 - RNA, 84 nt, Homo sapiens
ggagcagagcgcgcccaggcggcgcaggcggccaacgagaggaacggccacgcgccaggcccaggccgagcggcccgcgaaacg

SEQ ID NO: 38156 - RNA, 63 nt, Homo sapiens
caacgggcaagaagaccgcgagagccaacaaaggaacgagcagcaacggccaggaaccaggcc

SEQ ID NO: 38157 - RNA, 79 nt, Homo sapiens
ggggagggcccagcgcaccgacagccgacaaccccggaacgcgggcaaaaggccccaggggaccgggggaggccccaga

SEQ ID NO: 38158 - RNA, 92 nt, Homo sapiens
ggaaggagcggcggcagcgcgaggccggagaaacaggcgccgcgggcccgcgcccggccggacccgggcccgaggacgccccaagggaaggg

SEQ ID NO: 38159 - RNA, 99 nt, Homo sapiens
agggccccaaggccagcccagacacccacaggaggggacagcaaacagagaaggaaagcgaacgcgaaaagaaaagccgagagcagccagaccggcgaa

SEQ ID NO: 38160 - RNA, 78 nt, Homo sapiens
gacaacaggcaggagaaagggagcgcaccccagggcggaccaaaaccccagcaaggggcagccggcggccgaggcgca

SEQ ID NO: 38161 - RNA, 82 nt, Homo sapiens
ccagaggacgcccaacaccacccacccaccacggggcagggcccagccccgaaccagacaagggacccccaaggagccacag

SEQ ID NO: 38162 - RNA, 81 nt, Homo sapiens
gcgaggcacaacaggccgcgccggcggcagagaggaacgggcgggggaggagcgcgagcccggcagagcccccgcgcgggg

SEQ ID NO: 38163 - RNA, 81 nt, Homo sapiens
cgccacacagaccggggggcggccgcgcggccgggggcgcgggcggcggcgccggcaggaaggcaaggagcgagagcgcac

SEQ ID NO: 38164 - RNA, 78 nt, Homo sapiens
aacgggaaaaaacacccaagaacacgacggaacaacaaaggaccagacagcaggaaaagacaagaaaaggcgccaaca

SEQ ID NO: 38165 - RNA, 37 nt, Homo sapiens
agaaacaagcaacgacaggaagaaagagggccacgga

SEQ ID NO: 38166 - RNA, 85 nt, Homo sapiens
cggcagggccggggcgaggcggcgagcggcggaagaaaagaagagccccaggccaagggcgggagcaccccggcgaaagcagaag

SEQ ID NO: 38167 - RNA, 75 nt, Homo sapiens
agaccccccgaaaccggcacgggacccgaccggaggcaccggcaaggacagacgccgcggcccgacaggagccag

SEQ ID NO: 38168 - RNA, 82 nt, Homo sapiens
gcgcggccggggacccacagacacagccggggcgggagccgcccggggcagggccgggagagcggggggaaacccgcccagg

SEQ ID NO: 38169 - RNA, 71 nt, Homo sapiens
cagggagccgaccagaggagcggagaccgacacaacccccgggagcaaaaaccgaaaccgaaaaggccaac

SEQ ID NO: 38170 - RNA, 75 nt, Homo sapiens
caccccccgccgcccgccggcagcccaaccagggaggccgcgcccgcagccgaggaagaagaaggcagcagaaaa

SEQ ID NO: 38171 - RNA, 59 nt, Homo sapiens
gacagccacaggcgggaccagcccacacccaaggagagaagacccaacagaggaagccg

SEQ ID NO: 38172 - RNA, 128 nt, Homo sapiens
cacgccgaggacgagacagagggaggggacgggaacggcgcaccccaccagccggaccagaggagcgagagcagcaagaaccacacccagcagcaagcagcggaagggaaacccagagggggagacga

SEQ ID NO: 38173 - RNA, 57 nt, Homo sapiens
cagccaggagcacggggggggccagggagcccggaaggcggcagacgcagacaaaca

SEQ ID NO: 38174 - RNA, 67 nt, Homo sapiens
aaagaggccaacccacaaacagaagaagccgaggcccagaacgagacgaaggaagggcgagacagag

SEQ ID NO: 38175 - RNA, 71 nt, Homo sapiens
gcaaacagacggcaggagggccgcagacccaggagagaacaccgaccgcagaacgggcggaagcaaaaaaa

SEQ ID NO: 38176 - RNA, 86 nt, Homo sapiens
cggccccgacggggcgggggccccagccccacagaccagcccagcacagagaggggggaaaggaacggaagaccaagaacaggagg

SEQ ID NO: 38177 - RNA, 75 nt, Homo sapiens
cccacccgcaagaacccagggcagaaaggagaaacaacgaacgagcaaggaagggccaaggcagaccccacaccg

SEQ ID NO: 38178 - RNA, 81 nt, Homo sapiens
acaccaacgagacacagccgggcaagcaaggacggggacacaagaccagccagcccagccacagagacaggccgcccagag

SEQ ID NO: 38179 - RNA, 53 nt, Homo sapiens
aagccaggacaacggaaacacgaaaggagcagggccgccccgaggagagcgac

SEQ ID NO: 38180 - RNA, 62 nt, Homo sapiens
acaaaaacaagcaacagaacgggaagaagaagaaggcgaagaagcacaacaccaccaaacaa

SEQ ID NO: 38181 - RNA, 56 nt, Homo sapiens
aggggcggaaggggccagcggagacagcaagacacgcgggcacgggcccggaccag

SEQ ID NO: 38182 - RNA, 73 nt, Homo sapiens
agaaccggaagggggccagacggcaaacagcacaaggacccgggacccgagcaaaggagaaaaaaaaagggga

SEQ ID NO: 38183 - RNA, 73 nt, Homo sapiens
aaaggagagaccagaccaagcaagcaaaggcagacaagaccagccacaaaaagcggacaaagcaagagagaag

SEQ ID NO: 38184 - RNA, 76 nt, Homo sapiens
aggcgggaaggccaccggcaggcgcacaggcccggccaggcacaagggcaccacaaaggggccggaggacgcgggg

SEQ ID NO: 38185 - RNA, 76 nt, Homo sapiens
gaccccaggaagaccaagaccagcaccccaagaacccagagccaggcgagaggagaagacgacaccggggaagggg

SEQ ID NO: 38186 - RNA, 69 nt, Homo sapiens
ggaaagcgcaacacgaaaggcgagggacacccccaaggagccgcgcggccggacaccgagcccaagccc

SEQ ID NO: 38187 - RNA, 69 nt, Homo sapiens
gagaaggcagggcaaaccagaaagacgaaagaaggcaacacaaggacaaggcaaaacagaccacgacgc

SEQ ID NO: 38188 - RNA, 70 nt, Homo sapiens
agaagagaacggaacaagcacagcaggagaagccggaaagaacaagagcacgaaggcaaaccgagaccca

SEQ ID NO: 38189 - RNA, 88 nt, Homo sapiens
ggacccccgaggaccaggcgccccaacaacgggcaccggggccacccgccgcggggcacgcaacaggaagaaccggacccggcgaacc

SEQ ID NO: 38190 - RNA, 77 nt, Homo sapiens
cggacgcccacagaaggaagcacaaaaagggacagcggagagacgcaaagcacaccaggacaacacaaagaagcaga

SEQ ID NO: 38191 - RNA, 109 nt, Homo sapiens
cagaagccgaaaagaaagaaagaacaaggccgcccagagaagcgaaaaggcgaaacgaacgaaggggaccagagcagaaacaggccggaagggaacaggaaagacacga

SEQ ID NO: 38192 - RNA, 72 nt, Homo sapiens
ccgcaaggccaacagagggaaggaacaaaggcacagccagcgggaagaagaacaacagccgaggccaacaca

SEQ ID NO: 38193 - RNA, 66 nt, Homo sapiens
gcaccgcaccaaaagaggggacaggagggaaggaacaccccacgacaagcgcagagagaaagcccg

SEQ ID NO: 38194 - RNA, 87 nt, Homo sapiens
cccgcgccgccgaccccccggcgccgcgccggcggcgcgccagaggaagaaaaaagcccaccgcccagaggccccccggacaccaac

SEQ ID NO: 38195 - RNA, 71 nt, Homo sapiens
ggcagccgaacgggaccaggacgcggaagcaggaagacacacaaacccagaggagggcagcgggggcagag

SEQ ID NO: 38196 - RNA, 76 nt, Homo sapiens
aaagaaacccgaaaccaggaacacaaccagaccccaaaggccacgaaccgcgggcaaggaagagacaaggaaacca

SEQ ID NO: 38197 - RNA, 87 nt, Homo sapiens
gggcggacagcggaccccaggccccccgagcgccagaccagaccaaggcaccagagggaacacaagacccccggcggaaggaagaac

SEQ ID NO: 38198 - RNA, 64 nt, Homo sapiens
acagaaacaccaccaaacgcgccggccccaagaacggcagaagaggagccccgccgaggcagag

SEQ ID NO: 38199 - RNA, 92 nt, Homo sapiens
aggcgggcagaggagccagaagggggaagcccaaggaggaacaagcagcagaaaaaagaggaggaagaagcaaagaagaacgcacaccaaaa

SEQ ID NO: 38200 - RNA, 73 nt, Homo sapiens
aaccagcaccacagaaggacgaagagcgacagagaagaaccaaagccaggaaaacaccccagagccgcaaagg

SEQ ID NO: 38201 - RNA, 87 nt, Homo sapiens
gggaccgggacggaccgggagggcacaagaccccgagggcgcggcgccggggcgcaggagcgcggcgaggagcggacggaagcgcag

SEQ ID NO: 38202 - RNA, 64 nt, Homo sapiens
aagcacagggagcgacgcacccccaaggccaaccaaggggaaggcagcacagagcgacaaaccc

SEQ ID NO: 38203 - RNA, 77 nt, Homo sapiens
ccggaccccccaacaccccacgaaggcggcaccaaggaaagagcagagcagaaaaacgggccgaaaaaaacaaggca

SEQ ID NO: 38204 - RNA, 78 nt, Homo sapiens
aaccgaagaacagcgggaaagaaggcaaaacacgggcccaccagaccaggggaggaggagaaagggagaaggggaggg

SEQ ID NO: 38205 - RNA, 62 nt, Homo sapiens
cgccgccgcgcagcgccgcgcggcaaaagcagaccggaaaacccaccggcaagaccacaccc

SEQ ID NO: 38206 - RNA, 77 nt, Homo sapiens
cccagacacacagaagaagccaacgagaaccgacaagagcacgaaggaagaaaggggaggacgaccaggacgcccag

SEQ ID NO: 38207 - RNA, 57 nt, Homo sapiens
gacagccgccaagaggccacggaggccagccccaacacccgcaggaacgaacaaaca

SEQ ID NO: 38208 - RNA, 73 nt, Homo sapiens
acagccagaacgggcccgggacaccaggcccgggagcgagacgcaacagaaaagccgagacaggagaagagag

SEQ ID NO: 38209 - RNA, 63 nt, Homo sapiens
cgcgcgcggcacgcgccgcgggacccgaggcgagccaagcaggggggaagaaaacagacagaa

SEQ ID NO: 38210 - RNA, 77 nt, Homo sapiens
gggaggaaggaggaggacgagacacagaacgcgcccagcaaagcgaagacggcaccaggacaagcgagggagacacg

SEQ ID NO: 38211 - RNA, 87 nt, Homo sapiens
aagcaagcagcagaagagccaaggaaaaacagcaagaacccaaaaggggcccgagggaccgccaacaagcggcccgcaccgggccag

SEQ ID NO: 38212 - RNA, 68 nt, Homo sapiens
cgcaacagccaacaaccaaaagagagaagaggaaagacccaaaaaagcgaggaagagcgacagcaagg

SEQ ID NO: 38213 - RNA, 78 nt, Homo sapiens
acaaacacgcaaggacccccccggccaagggcaagcaagggccacggcaggcgggcaacgaggaacgaggccccaggg

SEQ ID NO: 38214 - RNA, 60 nt, Homo sapiens
gcgacgcagaagacggggacgcaccacgagaaagggcagcaagacacgaagccgagaaag

SEQ ID NO: 38215 - RNA, 82 nt, Homo sapiens
gcaaggagcggaaggcgcgaggcaacaaaaccacacgggaagaccaacaaaggcacacccaggcggagaaagcccacacaac

SEQ ID NO: 38216 - RNA, 65 nt, Homo sapiens
ccgaagcgccgcgcgcgcgccgcgagcgcaggacaaggcacgaggcgcggcgaccaccacagcag

SEQ ID NO: 38217 - RNA, 71 nt, Homo sapiens
cacacgaagcgagcacagaaagacagcaggcaaaacaggacacgagcaggagaccgaggacgcaaacagca

SEQ ID NO: 38218 - RNA, 75 nt, Homo sapiens
cccacggagccggccagggagcgggaaaccggcgcaggcaggaaccgcaccccagggaggcgacaggccagaaca

SEQ ID NO: 38219 - RNA, 60 nt, Homo sapiens
agaagagccagaaaaccccccagaaagaggccaaagcaagagagcagcagcagagaaacg

SEQ ID NO: 38220 - RNA, 78 nt, Homo sapiens
gagaagagaagaacagcacaggacagacccacacagcgacaggaagaacagaccaaggagaaacaacaggaacagaca

SEQ ID NO: 38221 - RNA, 79 nt, Homo sapiens
gggcggagaggagcaaacagcaagggaccccacaccacaaaccgaggaaagaagggacagcagaaaacgcagagggagc

SEQ ID NO: 38222 - RNA, 84 nt, Homo sapiens
gaaggaggccgagccgggaccaggcccgggggcggcggccacgccaaggacgggaaagaagcgaagccaggagggagaagggaa

SEQ ID NO: 38223 - RNA, 75 nt, Homo sapiens
gagcagagaagagcaaaagaaggggaaagaacaacgagagaccacggaagcagacccggaacgccagcacagacc

SEQ ID NO: 38224 - RNA, 72 nt, Homo sapiens
ggccgacaaccacggagagaggaccggaaaacccccaaggccaggagagccccaacacccacgcccccagcc

SEQ ID NO: 38225 - RNA, 65 nt, Homo sapiens
accacccggagaagcagaagacgaacaggcgcacaccacaacagagagggggaccagagacaccc

SEQ ID NO: 38226 - RNA, 75 nt, Homo sapiens
cgcggccgggcgccagcgcggcgcaggccaagaaacgggccgggggaaccagaaaagaaagaacgccaagccgac

SEQ ID NO: 38227 - RNA, 74 nt, Homo sapiens
gaaaaaagaaaacgcccagagcaacacccccagggagcgggggcggaaacacggaagagggggaggccagggcc

SEQ ID NO: 38228 - RNA, 64 nt, Homo sapiens
gcgcggccgagccccgacggccacccggcgggaagaaggaggccgaccaggccgacaaagcaga

SEQ ID NO: 38229 - RNA, 53 nt, Homo sapiens
agacgaggcccaggagcgagaagcacagaaggagacgaagaggccaaagggac

SEQ ID NO: 38230 - RNA, 69 nt, Homo sapiens
cgcgcaaacgaaaggaccagaacagaggaggagaagccacgggcagaggcagggaggcaggggaacagc

SEQ ID NO: 38231 - RNA, 66 nt, Homo sapiens
ggaagggggaaacccgccgaccacacacaacccaagaagaaccacaaggcagcaccggcccagcga

SEQ ID NO: 38232 - RNA, 112 nt, Homo sapiens
aaaaaggaaaggacgaaaaggggcggaagaaaaacaaacacacgcaaaggagaaaggaaccgacaggccgaacggccacagggacaggaacccacaggggaagagacaccga

SEQ ID NO: 38233 - RNA, 78 nt, Homo sapiens
cgagcccccgcggacccacccccgaacccccaagagacgagagccgaggcgccggaaacaacagccaacaaaaccaag

SEQ ID NO: 38234 - RNA, 70 nt, Homo sapiens
caagcagcgcaggggaacagcaaaacacagaaacagccagaggcccgggggcgaaaaacaccaccagggc

SEQ ID NO: 38235 - RNA, 71 nt, Homo sapiens
acagccacgcagacacagccaggagcggagcggccaaaacaacaggcccaggacgagaaaggaacaagcca

SEQ ID NO: 38236 - RNA, 113 nt, Homo sapiens
agaaccagcaccgggacgcacagagaccggaagaccaagcaggagaaccgaccgcaacagccaaccagaaaaccagaaacaccggcagggagcaaaccccccaacaagcaccg

SEQ ID NO: 38237 - RNA, 80 nt, Homo sapiens
gcggggcgcgccaaggacacggcacaccgaccgacggggagccgccaccaaaagcagacggaaaacccacggggaagacc

SEQ ID NO: 38238 - RNA, 78 nt, Homo sapiens
acggcaggggaagaccccaggggggaaaggaacacagcagagacagccaagcaaaaaaagcacagcagccggaggcag

SEQ ID NO: 38239 - RNA, 48 nt, Homo sapiens
ggcagacaaaagggccaaagaagggagagagaccaggaccaacggcca

SEQ ID NO: 38240 - RNA, 83 nt, Homo sapiens
ggcagccccgcgggggaggcaggggcgggcggcagcgcgcccgggagcgcgcgccgggaacggagaccgaggggagacagcag

SEQ ID NO: 38241 - RNA, 65 nt, Homo sapiens
agaaggaccaagaaccaggacgcaagaccagaagccagaagaagaagaaggccagaggccacaca

SEQ ID NO: 38242 - RNA, 78 nt, Homo sapiens
gaaaaacagacacgcaagagaaacaggcacacaagggaggaggcaaagccaggcagggcagcccccaccaccggaagg

SEQ ID NO: 38243 - RNA, 78 nt, Homo sapiens
gggagaaagcacgggaggagagagcccacccagacaggcgcccaacgagaagaagacccgaggaaagaaaggcaggag

SEQ ID NO: 38244 - RNA, 89 nt, Homo sapiens
gcggcggcggcggcggcggaggaggaagaggcacgcgagggggcgcgaggggaacggaggccagagcgcgacagggccaccgcgcccag

SEQ ID NO: 38245 - RNA, 82 nt, Homo sapiens
cggcggcggggaggagccggagcaaaggacgagcagggggaggaacaaagcgaggaagggaagggaaggcgacaggcagcaa

SEQ ID NO: 38246 - RNA, 72 nt, Homo sapiens
ggaagagaagacccgaaacgaagggagaggaaccagacaaagcagaaagcaccggaccagcccgccgagacc

SEQ ID NO: 38247 - RNA, 88 nt, Homo sapiens
ccccagcagacaggaagcgaggcacaagcagcaagacaccagcccccggacaacccaagggaaaggagcgcgggcaagcgagagagaa

SEQ ID NO: 38248 - RNA, 51 nt, Homo sapiens
ggaaagccgacccgccccaacaccggggaggaaggaaacccgaagagggga

SEQ ID NO: 38249 - RNA, 79 nt, Homo sapiens
gaaaaaggagaacaggaaggccgagaccaggaaaacgccgcccacacaccaaggagaggcgccaggagaagcagaggaa

SEQ ID NO: 38250 - RNA, 82 nt, Homo sapiens
cgcccggcccccgggggcccgggccgcgcaggacgcagaagggcagggagccagagcaaaaccacaggcaaccccacgaccc

SEQ ID NO: 38251 - RNA, 67 nt, Homo sapiens
gggccaaagcgagccaagcgaaagaagcccaaccgcggagaaaaggggacagggaacgcggccccgg

SEQ ID NO: 38252 - RNA, 81 nt, Homo sapiens
gagaggccggcgggaacgaacagccgacggggcgaccgccggcccaggggcgcccgggggcggagaaggccaggcagcagc

SEQ ID NO: 38253 - RNA, 89 nt, Homo sapiens
gagccgcagagcgcgcagaccccggcagaggggaggagacacgaagcgacgcagagccagaagggaggcagggaacacgcggaacacag

SEQ ID NO: 38254 - RNA, 51 nt, Homo sapiens
cgccaccgcccacacggccacagcggggaaggggcaagccgggagaggaag

SEQ ID NO: 38255 - RNA, 77 nt, Homo sapiens
ggcgcagggggccaaacgcccaccaagcggcaggcccgccagcaagaggaaaagcagagacacccggcacccaggac

SEQ ID NO: 38256 - RNA, 51 nt, Homo sapiens
gggacgggggaacccggggccagagaacagagaaaaggaggccggacaaaa

SEQ ID NO: 38257 - RNA, 61 nt, Homo sapiens
aggcccggaccagggagcgcagggcagaaccaaaggcaagaaggaaaaaacacgacacacc

SEQ ID NO: 38258 - RNA, 77 nt, Homo sapiens
caggcacagaagcacgaaaaagcgggaaggccggaaaggaccagaccgcccaggaaacggaagaaacaagcccagga

SEQ ID NO: 38259 - RNA, 78 nt, Homo sapiens
ggaggagccacaaacgaccaagaaagaaacagaagacagaacaggggacaacaaggaaggagagaagcaagcacgccc

SEQ ID NO: 38260 - RNA, 72 nt, Homo sapiens
aaacacgaccaacaagcacaaccaagcagaagagagaggagggcacaaaggaggggcaaccgaccggcagaa

SEQ ID NO: 38261 - RNA, 74 nt, Homo sapiens
ccagcagacgcaaccagcgggagcaaggaaacgaaaagcaccccaaagaacgacagggggcccaaggccgaggg

SEQ ID NO: 38262 - RNA, 51 nt, Homo sapiens
ccagccccaggaggggacaaaaccccgaaaaaggcagaacagaaagccaaa

SEQ ID NO: 38263 - RNA, 71 nt, Homo sapiens
acaccaacacccggaggcgcaagcacccaaagccagcggcggggaagaggggagcagaagaggccccagcc

SEQ ID NO: 38264 - RNA, 69 nt, Homo sapiens
cccggaaagccacgccaaagcaccacgaggccgcaggcaggggaggcaccagcccaggggacacccagc

SEQ ID NO: 38265 - RNA, 57 nt, Homo sapiens
acggccacacggcggccgcagggcgccggagccccccagaggcagcgagaagaaaaa

SEQ ID NO: 38266 - RNA, 75 nt, Homo sapiens
ggcaggaggagcgggagcccacacacaggaccgccccggacaggaggagaaggccgccaagcggggccggggagc

SEQ ID NO: 38267 - RNA, 80 nt, Homo sapiens
gccagggcccaggagacccacaagggcaaagcaccggacaagagcagagaaagagacgaggaggggaccccaaagcagcc

SEQ ID NO: 38268 - RNA, 84 nt, Homo sapiens
gggcccggagcccggcccagggaagccggccgaggaacaggaggccacgcaagcccccaaaggcgggaacaggggagccaccgc

SEQ ID NO: 38269 - RNA, 76 nt, Homo sapiens
agagaacaagggagcgaggccgacccagccgccaggcagacagggccgaacagcaggaccggaaggaacaacacca

SEQ ID NO: 38270 - RNA, 107 nt, Homo sapiens
ggcggcgcggcagcaagggcggcggggcggcggcggcagcgcaggacagccagcagaacccgaaaggaaggggaagcaggccaacccagaacacaccccagcgggga

SEQ ID NO: 38271 - RNA, 81 nt, Homo sapiens
caaacgaagagccccagcaggagagcgagaagaggcgacaccagggcccaaagaacaaccgaaaggaagaaggaaacacgc

SEQ ID NO: 38272 - RNA, 73 nt, Homo sapiens
aaacaacccaaccggcaccagacaagagacagaagaggcacccacagggagcccagaccgagaaccgggggaa

SEQ ID NO: 38273 - RNA, 70 nt, Homo sapiens
cgccggccgacggccggcgggcgggggccccgcgccgcggccgagcagcgggagaacacaggaaggaaag

SEQ ID NO: 38274 - RNA, 44 nt, Homo sapiens
gggcgccgaggaggacgcgccagcagcgcagacccaggggagcc

SEQ ID NO: 38275 - RNA, 87 nt, Homo sapiens
accaacggaaaacaacacagggaaaaccggaccaccccagaggaacgagcacccagaggagaggccagagggcgggccagcggagca

SEQ ID NO: 38276 - RNA, 69 nt, Homo sapiens
cgcacccacgcccccaccccccgagagccgcccaggaccgacagcagaggagcgcaagaacggagaaca

SEQ ID NO: 38277 - RNA, 113 nt, Homo sapiens
caagcagaagcacgaggcacgggggccgccacaacccagacccaggcagccgacacggacaaacgagcagagcacggcagacgaggcccacgagcggacccgccccagaccac

SEQ ID NO: 38278 - RNA, 56 nt, Homo sapiens
agggaggaaaagggcagggacagcgcaggcagcaggcgaggaaaaccaccacacag

SEQ ID NO: 38279 - RNA, 74 nt, Homo sapiens
cgggagccgaaaacggaaggaagagagaaggccacgcccgaccccaagcaacaacggggcagggacaggcgcga

SEQ ID NO: 38280 - RNA, 72 nt, Homo sapiens
aacacgcacaagacggacgaaagccagagaaaaagcggagaaaaggcacgaaccgaagaccgccagcacaac

SEQ ID NO: 38281 - RNA, 81 nt, Homo sapiens
agaagacgaaaaaaacccagggagagagaaggcccaaaagccaggggccgacggacaagaggaagaccaggccccgaccac

SEQ ID NO: 38282 - RNA, 81 nt, Homo sapiens
gaaccgcaacgagagcccaacaggcagacgccccgagggcccgcgccgagcccacagccgagccggccgagagagacggcg

SEQ ID NO: 38283 - RNA, 72 nt, Homo sapiens
ccggacaaccgacaaaaggcacaccaagccagaaggcgaggcgcacggcagaaagccaacaggcccacccag

SEQ ID NO: 38284 - RNA, 62 nt, Homo sapiens
cagaagaccagaagcgacaggaaaaggaaaccagaagagggacgaagaaaacagcgcagcgc

SEQ ID NO: 38285 - RNA, 86 nt, Homo sapiens
cgcgaccccaccggagaaggccgacccggcagaggccccagcaccggagcaggaggcgggcccaccgcacagacagcaccgaccca

SEQ ID NO: 38286 - RNA, 75 nt, Homo sapiens
caccggacgcgcaaaaaaaagcgggcgaggaagaggacaacaccggagaggggaagaaaccgagaggggcaggcg

SEQ ID NO: 38287 - RNA, 81 nt, Homo sapiens
ccgcggcccgcgagagggaaaaggacgccgcggccccaggcgcgcggagagcagggcgcagcaacggcacacagaggggag

SEQ ID NO: 38288 - RNA, 69 nt, Homo sapiens
aacgagcccaggccacagacccacacgccggcggccaaggcccgccgcgccaccagaagacgcgacgcc

SEQ ID NO: 38289 - RNA, 76 nt, Homo sapiens
cacaaccccccccggcccacgacccaaggacacaacccggccgcagagcccaggagaagacagaggagccagacca

SEQ ID NO: 38290 - RNA, 79 nt, Homo sapiens
gggccagagcccagaaaagagacaggaagagcacccaagcgcaagcaaaagaaggcccccccagcagagccaccccaaa

SEQ ID NO: 38291 - RNA, 77 nt, Homo sapiens
cgccgcccgccgacagccaggcccgggagaaaccggagggagcagaagaccgcagagagaaagaaaaaccgacaaga

SEQ ID NO: 38292 - RNA, 49 nt, Homo sapiens
agagaagggcaaaaacagggagcggcaggggaggcgaagaagagcccgg

SEQ ID NO: 38293 - RNA, 74 nt, Homo sapiens
aaaagaagaagaaaccgacgacggccggcaaagcaaaaacaagaaaacagaaaccacccgggggaacaaccgac

SEQ ID NO: 38294 - RNA, 84 nt, Homo sapiens
cgcggcacagagagggccgggagcgcgcagccagcacgggccgaggagcccagcacgcgcagggcgaggggccccgccgggcca

SEQ ID NO: 38295 - RNA, 72 nt, Homo sapiens
gggcgcccaggaggcaccacaggcggagggcgaacgaacgcccgccagaagccccgaggggccgggcaagcc

SEQ ID NO: 38296 - RNA, 84 nt, Homo sapiens
cccgggccgcgcccggacggggcccgacacggccacccacgccggaggccggggagccgacgccggacccaaagacaggaccac

SEQ ID NO: 38297 - RNA, 66 nt, Homo sapiens
cgggccacaaaccggcccaacaaccacaaggggaacggccagcaccaagggcaccaggagaaaggg

SEQ ID NO: 38298 - RNA, 63 nt, Homo sapiens
cggggaccagcagcgcgccgccgcccagggccaaccagcaagagaaacgaagaggaggcaaag

SEQ ID NO: 38299 - RNA, 73 nt, Homo sapiens
gagacggccgacccgccagaggaggccccccagccacggaaacaagcacccaagccagggagcggcaaaagca

SEQ ID NO: 38300 - RNA, 80 nt, Homo sapiens
agcggccagcgcaggaggacgaccggggggcaggaggcacccggggcagcacccgagggacccgaggagcccaccaagcc

SEQ ID NO: 38301 - RNA, 66 nt, Homo sapiens
gcagaaaaagcacacaccacgcaacggccagcaaaggaccagcaggaacaaagaaagaccgaagga

SEQ ID NO: 38302 - RNA, 76 nt, Homo sapiens
acacagggacaccccagggcgaaaagccaggagcaaaagacgagcgcgacgccaccagcaacgaacccggcaagaa

SEQ ID NO: 38303 - RNA, 86 nt, Homo sapiens
gagccagacgcgccagcggagcgaaggccaagaacagccgacagaaggcacacccagaagccacaggagaagcaagaggcggcccc

SEQ ID NO: 38304 - RNA, 55 nt, Homo sapiens
gagccccacagagcccccagagcccaagcggccaagagcccagcaaggcaaccca

SEQ ID NO: 38305 - RNA, 107 nt, Homo sapiens
agcggcagccgcgaggaggcgcgggagggcgagaacgaccccgagacggcaaacgaacacgcgcagcgcagaggcccggcagccccaaggaacgcggccccgacaga

SEQ ID NO: 38306 - RNA, 76 nt, Homo sapiens
ccgccaggcgccacacggcaagcccgggagagcagccagacagaggaccgccaagaagaagagagaaggaagaaag

SEQ ID NO: 38307 - RNA, 38 nt, Homo sapiens
ccaagggacggccaccccagcagcacggccccgccgag

SEQ ID NO: 38308 - RNA, 74 nt, Homo sapiens
gagaagacaagggcacgccgcccagccgccgccgccgccgcgccgcagcgccaccggccgaggaaggcggggga

SEQ ID NO: 38309 - RNA, 83 nt, Homo sapiens
gcagcaggaagggacggcgcgcggaaccggaaaacaggccggcccgagccagaccagcaggaggagaagcgcgacacaacgga

SEQ ID NO: 38310 - RNA, 67 nt, Homo sapiens
agcggcagcagaaagagcagggacgaagggaacccgccgggcggcccggcacccagccccccggcac

SEQ ID NO: 38311 - RNA, 51 nt, Homo sapiens
cggacaccgcccaccaaccagagagccaaggccggaaaggaaaaacaccag

SEQ ID NO: 38312 - RNA, 81 nt, Homo sapiens
gaacccagcgcccccccagaacacccagccacggaaccaggagcgcagaccccgagccccccaggcgccgagggccccacc

SEQ ID NO: 38313 - RNA, 81 nt, Homo sapiens
gagacgcccggcgcggcggccagcggaaggcccgcgccaagccaaggaaagccaggccagaagaaggaaggccggggaggg

SEQ ID NO: 38314 - RNA, 65 nt, Homo sapiens
ccagggaagcccacaggcaacgaccacaaaaacagcacgcgaggcacgaaaggcgcacccgcgac

SEQ ID NO: 38315 - RNA, 74 nt, Homo sapiens
aagcgcgcaacacaacaaaacaaaccccgacacagggacaaaaaggcaagaacgagagaagccgaaaaaacgga

SEQ ID NO: 38316 - RNA, 74 nt, Homo sapiens
gcgcggcgggccggcggcgcgggccggcccagggagaacgcaaaaccaccacccccacaaaaaacgcagggaga

SEQ ID NO: 38317 - RNA, 83 nt, Homo sapiens
ggagcgggcagccgggcccccggcccccccggacccccgggaccgggcacggcggagcaggacacaccccagcagagagccaa

SEQ ID NO: 38318 - RNA, 65 nt, Homo sapiens
ccaccggacggcggaaaggcccaggcgccccgcagaacagcaacggcagacacacaaagaacgac

SEQ ID NO: 38319 - RNA, 67 nt, Homo sapiens
cagacggagaaccgcaggaaagcccggagcggcgccgcccgccaccaacgggggggggacaccgggc

SEQ ID NO: 38320 - RNA, 42 nt, Homo sapiens
agccgcccggaccacaccaaggcagaggaacgaggacgccga

SEQ ID NO: 38321 - RNA, 65 nt, Homo sapiens
caagcaggaccacccaccagccaccagacaacggcaagcggagaagagcaaggccgaaccgagag

SEQ ID NO: 38322 - RNA, 75 nt, Homo sapiens
ggagaacaggcgggccagcacggcccgagggcccacccagacaggagcccagcagggggaggccgacaggaaaag

SEQ ID NO: 38323 - RNA, 82 nt, Homo sapiens
aagccaagaagcaaaaaagggacgcaagaagaaccaccagcgggcccccccccacacgagacaagcaccacaagccaccacc

SEQ ID NO: 38324 - RNA, 116 nt, Homo sapiens
ggggcgcccgacgcccagcacaggaaccggcaggagaaggggcccggcagccgcccgaagaaaacacgcaagcccaggaaccagacagacaaacagaagaaagggcccaagagcga

SEQ ID NO: 38325 - RNA, 73 nt, Homo sapiens
agacgccgaaagaacagcagcacagaacccaaagaagcaaggacagagacaagaacggcagagaagaacaaga

SEQ ID NO: 38326 - RNA, 34 nt, Homo sapiens
ccgcggggcgcggcacgggcgcaccacgagcgca

SEQ ID NO: 38327 - RNA, 81 nt, Homo sapiens
ggggagccgcgggcacgggcacccagcaggcggaagaccggccggagcagcgaggagacacaagagacagggcgccggggc

SEQ ID NO: 38328 - RNA, 77 nt, Homo sapiens
ccacagcccgaagagcggacggagagccgcgccgcccgagcggggcaggcagaggcaccaaggcggcagaaacaagc

SEQ ID NO: 38329 - RNA, 75 nt, Homo sapiens
agggaccccagagcacaggcggaggacagccccaagcgagaacaaacaacaaaacccagccaccacagagaacgc

SEQ ID NO: 38330 - RNA, 59 nt, Homo sapiens
gcgcgcacagccgggcgcgggagcgcgggcgcggagacacagcggccagagcagcgacc

SEQ ID NO: 38331 - RNA, 62 nt, Homo sapiens
acaccggaagcgggaaagccagacgggaggacagaccgcacccaggcgcgggaacaaggcag

SEQ ID NO: 38332 - RNA, 75 nt, Homo sapiens
gcggacgagcagacgagccgcgggcggcccggcggggggagccgccagaggccggcgcggcacccacaaagcacg

SEQ ID NO: 38333 - RNA, 83 nt, Homo sapiens
agccagcacaccccgcgagcaagacaggccggacacaaccacaaacgagccacgccaaagggcccggccgggacaccgaaaca

SEQ ID NO: 38334 - RNA, 70 nt, Homo sapiens
ggaggagcggagaaccggagcggccaacggcaggaggaggaggcagcgcccaggaagacgcggcaaacag

SEQ ID NO: 38335 - RNA, 111 nt, Homo sapiens
gcagacccacgcagggccgagacgccgcgggcacagcgagaccacagacccagaacgcagcgagcaagaacaagccaggaggcggagaaaacggcacaggcacaaaacgcc

SEQ ID NO: 38336 - RNA, 66 nt, Homo sapiens
ccgggcacggccggggacgaggggagcacacccccacagacacaggaacgccacaagaaacaacag

SEQ ID NO: 38337 - RNA, 79 nt, Homo sapiens
gaacagcacaccaggagagaagcgacagccgcaggaggaggaagccaagaacgggagcgaagccacgcagcggcaccaa

SEQ ID NO: 38338 - RNA, 70 nt, Homo sapiens
cgaaaccggggaccccgcagcacaaccggaggaaaggccaggaaccagcgcggcccgagccccaggagag

SEQ ID NO: 38339 - RNA, 33 nt, Homo sapiens
aaacaaggcccacacgagggaaggggaacagga

SEQ ID NO: 38340 - RNA, 72 nt, Homo sapiens
agaaggggaggggacagacggggccacccccacacgcccccagccaaacaggaaaagcgacacaccaggcgc

SEQ ID NO: 38341 - RNA, 71 nt, Homo sapiens
gaggagccccaagaacagaggcaggagccgagagccagacgcacagcgcagggcgcgcgggccccgcccga

SEQ ID NO: 38342 - RNA, 74 nt, Homo sapiens
ggcgcccggaacaggaggagaagagagaaccccacgacgggaaggcaaagcagaaggagaccccagagaaaggc

SEQ ID NO: 38343 - RNA, 69 nt, Homo sapiens
cgccccccagccggaagggcagagaggagccaagaagaaccggagccaagaacccaaggagggagcagg

SEQ ID NO: 38344 - RNA, 75 nt, Homo sapiens
acgagccggagcacgacaggcccggacggagagggcaaggagcggaacaccgggcccgcgccacgcgcacacagg

SEQ ID NO: 38345 - RNA, 54 nt, Homo sapiens
ccccaagagcgggagcaggccccagaaaggagaaccaacccgcaagacacccag

SEQ ID NO: 38346 - RNA, 87 nt, Homo sapiens
ccgacaaggagggaagcggccccagcaccccagcgcgcagggccgccaggggcgccgggcggagaacggaaaagcaccaggaagcag

SEQ ID NO: 38347 - RNA, 85 nt, Homo sapiens
cagaaacagacagacagagagaaccaggcgcaacagagcccgaaacggagagggcagcgaacacagggcacaagagagcacaacc

SEQ ID NO: 38348 - RNA, 73 nt, Homo sapiens
cggccgcgacagcgaacagcgcggccgcagagccggcgccgcaaaccgagcccaagccggaagcacgggaagg

SEQ ID NO: 38349 - RNA, 52 nt, Homo sapiens
ccagaagaaaaggaacgagcaaaaggagggaggacagagaaccccagacgca

SEQ ID NO: 38350 - RNA, 87 nt, Homo sapiens
ccgggcccgcgggggcaaccgggcgcagacgagggaggcgccacaccaccaccggggaaccagcgcagcgaaccagcacgccggaca

SEQ ID NO: 38351 - RNA, 53 nt, Homo sapiens
cggagaagaacaaaccaagaggagcaccgggcccaggcgggcgaacccgagcc

SEQ ID NO: 38352 - RNA, 74 nt, Homo sapiens
cagcgcggagcaggagaaacagaagggcccaaagcacaagcgaccgccgaaggagcccccgaacggcaacgccc

SEQ ID NO: 38353 - RNA, 74 nt, Homo sapiens
aaacgaaagaaaaacagcccagggacaggaaccaaccgaaagagggagggcaacaaagagaaaccaaggagagc

SEQ ID NO: 38354 - RNA, 33 nt, Homo sapiens
ccggccccggggcccccggaaaagcgcaaagac

SEQ ID NO: 38355 - RNA, 73 nt, Homo sapiens
accaggagccccgcggcggggaggcacgagagaagacagccagcaaagggggagagcaaaacggcggaggccg

SEQ ID NO: 38356 - RNA, 67 nt, Homo sapiens
aggggcgccaacgcccggccgcggcccagggacgcggcgcggcagccagccccccaccgaagaagaa

SEQ ID NO: 38357 - RNA, 58 nt, Homo sapiens
aaccaaaaaaaacaccgaaaacgccccacacaagggacaggcagccaagaggaaacag

SEQ ID NO: 38358 - RNA, 53 nt, Homo sapiens
cggggcggcacggggcgggggcaagggcgcccgcggaagcggagcaaaccccg

SEQ ID NO: 38359 - RNA, 76 nt, Homo sapiens
aaagaccaacaacagcgcaggacacgagacgggcaaggcgggaccgacgcaggaagcccgagcaccgacgagacca

SEQ ID NO: 38360 - RNA, 74 nt, Homo sapiens
gcgacagcgcagaggggcaggagccgggagccaccgcgaaggggacgaagggaacccgccgggcggcccggcac

SEQ ID NO: 38361 - RNA, 54 nt, Homo sapiens
ccagcccaggaaaggcgccgaagaggaaaagacaggcagggaggcagcggcaag

SEQ ID NO: 38362 - RNA, 81 nt, Homo sapiens
gaccggagcgggagacagcgggacaggagcagcggccgggagcccagggaggcaggcaccgaagagcaagggaaacggaac

SEQ ID NO: 38363 - RNA, 77 nt, Homo sapiens
ccgaccgggagaggacaagaccacgagccaggagggagcaacaacaaggagcaagcacagcgcgagccagcccgaaa

SEQ ID NO: 38364 - RNA, 73 nt, Homo sapiens
aaggagcggaaggcggagcgaagagccggaccaagcgccaggcacacagagaaaaaaagggaacaaaacacag

SEQ ID NO: 38365 - RNA, 70 nt, Homo sapiens
acggcccacaagaccagcccgcaagagaaggaagccagccaacggggaaaccgaaagagcgaaaagaagg

SEQ ID NO: 38366 - RNA, 76 nt, Homo sapiens
gcaaccgaaagccagcagcggaacccaaggacgcagcaaagccaaaaagcggggaaacaacaaaggcgggcaggcg

SEQ ID NO: 38367 - RNA, 65 nt, Homo sapiens
aaaccgaacaagaaaacgggccacacggaaggacaggagccgggaggacaacaaaaagaaacagg

SEQ ID NO: 38368 - RNA, 81 nt, Homo sapiens
gggcgaagaaaaggccccaccaccaccaggacaagaccgacgccccggcgcagcaggaaggggagcggaccgcagggcgga

SEQ ID NO: 38369 - RNA, 85 nt, Homo sapiens
gccaggagcacccgcccccacccccaaccgcgcccccacggaaaagcgaaggcaaacaagggggaaggagaggaaaaacgggaag

SEQ ID NO: 38370 - RNA, 80 nt, Homo sapiens
ccggagcaaaaaagaccccagcgggaacaccaggcacagacccaaacaggcccacaccaagaaacacccaagccgcaggg

SEQ ID NO: 38371 - RNA, 41 nt, Homo sapiens
acgaagccacccccaccccaccaaggacaccacaccgccca

SEQ ID NO: 38372 - RNA, 78 nt, Homo sapiens
cagcccccacacaacgcagggagagagggaggcaagagaaaagccagccgagacagcgcggagggacgagagcaggac

SEQ ID NO: 38373 - RNA, 69 nt, Homo sapiens
gcacccacggagaggagcgccgccaaagagcgcaccgccgagcagccagcccaaggagccaccaacaga

SEQ ID NO: 38374 - RNA, 66 nt, Homo sapiens
cccgagaccaggaaccagcagagaaacggacgagacagaacaccacccggggaaccgaaccagaga

SEQ ID NO: 38375 - RNA, 75 nt, Homo sapiens
gcggaggacaaggagaaggaggggaggcaagcaggggggcaaaggaaagaaggcagaaagggaggccaggagcgc

SEQ ID NO: 38376 - RNA, 83 nt, Homo sapiens
gcgccgcccggcgccggcccgcccccgcagcagcgccaggcaaaaacaaccaggcagagagacaagcaggagcgaagcaggac

SEQ ID NO: 38377 - RNA, 72 nt, Homo sapiens
gcggagaaccggagcggccaacggcaggagggggaaaggccaagaacgccaggcaaccagaaaaaaccggag

SEQ ID NO: 38378 - RNA, 72 nt, Homo sapiens
acaagcggaaaggacacagggcggagaacggaaaagcaccaggaagcagagaggaccgcagaagggaaggag

SEQ ID NO: 38379 - RNA, 72 nt, Homo sapiens
agaagccgaccccaagaaagagagagacagaagccacagggaggaaaagacgagcaggggagaaacaagaac

SEQ ID NO: 38380 - RNA, 69 nt, Homo sapiens
ggcacaccccgggcccgcggcggcgggcacccggaggcgcccgagcggaaagaaggggagccagagagc

SEQ ID NO: 38381 - RNA, 82 nt, Homo sapiens
aaggagaacgggcgacggagccgggaaaggacaaggggagaccacacccaaaacgaaacgggaggcagccagaaggaagacc

SEQ ID NO: 38382 - RNA, 95 nt, Homo sapiens
cccccacaaggaggaaaccagcccaaggccaccacccccagggaaagccacaaggaccaccccaacagggaggccaccccccccccaaggaaggc

SEQ ID NO: 38383 - RNA, 70 nt, Homo sapiens
gcacccgcggagacggacgcccgacccgccccaggcaaggaacagagccagagccgcagggggaggaccg

SEQ ID NO: 38384 - RNA, 90 nt, Homo sapiens
ggagcagaggcaaagagcgacgcacagggaccagggacacaacgcaacagggaacggaagagccaggcagagcgaagaaggcccagcacc

SEQ ID NO: 38385 - RNA, 72 nt, Homo sapiens
gccagaccggcgggaaccggcccgcccacaccacagggcaaaggcaaaccaaacgcaagaccagggcggaga

SEQ ID NO: 38386 - RNA, 81 nt, Homo sapiens
ccgggcgcggcgggcgcgcccgccagcgcccggagaacgggacccccgccaagagaccggagaccagccaccccagagaaa

SEQ ID NO: 38387 - RNA, 84 nt, Homo sapiens
cagaggaggagccagaaagaagggcggggcccacagggagcagaacggcggccaaagcgccagacaagggccgagccccggaga

SEQ ID NO: 38388 - RNA, 80 nt, Homo sapiens
gcagcagaggggcgagcaggagcgaccgcgccaaacagaaagaagcccggcgaggccggagggccacccccggaagcaaa

SEQ ID NO: 38389 - RNA, 79 nt, Homo sapiens
caagaggccggccaagaaggcaacaccgcgagcgcgcggcaccccgggcgaggagcggagcggagcgacacgcgcgcgc

SEQ ID NO: 38390 - RNA, 67 nt, Homo sapiens
cgccccgcggcccccaacccaccccccacaccacagggcaaaggagggcccaaaaaaggcccggaca

SEQ ID NO: 38391 - RNA, 87 nt, Homo sapiens
aggccgggccggccgcccagacgcgcccgcgggcccggccacggcggagccaagcagggccaggccgagggcccgcccggccccagg

SEQ ID NO: 38392 - RNA, 75 nt, Homo sapiens
acagggagacgggccccgcgaagaacgaacaagaagaaggaaccagcaaagcgccacgaagcacaagcaagagga

SEQ ID NO: 38393 - RNA, 87 nt, Homo sapiens
aagaggaaagggacgccggggccgggccaggagcagagggaaagggagcagcaccggccacacccacagcacgaccggaacccagcg

SEQ ID NO: 38394 - RNA, 58 nt, Homo sapiens
agacgacccccgggcacaaccagccggaagagagggagagcacgccgaaagaaggaga

SEQ ID NO: 38395 - RNA, 52 nt, Homo sapiens
ccaagcagccacaccgggccgcccgccccgcgcaagaccagccaaggaagca

SEQ ID NO: 38396 - RNA, 77 nt, Homo sapiens
aaagcaaagaccaccaaggaccaaacagaaaagagcacagccccgccaaaacagaagaggcaaagcccagccacagc

SEQ ID NO: 38397 - RNA, 69 nt, Homo sapiens
caccccaacgggccaaagaaagcccgggaacgagagcagaaccccacacaacccaagccaaggagaagg

SEQ ID NO: 38398 - RNA, 36 nt, Homo sapiens
gggggagccaccccgcggaagggcacggcagaacga

SEQ ID NO: 38399 - RNA, 72 nt, Homo sapiens
ggaagaccagaaacaccaaggcccaaagacagccccacgcagcccaaacccggagaacagccagccgggagc

SEQ ID NO: 38400 - RNA, 73 nt, Homo sapiens
accagacaagcaaacggagccgaagaccaaagagaaagaggcggcacagggagaacacagggccccaccgcgc

SEQ ID NO: 38401 - RNA, 49 nt, Homo sapiens
caggaaggggcagacaagcacgccgcccagacaaccaccccggccgccc

SEQ ID NO: 38402 - RNA, 80 nt, Homo sapiens
aaagagagcgccagggcagcaggccggcgccacccccagacgccgcaggcccaaggcgacccgccaccgcgggagcacca

SEQ ID NO: 38403 - RNA, 53 nt, Homo sapiens
gaacaggcaccaagccggcggggcggggcaggaaaggagggcgaaacacaagc

SEQ ID NO: 38404 - RNA, 64 nt, Homo sapiens
gacaaaacaaccaacgaagacaccgagcgaaagagaaagagcaacacagcacccggcggcaaac

SEQ ID NO: 38405 - RNA, 80 nt, Homo sapiens
caaggaggggaggcgagaacacgaggaggggcaggcccgcaacgcaaaggagggcagccacaccaccaccacaggccaag

SEQ ID NO: 38406 - RNA, 76 nt, Homo sapiens
ccagagcggagacagacgggggaaggcccacgggggaacgcgcagcacacggcaagcccaaacggaccaacccgga

SEQ ID NO: 38407 - RNA, 77 nt, Homo sapiens
cccccaggacaaggaaaggaagacggcgcgccaggaagaaagggaccgaaggaaacaaaagaaagggcagaagaaaa

SEQ ID NO: 38408 - RNA, 71 nt, Homo sapiens
aacgcgccacaagccagacccggaccgacaggaaagaaggagcccacaaagaaaagaacaccgccagcagc

SEQ ID NO: 38409 - RNA, 67 nt, Homo sapiens
cgaagaagaggcccaacccccaccccgcccaaggaggcccagcgagccagcaaagcggagaccaaca

SEQ ID NO: 38410 - RNA, 72 nt, Homo sapiens
gacgggaagcagaggccacccaggaggacccgagcgagggaaagcggggacgggaaaagcacccacccggac

SEQ ID NO: 38411 - RNA, 35 nt, Homo sapiens
cggagcgccaggacgggcgaggaaccaaagccccg

SEQ ID NO: 38412 - RNA, 78 nt, Homo sapiens
aaaagggcggaaaccgcacaggagacaaaaacggggcacacagcaaaaaagcggacacagcccagcacaagaccgcag

SEQ ID NO: 38413 - RNA, 90 nt, Homo sapiens
caaacaccagcacggaaccgccaccagggcagcgagcgcaaacccaggccgagggaggacccagcccccggagaagccaaggaagaccaa

SEQ ID NO: 38414 - RNA, 55 nt, Homo sapiens
aacggcccccgggacccgcacccagcaggcccgaggacaacccccccggcacgcg

SEQ ID NO: 38415 - RNA, 78 nt, Homo sapiens
gaccgagaccggaccgagagcggaccgagagcgcgaaacgcacgagaagagaagagggaccaccccagaacgcaaagg

SEQ ID NO: 38416 - RNA, 78 nt, Homo sapiens
gccgccgccgccgccgccgcgccgagcggaggaggaggaggaggcgaggaggagagacgcacagagcacaggaaggag

SEQ ID NO: 38417 - RNA, 52 nt, Homo sapiens
caacgcgccacgaaggccaggccagggaggcccaagaggcacgagagccacg

SEQ ID NO: 38418 - RNA, 81 nt, Homo sapiens
ggggaaaggagagcggcggggcggcggcaccaaggcccccaagccccccggcgacgacgcccgaggaagccacagggagga

SEQ ID NO: 38419 - RNA, 80 nt, Homo sapiens
acaaccccacgccaaagaaaccagcccgaccagaagaaagagggccacggacagaggcgcagcagaggaaccgcagaaga

SEQ ID NO: 38420 - RNA, 66 nt, Homo sapiens
cgggcgcgcggggagcagccgcgcccagccaggaacaccggcagcacacgaacagggaaagcacag

SEQ ID NO: 38421 - RNA, 71 nt, Homo sapiens
gggaaaacggcccaaccgcacacagcgacaggaccgaccgggggcggacagaaacaagcacacaggcccag

SEQ ID NO: 38422 - RNA, 72 nt, Homo sapiens
caaacagagacgggcgccgcaccaggagcgaagagcgccgacaaggagaagcccacccgccccaggagcaaa

SEQ ID NO: 38423 - RNA, 76 nt, Homo sapiens
gccaccgcaggcgaggacggcggaccccgcggcgggaggagccgccccgagaggcccacgcggaccggcagcgcca

SEQ ID NO: 38424 - RNA, 118 nt, Homo sapiens
aggagagcccggaccacccagcaacaggccgacaaaagcacagagaaggccagcccccaggaagagacccccgacgacagagaagagccgcagggacagagcggacacagcaaccgga

SEQ ID NO: 38425 - RNA, 71 nt, Homo sapiens
ccaagcacggaccaaaggcgaagagagaacacgcacggaaggaaggagaccacgagaaagaaaaaacagaa

SEQ ID NO: 38426 - RNA, 62 nt, Homo sapiens
aagcggagaggagcaaaaacagggcagcaggaggggggaagcaggaggcacggaggggaccc

SEQ ID NO: 38427 - RNA, 69 nt, Homo sapiens
cacagacgaaaagagaggacgaaaccaaccacggagaaacggaaggaccgcacaagaccaagcaccaca

SEQ ID NO: 38428 - RNA, 77 nt, Homo sapiens
gaccggccccggagcacaagccccccaagagaacccagggggagccacgccggagcgggcaccggcgcggacccacc

SEQ ID NO: 38429 - RNA, 73 nt, Homo sapiens
gaaagaggcaacaggccccagaggagggaaaggggcccgaaccgcgaccaacaaaaaaaagagaagaaaggaa

SEQ ID NO: 38430 - RNA, 66 nt, Homo sapiens
caccaggaacccaacgagcaaacagaaccagcaaaaacaccgggaaaggcccaaaccggcgaaaac

SEQ ID NO: 38431 - RNA, 79 nt, Homo sapiens
gggagcgccgggacgcggagcccggagcggggcgacgaggcgagcgggggccgggcagaagacccgaggaccgggaacg

SEQ ID NO: 38432 - RNA, 63 nt, Homo sapiens
gggaacaggcccgggggaagagccgcgacacgcggagacccacaggaccgcgaacaaggaggc

SEQ ID NO: 38433 - RNA, 82 nt, Homo sapiens
gggagagagaaaaaccggacgagcgagcaaggccagacaaagggaagggacaggagaaagcagaaagccgcaaggacgagag

SEQ ID NO: 38434 - RNA, 86 nt, Homo sapiens
agggcaagacgagaccgcccgacccccgcaccagcggacagcgagccgagaaagacagagcaccagccccaggaaggccaggagga

SEQ ID NO: 38435 - RNA, 40 nt, Homo sapiens
gggggggaaggaggccaggagcaggaacagacgccccacc

SEQ ID NO: 38436 - RNA, 61 nt, Homo sapiens
accgaagggcaagacaagggaaagcagccagcgagggagagagccggagcagccccgaaaa

SEQ ID NO: 38437 - RNA, 70 nt, Homo sapiens
gcgggcagagcgagccggagaagagggggcccggggggaggaggggcaggcccggcgaccagggcgcaga

SEQ ID NO: 38438 - RNA, 77 nt, Homo sapiens
ccgggacccaggaccagccgccgccagaggagagcaccggccacggaaaagcaaagaacagccagcaaagacaagag

SEQ ID NO: 38439 - RNA, 67 nt, Homo sapiens
gcacaacagagaaccgcggacacgaaagcaagaccacaaaagaggaagacgaagcaaagcgagagga

SEQ ID NO: 38440 - RNA, 80 nt, Homo sapiens
ggagacagccaagaagcaggccgcgcggcggggggcgcgccagcacggggaccggagaagagagcaggcagccaggccac

SEQ ID NO: 38441 - RNA, 75 nt, Homo sapiens
gggaagacagaaccagggccgggggccagagcaggccggggagccccggacgagaagagaagaaggagaagcccc

SEQ ID NO: 38442 - RNA, 72 nt, Homo sapiens
gaaaaccacggacaagaaagcgccaaaaacaacaccaaaaagccgcaggggacaagcccccacgaggaaaac

SEQ ID NO: 38443 - RNA, 71 nt, Homo sapiens
ggggaccgaccgcaacagaacggacccggggaacggcacagggaggggacagaccaaccggcagccaaccg

SEQ ID NO: 38444 - RNA, 76 nt, Homo sapiens
ggaacccagccccgcccgggagaggaggccagcagaaaacagagcagcgaacacggaaggccgaagaaggaaagag

SEQ ID NO: 38445 - RNA, 71 nt, Homo sapiens
gcgaaccgaaaaaagagaacgagaagagaaaggggcaaagcaaggccacaggaacggggggggccaacgca

SEQ ID NO: 38446 - RNA, 78 nt, Homo sapiens
gagcgacccccggagcaccggggccaccaggagggaggagcagcgcagccacgggccaggacccacagagccgcaaga

SEQ ID NO: 38447 - RNA, 64 nt, Homo sapiens
accccacacaggagaccaggcaccagcaccacggagcacaagacggcagagaggcgagacacgg

SEQ ID NO: 38448 - RNA, 82 nt, Homo sapiens
cccagaagagcagcgcaccaccgcagcggcgccgcgggcacggcgaggggggcggccgcccaccgacgcagaaccccagaca

SEQ ID NO: 38449 - RNA, 85 nt, Homo sapiens
gcagcgaccccacaggcagcgcccgggcacggggacaagggccagagccggaagaagaggaaagcaaagaagccaagaagcgaag

SEQ ID NO: 38450 - RNA, 77 nt, Homo sapiens
gaagcacccaggaggaagcgacaaaaaccaaaccggagaagcgaagaggaggcacccgggaagcggaaaagcagcca

SEQ ID NO: 38451 - RNA, 75 nt, Homo sapiens
gcccgggccgccggcaggcggccgcagcaacccgccggaaaggaagcacgcgcgcggacaagaccagaaagaaaa

SEQ ID NO: 38452 - RNA, 77 nt, Homo sapiens
gagcgcgaaacgcacgagaagcaggaagaagagagccaggcgaacgccgaggaacagggaccggcaagaaaggaggg

SEQ ID NO: 38453 - RNA, 63 nt, Homo sapiens
ggcaacccgggccccaaggccccgggagaccagacacccggagcgaccgaacggagggaaggc

SEQ ID NO: 38454 - RNA, 46 nt, Homo sapiens
acccgaggagcagaggaaccaccaagaacaaacccgcccaaacgcg

SEQ ID NO: 38455 - RNA, 75 nt, Homo sapiens
cgaaaccaaaagaaggaccgagaggaggagagagcgaggcacacaagcaaggaagacaaaggaccagggaagaac

SEQ ID NO: 38456 - RNA, 54 nt, Homo sapiens
acaggaggcccgggaaccgaaaaaagcagggaagaaggaaaagcaacggcgcaa

SEQ ID NO: 38457 - RNA, 84 nt, Homo sapiens
gaagagaaagccagaccacggacggaagacaaaagaggaccaagacacccaggagaaagacagcggggaaaagaaaaaggaggg

SEQ ID NO: 38458 - RNA, 54 nt, Homo sapiens
gaggagagagggagagccaaagaaggccggagcgcgaagacgcagggaaagcgg

SEQ ID NO: 38459 - RNA, 39 nt, Homo sapiens
cccgccccggccaaagggcagggacacaacgccacgacg

SEQ ID NO: 38460 - RNA, 66 nt, Homo sapiens
gggacaggaaggggcagacaagcacgccgcccagacaaccggagagaaagaacaaagacccgacag

SEQ ID NO: 38461 - RNA, 37 nt, Homo sapiens
gccgaggcccaccgccaccgccagacggaaggcacga

SEQ ID NO: 38462 - RNA, 74 nt, Homo sapiens
gacaaccaccaacaacgaggcacccaaaagggagcgaggagcgaccgagggccacccggcagagagggcagaag

SEQ ID NO: 38463 - RNA, 89 nt, Homo sapiens
ccggggagacagcacgccaggagggagaggagaccaacacccacccagggcgcaccacgccacgggaaggcaggcaagagcggggagac

SEQ ID NO: 38464 - RNA, 85 nt, Homo sapiens
cccggcgccgccggcccgcgggaccgacagccgggcagagggggggccccagcccggccgaacgggcgcacgacacaaacacaac

SEQ ID NO: 38465 - RNA, 79 nt, Homo sapiens
ggccggcaacggagacccaagaggacaagaagggcagagaagccagaacggagaaacaacgaagaccaacacgaaggcg

SEQ ID NO: 38466 - RNA, 76 nt, Homo sapiens
acagaaccagcgccacaaggccagagcagccaggggaaaagaggacccgccaagaaggagaagcggcgaggaagga

SEQ ID NO: 38467 - RNA, 79 nt, Homo sapiens
aaagaagcgggacgaggaacgcgcgagggagaaccagccgccggaacagggacgaagccacgacagcagagaggagcac

SEQ ID NO: 38468 - RNA, 88 nt, Homo sapiens
ccgcccgagccagccgagacgaagcgcggccaggggaacaccacgacagcagcagcagaggacccaggagaacccccggacgagcaga

SEQ ID NO: 38469 - RNA, 90 nt, Homo sapiens
acaaaacgaacaagcaacgaaggacagagacagaagagaggggagaagaagcccgggaagggcaaagggacagcccacgaaccagagaac

SEQ ID NO: 38470 - RNA, 72 nt, Homo sapiens
gaagacccgggagagagaaaaaccggacgagcgagcaaggggaaacacccagcagcaacccaggcgcacccc

SEQ ID NO: 38471 - RNA, 36 nt, Homo sapiens
ggcgagaccgagacaagaggcaagcaagcagacaac

SEQ ID NO: 38472 - RNA, 89 nt, Homo sapiens
gaaacgggccgcgaaccgcagacagcggccaagaagacacaaaggacggaggcacgaccagggaaccgggcagcagccgcagccgcccc

SEQ ID NO: 38473 - RNA, 77 nt, Homo sapiens
ccccacacggagcccagcagcccagccagcggacccgacggcgagagcgcggggaccacgagccaggacccagcgcc

SEQ ID NO: 38474 - RNA, 52 nt, Homo sapiens
gagagagagcggaacgggagaaagcacgggaggagagaacgaggggagagcg

SEQ ID NO: 38475 - RNA, 86 nt, Homo sapiens
cgggggccacacgcaggccccgcgccagggacgcggcagagcgcaagccgacacgaggcgggccacagccacgagcagagagagcg

SEQ ID NO: 38476 - RNA, 90 nt, Homo sapiens
ccgcgccgagcaggccgaagccgacaagaagcaagcgaggaccgcgcaagcagcggaagagagcgggcacgcaaaagaaaccaagggcac

SEQ ID NO: 38477 - RNA, 60 nt, Homo sapiens
caacgccccgcaaggcccccagcacacagcgcggccaaacagacgcccgccgcccgcagc

SEQ ID NO: 38478 - RNA, 69 nt, Homo sapiens
agaggggagagggaccacacagaaacgccgggccagaacaggcgaaaaaaggggggagaacaagcaaac

SEQ ID NO: 38479 - RNA, 73 nt, Homo sapiens
aaagaggcaaagcaagcgagaagcgcgggcccagcccacagcagggagcgagaacccgagcagcgccagagca

SEQ ID NO: 38480 - RNA, 74 nt, Homo sapiens
gagccccccagcggaaggggggagcagcgaacagcaaggagggccgcaaggacaaggcggagggcagggcagac

SEQ ID NO: 38481 - RNA, 63 nt, Homo sapiens
caagagaaaggagccccccaagaagccgaggccgccagcgccaagaaaaaaacaaggccaaag

SEQ ID NO: 38482 - RNA, 78 nt, Homo sapiens
cgacacaaaggaaggccaggaggcggcggagaaaccaccacaaacacgaggccagcaacgaccaacaagacagacccg

SEQ ID NO: 38483 - RNA, 73 nt, Homo sapiens
gccacggacgccgcggcaagaacccaggacgggggccacagcaacggggggggagcgaacacagagcggcgac

SEQ ID NO: 38484 - RNA, 73 nt, Homo sapiens
gccgagccaccggcccggcaggcggcaaaacgcagaaagaacacaaccgccaaaaaaaaaacaaggagacgag

SEQ ID NO: 38485 - RNA, 62 nt, Homo sapiens
ggcgcaagcaccccagccaaagagccgaggcaggggcggagagagaagaaaggagaggcagg

SEQ ID NO: 38486 - RNA, 75 nt, Homo sapiens
gaagcgggaccgggagcaggcaggcagggagcagccacacagccgcccaaagaccaacagggcagcagacccccc

SEQ ID NO: 38487 - RNA, 92 nt, Homo sapiens
gccgaggcagaagacggggcccgggaccacaggccccggcccagaagaaggagggggcagagcacggcaggcagaaggggccaacccggggg

SEQ ID NO: 38488 - RNA, 76 nt, Homo sapiens
aaaagggagcgggcgagccggcggaggcacccaccacgggccaggcgggccagaggcaagccgcgggagccacgcc

SEQ ID NO: 38489 - RNA, 79 nt, Homo sapiens
gcagacaaggccaaaaagagcggagccagagaagagcaaccggaggggggggcagaagaaggcagccaggagaaccaga

SEQ ID NO: 38490 - RNA, 72 nt, Homo sapiens
cgggaagggccacccaccgcgaggacagaacgccaggagccagaaccccgaggaaaggggaaaagccgcaac

SEQ ID NO: 38491 - RNA, 79 nt, Homo sapiens
gccggccggcccgcggcgcggacgccggcgcgggagagaaagacaacaaacaccccggcacagggcagccaaccacaca

SEQ ID NO: 38492 - RNA, 110 nt, Homo sapiens
caccccccaaggacaggccccgcaccgggccagcaccaccaacgccaccaggaccccgaccgaggagcggggagcgaccgagcgaggcgaggagagaggagacaccccga

SEQ ID NO: 38493 - RNA, 81 nt, Homo sapiens
ggcgggccggaggcgacagggggagcgggccggagagaagagaggggcgcgaggagaaggaaacaggcccggaggccccac

SEQ ID NO: 38494 - RNA, 73 nt, Homo sapiens
cacacgcaggccccgcgccaggaggaggcagggaagaggccgagagagagagaccgaagagagcccgagcgag

SEQ ID NO: 38495 - RNA, 78 nt, Homo sapiens
cgcggagaccccaccgccggcgcgggaaacgggcgaagcgacgagccgcgaggaggcgacagcgaccgaagaacagag

SEQ ID NO: 38496 - RNA, 69 nt, Homo sapiens
gaggacggaaaaaccagccgcacgccaaggaaacaggcccaaaaacccagaacagaagacaaagagagg

SEQ ID NO: 38497 - RNA, 73 nt, Homo sapiens
gcggcagacgggaccacgaggcaacgccccagagcacgaccgcacaggcaaaggaaggcgaacacaaagagaa

SEQ ID NO: 38498 - RNA, 37 nt, Homo sapiens
acaccaaaccaccagaacaggcaccgggaaaacgcag

SEQ ID NO: 38499 - RNA, 71 nt, Homo sapiens
ggaggaagccacacaaagaacaaagcagggagaaaaccgagaacagggggggcaaaaccaagcacggacgg

SEQ ID NO: 38500 - RNA, 59 nt, Homo sapiens
cgcgccggagccccgggccaggccgagaagcagcaaaggcaaacaaagcggccagaaag

SEQ ID NO: 38501 - RNA, 73 nt, Homo sapiens
aaggcaagaaaccagaaagagaacgggacaacaaaagagccacccaagggacacagaacaggggaacccaggc

SEQ ID NO: 38502 - RNA, 51 nt, Homo sapiens
acccaacacagaccgaacaacgaaggccagacagaaggaaagaaaagaaaa

SEQ ID NO: 38503 - RNA, 81 nt, Homo sapiens
agaaaagcaaaggcagggcgaggaaaagaagcccacggccagagacagaaagaagaacgaccaaagggaagaaagagagga

SEQ ID NO: 38504 - RNA, 66 nt, Homo sapiens
agaaaggaaggaaaccaagcacaccagacggccggcaacaagcgaggggggaggccaggcgcccag

SEQ ID NO: 38505 - RNA, 80 nt, Homo sapiens
aagagagcaaggcaaaggagaacccgcaagccagaaagaaacagaaagaagggagaagggagagcggggacaaagaagag

SEQ ID NO: 38506 - RNA, 71 nt, Homo sapiens
cagccccaggccccagcgcgagagacacaggaacgggggcgaggaagagacaggcgggggagaagaagcag

SEQ ID NO: 38507 - RNA, 78 nt, Homo sapiens
gggccgaagaacaagacgcgggggcgcggcaacgagggcggggaagcgagcggacaggagcgaaggaaaaaacagaag

SEQ ID NO: 38508 - RNA, 88 nt, Homo sapiens
ggaaccgcagcgcaggacaggcagaaccccggcgcggcccgaagcggaggggcgccaaccaaacaaccaaagcgcaaacagcaaggag

SEQ ID NO: 38509 - RNA, 73 nt, Homo sapiens
ccaaaagcgacagcaccaagacgccacaaaggaaccaaccacagaaagcccaagcccgggccagggggcaagc

SEQ ID NO: 38510 - RNA, 56 nt, Homo sapiens
gagcccacccagccaacacagaaagaggcacgagcaaggggaagagagaggaagca

SEQ ID NO: 38511 - RNA, 64 nt, Homo sapiens
acccccaacgaggaaggaaggagcagggcaaccggagagcagcaccagcagaagagggcccgac

SEQ ID NO: 38512 - RNA, 74 nt, Homo sapiens
acccacagaggagaccaaaaaaaacaacagcagagcaaggaaagccagacaccaccacccaagaagaccaaggc

SEQ ID NO: 38513 - RNA, 66 nt, Homo sapiens
acacggccgcaggaggaccaaacccaaagcaggcaagaggcagagaaaggaggagcccgccgcgcc

SEQ ID NO: 38514 - RNA, 80 nt, Homo sapiens
agcagccgcggcagaccaagaagccagagagggcggggagacaaggaggccgagagaccgcagggcccgagcaggaaaga

SEQ ID NO: 38515 - RNA, 70 nt, Homo sapiens
cccaggagaggcagccagaggccgaccaccagggccagggacacacaggaagacgaacacggaacgggcg

SEQ ID NO: 38516 - RNA, 85 nt, Homo sapiens
gcaggacacaagcgccgcaagggaagcccccaaagccagccaggacaggaaccacagccaaaaggcaaaagaagacaaaagcccc

SEQ ID NO: 38517 - RNA, 89 nt, Homo sapiens
aaccaagccgagaagagaccacggaaaggcagagaagcaaccacggccccgcccccccagcagagcaccacaggagaaaacacaagggc

SEQ ID NO: 38518 - RNA, 37 nt, Homo sapiens
gcaacgcagcggagaagagaaaagagaggaacagcac

SEQ ID NO: 38519 - RNA, 72 nt, Homo sapiens
aggagccaaaggacggcccgccaggggcggaggaggccaagggcagggagaagggacaacacagaacacaga

SEQ ID NO: 38520 - RNA, 42 nt, Homo sapiens
gcaaacgcacaaaaccaaagcggacggccaaggaggaggagc

SEQ ID NO: 38521 - RNA, 81 nt, Homo sapiens
cgaacaaacagcaagaaagaccacaagaccagcaagaaagcgcaaggggaacgcacaacacagcaaaggaaccagggacca

SEQ ID NO: 38522 - RNA, 83 nt, Homo sapiens
ggacaggaaggggggaggaggagaggaaggagaccgaagacaagccggcccacgacaacaaccagccgcaccggagggcgacg

SEQ ID NO: 38523 - RNA, 83 nt, Homo sapiens
agacagcaagaagaagaggaagaaaggaaaagagggaagagggaaggacagggcagaccgccagcagcacagcaagccacaga

SEQ ID NO: 38524 - RNA, 78 nt, Homo sapiens
gggggacaggaaaacgacgcaaagacgaacaaaccgaagcaggacagaaaagacccacggaaaagaaacagaaagcca

SEQ ID NO: 38525 - RNA, 71 nt, Homo sapiens
aagaggagaccccaggcaccacagcccgaggcccggagcgaccagaacaacacggaggaaaccaccgagcc

SEQ ID NO: 38526 - RNA, 73 nt, Homo sapiens
agaccgaaagcaaaggcgcagaggaaaggcaaaagcaacaaccagcaaggagaggcaaccagaccgaggccgg

SEQ ID NO: 38527 - RNA, 119 nt, Homo sapiens
gccagccccccgccgcgcggagcccacgaaggggacagcgcagccggcccagagccgggcccggggaccgaggcccggaaaaccgccagccccagaaaaggccaacaagggccgccccg

SEQ ID NO: 38528 - RNA, 118 nt, Homo sapiens
ggccccccgggccgcgagggacaacacacgcgcggacgcgccacggcgcaaagccgaaaaacagcagcagaggaaagaaaagaccagagcaagggacccgaacaagcaaggaaagaaa

SEQ ID NO: 38529 - RNA, 82 nt, Homo sapiens
gcggcgcggaggagcgaggcagcgacaggacgggaacgggaggcagcacggcaggagacgaggagaggacagcaggacaccc

SEQ ID NO: 38530 - RNA, 93 nt, Homo sapiens
ggccagcggaagaccccagacacagcaacaggacacaggagacaaacggcgggcagaaggaacgagggagcacggagggaaaagaagccgccg

SEQ ID NO: 38531 - RNA, 61 nt, Homo sapiens
acggagaaaccgaccaggggggcccgcgggaccagcccggccggggcccacacaggggccg

SEQ ID NO: 38532 - RNA, 74 nt, Homo sapiens
gccgacagacaaccaggccagccaccagcagcgacaagaggaaaaccaagaaaacccagcagaggcagcaagag

SEQ ID NO: 38533 - RNA, 61 nt, Homo sapiens
acgaccggggggcaggaggcacccggggcagaagcgcgccaggacaccgccagaagccgac

SEQ ID NO: 38534 - RNA, 76 nt, Homo sapiens
gaacgcagccccagagcggcggggaaacgggaggcaacaccaaaagccaagccacccaggaaggaaaaggcgcccg

SEQ ID NO: 38535 - RNA, 74 nt, Homo sapiens
ccaaagacagaagaaaagcccaccccaaaccggcaaggcggcggccagaccgaacccagaaacagagggaggaa

SEQ ID NO: 38536 - RNA, 81 nt, Homo sapiens
ggagcaaaaaaagagcccgcaagaagaacagagacagcagccaaacccccagcccccagaaagaccagagaccggcgacgg

SEQ ID NO: 38537 - RNA, 76 nt, Homo sapiens
ggaaaggaaaaaagggccagaccaagacacccaggagaaagacagcggggaaaagaaaaaggagggggcaaaaggg

SEQ ID NO: 38538 - RNA, 76 nt, Homo sapiens
cgcagaagcaagcgacaacggaaaagcaccacaaccaggacaacgagaaggcaggcgagaacgaaaccaagaggca

SEQ ID NO: 38539 - RNA, 70 nt, Homo sapiens
gagacaaagaaaaacggaaaggaaacacaacaccaagcccacaaggaaggaggggacagagcagaaacag

SEQ ID NO: 38540 - RNA, 38 nt, Homo sapiens
cagccggggaccgccccagcaacagcgcacaacacaga

SEQ ID NO: 38541 - RNA, 56 nt, Homo sapiens
aaggaagggcgggaccaacagggagccagccccacaccacacaccccccccggcgg

SEQ ID NO: 38542 - RNA, 73 nt, Homo sapiens
aggagcgccacgcgcggaaggcagcgcccagcagcgcagaggaggagagaaagaaagccagcgcaacgagaga

SEQ ID NO: 38543 - RNA, 88 nt, Homo sapiens
gaaagcaggaggacgacgaggaggaaggcgaaggcgggccagcagaggggagcagagaaccccgggggccggcaaacgccggaagaac

SEQ ID NO: 38544 - RNA, 44 nt, Homo sapiens
caaggaaggacgaaggacccaggaacgcgaagagacccccaggc

SEQ ID NO: 38545 - RNA, 60 nt, Homo sapiens
gaggaccaccggggcggcccggcggagcagaacccaagccagacacgaaacccaaggggc

SEQ ID NO: 38546 - RNA, 77 nt, Homo sapiens
cgaaacagacggagcggaaaccggaggcaggaacccgcgccagggacccgccagcgcgccccgcccccagcacggag

SEQ ID NO: 38547 - RNA, 76 nt, Homo sapiens
aaggaaaaagacgcacaaggggagcccaaaagcacgaagcgccagaggacaccgcggcccgaggacgccaccgcac

SEQ ID NO: 38548 - RNA, 89 nt, Homo sapiens
gaggggccacccagggccaggagaacaggaacagaacgagcaggggcaggcccaagcaacgcggaccagcagcggaagcccccgagagc

SEQ ID NO: 38549 - RNA, 73 nt, Homo sapiens
aaaaccagcaacaccccaacaggacagccccccgaagagaagcgggccgaaggagaggccgcccacgccaaag

SEQ ID NO: 38550 - RNA, 75 nt, Homo sapiens
aagaagaaacaccagacagccgaagagaacacaaggaacgaaaggaagggaagaagcagaaccaagacaaaagaa

SEQ ID NO: 38551 - RNA, 71 nt, Homo sapiens
acagagcagacagaacagacaaggggacacggcagacgccagacacacagccccagcaaccaccaaacagg

SEQ ID NO: 38552 - RNA, 76 nt, Homo sapiens
ggcgggccaaggccgcgccgggcgggacgggggggcggcccggccccgcagaggaagcaccaaccgcccccagggg

SEQ ID NO: 38553 - RNA, 79 nt, Homo sapiens
cgacgggagcgcgagagccggaacggaaggaggacaccacagaacaacccgaagagagacggagccgggcacggcaaga

SEQ ID NO: 38554 - RNA, 76 nt, Homo sapiens
gcgcgcgcccgccacggcgccgagccgcggccgaacagccgacccaaaccagaagacggccaggaaggggggccga

SEQ ID NO: 38555 - RNA, 60 nt, Homo sapiens
cgacaagcaagcagcgcgccggccccaacacggaccgaccaggagggccggaggacccaa

SEQ ID NO: 38556 - RNA, 69 nt, Homo sapiens
ccaggccacacagaacggcgacgggaccacaggcaacaggaaaccgcaagaagcaagcgaacagaagcg

SEQ ID NO: 38557 - RNA, 59 nt, Homo sapiens
ccaggcccaaccaggacgggcagccagcagcgggggaccgagggggcaaccgggcgccc

SEQ ID NO: 38558 - RNA, 74 nt, Homo sapiens
aagccaaccaccagaagcgaagggggaaggcgcccggcaacagaaagggaacgccaacggccgcgccacgccgg

SEQ ID NO: 38559 - RNA, 75 nt, Homo sapiens
acgggggagggacgccgcagcagagagaggacaacccacggaggaaggagcacgggaagcggaggaaaagagagg

SEQ ID NO: 38560 - RNA, 72 nt, Homo sapiens
accgggccacaccagccccccacggacccaaaccagaagaaaaccgaaccgagcaccaaaaagcccgggcac

SEQ ID NO: 38561 - RNA, 72 nt, Homo sapiens
ggcaacaccgcgagcgcgcggcaccccgggcgaggagcgggaggggacggcacggcgagcgcacccacgcgc

SEQ ID NO: 38562 - RNA, 75 nt, Homo sapiens
aagaaccccccaacccgcaaggcaagggaaacggcccccgccgaacccccccaccaccggaaggcccgggcagag

SEQ ID NO: 38563 - RNA, 65 nt, Homo sapiens
aggcccccccccggccacacccaaccaggacgggagggcggccagggaagccaaggggaccggcg

SEQ ID NO: 38564 - RNA, 60 nt, Homo sapiens
cagagcccagggcaggacaccgacaggaacagggaccacggggaaccaaaggcaagaacc

SEQ ID NO: 38565 - RNA, 53 nt, Homo sapiens
gagacgaagaccacggcacggggaagcgggagaggccacccgcccacgagcgg

SEQ ID NO: 38566 - RNA, 57 nt, Homo sapiens
aagggaggagacccgaccccagaaggccccgggggcgccgagggcacaagggcaacg

SEQ ID NO: 38567 - RNA, 107 nt, Homo sapiens
cggcggcggcgcaaaaaggcgaaagccgagggaagggggacgagccaagaagggaaagaaaccgacggccccaggagagagccagcaggcagcaggacgaaggagaa

SEQ ID NO: 38568 - RNA, 70 nt, Homo sapiens
ggcaaggcgagaaacccccgccaacacaccacgggaccgggcaagggaagaaaagaaccacggaaaaacg

SEQ ID NO: 38569 - RNA, 78 nt, Homo sapiens
acaggccaaacggaaagacgaaggggccccagagccaaggaggaaggggccgggacacccccggcaccgaggaaaaca

SEQ ID NO: 38570 - RNA, 77 nt, Homo sapiens
gggaacgagaaaaacgcggcgagcccacagcaccagacagcggcgcccacaaaccccacagagcgccgggcccaggc

SEQ ID NO: 38571 - RNA, 78 nt, Homo sapiens
ccggaaagccggacgcaagaggcagacggaccgagaggaaaagagcgacagcaggacgggaccgaaggaggaaccagg

SEQ ID NO: 38572 - RNA, 55 nt, Homo sapiens
agagccgggcccgccgccggccaacaaggcgcagggcgaaccagccaaaacgcgc

SEQ ID NO: 38573 - RNA, 69 nt, Homo sapiens
gaaggaccaagaaccaggaaaacgcaaaaccagaagcgcgccgacacggcccgggcagccaggaggcgg

SEQ ID NO: 38574 - RNA, 49 nt, Homo sapiens
ggaaaccagaagggagaaggcgaagagcaagagggggggaccgagacgg

SEQ ID NO: 38575 - RNA, 76 nt, Homo sapiens
gcgagggaggaggcggggcagagccggccccaagccgaagcaggaaccccgggcaggcgcggggaagcgaagccag

SEQ ID NO: 38576 - RNA, 70 nt, Homo sapiens
gaaggcagcaagaaagagcaggcaccaaccagaaggccgaggaggggacacagacgaagcgaaacagcga

SEQ ID NO: 38577 - RNA, 77 nt, Homo sapiens
agacccgaaagagaggccagcaccaccaggacgcccgccgcaaaccaacaaaggcagggagggaaccgccggggcca

SEQ ID NO: 38578 - RNA, 84 nt, Homo sapiens
aggagccacgccgcgacaagggcagaaaggaaaaccaacggcccggaggaccacagcccaggggccccaggcgaaacccagccg

SEQ ID NO: 38579 - RNA, 54 nt, Homo sapiens
ccgagaccaagaaccagaggaacgaaaagacccagaggagaaaagaacagccca

SEQ ID NO: 38580 - RNA, 78 nt, Homo sapiens
cgaggaggaaccacacgccaccaacacaaagcccagccagcagaggcaacaaaaagcccgcccagaagccaagcacgg

SEQ ID NO: 38581 - RNA, 81 nt, Homo sapiens
ccgaaaaggcagaacaaaacgcagcaaccaaaggcaccggccgagaggcaaggaaggcaaaaacagcaaaagaaaagaaaa

SEQ ID NO: 38582 - RNA, 37 nt, Homo sapiens
ggggaacgccacggacggggaccgacccgcgcacagc

SEQ ID NO: 38583 - RNA, 87 nt, Homo sapiens
cgggcgcggcaccaaggcacaggacccaggaagcgcccccggcagacgaggccgaccggggagcacacaggaggacccagacaagcc

SEQ ID NO: 38584 - RNA, 70 nt, Homo sapiens
ccgcaccgggcgccccgcagcgagccacgggagggcaggggcagacaggcaggagggacagagcgggcca

SEQ ID NO: 38585 - RNA, 71 nt, Homo sapiens
cagccgccacggaggcaaagcagccggggggaccacgaagaaggcggcagaaagggaagagccaaaacgcc

SEQ ID NO: 38586 - RNA, 57 nt, Homo sapiens
ggaaaagggcacagaccagaaggagagagcacgaccaccgccgagagacccacagag

SEQ ID NO: 38587 - RNA, 38 nt, Homo sapiens
cccaaaggaagagcccaaaggaaaggaggcacccggcc

SEQ ID NO: 38588 - RNA, 57 nt, Homo sapiens
cgcggcccggagcgcggcccgaggcccgcccagagggcggagaacggaaaagcacca

SEQ ID NO: 38589 - RNA, 77 nt, Homo sapiens
gacgacccaagcggcagaagcccggagcagcaagaagacgggagaccgaagaagaagacgagaaaagaacacagaag

SEQ ID NO: 38590 - RNA, 74 nt, Homo sapiens
ggggcgcaggcgagccgccggccccccaccccagacaggaccccgcagcgcagacacgccaccaaggagcacac

SEQ ID NO: 38591 - RNA, 77 nt, Homo sapiens
aaagcgcgaccgggccagagcccccacgcaaacaggccgacggcgcaaggccacggcaagcaccgggagcagcagcg

SEQ ID NO: 38592 - RNA, 67 nt, Homo sapiens
gggcagccgcaacagcgagggagcagccggcagggaaaaaaaagggcaggaggaacaaaccgcaaaa

SEQ ID NO: 38593 - RNA, 76 nt, Homo sapiens
gcgcaccgggggcgggggcgccagcccaccaagaagggccgagcacagcaagcaaggagaaggggaaaccaggaga

SEQ ID NO: 38594 - RNA, 73 nt, Homo sapiens
cagaccgaccccgagagaggacggaggcagcacggcaggagacgaggagaggacagcaggacacccggacccc

SEQ ID NO: 38595 - RNA, 77 nt, Homo sapiens
cacaaaaaggaagggaggaaagggaagagagacccaccgaacggcagcggaaaccccacagcaacagggagagaaaa

SEQ ID NO: 38596 - RNA, 40 nt, Homo sapiens
acccaccgaaagccaagaacgcagaacaccagaagcagcc

SEQ ID NO: 38597 - RNA, 63 nt, Homo sapiens
gccagcgccgagcaccccgcaggggcacccggggcggccaagcccggggaaccccaccaaggg

SEQ ID NO: 38598 - RNA, 54 nt, Homo sapiens
gaccccaaaaaaaacaagaaccacggcacgaaaggggggggagccgcacgaccc

SEQ ID NO: 38599 - RNA, 34 nt, Homo sapiens
gacacgaccgaggacaaggagagccacccgcacg

SEQ ID NO: 38600 - RNA, 78 nt, Homo sapiens
ggcgacggcagccaaaaagaggccagccggccgaccgcacagacgaccacacgcgccgacagagacgcccaggcacag

SEQ ID NO: 38601 - RNA, 84 nt, Homo sapiens
cccaaaacgcccaaacaccgagcagcaccaaaaagccaaggaaagcagccagagcagcagagcagcagcagcagcagagcagga

SEQ ID NO: 38602 - RNA, 76 nt, Homo sapiens
cgaggcaccggagacccgagcaccccaacgggcagggaagaacagacacagcaccgacacgcgcaaaagcacgaca

SEQ ID NO: 38603 - RNA, 74 nt, Homo sapiens
ggacgcacacaccggcacaccgcaaggccaagagaggacgcccaaccacagcccaggaaccacaccaagaaagc

SEQ ID NO: 38604 - RNA, 57 nt, Homo sapiens
gcggggaccgcggcccgggggggccccagcccggccgaacgggcgcacgacacaaac

SEQ ID NO: 38605 - RNA, 71 nt, Homo sapiens
ggcgacacaaaaagagcgaaagagagagagccaacaagagccagacaaacagcaacaggggaagaacacag

SEQ ID NO: 38606 - RNA, 65 nt, Homo sapiens
cccgagacagaaaaggcaaaggacagccaccccagcgaaagcaacaaggccgccacccaggaaag

SEQ ID NO: 38607 - RNA, 76 nt, Homo sapiens
gaaacaccccggcggaggcacccaacaacccaggagggcggggccccgagcagacagcaggaaagaagaagccccg

SEQ ID NO: 38608 - RNA, 65 nt, Homo sapiens
gaggagccgggacacgccagcgcgggcccagggaagaagaagccaacaacagcaaacaagaagag

SEQ ID NO: 38609 - RNA, 40 nt, Homo sapiens
gcgacggccccgggaaggaggagccgcaccaggcgcacac

SEQ ID NO: 38610 - RNA, 77 nt, Homo sapiens
aaagcgaaaagagaaccccccagcaacggaaaggaaggcagcggccgcgagagaagccccgagcgaaaccacgcgcg

SEQ ID NO: 38611 - RNA, 68 nt, Homo sapiens
acgagaaggaagaggacggaagcaaacagacagggcagaccgccagcagcacagcaagccacagagag

SEQ ID NO: 38612 - RNA, 81 nt, Homo sapiens
cagaggggacagaggcaccaaggaccccaagacaggcgcaagaaggaaagcaggcgaccgcacaggcagcggaccaacggc

SEQ ID NO: 38613 - RNA, 73 nt, Homo sapiens
cggggagccacgcggcgcccaggcgccgagagagggcccagaggagacaggggaaccaggaggaggacagcca

SEQ ID NO: 38614 - RNA, 71 nt, Homo sapiens
cgaagaaaacgaacgagaaagacgcagaggaagcacagcaaggaaggaaagcgcaagaagaacagccccac

SEQ ID NO: 38615 - RNA, 61 nt, Homo sapiens
agcgaacccgagagcgggagcgggcgggccagggcgaagcgcgaagggccaaggaaaacac

SEQ ID NO: 38616 - RNA, 45 nt, Homo sapiens
cggaggcggcgcagcagcaccgaacagaggaaggcgacagaccag

SEQ ID NO: 38617 - RNA, 54 nt, Homo sapiens
gaccgcgccggcgaccaggagggccagacaaggggaacacaagaggagagaagg

SEQ ID NO: 38618 - RNA, 76 nt, Homo sapiens
gcagaggagacaaaccggagaaggagccaagaaagagaagaaaaaaagcccccagagcccgggcggggcagacagc

SEQ ID NO: 38619 - RNA, 82 nt, Homo sapiens
ccaagagggagaccgaccacgggacgcagagcgcggccagagggcccgcccagccccaaccagaccagcccaccgcacccag

SEQ ID NO: 38620 - RNA, 58 nt, Homo sapiens
ggcagaagagaaccgaaccagaggacccagaaacaagggacgaacaaaacaccgagga

SEQ ID NO: 38621 - RNA, 81 nt, Homo sapiens
cacaggggcccccaccacccggaggagcagcccgccccgccgggggagacgacccccgccagaccccaagaagaagcggaa

SEQ ID NO: 38622 - RNA, 63 nt, Homo sapiens
ccccaacaaccagagagcgcagccccggacccagagaaacaacgggcaacagacgggaaaagc

SEQ ID NO: 38623 - RNA, 51 nt, Homo sapiens
caccaccccaaccccggggcaagaaacgaagcaccgggccagggacaagcc

SEQ ID NO: 38624 - RNA, 72 nt, Homo sapiens
gacaagacaagagggaaaccagaccagacccaaaaagagacaaggggagaaacgccgaccaacaggagaaac

SEQ ID NO: 38625 - RNA, 76 nt, Homo sapiens
caacaacagaaacagcaccagacccccagagaaagagggcacacagaacccgggcggggccggacggggggagaag

SEQ ID NO: 38626 - RNA, 66 nt, Homo sapiens
ggagagcaaaacaagagagcgcgcaccgacgccagaggaccagaggaaacgggaagcggggacacc

SEQ ID NO: 38627 - RNA, 74 nt, Homo sapiens
gcagggcggaaggacaacagcccgacaaccagacgggaagaccccagaaaaagaaagagcacgaacgcggagaa

SEQ ID NO: 38628 - RNA, 66 nt, Homo sapiens
aggggaaccgccagccggccgcacagaacagcgggcaagagaagaaagaggaaagggggacgaagg

SEQ ID NO: 38629 - RNA, 38 nt, Homo sapiens
gagacggccacagacaacggagacggagccagccaaag

SEQ ID NO: 38630 - RNA, 68 nt, Homo sapiens
accccgccgccccgcgaggccgaccccgaggggggcccacgcggaggacgcagaacacggcgggcggc

SEQ ID NO: 38631 - RNA, 74 nt, Homo sapiens
ggaagcaccacggagggagccccccagcaccgaagacgcgaggaaggcgaccgagcgagaagacacgacgaaga

SEQ ID NO: 38632 - RNA, 76 nt, Homo sapiens
ccgggccgaccgagcaccaggcgggcagggggccagggcagccagggccaggaaacacagagggcgagcacaccag

SEQ ID NO: 38633 - RNA, 82 nt, Homo sapiens
cgcagaaagcaggcgaacccgcggcgcaaaacgacggcccgccacgggccccgcagccgcgcccgagcgcccgagcagggac

SEQ ID NO: 38634 - RNA, 75 nt, Homo sapiens
aacacaccgcccagccacgcggggcaacaagaggaaacaacagcacgggacggcggaacaaaacccccacaccgc

SEQ ID NO: 38635 - RNA, 72 nt, Homo sapiens
ccgaagagcgaccggcgcagcgcgccgcgcgccgggagaggcccggggcccgccggcgcccggagcccgcgc

SEQ ID NO: 38636 - RNA, 86 nt, Homo sapiens
agcccggaccaagaccggagcggccgaaacgagcccgaaaggccccagcgaccggacaggccagcggccccaccgaagaggagaac

SEQ ID NO: 38637 - RNA, 60 nt, Homo sapiens
ggacaaggccagagaacacaagaacgacccggaaaaaccacgagcccacacccaggccga

SEQ ID NO: 38638 - RNA, 74 nt, Homo sapiens
cgagaccccgcggaacgcccaccgcggagagcagcacgaccccagcacagaagaaagaagccaaagagaaggca

SEQ ID NO: 38639 - RNA, 81 nt, Homo sapiens
cagccggaagggcggggggcgggccggaggggagacgggaggcagcccgccgggacccaccaagggcccccacgacgcagg

SEQ ID NO: 38640 - RNA, 74 nt, Homo sapiens
cgggaaaggcggagccaccggccggcgaagggaacacaacagagagagaagagagaccaggcgcaaggagacca

SEQ ID NO: 38641 - RNA, 67 nt, Homo sapiens
agcagcgggcgcggacacgagcgcggggacggacagaggaagcagagcaaggccgggccgcagggaa

SEQ ID NO: 38642 - RNA, 75 nt, Homo sapiens
gccggccgagacgcaccgcgggacgggaaccgcgacacaagaccgaggccaaccaccgcccgcagcccacaagcc

SEQ ID NO: 38643 - RNA, 71 nt, Homo sapiens
acggaaggagacaagaacagggggcgaccacgaccgaagagccagagacaagccccacgagacgcacagag

SEQ ID NO: 38644 - RNA, 90 nt, Homo sapiens
cccggccggccgcccccaggaccccagggagagcgggcagccccaggggacaggggcccgcgacccagagaacaagacgaggcagagcga

SEQ ID NO: 38645 - RNA, 69 nt, Homo sapiens
ccccccgccgggagggccacaggaggcggcgggccccgcccgccgaagggacaaggagaggaggagacc

SEQ ID NO: 38646 - RNA, 43 nt, Homo sapiens
cccaacacgggaggccgagaacaggcggagccaccacgcccgg

SEQ ID NO: 38647 - RNA, 79 nt, Homo sapiens
cgcgaagcccagccagcaggccgcccgggggacggagcagaccgacacccgggccacaggaccaagcacaggaccccgg

SEQ ID NO: 38648 - RNA, 70 nt, Homo sapiens
aaaaccccaagcaccggaggagagcagacaaccacacccacgggcagacgaagcaggccaaggaagcgcc

SEQ ID NO: 38649 - RNA, 81 nt, Homo sapiens
agcggaaacaggcgggcaagcacggcaggcagaagcccccggggagagacagacagagggacacagagaggaagaaaggag

SEQ ID NO: 38650 - RNA, 58 nt, Homo sapiens
ccaagaaccaacccccaaaggcgggacaggaccgggggagcggccgaggacaagcaca

SEQ ID NO: 38651 - RNA, 40 nt, Homo sapiens
aagcgaggagaagaagagacaacaagggagggcacagcca

SEQ ID NO: 38652 - RNA, 72 nt, Homo sapiens
gaagcacacaaggagaaaaacacccaccgaaaaacagaggaccaaacgacccggagacgaaagcaaggaaaa

SEQ ID NO: 38653 - RNA, 83 nt, Homo sapiens
gaagaagagcggaaacccagcggagcggccagggccccacaggggcacaaccgagcggacccaacagaggaagccgcaagaaa

SEQ ID NO: 38654 - RNA, 85 nt, Homo sapiens
cccacccagaagaagccgacaaaaaagcaggaggcaagaaaggggcccggaaaccaagggccacacagcgacaaaagaaaacgcg

SEQ ID NO: 38655 - RNA, 56 nt, Homo sapiens
cggaaagaccaggcaaaagggcggggagcggaccccgggccggggcgccccgacgg

SEQ ID NO: 38656 - RNA, 57 nt, Homo sapiens
ccagaaggcagaaggaagcaagccgggaagcccaaagcaagggaacaaagagcagag

SEQ ID NO: 38657 - RNA, 82 nt, Homo sapiens
aaggccgcggccgggccagcaggcccccagggagggcaggagagccgaggagggcggggccgccagaaacgccgaagggacc

SEQ ID NO: 38658 - RNA, 57 nt, Homo sapiens
agggcccccaaacgcacagaaagagcgaacacccagaaacggaggagccaccggccc

SEQ ID NO: 38659 - RNA, 81 nt, Homo sapiens
gaagacagcccggacaccgacagcacagacagaacccgcaccaacaacaggcacaaagagagaaggaacacccacagggca

SEQ ID NO: 38660 - RNA, 56 nt, Homo sapiens
gcagggaaaggagagcaccacacaagacagccagcaggggcagaagcagcagacgg

SEQ ID NO: 38661 - RNA, 76 nt, Homo sapiens
gggacgcgaggacccgggcgggccccacccggaaaaaggaggcggcaacagggaacgccgcgcagagcccagcccg

SEQ ID NO: 38662 - RNA, 80 nt, Homo sapiens
gaaacgggagcaccgcgcgaagcccaccagggcccagcacaaaacacagacaaagaacgcacgcagaaccagccgagccg

SEQ ID NO: 38663 - RNA, 78 nt, Homo sapiens
gccagcgcacccaggagcacaggagagccaccccccgcggagagcgagggcccaggagcacagcggcggagagcgccc

SEQ ID NO: 38664 - RNA, 82 nt, Homo sapiens
cgccgccagccagagggccgagagccgcggggagaaggccacacccagggggaaaccacaccacccgccacagacagggagg

SEQ ID NO: 38665 - RNA, 54 nt, Homo sapiens
gagcaacgcacaagaacgaaaccggaaccagacagaagccaggggcacagaagg

SEQ ID NO: 38666 - RNA, 77 nt, Homo sapiens
ggggaagaagcagaagaaaaacaagcagaagcacgagggaacccgagagccgggacagaccaaggcggacagcggga

SEQ ID NO: 38667 - RNA, 57 nt, Homo sapiens
cacgagaacccccaaaaaaccaggaaagcccggccgcaccgcggagcccaggcacac

SEQ ID NO: 38668 - RNA, 80 nt, Homo sapiens
acgcccaccgcggagagcagcacgaccccagcacaggggcaacgaggaacaggccaagaaacaacacagccaaggccagc

SEQ ID NO: 38669 - RNA, 66 nt, Homo sapiens
caccgggaagagaaagaaaagccgaaggcaccagacaggcaaaacggaggaggcagggagagagca

SEQ ID NO: 38670 - RNA, 47 nt, Homo sapiens
agggcacacaaacagagcagcacacagaccaagcgagacagaggcaa

SEQ ID NO: 38671 - RNA, 79 nt, Homo sapiens
ggccgggagaccaaacagagggaacacaacagaggggaagcccaacagagggaacacaaccagcggggagaccccccaa

SEQ ID NO: 38672 - RNA, 75 nt, Homo sapiens
gggaccacggcagcccagagagacggaaacaggaacaccaaggaagcaaaagccccagaacgaacccagaaccgc

SEQ ID NO: 38673 - RNA, 73 nt, Homo sapiens
ccccggcgagagacgcagccccgcacagaacgaaaccgccagaagcgcggcgagaaaacagacgcagcaaacc

SEQ ID NO: 38674 - RNA, 81 nt, Homo sapiens
cacacacaagaaacgggcacacagagaacaagccaagaacaagaaaggggcacaagaaaccacaagaaaaagaaagaggaa

SEQ ID NO: 38675 - RNA, 76 nt, Homo sapiens
acacaccacgcggcgcgacccacacagacaacagccggggcagcgcaccgggccggacgccgcaccgagagcggcg

SEQ ID NO: 38676 - RNA, 75 nt, Homo sapiens
gccaagccaagacagggaggggacggaaacgccaccagcaggaggaagaggcggggccgggcgggccgggaaggg

SEQ ID NO: 38677 - RNA, 80 nt, Homo sapiens
aggacagcaggcccaagcgcacacccagcccacagaagaagggaaaaaagagcgcgccaagaacgcgaacccccgcgcgg

SEQ ID NO: 38678 - RNA, 75 nt, Homo sapiens
gcggcaaaaggcggaccgcccccgccaacgaagaccgagaccaggggaaaaggccaaaaccacagaagaggaaaa

SEQ ID NO: 38679 - RNA, 83 nt, Homo sapiens
cgggaaccgaggagacgagccaacggcggccgccccgggcacacccggcccccggacgcccgcggaagcccgcgggccccgca

SEQ ID NO: 38680 - RNA, 80 nt, Homo sapiens
ggccccgcgcccccccggggccccagcccccgggagaaccaccggagggccgggccacggccgaccgacaagaccgcagc

SEQ ID NO: 38681 - RNA, 80 nt, Homo sapiens
ccgaaccggagaccgaggaggggggacccaaacgagcagccagagcgccgccaaagcagcaaaagcaaagaacccaggaa

SEQ ID NO: 38682 - RNA, 79 nt, Homo sapiens
gggagcggggccccacacccccccgggggggaggacagcagcggacggccggaccaagaggcgccgccccccagcaaac

SEQ ID NO: 38683 - RNA, 62 nt, Homo sapiens
accaaaagcaggaccaaaagcgggggccaggaaaaccaggaaggcacaacaacacggccaga

SEQ ID NO: 38684 - RNA, 75 nt, Homo sapiens
aaaagcacccggagaggaggaaaaaaaggaccaccccaacaggaaacaagcacgcaaaggagagagcccaccaag

SEQ ID NO: 38685 - RNA, 67 nt, Homo sapiens
acgaagcgaccaaagcgcacggcagcgagagcaacacccgcgcggagggggagggccagccccccaa

SEQ ID NO: 38686 - RNA, 79 nt, Homo sapiens
cgggcgggcaccgccgggaaccaccggcacgccaagacagacgcccccgcaaaacggcccaacacgaagcggcaccggc

SEQ ID NO: 38687 - RNA, 80 nt, Homo sapiens
ggagaggccgggcgccgagagcaggcacagaagaccgagacgagcagaagacagaccagaaccgccgggcccagaccgag

SEQ ID NO: 38688 - RNA, 77 nt, Homo sapiens
gagaaaggagccggggaccccccaaagacaaggccagcggacgcgcaccggcaaaccaggcgccccgaggagaagcc

SEQ ID NO: 38689 - RNA, 69 nt, Homo sapiens
cggcagggcccgcaggcggcgcacaggaagcacgaacgccaaaagacgaacacaaagggaaagaggaga

SEQ ID NO: 38690 - RNA, 82 nt, Homo sapiens
gcgcgagaggagccgggacacgccagcgcgggcccagggcgccaacccccaacccacgcgggcagccagaacccgacccccg

SEQ ID NO: 38691 - RNA, 95 nt, Homo sapiens
gcgggacggagcggccggggccggggcgccgccgggcggccgggcgcggcgagcccaggcgaaggagaaccggaggaccagccaaagacagccag

SEQ ID NO: 38692 - RNA, 81 nt, Homo sapiens
agacgaaagcgggccagaccccagcaggcggcccaggacgaacaaagccagccaggaggaccagagagagaagaaaaccgg

SEQ ID NO: 38693 - RNA, 75 nt, Homo sapiens
accgggaccccggaagccaaaaagaaaggagaaaagaggcgcggaccaggggaaggcaaaaggcccgggaaaccg

SEQ ID NO: 38694 - RNA, 36 nt, Homo sapiens
cgaaacccacccacacaagaggaagccgagcgcaaa

SEQ ID NO: 38695 - RNA, 81 nt, Homo sapiens
caagaacccagaagaggcagcagcggaaggcagcgggagccgaaaacggaagccaagaggcgaggaggaggagagaacaac

SEQ ID NO: 38696 - RNA, 67 nt, Homo sapiens
cggcccgcggcgcaccgcgccgcggagaaagggacggcagcaggaaggcggcgcaaccaccgacccg

SEQ ID NO: 38697 - RNA, 74 nt, Homo sapiens
gccgccaagaacgcagcagcagccgccaagacgaggcagcgagaagaaaaagaagagagagacacggacaagga

SEQ ID NO: 38698 - RNA, 74 nt, Homo sapiens
aaggaccaagaaccagaggggaaagaaccagacgacaggaaggcacagaacgaagccgcagaagccaaacaagc

SEQ ID NO: 38699 - RNA, 82 nt, Homo sapiens
cccccaacaccggagccggggccagcagagggcggacagcagacgggacggcaggcccaggccaggccagccaggagaagca

SEQ ID NO: 38700 - RNA, 65 nt, Homo sapiens
cacccggagcagccgggagaagaaaaggggaagaaggccaaccgggggccaagggggaagggagg

SEQ ID NO: 38701 - RNA, 83 nt, Homo sapiens
caccgggacccaagaccgagaaccccgcggaggcaacaggacacaagcggcaggaggaacgaagcgcggcccgcccggagcgg

SEQ ID NO: 38702 - RNA, 77 nt, Homo sapiens
caaccacaagacgaccaaaggaggaaggaaaaggcccgaagaacagcaacaggggacacaagccaggcgcgcgagaa

SEQ ID NO: 38703 - RNA, 75 nt, Homo sapiens
ggaaccaccagaagccagcccccaggcggaacgcccgccccgcagagagggagcacggcccaggcagccaagaag

SEQ ID NO: 38704 - RNA, 71 nt, Homo sapiens
accgaccagaacgcagcaacaaagggaaacacaaagaagacaccagaagggccagcaccacgacaacacgg

SEQ ID NO: 38705 - RNA, 73 nt, Homo sapiens
gaccggcggaaacaaagccaccaggcgcacaccagcgaaaaagaaagccaagaaaagacagcaaaaagcaaag

SEQ ID NO: 38706 - RNA, 68 nt, Homo sapiens
caccaccagcgacccgagagaaaccacaaaggacccacagccaagcgcagagaaggccgaaccagaaa

SEQ ID NO: 38707 - RNA, 72 nt, Homo sapiens
cgggccagcgaccggcccacaacacgcccggcaaagcaggcaggggcagaaggcgacccagcgcagagcaaa

SEQ ID NO: 38708 - RNA, 72 nt, Homo sapiens
ccggagagggccgggacgggagagaaaagccgagcacgacagaggcacaaaaggagaaagcagaagaaacag

SEQ ID NO: 38709 - RNA, 74 nt, Homo sapiens
aaggggcagccaccaacccccccagacaaacaagcacagcgccacagagccgggacagcagaaagagccaggca

SEQ ID NO: 38710 - RNA, 82 nt, Homo sapiens
gggacagaaggagacggaacgcacagaggaacgagcgagcggcagagcgggagcgaacaaggagcggggaggagaaagaggg

SEQ ID NO: 38711 - RNA, 78 nt, Homo sapiens
agcagcgccagacaaagagcaaggaggcggggcaccaggcccagacggcgaacccgagcaagcaaccaccgcccggcc

SEQ ID NO: 38712 - RNA, 71 nt, Homo sapiens
agggcaacaccaaaaacaaaacgaaccaggacggcaaaaggaaccaaggcagccccaaccagacggaacaa

SEQ ID NO: 38713 - RNA, 70 nt, Homo sapiens
gggacacgcgcacgcagcaacaagcaccgaccaagaagcggcaagggcacgcggaccacccacccaaaga

SEQ ID NO: 38714 - RNA, 56 nt, Homo sapiens
gggggacaccgggaacacggagcaaagacaaagaggcggggacggacagccaggac

SEQ ID NO: 38715 - RNA, 79 nt, Homo sapiens
acgaaggggaaccagggaacgcccaccgaaaagaacaacaaccaaggacaccggaaaagcccagaaacagagaagggaa

SEQ ID NO: 38716 - RNA, 76 nt, Homo sapiens
ccaaggccccacagcgggacagagaccaaccgccaacaccagaaaagacgaggaaacaacccagacagaagaggga

SEQ ID NO: 38717 - RNA, 73 nt, Homo sapiens
acagcgcaagcgaaaaggccgcaagccaagaaaagggcagccccgggcaaccagcaagcccagagaacccaca

SEQ ID NO: 38718 - RNA, 87 nt, Homo sapiens
aggacaccagcacgccccgaaacgccgccccaggaagccaagaccgacaagcgggcacggcggccaagccagcccccgacaaaggga

SEQ ID NO: 38719 - RNA, 73 nt, Homo sapiens
ggagcggagggacagggccagccaccagaaccggagacgccgggcagcaacccaccaggcagaaaaaccacag

SEQ ID NO: 38720 - RNA, 75 nt, Homo sapiens
cagaggcagaaccccaaaaccagcagaccacagacccacagcgaaagcaacagggggagaggcaccagcaacaga

SEQ ID NO: 38721 - RNA, 66 nt, Homo sapiens
caacaccgcgggacgagcagcgaaccacgagagcacagggcggaaagcaccggagaggaaagccaa

SEQ ID NO: 38722 - RNA, 63 nt, Homo sapiens
caccgacgccacccaaagagacaacagcagggcggaccgcacccacagagagcaaaacacagg

SEQ ID NO: 38723 - RNA, 70 nt, Homo sapiens
acagcacggcaaccaccaagaagacggacagcaccgaaagagaagagagaaggccacgcccgaccccaag

SEQ ID NO: 38724 - RNA, 81 nt, Homo sapiens
gacagacagcggcaagaggcagccgggggccacagcgccagcgcaaccaaggaaagccaggaagcaggacagcaggcaccg

SEQ ID NO: 38725 - RNA, 48 nt, Homo sapiens
gaaggaccaagaaccagaacggccgagcgaccaggagaggagcccccg

SEQ ID NO: 38726 - RNA, 81 nt, Homo sapiens
cccagcacgaggaggcgcgaggagagggcccaaacccgagcccgcaagcagagaccgggagcaaagaggcagaacgaggac

SEQ ID NO: 38727 - RNA, 75 nt, Homo sapiens
gaaccaccacaagcacggaggcgcaaaaaaagcccgccggagagggccaagccggaagaagccagccaggagaag

SEQ ID NO: 38728 - RNA, 78 nt, Homo sapiens
ccagcaccggaggggcccggccacggacccgaggagcccagcacgaacaccaaagcgaggagaaagagggaaggcaac

SEQ ID NO: 38729 - RNA, 68 nt, Homo sapiens
ccgggccagcggccgcgcacccccggccggaggcaccagcgaccaagaacgcccagcccgcgggcacc

SEQ ID NO: 38730 - RNA, 55 nt, Homo sapiens
ggagcagggaagccagccacgggccagccggcggaggccgccgcccaccaagcag

SEQ ID NO: 38731 - RNA, 74 nt, Homo sapiens
gggaccacggcagcccgaaaggagagacacggaacacaaggaagcaaaagcccagaagggacggaaagagagcc

SEQ ID NO: 38732 - RNA, 70 nt, Homo sapiens
cgcagggcgcccccgaaggccgcgggaaaggcaaaaccccaagaggggacgaaggaggagggcgccggga

SEQ ID NO: 38733 - RNA, 75 nt, Homo sapiens
gcacagcgcgagaagagggggcgaagaaggagggaagcggacacacaggacgagaaacccgaccacacccaggca

SEQ ID NO: 38734 - RNA, 76 nt, Homo sapiens
ggcaagcgagaaagccacgagccggaagaaaacagaagcggagaaagggagagcacaggggggcagaggaggcaag

SEQ ID NO: 38735 - RNA, 67 nt, Homo sapiens
cacagcaagaaaccgcccccagaacacaacagggcaaaggccccgacagagacggggcaccagcggc

SEQ ID NO: 38736 - RNA, 84 nt, Homo sapiens
ccggccgccagaccacagcacagccgggaaggggagccaccagccccccggcgcagcccagcccgaaagcagaacgacgccggc

SEQ ID NO: 38737 - RNA, 69 nt, Homo sapiens
caccagagaagcacagcagcaaccaaacccaagaacaaaaaggagccgggaggagaaaagaccacaaga

SEQ ID NO: 38738 - RNA, 76 nt, Homo sapiens
ggaaccaaccggacacaaacaagcagcaggaggacaccaaagacgaggcgaggaaccaaaggccaccccgccgagc

SEQ ID NO: 38739 - RNA, 64 nt, Homo sapiens
ggcgggcgcagccgccaccggcagcagcagcaccaccggacgcgcgcgaagggaaaggcagaag

SEQ ID NO: 38740 - RNA, 76 nt, Homo sapiens
gggcggagccgacgagcggcgggaaaaccagagacccagacacgcgaaggaacgaaaggccaaaaggcaaaagacg

SEQ ID NO: 38741 - RNA, 78 nt, Homo sapiens
ccagggccaggcggcacaccccccaagaccggcggcccaacccaccggggaaagcacagggcagagacacggaaggag

SEQ ID NO: 38742 - RNA, 73 nt, Homo sapiens
gaccaggggcgagagcgggcaccccccaaacgacgcagccacggagagcaaaagaacagaagggagaagccac

SEQ ID NO: 38743 - RNA, 81 nt, Homo sapiens
cacggcggcgaccagcggcggggagccaagaccgccagagcggaacgaccccagagcgagcccgcagcagcccagaaacaa

SEQ ID NO: 38744 - RNA, 81 nt, Homo sapiens
gcaacagaccaaggagaccgggacgcacacgggacaagaagccggaggaccccaccccaggacacagaagaacgcagcccg

SEQ ID NO: 38745 - RNA, 75 nt, Homo sapiens
cccgagagccgcgccgcagggcgcccggccgccaggccagcgagaagacggaacaagaaaggaccaggagccccg

SEQ ID NO: 38746 - RNA, 73 nt, Homo sapiens
ggcaggaacccaagccccacaggagcggaagaagggcacacacgaaacgggcaaccggggccagggccagcac

SEQ ID NO: 38747 - RNA, 76 nt, Homo sapiens
cggcggccgcccggggccgcgggaaggccgaccgacgccgcgacaggaagggaaggggcggagacgggcggaacgc

SEQ ID NO: 38748 - RNA, 78 nt, Homo sapiens
cggggcgagagggcggcgaaggaggcagaggcacagcgcagcaaggcgccaccggaagaaacgggaggggaggagccg

SEQ ID NO: 38749 - RNA, 63 nt, Homo sapiens
ggcccccgcccgacgcccggcgcacggggcgcacaccacggcccgggaaacacaaaccaggga

SEQ ID NO: 38750 - RNA, 75 nt, Homo sapiens
caagcgccaaaaggaacgaaggcgggggggaggcaagcaggggggcaaaggaaagaaggcagaaagggaggccag

SEQ ID NO: 38751 - RNA, 60 nt, Homo sapiens
caaggacaaaggggcccagaaccaggcccgaaaaaaaaggacaggagaaacaggggccaa

SEQ ID NO: 38752 - RNA, 82 nt, Homo sapiens
cgcggggagaggcaggggcaaaaaagcgccccccaggaagcaggccggggaccaaggggacgcggagcggacggcggaaggg

SEQ ID NO: 38753 - RNA, 70 nt, Homo sapiens
cagcggaaaaggacaacggaggcagagaccaagcaggggcgaacgcagcaaaaaaaccgacaggaccaac

SEQ ID NO: 38754 - RNA, 78 nt, Homo sapiens
ggccacgcccgccggaccgcgcccaggccccccaggcacacagagaaaaaaagggaacaaaacacagcaagcagacaa

SEQ ID NO: 38755 - RNA, 39 nt, Homo sapiens
gagagagccaaacccccaggaaagagcagccaaagccaa

SEQ ID NO: 38756 - RNA, 72 nt, Homo sapiens
caacccaaggagaaaggaagccaaacgcagaaaagccccccaggaacaaggggagaacggacagcaggccga

SEQ ID NO: 38757 - RNA, 81 nt, Homo sapiens
gccacggaccgcgggacaagaaaacagcggcgggagaggagagagaaggaggagcccagagggagcacaaccagggaccgg

SEQ ID NO: 38758 - RNA, 82 nt, Homo sapiens
ggacagcacccaccccggagggggaccacaagacccacgacaggcgccgcgcccggggagacagaaacgaggcgcccccagc

SEQ ID NO: 38759 - RNA, 74 nt, Homo sapiens
ccccggcccacgcgccaaaacccgcccggagcacaaaacgggcaaggaccagaagaacccaggagaagcgagca

SEQ ID NO: 38760 - RNA, 84 nt, Homo sapiens
cggcggcagggcaagcggcgacggaccccaaggacagggccaaagcggcaggagaaggaagggaccggaaacgacaaggcaacc

SEQ ID NO: 38761 - RNA, 92 nt, Homo sapiens
cgcgcggaggccgcgacggacgcaagaggcgacggcgaccaagcccgaaggagggccccggagcagccacaccaccgaggccccacccagca

SEQ ID NO: 38762 - RNA, 65 nt, Homo sapiens
caggaaagacaggacaccgggaagcggaaggaggcagaaagggagccccaagagagagggccaag

SEQ ID NO: 38763 - RNA, 38 nt, Homo sapiens
gccccccgagggagggacaagaccaggggcaaggagag

SEQ ID NO: 38764 - RNA, 75 nt, Homo sapiens
aaggagaggcagacccaaggggccccaagcaggagcgcgggcaagagcggcgccacggagccccgacccgagcag

SEQ ID NO: 38765 - RNA, 72 nt, Homo sapiens
aaaccccaacacagagccaagcgccaacagcaaggcagcagccgaaacccagcggcaccaaaagcgaagaca

SEQ ID NO: 38766 - RNA, 63 nt, Homo sapiens
cgaagaccagcaggaaagcaggagcccacaggggagccgccaccaaaagcagacggaaaaccc

SEQ ID NO: 38767 - RNA, 72 nt, Homo sapiens
gagcgcggaaggggacccggggacgcggcgagacaggacgaaaccccgacccccgagacacgcgcaagacga

SEQ ID NO: 38768 - RNA, 84 nt, Homo sapiens
aaccacaggagggaaaccacgcaggcaaacgagaaaaagccgagaaggccagacgggaaaagccaccgaccacacgccacaaac

SEQ ID NO: 38769 - RNA, 55 nt, Homo sapiens
ccccccccacgggcagccggacgcccgcggcggacggagcaccacccccacaccc

SEQ ID NO: 38770 - RNA, 78 nt, Homo sapiens
gccgaagaaaagcaaaacggaggaaaacaaggcggcccacaaaggcgacaaagcgggagcaaaaaaagcaacggcgac

SEQ ID NO: 38771 - RNA, 68 nt, Homo sapiens
gagccaagaagagaagcaaaacagccaaacgagacacaaagcacggccaccaaaaaacaaacgcgaaa

SEQ ID NO: 38772 - RNA, 75 nt, Homo sapiens
ggaacgcccgcagccgccacgggaccccggggaaagcaagagaggaaagcaagacagagaggacaagcaagaaac

SEQ ID NO: 38773 - RNA, 72 nt, Homo sapiens
ggaacacacgggcgcagggaccgcgggcagcaggccgcgccgggagccggagggccggcaccggagggcccg

SEQ ID NO: 38774 - RNA, 74 nt, Homo sapiens
gcagaagaacggggaagacgacagagaggaggggggaggagagaaccagccaccacgcaccggaagcgagacca

SEQ ID NO: 38775 - RNA, 75 nt, Homo sapiens
aaacccacagaacacagcaaagggagcagaaaagcgcccccaaggaaaacagaaacgggaaaagagcacgaaggg

SEQ ID NO: 38776 - RNA, 63 nt, Homo sapiens
gaaggaaaaaacagaagacgcagcccagggaaagcggcgagacaggaagcagagggcaggggg

SEQ ID NO: 38777 - RNA, 73 nt, Homo sapiens
aaccccgagccagcacgcaccccgcccagacgccagggggggccccagcccggccgaacgggcgcacgacaca

SEQ ID NO: 38778 - RNA, 72 nt, Homo sapiens
gaccaagaaggaaaccgcacccacacggccgaggcagcaagagaagagacaaaggagaagcaagacagaaaa

SEQ ID NO: 38779 - RNA, 52 nt, Homo sapiens
cacacccgacggccccccacccagacagcagaccacagcccggcaggcccaa

SEQ ID NO: 38780 - RNA, 69 nt, Homo sapiens
aaggaccaagaaccaggccaagggacaagaaaggaccagccaggcgcaggagccaaagaagaacccccg

SEQ ID NO: 38781 - RNA, 82 nt, Homo sapiens
ccgcccgggaggcgccccaccagagaaacagccggcagccggcccgcagcgcgccccgggagaggagaaggccggaacaacg

SEQ ID NO: 38782 - RNA, 54 nt, Homo sapiens
agccaggacagagcgggacggcaaggagagccaaaaggccaggcacagcaacga

SEQ ID NO: 38783 - RNA, 79 nt, Homo sapiens
cggcccagcgagggcggcccggggcacccgcacgggaagcaggcccgccacaggaccaaaacagggaaggaagaaccag

SEQ ID NO: 38784 - RNA, 93 nt, Homo sapiens
cggagcgcggagcccggccccgcaccaggaggaggacgacagcacgacagcaagaaagcaccagccaagcagaagggagccagcggacgaggg

SEQ ID NO: 38785 - RNA, 47 nt, Homo sapiens
ggaagagaccggacaacaggaaaaaagcgcgcggaggcaggccagca

SEQ ID NO: 38786 - RNA, 55 nt, Homo sapiens
ccacccaggccccgacgccccgagacagagaaggggcgcgccacccagcagcccc

SEQ ID NO: 38787 - RNA, 54 nt, Homo sapiens
gaagacaggggaacacccccagagagaggaggggcagcagcaggacagggaacc

SEQ ID NO: 38788 - RNA, 60 nt, Homo sapiens
ccagcccgcccggcggaccaaaggggccgagacgaaaagccaaacccccccagcaccccc

SEQ ID NO: 38789 - RNA, 72 nt, Homo sapiens
ggcccggaccgcccccgagcccggaggggggagaaaagaacaggcggccagcccggaaaaacagacaaggcg

SEQ ID NO: 38790 - RNA, 83 nt, Homo sapiens
agcaccccacccaaccacacacaccacgacccccagggcgaacggagaaggcggggcgcgaacgaggcgagccaaaaccaccg

SEQ ID NO: 38791 - RNA, 87 nt, Homo sapiens
gcccagccaccaagaagaaacccaaaacaaccaaaagaaccaaggagaccaaagaggagaaagacagcaaagaaaaggagaagaaag

SEQ ID NO: 38792 - RNA, 77 nt, Homo sapiens
ggcgggcccagacgaagagaggaggggaggcgggcaagaacaccagggaaagggcaaagccaccagcaggccaggag

SEQ ID NO: 38793 - RNA, 61 nt, Homo sapiens
caggaagcggagcaggacgagcaggcgacccaaaagagcgaaggaaaaccagcaacaaaac

SEQ ID NO: 38794 - RNA, 71 nt, Homo sapiens
gcgcgcccgccaagcaaaacggcgccaggcgagccccacagggccgcccaggaccagagaccggaggcaca

SEQ ID NO: 38795 - RNA, 78 nt, Homo sapiens
aggcgaggagaaagcggcgcgcggaggcggacccccccccagcaggagccccagggcggacaagagacagcagaacga

SEQ ID NO: 38796 - RNA, 67 nt, Homo sapiens
caccagcccagccacacagacggggacagaagcggaccgcacaggcgcaggcgcaaggggccagggg

SEQ ID NO: 38797 - RNA, 74 nt, Homo sapiens
ccaggaccccggaagccagaaagaaggccggcccacagcccaaaaagaaacaggaccgaaagccagagcgaagc

SEQ ID NO: 38798 - RNA, 78 nt, Homo sapiens
aagaaacaaaaaaaacagggaaagcagagaaaacagacgggacagcggccaagcagcgccaggggagaggaggcagaa

SEQ ID NO: 38799 - RNA, 71 nt, Homo sapiens
caagaggccagcgaaaaccgaaggaagagcagccccacaagagcaggcaaccccaacacagggaaacaagc

SEQ ID NO: 38800 - RNA, 61 nt, Homo sapiens
cagcgcccgaaccaggaaggaaaacgcgaagacccaaaggccagagcgagaagccacgaaa

SEQ ID NO: 38801 - RNA, 77 nt, Homo sapiens
gcccccgggagcgcgggcaaaagggccgagaaaaggggccagcgagccggacgccgggaaggaagaacagccagacc

SEQ ID NO: 38802 - RNA, 74 nt, Homo sapiens
gcgggagagggaggagcccagaccgggcgacccgccggagaagaagggggacgggggacacgcccgaggaaaag

SEQ ID NO: 38803 - RNA, 40 nt, Homo sapiens
gaccggaggcgggagaagggccaaccgccccccagcagca

SEQ ID NO: 38804 - RNA, 82 nt, Homo sapiens
ggagcccccagcccccgcgaagcgccgggaccagggcagggaccccggaaccgaagggcgacaaagagaccgcgcggaggag

SEQ ID NO: 38805 - RNA, 63 nt, Homo sapiens
ccaccaccacagcagcggcgggccaccgacccccagacggggggccgaagaagccagggggag

SEQ ID NO: 38806 - RNA, 64 nt, Homo sapiens
aggaggaggaggcggaggccaagcggaaagaccaagacacccaggagaaagacagcggggaaaa

SEQ ID NO: 38807 - RNA, 93 nt, Homo sapiens
agcaagagggcaaaaacagccccaaccgcgaacggacaaaagacaggccacgagagcagcccgccccccggagaaagcgggcgggagacagac

SEQ ID NO: 38808 - RNA, 73 nt, Homo sapiens
caaggaagcgacagccaggaccaggcacccgggaagacacggccacacagaccgaacacaaacagccaacagg

SEQ ID NO: 38809 - RNA, 76 nt, Homo sapiens
agacaaagccagcacccaaaggagcaacagacagcccccagaacagcaccaggaggaagcgaacgaagccgagcca

SEQ ID NO: 38810 - RNA, 75 nt, Homo sapiens
cacagcacaaaggagcaggaagcagggagcaggaaggcgagaacacggggcccggcaggaaccggaacaacccac

SEQ ID NO: 38811 - RNA, 72 nt, Homo sapiens
ggggaggggagcccgcgcccgccgcgggagagaggacccccccccccccccaaggacaagagcaccaagaga

SEQ ID NO: 38812 - RNA, 117 nt, Homo sapiens
gcagaggcaggaagccgcgacacccaggccaaggacccccacccagcccgagaggaaccagagcaggccaagacagcagcacgagggacagcggagagaggggacaccaccagagcc

SEQ ID NO: 38813 - RNA, 75 nt, Homo sapiens
ggcggcaggaccgaaaggaacgacaaggcgaagccccccgaaccacccacagcccgggacacgcccacaagagga

SEQ ID NO: 38814 - RNA, 72 nt, Homo sapiens
ccggacaaccagaggcagccagcagggggagcggggagagaggaagaacaacaagcagaccgagaaagcacc

SEQ ID NO: 38815 - RNA, 58 nt, Homo sapiens
ggaagagggaaaaggcaaccgccaagaccagcgacgcacaaggaaaaacagagagaaa

SEQ ID NO: 38816 - RNA, 76 nt, Homo sapiens
gaaaagcgccaaggaaaaggacgagaacgccgcgacagaaagcgagagcgggcgccgccagcccagcgcagccaca

SEQ ID NO: 38817 - RNA, 104 nt, Homo sapiens
aaacaaaaacagggaaccagccaaggaccaaaaccagaaggagagcacagcggcaacaggcggagcaggagcaaaggagcaagaaaccagacccggaaacgcag

SEQ ID NO: 38818 - RNA, 51 nt, Homo sapiens
ggaacccggcgcagaagggagaggggccgacgcccgccgcggccggggaac

SEQ ID NO: 38819 - RNA, 85 nt, Homo sapiens
cagcccaccgaaaggagagaagcagaccgaggaggagaaggggcggcccggaggccgagaggagcggagagacaagacgaagccc

SEQ ID NO: 38820 - RNA, 82 nt, Homo sapiens
cgcgccgcccggcgagcgggccggaggaaaagaaagaggccagaccggcccgggccgggccaggaggacacgcgcagggccc

SEQ ID NO: 38821 - RNA, 65 nt, Homo sapiens
ggagacaacacgaaccggagggggaaggcagggaccaacgcgggggacgagagaaaagggaaggg

SEQ ID NO: 38822 - RNA, 75 nt, Homo sapiens
gcgaggccgaaacgcagcgcgcccccaggaggcgagcccgcggaaccgcagccagcacagagagaccaaaacaac

SEQ ID NO: 38823 - RNA, 76 nt, Homo sapiens
cagacggcccgaccacccccggcacggccacgcccacagaggcagacccgcagccaacacacaccagagggagcac

SEQ ID NO: 38824 - RNA, 71 nt, Homo sapiens
cagccaggggaaacccggagggaaccaagaaaaccaaccaagcggaacagcccaggcaaacggaacgaagg

SEQ ID NO: 38825 - RNA, 81 nt, Homo sapiens
cgcaccggacacagcggaggagaagcgcaggagaaaggaccgagacgcaaccccccggaaggccaaccgcgcagggagcaa

SEQ ID NO: 38826 - RNA, 71 nt, Homo sapiens
caccaccccccggacgagccggaccagcggagcggggcacaagaagacccacgcggggaaagcaacccaaa

SEQ ID NO: 38827 - RNA, 91 nt, Homo sapiens
cccagggaagcgcagaaagcaggcgaacccgcggcgcaaaacggccaccaacggcggggggcgaggagcgagcaggagccgggcggcggcc

SEQ ID NO: 38828 - RNA, 67 nt, Homo sapiens
cggaaaggagccaagaggagagcgcaagcagaacaaggggagagcccgacgcagaacagcggagccc

SEQ ID NO: 38829 - RNA, 66 nt, Homo sapiens
gccgacagggacgaagaaaaggggcgcaggaggaccggccccgcaccggccgggcgagggcgcacg

SEQ ID NO: 38830 - RNA, 72 nt, Homo sapiens
gggccagcaagacacaggcagacacacaggaaaaacaggcaaaacaggaagccaggaaaagaaagcgggaga

SEQ ID NO: 38831 - RNA, 82 nt, Homo sapiens
agaaaaagaccaaagaagaaaggggcaaagcaaccaacgccagacggggaccgagacccgacgagagagacgaggggaagag

SEQ ID NO: 38832 - RNA, 76 nt, Homo sapiens
gacccaaagcacccaagggcacaagcccaccacacggcagacaggaggaaacaacagcccacacaggacacgaaag

SEQ ID NO: 38833 - RNA, 72 nt, Homo sapiens
ccgccaaccacgggcgaggaggcgccgcgcaggaagccaccgacaagagcacagggaaggggaagacgcagc

SEQ ID NO: 38834 - RNA, 82 nt, Homo sapiens
ggggggccgggggcgcgccacgggccagagggcggccacccggagccagcggagggacaggcgcgcacagcagccgcgcccg

SEQ ID NO: 38835 - RNA, 73 nt, Homo sapiens
ggaggggaaggcacggacgcaacacggaacagacgcagccgccaggcacagagaaggcaaacgggagggcgag

SEQ ID NO: 38836 - RNA, 77 nt, Homo sapiens
cagccagaaaaaacacagccgacagacgccaccaaaagcaccaggggacaaacaacggaaagggcgaagacaacagg

SEQ ID NO: 38837 - RNA, 74 nt, Homo sapiens
cgacaggcgcggcacgggaggcggaggcgccccgccagaacgccaggagccagaaccccgaggaaaggggaaaa

SEQ ID NO: 38838 - RNA, 83 nt, Homo sapiens
ccaggcccaagacgccgcgcgaggccagccaggaaagcgggagcgcgggagcaaaggaaagaagagaagcgcggcgcccaaag

SEQ ID NO: 38839 - RNA, 39 nt, Homo sapiens
gagagcgcccccggccgcacagaccccccccccccggcc

SEQ ID NO: 38840 - RNA, 81 nt, Homo sapiens
caccggcccgggcgcgaacaaaggcaacagccaaaggccgagacacagggcagaacggacaggcacggcaggaagaccaaa

SEQ ID NO: 38841 - RNA, 77 nt, Homo sapiens
gacggagccccaggaacaggcgacgcccggaagggcaagcgagacgacgggaccgaaggaccccgccagagacaacc

SEQ ID NO: 38842 - RNA, 67 nt, Homo sapiens
caggcgggccagcggacaggaaggaacacaagaccaaagaaaaaaacgggcacgaagcacaaaaaca

SEQ ID NO: 38843 - RNA, 70 nt, Homo sapiens
caaaaacaccaggaagcaaggaggaaggagcaaagaaaagggggcacagagcggagagccagagaagagg

SEQ ID NO: 38844 - RNA, 89 nt, Homo sapiens
ccgagagagaggagaagagcccagcacaacgaagcgcaccaccaccgccggcgagcaccaggagagcccccaggccgcacccggcaaca

SEQ ID NO: 38845 - RNA, 49 nt, Homo sapiens
gcgggcaagaagcccaagaggagagagccacagagagacggggcgccag

SEQ ID NO: 38846 - RNA, 77 nt, Homo sapiens
cgaccaagccgacccaccacacaagacggaaaaagcgacggagcccccccccggaagaagaccaccagaaacaaaga

SEQ ID NO: 38847 - RNA, 73 nt, Homo sapiens
agacggagcagaaccgagggaaaagcacagggccaggaagcagagggacagccaggccagaaacaggcccagc

SEQ ID NO: 38848 - RNA, 80 nt, Homo sapiens
cggcgcggcaaccggggagcccgccaggaagggaccacagaccagcacgccggcgccacgaaccgagcgacaggacgggc

SEQ ID NO: 38849 - RNA, 83 nt, Homo sapiens
gcgcgccgcgcaacaccgggaggcaaggagcaccggcggcagccacgagagaagaaagaaaaagaaaccgccagcccagagac

SEQ ID NO: 38850 - RNA, 55 nt, Homo sapiens
ccgaggccacgagaagccacgagcccagcaggcaaccaggggagagagagggaac

SEQ ID NO: 38851 - RNA, 60 nt, Homo sapiens
caccagcgggaaccgccacgccaggaaggaaagccccgaccacacgaggagagcgaaagg

SEQ ID NO: 38852 - RNA, 81 nt, Homo sapiens
ggaagcaggacgcgccgcgccccaaggagcagggccgccccgaggagagcgacgcccgggcgcgccccggcagagcgagcc

SEQ ID NO: 38853 - RNA, 79 nt, Homo sapiens
gcagcacacaaccgcgacaaaacgagaacaccagagcagcaggaaagggccagggaaaacacaccaaacaggccaccaa

SEQ ID NO: 38854 - RNA, 78 nt, Homo sapiens
aaccagaaccagcacaggccgggcaaaagcacaaaggacaggaacaaagaacaggaccaggggacaggaaagagagag

SEQ ID NO: 38855 - RNA, 64 nt, Homo sapiens
gccaggaagagaaggagaaccaccagagcaccagaccgccgacccacggagccagcgggcgcgg

SEQ ID NO: 38856 - RNA, 75 nt, Homo sapiens
ggcgccagccaggaggaccggcaggaccgacgagcccgggagagcgccccaggcgaccggccgaaagcgagaggg

SEQ ID NO: 38857 - RNA, 67 nt, Homo sapiens
ggaaggagcggaaggaagccagaagaagagcggaggaagaacaggaacaggcaggaagaaaacccac

SEQ ID NO: 38858 - RNA, 39 nt, Homo sapiens
caaggagggagaacagcacaaagcccagcaagaccacga

SEQ ID NO: 38859 - RNA, 79 nt, Homo sapiens
ggacccggccccggcccacaggggggggcaaacccgagagaacgggaacgcgaagggaagaaaaaacaagaaagccagg

SEQ ID NO: 38860 - RNA, 78 nt, Homo sapiens
gagaacggcgccacaagaaagagcaggacaagagaaaggcggcggcacacacaagggcaaggcacagaagcaacaaag

SEQ ID NO: 38861 - RNA, 72 nt, Homo sapiens
acccgccccggggcaccacccccaagcgcagagaagggaggcgccggcagaaaaccagggaacacgaagaaa

SEQ ID NO: 38862 - RNA, 81 nt, Homo sapiens
gcccgcaggccccgagcagaagacagagcggggcgagcacagaagccaaagccacagacaaagacgccccacagccaaccc

SEQ ID NO: 38863 - RNA, 61 nt, Homo sapiens
cgccgggcgccccgggcgggcgagcacaggcacacacacgaccggggagggagaaagcgag

SEQ ID NO: 38864 - RNA, 80 nt, Homo sapiens
cgggccgggaggggacggccgccggagccgcgaggccaaaacagccagcaaagacaagagcagaccagcagccgcagcgc

SEQ ID NO: 38865 - RNA, 68 nt, Homo sapiens
gaggaggggaccggccgggcaccagccagcaaaccagagaggccaacccaacagaagcgccacacacc

SEQ ID NO: 38866 - RNA, 76 nt, Homo sapiens
aggccgacagcacgccgagaagcaccggggggaagaagaagggaacaagcggagggacgcacgagaacgaggagcg

SEQ ID NO: 38867 - RNA, 65 nt, Homo sapiens
agagccagggccggaagaaaaccaccagaccagagaggacaaccaaaagcaccgaaccggaacaa

SEQ ID NO: 38868 - RNA, 51 nt, Homo sapiens
agggggacgaaggccaccaagcacgaacagacgccagccaacaagccgaca

SEQ ID NO: 38869 - RNA, 51 nt, Homo sapiens
ggcagcacggccccggagcaaaccgccaccacagcggacgacgcccaccca

SEQ ID NO: 38870 - RNA, 58 nt, Homo sapiens
ccgcccacggaccccagccaccccaaacaggagagcccgagggaaaagacaggcaaca

SEQ ID NO: 38871 - RNA, 74 nt, Homo sapiens
agagaccgacccgaagaggcgcggaccaacacaagaacgagaccacgcccgagagccgcaaaggccacaagccc

SEQ ID NO: 38872 - RNA, 74 nt, Homo sapiens
ccgaaggcgcaaacgacaccacccgaccgcagaccgaaaagggcggaaaaggaccaaggcccgcaaaagggcgc

SEQ ID NO: 38873 - RNA, 84 nt, Homo sapiens
ggggcggccggcccccagcccaagacacagccccagcagcccccagacccacagacacacccagggaaaacaaaaagccacaac

SEQ ID NO: 38874 - RNA, 88 nt, Homo sapiens
ggcgcgggagggcgagaacgaccccgagacggggaggcaaaccggagagaagacagaacaaacggagacggaagggccaccaaccgga

SEQ ID NO: 38875 - RNA, 76 nt, Homo sapiens
gaaggaaaaccccagcgaaacaccaagaggggcagccgcgggaccaggagcaacgcgggggagcgggagacagacg

SEQ ID NO: 38876 - RNA, 65 nt, Homo sapiens
ggaccaggaggcgagcaacagacaacggcaagcggagaagagcaaggccgaaccgagaggaaggg

SEQ ID NO: 38877 - RNA, 76 nt, Homo sapiens
acaccgagcagccggcgcgaggccagacgcccacggggagcaggacaagcaagaggcacggagcccaggcgccgga

SEQ ID NO: 38878 - RNA, 95 nt, Homo sapiens
ccaccaccacgccagccgcaccagccgcccaagccgcacagccgcggcggcagcagcaggagaggaaaacacacgagcgccagaaacacgagacc

SEQ ID NO: 38879 - RNA, 75 nt, Homo sapiens
ccgccggagccgccggaagggcgcccgcagccccccacggaaacggagcacccaccaacgagagagccgcagggc

SEQ ID NO: 38880 - RNA, 85 nt, Homo sapiens
cgacgaggcacgagcggggacgcgggccgcagcgcggagcagaaagcagaacccgcaggggaccgagacccgacgagagagacga

SEQ ID NO: 38881 - RNA, 75 nt, Homo sapiens
cggccgcgcgccccgaaaccggcgcgggaccaagcgaggacgcggggagacgcgcgcgaggaaggagcggggccc

SEQ ID NO: 38882 - RNA, 76 nt, Homo sapiens
ggagaaggaccaagaaccagaggcccgcgggcaccaggaccaacgggaacacaacgggccaccccgaacgagacgg

SEQ ID NO: 38883 - RNA, 43 nt, Homo sapiens
caggaaggacggaccaggggcaggaaaagcaacggcgcaagag

SEQ ID NO: 38884 - RNA, 87 nt, Homo sapiens
cgggcccgaggaggcagccaagccgagccgccacccagaccagaagcgggcggagggccgggggcgaggccacgagaccacccagcg

SEQ ID NO: 38885 - RNA, 78 nt, Homo sapiens
cgagggcgggacagccaggcagacgaggaaccaaccagaggcggggccaaagcacagaacaaacccaggggcagaaag

SEQ ID NO: 38886 - RNA, 79 nt, Homo sapiens
accggacggcggggccacgggcgccgggaggacaagcccaaccagggaccaggccaaaaccagacgccacgccccacgg

SEQ ID NO: 38887 - RNA, 59 nt, Homo sapiens
cacacggcacaggcaccagcccgggcagcgagcgcaaaaggaaacccccggaggacagg

SEQ ID NO: 38888 - RNA, 75 nt, Homo sapiens
cccaaccaaccggaggccagagcaccaggaagcggcccagcggcggaaaccggcaggaaccacaagccgagccaa

SEQ ID NO: 38889 - RNA, 84 nt, Homo sapiens
gcggcggcggcggccgcggcggcgaacgaagcgggcgggagaccaggacgaaacccgagaagcaagggaaagcgggcgaaaagg

SEQ ID NO: 38890 - RNA, 70 nt, Homo sapiens
agaggaaaaccaccgggcagggccggggacacaagcaacagccagaacaagccgaagcacgaaaccaaga

SEQ ID NO: 38891 - RNA, 82 nt, Homo sapiens
cggggagggcgcccacggcacgccaaggccaagcacgggaggggacggagcgcccccccgccagagaccaccagccggagga

SEQ ID NO: 38892 - RNA, 81 nt, Homo sapiens
ggagcgccgccgccgggaccccgcccagcagccacaagggcgcagaagccggcagagcccaagagacaacaagccgaaaag

SEQ ID NO: 38893 - RNA, 77 nt, Homo sapiens
gcgcggccgcggcggggcagcaggggcgggcggcgagccccggagcaagaagccaccaaagcccgccgaccgagccc

SEQ ID NO: 38894 - RNA, 75 nt, Homo sapiens
acacgaacccccaagcggggcccacccaaacgacccaggacaccaggggggaaaaaccacacaggcaaagaacgc

SEQ ID NO: 38895 - RNA, 49 nt, Homo sapiens
ggcgcacaggccccccagcccaacggaccgcagaggcgcggggccgaga

SEQ ID NO: 38896 - RNA, 38 nt, Homo sapiens
aaccgaacacacaaagagaagagcaagagaccgaccaa

SEQ ID NO: 38897 - RNA, 74 nt, Homo sapiens
agagagacaaaaaggacgaggcagccccaacgaacagacaaagcagaagggaagcccacgggaaccaagcaaca

SEQ ID NO: 38898 - RNA, 78 nt, Homo sapiens
ggggccccgcagcgacaacaggaggccggaagacccaaagcgagggaagaaggcccaggggggcagcgggacacgacc

SEQ ID NO: 38899 - RNA, 85 nt, Homo sapiens
cagaaagagagaagagagacagaagagcaagcacaaagcaaggaggagaggcagcacaagcagaagccgggccggcagcagccaa

SEQ ID NO: 38900 - RNA, 111 nt, Homo sapiens
cgggcaggccccgagaggaacccagccgacacgacgccgccggcaggcccgcgcaccaggaagcacacacacccgcacgagaccccggcccgcaccgagcgagggcggcag

SEQ ID NO: 38901 - RNA, 55 nt, Homo sapiens
aaccagggccaacagggacagccgcaaccaggaagaccaagagaagaaaccagag

SEQ ID NO: 38902 - RNA, 58 nt, Homo sapiens
gcgccgcggcgggccccgggaggcagaagagaagcccgcggaggaacggacaacacac

SEQ ID NO: 38903 - RNA, 68 nt, Homo sapiens
ccccggagggggggagcgaaaagcaaagccaggagaccgggaccagaacacacaagaaccgggagaac

SEQ ID NO: 38904 - RNA, 82 nt, Homo sapiens
cggacacaccacccggaggagagggccaccaaacagcggaaggagacccaacaccccggccagacgggccaccaggccggcg

SEQ ID NO: 38905 - RNA, 82 nt, Homo sapiens
gcagagaaggaccacggaacaaaagacaggcccgagaaggggagggcagggcagaggaagaacaaccaagagggaggaagaa

SEQ ID NO: 38906 - RNA, 49 nt, Homo sapiens
gaaccggcagggcaagcggcgacacacgacgggacggaagcacgggaaa

SEQ ID NO: 38907 - RNA, 79 nt, Homo sapiens
cccacagggagagggagccggacgaagcagggaccagcgccagccagccagggggggcagagccccacacaaggcagag

SEQ ID NO: 38908 - RNA, 86 nt, Homo sapiens
gcagcacgggacacgcggagccccaggcaggacagcagcaggacagcaagcccagggcgagacagccggagcggcccaaagaagga

SEQ ID NO: 38909 - RNA, 64 nt, Homo sapiens
gcgaagaagcgcagccgcaccggccaagggagccaagaccaaggagaaggacagagcggaccca

SEQ ID NO: 38910 - RNA, 73 nt, Homo sapiens
agccacgcagacggaaacaaggcaacagaaagagcaacagcagggcaacaggaacaagacaacacacacgcac

SEQ ID NO: 38911 - RNA, 78 nt, Homo sapiens
cgccagacgcacggaaagcagcgcaggagccaagaccacagcagcacccaggcggcgccaacaagccacaagagggaa

SEQ ID NO: 38912 - RNA, 71 nt, Homo sapiens
ggaccgcgaccgccgacccgcggcggggggagccggccacccaccggagaaggaagccgccagagcaaaag

SEQ ID NO: 38913 - RNA, 44 nt, Homo sapiens
gaaagaaggggaggaggacagaggaggagaaggacagaacggca

SEQ ID NO: 38914 - RNA, 62 nt, Homo sapiens
gggaccgggcacgaaacgcgcgcccccgaaggcggccaacggccaggaaaggagcagaaccc

SEQ ID NO: 38915 - RNA, 76 nt, Homo sapiens
ggacaggaggaacacagcaccagaaggaagggaagcgagaaccaggaacgaagaacaaaggggaaaggcaacaaga

SEQ ID NO: 38916 - RNA, 80 nt, Homo sapiens
agcagaaacagcccagcgcacaccgcgcccccgccgcgcggcccagcaccagggcgaaaagccaggagcaaaagacgagc

SEQ ID NO: 38917 - RNA, 80 nt, Homo sapiens
cagcaagaggccgcaaaaacaggcaaagaaaccccaaagccagcaagaccacagcagcacgcaccagccagcgaaccggc

SEQ ID NO: 38918 - RNA, 78 nt, Homo sapiens
aaggccgcccccaccggacgaggccccccaaccaggcaacgggcgacgcacgaggcacacaggaaggaggggagcagg

SEQ ID NO: 38919 - RNA, 71 nt, Homo sapiens
aagcaacacagagaccggagagcacacggaggccggccacaaagcgaacaaagaaagggaagagacacaag

SEQ ID NO: 38920 - RNA, 76 nt, Homo sapiens
cgcccagcccccgagaagcgggaacaggccaacaaacaggaaacaaaggaagagggagccacaggcgagaagagca

SEQ ID NO: 38921 - RNA, 82 nt, Homo sapiens
gcaagggaaaaagaagggagcggccgaaggagccaccaggccgggaagcccacgggacacgaggaggggacggcccgccaca

SEQ ID NO: 38922 - RNA, 60 nt, Homo sapiens
gcacacgcccgccgccagagggcaaagggaggcccaagcagagacgaggacgcgcacagg

SEQ ID NO: 38923 - RNA, 72 nt, Homo sapiens
ccaggaccacgggggagaaagaaggaggggagaacccagggcgaccaggccaggcaaggaagagaaaaggaa

SEQ ID NO: 38924 - RNA, 73 nt, Homo sapiens
aaagaagagccagccaccaacaggccccagcgcagccagcagggaacgaggacaaagacgccagagagaaacg

SEQ ID NO: 38925 - RNA, 69 nt, Homo sapiens
gaagaccgccaaaaaggacacggagccaggcgcgcgcagaaccaacaaaagcgaaggaaaagggagcga

SEQ ID NO: 38926 - RNA, 35 nt, Homo sapiens
ccgggggcccacaacagggaaagggagcagcaccg

SEQ ID NO: 38927 - RNA, 76 nt, Homo sapiens
agcaacaccacgccaaacagaagccagaacgcggacccccgcagaaggaggggaaagccagcgcagcgcgagaagc

SEQ ID NO: 38928 - RNA, 53 nt, Homo sapiens
agcagcccaccagggagcccgcaggggaagccaacagcgggacaaacggacag

SEQ ID NO: 38929 - RNA, 72 nt, Homo sapiens
aggaccaagaaccaggcggcggcacacacaagggcaaggcacagaagcaacaaagccagcacagccagacca

SEQ ID NO: 38930 - RNA, 66 nt, Homo sapiens
aacgggcaggcccagagaccagcccgcaggagcaggcgaagcgagccagggaagcgaaccaggcga

SEQ ID NO: 38931 - RNA, 73 nt, Homo sapiens
agcacacacgaaagacagccgggacaccacagcaagaggaacgggcacgccagaaaagaccaggagaagcaga

SEQ ID NO: 38932 - RNA, 119 nt, Homo sapiens
cccagaggaagccgcaggcccacaagggaacggcaacaaggaccccggaacagggaaggggaaaccacacgcagaaggaacgggcaccaacaagaaggggccaagcgcaagcagccgag

SEQ ID NO: 38933 - RNA, 75 nt, Homo sapiens
accgaggccccggggaagccaccccaccccccaggagaagagaaaagggaaggcacggaggaagcccgagaccac

SEQ ID NO: 38934 - RNA, 74 nt, Homo sapiens
aggcaggaggagcggggaacaccacaagagggccggaagccgccagaccagaagggaaagacagcacacgacgc

SEQ ID NO: 38935 - RNA, 60 nt, Homo sapiens
gcggccgggagcccgccgcgcggagcgcccccagaaacccacaaagccccgaggggcagg

SEQ ID NO: 38936 - RNA, 78 nt, Homo sapiens
gccgcgcacgcacagacaaggggagaagccccccgcggggaagaaccgggacggcgcgcagaccccggagcggcaccc

SEQ ID NO: 38937 - RNA, 69 nt, Homo sapiens
cccgccacaacggccgcagggccgaggagacaggagaaggcgccgagacggcgcgcgggggccaccaac

SEQ ID NO: 38938 - RNA, 84 nt, Homo sapiens
ggcaagaggagagggagaagagcagagacgagaaccgcagaccaggcagcagcccagacgcggcacagagagggccgggagcgc

SEQ ID NO: 38939 - RNA, 69 nt, Homo sapiens
aaaaaagcggaggcgcgcaggagccaaggcgaagagccaggcgcgccgggcgggacaagggcaaggaga

SEQ ID NO: 38940 - RNA, 74 nt, Homo sapiens
gacaggcgaacacacgaccggccgggcgccgagacagggacagggaaagggggcagacccccacagcccaggca

SEQ ID NO: 38941 - RNA, 79 nt, Homo sapiens
cagcccaaggggaggagagccacgcaggaccacagcgcagcaaagaacacagaggcagcgaaaccaccccagagcaagc

SEQ ID NO: 38942 - RNA, 78 nt, Homo sapiens
accgggaccggagaggaagcggaggaggcagcacggcaggagacgaggagaggacagcaggacacccggaccccaccg

SEQ ID NO: 38943 - RNA, 105 nt, Homo sapiens
gaagaagcaggaggcaagaaaggggaaccccggagaaaaggccaagaaggcaggccagccaccagcagcgacaagaggaaaaccaagaaaacccagcagaggcag

SEQ ID NO: 38944 - RNA, 76 nt, Homo sapiens
cgggaaccggccgacgggcggaccgcgagacccaacgcggaccgagagggcgaccagacgaggggagacggacggg

SEQ ID NO: 38945 - RNA, 73 nt, Homo sapiens
gcgaaggaaacaacgaagcaaggaagccaagaacaaacccccagcagacaagagcgggaccaaccaagcccca

SEQ ID NO: 38946 - RNA, 70 nt, Homo sapiens
gcaacagaggagggcggcgggcggaggaacagcggcagccacaggagccagggggccacggacggggccg

SEQ ID NO: 38947 - RNA, 84 nt, Homo sapiens
acgaagaaaagaaaggccaagaccaggaaaggaagacaggggcaaggccgaggggaacagcacacagagaggaggcggaagcac

SEQ ID NO: 38948 - RNA, 81 nt, Homo sapiens
acacacaaggagcgccaagagcagagcagaccagaagagccaccagggagcgaaaccaaaagacagcccaacaaggcggga

SEQ ID NO: 38949 - RNA, 77 nt, Homo sapiens
gcagcaggaccgcggcggcgaacacaggagagcagcgcgaccagccccaacaacaagccccaccaccaagacgggcg

SEQ ID NO: 38950 - RNA, 77 nt, Homo sapiens
aacagaagaacaaacagagacgcgaaacgaccccaacaaaaaaggcagaggccggccaagacggagacaaggagggc

SEQ ID NO: 38951 - RNA, 72 nt, Homo sapiens
ccgacgcgaaggaagcagcacagggcaggagccccccgggaagacacaaacgcaccaccagaaagccaagcg

SEQ ID NO: 38952 - RNA, 61 nt, Homo sapiens
gcccgcgggcggcggcccacgaccggaccggaaaccacgagcggggagaaacagcaaggag

SEQ ID NO: 38953 - RNA, 77 nt, Homo sapiens
ccacacaaagccgggggcccccacggacgcgcgagacaagaggagggcgaccaagagagaaacagaacaaagaagag

SEQ ID NO: 38954 - RNA, 83 nt, Homo sapiens
gaaaccccaggcagagacgggggaagcagcacgggacccagcccaggccgcacggacggggggggacagcgaacgggcacgac

SEQ ID NO: 38955 - RNA, 73 nt, Homo sapiens
accgcacgcgggcgcgagaacggccgcccgccgcagcggaggccgcacagcgaccacaggggaaacggcgcgg

SEQ ID NO: 38956 - RNA, 70 nt, Homo sapiens
ggacaggaggaagaggcagcgccaacccacgccgaaaggggcggcaggaagaaccgcgagcggaccagcc

SEQ ID NO: 38957 - RNA, 84 nt, Homo sapiens
ccggcccccgcccgcgcgacggcgcccaggaaggaggagggcgaccgcgagacccagcccagggacagcccccgggcgccgaaa

SEQ ID NO: 38958 - RNA, 80 nt, Homo sapiens
gggagagcagaggcaaaccgaaagaccccagaggagggaggcaaagaacggccaaggaaggagcgagggcgaggacagag

SEQ ID NO: 38959 - RNA, 70 nt, Homo sapiens
aaaaaggaaggccgccggacagcgcagagccaagacggagaaacaagagagacaggagccacgagacagg

SEQ ID NO: 38960 - RNA, 90 nt, Homo sapiens
gcccggccggcggcggcggcggcggcggcggcggcgcaggggaccaccccacaccaggcacccagaaacccaagcgcggacacccgaagc

SEQ ID NO: 38961 - RNA, 81 nt, Homo sapiens
ccagccgcgcggcgggaagcggcggcggcggcccagcgccaagagacaagggaggcgaggacggacaaaaggaaacggacg

SEQ ID NO: 38962 - RNA, 68 nt, Homo sapiens
caggagagccacgaaggaccaggcaagaagaccggaaggagagaaagccagaccggaaaagaagaacg

SEQ ID NO: 38963 - RNA, 56 nt, Homo sapiens
acagacaaggggacacgccgcagcccgacgccaggagaccccaagcgacgacgccc

SEQ ID NO: 38964 - RNA, 35 nt, Homo sapiens
acagaggggcgcggcagggcggaggaaaagaaccc

SEQ ID NO: 38965 - RNA, 47 nt, Homo sapiens
aaggaccaagaaccagaaggagagaaccaggagaccgaagcaaccaa

SEQ ID NO: 38966 - RNA, 74 nt, Homo sapiens
ggaacgggcggaggccgacgacacagacaagagacccgccgcacaggggcgccggcgcagggcgggaccagaca

SEQ ID NO: 38967 - RNA, 76 nt, Homo sapiens
ggaaagcaggaccagagaaccagaagagaagacaggccccagccaacgaagccgagccgggccgggccccgcgggc

SEQ ID NO: 38968 - RNA, 65 nt, Homo sapiens
gagaccacagcaagacgccgggaccccggaaaccagaaaggaccgaaaagacgcggccccaaagg

SEQ ID NO: 38969 - RNA, 100 nt, Homo sapiens
aaagggggaagaaaggaaacaaaccgaaaaggaaagacccagcaaacccccaggaagcccagagcccccaggcaggaaccccccccaaccccgaaccaag

SEQ ID NO: 38970 - RNA, 72 nt, Homo sapiens
aggcaaaagggagagccgcgggccacagggcagagaaagagcagcgcccgaagcccgaaggagggacccaga

SEQ ID NO: 38971 - RNA, 74 nt, Homo sapiens
gagaagaaagggggcccaggaacggggcgcgaaagacacggacaacgcaaacccggccccccccccccccgcgg

SEQ ID NO: 38972 - RNA, 75 nt, Homo sapiens
gacacgggagccaagccgcacaccaggaagaagaggcggaagaaacaacaagcgcaaggagcgcccaaaccaccg

SEQ ID NO: 38973 - RNA, 89 nt, Homo sapiens
ggcggacggccccagcccaagcccccgggggagccgaaaccggaaccgaagaagagcccaaacaaggagcacccagacggccggcaaaa

SEQ ID NO: 38974 - RNA, 83 nt, Homo sapiens
ccccaagaccggcggggacaaggagaggaaaaacgagacgcaggacaaagagaaacgcgaagcggaggacgacgaggaaagga

SEQ ID NO: 38975 - RNA, 53 nt, Homo sapiens
aggaaaagcacgcccaggccaaaggcagccaccccaacaacccagaaggcgga

SEQ ID NO: 38976 - RNA, 71 nt, Homo sapiens
gccacggcggacagaagaaggaggggagaaagaagagaccggacacacgagccagggacagggaaagaaga

SEQ ID NO: 38977 - RNA, 79 nt, Homo sapiens
ccgggacccccaagcgggcccaccgacggggaccagagaggagggagccggggggagaacaaccgcaacgaacaaacag

SEQ ID NO: 38978 - RNA, 70 nt, Homo sapiens
gccggggagcaggaaccggcagacgccgccgggccggaacaagccgcagccacagccaaaagcgaaagaa

SEQ ID NO: 38979 - RNA, 83 nt, Homo sapiens
ccccgagggcgggacacaggcgcgcgacaccgcggaggcgcaacggggcgggccgcgcgcagcacaggacacacggagaggaa

SEQ ID NO: 38980 - RNA, 50 nt, Homo sapiens
gggaagcaagagaaaaagaacaacgcgaaaagcaccgaggagcggaagag

SEQ ID NO: 38981 - RNA, 73 nt, Homo sapiens
acggccgcgaccggccggaaaaaccagaccaacgaacaagaaggcgagcaacagagcgcaagaacaggcaaac

SEQ ID NO: 38982 - RNA, 70 nt, Homo sapiens
cgccaaaagccaccgagggagcgaaaaccgggccaggagcgcagaggacaaccacagagaagcaggcgac

SEQ ID NO: 38983 - RNA, 64 nt, Homo sapiens
gggcagggggcagggcggcagaggaaagaaagccaaaaacccgaagcccagaaaaacgcagaga

SEQ ID NO: 38984 - RNA, 38 nt, Homo sapiens
ccccgagcaggggaacaggcgaggcaggagaacgcgaa

SEQ ID NO: 38985 - RNA, 65 nt, Homo sapiens
ggacgaggaccaggggaggaggagcagaggacacagagaaaggaggcaggggggaggggggcagc

SEQ ID NO: 38986 - RNA, 75 nt, Homo sapiens
caacagcaagcggaggagcagaaacaaaggaagaaggagcggaaaagcaggacggccagcagaagcaggcgagcc

SEQ ID NO: 38987 - RNA, 81 nt, Homo sapiens
caccacgccaccacggcgccgccacaggcccgggcccccacaaccgggccccacggccccccccacggggcggaccgggcc

SEQ ID NO: 38988 - RNA, 62 nt, Homo sapiens
gcagccaaaaaagagaaacgcgagagagacccagaaagaggaaagcagaggggagcgaaagc

SEQ ID NO: 38989 - RNA, 77 nt, Homo sapiens
accaagacaccaccgccgcggcccccgcgcccacacagcagggcgcagcgcaaaagcccgggggcgcaccaggcaca

SEQ ID NO: 38990 - RNA, 43 nt, Homo sapiens
agaaaacacggagaagagagaggggaaggggaaccagagcgca

SEQ ID NO: 38991 - RNA, 74 nt, Homo sapiens
acggaggcaagaagaagcgagagaagggagggaggggacaagccacagcacccagacggagcgaaaacacggac

SEQ ID NO: 38992 - RNA, 75 nt, Homo sapiens
gacaaaaaaccacacccgccacgagggaggaggaggaggagccaggagcggaggagcaaaaaggaacccaaccag

SEQ ID NO: 38993 - RNA, 37 nt, Homo sapiens
cccaagacccacaacaaaaggacaaggcgaacaccaa

SEQ ID NO: 38994 - RNA, 76 nt, Homo sapiens
gagaggacagcagccggcaagggggcgaggaagagacaggcgggggagaagaagcagggccaaacgcaggagaaag

SEQ ID NO: 38995 - RNA, 83 nt, Homo sapiens
ccggcaggacggaaggggaagaggcccacccggagaaccccacggagaaccagagggcggagaacggaaaagcaccaggaagc

SEQ ID NO: 38996 - RNA, 70 nt, Homo sapiens
cgaaagacccagggcggacagacagacaaaggcccgaagaggaccaggcccaaacggagggacacccggg

SEQ ID NO: 38997 - RNA, 81 nt, Homo sapiens
cggggagcgaacgcaaagagggcgcccgcggagaacaacaaggagcaggccccccgccccacgaaccggccagcacagaag

SEQ ID NO: 38998 - RNA, 84 nt, Homo sapiens
cagaggagcacaggggaacaggccagaagaccccccaagcgccagaaccccccaaccaagagaagaaagagagccgaagagaag

SEQ ID NO: 38999 - RNA, 38 nt, Homo sapiens
gccgggcgcggaaacgaggagaagcaggccaacagcaa

SEQ ID NO: 39000 - RNA, 67 nt, Homo sapiens
cacaacgcacaaaaaccagacccacaccggggcagggccccacgagacacagccccccagcacaccc

SEQ ID NO: 39001 - RNA, 81 nt, Homo sapiens
gcccccagcaccggcccaaggccacaccggacacgaggacgcacagaagcaggcccccacgggaacgacgccgcgagagcc

SEQ ID NO: 39002 - RNA, 76 nt, Homo sapiens
gaagacaagccgcagcgggcagcgcaagccagcagaggccggaccacggaaagaccccacgccacgcaccaggcac

SEQ ID NO: 39003 - RNA, 55 nt, Homo sapiens
cggagaaggaggaccgcgccaggcagaagcaacagaagccaggcaaggaacgcgg

SEQ ID NO: 39004 - RNA, 75 nt, Homo sapiens
cccgagaggaacccaccggaaggagagcgggcccaggcaggagagggcgaggagccagacaggcgggaacaacca

SEQ ID NO: 39005 - RNA, 64 nt, Homo sapiens
cagcgacgagagagaccggagaggggagagggcgaaggcgccaccggcgagaagacgcggggac

SEQ ID NO: 39006 - RNA, 78 nt, Homo sapiens
acagaaaaaggaaacaaagcagaacaggcacaagcaggacaaggggcagggcccagccccgaaccagacaagggaccc

SEQ ID NO: 39007 - RNA, 45 nt, Homo sapiens
ccagacggggagggggcaaacacagagagaggggccaggccaggc

SEQ ID NO: 39008 - RNA, 79 nt, Homo sapiens
aagagaccacggcacgggaggaacacggccaggagcacccaaacaacaacggcaaggggggccacgaagaaaagaagcc

SEQ ID NO: 39009 - RNA, 62 nt, Homo sapiens
gagaacccgaccccgcggagacagcgagacccgccaggagcaaaggggaaccagaagaggcc

SEQ ID NO: 39010 - RNA, 80 nt, Homo sapiens
acagcccggacaccgacagcacagacagaacccgcaccaaccgagagcccaccgagaccgccagcgccacagcaaagaaa

SEQ ID NO: 39011 - RNA, 57 nt, Homo sapiens
ccggcagggcacaaggaaaacggaaggagaggaaaagcagagaggggcaccacccag

SEQ ID NO: 39012 - RNA, 113 nt, Homo sapiens
caaaacaccggagccacaagaaaccagggcggccccagcccagacggaaccagaaaagaacaaggaaacacgcagaaggaaaagcgcagagaccacacaacaggaaaaaacag

SEQ ID NO: 39013 - RNA, 58 nt, Homo sapiens
ccagggaccaggaccgaggagagccccgccagcgcaaaacacagcaaagacaaagacg

SEQ ID NO: 39014 - RNA, 74 nt, Homo sapiens
ggaccccagggccggcccggaggcgggacccagggcccagggcacccacagaggcaacgaaagcacaaaagaaa

SEQ ID NO: 39015 - RNA, 68 nt, Homo sapiens
gaagcggcagcccgaagaaaagcgaccaaaccagcgaagccccacaaacgccagaaacaaccagccaa

SEQ ID NO: 39016 - RNA, 74 nt, Homo sapiens
caacacaacgcggcgacagacccacggacacacaaaggcggccagccaagccgggagggaacgacgcagcaacg

SEQ ID NO: 39017 - RNA, 82 nt, Homo sapiens
cgaaacgaaggcacagcgggccgagaaagcaaacagaaaggccaaaacccccaagccacgagaaggacccaaagcggacaca

SEQ ID NO: 39018 - RNA, 81 nt, Homo sapiens
ggcggggcggcggagagccgggagcgcggggcgggggcgcccgccgcgccgccacggggagccgccagcgaccgaggccgg

SEQ ID NO: 39019 - RNA, 65 nt, Homo sapiens
gcagaccaccaggacaaaaaggaaacgagcccagaaaaggaacagcggcggagcccaaagccggc

SEQ ID NO: 39020 - RNA, 82 nt, Homo sapiens
ccacgccaccgaagagccaagcccagggaccagcaaggcagcacgggagggacccgccagcggagacccagcccagaaccca

SEQ ID NO: 39021 - RNA, 61 nt, Homo sapiens
gaacaaccgcggacacggagaggaaggagccaagaagagagccaggcgaacaaaagcaaag

SEQ ID NO: 39022 - RNA, 78 nt, Homo sapiens
aaagcaccgggaggaaagagagccacacgaagaacacggccaaaggacagggcagaccgccagcagcacagcaagcca

SEQ ID NO: 39023 - RNA, 115 nt, Homo sapiens
cccacaagaacccagccaaagccccaagaagaacggaaaagccagccaggacagggagccaggcccagacgaacggaccacagggcccaacccgccgaaggcaacggggcagccg

SEQ ID NO: 39024 - RNA, 74 nt, Homo sapiens
aagacagagaggggaaaccccgaaaggggggcagggagagaaggagcaaaaacaccacggcagccagcacaaac

SEQ ID NO: 39025 - RNA, 77 nt, Homo sapiens
gaacaacaagaagacgaagccagaaaacacacaggcaaagcgacaaacgcaggaaccagaggaagaaaaggcagaga

SEQ ID NO: 39026 - RNA, 75 nt, Homo sapiens
cacgcagagggcggagcggcagcaccaccagccagcgggaggaagcgcacaccgccccacaccccagcaaggcag

SEQ ID NO: 39027 - RNA, 52 nt, Homo sapiens
agacggcaaccagggcaaccgagacggggagggaggggagagaaaagaacaa

SEQ ID NO: 39028 - RNA, 59 nt, Homo sapiens
cgaaaccccacaagagaagcggaggcaaagcggaaaggacaggggaaggccaaggcaag

SEQ ID NO: 39029 - RNA, 70 nt, Homo sapiens
agggcaacaagagccaggcaacgagcgcgcgacggccacgagccccgcacaaagcccgacccgggccaga

SEQ ID NO: 39030 - RNA, 67 nt, Homo sapiens
gaacggccaggagacgcaacggaggagggagaggaaaacgggaaaccggcggccagcaggccgcaag

SEQ ID NO: 39031 - RNA, 79 nt, Homo sapiens
accaccgcaagcaggcaaagacggcaaaagcacaaggaccgcggacagagacaacaccgagagagaaagagcgccgaaa

SEQ ID NO: 39032 - RNA, 55 nt, Homo sapiens
cacaccacacagcagcaccgcccggagcccgcacggaccgagaccgggcacaaca

SEQ ID NO: 39033 - RNA, 84 nt, Homo sapiens
aacagaagcgagaggaaccagaaaaagggagcacaaggaagaaggaaggaacagagccacagagaaaaagacgccacaacagaa

SEQ ID NO: 39034 - RNA, 83 nt, Homo sapiens
accgcggagcaaaaaaagagcccgcaagaagaacagagacagcagccaaacccccaggaagaaaacaggcgaaacaaggcacc

SEQ ID NO: 39035 - RNA, 55 nt, Homo sapiens
agacgccgagcaaaagcccagaagagccggaagcaacgaggccgaaaaagagagc

SEQ ID NO: 39036 - RNA, 74 nt, Homo sapiens
ccggcaggacacaagcggcgagagcgccaggaacagggcacaaagcggccacgccccaacccaggcacacgggc

SEQ ID NO: 39037 - RNA, 35 nt, Homo sapiens
cggcccgacaggagcacagaggaggaagagacacc

SEQ ID NO: 39038 - RNA, 78 nt, Homo sapiens
cccccaggccacagcaacagcaccccaccacccaccgaaacaaccaggaggcaggagcaggccccagccaacccgaaa

SEQ ID NO: 39039 - RNA, 61 nt, Homo sapiens
gccacagcacggcgacaaacccaaagacagagagaccagcggcaaacaggacagcgccaag

SEQ ID NO: 39040 - RNA, 53 nt, Homo sapiens
gcccccagcaaggagggccgacgccggacgcgaggaacaaggaaaaggacacg

SEQ ID NO: 39041 - RNA, 87 nt, Homo sapiens
acgagccgggaggaacggcccggaaacaggaggaccacaggaagccggagaaccgaaggaccgcggaccaggcggacagccccccgc

SEQ ID NO: 39042 - RNA, 35 nt, Homo sapiens
ccgagagcgggaaaggccggagggaagaaccacgg

SEQ ID NO: 39043 - RNA, 88 nt, Homo sapiens
agagcgccgaccgggcggcgaggaaggcgccccgggcaaaacaacgagggagagaaacccagccgggagccggaagcgcaggaggccc

SEQ ID NO: 39044 - RNA, 55 nt, Homo sapiens
acgcccagccccgggcacggaaagacagaacaaggggcaggaaagcaagggggcg

SEQ ID NO: 39045 - RNA, 73 nt, Homo sapiens
cagagaaagggggggaggaagggcagagaagcggacgaaaagaacaagcgcccggagacagcaacgagggaag

SEQ ID NO: 39046 - RNA, 105 nt, Homo sapiens
caaacagagccaaaaacgagaaggggaaaaaacacaggacacgcggcagagagaacccaccggggcgaaagcaagaagcacgacgccccggcccaccccgcccga

SEQ ID NO: 39047 - RNA, 40 nt, Homo sapiens
gacaagggaccaacacgagcgggggaaagcaggggagaaa

SEQ ID NO: 39048 - RNA, 58 nt, Homo sapiens
agaaaaacaaacacacgcaaaggagaaaggaaccgacagagggacgcagaaacgacag

SEQ ID NO: 39049 - RNA, 49 nt, Homo sapiens
gagacccgccaaagccgccgggcaaggagacggaaaagcagacccagag

SEQ ID NO: 39050 - RNA, 58 nt, Homo sapiens
agaggaaacagaacaccaggacacccagagcgggaaagagagggggccgggcccagac

SEQ ID NO: 39051 - RNA, 80 nt, Homo sapiens
gcaaaaaagaaagaaaaaaacagcagcagaacacaccggaaacaaagcagcaggagaggagagccagagaaggacaggga

SEQ ID NO: 39052 - RNA, 107 nt, Homo sapiens
cgccccgcggccacgccaccaaggagccggcaggggggcggagccaccacggagaaccacggggaccaagaagcgagcagcccaaacggacccgggaacaagagccg

SEQ ID NO: 39053 - RNA, 86 nt, Homo sapiens
cggcggccgagggggcacagaagcgggcggcggcgcgccgccccgggcggccgcgggcggaacgaagcgcgcggcaggcgcgcgcc

SEQ ID NO: 39054 - RNA, 81 nt, Homo sapiens
cgcccagccccaccccacagacggagcaacagcgagcaacaggcaacgaaaacagacaaaacaacggaaaagcagggcacc

SEQ ID NO: 39055 - RNA, 79 nt, Homo sapiens
aagaacaacagccggagcaggagaggacgggacgccaagagacagagaaggacaacaccgaggagcaacacccccaggg

SEQ ID NO: 39056 - RNA, 60 nt, Homo sapiens
gagcgcgagaaggaaccgacggccacgccgccgaccggcaaggccacgcgcagagcgaac

SEQ ID NO: 39057 - RNA, 79 nt, Homo sapiens
aacgcaaaagaagagaagcagaaaaccagaagcacaaggacagagcacccaccacaggagagagagcggaaacacaggc

SEQ ID NO: 39058 - RNA, 81 nt, Homo sapiens
aacgacagccagggccaggcgaggccagccagcaccccaacagaaccaggggcaaagagaaccaggagaccccaccaccac

SEQ ID NO: 39059 - RNA, 68 nt, Homo sapiens
ggagcaccaggaccgggccggaacgagacgcacggcggacgggccccgaagcccaaggggagaccagg

SEQ ID NO: 39060 - RNA, 78 nt, Homo sapiens
gaccagaaaaaacagcacaccaggaagcaagggagaacagcaagagaaagagcaggaaacagacccgaaggggaaaac

SEQ ID NO: 39061 - RNA, 71 nt, Homo sapiens
ccgcgcccgccgcgggagagaggacccccccccccccccaaggaacccaagacagaccaggagaggagcag

SEQ ID NO: 39062 - RNA, 62 nt, Homo sapiens
gagggccgagaagcggggcaccacgaaggaccgaagaggccgcccaaggcggagaaaacccc

SEQ ID NO: 39063 - RNA, 62 nt, Homo sapiens
gcacgaccgcccacagccggcgaccaccccggcgcccccggaggcggaggcagggcgagacc

SEQ ID NO: 39064 - RNA, 73 nt, Homo sapiens
aaccaaccaccagaggccaacaccaacccggaagcgaaggagagcagaacacaaaaggagccgggaggagaaa

SEQ ID NO: 39065 - RNA, 86 nt, Homo sapiens
gaggccgcgaagccccccagccaccagccgaccacagcaagcccgggggaaagcccacagcgaagccaagcaaaaggagaagcggc

SEQ ID NO: 39066 - RNA, 79 nt, Homo sapiens
agcaagcaacagagcgcgggacgggcaaaggaaagaaggggcagaccaacaccacccagcaaaaaccccgacgaacgcg

SEQ ID NO: 39067 - RNA, 84 nt, Homo sapiens
acccggagaaccccacggagaaccagagggaccggaaccccccggacgacagagacagggcaggccggccaagggcagccacag

SEQ ID NO: 39068 - RNA, 76 nt, Homo sapiens
gagaaagcaacccaagcaagaccagcagagaggaaaaacacaacccaagaaacggagggagaacaaaacagaagaa

SEQ ID NO: 39069 - RNA, 74 nt, Homo sapiens
aaaaccgccagaagccaccccagcagggggcagcaccgaagagggaagaggcaacaagaggcaaaggccaggca

SEQ ID NO: 39070 - RNA, 70 nt, Homo sapiens
agggccgccacaaaccccaggccccaaacagacggaccagagacgcagccaccacgacagcagggacagg

SEQ ID NO: 39071 - RNA, 81 nt, Homo sapiens
gcaacaggacaggccaaaacggacccacaaagcagagcccacagacaaggccaaaggcaaagcgcacagaggggcccaggc

SEQ ID NO: 39072 - RNA, 70 nt, Homo sapiens
ggcaaagcacagacaggagaaagaagacagccacagaaagcgcaccaagcccgaggaaacaaagaaaaaa

SEQ ID NO: 39073 - RNA, 65 nt, Homo sapiens
caagggcgaaggagccggcccaaggccggcaagaagccaacggagaaccaaggccaagaccagaa

SEQ ID NO: 39074 - RNA, 76 nt, Homo sapiens
acgccaggacgagcagagccccccccaccagaggacgggaggagcagcaacagggaggcagcagagcaggaaaacg

SEQ ID NO: 39075 - RNA, 56 nt, Homo sapiens
cagagcagcccccagccagccgcgagggcgggccagccaaagaggccagaagagga

SEQ ID NO: 39076 - RNA, 74 nt, Homo sapiens
gaggccacagacaccgaaggaaggacccaaagacaggaccacgcaccagcagagaaggaaagcaaaccgaagca

SEQ ID NO: 39077 - RNA, 64 nt, Homo sapiens
cacaacccaaacccgcccggggcccaccagggaggaagaggcaggcgcagcagagagagcagag

SEQ ID NO: 39078 - RNA, 99 nt, Homo sapiens
ggaacaacccgcgcccaggccagcgccccaggccaagagggacccacccggcggagaagacagcacggggagcccacaggccaccacccggcagaggag

SEQ ID NO: 39079 - RNA, 80 nt, Homo sapiens
cgaagagccggaccaagcgccagcacgacgacaccaaaaagaagagacagcccaccaggggggagggggagcaaaagcca

SEQ ID NO: 39080 - RNA, 70 nt, Homo sapiens
agggaaagaagaacacagcaggcaaacaggaaaaaaagcggaaaggacacgacaaccaaagcaaaagaag

SEQ ID NO: 39081 - RNA, 52 nt, Homo sapiens
gcaaaaacaagacggggcgccccacagaggggcgacgaagaaagaagccaaa

SEQ ID NO: 39082 - RNA, 66 nt, Homo sapiens
gacccaaagcacaggaaccaccgaaagcggcgcaacgagacgaaaaagagccacgcccccacgagc

SEQ ID NO: 39083 - RNA, 71 nt, Homo sapiens
cggaaggcggaagccggaccaagaaacaggaccagaggcgcagccagcagggaagcggacagcaagacagg

SEQ ID NO: 39084 - RNA, 72 nt, Homo sapiens
aacgccaagaggggagcgcccccagcgcaggaaacacagacaccaccacgaccaaagaaaagccggacgcgg

SEQ ID NO: 39085 - RNA, 77 nt, Homo sapiens
gcagaccaaaagacgcaaggaaagccaaccagacaacagcgcccccagcgagcagacacagggaggggcaccacgac

SEQ ID NO: 39086 - RNA, 79 nt, Homo sapiens
acgcagagaagaaacacggcaaaaagaaaaaccagcgaagcacagagcgggagcgcggagggggcgggcacggaagcac

SEQ ID NO: 39087 - RNA, 51 nt, Homo sapiens
ggcggcgggcgagcccccaacagcgaccacccacccagggcccaaaaccgc

SEQ ID NO: 39088 - RNA, 77 nt, Homo sapiens
ccggcccaaacaaacggacgaacggacgcgcgaggcccaaagacaacaggcccccccgccccccgcggagccccgcc

SEQ ID NO: 39089 - RNA, 57 nt, Homo sapiens
gcccaccggaaggccaccccgcaggcaccagaaggccagcggacaaccgacgaggcc

SEQ ID NO: 39090 - RNA, 72 nt, Homo sapiens
agagcccgcgccggacccccagcacaggcccacaggggcccaggcccaaccacgcaacggggggagacccgc

SEQ ID NO: 39091 - RNA, 65 nt, Homo sapiens
gaaaaagcggaaaaagggagggacaagagcagcaccaagcgcaggacaaaccggcgaccacacac

SEQ ID NO: 39092 - RNA, 79 nt, Homo sapiens
agagccccaggacaaacaagaaggcacaaagagcacacggaacgccagggaaggaccaggacaaaccccggacacaacc

SEQ ID NO: 39093 - RNA, 73 nt, Homo sapiens
aaagccaagcaaaaacccagccaaaccagggaggaaacagaagacagccgaaccaagggcgacaaccagagac

SEQ ID NO: 39094 - RNA, 102 nt, Homo sapiens
cgcgcgcccggccaagaggcaaaggggaggacgcagcaaaccaccagaaggaacccaagacagaccaggagaggagcagccggaaagcaacgagacgaacaa

SEQ ID NO: 39095 - RNA, 78 nt, Homo sapiens
ccacgggccccagcagcccaggcaggagccgacacggggcccgagagggacgcaacccggccagagaggcaaacccag

SEQ ID NO: 39096 - RNA, 37 nt, Homo sapiens
cagaggagagaaccacagccaggcaagacaggccaac

SEQ ID NO: 39097 - RNA, 77 nt, Homo sapiens
aaagcaccgcgaagggggcaaggccgggcgggggcacagccaggggcgggccgcgacaggccacacgccaagcgacc

SEQ ID NO: 39098 - RNA, 74 nt, Homo sapiens
ggaaaaagcaaaaccgaacacgaccagcccaggcacccaaagcgcaagcccgcccccgagcaaccacgcacagc

SEQ ID NO: 39099 - RNA, 87 nt, Homo sapiens
ggagcccagggaagcagccgaccagccgcggagccgggggcagggaccaagaaaggcccagggaccaaagcccggacaaggcccgag

SEQ ID NO: 39100 - RNA, 62 nt, Homo sapiens
cgcgcacgcccaccaccagccggaaaagagaaacaacgagaggccagcaggaagacacacac

SEQ ID NO: 39101 - RNA, 73 nt, Homo sapiens
gacgcgccgccccggaaccaacaacggaacccaacgcccaaaacccgcccgaaaagagccccccccaccaaag

SEQ ID NO: 39102 - RNA, 71 nt, Homo sapiens
agaaggaccaagaaccagcaaagaacagcgaacgacaagaggagaggaagaagagaagaagaggaaacggg

SEQ ID NO: 39103 - RNA, 77 nt, Homo sapiens
cagcaaaaaggagacacggaacaagagcgccagacggaacccagagcgaagcacaaaagaaaagaaaagacacacaa

SEQ ID NO: 39104 - RNA, 77 nt, Homo sapiens
ggcagccggggcggaagaggcggcggccccgcgggcgccagcaggcccggggcgcccgggagacgccacacggccga

SEQ ID NO: 39105 - RNA, 75 nt, Homo sapiens
gccgaaaaacccccccggcaacgccaggaaggacgagcccccgcggagacagcccgaagaacccgaacgcaagcg

SEQ ID NO: 39106 - RNA, 96 nt, Homo sapiens
caaccgcccaggaaacagcccaaaaccgccgcgcgcgaccaaagcgaaggaagaggacaccccaagacaaaacagccagggggaaaaagacgcgcc

SEQ ID NO: 39107 - RNA, 85 nt, Homo sapiens
ggggcggggaggagacggcggaaaacggagagacggggagaacaggaggcaaagggaccccaagaaaccaaagggcaagagccgc

SEQ ID NO: 39108 - RNA, 56 nt, Homo sapiens
caccggacaccgagggcccccaaaagagaaccaacagcccagcagacagaagcaca

SEQ ID NO: 39109 - RNA, 51 nt, Homo sapiens
gcaaccagaaagccaccaacaaccaggacagcagcccggcacagccacaaa

SEQ ID NO: 39110 - RNA, 79 nt, Homo sapiens
cacagaacaacaacgacagaggcagacaacacaaaaggcagaccgaaaagggcggaaaaggaccaaggcccgcaaaagg

SEQ ID NO: 39111 - RNA, 77 nt, Homo sapiens
cagccacgcagacggaaacaaggcaacagaaagagcaacagcagggcaacagaaaagacggggacgagcggcagacc

SEQ ID NO: 39112 - RNA, 61 nt, Homo sapiens
acgaggcggcgggcggagacaggaccgcggcgagcaagggcgaaccgaccaagaacaacac

SEQ ID NO: 39113 - RNA, 75 nt, Homo sapiens
acggacggccaacaagacgcacccgccaccgggaccgacgggcacgggggagagggaagcaaaaaaagccaacgg

SEQ ID NO: 39114 - RNA, 67 nt, Homo sapiens
ggacgcacccagcgccccaggccacgcgccccacagaagagagccacaagcgaaaagagcgaggaag

SEQ ID NO: 39115 - RNA, 74 nt, Homo sapiens
gaaggaccaagaaccagacacgaacgcgggaggagaccaaacccgacaaggcaggccacagagggacagaacgg

SEQ ID NO: 39116 - RNA, 78 nt, Homo sapiens
gggaaggcgcgaggaggaaaggaggacgagcaccgaggagcaacacccccagggagcccagaccgacaggacgcaagg

SEQ ID NO: 39117 - RNA, 88 nt, Homo sapiens
caggaaggaggagagaagggcaagggccaaaagagggaccaagaaaggcccagggaccaaagcccggacaaggcccgagcaccaggac

SEQ ID NO: 39118 - RNA, 68 nt, Homo sapiens
gcgaagaaaagcggggcacaaaaagacacaacagaaagaggaccgaccgagagcgacaaagacgaaga

SEQ ID NO: 39119 - RNA, 68 nt, Homo sapiens
gacagccacaccccaagaggaacacgccgccccacccgcaggagacagcaaggaccaggggaaaaacc

SEQ ID NO: 39120 - RNA, 62 nt, Homo sapiens
ccagggcaaggcccccccgggaagcgacccggaccgccgcgccccccaacgaccaggcccca

SEQ ID NO: 39121 - RNA, 40 nt, Homo sapiens
aacgcaggaaggagaaacacagacgccacccagagcagcc

SEQ ID NO: 39122 - RNA, 58 nt, Homo sapiens
agaagagacgccccccgcggacccggggcagaccaggaaacaggccgacagcggaaaa

SEQ ID NO: 39123 - RNA, 86 nt, Homo sapiens
acgggagcggcccgcacaccgagccgcccggagaggagcccggccccgacccagggacggaaaaggcgcacacgacccggagaacc

SEQ ID NO: 39124 - RNA, 77 nt, Homo sapiens
ggacccccagaaggaacggagacaaaaacggcccggagaggagaaaagagccgagggagcgaaacagaggggacaca

SEQ ID NO: 39125 - RNA, 74 nt, Homo sapiens
acagggggcgacggaaagccgggcgcggcgagcgcgccagacacaccgcggcgcgcgggagcgcacgggcgcag

SEQ ID NO: 39126 - RNA, 64 nt, Homo sapiens
aaaacaagcccagggaaaaggagaccgcgcccagcccacaccagacaccccggggcaagcggac

SEQ ID NO: 39127 - RNA, 57 nt, Homo sapiens
gcaccgcgcggcgcccgcccagggccccggaggccgccagcagagccgagcagcggg

SEQ ID NO: 39128 - RNA, 79 nt, Homo sapiens
aaccgcaaagcaaagacaagaagagaaaacccacagaagaaccgcagacgagaagacggaacagagagagcaaggggag

SEQ ID NO: 39129 - RNA, 57 nt, Homo sapiens
gacacccaagacaagacagcgcaaggcagaaagccaaggacacgcaggacgaagaag

SEQ ID NO: 39130 - RNA, 86 nt, Homo sapiens
ggcgcagaagggagaggggagcgacccggggaccgaccggggaccccgccgaagagaaaagaaacgaagccgggcacggacaggac

SEQ ID NO: 39131 - RNA, 41 nt, Homo sapiens
ccccggagaccccggccacgaccgggcccccagcagccaag

SEQ ID NO: 39132 - RNA, 78 nt, Homo sapiens
ggagaaggaccaagaaccagaagccgaggccgccagcgccaagaaaaaaacaaggccaaagccagccccagaaacaga

SEQ ID NO: 39133 - RNA, 78 nt, Homo sapiens
ggagagagaaaggacgaagcgccaagaggagccagaggcaggcggcaccaggacgccgaaaagcgaccggacgcaggc

SEQ ID NO: 39134 - RNA, 81 nt, Homo sapiens
caaagggggcccaccagcgcaggccaggggaaggcagagaccgcagaaggcccaggaaacgagggcaggaaggaccaaaag

SEQ ID NO: 39135 - RNA, 76 nt, Homo sapiens
ggagcccgaacccccccgcgccgggagccgggcccgaccagaccgggcaggcgcaaaaaccagacaccccacacca

SEQ ID NO: 39136 - RNA, 85 nt, Homo sapiens
gccacgaggaaggcccggggggaagcggaccagaggccgggaggcgaggaaaccgggcaccagacacgaaagagcagaaggcaaa

SEQ ID NO: 39137 - RNA, 54 nt, Homo sapiens
gagacaggggcccaagaaaaagcaccggacacgaccacagcggaccgcccccca

SEQ ID NO: 39138 - RNA, 77 nt, Homo sapiens
ccagccaacgagaaaacaaacaagcggccacccgaaagaaagagcccgagaacgcggacaacgaagaggagcagacg

SEQ ID NO: 39139 - RNA, 80 nt, Homo sapiens
ccgccgggagggccacaggaggcggcgggccccgcccgccgaaggcccccagacaggccaacaagggccccaggcagagc

SEQ ID NO: 39140 - RNA, 75 nt, Homo sapiens
cagaaaaaaagcccacaaagccagacaacgcccggaacggaaaaccgagacaagccacaccccagagaagcgaaa

SEQ ID NO: 39141 - RNA, 75 nt, Homo sapiens
gaaggcaacacccaacccgaagcgacgcaaggaaacacggaggggagaagggggagaaagccaccacacaaccca

SEQ ID NO: 39142 - RNA, 71 nt, Homo sapiens
gaggggaaagcaaaagaaacagagcagggacagcacgcagcgaaggagccccgacgcggcacaagcgaccc

SEQ ID NO: 39143 - RNA, 76 nt, Homo sapiens
ccaaaagaagaaagggccagaccggggagcaagcaaaagaggaagcagcgccagcagcaaaaacggagcagaaagg

SEQ ID NO: 39144 - RNA, 69 nt, Homo sapiens
ccgaccccaaagagaaacaaaggaagaagacggccaagcagccaggcagcgcgcagaaccggccgaaaa

SEQ ID NO: 39145 - RNA, 81 nt, Homo sapiens
agaagaaaggacgacagccagagagggagaggcgcgagcgaggcacgagagaagcccgcccccagagaaaaggcgggacag

SEQ ID NO: 39146 - RNA, 77 nt, Homo sapiens
cccccggcggcacgcccagcaccaccccgggagcgggggggccccacaacaaaagaccagaagagccacacacgggg

SEQ ID NO: 39147 - RNA, 85 nt, Homo sapiens
ggcgacggcaggcgaccacgccacgcccggcccagacggagcggacagacggaagaagaagagcacagcgccggagcaggcccag

SEQ ID NO: 39148 - RNA, 67 nt, Homo sapiens
aacagggcgcggaaaagaggcggaagacacaaccagaacacagcaggggagaagcgccacgcaccaa

SEQ ID NO: 39149 - RNA, 83 nt, Homo sapiens
ccagggacaccagagagaaggccgacagcacgccaggaaagagagaagaaaaccgaacaacaaaccagaacaagagagacgac

SEQ ID NO: 39150 - RNA, 87 nt, Homo sapiens
gagcaagcggccgcgcacgaggaggcggcggccgacggggcggcgggagcagaacaccccaccagaccacccagcaagcccacaaaa

SEQ ID NO: 39151 - RNA, 83 nt, Homo sapiens
agacgagaagagaagggagcaccaggagacgccagaagaagggaccagggccaagagaagaagagcaccccccccagcaggca

SEQ ID NO: 39152 - RNA, 86 nt, Homo sapiens
ccgaagagggagaacaaaacagggcaggccagcaggagacacccccagcaggaacaggcgggccagaaaagaagaagccagagaag

SEQ ID NO: 39153 - RNA, 79 nt, Homo sapiens
cacgcaggcgccccgggaaacgcaaaaaggaaaaccaacggcccggaggaccacagcccaggggccccaggcgaaaccc

SEQ ID NO: 39154 - RNA, 64 nt, Homo sapiens
ggcgaggccccagaccacacgaggaaagagcaaccaaagcccagaacccgccgagagccgcaaa

SEQ ID NO: 39155 - RNA, 84 nt, Homo sapiens
cagaccagcagccagccggcggcacaagcgaccaaacgacccccgcggagacagacgaaagcgaaaagaaacagaaagagacag

SEQ ID NO: 39156 - RNA, 90 nt, Homo sapiens
ggacgccccggagacaggaagggaaagagagcaaggggaaggacgggagacacagacacaccgaacggcgcccgacccagcaaaccaaga

SEQ ID NO: 39157 - RNA, 84 nt, Homo sapiens
gcgggagaggcgagcagaagcaggaagggcaaggaccggcaaagccgaagagaacagcacagcaggccgcgggccggagcccac

SEQ ID NO: 39158 - RNA, 65 nt, Homo sapiens
aggagcccaagggggcccgagaaagaacaaaccaggggagggaaacgagaaaaacgacgccagcg

SEQ ID NO: 39159 - RNA, 78 nt, Homo sapiens
cagcccgccgcgcgcccgacgccccgcgggaccccccgccggaccccacagcaacaagggacaggacaggagagaaaa

SEQ ID NO: 39160 - RNA, 71 nt, Homo sapiens
agagagcggaaaacggcgcagccaacaagggggagaggggggaccgggcgaggcagcagccgcccacgagc

SEQ ID NO: 39161 - RNA, 80 nt, Homo sapiens
ccacccagcccaaaagacgacacgccccacaggcgggaggaaaggaggggacagagagaagacggcccagcagagcaccc

SEQ ID NO: 39162 - RNA, 61 nt, Homo sapiens
gacagagaagaaggcgcgcaccggaaaagagccccggaagaaggcaggcaccagaacgaaa

SEQ ID NO: 39163 - RNA, 62 nt, Homo sapiens
cgcgccggaaaccggagcgcgcagcaggccccgggggcgccgagggcacaagggcaacgaca

SEQ ID NO: 39164 - RNA, 67 nt, Homo sapiens
acggaaggaccaagaggaccccaggccagacaaacaagagcagcacaaagggaaggagcaggcaagg

SEQ ID NO: 39165 - RNA, 77 nt, Homo sapiens
aggaacgcaaacagaacagaacaaagggccgaggccaaccagaagagcacagaagaggagggccgcaaccagcgaaa

SEQ ID NO: 39166 - RNA, 74 nt, Homo sapiens
gccagccgcacgcagaagggcaacaaaagaaacagaccaaaggcaggaaacacgagccccaccaaagcaaaggc

SEQ ID NO: 39167 - RNA, 81 nt, Homo sapiens
gcgaggggacggagccggacaggagccgccgccgccaacagggcaggacccgaggcgccagcagcagcaagaccgggggac

SEQ ID NO: 39168 - RNA, 75 nt, Homo sapiens
ggcggaagaccaagacacgagagagagaacccaagagaggagaggaacagaagaagaaacaaacagaggcaccga

SEQ ID NO: 39169 - RNA, 80 nt, Homo sapiens
ccgcgggagggaaaaggccagaccaaggccgcaagagagaggggaaagcgccgcaggcgccaaaaggaaacacggaagac

SEQ ID NO: 39170 - RNA, 70 nt, Homo sapiens
cacagccgggagaaggcccaggcacagccggagacaaaggaaccacccagaggcacaggaagcggagcga

SEQ ID NO: 39171 - RNA, 69 nt, Homo sapiens
cacaacagggcacaaaaagaacccaccaggcaggagaccaacggaaggccgaccgggacaagcaggagg

SEQ ID NO: 39172 - RNA, 69 nt, Homo sapiens
cacgaccccagccaaggagacacacacaggggcgcaagacagaaaaacaaccaccagcgagcaaaaagg

SEQ ID NO: 39173 - RNA, 79 nt, Homo sapiens
cggacggaagccgggaccgcagggccaagacaccacccaagcccggccccgacaagggaccgggcgggccccgcaggaa

SEQ ID NO: 39174 - RNA, 63 nt, Homo sapiens
cggcccacaggggggggcaaacccgagagaacggagggcggaagccaccaaaaccagggaaac

SEQ ID NO: 39175 - RNA, 73 nt, Homo sapiens
accaacagacaagccaaacggcaaggaacacagagagacccaaagagacagagaacccccaagcccagaaaag

SEQ ID NO: 39176 - RNA, 81 nt, Homo sapiens
acaagggcacacccaggcgcggaccacgggggcgacggaccacaagacgcacccacagagaaagacagcaaagaaaaggag

SEQ ID NO: 39177 - RNA, 85 nt, Homo sapiens
agaagggccaggagaggagcacgaggacaggccccgacgaggacacagccccgcaaagggaacaggaagcagccacggaggggac

SEQ ID NO: 39178 - RNA, 68 nt, Homo sapiens
ggaacagggacaccaacacagagagacgggcacccggagccaacaccagaggacacacaccccgacaa

SEQ ID NO: 39179 - RNA, 53 nt, Homo sapiens
gccaacccccaaagcagaacaggcacaaggaaagccaaaaagccagggggaca

SEQ ID NO: 39180 - RNA, 71 nt, Homo sapiens
ccgcaccgggacgcggcgaaacgaggccaggagaagccccggagagagggccgaccaagcagaacccgaga

SEQ ID NO: 39181 - RNA, 70 nt, Homo sapiens
gaggacaaccgaggggaggaaggaggacaaaaaggggaagaaagccgaaggagaaaacaccccgcacgcc

SEQ ID NO: 39182 - RNA, 75 nt, Homo sapiens
ggacgcggcgcgcgaccgacacgaaggccacaagcccccccggaacaccggaagaagacaaaaagaacacaaacg

SEQ ID NO: 39183 - RNA, 79 nt, Homo sapiens
cccagacacacggcggcacacgcagaccgcaccaggagacaaggacgacccgagaggaggagggaaagggggcaaggcc

SEQ ID NO: 39184 - RNA, 86 nt, Homo sapiens
cgcgaagacgcgggggccgccccccgacagggcgggaccaccaggagcagagcggaggccaccagcccaacaccaccgggaagcag

SEQ ID NO: 39185 - RNA, 51 nt, Homo sapiens
ccaccgcccgcacggcggcgcgcgagccccgcagcgaaacagcggaagaac

SEQ ID NO: 39186 - RNA, 61 nt, Homo sapiens
ccgcagaaggccggagacaccagcagggacagagagggaaagccggcccacgagaccccaa

SEQ ID NO: 39187 - RNA, 72 nt, Homo sapiens
cgagcccaggagcgccacgcgcggaaggcagcgcccagcagcgcaggaggcgacgagacggagacagcaaac

SEQ ID NO: 39188 - RNA, 81 nt, Homo sapiens
cagaggaaaccagacccggaggaacggaccagagagaccccggagggcccaacaaaagaacccgaagaggagagaccggag

SEQ ID NO: 39189 - RNA, 79 nt, Homo sapiens
aagcacaaggacagagcacccaccacaggagacgcaaaacgaagaagcaaggccgacaacacgaggagaccaccaaacc

SEQ ID NO: 39190 - RNA, 42 nt, Homo sapiens
agaccagccgggcagcaaaacagagaagcagaccaaaggagc

SEQ ID NO: 39191 - RNA, 44 nt, Homo sapiens
gcgaagcaggggccgcgggaaggcaggccagaaagcagacccag

SEQ ID NO: 39192 - RNA, 89 nt, Homo sapiens
agcaggggcgggagagccccgcagaagacgccgacgagccccaacagcaaaggcgagaaacacaaaaggagaaggaggagcggagaggc

SEQ ID NO: 39193 - RNA, 72 nt, Homo sapiens
gagggaggagggagaacggccaaggaagcagagaagccaagacaagaagcggagaagcgagagaaacacagg

SEQ ID NO: 39194 - RNA, 85 nt, Homo sapiens
cggcaccgcagccgaggagcgccgagggcccaccgccagagaccccagccgacgggcccgaaaagcaaaggcccacccaggcaca

SEQ ID NO: 39195 - RNA, 84 nt, Homo sapiens
cgcagcccgcggagccgggccgggcgccggagccgcgccccaccccgccagcccagagccacgggaaaaagaaaagggcgaaga

SEQ ID NO: 39196 - RNA, 57 nt, Homo sapiens
cccaacggcaagccaagccaaagacccgagccaaagggaacaaagagcagaagaccc

SEQ ID NO: 39197 - RNA, 93 nt, Homo sapiens
aaggcgcagcagaggggccacgcgggcccgaggcgcaccaagggcgaaggagccggcccaaggaccaggcaggcgggcagcggcagcagcacc

SEQ ID NO: 39198 - RNA, 65 nt, Homo sapiens
ggccaagcgcgccaggacgaaaaaagccacgaggcgacagggccaggccaccaagccagaagaga

SEQ ID NO: 39199 - RNA, 68 nt, Homo sapiens
acccacagaaaagaggagagcacccagacgcgagaccccgaagagcagggacacagcagcaagaaaga

SEQ ID NO: 39200 - RNA, 66 nt, Homo sapiens
caggagccgaagccaagggccggaagaggggagccccaggacagagcgcagaggaacagcaacccc

SEQ ID NO: 39201 - RNA, 85 nt, Homo sapiens
gggggaaaaaacccaaggcgcaaagcgaaccagccggccgacgaggagcagggcccccggacgcacaccacaagcgacgacgcac

SEQ ID NO: 39202 - RNA, 58 nt, Homo sapiens
gacgaccccgaacccaggacagcaccaggcccaggacagcacgagaacagaggccggg

SEQ ID NO: 39203 - RNA, 72 nt, Homo sapiens
ggccccagcaacacagcaccggggagacacaaagcaccagaagcacaggccccagacccgaccgccgaacca

SEQ ID NO: 39204 - RNA, 71 nt, Homo sapiens
cgaaacaacggagagacaacaagggccacggacgcgccaacccaaacgagcgagacacacagaaaggaaaa

SEQ ID NO: 39205 - RNA, 69 nt, Homo sapiens
caacagcccaagcagccggggaaggcaacacacgaaaaccggcaacgagaagagacagaaaaagaaaac

SEQ ID NO: 39206 - RNA, 77 nt, Homo sapiens
aaagagaggaacggggggagagaacccaaccagggggaaacacagaacgcaggccgacaagcaccgccaaagaagcc

SEQ ID NO: 39207 - RNA, 81 nt, Homo sapiens
gggaccgcccaccggcggccacgcaccgcgcgaagacggaagacgcgcccgcgccgaggcaggaaagggacacagccggcg

SEQ ID NO: 39208 - RNA, 68 nt, Homo sapiens
caaggcaacgcaagccccaacccgcgcgacaagccaaacagcagaagcccgccgacacagccaccaag

SEQ ID NO: 39209 - RNA, 80 nt, Homo sapiens
caggaagagacacgcgacggcaaccccaagcgacccggcccacggacaacacgcacccaggaccaaggcagcagcgcagg

SEQ ID NO: 39210 - RNA, 77 nt, Homo sapiens
gagccagcccagggccagggagcaggagccagggccgagcacgggaacaaggaccagaaggacccaaggacgaaggc

SEQ ID NO: 39211 - RNA, 82 nt, Homo sapiens
aaggcagcaagggggcccggacggcacacccacgaccggccaagggcgccgaccaggccccaggagaaggaagggaacccaa

SEQ ID NO: 39212 - RNA, 73 nt, Homo sapiens
ccgcggggaaccaccaggacccagcaggccccagaaagaccaccaggagcacacggagaagaaaaagcagaaa

SEQ ID NO: 39213 - RNA, 68 nt, Homo sapiens
ccagggaaggcaccaaaagggggggcaggaaagcggccgcgagaaccgggcagagcagcccggcgcac

SEQ ID NO: 39214 - RNA, 39 nt, Homo sapiens
ccccagagagcggaaaacaggggacaacagagccgacac

SEQ ID NO: 39215 - RNA, 79 nt, Homo sapiens
aaggaccagagaaaaggcacagaacagaccggaaggaaacacaaaagagccaaaagaccaaaccaggcacaagcccccg

SEQ ID NO: 39216 - RNA, 77 nt, Homo sapiens
gcgagaccccacccgcagcagggcgacaggccacggggcgcgcaggccgaggcgaggccagggggggccgcggccac

SEQ ID NO: 39217 - RNA, 60 nt, Homo sapiens
ccacggacaagaaccaagagcagaacccggcaaacgaagcacggcaggccaccagccggc

SEQ ID NO: 39218 - RNA, 70 nt, Homo sapiens
agacgggagcccggagcgcggggcggagaacggaaaagcaccaggaagcagagaggaccgcagaagggaa

SEQ ID NO: 39219 - RNA, 78 nt, Homo sapiens
agaccgcaggggaagcgcagcacgcaccaggagacccaagcgggcagccggacaacagaccgcaccggcgccccgggg

SEQ ID NO: 39220 - RNA, 72 nt, Homo sapiens
cggaccgacaggcacaaccccaggccccaaacgcagaaggcccacagaaaagacagggcgggaccaccagga

SEQ ID NO: 39221 - RNA, 82 nt, Homo sapiens
ggcagaccggccagcaagagagccgggaaccagccacaccagcggacagccaccaagaggccagaaggcagaacagcgacac

SEQ ID NO: 39222 - RNA, 78 nt, Homo sapiens
cagcggagggggaggacgcaggacgcacaggagagcaaccgggagaagaggcacaaggacaggcacagagaacagaac

SEQ ID NO: 39223 - RNA, 65 nt, Homo sapiens
cgcgacgcaaaacagccgcaagcacgagagcggccaaccaaagcggcgaaggcccaacaagaggg

SEQ ID NO: 39224 - RNA, 76 nt, Homo sapiens
acgcacagaaagcgccaccacagggccccgacgcccagaggagaaggagaccaagccgggggagcacagacacggg

SEQ ID NO: 39225 - RNA, 89 nt, Homo sapiens
agaaagcaggcgaacccgcggcgcaaaacggagcagcaagcagagacagagaacgcagaacagaagggaagaccaaaacgagagaaacc

SEQ ID NO: 39226 - RNA, 72 nt, Homo sapiens
gaacccacggagggacccacccaaaaggacgcaaagaagcccccagccaggccaacgaaggggaagacaggc

SEQ ID NO: 39227 - RNA, 86 nt, Homo sapiens
cccggcccggcggggccgacgagccggaggggcgccgcgggagcccaccgggacaccgacccaagcccagcagaagccaacagacg

SEQ ID NO: 39228 - RNA, 78 nt, Homo sapiens
cggacaccaggcaggccagagcagcaccaggccagagccagaacacaccgggaaccccaagaggaacagcagggaagg

SEQ ID NO: 39229 - RNA, 77 nt, Homo sapiens
gcaggggcggcgcggcgcgggcggcggggcccacggacagaaggcgacacaggcagaggaagggacaaaagagagaa

SEQ ID NO: 39230 - RNA, 70 nt, Homo sapiens
ggacaacgcacaaccaccgcgaacgccagcccagaacaaagcaggccacggaaggagcacacaaaacaag

SEQ ID NO: 39231 - RNA, 53 nt, Homo sapiens
ccccacccacgcgaacgagagggacacggagcaggcccccccgagaaaagaga

SEQ ID NO: 39232 - RNA, 70 nt, Homo sapiens
aaaagcaaacacacgcagcagcaaagaagggcagagacacggagcaacaagccccgacacggggaagaaa

SEQ ID NO: 39233 - RNA, 72 nt, Homo sapiens
cgcgacacgaaccggagagcaagggagacccacaggaccgcgaacaaggaggccacaaaacacccggaccca

SEQ ID NO: 39234 - RNA, 78 nt, Homo sapiens
cgcggaggacagagacaagcggacaaaagggcagcaacgcccacggaccgagaaaagacccagagggggcacagaaca

SEQ ID NO: 39235 - RNA, 79 nt, Homo sapiens
aagaagaagcacagaaaaccgcagaacgaaagccaaggacacgcaggacgaagaaggaggagagcccagaagaaaccaa

SEQ ID NO: 39236 - RNA, 76 nt, Homo sapiens
ccagagaagcaaaggaaagcgcggggagagcagggacccacagcccggcgaccacggggaaccgaggcagaagcga

SEQ ID NO: 39237 - RNA, 50 nt, Homo sapiens
cgccaccccacaccggagagcgaggaagcaagaaagccgaaagaaaaccc

SEQ ID NO: 39238 - RNA, 79 nt, Homo sapiens
ccaagggaaaagcagagggcacgcagcaagcaaacagcagcgcaagggcagcagaacaggagcagggaaggaaaaggcg

SEQ ID NO: 39239 - RNA, 71 nt, Homo sapiens
ggaacaaggaaacaacggaaaaggccagaacccgcccaccacagcggagaagagaacccgaccgaagaagg

SEQ ID NO: 39240 - RNA, 99 nt, Homo sapiens
gaggcagagaagcgaagggggcggcgagacggggggagcccacccgggcgagaaaggggacaccggaaccgccacggacaagaagaagcaaaagagcgg

SEQ ID NO: 39241 - RNA, 81 nt, Homo sapiens
agcagcaaagaaggcacggaaagagaggaaagggcacacggcccgaacaagggaacaccagcacagcggcagaagcaaggc

SEQ ID NO: 39242 - RNA, 54 nt, Homo sapiens
aggagccaagcaaacagaagcgcggccaaggaagggaaaaggccgaggcacagc

SEQ ID NO: 39243 - RNA, 33 nt, Homo sapiens
cccacgacaaaaagagggacgaaaggcaaaaca

SEQ ID NO: 39244 - RNA, 82 nt, Homo sapiens
gccgccaggaaggaccaccgaggcgcaggggcggagggggcggggggaagcgggagaggccacccgcccacgagcggaagaa

SEQ ID NO: 39245 - RNA, 74 nt, Homo sapiens
gacgcaggaggaggcccaccgcagcggcccaaggaagccaaggcaacgccagcgggcccgccaacccgccacgg

SEQ ID NO: 39246 - RNA, 79 nt, Homo sapiens
ggaaaaaacgaccaagccagagaacagcccccacgcagcccagaaggaggccagagggaagcaaagcagccaacaccag

SEQ ID NO: 39247 - RNA, 76 nt, Homo sapiens
acgaacaacacaggaccaggaaaggcagcaacaggggaagcggagggaggcaaagaagccaaaaaaaccaaagggc

SEQ ID NO: 39248 - RNA, 86 nt, Homo sapiens
ccgacacaccggcccgggagccccagggaaacgccgcgcggggacaggcaggcaggagaagggcaccggggaggaccgcgcgacgc

SEQ ID NO: 39249 - RNA, 82 nt, Homo sapiens
ccggcgggagaggccaagcgggaccgccagaacaaggaaggagcaagacgagaacaacgacaaaagaaggggcggggcagga

SEQ ID NO: 39250 - RNA, 66 nt, Homo sapiens
ccgcacggcaccccggacgaggaaacacccaggagaagcaggaagcacaaacaccagcccgaacga

SEQ ID NO: 39251 - RNA, 78 nt, Homo sapiens
acgccgcagcagaaagccaagaaccagcggaccaggaacccccgaacgcaaagccaccgacggacaagaggagacgac

SEQ ID NO: 39252 - RNA, 63 nt, Homo sapiens
gggacgccccaggaagcggaccaggcagacgaccaaggagcaggcggggcaggcccaaaacag

SEQ ID NO: 39253 - RNA, 82 nt, Homo sapiens
ggacgcacggcccggcagcagaggcggggcaccaggcccagacggcgaacccgagcaagcaaccaccgcccggcccccaaag

SEQ ID NO: 39254 - RNA, 77 nt, Homo sapiens
ggggggcagcgagacggccacacggccacgcacgcagcgccgcgcgccccgggggcaaaccagccagcacgggggcc

SEQ ID NO: 39255 - RNA, 72 nt, Homo sapiens
cccgccggcgccggggcgcgccgccccagccagggaaacaggccagccacgcagcagcagaagccaggccgg

SEQ ID NO: 39256 - RNA, 52 nt, Homo sapiens
agaggacaagaccacgagccagggcgagcaacggcccaaccaacccccggac

SEQ ID NO: 39257 - RNA, 37 nt, Homo sapiens
aaaaagcgcacacacgacgacggaaggaaaaacaggg

SEQ ID NO: 39258 - RNA, 76 nt, Homo sapiens
aaagacgaccaacaggaacgagaggcgagaagacgcagacccccgacaaaaggaaggcccgaacaagacaggaacg

SEQ ID NO: 39259 - RNA, 79 nt, Homo sapiens
ggaaggagaagcaggagcacgcaggaggcacaaggggggcagaagaaaaagcaggacaacagggcaaggagcgggagga

SEQ ID NO: 39260 - RNA, 73 nt, Homo sapiens
ggcgaagccacaaaggaaaaggaggcaccgcgcgaaaagcccgagaacaacacgggaagagagcgaaaagaac

SEQ ID NO: 39261 - RNA, 72 nt, Homo sapiens
cgagaagaggaacaggagcgccaacaagccagacaacaggccaaagccagggagggccagccccacaagacg

SEQ ID NO: 39262 - RNA, 50 nt, Homo sapiens
cgcagggcgcccccgccagaaacgccgccacgaccggggcaggaagagga

SEQ ID NO: 39263 - RNA, 70 nt, Homo sapiens
cagcccccgccggccgcccaacaccgaacaccgacggaggggcagaagaggccgccgacaccaagccaac

SEQ ID NO: 39264 - RNA, 66 nt, Homo sapiens
ggccagcacccccccccgcaggacagggcccgcgcacgaagagagaaacgcaaagaacaacaaaaa

SEQ ID NO: 39265 - RNA, 73 nt, Homo sapiens
accccccaccaggccggacccacagaagaagaacagggacaacaagccgaaaacaaaaacacaggagagacac

SEQ ID NO: 39266 - RNA, 75 nt, Homo sapiens
cccgcgccgccagcgccgcccccgccaacagagacccagagaacaacacagcagcgccccgaaccccgcccagcc

SEQ ID NO: 39267 - RNA, 79 nt, Homo sapiens
ggaggggcgaagaggacgagggggccaaggcccccggggaaccgaggagcaaggaccgggagaaacgagaccaaggaag

SEQ ID NO: 39268 - RNA, 68 nt, Homo sapiens
gggagagaggacccccccccccccccaaggcacacagagaaaaaaagggaacaaaacacagcaagcag

SEQ ID NO: 39269 - RNA, 71 nt, Homo sapiens
accgagcaaagagcgaaaccagagcaagcagggcaaaaggggggagaaagaagacaaggaaagaacacgaa

SEQ ID NO: 39270 - RNA, 72 nt, Homo sapiens
ccaagaagaggagacagaccgacagggagggagggacggaaacaaagacagccaagagagagggacccaaca

SEQ ID NO: 39271 - RNA, 85 nt, Homo sapiens
ccccggcgggaccgggcggcacgcacgcgggcagggaacaggcggagcggaaggacagagcgggagccaccagcgccaaagggaa

SEQ ID NO: 39272 - RNA, 72 nt, Homo sapiens
agccgaaacaaaccggaggcaggcgaagcaggcacgaacccaagaccccaggaaaacaggaccggagcacag

SEQ ID NO: 39273 - RNA, 69 nt, Homo sapiens
agagcgggcaccccccaaacgacgcagccacggagagaccgcccacaccggcccccagaacggcgaacc

SEQ ID NO: 39274 - RNA, 59 nt, Homo sapiens
ggcagagaaaaccgaggccaacaggacagagaaaaggacagcagcaggacgaacaggag

SEQ ID NO: 39275 - RNA, 79 nt, Homo sapiens
acgagagacaaacgccgaagccaggaacggaggccggaaagagaccgcgcaggcacccagcagagacagcaaccggcca

SEQ ID NO: 39276 - RNA, 73 nt, Homo sapiens
gggcgcacgggaggggaacgggccgaacgcagaccgaagcgccggccagaccaggcgagccgagagagaggac

SEQ ID NO: 39277 - RNA, 49 nt, Homo sapiens
gagcggagaaacggggcggggagaggggagggacaagagggaaagcagg

SEQ ID NO: 39278 - RNA, 39 nt, Homo sapiens
aaagaggcgagagaggggaagacaagcgcacacgcacgg

SEQ ID NO: 39279 - RNA, 70 nt, Homo sapiens
ccacggagcgcagccgccgagggagcacggcccaggcagccaagaaggcagagagacacacaagaaacgg

SEQ ID NO: 39280 - RNA, 71 nt, Homo sapiens
gcgaggaccaaaccagagcagacacagccggagaggcaacggaacacgccgacaaagccagacccacccaa

SEQ ID NO: 39281 - RNA, 78 nt, Homo sapiens
cgacaaggaaagcagccaaacagacccagcccccaacgaggaaggaagggccacacagccagcagccccccaaggccc

SEQ ID NO: 39282 - RNA, 86 nt, Homo sapiens
caggagcaggcccagggcagcagggccgggaccagcagcgccgagcaaaaaccagccgcggaggaggcccaccacaacaccaagca

SEQ ID NO: 39283 - RNA, 79 nt, Homo sapiens
ggcaagaggcgcaaacaagccaacccaggaggaaaaacgcgaaacagaacaccgaacaccagcgggcgaccgacaaaag

SEQ ID NO: 39284 - RNA, 58 nt, Homo sapiens
gaaagaggcgggcagaacacggagcccgagggcaacacccgagaccggcaagagccca

SEQ ID NO: 39285 - RNA, 71 nt, Homo sapiens
ggacacccccaccggcacagccgaggggccccgagagaacagggcaaagccaaggggcccaagaaccagcg

SEQ ID NO: 39286 - RNA, 81 nt, Homo sapiens
gaggaagaacccaagccagagcccagcacacgggggggcccacgaccgagcggccacaagggcgccaacaaggggccaaac

SEQ ID NO: 39287 - RNA, 79 nt, Homo sapiens
cgcgggccagcgacccgcgccagcgcccagggggggaaaccaccgcgaaaagagagccggaggcagaggacaccaaagg

SEQ ID NO: 39288 - RNA, 92 nt, Homo sapiens
gagggacgcggcagaaaggcgacgggcgcggagggaaagagcgaagaagaacaaagaaaccaccgagagagcacaaagcaaaaaaccaacac

SEQ ID NO: 39289 - RNA, 53 nt, Homo sapiens
ggagaagaaaagaccagacacaacaggcacaaagagagaaggaacacccacag

SEQ ID NO: 39290 - RNA, 67 nt, Homo sapiens
caagggaggccacagagacaagagagagggggcgaggaagagacaggcgggggagaagaagcagggc

SEQ ID NO: 39291 - RNA, 75 nt, Homo sapiens
gaaggaccaagaaccagaggcgcgaacagggcccacccgccacgacacaggggaagaagaccaccgcacagaccc

SEQ ID NO: 39292 - RNA, 67 nt, Homo sapiens
ggcgcgacgggccagcccacggcagaaagacggcggaagaggagggggaagcagaccaagaagacag

SEQ ID NO: 39293 - RNA, 97 nt, Homo sapiens
ccgccaggcagaaggccccccgaacagcaggcgccaccagcccggagagccaggccccggggccccagcggcaccagcggagaccacgggagccgcg

SEQ ID NO: 39294 - RNA, 61 nt, Homo sapiens
ccggggacccgaccacaggagccgcccggcaaagcgaaagcgcaggaccgaggagaaggag

SEQ ID NO: 39295 - RNA, 72 nt, Homo sapiens
cgggacgcaagacccggcggacccagagccaaagacaaaccggcgaccacacacggggacgacggggaagcc

SEQ ID NO: 39296 - RNA, 80 nt, Homo sapiens
gccaccccagcccgggccgagccaacaggaccagcagggcgggcaggcccacacaggggagcgcggccacagacgcacag

SEQ ID NO: 39297 - RNA, 87 nt, Homo sapiens
cgcggccgggaggcgggccgcagcgggaccccagccccgccaagcgcggccgccgcccccgcccaggcgagaaccacgccgacaacg

SEQ ID NO: 39298 - RNA, 77 nt, Homo sapiens
acgcggcccgcgaaagggcgcaaaggccacaccaacaagacaagaaccaaacagaacccacgaagggagaccagaca

SEQ ID NO: 39299 - RNA, 81 nt, Homo sapiens
caggcccacccagaccaagggcagaacccaggggagggcccagccacgcgcgaaaaaccccaggggaaacagccaggccca

SEQ ID NO: 39300 - RNA, 84 nt, Homo sapiens
gcagaggcggacacgggacacgccacagcggcaggagcgggcgggagaaggcaagcaggagaagccggagcggcgcgcagacgc

SEQ ID NO: 39301 - RNA, 58 nt, Homo sapiens
ccacaccgacaccacggaggaggcggccggagggaaaagcagacaagagaacaggggg

SEQ ID NO: 39302 - RNA, 60 nt, Homo sapiens
cgccccgcggagcggcgagcaaaggaggggcgcgaaaagccccccgggagcagccagaac

SEQ ID NO: 39303 - RNA, 50 nt, Homo sapiens
gaccaaaaacaggaggaagcccagggaacggcgacggcaccaggacaagc

SEQ ID NO: 39304 - RNA, 91 nt, Homo sapiens
gaaaaacagagcggggccagcgcagcggaggcgagggggcggacgcgcgcagcccgcccgcccggcgaccagcaagacggagccaccgcgc

SEQ ID NO: 39305 - RNA, 35 nt, Homo sapiens
caagcccaacgccgaaagacaagcaacgaaagccc

SEQ ID NO: 39306 - RNA, 77 nt, Homo sapiens
aaaaagcagacaacgaggagaggacggggaccaaaggcacaggcgggagcagcggaagacaccaaggccagggaggg

SEQ ID NO: 39307 - RNA, 73 nt, Homo sapiens
gaagccggaccggggcccagcaaagccaaaggaaggaccaggccgagaaacagacaacccacagaacaaagcg

SEQ ID NO: 39308 - RNA, 57 nt, Homo sapiens
gacaaaagagaacaaggccagggcgcagggagcaggagaagcggagcgaaggggcgg

SEQ ID NO: 39309 - RNA, 80 nt, Homo sapiens
gagagaggacgggaggaaaccagacggggaagaccgccccaccggagagggccggcacgagaagagagcaggcgggaggc

SEQ ID NO: 39310 - RNA, 73 nt, Homo sapiens
ccacgacacaagaaaccggggagcaggcgcagcagggccaccagcaggccagccacgggcagcccaccccggg

SEQ ID NO: 39311 - RNA, 77 nt, Homo sapiens
aacacagcaagagcaaacacagaagggaagaacaaggccaaggcgaaaaccacaaagccaccagccgcccacggaag

SEQ ID NO: 39312 - RNA, 61 nt, Homo sapiens
aagaaagcacgggccgcaggacccggacacgaagacgaaaccagagggagggcccgcagga

SEQ ID NO: 39313 - RNA, 76 nt, Homo sapiens
gcccaggccgccaaggagcggaaggcgggagccagagacgaccccagcaggcggaggaccccagagcaccaccacc

SEQ ID NO: 39314 - RNA, 71 nt, Homo sapiens
agaaaccgaagagaaaggccaacgagaacaagcacagagagcggaaccgcaggggaagccccagaagccga

SEQ ID NO: 39315 - RNA, 62 nt, Homo sapiens
agggcccaggcgaaaaccgaaggccgcggaaagggagaagcccggacagacccagcgcccag

SEQ ID NO: 39316 - RNA, 52 nt, Homo sapiens
gcaaacccggcgcccagagacccccggccgcccaggagcgaggggagggaca

SEQ ID NO: 39317 - RNA, 65 nt, Homo sapiens
gcgacgcgagagaagagacgaggaaccccaagagaccaggcagccggagcgaagaacaccacagg

SEQ ID NO: 39318 - RNA, 90 nt, Homo sapiens
cggcccggggccgacccggcccgaggggaagcagccaggcagaagaaacacacaggagaacccccgagaacagagagaacacgcccaccc

SEQ ID NO: 39319 - RNA, 80 nt, Homo sapiens
cgagaaagccccgggagaagcagcgccgcccggggcagaccaggcagggggcacccgaggaggaagagggcagggcccac

SEQ ID NO: 39320 - RNA, 80 nt, Homo sapiens
cccggggagaagcacagccacaggcagcaaccaccggagggcgcagagaagagacagagcggaagaaaaaaaaacggcaa

SEQ ID NO: 39321 - RNA, 70 nt, Homo sapiens
acccgcacggagaacaggacaggagaagcaaaacggacaagcggaagggcaacaacacaccagagaagca

SEQ ID NO: 39322 - RNA, 82 nt, Homo sapiens
ccggcaggagccccgcgcgcccccgcagcaccgcaccggagggcgagcggacccccggagaaggcagggacccgggcaggca

SEQ ID NO: 39323 - RNA, 77 nt, Homo sapiens
cagcccccaaagccaaaagcgcgaggaccgcgggaagcacaaaggccagcgaacaacggggaaaagaggaagaaaac

SEQ ID NO: 39324 - RNA, 62 nt, Homo sapiens
gcgggccaggcgcgcccgacgagggcagaggagaagcgcccaggcggagagaccggaggccg

SEQ ID NO: 39325 - RNA, 78 nt, Homo sapiens
gcgcggaagcaacacaacaggaggcggaggcgaaagcggaacgaggggaggcaagacggccccaagaagaggggagag

SEQ ID NO: 39326 - RNA, 78 nt, Homo sapiens
gaggcgcgcgcagaccagcaggcgccccggcaaggccaccgcagaagccacaggagaccggaggccaacggcagaagc

SEQ ID NO: 39327 - RNA, 64 nt, Homo sapiens
gcgaaggaccccaacggggaggccaacggaagaacgccgagggcaggggggaccagagccagcg

SEQ ID NO: 39328 - RNA, 66 nt, Homo sapiens
ccagggacagcaacagcggccgggaacgaccgaaacaccagccacagaccgccccccccagccagc

SEQ ID NO: 39329 - RNA, 76 nt, Homo sapiens
accaaaagagaggcaccgcggaacacaagaggggccgacgaccaccaccacacaacacaggaacagccgcagggcg

SEQ ID NO: 39330 - RNA, 64 nt, Homo sapiens
cacggcaagacacagagagacggcagccgcgacagacacaccacgaccgcaaaccaagagacac

SEQ ID NO: 39331 - RNA, 70 nt, Homo sapiens
aagaagagaagacgcggcacaagcagggaacaccggccaagaagacgaagaggaagaaacgccgaaaaaa

SEQ ID NO: 39332 - RNA, 73 nt, Homo sapiens
ggcaacccaaacgaggacaccccgcccagcaacgggagcagaaggaaaaaaaagcagaaacggcacaacagca

SEQ ID NO: 39333 - RNA, 79 nt, Homo sapiens
acagggcacacagcaccgggcgaaaaggaggaaaagaagccagaccgaggaaacgacaagcaagcggcaaagaagaagc

SEQ ID NO: 39334 - RNA, 67 nt, Homo sapiens
gggacgagcaaaggaagcgcgaacagcagcgcagggggacgaccaccagccaggccggggacaaaca

SEQ ID NO: 39335 - RNA, 80 nt, Homo sapiens
ggccgaaaagcgcaaacggggggaggacccgacccagccccaggcagccaccaacaccacaacgggcacacaggccagcc

SEQ ID NO: 39336 - RNA, 79 nt, Homo sapiens
cggagagacgaaccgaagcgggcgggcccccccacccagagggacaccacaccagcgggacgccgccacgacccgagga

SEQ ID NO: 39337 - RNA, 69 nt, Homo sapiens
gggaagagaaagagacccgcagggcgcaggccaagaggaggagaagaagcgcgacaaaaacagagggaa

SEQ ID NO: 39338 - RNA, 47 nt, Homo sapiens
aggagcaaaacccagaaccacaaggggacaacaccacaggagaccgc

SEQ ID NO: 39339 - RNA, 77 nt, Homo sapiens
cagccgccggagccagccaacgagcggccccccaccgaagacaagcgagagcggcaccaaaggcgacacaagcccgg

SEQ ID NO: 39340 - RNA, 69 nt, Homo sapiens
gaacaggaacaaagccagacggacacgcccaaaaacaggaacaaagagaaggaccccgggagcaaaccg

SEQ ID NO: 39341 - RNA, 72 nt, Homo sapiens
cggccccgccggcgcccgcgcggcacgcgagcgaagcagagacagccaaacggggacgcaagagaaagaagc

SEQ ID NO: 39342 - RNA, 67 nt, Homo sapiens
ccgagggccaccaggccgccgggggccgcgcgcccgggagccgcccggcaaagcgaaagcgcaggac

SEQ ID NO: 39343 - RNA, 78 nt, Homo sapiens
agagcgcgcagagaacagaaggcaaaagagggaggagagcgaccgaagcagaaaggcaagacagccgccacccaacgc

SEQ ID NO: 39344 - RNA, 79 nt, Homo sapiens
gccaggccagacccgaaggccaggagacccgaccccaagcccggaccaagagacgaggaaaaccccacccacaaaggcg

SEQ ID NO: 39345 - RNA, 70 nt, Homo sapiens
accaggagccgcaaagcaaagccaaccagaacgaagcccaaagaaaaggggagggaagaggggaagagca

SEQ ID NO: 39346 - RNA, 85 nt, Homo sapiens
aggagacgagaggacgggaccaggcgaagcggccgagcaggcgagcgaacgacggacggaaggacaccagcacaagcggccagca

SEQ ID NO: 39347 - RNA, 86 nt, Homo sapiens
ggagaccagaaaacagggacccccagcggggagacacagagcaccagccagaggagagggcccagccgccccgcccccccgccccc

SEQ ID NO: 39348 - RNA, 76 nt, Homo sapiens
gcaaggaggaaacagcaagggaacaacaacaggacgccacaggaaaccaagccgccgacgacaacggacggaacag

SEQ ID NO: 39349 - RNA, 75 nt, Homo sapiens
gggaggcggagccccagacagagaaggagaaaaaaggagcccgaaagccccaaggaaaaaaagaaagcgaaagaa

SEQ ID NO: 39350 - RNA, 82 nt, Homo sapiens
ccagcaggaagcccagaagccagccagacagagccggcccaacagagaacggcaaacagcgagaaaccacagacacaaccac

SEQ ID NO: 39351 - RNA, 63 nt, Homo sapiens
gaggaaagggaggcaagaaggaagcagacgagagaaacgacaccaagaacgagcgcgaaggac

SEQ ID NO: 39352 - RNA, 69 nt, Homo sapiens
cgggccacaccccgccagcccaacaggaccaccggaacgcgggaacaggacgggcgggcggaagaagca

SEQ ID NO: 39353 - RNA, 72 nt, Homo sapiens
gccgaccgcgccgcccagccaccagcgggcgccgcagagggaccgcggccacaacaagcagccggagccaac

SEQ ID NO: 39354 - RNA, 78 nt, Homo sapiens
ggcacacagccgggggccgaggccccacggcccccgggacccccggcaggccaaacccgggccgagggagaggccgca

SEQ ID NO: 39355 - RNA, 101 nt, Homo sapiens
gacgggcagcgcaggggcgggaaagacccaggagaagccgcccaaagaacggaccaccgcggaagagaagaacgacgagaaggcaccggaggccaaaggca

SEQ ID NO: 39356 - RNA, 73 nt, Homo sapiens
gcgggaacacccaaaagcgagcgcaaggaggcagcccaaaggcaggcccggcaccgaggccgaaacccaaggg

SEQ ID NO: 39357 - RNA, 72 nt, Homo sapiens
agccaccacgaccgggccagcgcaccgccccgcagcagcacacgaccgcgagagggcgaagaacgccaaaac

SEQ ID NO: 39358 - RNA, 62 nt, Homo sapiens
aagaccgaacagaaaccccccccccagccaccaagagaagaccagaggaacccgagcaggaa

SEQ ID NO: 39359 - RNA, 44 nt, Homo sapiens
gcgaggacaaagcagcagaaccacacaggagcaggcgccggggc

SEQ ID NO: 39360 - RNA, 82 nt, Homo sapiens
ccaaaagcaaaccaaggcaggagaggagccagcccccaccccacaggccccagcccaagcggaagggaagaaccagcggagc

SEQ ID NO: 39361 - RNA, 79 nt, Homo sapiens
agcgcacacggcaggagaacaagacagcagcgcagcgcaaaggagagcagagaaaagccgagaaggaccagaacaggcc

SEQ ID NO: 39362 - RNA, 69 nt, Homo sapiens
cgcggaggggcacgagcgccacaaccccaggggacagaagggccgcccgggcgacgaacaccgccccgg

SEQ ID NO: 39363 - RNA, 70 nt, Homo sapiens
ggggaaaagacagcccaggccgagaaaagagacagggcaccaggaaagggggggcagggccagaacgacc

SEQ ID NO: 39364 - RNA, 78 nt, Homo sapiens
gcaagaccgagccgccgagcgacaacccgcgccccgagggagagaaacaccgaggaggacgcagcacacggccaggac

SEQ ID NO: 39365 - RNA, 55 nt, Homo sapiens
gccgaccggcgccgggagaccggagccaaagcagcggcacagggcaacagagcag

SEQ ID NO: 39366 - RNA, 76 nt, Homo sapiens
ccgagaagaacgacaggaaggacgggaacacgcaaaaccaagcacggaaccaaacgggcaggagacagagagaaag

SEQ ID NO: 39367 - RNA, 77 nt, Homo sapiens
gcccacccccgcggcgccgcgccccagaccagaggaggaccgcgccaacaggacgaggagaccgaccaggagacccc

SEQ ID NO: 39368 - RNA, 57 nt, Homo sapiens
gaggcgagggcagagccgcggggcaagacaacaagaggaacggagagagacaaaaac

SEQ ID NO: 39369 - RNA, 70 nt, Homo sapiens
ccggggacaggccgcaccggcgccaacccacaacaggggccagagaaaaccggcaggaagcagagccccg

SEQ ID NO: 39370 - RNA, 74 nt, Homo sapiens
gcgcccggcagcccgacgcgagccgccggagcgaacgccagagcaagacccacgaagggcacacaaaggaccca

SEQ ID NO: 39371 - RNA, 76 nt, Homo sapiens
ggacaggggcaccggcccaggcgaagcaacccgaagagagaggagaacaccccaccagaccacccagcaagcccac

SEQ ID NO: 39372 - RNA, 75 nt, Homo sapiens
gaccccaggggcgcggccgaacagccccgcgggaagcgacgaggagcgaggcgagaggaaacagaccaaagaggc

SEQ ID NO: 39373 - RNA, 74 nt, Homo sapiens
gagcaaggggaacgccacggacgggaaaaagcggggaaggggggcaaaaaaaagaagcaagcgaagcaccgagc

SEQ ID NO: 39374 - RNA, 74 nt, Homo sapiens
caccgccaccaggacaagaagcaccaaacccaccagcgcgaaagaaagcaagacgccacaagggaaaagcaccc

SEQ ID NO: 39375 - RNA, 84 nt, Homo sapiens
gagaccaggagaccccacggagcgggcgacgagcgacccgggagacacgacggaaaccccccaggcaagaggcgcaggaccggg

SEQ ID NO: 39376 - RNA, 73 nt, Homo sapiens
ccaagagggcgagcaggacgaagcgcccgccaccaagacaagcagaccggaagaccgacggaagaccacaccc

SEQ ID NO: 39377 - RNA, 71 nt, Homo sapiens
cagccaagcagagggcacccaccggaccgagccagaaagcacacacagcaagaagggacagaacagagaaa

SEQ ID NO: 39378 - RNA, 79 nt, Homo sapiens
ggcggcagccgaggccgcgaacgcacaggagacggcccgccacgggccccgcagccgcgcccgagcgcccgagcaggga

SEQ ID NO: 39379 - RNA, 40 nt, Homo sapiens
ccgccgggcaggggcaacaggcccggacgaccggccccac

SEQ ID NO: 39380 - RNA, 84 nt, Homo sapiens
cccgagggcgggaacaggacccacagaaggaggaagaggaggacacagaagaacaacaacagaagaagagaagcaggaaagaga

SEQ ID NO: 39381 - RNA, 72 nt, Homo sapiens
cgagcccagcagccgcccacccagccagcacacacgaaagacaggcacaaacgcagaaagggaggggggaag

SEQ ID NO: 39382 - RNA, 96 nt, Homo sapiens
cagaacacgcaaacgcagaagacaagagcgggcagcggcgcagcgcgcaggcgggagcggcgcacagcgacacgcagacgccaacaaccggagcgc

SEQ ID NO: 39383 - RNA, 55 nt, Homo sapiens
ggccccaaaggcggggaagagagcgccgagccagacccaggcgggcaggagagcg

SEQ ID NO: 39384 - RNA, 73 nt, Homo sapiens
ggcgcgagccgggggccgcccgccccgcgcgcggccggcggcccaggcgcacaccgcggggcccgggcagagg

SEQ ID NO: 39385 - RNA, 50 nt, Homo sapiens
gacggacagcaaggaaccccgggcagcggaggaccgaagagacgccgaag

SEQ ID NO: 39386 - RNA, 84 nt, Homo sapiens
gcccaggagcacccccaacccaagaaagccagacggcaggacagggggacagggagagaggcagaaccccaaccgaaccaaagc

SEQ ID NO: 39387 - RNA, 86 nt, Homo sapiens
gccgcccgcccaggaagggccgccgagcgccaggccacccccgggcagcgggccgcccggcagcagagaccgaaggagcagacgag

SEQ ID NO: 39388 - RNA, 77 nt, Homo sapiens
aaacagaacaacaggagaagccaccagccccagaacgggcgcagaagcaggaacagcagcccacaaaccggaggaca

SEQ ID NO: 39389 - RNA, 69 nt, Homo sapiens
cacaaaacaaggaaagagagggggagaagagggagacccgaacgaagacgcagcccagacaggaaaagg

SEQ ID NO: 39390 - RNA, 75 nt, Homo sapiens
ccgaggaaagaccaacaacgcgcaggcacaagcggaccggcggggaggacagggccggcaaacgcaccgggacgg

SEQ ID NO: 39391 - RNA, 88 nt, Homo sapiens
cccccggagcgcggccacggcgcagcagaagaccgaagaagcagccgaacacggagcagaaacgagcgcgaacgggacccaacagagg

SEQ ID NO: 39392 - RNA, 79 nt, Homo sapiens
gaccaagaaagaaacaaccgcccgacagccaccggggacaggacaggggccaggggagggcagcggagaggaccacgag

SEQ ID NO: 39393 - RNA, 79 nt, Homo sapiens
cggggccgcggggaagcggcggggagccaggcggccaacgagcgagggggccagcgacaagggggcagcgacgggcgag

SEQ ID NO: 39394 - RNA, 60 nt, Homo sapiens
gaaagacagcaacaacaaccagcagcaacaaggaaacagaaacaacgaacgagcaaggaa

SEQ ID NO: 39395 - RNA, 60 nt, Homo sapiens
cgcgcccaagggcggggacacgggccgcgcgaaaaagagagccaggaacaaaaggggaaa

SEQ ID NO: 39396 - RNA, 81 nt, Homo sapiens
ggagcgcgaaggccgggacccggccccggcccacaggggggggcaaacccgagagaacgggaacggggcgcgaaagacacg

SEQ ID NO: 39397 - RNA, 75 nt, Homo sapiens
aaggaacagaagccaccgcaaaaaccgaagcaggacacaaagaaaagacgaaggaagcaacacaaggaagcggag

SEQ ID NO: 39398 - RNA, 75 nt, Homo sapiens
aggccccgagagcaaccgggggaaagcccaccgacacccagaacgggaagcggaaggcaaacacgaggaagcaga

SEQ ID NO: 39399 - RNA, 74 nt, Homo sapiens
aagacaggaagcaccccggaaccgcagcgggcgcagagacggggggaaacccgcccagggcgggagaccgccaa

SEQ ID NO: 39400 - RNA, 124 nt, Homo sapiens
gagccgcgaccggggggccaggagaaggggaagaagagagggggacgccaaggagagggcacgcacaggagaaaacgacgcccacaccaaccccacaccccacaagcaacagagaaaagcccac

SEQ ID NO: 39401 - RNA, 91 nt, Homo sapiens
caccaacacacacgacaaacccacgccacaccgggcacgacaaaagggcagaaaagcagggcaagcagggaaaagagaaagaaaccggcag

SEQ ID NO: 39402 - RNA, 80 nt, Homo sapiens
agcggaaccggacccagcccgagccgccccacacccacagacaccaaaaaggcaaggacagaacccaagcaggccggaga

SEQ ID NO: 39403 - RNA, 82 nt, Homo sapiens
cgacgccaggacggcaaggcggcacggggaaggcaaggccacaaccggggcgaggccaagccagggagacccagagaagacc

SEQ ID NO: 39404 - RNA, 80 nt, Homo sapiens
ccccccagaccgggacagaaggcaagcggagaagacaaccagacacaagcggaaccagaacagcacaacagagggacaca

SEQ ID NO: 39405 - RNA, 77 nt, Homo sapiens
gcgggggggggccgaccggagcgggccaggccgggaggagaggggcgggagccgagagaagccaacccggggagaca

SEQ ID NO: 39406 - RNA, 77 nt, Homo sapiens
aggcggagcggacgcgggccgcacgcagaaagacacagagaccacacgggccagccagcccggaaaccggaccggaa

SEQ ID NO: 39407 - RNA, 63 nt, Homo sapiens
cacccaaggcagccggaaacgaggcaacaccgggcgcgcacagaagggacaacggaggaaacc

SEQ ID NO: 39408 - RNA, 82 nt, Homo sapiens
cgccagacacggcaggccaagaagcaccgagcgcacacacgcagggcccgcgaggcagccacgcgaagggaggaagaaaagc

SEQ ID NO: 39409 - RNA, 73 nt, Homo sapiens
agccagccgcgccgacagcacgcagagcggagaagccccagaccagcaaagaaagggagacaggcagaaccag

SEQ ID NO: 39410 - RNA, 50 nt, Homo sapiens
gaacccaaccacgccccagcagcaggaagcccaggggagccacaaggacc

SEQ ID NO: 39411 - RNA, 80 nt, Homo sapiens
gggcacagacgcgccagcacgccgccgccagcaaacggggacagcgccgaccggaacagggaccacggaagcccaggacc

SEQ ID NO: 39412 - RNA, 84 nt, Homo sapiens
gcccaagggcaccagccaaccgcccgggcccgccccacaggagccggacacgcagacagcaaggagggacaggcaagaaggaag

SEQ ID NO: 39413 - RNA, 58 nt, Homo sapiens
aaacaagacggggcgccccacagaggggcgacgggaaggaaacacgcgcagaaaaccc

SEQ ID NO: 39414 - RNA, 60 nt, Homo sapiens
aagagcgcagacggccagccgaaaccacgccagaaaggaggagcaaggaagcccaggaac

SEQ ID NO: 39415 - RNA, 37 nt, Homo sapiens
aaccaaccccccccaaaagcggcgagcccagaacgaa

SEQ ID NO: 39416 - RNA, 82 nt, Homo sapiens
gacaccaggacagaaaagacaggcgccaggagcacagaagagcgaggaggagaaaggagcaaccagggaaaagaagaacggg

SEQ ID NO: 39417 - RNA, 80 nt, Homo sapiens
agagaagcgagaacagccagagagacgaccaaaaagcaaggggccaaggccccaggaaagcagcaccaccccacccggaa

SEQ ID NO: 39418 - RNA, 74 nt, Homo sapiens
cggaaagacgacagcaacccgaagacagggaaaagaaggggccacaggcaccaggaagaaaaagacaccaacaa

SEQ ID NO: 39419 - RNA, 80 nt, Homo sapiens
ccgcgcgcaccgccgacccggaagaccgccgccgcgggagagacccagagcaaaacgagcaccaagggcaaacacaagcc

SEQ ID NO: 39420 - RNA, 76 nt, Homo sapiens
agagggagaggacagcagcgccgggcggagaacggaaaagcaccaggaagcagagaggaccgcagaagggaaggag

SEQ ID NO: 39421 - RNA, 78 nt, Homo sapiens
cccaaggacgcaaccacagccggggggcgacagcgccccgacaagaagccgaaggggggccgacgcgaggaggacagc

SEQ ID NO: 39422 - RNA, 77 nt, Homo sapiens
gagacccccagaggagcagggagccgaggaaggacagggcgggaggggccaccgccaggccgcagcggccggaggga

SEQ ID NO: 39423 - RNA, 61 nt, Homo sapiens
accaggcacacagggcagaccaaccagaaaggaagaggaagggaaggcagacaaagaacag

SEQ ID NO: 39424 - RNA, 74 nt, Homo sapiens
aacgcccaagccccaccgcgagggaagcaaggaccagaagcgccaacgcaagcagaaagaaggaggcacagacc

SEQ ID NO: 39425 - RNA, 90 nt, Homo sapiens
cggaaggcggcaagcccggcagcgggaacacagagagcgaagccaggaaaggccggaaagcagcggcgccagacagcccagggaagagcg

SEQ ID NO: 39426 - RNA, 77 nt, Homo sapiens
ggcaacagaaagagcaacagcagggcaacagagaaagagcgcgcacgaaagcacacgaaaaggaaggaaaaacgcag

SEQ ID NO: 39427 - RNA, 80 nt, Homo sapiens
ccccaacccaccagcgacggcaccagaaaaccaagggcccacaacacacgacgacgagaaggaaaagcgcaaacgggaga

SEQ ID NO: 39428 - RNA, 81 nt, Homo sapiens
gagccccggaaaacacaaagacagaaaaggagacgaaaagagaaacaaaaagacccagaccagcaggacagacccaaagga

SEQ ID NO: 39429 - RNA, 81 nt, Homo sapiens
ccgagcaccgcagcgggagaccggggggggagggaagaagccggagccgccgcaagccacacgaagcaagaaaggacagca

SEQ ID NO: 39430 - RNA, 90 nt, Homo sapiens
gccagggcgcagggccgggccgccgcgcaccgcagcgccggggcacgacacaaaaacagagaaggggagaaggaacccccgacaacacac

SEQ ID NO: 39431 - RNA, 100 nt, Homo sapiens
cgaggaaaaccagaacacgaacaaggacacacagaccacaaacacgaaagggccagagaggggaagaggaaaccggaacccaaagagaagaaacgcaagg

SEQ ID NO: 39432 - RNA, 89 nt, Homo sapiens
aagagaaagccgggcgacggccaccaccgcccaaaggggcacaaaacgccccgggagagaagaggaggagcagaagagcgcggaaacaa

SEQ ID NO: 39433 - RNA, 85 nt, Homo sapiens
gggcaaccccgggggcagcagcaacgccggacgcccacgcaagcagccaaaacggacaagccaaggcacgagccaaagaaacaaa

SEQ ID NO: 39434 - RNA, 74 nt, Homo sapiens
agggggccgacacacggcggaaacccaccagagaaggcgcggccacccaggacccgggggaggcagcgaagaaa

SEQ ID NO: 39435 - RNA, 55 nt, Homo sapiens
acccaccggaacacaaacaagcgggagaagcaggagccgggaaacaaaaagcaca

SEQ ID NO: 39436 - RNA, 74 nt, Homo sapiens
cagcggaacaagaagagccagagggagggagaccccagcagagccgccaggacccacgaccaagcagacaagcc

SEQ ID NO: 39437 - RNA, 82 nt, Homo sapiens
gggcccgcgacgcagcagcgaggacacccgaggaggcccagccggaagagccccagccgaagcaggacacaaagaaaagacg

SEQ ID NO: 39438 - RNA, 58 nt, Homo sapiens
cagcagcccagagcgcaaagagcagaaggcggcagggagcacgcaccaggagcccacg

SEQ ID NO: 39439 - RNA, 71 nt, Homo sapiens
ccaagacaaccaaacagagaaagcaaggaaaagggggagaggcaccagcaacagaccaaccgcagcaagca

SEQ ID NO: 39440 - RNA, 76 nt, Homo sapiens
ggggcgcgggaggcggcgcacaccagccgcacaccgcaagcaccgggcagcggcaaagaagagaacgacacaggaa

SEQ ID NO: 39441 - RNA, 63 nt, Homo sapiens
caaaggaagaaaaccaggcaccaaaaagcaggcgaaacaacccaaaggggcaggcaacagcag

SEQ ID NO: 39442 - RNA, 77 nt, Homo sapiens
acaccgacaaagggaaccacgacagacacaaggagggagaacagcacaaaaaacacggagcagggggccgagcaaac

SEQ ID NO: 39443 - RNA, 72 nt, Homo sapiens
cgaggaccggcgggagagagagcgcccagaaagccagaagacgaccccgacgcaggccaggagccgcggaca

SEQ ID NO: 39444 - RNA, 69 nt, Homo sapiens
gaaggggaggcaccccagcaaagaaaaccgaaggaaagacccagagagcccggcgaaaaacagccaaga

SEQ ID NO: 39445 - RNA, 81 nt, Homo sapiens
gccgcccaagagagcaagaccgggcccacgagcgagaggcccggccagagaccgccgggggagcaaggcgaccgggcgcgc

SEQ ID NO: 39446 - RNA, 76 nt, Homo sapiens
ggaaaaaagaggcggcgggccggacgcggacgaggcccaacagcgaggggacgagaaaggggggcacccgaggagg

SEQ ID NO: 39447 - RNA, 79 nt, Homo sapiens
cgccgcgagacgccgccgacgccgcgcgggccgcgcgcgcgcgcccggaaaccggaaaccacgagcggggagaaacagc

SEQ ID NO: 39448 - RNA, 63 nt, Homo sapiens
ggagaagccccagaccaggcagagccggggccgagaaaaacgacaaagacagaaacagaagac

SEQ ID NO: 39449 - RNA, 62 nt, Homo sapiens
ggcggagagaggcgccccgcagcccccaagcagcgcccccccgcgccaggccacaagaaagg

SEQ ID NO: 39450 - RNA, 79 nt, Homo sapiens
gagcaagcgagcaccaaagcacacagaaccaggccaggggagaagaaccagccggccaagacaaggccgagaccgcggg

SEQ ID NO: 39451 - RNA, 79 nt, Homo sapiens
cgagaagagaacaccagccaaagcaaaaggggcaagacgccaagagaaaaggcgagagcacaaagcaccaagagccgag

SEQ ID NO: 39452 - RNA, 57 nt, Homo sapiens
ggaaacgcagcggagaaaccagcaaccaaggaaaggcccaaagggggaaaagcagca

SEQ ID NO: 39453 - RNA, 86 nt, Homo sapiens
cccaggcgccggcgggaaggcggggcgacccggggggcgcgcccagagccccgcgcagcccagggaagaccccgccccccgaggcg

SEQ ID NO: 39454 - RNA, 80 nt, Homo sapiens
caacgcagagcaccagaagcaaacgggagaacagcagggagaaaaagagcccggcgcccagcaaaacgcggagaaggcga

SEQ ID NO: 39455 - RNA, 76 nt, Homo sapiens
caagcaccgccggggcgccgcacgagaccgggcggccagacaggaaaaagccccaacgaagagaaagggaccgaga

SEQ ID NO: 39456 - RNA, 113 nt, Homo sapiens
ccagaagacgaagaaaacaagcaagcgcaggaagagaccagaggacagaccgaagcaaaggcaaaacgggcgggggcaaagaaccacaagaacaaaaggcaagaaacacagcg

SEQ ID NO: 39457 - RNA, 59 nt, Homo sapiens
cgaacggaaacccagaccacaaggagccacccaccaggcggaggcagcagcgcaaccgg

SEQ ID NO: 39458 - RNA, 81 nt, Homo sapiens
cagggcgcggagaggaaggagagcaccggcccccccaccccaaccccggccgcggccccgacgagggacacgaccgagaac

SEQ ID NO: 39459 - RNA, 57 nt, Homo sapiens
cccaacacagggaaaggaaccgcggacagacaaggcgagggaaaccaacacaagacg

SEQ ID NO: 39460 - RNA, 74 nt, Homo sapiens
gcaggccccgaggagccgggagcgcaagggcaggaagaggccaagggcaccagacagcagagacgcaaaaaacc

SEQ ID NO: 39461 - RNA, 87 nt, Homo sapiens
ccaaagaacaacgaggagaacaaacagccagcagagcaccaaacaggggggaaggaagacaaacagagccaagcagacagaaacccg

SEQ ID NO: 39462 - RNA, 38 nt, Homo sapiens
aaccacaacaacacagcagagaaaccagagacgaccac

SEQ ID NO: 39463 - RNA, 58 nt, Homo sapiens
cacacagagcgaagcgcgaggagcagcagacacccaaaagagggaagcccaagagagg

SEQ ID NO: 39464 - RNA, 74 nt, Homo sapiens
gagaaccgagcagaaagagggaaaaaacccagggggcaggaagagacgaggaaaacagaccacagagaagggag

SEQ ID NO: 39465 - RNA, 51 nt, Homo sapiens
gcaccggcccccacccaaggagaggccaaggaagcacagacgaccaaggcc

SEQ ID NO: 39466 - RNA, 77 nt, Homo sapiens
gagacagcagaagggaaagacccggagcgggcaggcggcggacccagcccccaaacgaggcgacccgcggcgagagc

SEQ ID NO: 39467 - RNA, 70 nt, Homo sapiens
agcagagacagagaggagccaacccccagggacagggcgaaacaaccaaggccgacaccacacgacaaaa

SEQ ID NO: 39468 - RNA, 51 nt, Homo sapiens
accggcccacaccaaggagacgaggggccccgggcgcgggagccagccgaa

SEQ ID NO: 39469 - RNA, 79 nt, Homo sapiens
aggggaccccaagaagaccacagagggacccggacaaccagaggcagccagcagggggagggcaccgccgaccgaaacc

SEQ ID NO: 39470 - RNA, 64 nt, Homo sapiens
acccaccaacaggcaacccagacaaagaagagcagccgcagaaaaaaaggagcccacgggagcg

SEQ ID NO: 39471 - RNA, 64 nt, Homo sapiens
agcggggccgcgaagggacgcaggagaaggaagagcaggaaggccaaaaaaccaaaacacagag

SEQ ID NO: 39472 - RNA, 83 nt, Homo sapiens
ggaccgaagcccggacgacgaggaaccgcccaacaggcccggagggacaaaaggaaaggccaacccacagcgaggagaagcca

SEQ ID NO: 39473 - RNA, 81 nt, Homo sapiens
caagagaggcaccccgaagaggcgaggagcaacccagggccggcacacaagaaggggcccggaccacggcacgggaccgag

SEQ ID NO: 39474 - RNA, 81 nt, Homo sapiens
cgaaaggcggaaggaggacccgggagcgacgccgacagcgaagcgagcgaaaggggaaaaagcgccaaaacggccccccga

SEQ ID NO: 39475 - RNA, 46 nt, Homo sapiens
cacgagggagcagggccacacggcgaccgccgggcaccgcccgcac

SEQ ID NO: 39476 - RNA, 73 nt, Homo sapiens
gaaagaggcgggagagggaggagcccagaccgggcgacccgccgaaagagggcaaccccgcaggaggaagcac

SEQ ID NO: 39477 - RNA, 84 nt, Homo sapiens
ggaggcccaggcccggcagcccaacccagcaggacaagggcccaggcaccacaaccaggggccagaggcgaggcgccccagaga

SEQ ID NO: 39478 - RNA, 58 nt, Homo sapiens
ggaagcgggcgcgaaaacgaacgcgggaaccagcaggccgggcacccgaccacgcacc

SEQ ID NO: 39479 - RNA, 82 nt, Homo sapiens
ccagagccggagcgcgaaggccgggacccggccccggcccacaggggggggcaaacccgagagaacgggccaagaagggacc

SEQ ID NO: 39480 - RNA, 79 nt, Homo sapiens
caccacaagggaacagacacccacccgacggggccggcccgccgcccagaggcacaagccccaaagggacggcaagcaa

SEQ ID NO: 39481 - RNA, 75 nt, Homo sapiens
aaaaacagaagaccccagggcccgccgggggaccgggagaaggcgggacaggagagacaacggaggcaagaaaga

SEQ ID NO: 39482 - RNA, 36 nt, Homo sapiens
ggcgagggcgccggcagcccagaacagagagaaggg

SEQ ID NO: 39483 - RNA, 85 nt, Homo sapiens
acgggagggcaacgagcacaacaggagcacgaggagggagacaaaccaccaggaacccgaaaccaaacacggagggaaacaggag

SEQ ID NO: 39484 - RNA, 73 nt, Homo sapiens
cgagaaggcaaacgggcagagaccaggcagccacagaagcagagccaaggaacgaacagggcgggcggaggcg

SEQ ID NO: 39485 - RNA, 74 nt, Homo sapiens
gggggagaacacgacacgccagcacgacaggccgaagcaacaggcccaggcagcgcagagccaacagacgagca

SEQ ID NO: 39486 - RNA, 77 nt, Homo sapiens
gcagcagcggaagaagccccgcccccagaaagagcccaggccacagcaagccacaagcgcccaagacggcagggaca

SEQ ID NO: 39487 - RNA, 83 nt, Homo sapiens
cagacccagcccagagggccaggccggccagggggacgcgcgcaaggggccgcagggggagcacagaggaccggaagcagcaa

SEQ ID NO: 39488 - RNA, 58 nt, Homo sapiens
ggaccagccagaggacgcgggccgaggagagcggaggagggggcagcgggcggaggac

SEQ ID NO: 39489 - RNA, 79 nt, Homo sapiens
agagcaccgagagaccagccaggcccaccccaccgcgacaagggcacgaggaacaccggcaagagacgccaaaagaaca

SEQ ID NO: 39490 - RNA, 75 nt, Homo sapiens
cccccaccagccgccagccggacagacagcacccacggcaaggacccaccggagaacccgaccggcggcaggcag

SEQ ID NO: 39491 - RNA, 72 nt, Homo sapiens
gaaaaacgagccacccgcgaaaagagccacggggccaagaagggcagcggggaagaagaaaaggaaccgagg

SEQ ID NO: 39492 - RNA, 85 nt, Homo sapiens
agcaggcagaggcacgggagaagaggaggagcggccgggggaggcaggggcgcggcagcacaacaccccgacccccaaggaggca

SEQ ID NO: 39493 - RNA, 80 nt, Homo sapiens
gacagaccgaggggacgcaaacagccggcaccaggagcagcaccagagcgaacgagcccccggggagcggcggacaccag

SEQ ID NO: 39494 - RNA, 66 nt, Homo sapiens
aaccggggccgaggcagaccccccgaaccgaagcaggaaagggcagcggaggcagagccgaagaaa

SEQ ID NO: 39495 - RNA, 60 nt, Homo sapiens
agcgccgccaccgagccgggcccaccccccaccaaggaaggaaggagggccccggagcag

SEQ ID NO: 39496 - RNA, 81 nt, Homo sapiens
cacgaacaaacagaaagcgcgaagaggggaagcaaagcaaagagaccgacagagccacaagaaacaaaggcacggcacggc

SEQ ID NO: 39497 - RNA, 84 nt, Homo sapiens
agaaaaagaaagcagaacaaagaagcagcaaaccccccaagacaaagggcgccacgcagagccccgccaggaagacacgccggg

SEQ ID NO: 39498 - RNA, 87 nt, Homo sapiens
aacacccaagggaagcagaagaaaaggagaaggaaagcgaaggggaaggcgccgaagaggacgaagcaaggcgccaccggaagaaac

SEQ ID NO: 39499 - RNA, 44 nt, Homo sapiens
acacaaggagacgaggggaagaggagaaggccccaggcaaggca

SEQ ID NO: 39500 - RNA, 55 nt, Homo sapiens
acgaggagcagggccgacgcgcaggacgagggcgcacagaacgggaagaaagcca

SEQ ID NO: 39501 - RNA, 70 nt, Homo sapiens
aacaggaaagaacaagaagagggcaggacagggcagaccgccagcagcacagcaagccacagagagggcc

SEQ ID NO: 39502 - RNA, 58 nt, Homo sapiens
caggccaccacagaaacaaaagcaacaaagaggaggaacgcgacgcaacgaacggaac

SEQ ID NO: 39503 - RNA, 68 nt, Homo sapiens
acaccccccaaggcgccgccggacaccgcacagaccgggccccgcgagagcacggacacaggaacccc

SEQ ID NO: 39504 - RNA, 65 nt, Homo sapiens
acccaagagcgaacccgagccagcggaaacagggccgacaagggagaacgaggaaaccgaagagc

SEQ ID NO: 39505 - RNA, 70 nt, Homo sapiens
gcagacagggagcgggcaacacaaaggaagccaagaagaaggagcacagaaccgaacaagacagaaagcg

SEQ ID NO: 39506 - RNA, 109 nt, Homo sapiens
gggccacccaagggggcagccagagccggacagaggacaaggcccaggcaggagaccggggaggggaaccggcagggagggcaggaagagggacggccccggccagacc

SEQ ID NO: 39507 - RNA, 77 nt, Homo sapiens
agggcagggaaggaagaaagaacagagagcagaggcgcaagagggcgagaaggaggcgaaggaaggcccagaccaaa

SEQ ID NO: 39508 - RNA, 76 nt, Homo sapiens
aggccgaagggaaggggcccggcccacacaccaggaccacggggcgaaccccggcccagccccaccgaagaccagc

SEQ ID NO: 39509 - RNA, 68 nt, Homo sapiens
cggcacaaacggaccaccagaaagcaccccacagacgccaggaagccggacgcgcagggaaaacgaga

SEQ ID NO: 39510 - RNA, 83 nt, Homo sapiens
aggcacagagcacaggcgcgcaaacggaggaaagggcacagaggggcccagaaaacaagccagcagagacagggcgcaggccc

SEQ ID NO: 39511 - RNA, 68 nt, Homo sapiens
cggcagcaacccagaggaccccagagcaccaagagggcccagacgacgcccggccaccccggcccaga

SEQ ID NO: 39512 - RNA, 71 nt, Homo sapiens
cgcccagccggcaacccacccaccacacaacaaagaccggcgagcaggcggaaggcggcacaccgacagcg

SEQ ID NO: 39513 - RNA, 73 nt, Homo sapiens
ccagaacgcggaagcgagcaggaccccaaacgggcgaggagaccagagggcccagcccaggcgaaccagcaga

SEQ ID NO: 39514 - RNA, 60 nt, Homo sapiens
gggggcccggacggcacacccacgaccggccaaggaacaggacacccaaccgcgagacca

SEQ ID NO: 39515 - RNA, 67 nt, Homo sapiens
aacagcaagaaagacagcggcgggcgcggacggcaggggcgccggggaacccgcgggaagaagcaac

SEQ ID NO: 39516 - RNA, 71 nt, Homo sapiens
cggccaggaaacgcaccacagcccgggcaaacgaaaagccaaaaacacaaagagggacagcagagacgaaa

SEQ ID NO: 39517 - RNA, 70 nt, Homo sapiens
ccgcagaggacagaagaggccaccaaacccgagggagaaagaggacacggccgacagacagcgggccggg

SEQ ID NO: 39518 - RNA, 67 nt, Homo sapiens
ccccacgacagaccacgacaagagcacaaccccgggggagccacggaccagggggacggcgacagcg

SEQ ID NO: 39519 - RNA, 97 nt, Homo sapiens
gcaggcaaccagcgggaccagaggagaccggagccaccaaaaacgaagaggaaaccggaccaacaggggaaccaaaggacagcacagaccgagcagg

SEQ ID NO: 39520 - RNA, 71 nt, Homo sapiens
ggccagaagaccgccggggcggaaagggacccgacacgaggcggagaacggaaaagcaccaggaagcagag

SEQ ID NO: 39521 - RNA, 76 nt, Homo sapiens
cgaagggggcaaccggaagggcacagaaaacaaagcaaagaggcaggcaggcaggcgacccggggacccagcagcg

SEQ ID NO: 39522 - RNA, 54 nt, Homo sapiens
aggggccacaggggcacgggaggcgcccgaggccccggaggcgaagccacacag

SEQ ID NO: 39523 - RNA, 80 nt, Homo sapiens
ccacaccaggcccagaggccaggcagacccagccaaaccgcgcaagagaagccaggcaacagaaaaccagcaggacaaaa

SEQ ID NO: 39524 - RNA, 77 nt, Homo sapiens
caagacacaggacacaagggcgaccgggggaaccaagacgccaacgcacagaagagcaacaagcggaagaccacaac

SEQ ID NO: 39525 - RNA, 35 nt, Homo sapiens
gaaaaggaggcaggaggggccaaaccaagccgagg

SEQ ID NO: 39526 - RNA, 67 nt, Homo sapiens
cacaaacagcagggagaagagacaacaagacagggaaagacaaggagccgggccgagaaaccgaacc

SEQ ID NO: 39527 - RNA, 80 nt, Homo sapiens
ggcagcccacgccgcaacccgccccagagccgaggagaggagacgccggagcgggacgaccagagaccgagagcggcgcg

SEQ ID NO: 39528 - RNA, 64 nt, Homo sapiens
gaacagcaaacggaacaagagagcacgggaacaagcagcaccgcagaaggaccccgacaacgcc

SEQ ID NO: 39529 - RNA, 76 nt, Homo sapiens
cagcgaggaagagcggccagaaaccgcgggagaaacccaggaagaaggaccacgggaggcagaccccgacgacaca

SEQ ID NO: 39530 - RNA, 75 nt, Homo sapiens
gcaccccgcaaagggagcaaggcagccgcggagcccgacacaggcccaccgggaccgccccgcggccaggccacc

SEQ ID NO: 39531 - RNA, 77 nt, Homo sapiens
aaaagagaaggaaaaacagaacggcaaaccggaaaaaaacggaccagaggaacccgagcaggaacaccccagcccgg

SEQ ID NO: 39532 - RNA, 65 nt, Homo sapiens
gacacacgagaccggacaccccagaggacacggccacagggacgcagcgggagaggcggccagaa

SEQ ID NO: 39533 - RNA, 82 nt, Homo sapiens
cgggaaggaccgaagccacccacggaggccccaaggggccgggagaggaaggccccaagcagccagcagaaaagcaaccaga

SEQ ID NO: 39534 - RNA, 59 nt, Homo sapiens
acggacgcaacacggaacagacgcaacaggccggacacaaccacaaacgagccacgcca

SEQ ID NO: 39535 - RNA, 71 nt, Homo sapiens
caagaacgccgccgccgcacaagcgccacgggacagccaacaccagaccgagcccacgcgcgccacaggga

SEQ ID NO: 39536 - RNA, 85 nt, Homo sapiens
aggccgcgccgaccgcacgcgcacggaacagcagcaaccccaggcccacccgaaagagccccccagcgccaggccgggaccccag

SEQ ID NO: 39537 - RNA, 71 nt, Homo sapiens
cgccccgggggccacaggggcccgacaacggcacgagacaacggagagaggacgacagcggcacagcacga

SEQ ID NO: 39538 - RNA, 59 nt, Homo sapiens
ccgggacacagcgccaccccgagcagcggggaagcgcggcgagaggacgcccaccccgg

SEQ ID NO: 39539 - RNA, 93 nt, Homo sapiens
gacaggacacgagggcgagcccccacggcggcggggacacccgacgggagcgaacgaagaaaggccaagagggagagacaaggagaacccacc

SEQ ID NO: 39540 - RNA, 39 nt, Homo sapiens
ggaaacgacagaagcagagacaacgaagagaggaaagaa

SEQ ID NO: 39541 - RNA, 68 nt, Homo sapiens
cagggcgccgagcagggccacggcgaaaacagccgggggccggggacacaagcaacagccagaacaag

SEQ ID NO: 39542 - RNA, 39 nt, Homo sapiens
agacacgccacaaccgagcagagcaaagcggcagccccg

SEQ ID NO: 39543 - RNA, 78 nt, Homo sapiens
acacgggaaaccagagccaagaccaccaagaaaggaggaacagaaaagacaacagaagaccagccaggcagcaacaga

SEQ ID NO: 39544 - RNA, 76 nt, Homo sapiens
aggagaagcaagaaggcccggacacagcaaaccgggccacagagaaaccaggcggggaacaagccagcagcccaag

SEQ ID NO: 39545 - RNA, 53 nt, Homo sapiens
aaaagaagaaagaaaccgggaccacagaaccgacacgcggcgcccacgcacaa

SEQ ID NO: 39546 - RNA, 83 nt, Homo sapiens
accaaccagcacaaccggcggagagcccaggccgaggagaaggagcgcccggcaccagcaggagcggcaaaggccggagagca

SEQ ID NO: 39547 - RNA, 85 nt, Homo sapiens
gggaaggagcgcccggcggagaagaccgaacggccccacagccgggcggggggaaagcaagcaggcagcgggggaagaaggcggg

SEQ ID NO: 39548 - RNA, 74 nt, Homo sapiens
cagagaaacaccacccacaggcgagaccgggcgaggcggagaggcagaacaaaggagaaaagcagagacagaag

SEQ ID NO: 39549 - RNA, 75 nt, Homo sapiens
aggggccacggagccacggccacggccgcaaggaccaaaacagggaaggaagaaccaggagggaaaaccccagcg

SEQ ID NO: 39550 - RNA, 74 nt, Homo sapiens
ggggggccacaccagccgggccaggcagagccggagcgggcagggcacacaaccgggcagcggacacggagcag

SEQ ID NO: 39551 - RNA, 83 nt, Homo sapiens
gcggcgacgcgacacccccaccaggacagccgacagcccgcccaggaagggacccgagcacggagagcggaagccggcagaag

SEQ ID NO: 39552 - RNA, 56 nt, Homo sapiens
ggcagccagaagcagccaggacagcagacccagaagaccgggcagcccacccaaaa

SEQ ID NO: 39553 - RNA, 77 nt, Homo sapiens
ccgggaggacaggcgacaagaaggccaaggcccaaaggggggcaagcagaaagggaaacgagcacggagcgcccacg

SEQ ID NO: 39554 - RNA, 54 nt, Homo sapiens
ccgaccaggacacgagcgggaacgcaaacgaagcccaaaaacggagaacgaggc

SEQ ID NO: 39555 - RNA, 82 nt, Homo sapiens
gaagcagcaaaggaagcagagcagagacgcccaagcagaggccgcgagaagagaagaggccggacaccgccagcgaaggaac

SEQ ID NO: 39556 - RNA, 83 nt, Homo sapiens
acgccggggaggcagcgcgggacccagcccaggcggcgcggacggggcggaaaaaagccgcaaaggcgaagcgcacaaaaccg

SEQ ID NO: 39557 - RNA, 82 nt, Homo sapiens
cggaagggacccgggaagagcagccaaaacggaagaagggcccaggagacaccagcgggggcgccgcgcagggaaagggacc

SEQ ID NO: 39558 - RNA, 79 nt, Homo sapiens
acgaaaagcagcaacgagaagaagccaccaaggagcaggaaaacggaaaagaaggaggccagcgggacacacaaagaaa

SEQ ID NO: 39559 - RNA, 80 nt, Homo sapiens
ggagaagcagcgccgcccggggcagaccaggcagggcggagaacggaaaagcaccaggaagcagagaggaccgcagaagg

SEQ ID NO: 39560 - RNA, 82 nt, Homo sapiens
gccgccagcaacacaccccaacgggaaccggaccccgggcagggggcgggcccggagcggcagcacggggacaccagcaggg

SEQ ID NO: 39561 - RNA, 66 nt, Homo sapiens
gaccaaagggaagagaaacgcaaccgcacccccggcgaggaaaagcgcaacaccggcagaacacga

SEQ ID NO: 39562 - RNA, 74 nt, Homo sapiens
ggagcccgcagaccgcagaaggccggagacaccagcaggaaggcgcgcccaaaaaacacaggagcaacagaacg

SEQ ID NO: 39563 - RNA, 78 nt, Homo sapiens
ccccccgcgcggcgcgggcgccgggggcaccgaggagcgagaagaggcgacaccagggcccaaagaacaaccgaaagg

SEQ ID NO: 39564 - RNA, 77 nt, Homo sapiens
gaagaggcggcgcgaggacgggcccgagcgcgggagacacgaagccgggagcaagcagaccagaagaaaaagaagca

SEQ ID NO: 39565 - RNA, 85 nt, Homo sapiens
aaaggcaacgaaagccaaccagggggacacggaaaacgacagaacgaagcagaagaacgcccaggcaggcagggaagcggcagac

SEQ ID NO: 39566 - RNA, 42 nt, Homo sapiens
ccccgcggacgccacagcgcacaaagacaccaccagccggga

SEQ ID NO: 39567 - RNA, 79 nt, Homo sapiens
gcgacgccacccaagacacaaacggcgacacaggcaaaagcagaccggaaaacccaccggcaagaccacacccgagggg

SEQ ID NO: 39568 - RNA, 80 nt, Homo sapiens
ggacggccgcgaagaggcgggccggagcacagccccaggcacaacacaagaaaagcggggcaccggcacaaagagaggca

SEQ ID NO: 39569 - RNA, 53 nt, Homo sapiens
gggaagccccaagacggaacaacgccagagagaacacagaagagcagaacacc

SEQ ID NO: 39570 - RNA, 81 nt, Homo sapiens
gcgggaaccccgaccagccccggccagggcccccccggggcggaaggcaccccacgccacagcggacccgcagggcgaggg

SEQ ID NO: 39571 - RNA, 56 nt, Homo sapiens
ggagcaaaaacgacacaaagggcggcgacggcggcgcgaggaccgaccgggcccgc

SEQ ID NO: 39572 - RNA, 73 nt, Homo sapiens
gcaggccaaggccgccgaaccgacaccggagacaccacaccaacgggcaaacagaagacgggcaaaagagcgg

SEQ ID NO: 39573 - RNA, 50 nt, Homo sapiens
ccgggggagcggggggacaggaaagcaggagagagacccaaaccggcgag

SEQ ID NO: 39574 - RNA, 67 nt, Homo sapiens
gaaaaaaaagaaacccaggaagcggacagacgggcagcggggcggaaaacaccccaaaagccaaaag

SEQ ID NO: 39575 - RNA, 48 nt, Homo sapiens
ccggagcgaaccaccccaaacaggaacaaaacaggaagcggaaaacag

SEQ ID NO: 39576 - RNA, 72 nt, Homo sapiens
ccagacccacagaagcagcacgagccgcggggcccgcgggagcaggcccagaaagaacagacaaagaccgaa

SEQ ID NO: 39577 - RNA, 43 nt, Homo sapiens
ccgcccccagccgacagaccggggcagcggggaagaccgacaa

SEQ ID NO: 39578 - RNA, 82 nt, Homo sapiens
aggggaccgcgggacgcaccgcgaccagggccgcaggaagacgcaaacaaaaccagccaagcagaggagaaaaagacagcac

SEQ ID NO: 39579 - RNA, 83 nt, Homo sapiens
gcaagggagaggacacaaaaaagagaagaccgagaggaggggacaccaccaggcaaaccccagaccggagagaacagaaaaaa

SEQ ID NO: 39580 - RNA, 72 nt, Homo sapiens
ggcacgacaaaagaagcagccaggaggcgaaacggaagacacccgaagacaagaggaccaagaagaagcaag

SEQ ID NO: 39581 - RNA, 56 nt, Homo sapiens
gagaggaaaggcgagggaagcgccggggggggccgaagaagccagggggaggaaag

SEQ ID NO: 39582 - RNA, 82 nt, Homo sapiens
gaacggcgaaggcccacgggagaaaaccgggcgcaaggcagcccccgagaccccggcagacaggccccagcggaaacgagga

SEQ ID NO: 39583 - RNA, 83 nt, Homo sapiens
gcccaagccgcgccccagagagcgcccgagagaacagggggccgcggccagaagcggcaagcacgcaggcccaacgacggcag

SEQ ID NO: 39584 - RNA, 74 nt, Homo sapiens
aaccagaggcagccagcagggggagcaaggcaggcgaccaaaaggaaagacgggaagagacagagaagacagca

SEQ ID NO: 39585 - RNA, 77 nt, Homo sapiens
aacaagacacggagcaaggaggaaaacacacggaggagcagagcgagacaggagaccgggcgcgcccgaacacccca

SEQ ID NO: 39586 - RNA, 48 nt, Homo sapiens
gccgcggaggggcacgagcgccacaaccccagggcaacagggcagcgg

SEQ ID NO: 39587 - RNA, 74 nt, Homo sapiens
cgaaaggagcaagagcaagacaccggacaccgagggcccccaaaagcgagccagcagcaccggaacaccaagag

SEQ ID NO: 39588 - RNA, 60 nt, Homo sapiens
gaccgcaccgcacggcggagcccgcacgcggcgggcagaagaacggaccgaagccaaaga

SEQ ID NO: 39589 - RNA, 73 nt, Homo sapiens
gcccaaagggaccaagaaaggcacgcaccaccccaccggacagcagaacaccgaacaggggacccaagccaga

SEQ ID NO: 39590 - RNA, 52 nt, Homo sapiens
aaaaccgcacacaccaaaaacccaccgggacgggaaaaacagccagagagca

SEQ ID NO: 39591 - RNA, 84 nt, Homo sapiens
gcagacgacgacagaacccgacaagaagcacgaacagcaggccaaagaccagaggaacggaaaacagccccaaagcagcagacc

SEQ ID NO: 39592 - RNA, 78 nt, Homo sapiens
gggaggaagaggcaaccaggcccaaagaaggcaccccacgccacagcggacccgcagggcgagggacacgcggcaggg

SEQ ID NO: 39593 - RNA, 76 nt, Homo sapiens
accacccaccgccagccgggagcgggcggacaggagccgccgcgccagacggaggcagggcacaaccggccacgca

SEQ ID NO: 39594 - RNA, 80 nt, Homo sapiens
gggccgggagcccggcacgagcgccgacaacccggcgccagagccggccgacaagccacaaggaggcaaaggagcagcac

SEQ ID NO: 39595 - RNA, 83 nt, Homo sapiens
ccaacaagacgcacccgccaccgggaccgacgggcacgggggagagcagcaacaacccaggcccagcaacacaggacaggccc

SEQ ID NO: 39596 - RNA, 82 nt, Homo sapiens
ccgacaggcgcggcacgggaggcggaggcgccccgccagccgaacacccaacaagaaggcaacgacaaacagccaagcaagc

SEQ ID NO: 39597 - RNA, 80 nt, Homo sapiens
acggcaggcaccgagaccagcgaggagcaagagggacagggaggacccagaagaggccggcccggaccccagaggagcag

SEQ ID NO: 39598 - RNA, 75 nt, Homo sapiens
aagacagcacaaaaaagggcaggcggaagcacacagccaggacaagccagacagaagaaaccacacgggccaaaa

SEQ ID NO: 39599 - RNA, 115 nt, Homo sapiens
ggcagaccccggcgggcgggcaggagggcggcggcggcggcgcggcgaagaaggggacgccgacaaggggacccacagcccggcgaccacggggaaccgaggcagaagcgaagag

SEQ ID NO: 39600 - RNA, 38 nt, Homo sapiens
gagcgacaacccgcgccccgaggagagacggggcacag

SEQ ID NO: 39601 - RNA, 75 nt, Homo sapiens
aggacagcagccacaagccacaagaaccacccagggacagacgaccgggcggcaaaaagaggaaggcacagggaa

SEQ ID NO: 39602 - RNA, 86 nt, Homo sapiens
cagagccgggcgcgcagcagccaccagcgcgggacgcggcggcagcggcggcggcggcggcccccgggcggaaaacaccccaaaag

SEQ ID NO: 39603 - RNA, 79 nt, Homo sapiens
gcccggagagcccagccagcgcccggcagcccgacgcgagccgccggagcgaacgagcccagcaagggaagaccaagca

SEQ ID NO: 39604 - RNA, 100 nt, Homo sapiens
accaggccaaagaaagagaaggcgggaggccaggcagcacgcagacaagaagcgcaggacaggcgcaggggccaaacacagaacagcaaagaggaggcca

SEQ ID NO: 39605 - RNA, 78 nt, Homo sapiens
gcagaaagcccagggaaccgacagaacggcgaagggacaaaggacaccaccagggaacggagaggacaagaaaggcgg

SEQ ID NO: 39606 - RNA, 75 nt, Homo sapiens
aggaaaaaacagaagcagagaggagggagagccgggaagagagcacaagcacgggcccagacgcagacaaacgag

SEQ ID NO: 39607 - RNA, 76 nt, Homo sapiens
cccgcccagccccaagagcgggacacagaaacccacggagagggcagaccagccacgaacaacaaaaccacaggca

SEQ ID NO: 39608 - RNA, 77 nt, Homo sapiens
ccgagaccgggagagagacgagagaccggagcgagcagcggagggggaaccggggaaaaccaccacgaacggggccc

SEQ ID NO: 39609 - RNA, 76 nt, Homo sapiens
ggaaaaagacagcccgcagcacgaccagcaggaacggcgcggggaggcccagcccgccgcagggccaccccgcggc

SEQ ID NO: 39610 - RNA, 80 nt, Homo sapiens
cacagcggggcgcagagaaaaagacagaacccgacaagccaacgccagaggacccggcgccgacgcaaggaacgagccag

SEQ ID NO: 39611 - RNA, 77 nt, Homo sapiens
acggaacagcagcaaccccagcaccaaggagaaacagagacgagcaaggcgagaggcaacgaacgagaccggggacc

SEQ ID NO: 39612 - RNA, 58 nt, Homo sapiens
ccgggaacggcgccggaggaccagacccaggagggcccagccagcagagccacgccag

SEQ ID NO: 39613 - RNA, 73 nt, Homo sapiens
gagcacccaccacggagggaaagaccaggcaggacagggggacagcagcaccagaaccaaaaagccacaacag

SEQ ID NO: 39614 - RNA, 70 nt, Homo sapiens
cggggacagccagaaaccggggaccaacaaccaccaagaaacagagaaccaaaagagcagaaggagcgag

SEQ ID NO: 39615 - RNA, 74 nt, Homo sapiens
agcagcaccaggaagaaacacggcggaggccaggggacaaccgcacacgaccgaaaaacaggagaacccagcga

SEQ ID NO: 39616 - RNA, 66 nt, Homo sapiens
ggaagggagacgacgccagaagcaaacaaaagcaagcggccgggaaaaaaagaaggaggaagcacc

SEQ ID NO: 39617 - RNA, 74 nt, Homo sapiens
gaaagcgccagcggaccaccaggaacacaggcacaggcacaggagaccaccaacacagcaaagcagccaaaggg

SEQ ID NO: 39618 - RNA, 80 nt, Homo sapiens
cggacccagaccagaaccagagggggacaaagagccccagaaacacaaagccaaaccagaaaggggacagcggcgggcag

SEQ ID NO: 39619 - RNA, 86 nt, Homo sapiens
ccccccccccgccccgcggggcggcgagaaaaggcccggggcccgggacgagggaaggacagagggcaggaaccccacaaacggaa

SEQ ID NO: 39620 - RNA, 64 nt, Homo sapiens
caagagcagcggaaaagaccagcacaggaagagagcgacaggacagaaggacacgagaagagga

SEQ ID NO: 39621 - RNA, 66 nt, Homo sapiens
gaaaagacaagaaccccgagaacccacaaccggggagaggccccgggagaaggccagcaaagcccc

SEQ ID NO: 39622 - RNA, 81 nt, Homo sapiens
acgaacagagccgggagcaagaagaacacccagagaaccaagacaagcagcggacggccaggagaacaaggcacacagaga

SEQ ID NO: 39623 - RNA, 63 nt, Homo sapiens
gcccgagaaggacgcagaacgaggggcacagaaaagccaccagaagcaacaaagaagccccca

SEQ ID NO: 39624 - RNA, 50 nt, Homo sapiens
ggaaacgcagacacgaacgggccgaaggacagagacggagaagggaacgc

SEQ ID NO: 39625 - RNA, 101 nt, Homo sapiens
gcaggcccccagccgcagccacaacaccggcaggaaccaccaggacagagggaaaggacaagggacagcagccgcagaagacgacgccaagcaagccaagg

SEQ ID NO: 39626 - RNA, 80 nt, Homo sapiens
aggcggagcccgcagaccgcagaaggccggagacaccagcagcgccgcgcgcgcgggaggggggagggacgcaaacagcc

SEQ ID NO: 39627 - RNA, 80 nt, Homo sapiens
gggagcggcgggaggccaccgccaggagccccaagggggggcaggcagcagagaggcccccaagggcgggaaagaaccag

SEQ ID NO: 39628 - RNA, 118 nt, Homo sapiens
ggcccggcagggagccggggggggcggagggggagacggccgggagggcccgccagccgcgcccgcagacgaaaaccacggaggccagggaccaccacaagacccaggccacgccgag

SEQ ID NO: 39629 - RNA, 71 nt, Homo sapiens
cccagcaaagaggacaaaagagcggaggagcggcgaggacacccaaaggagcccccgcggagccacacagc

SEQ ID NO: 39630 - RNA, 114 nt, Homo sapiens
acacgagggaggcaagagcggcccaccaaggaaaggggacagcaacagccggcgggcggaagaccagccacgccggaacaggaagagcccaaaggcgaaggaacgaggaaacca

SEQ ID NO: 39631 - RNA, 68 nt, Homo sapiens
cggaacacccgccaaagcagagaaaagagcaaggccgcaagaggacgaaggaccaagacgacaaagcg

SEQ ID NO: 39632 - RNA, 74 nt, Homo sapiens
acaccccaggcaacacagccccagcagcgacaacagggacggcccgccgggaggcccccagccgagccagcggc

SEQ ID NO: 39633 - RNA, 69 nt, Homo sapiens
aaagcacccagcccaccccggaacaggagacagcggagaaagagcccgggaagcacgaagccgagacca

SEQ ID NO: 39634 - RNA, 55 nt, Homo sapiens
ggaggccccccagccacggaaacgcagccagaacgaaaaggcacagagagccagc

SEQ ID NO: 39635 - RNA, 88 nt, Homo sapiens
gaaaaagaggacccaaaaaagagagaaaaggccaaagagagggcgaacaagcaaggaaaagcagcagcaacgggaacgaagagagaaa

SEQ ID NO: 39636 - RNA, 78 nt, Homo sapiens
aagccagcaggaggagagcaaagaaaggaaagaagacagacacacgagagaaagcagagcccaaggggaaaaagggag

SEQ ID NO: 39637 - RNA, 49 nt, Homo sapiens
ggaaggcgcgaggcaacaaaaaggagaccaggcggacgacacaaaccca

SEQ ID NO: 39638 - RNA, 101 nt, Homo sapiens
gccgcaccgagcaggcagccccgacggaaggagcgggggccccacccccccgcgggaacggggcacccgaggaggaagagggcagggcccacggaaagaag

SEQ ID NO: 39639 - RNA, 79 nt, Homo sapiens
cggcacaggcagcggaggagcccgaccgacccgcgccaaggggccaagggagagcggggccccccccaaggcacccccc

SEQ ID NO: 39640 - RNA, 67 nt, Homo sapiens
gagcgggcggcacgcacgcaggaaaccaagggaacagccagggccagagcaccccagccaggacacg

SEQ ID NO: 39641 - RNA, 78 nt, Homo sapiens
gagagccgggagcgcggggcgggggcgcccgccgcgccgccacgaccccagacgaggccgccggaggcagggcgcagc

SEQ ID NO: 39642 - RNA, 73 nt, Homo sapiens
ggccagagcaaagagagaacgcccggaggagaaaagcaaaaaaagccggggccagggaaccggacaagcagac

SEQ ID NO: 39643 - RNA, 67 nt, Homo sapiens
caccggaaagccaggaaaaacacacgaagccagcagaacggccaaggcacgggacaagccaccaggc

SEQ ID NO: 39644 - RNA, 72 nt, Homo sapiens
aagggcagagaagcacgaaaaaggacacgggcaagacacgaagacgccaccggagagagaaaagcaaccgaa

SEQ ID NO: 39645 - RNA, 76 nt, Homo sapiens
acaaggccaacagacggcggaaagcaggcccacgcggaccggcagcgccaccggaccaccagacaaggacacggcc

SEQ ID NO: 39646 - RNA, 77 nt, Homo sapiens
cagaaaacacgggaaacagccaggagagccagagagccaacagacaaacaacgcgagagaaggacccacaaaccccg

SEQ ID NO: 39647 - RNA, 75 nt, Homo sapiens
cgaaacgaccaaacagcgacgagagaccggcaggcacagccacagacagagagcgaccaaacccccacaacaagg

SEQ ID NO: 39648 - RNA, 80 nt, Homo sapiens
aaacgccagaccaaaccggaaaacacggcaggaccgacaacacagaaacagagacaaagcaggaggacacaagaagggag

SEQ ID NO: 39649 - RNA, 77 nt, Homo sapiens
ccaaacgccccacgaccagagagaagagagaagccgacagaccacgagccggccggagaaaaccagcgacggcaaag

SEQ ID NO: 39650 - RNA, 83 nt, Homo sapiens
ggagagaagaagaagaaaccggagaaggaacagaccccggaggaggacccaaggccagccagccccaggcaccagcggacagg

SEQ ID NO: 39651 - RNA, 66 nt, Homo sapiens
ccgagcgacagagacaagcgagcgccgcacaaaaagcagagagggcgccagcccccaggaggaccg

SEQ ID NO: 39652 - RNA, 76 nt, Homo sapiens
gccagaggggagacacgccaaagccccaaggggaaaggccagacagcgcagcagccgccagcacgcaacaccaagc

SEQ ID NO: 39653 - RNA, 86 nt, Homo sapiens
gcgcgcgcccacaacagggaccggaagagcccacggacacacaggaacgggggccacgcacggagaacccgggcgcgccaggcaca

SEQ ID NO: 39654 - RNA, 89 nt, Homo sapiens
gccaagccgggggcacgccccccacccggagacacagaaccgggaaccgcacggaaagcgaagacgaagaaagaaagagacagacagcg

SEQ ID NO: 39655 - RNA, 76 nt, Homo sapiens
agcacgggacccagcccaggccgcacggacgggggggggccgcagaccaagaagaaaaacacacgaggaacgccga

SEQ ID NO: 39656 - RNA, 75 nt, Homo sapiens
gagggacggcagccgcgcggagggcgggaagaccggaagcgccggggcaccgaccgaaacgcccaacgaaacaca

SEQ ID NO: 39657 - RNA, 74 nt, Homo sapiens
cgggaccccgccaggccagcccaaacacgccacacgaaacaagaagcaccgacagcacagcagaaaggccgccc

SEQ ID NO: 39658 - RNA, 59 nt, Homo sapiens
acccggaggcagccaccagacagcaggcagggggggccaggccccccccgggaaacggc

SEQ ID NO: 39659 - RNA, 74 nt, Homo sapiens
cacacgacacagaggggcaaagccccaacggacagcaccagccaccaaagcggagcagacagcccacaccggca

SEQ ID NO: 39660 - RNA, 89 nt, Homo sapiens
cgagaagccgaaaagcgcagcgagcggagccgccggagacccacggcagggcaaccccaccgcggaaggcaggcacacagacgagaaca

SEQ ID NO: 39661 - RNA, 75 nt, Homo sapiens
cgggcaagcgagcaccacggggccggaggcgggaccaccgcaggagccggcaggcgaaaagaagaggcgggaaac

SEQ ID NO: 39662 - RNA, 67 nt, Homo sapiens
cagacaacgcccgccggaacaccgcagagaaaaagggacggcagcggccgagcggccccgagccggg

SEQ ID NO: 39663 - RNA, 75 nt, Homo sapiens
agggccagcccgccaggaccgccacggcaagccacggacaaacgccggaacccccccaccaccggaaggcccggg

SEQ ID NO: 39664 - RNA, 76 nt, Homo sapiens
accacaaaaacaacaaggccaccaaacgagagcagccaacggacccaccggcccaggggaacaagagaaggcaccc

SEQ ID NO: 39665 - RNA, 69 nt, Homo sapiens
acgaaggaagagaaacagcgggggcgagcaccagcacaacaaggagaccaagaacccgggccagagggg

SEQ ID NO: 39666 - RNA, 82 nt, Homo sapiens
cgcgggcccaccgggaagccggggggcccggaaagagagagcaggcgaagaggaacgaaccgagcgcggaacgcgggcggaa

SEQ ID NO: 39667 - RNA, 63 nt, Homo sapiens
cgcacaacaggccaggcacaagaagaggaggagcaccgcacagcacggagaccgacacagaca

SEQ ID NO: 39668 - RNA, 69 nt, Homo sapiens
caggaggccagggcagcaccgggcagcgagacgaaaaacaaagagggaagaaagaggggcaagacaccg

SEQ ID NO: 39669 - RNA, 89 nt, Homo sapiens
gacggcacgccgggaggcggcgggacaacgacggcgggggacgggcaccgggccgcgggggaccgagacccgacgagagagacgagggg

SEQ ID NO: 39670 - RNA, 76 nt, Homo sapiens
gcacaggggggagacacccagaggacgcccgccccaggaaaggccgaggaaaaacaagaaggggggcacagcagaa

SEQ ID NO: 39671 - RNA, 71 nt, Homo sapiens
ccaagccggcggccaagacggagccgaggagagaaggcgcgcaggagagcgcagagacccgcccggaagcg

SEQ ID NO: 39672 - RNA, 85 nt, Homo sapiens
cccagccgagaggacgcggcggaaacgaagacagggaagaagaccgcaacacagcaacccagaccacaaaaacagaaaggacagc

SEQ ID NO: 39673 - RNA, 67 nt, Homo sapiens
aagaaacccgaggacagcaccaaacaacaccaaaggagaacaggagacagcggagaaagagcccggg

SEQ ID NO: 39674 - RNA, 59 nt, Homo sapiens
gaagacaggcccccgcagcagaaacagccgcccagcgaacagcagcacggaccaacaac

SEQ ID NO: 39675 - RNA, 72 nt, Homo sapiens
cagggaaaaaaaggagcggaaggccggcggaggccaggcgcccgcgagagggagcagggaggacaagcagca

SEQ ID NO: 39676 - RNA, 70 nt, Homo sapiens
ccgcggaggagcgccggcggggagagaagaacacagcggacagaccgacacgcccaacggcagacaggcc

SEQ ID NO: 39677 - RNA, 53 nt, Homo sapiens
gcagcaacgcaagacaccggcacgcaacagacaagacgggccccgccgacgag

SEQ ID NO: 39678 - RNA, 64 nt, Homo sapiens
caccagcagccaccaggagcccgagagagaaggaagaagcccaggacccaggaaggagacacag

SEQ ID NO: 39679 - RNA, 71 nt, Homo sapiens
gccaagggcgaacaaaggccagggaaacaacccaagcaaacagagcccacgaagagacacacgaagaggag

SEQ ID NO: 39680 - RNA, 70 nt, Homo sapiens
aggccagaacccccaacccggcgccgcccacaagccaagaaaaggcaaaagcagaccggaaaacccaccg

SEQ ID NO: 39681 - RNA, 79 nt, Homo sapiens
gagcaagaaaaaaacacggaagaagagaagaggaacaaaaggaacgggcacacgacacaacagaaacgagacacaccgg

SEQ ID NO: 39682 - RNA, 53 nt, Homo sapiens
ggcccaaggacacacaggacaaacacacaggaagaagagacacgaagagcacg

SEQ ID NO: 39683 - RNA, 64 nt, Homo sapiens
ggagcgcgcggcgccggggggcgcgccgcgaccgcccgccggacccgaagagggggaaaacgca

SEQ ID NO: 39684 - RNA, 83 nt, Homo sapiens
gggaagcgcccggccagccagacacacgagcagcgcagcggagaaacagagaaagcgcacccagccccagaccgaggggccgc

SEQ ID NO: 39685 - RNA, 98 nt, Homo sapiens
aaccagcaggaaagcgaggagggacacggggccacgagcaaacgagagccacaagaacaagcccccagaccggaaagccgaccagggaacccagacga

SEQ ID NO: 39686 - RNA, 78 nt, Homo sapiens
ccagcacagccagcaccgcacgcccgcaagggagagaggagccagccacacggaaagaagaaaagaaaagagagagca

SEQ ID NO: 39687 - RNA, 65 nt, Homo sapiens
ggccgagaggggccggacccgacacaaccagacagagccaaagccggcggacagcagacgaacga

SEQ ID NO: 39688 - RNA, 71 nt, Homo sapiens
aagaggagacaggcggcagcagcagagaaacccagcaaaagggagcagagaccacccgaggccaaggccga

SEQ ID NO: 39689 - RNA, 86 nt, Homo sapiens
ggcgcggccgcccgggccgggccccaccggacggaccccaccccaggaggagagaagcccagggagcccgccgcgccccccgcggc

SEQ ID NO: 39690 - RNA, 77 nt, Homo sapiens
gccagcgccagcaccgccggacccaagcgaaaaagccggacaccgagcccaagcccccacaccaggcaggagaggcg

SEQ ID NO: 39691 - RNA, 82 nt, Homo sapiens
ggccgcggcccgggccgcaccagagcgcccggcccacgacacaggaagaagacagcaaagaagaaacaccccgccgccaggg

SEQ ID NO: 39692 - RNA, 71 nt, Homo sapiens
agaagcccaggaagacggccagggaaccaaacagcagagcagggcagaaaagagcccgccagagaaggagg

SEQ ID NO: 39693 - RNA, 75 nt, Homo sapiens
cagccacaccggggagccagcggcacgaccgaaaccacgaggaaaccagacacgggcgggccccagggggcgcaa

SEQ ID NO: 39694 - RNA, 88 nt, Homo sapiens
cgccgggagccagaagcacaggcccgggcgaaggggccacgcgagaaggggaggagcacagaacgccaggaccaaaacagggagaaac

SEQ ID NO: 39695 - RNA, 47 nt, Homo sapiens
gaggacaggaccagggcggcggagaggacgcaaagaaaccagaaccc

SEQ ID NO: 39696 - RNA, 63 nt, Homo sapiens
gaggcgagacccgaggagcagagaggccaggccggcgcagcagcccaggcagcaggccacagc

SEQ ID NO: 39697 - RNA, 87 nt, Homo sapiens
gccgaaccgccggcagccggcgacgaggacgaacgccaaacgaggcagcaacacaacgcagaaacagagagcgcacagaaggagaaa

SEQ ID NO: 39698 - RNA, 72 nt, Homo sapiens
ggggcgcaaaacgccccggcgcacccgaccgagggacccgaggagcaagaggggggggcccccccgaagaaa

SEQ ID NO: 39699 - RNA, 34 nt, Homo sapiens
ccaccgggccggcgcaaggaaagaagacagacac

SEQ ID NO: 39700 - RNA, 87 nt, Homo sapiens
cggggcggccggggaaggagaagaggggccacacagcaggagagaggacgcgcagcgaggcccagcgcgggacacgcgcccaccacc

SEQ ID NO: 39701 - RNA, 84 nt, Homo sapiens
ggagggaaagagagcgaggagacggcgaccgacaacgaaaaccaagcgcaacacgaagagggagcacaaagaagaaagaaaacc

SEQ ID NO: 39702 - RNA, 53 nt, Homo sapiens
cgcggcggggcccccccgcgaccccacgagaaagcaaaccccacgagaacaaa

SEQ ID NO: 39703 - RNA, 81 nt, Homo sapiens
ggccgacccgacacaacaccagaaggagcgacccgcaccggccgcgcgagaggggccgaagacgcagcagaagccagaccg

SEQ ID NO: 39704 - RNA, 47 nt, Homo sapiens
cgagagcgcgaaacgcacgagaagagagaagagagaaagagagacag

SEQ ID NO: 39705 - RNA, 79 nt, Homo sapiens
gcagcccgggaccgccaggagagcccaagcggaccggacggcggccagcaggaaggccggggacccgagcgccgcagcg

SEQ ID NO: 39706 - RNA, 115 nt, Homo sapiens
agaggagcgcgcccaaagaaggaaacaaagccgccacgcccccccaaacggacagaggcggccgaaagaagaaaacccgagcagagaaaacaacaaagcgcccagcacacagccc

SEQ ID NO: 39707 - RNA, 79 nt, Homo sapiens
caagaaggggagcagaagcagggcagacaagacccggagggcgagccggcaccagggcccagggcgccggccgagcccg

SEQ ID NO: 39708 - RNA, 82 nt, Homo sapiens
gagggggcccgccacagccgcagcaaggaggagaaggaccaaaacagaccaggaccgcccccaacggcccccgagagaaccg

SEQ ID NO: 39709 - RNA, 94 nt, Homo sapiens
ccgccccgaagacgggagcgcgcggcggcgaaagaaggaacacacggacgcccagaaagaggccacagaaggaaacacaaaaagaaaaagacgg

SEQ ID NO: 39710 - RNA, 81 nt, Homo sapiens
gagcggagcggggcgcaggcgccgccgccggacgcggcaacggagaagacaacaggcacaaagagagaaggaacacccaca

SEQ ID NO: 39711 - RNA, 82 nt, Homo sapiens
agagccgcgcacgcacagacaaggaaccaggacccaaggacgggccgggaccacccaagaagaggggggcagcggaccgcag

SEQ ID NO: 39712 - RNA, 86 nt, Homo sapiens
gaaacgcagaggcgagcccaccaaggggcgacagccggccaagaagcaaggaaaggcaagcagaggaccaaccagaggaacggaag

SEQ ID NO: 39713 - RNA, 81 nt, Homo sapiens
cgggagagccacgggccgcgccgggcacagccggaaagcaggaccgcgacggcagcagagcagcagagggcagaccgacgg

SEQ ID NO: 39714 - RNA, 50 nt, Homo sapiens
caagaagggcaaagccgaagaacaaggccgcagcgggaccaaaaaacagg

SEQ ID NO: 39715 - RNA, 73 nt, Homo sapiens
ggcgacggggccaaccgcccggcgcgggcagccacgaaccgacggggaccccaagaggaaggaaccggagacg

SEQ ID NO: 39716 - RNA, 82 nt, Homo sapiens
cggcccggcgggggaaccacagacagccgggggagcacccagaacagcagcaaggcaagaaaggcaagggaaaaaggggggc

SEQ ID NO: 39717 - RNA, 43 nt, Homo sapiens
gagccggagcagaagcaaagagaaaaggcacacacacccgcag

SEQ ID NO: 39718 - RNA, 71 nt, Homo sapiens
gcaaagcccagcgcgcaacccaccgcgacccgccacccacagcagcccgcgagaaagggaccgagggggac

SEQ ID NO: 39719 - RNA, 61 nt, Homo sapiens
aaggaccaagaaccagggcccccccggccgccccccgcccggccgcccgccccgggccccc

SEQ ID NO: 39720 - RNA, 82 nt, Homo sapiens
gcggcgccggcggccgcgccgagggcggcgggccgcagaagaagcacagacgagaaacaaggcaagaaggcagccgagaagc

SEQ ID NO: 39721 - RNA, 76 nt, Homo sapiens
caccggaggaccagcagaccagcgcgcacacaagagcagagaaagggggaggcggacccggcaacacgaaccggaa

SEQ ID NO: 39722 - RNA, 99 nt, Homo sapiens
gggagccggagcgggcgcggacgccgaggcaccgaggcaccagaggaggccaggcagagcagcccaccagggaggggagggggggaggcgcaccccgcg

SEQ ID NO: 39723 - RNA, 55 nt, Homo sapiens
ggagcggccgccgggacaaaggcaaggacgcacggccacgaccgagccggaccag

SEQ ID NO: 39724 - RNA, 115 nt, Homo sapiens
ggcaaaaggccaaaagaagacgcaaaacgaggaaaagagagccgacagaagagccccagggggacagggcgacaggagaaagagcaaaaaaccaaaccgagcagacccggaagaa

SEQ ID NO: 39725 - RNA, 73 nt, Homo sapiens
acgcacagcaacagccccaccccgaaacgccccgaaaagacgggcaacagggcagcagggcgacagcaagaag

SEQ ID NO: 39726 - RNA, 118 nt, Homo sapiens
ccacagcagaggagacagccacacgggaggcaccacccagaggaaggcgggggagcaaggaagcggagccccaccccaaacagccagccagccagacgccagggaccagaaaaacgcc

SEQ ID NO: 39727 - RNA, 42 nt, Homo sapiens
gaagaccccgacaggaacagacaagaagggccaaaggcaaag

SEQ ID NO: 39728 - RNA, 45 nt, Homo sapiens
ggcaaacccgagagaacggggccgacgccaccgccgagcccagac

SEQ ID NO: 39729 - RNA, 73 nt, Homo sapiens
gaaacagcggagacggaacgggagaagaggcaaagaaacaccaagagagccgaacaggaaccgagaccggaca

SEQ ID NO: 39730 - RNA, 78 nt, Homo sapiens
agcgaaggggagcccagggaagcccgggaccgaaaaaacgaggcacgggcgcaccaccagcgcacgcgcccacaccag

SEQ ID NO: 39731 - RNA, 80 nt, Homo sapiens
cggggcccggggaaggcccgccgcccgccccagagcagcaagcagagaaggcgcaaaggaagcgaagagaggagagaaaa

SEQ ID NO: 39732 - RNA, 75 nt, Homo sapiens
ggaaagggacaagaagggcaaagccgaagcaaagaaccaaggaagaagaaccgagcacagaccaggagccagcca

SEQ ID NO: 39733 - RNA, 79 nt, Homo sapiens
ccgcaacccgcggcagagagaaaaggccggggcagagagccgaaagaccagacgccaacaagaaccagcacacccacgg

SEQ ID NO: 39734 - RNA, 64 nt, Homo sapiens
gcacagagcaggaggccgcagccccaggcgagacagggcaagaagacagaccggcgcggccccg

SEQ ID NO: 39735 - RNA, 82 nt, Homo sapiens
cccccccccccccagcggggccccaagaagccgagacacgcgggaggcggcgacgggcccggggagagagaaggcccaaaag

SEQ ID NO: 39736 - RNA, 59 nt, Homo sapiens
ggagcccggcagccgcccgggaacaagggaaacccagcgcacgacacccgggagccccg

SEQ ID NO: 39737 - RNA, 76 nt, Homo sapiens
aacagggaccaaccaaagacgccaaggagaaggcagaccgggaccaggagggaaagggagacacaaaacacaggca

SEQ ID NO: 39738 - RNA, 70 nt, Homo sapiens
gccgggccagcccaggcccagcccagcacaacccccgaggagggagacggccaaaagagaacggccaaaa

SEQ ID NO: 39739 - RNA, 71 nt, Homo sapiens
ccaaagggaagagaaacgcaaccgggcggagaacggaaaagcaccaggaagcagagaggaccgcagaaggg

SEQ ID NO: 39740 - RNA, 80 nt, Homo sapiens
accgccagcaggcaggcccgagcacgcgcgggagcagcaggcccggacaagcagagccgacccaacgggagaagcaagaa

SEQ ID NO: 39741 - RNA, 83 nt, Homo sapiens
ccagcaagccggagccgccagagccaaggccaagccccaagcagcaccccaagcagggggaggaaggccgaaagaaggaaaac

SEQ ID NO: 39742 - RNA, 100 nt, Homo sapiens
accgagcaacacccccgcagccaaaaagcgagcaaccggaggaaggagagaaggacggagaagcgaaagccagaccggcaagagcggaagaaagcaccaa

SEQ ID NO: 39743 - RNA, 68 nt, Homo sapiens
gcgggaagaccacggagcggggagagccgccgcaaacccagaccgacgacccggagacgcggaggcag

SEQ ID NO: 39744 - RNA, 75 nt, Homo sapiens
gcgaggcggaagggcaccccacccgcagcacaaggaaaacgagagaaacgaaggcgagagaaacagcaaggcccg

SEQ ID NO: 39745 - RNA, 70 nt, Homo sapiens
agaggaaaagagaaaaccacagacagccaaggagagaacaccagcgacgggaaaccggagaaccggggag

SEQ ID NO: 39746 - RNA, 90 nt, Homo sapiens
gaggaggcggcgcggcggccccgggaccaaggaggggaggggcgaccccggggcccggccagcacgaccgaggaggggcggacagcggag

SEQ ID NO: 39747 - RNA, 59 nt, Homo sapiens
ccccgggcacacaccccgacccgcccccccaggcagggacagcagggacagccgggaga

SEQ ID NO: 39748 - RNA, 78 nt, Homo sapiens
ggaacggagcaacccaaggaccggccagccgcagcgagaccaggagccgcccgagcgcgagaggggcggaaacaggag

SEQ ID NO: 39749 - RNA, 73 nt, Homo sapiens
aaggaccaagaaccagccagcggcacgccacaagccagccgcaccccagccaacagcacaaaaacgacaacca

SEQ ID NO: 39750 - RNA, 84 nt, Homo sapiens
cagcgcagaagggacggagcccagccgaggaccgcgaagaggaacaaggagacgagcgccaaagacagaagcaagcagaaaaga

SEQ ID NO: 39751 - RNA, 71 nt, Homo sapiens
aaggaaggagaacgacacgccccgcagccaggcaggagcagacaccaggccgaaggccaggacagagaacc

SEQ ID NO: 39752 - RNA, 79 nt, Homo sapiens
gggccacgagcaccgcgccggcccagcaccccgagaaccgcaggagccagaggcaaaacaacgagggagagaaacccag

SEQ ID NO: 39753 - RNA, 52 nt, Homo sapiens
cccagaggagcaaccccaccacagcggagaagagaacccgaccgaagaagga

SEQ ID NO: 39754 - RNA, 94 nt, Homo sapiens
ccgccacccggcgcgaccgcccggcaccgggagaaccaccgccaccgccaccagggcggagaacggaaaagcaccaggaagcagagaggaccgc

SEQ ID NO: 39755 - RNA, 42 nt, Homo sapiens
cgggcccccccgccggaaacaggcagaagagcaccgcccgcg

SEQ ID NO: 39756 - RNA, 53 nt, Homo sapiens
aaggaaaccagcaacagcaacccgagcccagagacccagccaagaagggagac

SEQ ID NO: 39757 - RNA, 84 nt, Homo sapiens
aacacgccgacagcccgcccaggcgaagggacaagcgaagcacaagcaggccgggagcggggcgggaagaaacggggagccgcc

SEQ ID NO: 39758 - RNA, 79 nt, Homo sapiens
accccgaagcagaggaaaaggagcaggccgggacaccggcgaagggaaaaaaccggccacagacccgaagaccaccaca

SEQ ID NO: 39759 - RNA, 86 nt, Homo sapiens
ggcggcacggcccgccacagcgacgccggcgccgagggacaccgcagagaggcagaggaggcagcacggcaggagacgaggagagg

SEQ ID NO: 39760 - RNA, 58 nt, Homo sapiens
gcggccgcggcgagaccggacccaggcagagggaaccaaaaaaaacagacaagaagga

SEQ ID NO: 39761 - RNA, 65 nt, Homo sapiens
ggacacagcaaaccgggccacagcaaaacagaccgcaggcagcgcccgagagagaacaccgacag

SEQ ID NO: 39762 - RNA, 76 nt, Homo sapiens
agcaggccaagcggggccaggacgcgggaggaccgggacagagaagaggacggagcgaggaggggagcggagccac

SEQ ID NO: 39763 - RNA, 37 nt, Homo sapiens
ccagacggggaaagcggccagaccagggagacgaggg

SEQ ID NO: 39764 - RNA, 77 nt, Homo sapiens
gacgggcgcacacgccagccggaccgaggaagacaaggggcacccggacaccgcccccagagagagaggggcgcagc

SEQ ID NO: 39765 - RNA, 60 nt, Homo sapiens
cggaagggagcccaagcgcagagggacaccggagaccgaagaacggaagcgcacgaacaa

SEQ ID NO: 39766 - RNA, 75 nt, Homo sapiens
accggaaacgccgccccaggcaacgcacgccgcaggcggagcgcccaaccggagcccgcggaggcaaggcgcgac

SEQ ID NO: 39767 - RNA, 83 nt, Homo sapiens
aggaaagcaaaaggaaaacagccgacgaggagcaaaacgagccaaaaccagggaagagaccaggagagaaaggaggaaacagg

SEQ ID NO: 39768 - RNA, 47 nt, Homo sapiens
gacaagcggcggggccccgggggacggcaaaacagaacagaaaggcg

SEQ ID NO: 39769 - RNA, 74 nt, Homo sapiens
ccccacccgcccccgcgggcgccgggccaggacggcgcgccgggggcccggaaagggacgcgcgcccagggagc

SEQ ID NO: 39770 - RNA, 83 nt, Homo sapiens
cgagaaaagagcgccagcagccaggaacccgggacagcaggagggggccacggccaaggaagggcaagaaggcacaagaacac

SEQ ID NO: 39771 - RNA, 69 nt, Homo sapiens
ccaagaaaggcgaaggaaaaccccagcgaaacaccaagaggaacgacccaacccaacacgaggcaccgg

SEQ ID NO: 39772 - RNA, 80 nt, Homo sapiens
ccgcccgggcggggaggggcgcccgcccaagcagaggccggcccggccacccccgggcccgcgccccaggcgagagcccc

SEQ ID NO: 39773 - RNA, 78 nt, Homo sapiens
cgcaggcccccccgcgccgaccgcgccaggacagacgcacagacaccgcaggcccccacagagagcacacaaacaaag

SEQ ID NO: 39774 - RNA, 72 nt, Homo sapiens
ggcaaagccggccaggcaaggaagggggaccacccgcaggaaccacgccaagggaagggaggagccaaacca

SEQ ID NO: 39775 - RNA, 77 nt, Homo sapiens
agcaagaaaaagaacaagaaccaagcaaaaggccacaacagaaagagaggaaggcccagaagcgagaaggagacacc

SEQ ID NO: 39776 - RNA, 75 nt, Homo sapiens
ccgcggccacgccaccaaggagccggcaggggggcggagccacagcggaaggaacgagacaaaagagaagaagaa

SEQ ID NO: 39777 - RNA, 70 nt, Homo sapiens
cacacaagccccacagaccagcggccccgagaaggaccgggaaccccggacaaaacgcgcaaaaggagcc

SEQ ID NO: 39778 - RNA, 83 nt, Homo sapiens
agcaggcaccggcgggcaaccagcgggcccggccgccacccgggaaagacaggccgacagcggaaaagggagcgaggaccagg

SEQ ID NO: 39779 - RNA, 67 nt, Homo sapiens
aaaaagaggagaccccaggcaccacagcccgaggcccggagcgaccagaaacgcaggccaacaaaac

SEQ ID NO: 39780 - RNA, 71 nt, Homo sapiens
caaccgaaaacgaacccaaaggagagcccggcggagcaggagcaaaggagcaagaaaccagacccggaaac

SEQ ID NO: 39781 - RNA, 67 nt, Homo sapiens
aagaacgcaagaagagggcaaagacaggccaccacaggaggagcagcgcgggaaaaccgccacaaag

SEQ ID NO: 39782 - RNA, 76 nt, Homo sapiens
gcaccccgcggagcggagcgacagacacgcaggaggccggggaacagacacacccacggcaccacgccggccaaca

SEQ ID NO: 39783 - RNA, 73 nt, Homo sapiens
gaccaagaccagagaacagcggcacaacaagagccccagcgagccagagggacagcacagcccgcccgcgcaa

SEQ ID NO: 39784 - RNA, 70 nt, Homo sapiens
ccagaacaacacacaccagaaacagcgcaccacccgcaggaaccggcagaagacagaccccgcggagacg

SEQ ID NO: 39785 - RNA, 83 nt, Homo sapiens
gacggcgggcaccggccgacgacaaaacgccaaggcacccagagaggcccaagcaacggaaacccagcaagcagaaaaggaaa

SEQ ID NO: 39786 - RNA, 80 nt, Homo sapiens
ggagagcggacccgagacgcaccagggccagagagaacaaagccggagcgagaaacaccaggaaaaagccggcaggagcc

SEQ ID NO: 39787 - RNA, 79 nt, Homo sapiens
aggacggaagcccaaaggagcccaaagcccacggcgagggcagaaacgggcagggagcgaagaggaaagaaagaccccc

SEQ ID NO: 39788 - RNA, 86 nt, Homo sapiens
gggcgcccccgccacgcagccggccaccgccgagacccagcacacgccgaccaggggaggggcgaccccggggcccggccagcacg

SEQ ID NO: 39789 - RNA, 85 nt, Homo sapiens
cgaggccgccggagaggagggcccgcccgcggaacccgccacgccagaggacaggcccaggcagcccggagagagagaccgggcc

SEQ ID NO: 39790 - RNA, 79 nt, Homo sapiens
gcgcccaggacgacccccgggccagcggcgccgcccccgacaacccccaagaaagggagcccagaacgaaacaacccag

SEQ ID NO: 39791 - RNA, 60 nt, Homo sapiens
cggacccggaaggggcggaggaaggccgagggaacagagggaaaacgccaaaaaccgcca

SEQ ID NO: 39792 - RNA, 38 nt, Homo sapiens
acaaaggaaaagcacaagaagcaacggagaaggcgcga

SEQ ID NO: 39793 - RNA, 63 nt, Homo sapiens
gaacggcccggaaacaggaggaccacaagagggccagggaccaggggacgcccaagacggcca

SEQ ID NO: 39794 - RNA, 76 nt, Homo sapiens
ccgccacccacaggaccaggccccaaggacgccccccaaggacacggaagcacgggcccagggacgagcggaggca

SEQ ID NO: 39795 - RNA, 70 nt, Homo sapiens
aacgaaagaaaacacacacacacaaagagaggagcaagccaggagaaacagagccagaacggccgcagcg

SEQ ID NO: 39796 - RNA, 79 nt, Homo sapiens
gaccggaccggcccccggaaggaaacgcagaagaggaagcgagcaacggagcccgagaggccggaagaggacaggagag

SEQ ID NO: 39797 - RNA, 75 nt, Homo sapiens
acgacaccggcgaggaacggcaggaaagaccacagccaggaaaaggcaacggccaggccaaaaggcgcaaagggg

SEQ ID NO: 39798 - RNA, 79 nt, Homo sapiens
agacccccccagaccggaaccaaaaacagaggagaaaaccacaacccagagcaagaaaaggaaaaccacacagacaaag

SEQ ID NO: 39799 - RNA, 72 nt, Homo sapiens
caggcgacaagcaaggggaggagcagcagcgcggcagagcagggggcaaaagcagaccggaaaacccaccgg

SEQ ID NO: 39800 - RNA, 85 nt, Homo sapiens
agaccacagcgcgcggcccccacaccacacagagagcgaggggagcgggccggagagaagagaggggcgcgaggagaaggaaaca

SEQ ID NO: 39801 - RNA, 111 nt, Homo sapiens
gagagccgaaggagcagcccaggaccgagaccggagcagccggggcggagcggcccagaaccgggacaacccagcaaacaggccagacccgacaggagcgacaaacacgca

SEQ ID NO: 39802 - RNA, 75 nt, Homo sapiens
ggccggccccccacgcgcacacaagggagcccccccaccacccccgagacagagcgggagccaccagcgccaaag

SEQ ID NO: 39803 - RNA, 77 nt, Homo sapiens
aacggggacgacacaaccaacaacaggagccaggagcaggggcgcggcagaggcgcggacgagcagcgcagggcggg

SEQ ID NO: 39804 - RNA, 75 nt, Homo sapiens
ccacgcgcggaaggcagcgcccagcagcgcaggacggggcgaggacgcaaccaccaccgacccgagccagcccga

SEQ ID NO: 39805 - RNA, 62 nt, Homo sapiens
ggcagggacagcgcaggcagcaggcgaagaccagggccacagcccagaaacccaaagcccac

SEQ ID NO: 39806 - RNA, 78 nt, Homo sapiens
cacgaaggcaccgacgcacagcgaccaccaacagaccgaagggaaagacaaggagccgggccgagaaaccgaaccaga

SEQ ID NO: 39807 - RNA, 73 nt, Homo sapiens
gcaaaccgacaagaaaaagcggcggcccagggagaaccagggccgcgagggcccggaacaggggcacgcacga

SEQ ID NO: 39808 - RNA, 75 nt, Homo sapiens
cgaccacaagccgagcgccccccaagggggccccacgaaggacggccagcgcggcagggaggagagacagaagcc

SEQ ID NO: 39809 - RNA, 53 nt, Homo sapiens
aggaaagcacacacacaccgcaagggccagcagaagaggaccagacgcccggg

SEQ ID NO: 39810 - RNA, 80 nt, Homo sapiens
ggagcaccacccgcgacgcaacggcgacacgggaccaagaggcgacggcgagacgccccagggccaccgccagcagacga

SEQ ID NO: 39811 - RNA, 83 nt, Homo sapiens
gagaagaaaagcgggagccagggcaaaaagacaacagaggccggagacacagacacgaaaagagacccggccaagaaacgccc

SEQ ID NO: 39812 - RNA, 73 nt, Homo sapiens
ggggcgaaacacccaaaaggcagaggacccgacgaaggcaggcacagggaagaaaagcaaaaagcacggaaaa

SEQ ID NO: 39813 - RNA, 56 nt, Homo sapiens
cggggcgggcccgggggcccagcgggcgccgcgcacgcggacacaccaaagagacc

SEQ ID NO: 39814 - RNA, 55 nt, Homo sapiens
caacacagccagccccccgagggagggacaaggacaaagcggcgcacgcacggag

SEQ ID NO: 39815 - RNA, 75 nt, Homo sapiens
aggagacacagaagccgacagggagacacggcaggaacccgcgaagcgggaagaggaacggacgaagcgggagcc

SEQ ID NO: 39816 - RNA, 82 nt, Homo sapiens
gccaaacggaggaaacccgagcaacccaggccagccagcgggggagcgggaggagccagagcacaccgcaccacggccacag

SEQ ID NO: 39817 - RNA, 54 nt, Homo sapiens
agagagaagaggagagagaagaaaagaaggaacacacggacgcccagaaagagg

SEQ ID NO: 39818 - RNA, 68 nt, Homo sapiens
ccgcgccacagccaccagagccggcagcaaagagggaacaggaacaagcagaaagcacgaacaacgag

SEQ ID NO: 39819 - RNA, 48 nt, Homo sapiens
caggacacgggcggagccagcccaggaggcaaaaacaaaaccaggaca

SEQ ID NO: 39820 - RNA, 85 nt, Homo sapiens
gcgccgcccggcagcccggcagaggcccgccaagccgaggaggcagaggccgagccccacagacccccggcacacggggccagga

SEQ ID NO: 39821 - RNA, 77 nt, Homo sapiens
ccaccccaagaccgggcggaacaccccccaggcccacagccgggagaccgagagcccagaaagcaaaggaggaacgc

SEQ ID NO: 39822 - RNA, 75 nt, Homo sapiens
ccgcgggccgccagacgggaaggaaaccccaccacgcggcaggggccgccgaggaaaaagcaacaagaagaaaac

SEQ ID NO: 39823 - RNA, 81 nt, Homo sapiens
aggacacgccaaaccgcaaacaagaacaaggccagaggcaagaaggcccgaaaaagcccaagacagcagaagcagacaccc

SEQ ID NO: 39824 - RNA, 82 nt, Homo sapiens
ccaccagacagacgcgcaaaacccagcacagccccgcggcgcccgagccccaccagcggccccgacacaccaggcagaagga

SEQ ID NO: 39825 - RNA, 75 nt, Homo sapiens
gcaaaaacagcagaaccggcagagacagaaccaaaaagagcaggagaaaagaacagcccaggcacagcaaggaag

SEQ ID NO: 39826 - RNA, 78 nt, Homo sapiens
ccaagcaggagacagccaaggggagaccacaccaagcgggagacacaccacgccaaggggacgaaaacccgaggcacc

SEQ ID NO: 39827 - RNA, 68 nt, Homo sapiens
aagcggcaaaacccacaacccagggacggcagcccacagcaccacaaagagggccaggcagcacagga

SEQ ID NO: 39828 - RNA, 68 nt, Homo sapiens
gcaaccagaccgcagaacccaaaggcggcacagaacagagggacagcccaggccaagacagcagccac

SEQ ID NO: 39829 - RNA, 94 nt, Homo sapiens
aaggaaggaagaaggcgcacaccccagcgcgcaaagcgcgaggggcgaggaaaagaaagcgcaggaaaaggagcgagaagaacggaagcgaagc

SEQ ID NO: 39830 - RNA, 80 nt, Homo sapiens
cccccaagacagcgacgaagccagaaccgaagcccgcaccaagacccagagaccaagagggcgcagagggcgaggaggag

SEQ ID NO: 39831 - RNA, 77 nt, Homo sapiens
cgagaaggcaaggggagggaagaagggaagacggccgcccgggcacaaagaccaccggccggggccggcccaaagcc

SEQ ID NO: 39832 - RNA, 57 nt, Homo sapiens
ggagaccgacaaaaaggccaggagggggccacaccgaacccagccgggaggccaagg

SEQ ID NO: 39833 - RNA, 64 nt, Homo sapiens
cagcgcccgcgggcccagccgacgccaccacgccgcggagcacgggccgaggagcccagcacgc

SEQ ID NO: 39834 - RNA, 77 nt, Homo sapiens
cccgcagccgccaccacccaggaccagaaggcgggggaagcaccgcaaacaacaaagcggaaaacaaaaaacggaag

SEQ ID NO: 39835 - RNA, 83 nt, Homo sapiens
aagaagggcgagggagcaagcgcacacgaagagaagcaaggcccaagacccaggcgaacaccggcagagagagagacacacca

SEQ ID NO: 39836 - RNA, 51 nt, Homo sapiens
cgagaagggggggccagggaaggccgaaacagagacagcggagagcccaac

SEQ ID NO: 39837 - RNA, 74 nt, Homo sapiens
gcaccaggaaggagcaagaccggcacaccacgccggcaaaacaggcgaccgggcaaaaggggcccccccggcgc

SEQ ID NO: 39838 - RNA, 76 nt, Homo sapiens
ggacgagggccgaccggagcccaggcggccccagacgggggaaccccaagcggcaaggccccgagcgcccaaccaa

SEQ ID NO: 39839 - RNA, 67 nt, Homo sapiens
gcagggcaaagcaacagccaaaaaacaggcagcaagaaaacacggcaggggaaaccccagccagcgc

SEQ ID NO: 39840 - RNA, 76 nt, Homo sapiens
ggagagaaagaaagaaaagagcagaccagaaggaggaaagcaacgcagcggacccagccaaccaggaggaggaaac

SEQ ID NO: 39841 - RNA, 78 nt, Homo sapiens
aggccggcgggacgcgggcgccaggaccggccgaacgcagagcgcgccgcgcgccgggagaggcccggggcccgccgg

SEQ ID NO: 39842 - RNA, 72 nt, Homo sapiens
gcacggacggggaaggggcccacccccgccaggaggcaagcgccaggaccgcggggggcgagccgccgcgcc

SEQ ID NO: 39843 - RNA, 94 nt, Homo sapiens
gacaaacagcccgcccgaccccgcccgacccggccgccccgagcggagccggagagcccgaggagagacaggaaggccgaaggagagaaaaaaa

SEQ ID NO: 39844 - RNA, 77 nt, Homo sapiens
agcaaaacccaagcaaaaccagagcaggaacaagggaaacccagcgcacgacacccgggagccccggaaagagaaga

SEQ ID NO: 39845 - RNA, 78 nt, Homo sapiens
cgaagagaagggggacaaagggagccaagaggccacgacagaagaacagcaacagaacacaccaagagacccggaaaa

SEQ ID NO: 39846 - RNA, 69 nt, Homo sapiens
ccggccgggaggacaccagagagcgcacggcagagaacccaggagaaacgagagggacagcaaggaaga

SEQ ID NO: 39847 - RNA, 70 nt, Homo sapiens
aggagcacagaaaggagcagacgggagcaaaggcacaaaaaggacggcggcgagaggcggaagacgcaga

SEQ ID NO: 39848 - RNA, 103 nt, Homo sapiens
ccaagacccgcggcaacggcgccggcaggcacaacaaccaagaaaaacgggggccgccgccaagcaccgaggagcaacacccccagggagcccagaccgacag

SEQ ID NO: 39849 - RNA, 68 nt, Homo sapiens
gccacaaccccaggggagacacaagaccggcggccacgcaccccccaagaagaggcacccaggcacaa

SEQ ID NO: 39850 - RNA, 73 nt, Homo sapiens
aggaagaaggaggaaggaccgaaaacgggcaaggcggcaagagcgagcacaccagggcacaaggcccacaaag

SEQ ID NO: 39851 - RNA, 74 nt, Homo sapiens
ccaggaagagaagaaagaggacaacagacgggggaaaagcccaaaggaacccaaacaggccacaaagcaaccga

SEQ ID NO: 39852 - RNA, 81 nt, Homo sapiens
gaacacaaccaagcaacacaagcacccccgaagagggaaggcaccaggagaaggcaccgggaaacagaaagcaaggaagcg

SEQ ID NO: 39853 - RNA, 74 nt, Homo sapiens
agggagcggaagggagaccaacaccggacaccggacccaggcgaagagaagccaacgcacacgaggcaacgcgg

SEQ ID NO: 39854 - RNA, 83 nt, Homo sapiens
cgcgcccaacgcaccccggccagcccgccacacgggcacggacaccgcgaccagcaccacccaaacaagaccacaagaccaaa

SEQ ID NO: 39855 - RNA, 55 nt, Homo sapiens
cgagggccacacgcccccccacgccggcagggggccgcacggggggggcccggca

SEQ ID NO: 39856 - RNA, 81 nt, Homo sapiens
aggcaaggcaaagaaaaagacaaaaggaagagaagacaaggaaccacccgaggcggaaaccacagccacgagacccgaaac

SEQ ID NO: 39857 - RNA, 56 nt, Homo sapiens
gaccaggaggcgggccaaggacaacaggcacaaagagagaaggaacacccacaggg

SEQ ID NO: 39858 - RNA, 76 nt, Homo sapiens
ggaagccaaaaccacagaaaggcccggcgcgcgaacacaaaggcgcgagggaccaacaaagacagagagccaagaa

SEQ ID NO: 39859 - RNA, 105 nt, Homo sapiens
aaagggggacagaaaaacagaccaaagaaccggagagccggaaacagaagggaggagggacacacgacaggcccgagagggaacccacaccaaaacacccacaga

SEQ ID NO: 39860 - RNA, 55 nt, Homo sapiens
cgggagcgggaccggccggaggagcacccacgggaacagcccagaaacgagggaa

SEQ ID NO: 39861 - RNA, 79 nt, Homo sapiens
agacccagggcggaaaggaagaggagacagagggccgagaaggacaggacaggacaccaggaagcggaggcaagcaaca

SEQ ID NO: 39862 - RNA, 67 nt, Homo sapiens
ggagaaggaccaagaaccagcccccaaaacacaagaggacggagaagcgacgaaagaagccgggaca

SEQ ID NO: 39863 - RNA, 57 nt, Homo sapiens
aaagagacagacggacaacagcccaacaacacccaggaaaggcacagagaaacacag

SEQ ID NO: 39864 - RNA, 80 nt, Homo sapiens
aagagacagaggaagaagagagagcggggcagggcagaggacagcaagggacaacagaagacggagccaccgcaccaggc

SEQ ID NO: 39865 - RNA, 59 nt, Homo sapiens
acgcgacaccacaggcacaacgggggcaagggaaccacccgccccgaccaggagaggac

SEQ ID NO: 39866 - RNA, 75 nt, Homo sapiens
cccaaaagaccaccgcccaacacaacacgcaggaacccaggagcccccgcagggccccggagcccacacggagca

SEQ ID NO: 39867 - RNA, 77 nt, Homo sapiens
gggcacgagcaccgccaccaggggaaggggggcgaggagcaccgacgaggaagcaagacgcgaagagaaaaaagaac

SEQ ID NO: 39868 - RNA, 78 nt, Homo sapiens
caaaggcaaagaaagcagggcaaagggcgcagcggggaaccacacagccagagagagcaaaaccgaacggaaaacgcc

SEQ ID NO: 39869 - RNA, 97 nt, Homo sapiens
gaaaccgagcaggcagagagcagaagaacacagacagcggaagaggaccggcagaaaggaggacggaaagacaaacgaagggaacaggcgggaaggc

SEQ ID NO: 39870 - RNA, 57 nt, Homo sapiens
cgaaggccaaaaaggaggagaaccggagcaccagcaaggaaacgaagaccgagacca

SEQ ID NO: 39871 - RNA, 75 nt, Homo sapiens
gagaccgagagcccgcaccaaacagagcagcagcagcagagagaaacagcagggaaggggcgagagaaaaagaag

SEQ ID NO: 39872 - RNA, 75 nt, Homo sapiens
cccagcaacgcgggacgcggcggcgccggccccggggagaaacgacagacagaagcacccgcggaccgcaccagg

SEQ ID NO: 39873 - RNA, 74 nt, Homo sapiens
ccgggcgggagggagacgcggcgaaacgccagggagagaacagcacacagaggcgcaaggggaagagaaaagac

SEQ ID NO: 39874 - RNA, 77 nt, Homo sapiens
cgggcccagaggcccagggaggcaggggcagaaacagagaaggaacagaggaggaaaggaaggcgccagcaccagac

SEQ ID NO: 39875 - RNA, 83 nt, Homo sapiens
ggggggcagaggccggaccccagcacacagaagccgagacggcagcaagcaaagacggaggagcagacggcggccaggagaga

SEQ ID NO: 39876 - RNA, 75 nt, Homo sapiens
cagaccgggcgaagggagaggacagcagggaggcgggacgcggagggaaaacgacaaccagccgcaggcgaaagc

SEQ ID NO: 39877 - RNA, 78 nt, Homo sapiens
gggacccgcgcccccggacggccacgagaccgggggcccgccagcggacagccgccgccaacgacagcccacgagcga

SEQ ID NO: 39878 - RNA, 86 nt, Homo sapiens
gcgcccggcgggcgggccaagcaggacacgggcgcgggcccgcccggcgaaggggagcaagggagaaaagcaaagggaaggacgaa

SEQ ID NO: 39879 - RNA, 68 nt, Homo sapiens
gaaagaaaaagagaccaggcgaccggcccgaggaccgccgcacgaccaaacgcagaacccacacccca

SEQ ID NO: 39880 - RNA, 82 nt, Homo sapiens
cggagccagggccggcgagacaacagaggacgaggcaccccacagcacccggcaggcaagaaaggaaggggggcccagcaag

SEQ ID NO: 39881 - RNA, 55 nt, Homo sapiens
ggaccggacagaaagccaaaaaggagaaaggggagccgccaccaaaagcagacgg

SEQ ID NO: 39882 - RNA, 75 nt, Homo sapiens
cccagaccagcagcaaggccacgcagaccacacacagagagaagcggaggcagacgcgcccggagaaggacagca

SEQ ID NO: 39883 - RNA, 80 nt, Homo sapiens
ggccagcggccgaccggaggaggagcgcaggaagcgaccggagggcgcagcccgggcgcaggccagccggcggcaccccc

SEQ ID NO: 39884 - RNA, 76 nt, Homo sapiens
gcaacacgcaaacgagagcgaggcaagaaaaacagggaaaccccggccggcggcggggacaccaggacgacccaca

SEQ ID NO: 39885 - RNA, 75 nt, Homo sapiens
gaagaagagaccgacacaaggaaagcgaagcggcgccacccagcaagagagccccgcagcggggagaccgcagca

SEQ ID NO: 39886 - RNA, 80 nt, Homo sapiens
caggcaccacaaaaaggacagaaggcagcccacgcaacagaaagagggaggggaagcagacaagaagggacaaggaggag

SEQ ID NO: 39887 - RNA, 75 nt, Homo sapiens
gccaaagggccggaggccgaagaacaggagaaggaagaacaaagaaagacagaggaaaggagaaacagaacaaga

SEQ ID NO: 39888 - RNA, 80 nt, Homo sapiens
gaccggaccgaagacggaccggccgggaagagcccgaaggaggcgccaagggagacaccacaggggcaaaggccgcaagc

SEQ ID NO: 39889 - RNA, 77 nt, Homo sapiens
acagaacgacagacgccaccccccaagcccacaccgcggacagagcaaacagcaacaaggagcggggggaccaggag

SEQ ID NO: 39890 - RNA, 53 nt, Homo sapiens
gacagcaggagagcagccaaaacgagaaaaaagggacccaagaaagccccgaa

SEQ ID NO: 39891 - RNA, 75 nt, Homo sapiens
ccccaaaggaaagaaagaggaacagagagggaaaccagaagcccaggacgacaggccaaggggagaaaaaacaga

SEQ ID NO: 39892 - RNA, 78 nt, Homo sapiens
cagcggagcaacggcccaacccaggccaagcagaaggcaggaaccagagagcaaggagcgcaccgcagccagggccca

SEQ ID NO: 39893 - RNA, 81 nt, Homo sapiens
ccgaggagccagagggccagaaacaggaagaggaacgccggaacaaagaacgcaccaagcagaccagaagcaaaagcccac

SEQ ID NO: 39894 - RNA, 67 nt, Homo sapiens
aagaagagaggagggagaacacagaaaccggccccagaagcacaaggaccgaggaaccacgccaggg

SEQ ID NO: 39895 - RNA, 71 nt, Homo sapiens
ccggcgaccgcggacgacggaccagaagcccgccgcaaagggacagcacacaccaagcccgaaggcacgaa

SEQ ID NO: 39896 - RNA, 40 nt, Homo sapiens
cagccccgaggcgaccaacagccagagaggggacgcaggc

SEQ ID NO: 39897 - RNA, 81 nt, Homo sapiens
gcggccagcggcggccccggggcgcagccagggaccgccccccgccgacaggggcacaacaccagcccccacaggggcccg

SEQ ID NO: 39898 - RNA, 79 nt, Homo sapiens
gaccccaagaacaggacaccaccggaccgacaggccagagagccccgacgccgcaggaacaggcagaggagacaccgcg

SEQ ID NO: 39899 - RNA, 72 nt, Homo sapiens
accacacgcagaacgggcggacgggcgcccagccagacaaaccagggccggaggaacgaaagagagagaaaa

SEQ ID NO: 39900 - RNA, 69 nt, Homo sapiens
ccagaaaccggaagcgagggaagaaacccacaaacccagagacagcggaggaaaaaccccaaaaggcgg

SEQ ID NO: 39901 - RNA, 79 nt, Homo sapiens
cacaccggacaggaggaagggagaaaaggcagcaacaacaggcagagcgcaggccccagcgcccagagcgaaaaagaac

SEQ ID NO: 39902 - RNA, 70 nt, Homo sapiens
ggcacacgcagcagaagcccggaccgaaacacacaagaggagggaagcaccaaacaaaccgaaaaaggga

SEQ ID NO: 39903 - RNA, 67 nt, Homo sapiens
ccgacgccaggcagcgcccccaaacggaacaaaacaggaagcggaaaacagaaccacagacaccccc

SEQ ID NO: 39904 - RNA, 70 nt, Homo sapiens
agaccaccgagggaagccaaggcccccagaacacaaaccagagaaccccaaagacaaaagagcgaaaaca

SEQ ID NO: 39905 - RNA, 60 nt, Homo sapiens
agcccgagcgggggaacccagaaaccagagcagcccaccaagaaacagaaccgaagccgg

SEQ ID NO: 39906 - RNA, 78 nt, Homo sapiens
agcaacggaggcgggaccggaacaggcacaccccacacaagcacgccaagcaaacaacacccaacagcccaaagcaaa

SEQ ID NO: 39907 - RNA, 74 nt, Homo sapiens
gagggccccgaggaaccgccgccggcaccacccagccaaggagaggcagagcgaaccagaacaagggacccccc

SEQ ID NO: 39908 - RNA, 76 nt, Homo sapiens
cagcaacccaaaacacagggacgcaaaagaaagcccagagaagcaaaccagccccagaaaagaaaagaagcaggcc

SEQ ID NO: 39909 - RNA, 71 nt, Homo sapiens
gaaaccaccgccagcggccgggaggcgggggagcgcgggcgagccaagcagcgggcggacgcccagccggg

SEQ ID NO: 39910 - RNA, 73 nt, Homo sapiens
acacagggcaagcagaagcgccgcaaggcacagccagcccgccagggacacacagacgccacagagggacagc

SEQ ID NO: 39911 - RNA, 70 nt, Homo sapiens
ggcgggaggacaggggcagggggaaggagaccgaaaagaccgaagaaacggacgaaaagccgagagcgcc

SEQ ID NO: 39912 - RNA, 74 nt, Homo sapiens
acaccgacagcaaggagcagaaaagccacgaggcgccgaggggagccggagcggaaggagcacagacccaggga

SEQ ID NO: 39913 - RNA, 76 nt, Homo sapiens
accaacccagaggggccaaaagcgccaaagcgacaggagcggacaggcccagaggcacaccacaggagcacaaaga

SEQ ID NO: 39914 - RNA, 80 nt, Homo sapiens
gcgcgccgcggcggccgccacaggcgcgcccagggaccgaggcgcgaggaaaagcgggacgcccagcaagagacaggcga

SEQ ID NO: 39915 - RNA, 93 nt, Homo sapiens
agggccggcccccccaggacaacccagaggcaacaaaggcgaggagacggaagcggaagcacacgccagacgccagcaggccggagcacggcg

SEQ ID NO: 39916 - RNA, 64 nt, Homo sapiens
ccggaagccccggcgcgcaccccggcagcgcgaggaaagcccaaagagacagccccaaggcgga

SEQ ID NO: 39917 - RNA, 72 nt, Homo sapiens
aagcagggaggagaagcgggccagaacaagagccaagaggaaggaaaccaccccacccaacccccgacacag

SEQ ID NO: 39918 - RNA, 77 nt, Homo sapiens
agaacccacccggaaacccagaggacgcgggagaaggagaagaagaaaaagaacaccaaacacaacaagacacaagg

SEQ ID NO: 39919 - RNA, 65 nt, Homo sapiens
gccgcaggggcggcacacagcacgggcgggggacgggcagaaaaacaggcaggcagcccgaggcc

SEQ ID NO: 39920 - RNA, 73 nt, Homo sapiens
aggaagacaggaacagcagcaacgcggaaggaagaacagaaacacgaccaacggaaggccaaagacagacggg

SEQ ID NO: 39921 - RNA, 72 nt, Homo sapiens
aggcgagacccccgcccacgcaaacccaaagaccccgccggagacgagagacaacgaagagaggaaagaagc

SEQ ID NO: 39922 - RNA, 73 nt, Homo sapiens
gcggcggcgccaggcagggcgcaggcgggcaacacaacaaggcgcggacacccagacaagcgcgccaccggcc

SEQ ID NO: 39923 - RNA, 72 nt, Homo sapiens
gccgcggggccccgaccccgaaggccaggaacgggaccagaaccccgagggccggcgcagcccccgcgaggg

SEQ ID NO: 39924 - RNA, 62 nt, Homo sapiens
agacacagaccagacgccaaagaacgggggagccgggaaaccgaagaaggcagagaaggcaa

SEQ ID NO: 39925 - RNA, 77 nt, Homo sapiens
gaggaacccagaacagggccgggcggcccaagggaaaagcagcggccgcaaggacggaaaaaggaccagacaaagaa

SEQ ID NO: 39926 - RNA, 48 nt, Homo sapiens
agcccgaggcccggagcgaccaggagacaggcacaaaagacccgaagc

SEQ ID NO: 39927 - RNA, 68 nt, Homo sapiens
caggaggaagacaaaagaggcgcgaacaaccgcagccaccccaggaggccaaacaggagaacggcaag

SEQ ID NO: 39928 - RNA, 77 nt, Homo sapiens
gaaggaccaccaaccaaaaggcagcgcagcccggaaagaaacaaagaaacaaaacgagcaaggcaagaggcaagagc

SEQ ID NO: 39929 - RNA, 61 nt, Homo sapiens
cgcaaggggagcacggggccggaccagccccgaaacacgggcggagaacagccaccggaag

SEQ ID NO: 39930 - RNA, 82 nt, Homo sapiens
cagaagggacccaagccgggacacccgagaaagcggacggggcgccacccggacacgggaggcaggccagccaggaagaccc

SEQ ID NO: 39931 - RNA, 78 nt, Homo sapiens
aagaggcgcacagcccggacacccaaggggacaggacgggacgggagcgaagggaagacccgaaacaagaagaagaga

SEQ ID NO: 39932 - RNA, 81 nt, Homo sapiens
ggcccagaaacgcacacaagaaggagcgaaaacgccacaacagagggggccagggcggggaagacaaacagaacaacgggc

SEQ ID NO: 39933 - RNA, 78 nt, Homo sapiens
aaagcgcgaagagacccaaacgcagggcggcaagcccccgaagcagggcagacggcgcgaagcacccacagaaaggga

SEQ ID NO: 39934 - RNA, 63 nt, Homo sapiens
ggcccccaaagggcgccggagacagaaacgagccccagagacgacgccccagagagcacagac

SEQ ID NO: 39935 - RNA, 79 nt, Homo sapiens
aaggagcaaagcaacagaagacaaggcgcacacacaagaaaggcaacaaaaccacgcagggaaaccacgccgggacggg

SEQ ID NO: 39936 - RNA, 74 nt, Homo sapiens
cagccgaccccccgagcgcgcagcaagaggccccaacacaggaagagaaccaggaacccgccagcagaggcacg

SEQ ID NO: 39937 - RNA, 50 nt, Homo sapiens
cacgaaaacacacaggcacaccgcacaagccggaacgcgcgccacccggc

SEQ ID NO: 39938 - RNA, 64 nt, Homo sapiens
ggggaaggcgggggaaggacagcagccaccgcagccgaggacacagcaggggccagacaaccag

SEQ ID NO: 39939 - RNA, 78 nt, Homo sapiens
ggaggaggagcccccgagaggaggcagacccccacaagacgacacccgacggggggcaagccgagcggcaacgaaaca

SEQ ID NO: 39940 - RNA, 86 nt, Homo sapiens
ccggcacccagacaggggcgacggcagaggaagaaacgcggggcacaccacgagacgggaaaccaggagggaaacaggaaaggaag

SEQ ID NO: 39941 - RNA, 79 nt, Homo sapiens
caaggccaccaagagacaaaagaagagaaagccccaagcgacaggggagggacccaggaagagccaagccacccaaacc

SEQ ID NO: 39942 - RNA, 48 nt, Homo sapiens
ggaaggacagcacgagcacccccgcgcccgcccggccggcaccaggac

SEQ ID NO: 39943 - RNA, 51 nt, Homo sapiens
gcccggcacccgggcagcggcaggcggacccgaccaaagacgccccccggc

SEQ ID NO: 39944 - RNA, 75 nt, Homo sapiens
aacgggaagaaagagccccaaggacaggccacgcagaaaacaacaagggcacaaagcggaagggagcagagacaa

SEQ ID NO: 39945 - RNA, 80 nt, Homo sapiens
ccaagaacaaagaagccaccgggcggcagcagcagggacccccagaagcacgccaaccaccggagaaaagaaaaagccag

SEQ ID NO: 39946 - RNA, 54 nt, Homo sapiens
cagaccccaccggagaagagcagaagggggcgcggggaggaggagccgagacag

SEQ ID NO: 39947 - RNA, 41 nt, Homo sapiens
ggccgcggacaccgaccggagaggcggggaaaaaggagaag

SEQ ID NO: 39948 - RNA, 67 nt, Homo sapiens
cagcccccaagagcgggaacaggagccaggcaaaagaagccacggcacaaggagaccagccccaaca

SEQ ID NO: 39949 - RNA, 70 nt, Homo sapiens
gacagacagcgcacccaggacgcgccagggggacacagaaaaagcaaacgccagcagaccacacccagac

SEQ ID NO: 39950 - RNA, 86 nt, Homo sapiens
gaccagccaagggcccggaccaccgggccagcagcccagcccaaacgaccggacgccaggaaggaaaacacccggcagggaaggaa

SEQ ID NO: 39951 - RNA, 65 nt, Homo sapiens
aaagaccggaagcgagaccccacccacggaaaaaagcacagccgagacggcacgagaacgggacc

SEQ ID NO: 39952 - RNA, 60 nt, Homo sapiens
cgaaccaaccccacaacaccgccggagacagccaaggcagcgcggagagcgaggggccaa

SEQ ID NO: 39953 - RNA, 81 nt, Homo sapiens
ccgaccacggaggcgccagcccaacacagcagagccacagggcccaggggcccgggccgccccagggcacggcggaaccgc

SEQ ID NO: 39954 - RNA, 75 nt, Homo sapiens
cggggagcgacagaagacaaacagcaaggggcaaagcagcagccgcccaaaacacaaaccaaagaagaaacccga

SEQ ID NO: 39955 - RNA, 70 nt, Homo sapiens
ccaagacggcacaaaggcggacacgaaaccaccgggaagcgccggggaacgcagagcccaaaaggcagag

SEQ ID NO: 39956 - RNA, 78 nt, Homo sapiens
acaggaagaagagagcggaacagcagagcgcacaaaggaaacccggacgcgaacccaccaccgcccaccaacaaccag

SEQ ID NO: 39957 - RNA, 79 nt, Homo sapiens
gcagccagccaggcccgcgagccgccaggcgcaagggccaagcacgcgccagcggcggaggcggaccggggggcccggg

SEQ ID NO: 39958 - RNA, 101 nt, Homo sapiens
cagcaaggccagcccacgggggcccagagaggggcccccaccacagagccagaggagcaaagacaggacggcgagaacagaagacagagccggagacagcc

SEQ ID NO: 39959 - RNA, 67 nt, Homo sapiens
accggcaccgcggcaagcaccacaaaggaacgccacacgcgaaaaacggagaaagaagaaacaaaga

SEQ ID NO: 39960 - RNA, 73 nt, Homo sapiens
accaagaaccagggcgccccacgcaagagcccgccccccacccgggagcccccaccagggcagacccagcgcg

SEQ ID NO: 39961 - RNA, 60 nt, Homo sapiens
cacagaggaaaccgcaccgcccggagacaagacgaggggggaacccagaggaggagcgcc

SEQ ID NO: 39962 - RNA, 71 nt, Homo sapiens
gcccagcagaagaagagaggagggagaacacagaaaccggccccaggggacccagaccaaacggccaaacg

SEQ ID NO: 39963 - RNA, 79 nt, Homo sapiens
gaacaagaaaacagaaagaagagaacaggcaaaaagggcaagacaagggaagaggaaagagcgcccggccagggggaga

SEQ ID NO: 39964 - RNA, 79 nt, Homo sapiens
gggcagaccccaagagaaaggagccccccaagcgagagaggaacgaggggcacagaaaccagaaaaacggagcgcgcaa

SEQ ID NO: 39965 - RNA, 66 nt, Homo sapiens
caaaggacgaagaacccacagagaccgaaacaaggaccccccgggagaagaaaagcgggacgagga

SEQ ID NO: 39966 - RNA, 74 nt, Homo sapiens
agcagcggagcaaggaaaccggagaggcggagccacaagcacgcggaagagccacagccgccgagcaccggggc

SEQ ID NO: 39967 - RNA, 76 nt, Homo sapiens
acaacacagaagaaacccacaggcaggagaaggggaaagcaaagcccaacaaaaaaagaaggccaccccagcaaca

SEQ ID NO: 39968 - RNA, 69 nt, Homo sapiens
gaacaaagaccggagcagcaacgcaagacaccggcacgcaacagaacagagcgggagagccccccacga

SEQ ID NO: 39969 - RNA, 74 nt, Homo sapiens
agggcacaagagcaaagagagaaccacccgcacacagccaaagcgcaaagggacacaagggcgcaaccaaagca

SEQ ID NO: 39970 - RNA, 79 nt, Homo sapiens
aaaggcgaggcagaggggcagcaaagcaaagagaaggagaaggaaaaccagaaaagaaacaaacgcagaagcaaagaga

SEQ ID NO: 39971 - RNA, 78 nt, Homo sapiens
cgcaaccgaaggaggcacccagccacaccccagagacgcgcacgaaacgacgaagaggcccgaggacagaggagcaaa

SEQ ID NO: 39972 - RNA, 67 nt, Homo sapiens
caagccaggccacaaggaaccaagacagcgccacagacagaaaaggggaccaaaacaaaacgagagc

SEQ ID NO: 39973 - RNA, 62 nt, Homo sapiens
aagacacccccagggcagaaaagcgaccaggcgagacaacgacgaaagacccacagaagcgc

SEQ ID NO: 39974 - RNA, 54 nt, Homo sapiens
cggccgaaacagaaaacaagagaccacagaagaacgagcgacggacacaagagg

SEQ ID NO: 39975 - RNA, 66 nt, Homo sapiens
acaagaagcggaagagggcgggggagaagaagagcaacgccaagggcaaaacggagaccacaaaaa

SEQ ID NO: 39976 - RNA, 72 nt, Homo sapiens
gaaaaagcaaggaacagaagccaccgcaaaaaaggcggcagcagccaccacgaccccaggcccccagccagc

SEQ ID NO: 39977 - RNA, 101 nt, Homo sapiens
ccaaccccagacgcgcaggccagccccggcaggccaagcagaaccacaggagggggcacacagaggcacgagaacggggaacagaacagcccaggagcggc

SEQ ID NO: 39978 - RNA, 76 nt, Homo sapiens
ggcaaaaaagcaaacacgaggccacggggaaacacagcagaacacaggcccgcagaggggaccggacagagcccac

SEQ ID NO: 39979 - RNA, 79 nt, Homo sapiens
ccaaacggacaggagaacggcgccacaagaaagagcaggacaagagaaaggcggagcaaaggaaaacaggcagaccggg

SEQ ID NO: 39980 - RNA, 86 nt, Homo sapiens
cggcgccggaaaagccccgccagggcccccaggggggccgacgacgagccccgcgaggagcgcagcggagaggccagaacgcccgc

SEQ ID NO: 39981 - RNA, 58 nt, Homo sapiens
caggagaaaacaagcagcaaacggcagcccgacacagagcagacaaccgaacagaagg

SEQ ID NO: 39982 - RNA, 65 nt, Homo sapiens
cacacgagcggaggcgaaggcccccacagggcaggaagccgccgcccagccaggacggggaggag

SEQ ID NO: 39983 - RNA, 81 nt, Homo sapiens
ggacaccaaacaccgccgccgcacgagacacgagacaggagagaaaggagagacaaaggaccagacaaaggcaaaaaggaa

SEQ ID NO: 39984 - RNA, 76 nt, Homo sapiens
caccggacggcaagcacaacgaccgacccaaccgaagaaagccaaaagaaaaaaaacaagaggaaaaggaaaagaa

SEQ ID NO: 39985 - RNA, 87 nt, Homo sapiens
agaaggggggaggaagaggaggaggaagaagaagggaggaacagaaaccaggacggaggcacaagcccacaagcgcagcaagcccgg

SEQ ID NO: 39986 - RNA, 94 nt, Homo sapiens
ggcacgccaaggagcagcaggagcagacggccgaggaaaggggcccaggacgaagccccagggggcggaggccacacccgggaggccggaccag

SEQ ID NO: 39987 - RNA, 52 nt, Homo sapiens
cagcaacagcggccgggaacgaccgaaacaccagaaccgcgggggcgaaccg

SEQ ID NO: 39988 - RNA, 34 nt, Homo sapiens
cacgcagggcaggaagccggagagggggaagccg

SEQ ID NO: 39989 - RNA, 73 nt, Homo sapiens
gccccgcaacgaccgaaaaaggggacggcaaaaaagaggaccacgaacaaaagagaaagaggccacagagacg

SEQ ID NO: 39990 - RNA, 77 nt, Homo sapiens
ccgacgacacagaaaaagacccagcgagaaagccacccacagacccacgcccccacccagaacaaacacaaacagcc

SEQ ID NO: 39991 - RNA, 58 nt, Homo sapiens
caaacggcgagaagacaccggcagacacgagaggcgagggacgacagagcaagcggca

SEQ ID NO: 39992 - RNA, 52 nt, Homo sapiens
cgagagaccaacgccccgcccgagagagagagagagaggaagcgaagaaaaa

SEQ ID NO: 39993 - RNA, 77 nt, Homo sapiens
gcgaagccgaggccccgcaacggcaagccccagggcgaagacccccccccagggcaaaccaccaggcaagaagaccc

SEQ ID NO: 39994 - RNA, 73 nt, Homo sapiens
acacgggcaccggaccaggccggggggggcacagagccccggaagacagcccccagcgaccagacccagggcc

SEQ ID NO: 39995 - RNA, 74 nt, Homo sapiens
gagagccaacgcaaccaggcgcaggacacacagagaggaccgcccacaaggcccagacgcgacaggccggacca

SEQ ID NO: 39996 - RNA, 76 nt, Homo sapiens
aaagccccaagcgacaggggagggacccagacaacaaacaccccggcacagggcagccaaccacacaggacccagc

SEQ ID NO: 39997 - RNA, 73 nt, Homo sapiens
gccgccgccaagcccggcccggcccgacaccgcgggccgccagacgggaagggccccgagccccggccccaaa

SEQ ID NO: 39998 - RNA, 55 nt, Homo sapiens
acaagaaaccgcacccaaggggagggaagcagccaagcgggcagaagaggaagcc

SEQ ID NO: 39999 - RNA, 62 nt, Homo sapiens
ccgggaggagggacaaagcaaggaggaggcagggccagcgagaggacgaggagcccccacaa

SEQ ID NO: 40000 - RNA, 83 nt, Homo sapiens
cagagccgccaggcagaaggccccccgaacagcaggcgccaccagcccggaggagagagaggaagaagaggaagaaagaaaca

SEQ ID NO: 40001 - RNA, 56 nt, Homo sapiens
gagcggcgcgcgcgcgaggacggaggccgcagccgaccgacagcggcacgagccac

SEQ ID NO: 40002 - RNA, 61 nt, Homo sapiens
acggagaaccaaggccaagaccagaaccagcccgggaaagcgcgcccacacaccccgccca

SEQ ID NO: 40003 - RNA, 79 nt, Homo sapiens
accgggaccaaccaacagaaacgaaggaggcccaaccacaaaaggagccgacggaacccagacggagaacaaaaggaag

SEQ ID NO: 40004 - RNA, 82 nt, Homo sapiens
caccccacggccagggccaccaaccccaacccggagagcggcgagaaccaaaggcagacccagaagagcacaaaacagagaa

SEQ ID NO: 40005 - RNA, 72 nt, Homo sapiens
ccgcgccccgccggccacgcaccgagccgcgcggccaggcgcccacccagagaaaagcagaaaagacaccag

SEQ ID NO: 40006 - RNA, 71 nt, Homo sapiens
aacaaagacggaccaacccaggacccccccacagaaagccagaaagacaaacagaccccagaaagaagaag

SEQ ID NO: 40007 - RNA, 53 nt, Homo sapiens
agcagagcgcagcgaaccggcaaccacaaagcccggcacccaggacgcccacc

SEQ ID NO: 40008 - RNA, 48 nt, Homo sapiens
acgcagggcgcccccgaacgaggaaccccagagaggacagaagccaac

SEQ ID NO: 40009 - RNA, 66 nt, Homo sapiens
acaagccgaccgagcagaacggccagccgcaggagaacccagacgcgaagaagcggaggacaggac

SEQ ID NO: 40010 - RNA, 83 nt, Homo sapiens
gaaccgcgccaccgggaggggacggcccagccccagcgcggcccagcaccggggggaagaagaagggaacaagcggagggacg

SEQ ID NO: 40011 - RNA, 73 nt, Homo sapiens
gaacggcagccccaagaacggaaaggcgcccgcagacgcagaagaccgcagagccgcgcgaccgcccgagcga

SEQ ID NO: 40012 - RNA, 73 nt, Homo sapiens
cggaggggaggagcacagcagccgggccggcgaaaaaccggaagaaagaagcgaaagagagaagagcaagaga

SEQ ID NO: 40013 - RNA, 82 nt, Homo sapiens
cgcccggggagaagagaccccaagagggagcagcccacggcaaagaaggcgcgccccagaccaccggcagggaacagccgag

SEQ ID NO: 40014 - RNA, 81 nt, Homo sapiens
gaaacagcagagaccccagacgccaccacaacccccagacgcaagccaagggagagaacagcacacagaggcgcaagggga

SEQ ID NO: 40015 - RNA, 71 nt, Homo sapiens
agcggcagcagaaggaggcaacagacgcggagccacccaaccaaggacgaagaagcagaagccaacaaaca

SEQ ID NO: 40016 - RNA, 37 nt, Homo sapiens
cccgcgcaccgcccagagacagccgacgccagacagg

SEQ ID NO: 40017 - RNA, 82 nt, Homo sapiens
acccgcccagcccccgagagcgggaacaggcacgcgccaccaccccaggaagcacacagcgaaggagacacaggaaaagaca

SEQ ID NO: 40018 - RNA, 63 nt, Homo sapiens
gcgcagccacaaggccgcaggggagccgagagccacagaggaagcagccacgaagaagcaggc

SEQ ID NO: 40019 - RNA, 87 nt, Homo sapiens
cagaggcgaccggcagggagaggaggcggcgagagagacccgcccaagacccccgcacaagaaccaagccgacgcacccgcccgccc

SEQ ID NO: 40020 - RNA, 69 nt, Homo sapiens
acgcgcggaaggcagcgcccagcagcgcaggagagccccagaagaagaaggcaccaaccaagcaaaaag

SEQ ID NO: 40021 - RNA, 79 nt, Homo sapiens
gagagcggaccgagagcgcgaaacgcacgagaagccccagaggaaccgcacggaccccggaacaggaaagacccgagcc

SEQ ID NO: 40022 - RNA, 80 nt, Homo sapiens
acacgaggggcagaaagagaccgcagagacagccaacacggcacccacaggacccagcggccaagcccgggcccagcccc

SEQ ID NO: 40023 - RNA, 85 nt, Homo sapiens
gcgcagcagaaccgcagccaccggcacggggcgggcagcggcgccgggcacaggagggaagagcaagggcagggaggcgcccgca

SEQ ID NO: 40024 - RNA, 72 nt, Homo sapiens
aaacagaagcgcaagagaagcacagaaaagagcaccggccagcagaaccagccggggccggcaagccccgcc

SEQ ID NO: 40025 - RNA, 60 nt, Homo sapiens
cacgaaaggaaaaacagaccaggacaaacggggcaaagcgccagcagagaacgccgaagc

SEQ ID NO: 40026 - RNA, 53 nt, Homo sapiens
gacagacccagcagaagggcagaggggcgggcaaaggagaggcacaggaagca

SEQ ID NO: 40027 - RNA, 80 nt, Homo sapiens
cggcacaccacgaggggaagccccgacaccaggggacacccagaagcggcgccgccggcagagccgggggcccggaagca

SEQ ID NO: 40028 - RNA, 75 nt, Homo sapiens
caccaaaggagcaaggagaagagccggggaggagaggagaaaccaagcagacccaggaagaagagcaccggcgac

SEQ ID NO: 40029 - RNA, 101 nt, Homo sapiens
agagccaaccggcgcggcacgagggccacaaacgaagaagccagccgcggcccggaggggccgcggcgccaagagaaccgacccgggaaagcgaaacccaa

SEQ ID NO: 40030 - RNA, 75 nt, Homo sapiens
gacagccagaggagagagagagacaacaggagcccggacgaaacaggcccaagcgagccaaagaaggaaaagaaa

SEQ ID NO: 40031 - RNA, 82 nt, Homo sapiens
gagacggaggaccagaacacggcagcgaacacccaaacccaggagcggaccggcaccacacgggggccacccccggacgccc

SEQ ID NO: 40032 - RNA, 69 nt, Homo sapiens
gaggagaccagaacgaacccccccccccgcggaagccgcagaaggaccggccagaagcaagccggagaa

SEQ ID NO: 40033 - RNA, 79 nt, Homo sapiens
acggggggagggagcaggcccggggagggggaccgcgaggagcgcagccgcaaggggaaagcaccaagaagcagcggaa

SEQ ID NO: 40034 - RNA, 79 nt, Homo sapiens
caccaagcagggcagacccccaaagaacaagaggggaaagaaaaagagcccaccaaaaggaacagacggccccaggcgg

SEQ ID NO: 40035 - RNA, 75 nt, Homo sapiens
aaaaaggaacaaagaaaaaaccacagaaccaaacggaccgaaaccagacaagaacacgcacgcgggaagcacggc

SEQ ID NO: 40036 - RNA, 73 nt, Homo sapiens
acacgccggcggccaaggagccggggcaggagaaacaacagccaccaaggcgcgggaaaggccaagcaggaga

SEQ ID NO: 40037 - RNA, 69 nt, Homo sapiens
cacaacaggaaccagagcgggcaaccaaacgggcgaacaaaaccagccacggagggcaggccgcaacgg

SEQ ID NO: 40038 - RNA, 84 nt, Homo sapiens
cagccgagcgggcccgccgccggagcgaggaccagaaacacagcaggcggacgcccggcgggagggcagcggcagaagcaggac

SEQ ID NO: 40039 - RNA, 81 nt, Homo sapiens
ccgagcgaagcagccaccaccagcagcgagcaagaaaaaggcacaaacccagcacagagaagacggcgacaagcaaaagac

SEQ ID NO: 40040 - RNA, 79 nt, Homo sapiens
cacggacccaggacccccgcgggcgacgcgagcccagccacaaagagaggaaaccgggccaaagcaaaggagagggccc

SEQ ID NO: 40041 - RNA, 73 nt, Homo sapiens
gaagccccaggagcagagaacggaggagcagaaaaaaggcagaaaggaggccgcaggacccccagcccaggac

SEQ ID NO: 40042 - RNA, 74 nt, Homo sapiens
gccggcgggaccgcagcacggggaaacgaccgccccaaaacgagagacacccggggggcaagggacaagaaggc

SEQ ID NO: 40043 - RNA, 71 nt, Homo sapiens
gcagacagcaggggccaaccaacaacagcgacagagaccgaggaaagagcccagacccccccagcaaggac

SEQ ID NO: 40044 - RNA, 63 nt, Homo sapiens
acagcggcaggggccccgaaccagaagccgccggagacaggaagagaagcacaaagaagaaga

SEQ ID NO: 40045 - RNA, 69 nt, Homo sapiens
acacgaaaaaaggaacaggaagaagaccaggacaacgcaaagcaccgggcagcaaagacaccgaaacca

SEQ ID NO: 40046 - RNA, 82 nt, Homo sapiens
cacaacaaagaagaccacacacgggaaacacaaaacgagccgggggggcgagcccgccgagagcgccaaggaggagacaacg

SEQ ID NO: 40047 - RNA, 57 nt, Homo sapiens
ggggaaggcggaggaccgggagcggcggggccaggaaacacccagcagacggagcac

SEQ ID NO: 40048 - RNA, 114 nt, Homo sapiens
cccgcccggggggaccccaccagaggacagccagccggaccccagcccaagaaccgaggggagcgcagcgggagcagaccaggccaggagacagcagcggacccgggggggggg

SEQ ID NO: 40049 - RNA, 42 nt, Homo sapiens
gccaaagccaggccagccacgcgcccggcccagcccacccag

SEQ ID NO: 40050 - RNA, 85 nt, Homo sapiens
aacccgcaccaagccgcccacacgccaaccggccagaggacgaggggacccaaagaccagacagcgcaaacagcgaccggcccag

SEQ ID NO: 40051 - RNA, 70 nt, Homo sapiens
cggaggagcccccagcggggcggagcgaccccgcggggcgcggccgagaccccacaagccagcaggcaga

SEQ ID NO: 40052 - RNA, 80 nt, Homo sapiens
agccccggcccgcggccagcacggcaacgcagcccgaggacaagcggcggacagagcgaagaaccccccaagaagacgaa

SEQ ID NO: 40053 - RNA, 73 nt, Homo sapiens
agcagaagcgcccgcaagaagagaggacaagcgcccaccacagcccagaaagcaggacccaccccggccagca

SEQ ID NO: 40054 - RNA, 76 nt, Homo sapiens
gccagccgggggcccggagcccggcccagggaagccggccgaggaacaggaggccacgcaagccgccgcgcccagc

SEQ ID NO: 40055 - RNA, 84 nt, Homo sapiens
gagcgccaggaaagaaggaaccccgaccgcagcccccgggcacgaccccggacacgggcaggcaggggcgcaaaaaagggaaga

SEQ ID NO: 40056 - RNA, 86 nt, Homo sapiens
gaagaggggcaacaagacgcccgagggcggacgggccccgcggccgcccgagcaggaggacgaacagaggagccaccggcccaggc

SEQ ID NO: 40057 - RNA, 80 nt, Homo sapiens
aaaggcggggaagaagccacgagccagagccccggacacaggagccggacaaggacccgaggaccacgcacccgagccag

SEQ ID NO: 40058 - RNA, 80 nt, Homo sapiens
aacgggggcacagagaggagccagaaaaacgggcaaacccccccgagcacgcgcagcaaacccacccgcccggaaggcca

SEQ ID NO: 40059 - RNA, 68 nt, Homo sapiens
aagggggaagccgagaagggcggagaacggaaaagcaccaggaagcagagaggaccgcagaagggaag

SEQ ID NO: 40060 - RNA, 66 nt, Homo sapiens
gacaaggggcccgaacagaggggaaaggcccgagccaaaagacccagagaaaggagcacgaaggaa

SEQ ID NO: 40061 - RNA, 71 nt, Homo sapiens
gacagcaccgcacaggggaacaagggcgacaaaaagggagaaacagggaagagaaagccaaacccaccccc

SEQ ID NO: 40062 - RNA, 82 nt, Homo sapiens
acaggcgcagcggccgcagcagcagcggcagcacaggcacacagcaaagagacggcaccaggacaagcgagggagacacggg

SEQ ID NO: 40063 - RNA, 77 nt, Homo sapiens
cggccccgaggaagcaaggccgcggggggagaccccaccaccggaaaaccaacccaaggcccaccaacagcagaaac

SEQ ID NO: 40064 - RNA, 75 nt, Homo sapiens
gcgaaggagaagagagaaggagggcgcccacgggccgcgggcccgccaccagccaaggacccagaagacccaccc

SEQ ID NO: 40065 - RNA, 58 nt, Homo sapiens
gccggacggcggggccgggcccccggccgcaagcaggagggggaaccagccaaaccaa

SEQ ID NO: 40066 - RNA, 46 nt, Homo sapiens
acgaagacacaagccgagggaagaggcgacacaccaaagaaaaaac

SEQ ID NO: 40067 - RNA, 75 nt, Homo sapiens
gggggagacggggaagacaggccagcgcggccaagacccaccgcaagggaccagagaagacgggcaacagcgaaa

SEQ ID NO: 40068 - RNA, 77 nt, Homo sapiens
gcgggcacggcccacggccggcgcacccgcacaggggacagagcgaagaaccccccaagaagacgaaacccccgggc

SEQ ID NO: 40069 - RNA, 78 nt, Homo sapiens
ggggggcggcagcgcggacacccagccccaggacagcggggaaagagagacagggacagaggccaagcgaaccagcaa

SEQ ID NO: 40070 - RNA, 77 nt, Homo sapiens
gcgcgcaccgccacccgcagagcacacgcggagcagaaggcccggaggcgcccgcgggccagcgcgccgacggggac

SEQ ID NO: 40071 - RNA, 77 nt, Homo sapiens
gccggaaccccaacgcgacagacgcgaggaacaccggcagcacacgaacagggaaagcacaggcaaccagaaaccaa

SEQ ID NO: 40072 - RNA, 57 nt, Homo sapiens
caagaccacagcagcacccagagcagggcggggccagcccacgaggcaaggaagccc

SEQ ID NO: 40073 - RNA, 30 nt, Homo sapiens
caaaggagcacaggaggacacaaaagcaac

SEQ ID NO: 40074 - RNA, 78 nt, Homo sapiens
ggacgagaagaaggggaggggacagacggggccacccccacacgcccccagccaaacagagggcgcgaagacaaacaa

SEQ ID NO: 40075 - RNA, 110 nt, Homo sapiens
cacagaagaagcacaagacaagggccaaaacaggacagaaagaaggaaaaagcagaaagccagaggaagggaaccaagaccaggacaaagaagacccggagagacaagcc

SEQ ID NO: 40076 - RNA, 61 nt, Homo sapiens
agggaaggacaccgacccacgaacccccccagagcaccacagagacgggaggcgacgccaa

SEQ ID NO: 40077 - RNA, 65 nt, Homo sapiens
cgcgcaggagaaggcaggaaaccgacgagaggacccagcccaagggccaaccgccccccagcagc

SEQ ID NO: 40078 - RNA, 45 nt, Homo sapiens
aaaaagaaccgcagacaggcggcccaaaggcgaaacacagaagga

SEQ ID NO: 40079 - RNA, 77 nt, Homo sapiens
cgagaggaccggcgagggcacaggaggcggagcaagcggggagaaaccggagagacagccccacagacgcaggcgca

SEQ ID NO: 40080 - RNA, 81 nt, Homo sapiens
aggcccccaaaacagcccaaagcaggcaggccgggcagcgcgaagcagcaggagaagagaccggccaggagggcgggcccg

SEQ ID NO: 40081 - RNA, 84 nt, Homo sapiens
cgagaggcaggcaggggacccggacccccccgggaagacacaaacgcaccaccagaaagccaagcggaaaaggaaacccaacca

SEQ ID NO: 40082 - RNA, 76 nt, Homo sapiens
aaggaaagcacacaagaaagacaaggaggacacaaaaggaagcaagcaaaccacgcccgggcaacaccagcagccc

SEQ ID NO: 40083 - RNA, 75 nt, Homo sapiens
caaagcccagaaacccggacaggacgagggcacgaaggcgggaacaccgagccagaagggagcaaagcgacgcca

SEQ ID NO: 40084 - RNA, 70 nt, Homo sapiens
caccccaccgagccgacggcagcagccggaggagccaccaacagaagcaggagccaggaaaccaaaaccc

SEQ ID NO: 40085 - RNA, 82 nt, Homo sapiens
ccagccgccgcaggcgccgcacggaggcgcccggggacggggccgcagggaggacggacagcgcaggagaagagggccacaa

SEQ ID NO: 40086 - RNA, 82 nt, Homo sapiens
cccgggcccgggcagcccgcggggcaccgcggaggagccacacgaagaagccgaggacgaagacgacggggagacagcggag

SEQ ID NO: 40087 - RNA, 91 nt, Homo sapiens
caaacaggggaagaagagaagacccaaaagccaagagaaggaagccaacaccggagccagaaagccgaacccacggccagaggaacaggga

SEQ ID NO: 40088 - RNA, 46 nt, Homo sapiens
cgcaggcaaggggaacaagggagaagcagaccgcaccaggcgggac

SEQ ID NO: 40089 - RNA, 68 nt, Homo sapiens
cccggggacccccgacgccaggcagcgcccccaaacgcagccaagaagagggaaagaagacaggaaac

SEQ ID NO: 40090 - RNA, 75 nt, Homo sapiens
gcacccccaacagccagcacccccagccgccaccagggggagcgcagggagaagccacaggcgcagcgagcggaa

SEQ ID NO: 40091 - RNA, 57 nt, Homo sapiens
ccagaaaacagaaacgaaacagaacagagagaagcccagaagaagagagggcgaagg

SEQ ID NO: 40092 - RNA, 59 nt, Homo sapiens
accagaggaaaaaagaaagagaaaaggaaagcagaagacaagcagcccaggaggcacac

SEQ ID NO: 40093 - RNA, 51 nt, Homo sapiens
ccaagaaggccaaggaaaggaccgaccccaaagggccaccgccacccaggc

SEQ ID NO: 40094 - RNA, 81 nt, Homo sapiens
cgcccccgaaggaagccgcccgccccccaccgccgcccccccggcggcagcccccgggggcccaaagcacaagcgaccgcc

SEQ ID NO: 40095 - RNA, 48 nt, Homo sapiens
cgaaggccgggaaggggaacagaccaaacgcgaagaaccccccacccg

SEQ ID NO: 40096 - RNA, 78 nt, Homo sapiens
gaaggcgcgaggaggaaaggaggacgaggggcccgcgccggagggaggccccagggcggagaagcggcgcagcaccag

SEQ ID NO: 40097 - RNA, 71 nt, Homo sapiens
cgggaagggaacagagcagacccggacggaacaggcaaaagaggcggagaacggaaaagcaccaggaagca

SEQ ID NO: 40098 - RNA, 82 nt, Homo sapiens
gaacggaaacagaggaggaccccaggaaaggcagaaaacgccagggagaagaagagaagacaggagacaaacgggaaagcaa

SEQ ID NO: 40099 - RNA, 67 nt, Homo sapiens
cgcagggcgcccccgacacagacagcaacgaggacgggaaccacaacaacaggacaggacggcgcaa

SEQ ID NO: 40100 - RNA, 52 nt, Homo sapiens
cagccccgagaccgggaacaggcgagcgagcagcaaaaacacagccaccaac

SEQ ID NO: 40101 - RNA, 82 nt, Homo sapiens
agagaaagagaacaccggagggaaaagaacggagcccaccgcaggacaccggggaacacgggcggcgagagaaaaggccagc

SEQ ID NO: 40102 - RNA, 80 nt, Homo sapiens
aggcaagcgacggcccgaacgagcggaggccaacaaaagccaaggaacgaacagggcgggcggaggcgggaagacaagag

SEQ ID NO: 40103 - RNA, 67 nt, Homo sapiens
cgggcggacacaacaagcgcaacaggaccagcaaaaaaagaacccaacacgcgcagcgcgcccggcc

SEQ ID NO: 40104 - RNA, 81 nt, Homo sapiens
ccagcgaaggagcacccacccaggaacccgccaccagaaagcgcagagagacaaggcggcggcggcgcggcggggcaggag

SEQ ID NO: 40105 - RNA, 38 nt, Homo sapiens
aggagcccggaagcccaaagagacagggcccccggccc

SEQ ID NO: 40106 - RNA, 75 nt, Homo sapiens
acccacgcagagggcggagcggcagacccagagcaggacggacaccgaaccggcggcgaggcccagacccacgca

SEQ ID NO: 40107 - RNA, 83 nt, Homo sapiens
caagcaagagcgacgcaagaggcagccaccacgggccggaaagccaacaggcagaccagagacagcgccacgcacccggggag

SEQ ID NO: 40108 - RNA, 78 nt, Homo sapiens
gagaggcaggaaaaagcaacggacaaaccggcagagagggagaccaaccgaaggacaagggaaggagcagaggcaaag

SEQ ID NO: 40109 - RNA, 71 nt, Homo sapiens
aaccggcgacaaagaagagcagcccagcacagggaccgccccagggggggggggacccaggcggccccagc

SEQ ID NO: 40110 - RNA, 86 nt, Homo sapiens
gggcgaaacgaggaggagaaacgcggccgggccgcgagcagcgacaggcgcgccagcggcggcggcgaaccggggccgcggcggaa

SEQ ID NO: 40111 - RNA, 65 nt, Homo sapiens
ggccgcaagaagggagccaagcggagccagcgccaggacaagcaggccacgggaggcaagagaag

SEQ ID NO: 40112 - RNA, 89 nt, Homo sapiens
gcggcgcgcgcggacgaagagccccccccccaacaccgcgacacgcaggacgaaccaagaaacaaaagggaagaccggaacggagacgc

SEQ ID NO: 40113 - RNA, 79 nt, Homo sapiens
cagaaggacgccgggagagagagcagagcaaggcagaaggcggcagggagcacgcaccaggagcccacggcccacccac

SEQ ID NO: 40114 - RNA, 68 nt, Homo sapiens
agcacccagccacgcgcccagcgccacaaggaaccacagcaggaagacgggaagccaagcaggacaac

SEQ ID NO: 40115 - RNA, 49 nt, Homo sapiens
aggaccaagaaccagaacaaaccaggggagggaaacgagaaaaacgacg

SEQ ID NO: 40116 - RNA, 78 nt, Homo sapiens
agaccaaaggaccgccccgggaggcaccgagaggaaaggcgagggaagcgccgggagaacggaagaggacaagagacg

SEQ ID NO: 40117 - RNA, 43 nt, Homo sapiens
gaagacgcagaggaaacggcagcagaacagcgccgcaaggcac

SEQ ID NO: 40118 - RNA, 86 nt, Homo sapiens
cggggcgggggcgaggcggcggcggcggccggagccccagccgaccccaagaagaagcggaagaggagccgcggaaccaagacaca

SEQ ID NO: 40119 - RNA, 68 nt, Homo sapiens
acacaccacaggaaaagcaggacaccaagcggcgagacgcaggagaacccaggacgagaaaaaacaga

SEQ ID NO: 40120 - RNA, 73 nt, Homo sapiens
ccagcagacggcagaggagcgcccaacaacacagacccggccaacgagcagcacaagaggaaagcagaaggac

SEQ ID NO: 40121 - RNA, 53 nt, Homo sapiens
caccgacaaaacaagcgagaggccagagggggccaaaaacagagccaagagaa

SEQ ID NO: 40122 - RNA, 69 nt, Homo sapiens
ccggccacaggaacaagaaccagggagaagccgcccgaacaccagggcggagaacggaaaagcaccagg

SEQ ID NO: 40123 - RNA, 84 nt, Homo sapiens
ggaaacaggcggaggcgggaccaaacacaagcagcgcagccaggcggaaagcggggggagggaaaaagagaccgagacggccag

SEQ ID NO: 40124 - RNA, 73 nt, Homo sapiens
acgcagggcgcccccggagccaaaaaccgaacacccggaaggggacaagggacggcgaacagaccccgcgcgg

SEQ ID NO: 40125 - RNA, 62 nt, Homo sapiens
ggcagggagcgcggacgcagagaggggcaggcagacaaacgagacaccgccagaagcaccag

SEQ ID NO: 40126 - RNA, 81 nt, Homo sapiens
gcagggcaccgcgcgaagcggccaaagccgcccagacggccaccggcgggaggaacaaaagcaccagaacagaagaggaac

SEQ ID NO: 40127 - RNA, 72 nt, Homo sapiens
ggaagccaacacccaagacacaaggagagaggcgccgggggagacccaaccagaccagcggcaacgcaccag

SEQ ID NO: 40128 - RNA, 70 nt, Homo sapiens
caggagcagcccaggggaaggcaagccaccgagaaagggaggaccacaacaacaaacaggcggagccgaa

SEQ ID NO: 40129 - RNA, 76 nt, Homo sapiens
gggaggcacagaccgacgaggacggcaggaagccaaagaggaaacgacacggccggcacagagcaacaagcaggcc

SEQ ID NO: 40130 - RNA, 83 nt, Homo sapiens
accaagaaacaaagaagacaccgcggaaaacggggaaacgaagacgaggagacaccacaggaggcaggaggcagccagaacca

SEQ ID NO: 40131 - RNA, 81 nt, Homo sapiens
ccggggcggcggcggcgggacgcgaggaccaggcgccccgagcgccgcgcccgcgcacaagacaacagcaccgcgccgagc

SEQ ID NO: 40132 - RNA, 76 nt, Homo sapiens
ccagcagcacggacaacggggggagcgggagccaaaaagcccgaccaccggaacaaaacaggaggagaaacagaag

SEQ ID NO: 40133 - RNA, 72 nt, Homo sapiens
gagaggaggggaccagaacggaacaggccggcggccccaccccccaggagccagagaaaaaaacaggggaga

SEQ ID NO: 40134 - RNA, 85 nt, Homo sapiens
agggcccgcaagcgaggcccccgggacggccaagggcgacaggcgcggacaaccgcaacggcgaggcccagcagggccacgcacc

SEQ ID NO: 40135 - RNA, 76 nt, Homo sapiens
gccgaggcaggggacacgaggagagaccaggaagacagaaaccaccgaaacaccaagaggaaaagggagagacgaa

SEQ ID NO: 40136 - RNA, 72 nt, Homo sapiens
gaaggaaacacaagaaacagccgaggaacacaagaaaacgaagaagaagcgaagacacagccacgaaacaca

SEQ ID NO: 40137 - RNA, 36 nt, Homo sapiens
gccacccaccccacaggaccaagcagagagaccgga

SEQ ID NO: 40138 - RNA, 82 nt, Homo sapiens
caggacaggcgcaggggccaaacacagaacagcaaagaggaggccagcgcggccagcagaagggcggggccagcacaggaag

SEQ ID NO: 40139 - RNA, 97 nt, Homo sapiens
gacacccacccccgcacgagggcacgggcagcgaggagaccggcccagcccgagccgaaagcagacccgccagcgccgccagcgcccggcccggccc

SEQ ID NO: 40140 - RNA, 73 nt, Homo sapiens
acacgcagaagcccccaggacagaccgagcccccggaaaccccagaacggcagcgcggagggggccgcacgga

SEQ ID NO: 40141 - RNA, 73 nt, Homo sapiens
gccaccagcggcagccgcggggccacacccggggagcagagcgaggcagggccccagagacacaagacaacca

SEQ ID NO: 40142 - RNA, 84 nt, Homo sapiens
cacggggggcccgaagcaggccgaaaggccgcgggaacgcgcgccgccgacaaggcgcacaacagacccccccccagggccaca

SEQ ID NO: 40143 - RNA, 73 nt, Homo sapiens
agccacaggcccagcccagaccggccagagaaggagaacaagaggaagcacacggaagagcgaaaaagagaaa

SEQ ID NO: 40144 - RNA, 102 nt, Homo sapiens
acaagcccaggaaggagcaagaggagaaacaaggaaaggccacaacagcaaggaacagaggaaccagagccggcagcccaggggcgaaggcgagcagcacga

SEQ ID NO: 40145 - RNA, 80 nt, Homo sapiens
caaaaaccgaccaaggaggaggcccaagaaaggccacgcacaggcgcggccgaacccagcgagaaaccaggaaccacccc

SEQ ID NO: 40146 - RNA, 83 nt, Homo sapiens
ccacaacccagccacgagacaagacacaaggagggggcagagcgagggcaaacagacaggcgcagcaggggagaccacaggac

SEQ ID NO: 40147 - RNA, 56 nt, Homo sapiens
ccgcgccccggcggggggaagcccgcgccgccggcaccagagccaggaaaggacac

SEQ ID NO: 40148 - RNA, 78 nt, Homo sapiens
caggcgagccaccacagcacaggggggacccacggaagaggcgggcccgagaggcagccacccgccaaaccaggccgg

SEQ ID NO: 40149 - RNA, 64 nt, Homo sapiens
gaagacaaccccaaaacccggaccaccgcggaccgggagaggggacgaaggcgaaccagcaaga

SEQ ID NO: 40150 - RNA, 59 nt, Homo sapiens
ccgccccggccgcaggccagggagggacgggacaccagcccccacggacccagacgagc

SEQ ID NO: 40151 - RNA, 77 nt, Homo sapiens
caaaccgaggaaggaaacgacaggggaggagaccacaaccgcaaaaagagccaggaccacccaaaggaaaaaccacc

SEQ ID NO: 40152 - RNA, 75 nt, Homo sapiens
cagcggacgggcgcggagacgccggaaggagggaaaaaaccggagcaaaaacaagcagacagacggcagaaggag

SEQ ID NO: 40153 - RNA, 84 nt, Homo sapiens
aaggggggagcccccgagggacaaaaagaggcgaccgcacggcaggagaccaaggaaaggcccgaaaaaggcagagaacgcggc

SEQ ID NO: 40154 - RNA, 72 nt, Homo sapiens
cgcgagcagcgggacacgagagcagcccgcccgacgagagagaagcccggacagaagcgagcagcagaggag

SEQ ID NO: 40155 - RNA, 58 nt, Homo sapiens
caccaggaaagacaggagaccaaaaagcaccaggaagaagaggcggaagaaacaacaa

SEQ ID NO: 40156 - RNA, 57 nt, Homo sapiens
gcagggcgcccccgaggcgcccccaccccggccaagggccgcacccagaccgaaggc

SEQ ID NO: 40157 - RNA, 36 nt, Homo sapiens
gaaccagaaaagaggaccagaggaaggcggggaggc

SEQ ID NO: 40158 - RNA, 67 nt, Homo sapiens
ggagaagaaacgagagagacaccaccagcaggagccgaaaaggggacggcccgccggaggcaccaag

SEQ ID NO: 40159 - RNA, 84 nt, Homo sapiens
cgaggccgcgggcggcgggcccggaaaagacagaggcgagaccggacaggaaagcccccagagaccaaccgagcaccagcacgg

SEQ ID NO: 40160 - RNA, 86 nt, Homo sapiens
cggggaagggagcgccaggcggccgcaggcgggcggagagccagccaagaaaagggccaagcaaaacgggaacagcggagaagaag

SEQ ID NO: 40161 - RNA, 69 nt, Homo sapiens
accggacagaaagccaaaaaggagaaagaccaaaccaagcacaacccacgacgaggggcacgcccaagc

SEQ ID NO: 40162 - RNA, 71 nt, Homo sapiens
caagacaaaggaggacaccacaaagcagcacacgggggagggcagggagaggaagggagacggcaacggaa

SEQ ID NO: 40163 - RNA, 73 nt, Homo sapiens
gaggcaaagagacaaggagagaagaaccaaagaagcaaaacacgagaacgaaaacaaacggaagagagggcag

SEQ ID NO: 40164 - RNA, 71 nt, Homo sapiens
cagcccaggagaccagcaaagaaccaggaacaccacccgcagggcccgggacgagcggcccagcgacgagc

SEQ ID NO: 40165 - RNA, 67 nt, Homo sapiens
ggcaccaccgccacggagccacacacggagccccagaccggaaagccgcccccgccggaaccaagac

SEQ ID NO: 40166 - RNA, 67 nt, Homo sapiens
ggcggggaggcacgagagaagggaaacaggccagccacgcagcagcagaagccaggccgggcggggg

SEQ ID NO: 40167 - RNA, 77 nt, Homo sapiens
gagggaacccgaccggacccagccccagaaggaaaaagaggccacagaaggccagcagacaaagagcccaggacacc

SEQ ID NO: 40168 - RNA, 72 nt, Homo sapiens
cagcggcaagccacagacgagacccgcggcgcggcggaccagcacaccggaccgccacccaaggccggaccg

SEQ ID NO: 40169 - RNA, 69 nt, Homo sapiens
aagcagcagaaaacagaggcccacgaggggaagcggggggccgggggggcagggaccccacaggagaag

SEQ ID NO: 40170 - RNA, 80 nt, Homo sapiens
ccacgccccgggcacggacacggagggggccgaacgcggaggcagcgccaaccggagggaagggcaagaaccgaccccga

SEQ ID NO: 40171 - RNA, 77 nt, Homo sapiens
acaaccaagaggaaagggggccagcaacccagacgcccacaggacaaaccagaagcagcaaggcagcaaccaaaaca

SEQ ID NO: 40172 - RNA, 78 nt, Homo sapiens
ccaagacagagacgcggccaaaagcgcaaaccagcaaaagcagaaagcacggaccaaaccagcgaaaaggggagaaaa

SEQ ID NO: 40173 - RNA, 51 nt, Homo sapiens
gcccaacaacccccaaggacgccccgccccagcacaagagaaaacagacag

SEQ ID NO: 40174 - RNA, 63 nt, Homo sapiens
agcagcaaggaacgcccgacccacaaggaaaacagaaccacaccaccgcgccgccgggaagcc

SEQ ID NO: 40175 - RNA, 76 nt, Homo sapiens
aaaccagaggaaggaccccagagaagacagcgcgcccaggacaacaccccggccaggggcagcggcccagacagcc

SEQ ID NO: 40176 - RNA, 76 nt, Homo sapiens
aacagggcaggcggccaaaccgaagcaacccgcaaggccaggacacagaaccgagggaaaagggccagggacgaag

SEQ ID NO: 40177 - RNA, 75 nt, Homo sapiens
cccgcgggacacaagacgggcaaggcgaagcacacagcagaggcggaccagacgggaagagcccaccccggagcc

SEQ ID NO: 40178 - RNA, 74 nt, Homo sapiens
cgggagggggccgccaggccaaaggcggagcgccccccccaacccaacggcaccaaggaagagagaagggaaac

SEQ ID NO: 40179 - RNA, 56 nt, Homo sapiens
cagaaagacagagcacgaaaggcaacgcggcgaagcgcccaggggagaacccagaa

SEQ ID NO: 40180 - RNA, 53 nt, Homo sapiens
aaaacccagggggcgaacacggaagaggcccacgcggaccggcagcgccaccg

SEQ ID NO: 40181 - RNA, 70 nt, Homo sapiens
ggagcccaccggcccaaaggcccggacccaaaacaggaaaggcaagaaagacacaaagacgagcgaggaa

SEQ ID NO: 40182 - RNA, 62 nt, Homo sapiens
agcgcacccgggcgcgcccaaggaccgcggagcggacgcagacaggacacagaacagagaag

SEQ ID NO: 40183 - RNA, 67 nt, Homo sapiens
cccccagaaaacgacaaacaggaaacaacaagaacggcgcgaaaagcacccagagagaggcagggcc

SEQ ID NO: 40184 - RNA, 69 nt, Homo sapiens
caggaggcgagcaacaggacccagacaggaaaaacccagggcagggagaaacgcgacgccggcaaggga

SEQ ID NO: 40185 - RNA, 67 nt, Homo sapiens
gaaaaggcacccagcggacggggccggacccagcgaccccccagaaaaggacagcaaagacccaagc

SEQ ID NO: 40186 - RNA, 78 nt, Homo sapiens
agagcagagccccgccccaaaccgggcccagcagaagaggaacccgaaaaccccaggggcggcgcaagggacgggggc

SEQ ID NO: 40187 - RNA, 89 nt, Homo sapiens
aaagaagaaagccaaaaaagagcacaagcaccaaaagcaccacaagaccacaagcaggcaagggcccaccgaaaagcgagaaaggcccc

SEQ ID NO: 40188 - RNA, 80 nt, Homo sapiens
agacggcccagcagaggagaaagaccccgccaggcagcaaaaacaagcagggagggaaaagaaagagcacccagggaccg

SEQ ID NO: 40189 - RNA, 74 nt, Homo sapiens
gacacccaaaaggagccagccaaacaggagcaagaaagagagccagaagaggcgagaagcagacgcccgccgcc

SEQ ID NO: 40190 - RNA, 75 nt, Homo sapiens
gcggaccagaccaggccgcggcccggccgcgggagagcgggggcgggaggcgggccccgggggcagcacccccag

SEQ ID NO: 40191 - RNA, 67 nt, Homo sapiens
ggcgcccgacgagcacggcggccaagggggagaagagggagacccgaacgaagacgcagcccagaca

SEQ ID NO: 40192 - RNA, 81 nt, Homo sapiens
ccaccggcggagcggacccacaccccggaccgagggacgcggaaacagccaagggacaaggagacaaaggggaacacccaa

SEQ ID NO: 40193 - RNA, 75 nt, Homo sapiens
gccccaaaaggcggcaacagccaccaacaacaccagggacacaacagcaaggagcagaaaccgaaacaccagaag

SEQ ID NO: 40194 - RNA, 68 nt, Homo sapiens
agacacgaacaagccgagcgaccacccaggggagaagggaagacaagaacaggcgaaaccaaaaccac

SEQ ID NO: 40195 - RNA, 81 nt, Homo sapiens
ccgcccgcggaaccacagcccagcacgggggagccaacagacagacagcgacccaaaaaacgcaaaacgagcaagagaaac

SEQ ID NO: 40196 - RNA, 72 nt, Homo sapiens
gcagaaaccacacaccagaaagaacgagcggccgaacaacaaggaaacaggaccgccaccgaacgcacggga

SEQ ID NO: 40197 - RNA, 64 nt, Homo sapiens
cagccccgagagcgggacacagaaaccccagcaaaaccagcgaagaagccagaagcacagacag

SEQ ID NO: 40198 - RNA, 79 nt, Homo sapiens
gccggacagagcagaagaaccccggacggacgagggaacaaaacgggacaaacgcagccggagaaaacggagcggagaa

SEQ ID NO: 40199 - RNA, 84 nt, Homo sapiens
ccgcggcgggccggagcccaacgccgggccgcaagacagcccgggacaacaccgagggggagacaagggacggcgaaggaacgg

SEQ ID NO: 40200 - RNA, 60 nt, Homo sapiens
acagacggacaagagaacaacaaacggcacggcacgaagaccagaggacaagacaaaggg

SEQ ID NO: 40201 - RNA, 76 nt, Homo sapiens
acgggcacgggcgaccggcccgcgagggcaaaagcagaccggaaaacccaccggcaagaccacacccgaggggagc

SEQ ID NO: 40202 - RNA, 79 nt, Homo sapiens
cgaagggaaccaaagagaacccaggagcccccgcagggccccggagcccacacggagcagcccgagagccggacagccc

SEQ ID NO: 40203 - RNA, 82 nt, Homo sapiens
ggaaccaaggcccccgaggagggggacagcaagaagaggaggagccagcgcaaccgaccccccacgacaccagggaaaacaa

SEQ ID NO: 40204 - RNA, 80 nt, Homo sapiens
agaaaaacaaggcacgaccccaaaggaagccagcaaggagggcgaaagaacccaggacgagaaaaaacagagcggaacaa

SEQ ID NO: 40205 - RNA, 74 nt, Homo sapiens
cgcaaacgcgggaacaagaggaggggacacaaaggaagaggcagccagacagcaccagcgcccaacgcacacga

SEQ ID NO: 40206 - RNA, 77 nt, Homo sapiens
cggggccccagcgcccgggcgcggggcggaaaaggccggcagaagggaggcacgaggacgaggaggggcagcaagcc

SEQ ID NO: 40207 - RNA, 83 nt, Homo sapiens
cagagaaagggagcaggaacccaagacacagcaaaaaaggaacaaaaagagacaaagaaaagaaaaaccagaagagaaagaaa

SEQ ID NO: 40208 - RNA, 117 nt, Homo sapiens
ggaggacggcgcaaccgcgcccgccggcccccccccgcgcccgcgaccgccgcggcgaagagggaaaggaaagcaagccaggaggaaacgacaccaaaccggggggggcggaggaca

SEQ ID NO: 40209 - RNA, 67 nt, Homo sapiens
cgggggagggccagagcagcaagggaagaagaacagaaaaggaaaggaccaaaggggaaaagaaaag

SEQ ID NO: 40210 - RNA, 109 nt, Homo sapiens
agacacggaccaaaggcgcagcagagccgcggcaaaccaacaccacagcagcaaggcgccgaccgagcgaggccgagccaaccccacccacagagcacacccgcgcaga

SEQ ID NO: 40211 - RNA, 76 nt, Homo sapiens
ccaagaccagccgacgcaacaggaagggggagcaacagacaagcccgaaaggaacagcagcaggaacgaaacccca

SEQ ID NO: 40212 - RNA, 93 nt, Homo sapiens
acaagcagccgccgacccgagggaacacggacgccgcaggagggccaagaggacaacagggagggaggcgcgccaccagcagaaggcaaaggg

SEQ ID NO: 40213 - RNA, 83 nt, Homo sapiens
ggcggcccgaggaggcagaaggaccgagccgacgcgggccgcgcggaggccgggaagaaggagggacacagcagcgcggagag

SEQ ID NO: 40214 - RNA, 68 nt, Homo sapiens
aacgagggcgagcagaggacgacaggccgggagacaacggcaagcggagaagagcaaggccgaaccga

SEQ ID NO: 40215 - RNA, 63 nt, Homo sapiens
acagccagagaaggggccagcggaaaagccggagcccacggagaggcccggagagaaggaaaa

SEQ ID NO: 40216 - RNA, 107 nt, Homo sapiens
ggggccccacccggccccgccgagcgcgccggaccggcgcccggacaacccgggcccgagggcaggacagcaggcaccggcgaagcacagagaggcgcgaggcaaaa

SEQ ID NO: 40217 - RNA, 70 nt, Homo sapiens
gggcaccaaaacacacaccgaaacccacgggaacacaggcgcagaacgccggcaggaaaggagacacaaa

SEQ ID NO: 40218 - RNA, 79 nt, Homo sapiens
aaaagcagagcgaccggaagggaaagcgccgagagacgggccgcgccgcccgcaagcagaggaccgagggcccccgagc

SEQ ID NO: 40219 - RNA, 86 nt, Homo sapiens
acaggcaagggcgaggaagcaggcacgcaagaagaaggcagaagaggagccccgccgaggcagagggccggcccccccagaggaag

SEQ ID NO: 40220 - RNA, 89 nt, Homo sapiens
aggcccgagcagccagcacggagaggagcaggagcggccgcggagcaggagcgagagcaggaacagaagaaggccaaagccggccaggc

SEQ ID NO: 40221 - RNA, 60 nt, Homo sapiens
cgaagcggccgagcaggcgagcgaacgacgcgaggggcacagaggcaggcacaaaaccac

SEQ ID NO: 40222 - RNA, 71 nt, Homo sapiens
gcagccggcagccaccggaggaggacgaagcggaaagaaaggacgaaagagagacaaggaagcagaagaaa

SEQ ID NO: 40223 - RNA, 80 nt, Homo sapiens
gccaggacgacgaggagcagggccgacgcgcaggaaccccaaagaggcccggaggaaacaggaacacccaagacaaaaag

SEQ ID NO: 40224 - RNA, 38 nt, Homo sapiens
aaagggcaccccaacaagaggcaaagggcgggaaacag

SEQ ID NO: 40225 - RNA, 76 nt, Homo sapiens
agagcacagcgcagaaaacgaccacagacggggagaccggcaggcaaaccacacgagaacacacccaacacgaccc

SEQ ID NO: 40226 - RNA, 73 nt, Homo sapiens
ccagaggaaaacaacaccagccgcgcacagccgaccaaccaaacaacgaaacagcggaagggcagaccaccca

SEQ ID NO: 40227 - RNA, 73 nt, Homo sapiens
cggaaccagacaggcaggaaaagacagggaaagagagggacgaaaccccagacacaagaaaaccagcaaacag

SEQ ID NO: 40228 - RNA, 76 nt, Homo sapiens
gaaaaggcacgccacggagggaggacacaccgggccagacagagccggcaagcagcccccccaccccggaagagga

SEQ ID NO: 40229 - RNA, 73 nt, Homo sapiens
gagcaaccaaagaagccgaaagcagaaaagggaaacaagcagcagaaacagcggaaagagccgcccagcaaaa

SEQ ID NO: 40230 - RNA, 72 nt, Homo sapiens
ggccccaggaaccacagcgccagaaggccaggcgcagggagcaggagaagcggagcgaaggggcgggcaggc

SEQ ID NO: 40231 - RNA, 75 nt, Homo sapiens
ccccaaagagcgagacacagagccgagaaggacagagggccagccccaggcccaggcaaaaagcaaaacacaccc

SEQ ID NO: 40232 - RNA, 84 nt, Homo sapiens
gcccaggcccccagcgagggcagcagcgcccaagaggagcaggcaagagcgaaggagaaaggcaacaaggcccgagcggggaac

SEQ ID NO: 40233 - RNA, 77 nt, Homo sapiens
ggccaggaggggagaggaggcaggcccgcggaaacacgagccccaccaaagcaaaggccggaccaggagagagcacc

SEQ ID NO: 40234 - RNA, 61 nt, Homo sapiens
gaagaggcaccaaaaagaaccgcagacaggcagaccccaacggaagggggcagcaaaacgg

SEQ ID NO: 40235 - RNA, 76 nt, Homo sapiens
accccgcccgggcaaacgggaaaaagagaaaggggaagccccgagaagggagccagagaaccgaaaacgccaccag

SEQ ID NO: 40236 - RNA, 72 nt, Homo sapiens
agccagggaagagaaaccgagcaacagacaaagcccggggggacaggagggcgcgagagagcggaaaccgac

SEQ ID NO: 40237 - RNA, 82 nt, Homo sapiens
ccgcagcgccgccgccgccgccagacgacggaggcgccgcacgacgcggggacagaccccagccaaccaccccaccaccccc

SEQ ID NO: 40238 - RNA, 85 nt, Homo sapiens
acaagggccaagacccgcgcacaggcagcgccagacccggccacgaggaccagggggggagacggcagcccagcgagcaagacgc

SEQ ID NO: 40239 - RNA, 80 nt, Homo sapiens
gggggacaccagaacgaggagacgagacgaggccggcaacccacagccgcccccccaccgcggaagagcaagggaagcac

SEQ ID NO: 40240 - RNA, 70 nt, Homo sapiens
ccagcggccgggccgagaaaaccccccggccagcgcgagccaggacaaagcccagaaaagagaaaacgag

SEQ ID NO: 40241 - RNA, 79 nt, Homo sapiens
gggcaagagaacagcacccggacaaccagggaaggcagcaacagaaccgcaaacagagcggaaaggcaaagaaccagcc

SEQ ID NO: 40242 - RNA, 84 nt, Homo sapiens
agcgggacggacaggcagggaagcaacgcagagggcaccagcaaacacaaaagggccaaaccaccaacgagccaaagaggagca

SEQ ID NO: 40243 - RNA, 61 nt, Homo sapiens
gcccccgaacgaacagaacgagaaaagaaagcccggacaaggggagacaaccccaggagca

SEQ ID NO: 40244 - RNA, 76 nt, Homo sapiens
cagggacaagcacggccacgcagccgaccccgggacaagggaagcggaaggccagcagaggcagacgcaaggcggg

SEQ ID NO: 40245 - RNA, 57 nt, Homo sapiens
aggaacaaggcggaggaacgagacgcgaaccagagaggaaaacccaagacaaggaag

SEQ ID NO: 40246 - RNA, 82 nt, Homo sapiens
gggggggggaccagccagccccccaggaccacagccccgaccgagagaaccagcgccagggcagggaagccccaacgggaaa

SEQ ID NO: 40247 - RNA, 70 nt, Homo sapiens
agacggaccacccacccggcacagaccacacccgccgcgcccgcccacggggaccagagacacaaccgaa

SEQ ID NO: 40248 - RNA, 79 nt, Homo sapiens
acaggagaaaagagcgcgccaaggggcaggcccaaaggaaagccacaaagaacacgagagacaggaagccgggcagggg

SEQ ID NO: 40249 - RNA, 71 nt, Homo sapiens
aagggagacgacagaccggggcaagccccgggcgggacagggagaagaaccaacaacggaaaaccagcggg

SEQ ID NO: 40250 - RNA, 87 nt, Homo sapiens
gccaggcgcccggggcccgaagcggggaaggggacaagaggacaccgaacggggcagggcccagccccgaaccagacaagggacccc

SEQ ID NO: 40251 - RNA, 87 nt, Homo sapiens
cgggcgggaacccgcggggagcgggacacgaacggggaaagaacgccggacaacagcggcgaagaaggcaaaccgaaggcccacaga

SEQ ID NO: 40252 - RNA, 84 nt, Homo sapiens
gcaagagcgagggcccacgaccccgccgaggaaacggaacgaaacggcagcagcaagagcaagaaagagccaaaaccaccagac

SEQ ID NO: 40253 - RNA, 52 nt, Homo sapiens
gcaacacggacccccacgaaagaaaaggacagaaccacagaagcgacccagg

SEQ ID NO: 40254 - RNA, 78 nt, Homo sapiens
gcgacacagccacacacacgaccaccaggaccgcgggacaagcgccgaacaaagcaagaagcgccgggggagaccaag

SEQ ID NO: 40255 - RNA, 91 nt, Homo sapiens
gaaggagccagaaccgacgggacagcaggaggaggggcccagacgcccgcccaacgccaggagggaagacaaagaggaaccagacaaaacc

SEQ ID NO: 40256 - RNA, 63 nt, Homo sapiens
cagaagagagggaggaacagcccaggcaaggacagcaaaccgcaagcccccggggggcaaggg

SEQ ID NO: 40257 - RNA, 44 nt, Homo sapiens
ggacgcacagccccagaacagaaggagaggacggggaggagcgc

SEQ ID NO: 40258 - RNA, 78 nt, Homo sapiens
ggaccgggagacacggccagacgcccccaggggaagacgcacgccgcacagaagagacagagaagcaggcagaccgac

SEQ ID NO: 40259 - RNA, 70 nt, Homo sapiens
cccagagcgcaaagacccgagacacgagccccaaggggaagcacccggaccccgagccggagcgcgggcc

SEQ ID NO: 40260 - RNA, 74 nt, Homo sapiens
aaaggagaggcggcgcccaaaaccgcagcacgagcccagcccgacccacgaacaacaagccacgaaccccacac

SEQ ID NO: 40261 - RNA, 83 nt, Homo sapiens
gcgacgagaggaaaggaaaaggcacaccgaaccacccggggcagaagcgccggcacccccggcacgacgccacacagcccaca

SEQ ID NO: 40262 - RNA, 95 nt, Homo sapiens
agccggaccgcgcagaagaccccgcaccagagacccacggcagggcaaccccaccgcggaaggcaggcacacagacgagaacagagaggacccga

SEQ ID NO: 40263 - RNA, 82 nt, Homo sapiens
ccgacgccgggccgggccaacccaccaacgccaccgcgagacgggagcagaaagagagacaccaccacacgggagcaaagga

SEQ ID NO: 40264 - RNA, 59 nt, Homo sapiens
gcgagaccaacgggagccccaaggcaaagaacggccaaggaaggagcgagggcgaggac

SEQ ID NO: 40265 - RNA, 72 nt, Homo sapiens
gggagaccgcaagagaagccccggacccacacacgaagagaaacaaacgcacgggcggagccagaaacaaac

SEQ ID NO: 40266 - RNA, 72 nt, Homo sapiens
ccgaacagaccccgccccagcagaagaggggggcggcacgcagccaccgaggccacggccggcaacggccag

SEQ ID NO: 40267 - RNA, 70 nt, Homo sapiens
caaccacccaacgggcccgggcaagcacaacgaggcgccagcggaaaccacgccaagaaggcgaggccca

SEQ ID NO: 40268 - RNA, 70 nt, Homo sapiens
gagaaggccgggcgagcgcaaaggaaggcgccgggcccgacccgcgagagaggacagcagcggacggccg

SEQ ID NO: 40269 - RNA, 87 nt, Homo sapiens
caggagaagcgagcccggacagaccaaccgcaggcgcaacccaaaggggcacaaaacgccccgggagagaagaggaggagcagaaga

SEQ ID NO: 40270 - RNA, 82 nt, Homo sapiens
cgcggagcgccgccgcgcgggggaccaccggaaaccgggccaggagcaccggggggggagaccggccgcccagccccagcac

SEQ ID NO: 40271 - RNA, 83 nt, Homo sapiens
ccaggaggaggcaggaccaaaagggaaaagcaccgcgggcgacgcacgaggcacacaggaaggaggggagcagggacgcgcgg

SEQ ID NO: 40272 - RNA, 70 nt, Homo sapiens
ggacacgcccagccccgggcacggaaagggaggaagaagagacagaaagcacagagaagcagaaagccgg

SEQ ID NO: 40273 - RNA, 77 nt, Homo sapiens
gagagggcggcgaaggaggcagaggcacagcgcaggaccaagaacgcccagcccgcgggcaccggcagaaaggagga

SEQ ID NO: 40274 - RNA, 67 nt, Homo sapiens
agagggaccaaaggaacaaccaaaccagagcaaacgagacggaagaaaaaaccgacggcccgaacca

SEQ ID NO: 40275 - RNA, 75 nt, Homo sapiens
caggaccgggcaggagcgaaggccacgccgggccagaaaaggggaagaaagacaacacaccccgcaaagacaaaa

SEQ ID NO: 40276 - RNA, 68 nt, Homo sapiens
caagagcgcacgggggaaacaagcgaaaaacaggcaagggccgcacagaggacggccaaagcaagcac

SEQ ID NO: 40277 - RNA, 79 nt, Homo sapiens
cggcccgccagaacgggcagcaagggcccaaggccggccaagaaagagcggccagcccaaacggcggagggaccaccga

SEQ ID NO: 40278 - RNA, 43 nt, Homo sapiens
gccccccagcaccgggcggacggacgcgcccggggcacggcca

SEQ ID NO: 40279 - RNA, 81 nt, Homo sapiens
aaaacagaacagcgcccgcgaaaggggcaaacacgaaaagagacaagagagaaaacgggaaaaaaaaaacaggaaccacac

SEQ ID NO: 40280 - RNA, 70 nt, Homo sapiens
acggaccaagaaccaaacgaccgacaccgcaagaccccgaagcccagggcacacaggccccgagaaccaa

SEQ ID NO: 40281 - RNA, 75 nt, Homo sapiens
cgccacgccgccagaccgcgcgccaagccgcacgcaaccaccgcccggccacaccaggaaaggccaaagaagaga

SEQ ID NO: 40282 - RNA, 38 nt, Homo sapiens
cggggggaggacccgaccagacagggccggaccgggcc

SEQ ID NO: 40283 - RNA, 78 nt, Homo sapiens
gggcggcagaaaccgcggagaagaggcgccacgccggcagaagcaggcacagacgcagccagcaaggaaggcgggaac

SEQ ID NO: 40284 - RNA, 92 nt, Homo sapiens
caagccgacggcacagggcccagcacacggagagggagcggagcgcagaaggaacagcggcggcaggaggagaacgacaagcgcgccaggag

SEQ ID NO: 40285 - RNA, 85 nt, Homo sapiens
ccgggaccgggcgggaacccgcggggagcgggacacgaacggggcagcgggggcagagacggggaacagggccacccacacggac

SEQ ID NO: 40286 - RNA, 73 nt, Homo sapiens
gccaggaccgacagcccccacaagaaacgaaggaggcccaaccacaaaaggagccgacggaacccagacggag

SEQ ID NO: 40287 - RNA, 73 nt, Homo sapiens
agaacggcgcccggacccccgcggggaggacgcccgaccccacccagcccgcaccgggcagccaggccccgca

SEQ ID NO: 40288 - RNA, 74 nt, Homo sapiens
cagccgccgccaccccgcggccgcacccccgccccaggagaacacaaagaacccaaacgaaaggaaaaggggac

SEQ ID NO: 40289 - RNA, 72 nt, Homo sapiens
caagacacccggggccacggccgccgcgcgcggcggcccagcaccccccggcacccgggcggaagcccacgc

SEQ ID NO: 40290 - RNA, 73 nt, Homo sapiens
gccagagaggcagcagaagcgcaacaaacgggcacccacagaaggagaacaagcagagcaccggacacgagga

SEQ ID NO: 40291 - RNA, 74 nt, Homo sapiens
ccacaacagcacaaggccgagcgccaacgaaccgaggggggggagaaaggaaagagcccacgagaaaaggaaga

SEQ ID NO: 40292 - RNA, 78 nt, Homo sapiens
gcgccgcacaaaaagcagagagccagagcaagacccacgaagggcacacaaaggacccaccgggaaaggacagagcag

SEQ ID NO: 40293 - RNA, 71 nt, Homo sapiens
aaaaggcccaaaggccgccaggccgcagacgcgaaggaacggcaaagccgcagcgcaggggcaggacagcg

SEQ ID NO: 40294 - RNA, 74 nt, Homo sapiens
acaaaccgaagaacagcgggaaagaaggcaaaacacggccagagaaacaaagaaggcaacaccaaaggaggccc

SEQ ID NO: 40295 - RNA, 43 nt, Homo sapiens
ccggaagaccagccaacagaggcgacccgcggcgagagccccc

SEQ ID NO: 40296 - RNA, 50 nt, Homo sapiens
aggcagcgcccccaaacgcgggaggccaccgccccaccagcaggcaacgc

SEQ ID NO: 40297 - RNA, 75 nt, Homo sapiens
acccaaaacaaggagaaaaccccagaaaggcagagggaaaaagacccgagaagcgcagacccaccagggaaagca

SEQ ID NO: 40298 - RNA, 59 nt, Homo sapiens
gaaggaaagcgaaggggaaggcgccgaagaggacgaaggcccgagggcccggaaagggg

SEQ ID NO: 40299 - RNA, 77 nt, Homo sapiens
gaaggagagccccagcgaggaagcacaccaccaaggaacgggcgcagcgagagccgaaacagaggcaccagagaaag

SEQ ID NO: 40300 - RNA, 67 nt, Homo sapiens
cgcaaaacccgagaaagggcaaccacagcacgaaggaaaccagacggacaccggggcaaaggaggcg

SEQ ID NO: 40301 - RNA, 76 nt, Homo sapiens
ccacaggcggagaagagggagggaaccagaggacagacaacaccgagaacacgggggaccagggaaaagaaaagga

SEQ ID NO: 40302 - RNA, 79 nt, Homo sapiens
cgcgggcgcgagggcagaaccggcgcagaaggccagacacagaaccaggaaagcaccaccacaaagaggagaagcccca

SEQ ID NO: 40303 - RNA, 75 nt, Homo sapiens
caacacaccggaggcagggggacacagccacccaggacgaacggagaaggaaggccgcaagcaagaggcagaccg

SEQ ID NO: 40304 - RNA, 112 nt, Homo sapiens
ggcgcaaccacggaagcccacgggcaccgagcccgcccacgacggagaggaggagaacgggagccgcagaaaggcccaggaagagcaagcgccagcacaaggcgcgggccgg

SEQ ID NO: 40305 - RNA, 34 nt, Homo sapiens
cagacacgcggaggaggcaggggaagcacaaaag

SEQ ID NO: 40306 - RNA, 75 nt, Homo sapiens
aaaaggaggggaacgagaaaacaggaccaagaagaagaaccagcaaaaagacccaggccagacagaagagggaga

SEQ ID NO: 40307 - RNA, 71 nt, Homo sapiens
aaaagggccagcaagaaaaggaaaacaacccgggagaacagaacgggggaaggacggggaaacagcgaaca

SEQ ID NO: 40308 - RNA, 69 nt, Homo sapiens
aaaccccaggccaagcagccaccagcagcccccagagcgggaccacaggaagggcgcacggaaaaggca

SEQ ID NO: 40309 - RNA, 82 nt, Homo sapiens
gccgggaccacagcagcccggaggccgggaaccggccccggcaaacaggaagggaaacggggcggaccagaccaccgggcag

SEQ ID NO: 40310 - RNA, 74 nt, Homo sapiens
ccccacgccggagaacacagagggcgcaagaagaagaagcagcgaagccggggcgcaacacagaagggaacaag

SEQ ID NO: 40311 - RNA, 75 nt, Homo sapiens
gaggagagccgcagagcgcgcagaccccggcgaagccacaagaagcacaaaaacaaccagggggaaaaacgcacc

SEQ ID NO: 40312 - RNA, 83 nt, Homo sapiens
cgcgggcggccccggcgggcgagcgaggaggcggcgggcgaagagcggcagggcccaccgcgaccgggccgaggacgcgaagc

SEQ ID NO: 40313 - RNA, 61 nt, Homo sapiens
agagagggagagccaaagaagcgagacgacgggaccgaaggaccccgccagagacaaccga

SEQ ID NO: 40314 - RNA, 75 nt, Homo sapiens
cacccggaggagcagcccgccccgccgggggagacgacccccgccaggccgccaggcacagagaaggcaaacggg

SEQ ID NO: 40315 - RNA, 36 nt, Homo sapiens
ccgcagaagcaaaagaaggccgaaagggaaaaaaga

SEQ ID NO: 40316 - RNA, 97 nt, Homo sapiens
gccagaaccgcacaagcggaagcaagaagaagacagggagacacagaacaaggggagccgccagaccagcaggccagaagacagaaaaaggaagaag

SEQ ID NO: 40317 - RNA, 109 nt, Homo sapiens
cagccggagcccgggaggggccgcgccgccaccgcgaacaggagcccgacagaaggaggaagaagccagagccacgaggagggagcccaaagaggcgaagagagaacag

SEQ ID NO: 40318 - RNA, 59 nt, Homo sapiens
caaagcacccggcggccaaaggccaggacaccaacgggaccagaagacgggaacagccg

SEQ ID NO: 40319 - RNA, 82 nt, Homo sapiens
ccccaacgcacagccagggagccaagcgccgcccggccgaccacggccaccgcgcggaagaggcgagagggagagcggcgcg

SEQ ID NO: 40320 - RNA, 83 nt, Homo sapiens
gccgacggccccggcaccgacccggaccccgcggagcccgcccgacgcgcgacaaaccaccccccaggccacgccggcgccgg

SEQ ID NO: 40321 - RNA, 84 nt, Homo sapiens
cggggcgcgacgccggcgccccgggcgggcgcagccgccaccggcagcagcagcaccaccggacgcaggaggagcggaggaggg

SEQ ID NO: 40322 - RNA, 74 nt, Homo sapiens
aacaacggggaggagggagaacacagccacagccggaaagagagcacaagcccaggaacggggagaaacgccag

SEQ ID NO: 40323 - RNA, 80 nt, Homo sapiens
aaccgaaagagggcaagagaagaacagaagaaacaaaaggccaccgaagagcgacagcaagcaagcccccggcgccagag

SEQ ID NO: 40324 - RNA, 83 nt, Homo sapiens
gaggcccccagccacaggaacagagcccaagaagagccaagccgccccaggagcaggaggaggccagcagaacaaacaagaga

SEQ ID NO: 40325 - RNA, 80 nt, Homo sapiens
gagcagccccagacagccggcgcggcgggcgggcggcggcggcgcgggccgccccgagccccggccccaaagacccaaaa

SEQ ID NO: 40326 - RNA, 73 nt, Homo sapiens
aaacgaaagaacacacacaggaagcccaggaggcaaaaggcagaagagacaacacagaaaccagggcggaggc

SEQ ID NO: 40327 - RNA, 74 nt, Homo sapiens
cgccacaaccacgccaggagggcgccgccccccccggcaagaacagccagcaaagacaagagcagaccagcagc

SEQ ID NO: 40328 - RNA, 55 nt, Homo sapiens
cgcaccccggacaccccgggcccgccagcaagaggaaaagcagagacacccggca

SEQ ID NO: 40329 - RNA, 77 nt, Homo sapiens
aaccgccacagcaccgaggccgaagggaccacggcccagccagcacgacaccccaggaagacagagcaccccacgcc

SEQ ID NO: 40330 - RNA, 36 nt, Homo sapiens
ccgaggcgggaacagccagcccgagggagaggaggg

SEQ ID NO: 40331 - RNA, 60 nt, Homo sapiens
cccaggacggaggcgcagcccgaggaccaggccggcgcagccagagaaagccgcacaccc

SEQ ID NO: 40332 - RNA, 69 nt, Homo sapiens
ggaaagacccaaccagaagagacacaaggggaagcgggacgaccaggacacaccacgaggaggacagcg

SEQ ID NO: 40333 - RNA, 46 nt, Homo sapiens
agaaggaccaagaaccaggaaccacagacagcgaccccagggcagg

SEQ ID NO: 40334 - RNA, 73 nt, Homo sapiens
aaaaaaggaagagaggccaaaacaccaacaagagagaggggaaaaaccgaaggcggagccgggagcggaggag

SEQ ID NO: 40335 - RNA, 86 nt, Homo sapiens
cggggagcgcaggagagccagagcgcggaggcgccacaaggaagccaggccggagggcgcccgggcacaccggggccagggggagg

SEQ ID NO: 40336 - RNA, 68 nt, Homo sapiens
ccaccaaaggaggaagagccccacgcccgaggaagagagaagacagcagcgaacaagaaggggcagcc

SEQ ID NO: 40337 - RNA, 81 nt, Homo sapiens
ccagaccgcgggggccagacagcaccggcaagaccacccacaggcccggaggccgggcagggcccacggaaggggccccca

SEQ ID NO: 40338 - RNA, 52 nt, Homo sapiens
caagagcacacagggcacgagcccaaagagaaaacgcgaccccaaccgcaag

SEQ ID NO: 40339 - RNA, 64 nt, Homo sapiens
agggaacacaacagaagaggaaccagaggaggggaggaaccaccacagaaagcaggagaacaca

SEQ ID NO: 40340 - RNA, 66 nt, Homo sapiens
gcagggaggggaaacgaagcgcacgaaacaccaaggaggggcaaaagggacaaccgaaggcacaga

SEQ ID NO: 40341 - RNA, 79 nt, Homo sapiens
ccgcaggaacaggcaagggcgaggaagcaggcacgcaagaagaagggagacggcgggggccgggacggagacgggccgc

SEQ ID NO: 40342 - RNA, 69 nt, Homo sapiens
gggcccggaggagagcggagggaaggaacaacaagaggcgccagcggaaaccacgccaagaaggcgagg

SEQ ID NO: 40343 - RNA, 60 nt, Homo sapiens
aagagagcaaacaaggagcagacggccgcagcaaagacgcacccccagacgccgacccag

SEQ ID NO: 40344 - RNA, 84 nt, Homo sapiens
agccaaaaacgccgaaacggaaagcccaagaggagacgacgccaaggagaggcagacccagacaggagggccagggaggcggac

SEQ ID NO: 40345 - RNA, 69 nt, Homo sapiens
gcggcggcggcccagcgccaagaggaggaggagcggaagaggaccgccaagaaaaaacaaaaaagacaa

SEQ ID NO: 40346 - RNA, 79 nt, Homo sapiens
aagacaggagggaggaacagacaccgagccagcaagcccccaacggcgccggggagggggcgccagccaggaagcaccg

SEQ ID NO: 40347 - RNA, 68 nt, Homo sapiens
cccaccccaccggagggcacggccccagacagcaggcagggaaggaaaaaagacccaacgaagaagac

SEQ ID NO: 40348 - RNA, 78 nt, Homo sapiens
ggaccggcccccccgcgggcgccacgcagcggacacgaggagcccgggcggaccacaccccagccacccacccgcagc

SEQ ID NO: 40349 - RNA, 70 nt, Homo sapiens
aagccagccagcaggaaggacaaaacacaacagggaagagagccaggggaaaggccagacagcgcagcag

SEQ ID NO: 40350 - RNA, 80 nt, Homo sapiens
agaagccaaagaacggcaggcaaaaagcaagacacacgaagaaggagcaagcaagaggaaaggacggacccaccaaaaca

SEQ ID NO: 40351 - RNA, 75 nt, Homo sapiens
agagcggcagcagcaccagcccaagagaagcggagggaggcgcccggccaccccaagccccggcgccacggggac

SEQ ID NO: 40352 - RNA, 80 nt, Homo sapiens
caacacccgcccccgaaaaaccacggggaagccacccgacagggagaagagcaaccggacacagaaggggaaggaaaccc

SEQ ID NO: 40353 - RNA, 80 nt, Homo sapiens
gagagcacgcagccaggaaaccacgaggcgcgagaaacccaggccgcgcacaagaaccggcagcgaacaaggagaaagcc

SEQ ID NO: 40354 - RNA, 76 nt, Homo sapiens
gcccggcggagcagaggaaccacacgcgacaggacaaaagggagaaaccagagggacgcacagaaaccccaagaac

SEQ ID NO: 40355 - RNA, 76 nt, Homo sapiens
aaaccagaagcccaagggacaagggcaacaaggccggcccagagggaggcacaacagcgaggacaccaccgagccc

SEQ ID NO: 40356 - RNA, 78 nt, Homo sapiens
caggagcaaggcacaacgagccaggaacacaacagcgagcaacagcacagcaaggagagaaaaaaaagagagaggcac

SEQ ID NO: 40357 - RNA, 80 nt, Homo sapiens
gacacagggcccagcacaacacaaaagaggaagacaccaccggacaccgaccaggccgcccgagcagcgaggcccaccag

SEQ ID NO: 40358 - RNA, 79 nt, Homo sapiens
gagggagagcaagaccacagcgcgcggcccccacaccacacagagagcgaggggggcgcaggccccggaagagggacgc

SEQ ID NO: 40359 - RNA, 56 nt, Homo sapiens
gcccacggggacggcgccggcgcggaaggagagagagggcgcggaagagggagcgc

SEQ ID NO: 40360 - RNA, 73 nt, Homo sapiens
cggcacgggcgcaacaaccaggcggcgggccagagaagcagacgcccagcgaacaagcaggaggagacgcaca

SEQ ID NO: 40361 - RNA, 81 nt, Homo sapiens
cggcaggccaaggacccgaggcaagacagagcggaaagcaaagacagcggaagccaaagccaccaaggccgaggagaagga

SEQ ID NO: 40362 - RNA, 73 nt, Homo sapiens
ggagaggcgcggcacaggaaagggcacaaccccagggagggagcggagccgcgaaaagccgcagcgagaggaa

SEQ ID NO: 40363 - RNA, 85 nt, Homo sapiens
gcgagaccgcggacaacagagagagagcaaaaacagaagggaaaggaaaggaaagagcacagacagaaaaaaaggccggccccca

SEQ ID NO: 40364 - RNA, 72 nt, Homo sapiens
caacaagagcaacccagggcggcaccccaccgcccagccacagccccccccacaggagcaccggccgaagaa

SEQ ID NO: 40365 - RNA, 82 nt, Homo sapiens
ggcggccgcgccagggcgcggggccgcggccgcgcgagcagcgccgcgggagaagagagcggacccacaccagggaagacag

SEQ ID NO: 40366 - RNA, 62 nt, Homo sapiens
agaggcgaaaggaccagccggaggacacggccaagaggagggccccagggaaagcacagcca

SEQ ID NO: 40367 - RNA, 64 nt, Homo sapiens
cggagccgagcaaccagaacagacaggaaggaggggaaagaaaaagaagaaaaagaaggacaag

SEQ ID NO: 40368 - RNA, 88 nt, Homo sapiens
cagacgccaaggccccccggccagggccgggagccgggccggccagccagaccccgacgggcagaccaccgcggcaccggggcgggcc

SEQ ID NO: 40369 - RNA, 76 nt, Homo sapiens
gcagcggcaagagccaggagaccggagaggagcgggggccccaagaaacggagggaacaggcacgccccacccgcc

SEQ ID NO: 40370 - RNA, 49 nt, Homo sapiens
gaagcggagagcaacagcgcgccggggcaagggaccccaagagaaaacc

SEQ ID NO: 40371 - RNA, 74 nt, Homo sapiens
acaggaacacccaagacaaaaaggcaaaacccacgacaagaaggcaccggacccagagcagaagagaaagaagc

SEQ ID NO: 40372 - RNA, 73 nt, Homo sapiens
aaggaccaagaaccaggggcaccaccacgaggcgaggggccaaccaaggaggcgaggggccccccgacaaccg

SEQ ID NO: 40373 - RNA, 79 nt, Homo sapiens
aaggccaacagagggggagcaacgaggccagacacaacaggccggggccccaggagggggcacggcagcggcgagagac

SEQ ID NO: 40374 - RNA, 80 nt, Homo sapiens
agagcagcccccaggagcggcagcacgaaaggaggaggccgacaacaaccagaaaaggccagaaccccacagccgagcca

SEQ ID NO: 40375 - RNA, 74 nt, Homo sapiens
aaccacgcgagacgccaccagcagcccgggaggcaggccacggcccagagccgagcgcacagacaccgggccag

SEQ ID NO: 40376 - RNA, 67 nt, Homo sapiens
ggacacaacacgaagacacaccacggggccagggagcagcacagacccagagcccagaggcccggaa

SEQ ID NO: 40377 - RNA, 80 nt, Homo sapiens
aggcggaaggacccggaagccacaaagcaaaacggcacgggagagccaagccagcgcccacgggaaggaacagcggacga

SEQ ID NO: 40378 - RNA, 53 nt, Homo sapiens
gccggggccccgcagaccgccggaccccgagggacccaagggagagagggaac

SEQ ID NO: 40379 - RNA, 65 nt, Homo sapiens
aggcgacggcgccgcggccgaggggcgaaggcccgggggaagaggaaaagggagaaggccaaagg

SEQ ID NO: 40380 - RNA, 45 nt, Homo sapiens
acccgcgccccgaccaggagcaaggccgcaagaggacgaaggacc

SEQ ID NO: 40381 - RNA, 75 nt, Homo sapiens
ggaccccagggcagaaggaccgcggagaccgccacgagcaggagcgcgaaagacggagcgcgccccaccgcggcc

SEQ ID NO: 40382 - RNA, 83 nt, Homo sapiens
gagacacaaaacccagacaccgacgggccgcgaggggaagaggaagcaaagccaaggaaggagcaaaggagagccagcccaca

SEQ ID NO: 40383 - RNA, 70 nt, Homo sapiens
aaagagagaaccggagagcacccaacagaaagaacgaacaacggaagcgagaaacgaggacgacagagag

SEQ ID NO: 40384 - RNA, 84 nt, Homo sapiens
acaagaccgaccggacgcgccgcccgaggccgcggccgccgcagcgagggcgccgagcaaccggaccgagcccgccaccgagca

SEQ ID NO: 40385 - RNA, 75 nt, Homo sapiens
cgagggagagagcgagcgagggggggcgcgccggaaaccggagcgcgcagcagaagacagggagagagcccgccc

SEQ ID NO: 40386 - RNA, 60 nt, Homo sapiens
cacagacacccgggaacccacccaccagcgggcccaggaaagccgcagcggggagaagcc

SEQ ID NO: 40387 - RNA, 70 nt, Homo sapiens
gccacaccccccccagcgaaagacccagaaccccaaaaaaaggaccgaggaaacagaagaaaagacaagc

SEQ ID NO: 40388 - RNA, 72 nt, Homo sapiens
aggagaagaaagagcgaaaaggaccccgggagggcccagcaaccggccagcgaaccggagacaaacaggcag

SEQ ID NO: 40389 - RNA, 71 nt, Homo sapiens
aaaacggaagcgcagggagaaggaagaggggaaaagggcgacgggacaaacacaggaaggaacacccggac

SEQ ID NO: 40390 - RNA, 53 nt, Homo sapiens
ccaggagcccgagagagaagggaagcagaggggaaaagcagggaccgcgccgc

SEQ ID NO: 40391 - RNA, 75 nt, Homo sapiens
caaacggaaagacgaaggggccccagagccaaggaggaaggggccggaggaaagagaggaaccggcagggaaaga

SEQ ID NO: 40392 - RNA, 65 nt, Homo sapiens
gcacagcggcccggggaaggaagcggagaacgcgggcagaggaagaggaccccaaagcaacacca

SEQ ID NO: 40393 - RNA, 75 nt, Homo sapiens
gggccggcgcaagacaacccaacaagccaaagaacagacacacagaagaaagggagaacgggccccaggacgagg

SEQ ID NO: 40394 - RNA, 83 nt, Homo sapiens
gcgaaggcgccgaggaacaggagcagcggcgaaacccaggcgcggacgaggcccacccaggccacccaggaccagcagcgacc

SEQ ID NO: 40395 - RNA, 66 nt, Homo sapiens
ccccggccccagcacacgacacgaacgccagcacaaggagaagaggaaaaggggagcaggaggcga

SEQ ID NO: 40396 - RNA, 53 nt, Homo sapiens
aaacgcgaccgaccacgcaggggcccgggggcggccagggcggcgggcgcagg

SEQ ID NO: 40397 - RNA, 67 nt, Homo sapiens
ggaggcacacaccaacgaaccaaccaagcggaacagcccaggcaaacggaacgaaggaacaaccagg

SEQ ID NO: 40398 - RNA, 88 nt, Homo sapiens
gagagcaaaacacaagagagcagggaggagagccccagcccccagcagccgacaggaggcccgcaagagcaggcaggcagccacccca

SEQ ID NO: 40399 - RNA, 88 nt, Homo sapiens
cagccccacccaccggcccacccacaagcgcacaggaccggaaacccgagaagcaagggaaagcgggcgaaaaggaacgagcaggagg

SEQ ID NO: 40400 - RNA, 78 nt, Homo sapiens
ccagaaacaggcacaacgagaaaccggccaagaggaagaccccaccaggagaccacgcccagggaaagaaaacaagcc

SEQ ID NO: 40401 - RNA, 56 nt, Homo sapiens
ggaacgcaggagagcagcgaaggaggccagacagagacggcgaaaaggagcacgca

SEQ ID NO: 40402 - RNA, 109 nt, Homo sapiens
gagagggggagcaccgcggaaacggagagaccggagaaccccaggggaaagccagggagccaaggaccggagaacccagcccggacacaagcgggaggaacgggcaaga

SEQ ID NO: 40403 - RNA, 72 nt, Homo sapiens
cgagcacccgggcgccgggagcagcacgaggaacgaaaagagaggacgggacgagagcccggcaccggagag

SEQ ID NO: 40404 - RNA, 78 nt, Homo sapiens
agagcacacgcacgggccccggcgccaccggagagaggccgcgccgggcagagcccacgggcgggccccggcgagcac

SEQ ID NO: 40405 - RNA, 72 nt, Homo sapiens
aggaccaagaaccagccgcagggccgaggcagccaggcgcccagccggaaggcaggcgaagccccacccaca

SEQ ID NO: 40406 - RNA, 42 nt, Homo sapiens
gcggagcgccggacccgcagacaaaaggagccacggagaaag

SEQ ID NO: 40407 - RNA, 66 nt, Homo sapiens
gccgccgaccacccacacagaaacacgagggccggacgcaggaccaaaggcggaagaggagcagaa

SEQ ID NO: 40408 - RNA, 74 nt, Homo sapiens
agacaccgacgggccgcgaggggaagaggaagcaaagccaaggcgaagagccaccagcggcgacgcaggccaaa

SEQ ID NO: 40409 - RNA, 72 nt, Homo sapiens
aacaggcaacacagggacgcccagaaggaacgcaggggaaaaccagaaccgaaaacccagaccaaccaggaa

SEQ ID NO: 40410 - RNA, 71 nt, Homo sapiens
acagaagcaccgagacccaagaaagcccggacaaacaagggaaaaggcacacagccacagagaggaaacag

SEQ ID NO: 40411 - RNA, 78 nt, Homo sapiens
aacgccgaccagcgacacgcggccgcggagaccaccgcggcgcggcagcgcgcccgaggcaagcccggacgggacaca

SEQ ID NO: 40412 - RNA, 76 nt, Homo sapiens
acaaagccccccggagacgcaaccaagagacgacacggcacacaagaaagggcccccggggccgacacaaccagca

SEQ ID NO: 40413 - RNA, 60 nt, Homo sapiens
gccggggcggcacacggagcacagcaccccccagaggaagcacagggcccacgcccacaa

SEQ ID NO: 40414 - RNA, 74 nt, Homo sapiens
cccgaccaggccacagccgggccagggacagagcgggagggagcggcgccgggccccggaagggaagggaccag

SEQ ID NO: 40415 - RNA, 74 nt, Homo sapiens
cgcgccccagaaggcagaggaacacaacaggggaaaaagaaaagggcgaagacccgaagcagcgcaggaacaga

SEQ ID NO: 40416 - RNA, 65 nt, Homo sapiens
gaaaggagcgggccggcaagggagccccgggaacagagagaccagcgccccacaagaaacccaaa

SEQ ID NO: 40417 - RNA, 68 nt, Homo sapiens
cagacaaggaaacagcagaaaccggaaccacacacaccacaggaagccaagcccaaaaggcagagcga

SEQ ID NO: 40418 - RNA, 75 nt, Homo sapiens
gcgcgcccgccgccccgcccacgaggagcacagccgggccgcgcgaaggaagaagacccgcagaccagaacggaa

SEQ ID NO: 40419 - RNA, 90 nt, Homo sapiens
ccgcgggcggcggaggcagcggggccgggaggaggacgaaccaacggaacgcggaccaggaggaaaaggcgaaagaaggaaccaaacggc

SEQ ID NO: 40420 - RNA, 78 nt, Homo sapiens
gagggcgaagccagacgcagcagcccgccgacacagccaccaagaaggcacaagcagaacgggaaaaggggcggaaag

SEQ ID NO: 40421 - RNA, 84 nt, Homo sapiens
ggaagaggccgagggcaggagaggacccgccaaaccagaggagggaaaacgccgaagaaggaaaccagggccgggaagcacaca

SEQ ID NO: 40422 - RNA, 82 nt, Homo sapiens
gcaaagccggcgacccgcacagccgcaccccaacccccaggggagcaaaacgcccaccacggaggcaccgaggacgacgggg

SEQ ID NO: 40423 - RNA, 74 nt, Homo sapiens
gcgacaacgggacgggaaacaacgaaaacaaacggaagagagggcagcaagaaagaacaagaaagcgaacggaa

SEQ ID NO: 40424 - RNA, 74 nt, Homo sapiens
caggagagcccaccaaggagccccacggcggggaccaggagcgaaacgaagccccaggcacgggggaacagacc

SEQ ID NO: 40425 - RNA, 75 nt, Homo sapiens
cccaagcccgcgagcaggagagggaaggcggccccgcagcagaggcgagccgccaggggaagggggcaacgcagc

SEQ ID NO: 40426 - RNA, 77 nt, Homo sapiens
cccgcgcgcaggggaagcgggcagggccagcaccccaagccaggccagcccaggggaacgaggagcgacccacgcgc

SEQ ID NO: 40427 - RNA, 79 nt, Homo sapiens
ggcagaaccggaaggccaggggggcacaagccacggagcgagcccggggagccaggcaggagggggaccccaccgaagg

SEQ ID NO: 40428 - RNA, 80 nt, Homo sapiens
cccacggagcagcacccacccgcacagccgaggcaggggaagcgaggagaacgagccggaccagggaccgggacccaggg

SEQ ID NO: 40429 - RNA, 84 nt, Homo sapiens
cgagcaccgcagcgggagaccggggggggagggaagaagccggagccgccgcaagccacacgggaaggggcgagagaaaaagaa

SEQ ID NO: 40430 - RNA, 83 nt, Homo sapiens
ccagcgagaccgggccggaacgaaagcaggacggaggagcgaccaccggcccagagccccgcagggagaaaggaagggccaag

SEQ ID NO: 40431 - RNA, 46 nt, Homo sapiens
cggaacagagcacacccccggggagaccgcgcgaaacgcccagaaa

SEQ ID NO: 40432 - RNA, 72 nt, Homo sapiens
aacaagaaaagaaagaaaggaacgcaaacgaacgaacaccagcgaaaaaaaagcccccagagacaccaggga

SEQ ID NO: 40433 - RNA, 76 nt, Homo sapiens
cccccccgccgcaccagacgaggagcgccaggaaagaggcagagacgaagcagaagcgaggcagacaagccgggag

SEQ ID NO: 40434 - RNA, 70 nt, Homo sapiens
cagcagccaaccaggcccgagacaaaaaggaacaggagacagcggagaaagagcccgggaagcacgaagc

SEQ ID NO: 40435 - RNA, 68 nt, Homo sapiens
cgccaccccaccgcacggaccccccgagaacagacagaaggaggacgggggggaagcacaccaaccgg

SEQ ID NO: 40436 - RNA, 57 nt, Homo sapiens
caacacgagaaccaccccgacacaacaccaccaggcggagaacggaaaagcaccagg

SEQ ID NO: 40437 - RNA, 80 nt, Homo sapiens
ggccgcgccccccaggacccgccggcgcgagaagccccgagccccggccccaaagacccaaaacagagacaccccccagc

SEQ ID NO: 40438 - RNA, 104 nt, Homo sapiens
gcacagacggaagcaaggaacaaaccgaagaacagcgggaaagaaggcaaaacacgggcggcccagggcagcagcacacaaacaaccacaaacaacagccacag

SEQ ID NO: 40439 - RNA, 82 nt, Homo sapiens
gaaggagaggccagcccccgcgccaccccgaaacaggcagaaagcagggaacaaagaagcagggacaccaggccgaccagag

SEQ ID NO: 40440 - RNA, 77 nt, Homo sapiens
caggaagagccgacccaagggagaggaagcgaccgaaacaggcccagacggcggcgcccgcagaggccaagacgcag

SEQ ID NO: 40441 - RNA, 106 nt, Homo sapiens
cagacggcgcagacgccccccccggccagccccgggcgcgggaaagaaccggaggcgaagcaggccaaagaagaagccaggcgaaagaacagaccgccgcagaggg

SEQ ID NO: 40442 - RNA, 69 nt, Homo sapiens
ccaccccccgaacccagccgcaccgggcggagaacggaaaagcaccaggaagcagagaggaccgcagaa

SEQ ID NO: 40443 - RNA, 64 nt, Homo sapiens
aaagcaaaccagcaggcaccaaggaaagcagaagacaaaaacgaagagagaagaagaacaggga

SEQ ID NO: 40444 - RNA, 113 nt, Homo sapiens
agggagcgggcccgggacaacggacacccgacgccgccgccagccgcaaccagaggaaaagggccgaccaccagagcacacaccaggcaccccagaggccagacccggggccg

SEQ ID NO: 40445 - RNA, 80 nt, Homo sapiens
acaccgccagacaacaacccgaaacccaacaccagccaagggaagagacccccagagaagggaagccgggggaggccacg

SEQ ID NO: 40446 - RNA, 73 nt, Homo sapiens
gcccgcagaagcgcaagcgaaaagaaaagaaggaaggccgaacccgaaaaaacaccagcagcccagcaaccaa

SEQ ID NO: 40447 - RNA, 87 nt, Homo sapiens
ggacacgcgaccccaaggagcccggagccggcggggccaggcccacgccagggagcgggaggacgaggaggaggccgccacgagcaa

SEQ ID NO: 40448 - RNA, 79 nt, Homo sapiens
aaccgccagaggcagcggaggcaagagaagacagcggaggaagaaaacgcagcgccccagagcacagccccaggcacaa

SEQ ID NO: 40449 - RNA, 70 nt, Homo sapiens
ccgggaagcacacaagggccgaagcagggcacaaaaccaaggccaagcaaggaaaccaggaaccgaagaa

SEQ ID NO: 40450 - RNA, 64 nt, Homo sapiens
gggacaaaaccccgaaaaaggcgccacacccagcaagggacaaggaccggagacccagcgcgcc

SEQ ID NO: 40451 - RNA, 81 nt, Homo sapiens
cgagcccccagccagagaccccgccaggacccgccccaccacagaaccaaaggccaagggaaccacgaagaaagaaaagcg

SEQ ID NO: 40452 - RNA, 80 nt, Homo sapiens
gaccagacggcagggaggcacaaaggggaacacagggagacggccgggagcccagaaacaaacacaggggggaaaagccc

SEQ ID NO: 40453 - RNA, 47 nt, Homo sapiens
acgcccagccccagaaccaaaacggcaagaccgccgaaagaaaacga

SEQ ID NO: 40454 - RNA, 52 nt, Homo sapiens
caagcaggagggccgagggcaggcccaggaggcaagagcgagaagagcgcaa

SEQ ID NO: 40455 - RNA, 52 nt, Homo sapiens
gcaacccgaagccacagcccaacccccggcacccacgagcaagaagacaaac

SEQ ID NO: 40456 - RNA, 61 nt, Homo sapiens
cgccgcgccgccacggccagcccccggccaggaccggagaacaaggccggcggaaccagcg

SEQ ID NO: 40457 - RNA, 38 nt, Homo sapiens
cccccaagagcgggacacaggaacacccagcccagaca

SEQ ID NO: 40458 - RNA, 83 nt, Homo sapiens
gcgcagggggacgacacgggcaggggggagggagggcaccacaaagaccgaggaggagaaggggcggcccggaggccgagagg

SEQ ID NO: 40459 - RNA, 76 nt, Homo sapiens
gcggagcaaaaaaagagcccgcaagaagaacagagacagcagccaaacccccagccagaacaccaacgccacacac

SEQ ID NO: 40460 - RNA, 80 nt, Homo sapiens
gcggccaacaaaacgaggagcccaccacagcaagggggaaagggcaagaaccaggggaggcacccagcaggcggagcaag

SEQ ID NO: 40461 - RNA, 64 nt, Homo sapiens
cgccgcgggggcaccagcggacaggaggagcgccagcgagaggaccccgcgcccacccaacaag

SEQ ID NO: 40462 - RNA, 72 nt, Homo sapiens
agaacaccagaggcacgacaaggagggaacagagaacaacaaccaggccagaagagcaaagaaccccagaag

SEQ ID NO: 40463 - RNA, 71 nt, Homo sapiens
gacggccgcggcaaggcaagagcggcggcgccaagccacacgcgcccggccaccggacaagaagcaaccac

SEQ ID NO: 40464 - RNA, 72 nt, Homo sapiens
ggaaggagaacaaagggagaagaggaagcccgacaacgaaggacgagagcacagcccccaggagaggcaggc

SEQ ID NO: 40465 - RNA, 49 nt, Homo sapiens
aaacaaacgagaagagcacagcaaacgcacgcaaggagcccagggggcc

SEQ ID NO: 40466 - RNA, 69 nt, Homo sapiens
agccacccccagcaggacgaaccaaccaagcggaacagcccaggcaaacggaacgaaggaacaaccagg

SEQ ID NO: 40467 - RNA, 56 nt, Homo sapiens
gagagaaagagccagacacggcccaggcggcggcgcagcagacgggcaccgcggcc

SEQ ID NO: 40468 - RNA, 85 nt, Homo sapiens
aacaagcggaggacaccgagaccagcagccccagaaagcaggagcccggaaaggagaaggaaaagacggcaggaggaagagagag

SEQ ID NO: 40469 - RNA, 80 nt, Homo sapiens
ccggagcagcgagggcccggcgaggagaaccaacggcccgaaagagccgcgaacgaaacaccacccacgcagagaggaaa

SEQ ID NO: 40470 - RNA, 74 nt, Homo sapiens
acgagaagagaacacaccggggaagggcaccggcacccagaaccggagagcccagaacgcgggcagcccgaaga

SEQ ID NO: 40471 - RNA, 71 nt, Homo sapiens
cacagccgacagggaccggggaagaagacggacagaagcaacaaaggaaaaacggggagcggaaggcagag

SEQ ID NO: 40472 - RNA, 108 nt, Homo sapiens
aagagggcgaacaaggggaccaaaccacgcaggaccccaagccaagaacgagaaggcaaaagcagaccggaaaacccaccggcaagaccacacccgaggggagcccag

SEQ ID NO: 40473 - RNA, 66 nt, Homo sapiens
cggcccgggccggcgcccaaggcccgcccgggagggccggggccgcgccagggccaaaccggggag

SEQ ID NO: 40474 - RNA, 89 nt, Homo sapiens
caccacgcaccgacagcgccgccaccgagccgggcccaccccccaccaaggaaggaaggacgcccagagaccggcagcgcaaacacccg

SEQ ID NO: 40475 - RNA, 73 nt, Homo sapiens
gaggaggaggaagagcaggggcaaaacaggcagcaaggcccgacggagggaccagaaagggaacaaccggcag

SEQ ID NO: 40476 - RNA, 83 nt, Homo sapiens
gaagcgcggcggcgcggcgggaggcacagcgagaagggaaggaagcccaggaggacacgaagaaggaggagcagacaaaagaa

SEQ ID NO: 40477 - RNA, 82 nt, Homo sapiens
cgaccccagccaccccagcgcgcaccacccaacgccacgccgcgccgccgcccccacgccaggcgaagccgacgagcccgaa

SEQ ID NO: 40478 - RNA, 74 nt, Homo sapiens
cgagccgccacccggcgcgaggaaaaccaccacacaggggaaacacccagacaacacacacaacaggaaagaac

SEQ ID NO: 40479 - RNA, 72 nt, Homo sapiens
aaagagcgccacgcacagcgaggggccaaggcagaagaaacggagaagggcaaagccggacacaagagggca

SEQ ID NO: 40480 - RNA, 71 nt, Homo sapiens
aaccaaaccaacagcaggaaagcgcccgaaggcccgagagaggaggcagaccgcagcaaccagcagggaca

SEQ ID NO: 40481 - RNA, 56 nt, Homo sapiens
gacaagaccaagacacccaagccggcaagagaggcaaggacacagaagaacggagc

SEQ ID NO: 40482 - RNA, 81 nt, Homo sapiens
cgcgcccaggcggcgcaggcggccaacgagaggaacggccacgcgccaggggacacccgccgcgcggcggcccacccccga

SEQ ID NO: 40483 - RNA, 75 nt, Homo sapiens
caacgcgccaaacaaacggacccgacaagagcgggaacgcgacgggaagcgcaaaccagaagccagacccagaag

SEQ ID NO: 40484 - RNA, 74 nt, Homo sapiens
gccgcagagcgagcggcagcggcccggaaccggcagagaggcggaccccgcgggcgcgcggcccgaacccagcg

SEQ ID NO: 40485 - RNA, 75 nt, Homo sapiens
agagcacagagccgaaaaaaaagcaaaggccagacggagccaaacagccacagaagaggacagcagcggacggcc

SEQ ID NO: 40486 - RNA, 75 nt, Homo sapiens
ccggcggagccacagccaacccgaagcagcaacagcaaagcggagcccaaacacgcgccgcaccagagcggcggg

SEQ ID NO: 40487 - RNA, 70 nt, Homo sapiens
cggccaggggggaccagacgcgcgggcggccagcccgccagcaaggagcgcacaccaccccaggcggaga

SEQ ID NO: 40488 - RNA, 83 nt, Homo sapiens
cggggcagccagcacaacgggcggaggggcgcgcccccagggggagaggcaccagcaacagaccaaccgcagcaagcacagag

SEQ ID NO: 40489 - RNA, 72 nt, Homo sapiens
cagaccccacgaggccccgggcagcgggccggccacggcgggagagcggcaaaagacaaacccaagagagca

SEQ ID NO: 40490 - RNA, 72 nt, Homo sapiens
gagagccgcccgggccagcggccgcgcacccccggccggaggcaccagcggagcgaggcggccagggcccca

SEQ ID NO: 40491 - RNA, 53 nt, Homo sapiens
aagaacaaccgcggacacggagaggaagggcgcgcagagaaggggcaagccaa

SEQ ID NO: 40492 - RNA, 77 nt, Homo sapiens
accacaacaagggccggaccacccagcggcggagaaaccaccacaaacacgaggccagcaacgaccaacaagacaga

SEQ ID NO: 40493 - RNA, 77 nt, Homo sapiens
cccccccaaaccaaaggccaccaccaccacagacagagggaagagcggaacaccaacaaaccagcagagccacacgg

SEQ ID NO: 40494 - RNA, 73 nt, Homo sapiens
aacaacaggagggcaacccagaacacaaaaacaccccacagaacaggacaaggcaaggcgcaggcgggaggcg

SEQ ID NO: 40495 - RNA, 86 nt, Homo sapiens
cgcgccgccgcacgggaccgccgagccacaccgggggccggagacggcagggcacgggccccaggccgggggccccgaaggcaaag

SEQ ID NO: 40496 - RNA, 53 nt, Homo sapiens
acaaggagaaccggagccaacggcagcaccgagggaaggaggacgaggcaagg

SEQ ID NO: 40497 - RNA, 74 nt, Homo sapiens
gcaaggcgcccccccagagagccagaaagaagaggaccccccccagaaaaccaagcgaaaccccaaagggaaga

SEQ ID NO: 40498 - RNA, 65 nt, Homo sapiens
agaacacaacaggagacacccaacagagagaaagaaggaccaaccaaagacggagaaaccacaga

SEQ ID NO: 40499 - RNA, 72 nt, Homo sapiens
aagacgcacagccccgagggaccccagcccggcacaaacaggaaggacagccagcccagccccagagaccgg

SEQ ID NO: 40500 - RNA, 77 nt, Homo sapiens
gggaacacagacggaagaacaggcacagggcgcacacgggaggagcaggcagagaaaaaggagagccacgccggacc

SEQ ID NO: 40501 - RNA, 54 nt, Homo sapiens
ggaccgggcaggagacaggccggacagccaacacaaccaggacaagccgaggaa

SEQ ID NO: 40502 - RNA, 80 nt, Homo sapiens
cggggagccgcgggcacgggcacccagcaggcggaagaccggccggagcagcgaggagacacaagacagggcgccggggc

SEQ ID NO: 40503 - RNA, 72 nt, Homo sapiens
agaggaaaacaaaccgccaacccaggagcgagggaaaaagagggcaaccagaggaagacagaccgcgaggcc

SEQ ID NO: 40504 - RNA, 60 nt, Homo sapiens
caggggcagcgaggcgcaccggcggggagaccccacgcagggcagagcgcggcggcagca

SEQ ID NO: 40505 - RNA, 107 nt, Homo sapiens
cagcaaaccggcggaggacggaaccaggggagagcgacccaaacaaaggccgaaaagcccgggccagccagagcagggcagaggagacgggagaccagcgcagagag

SEQ ID NO: 40506 - RNA, 74 nt, Homo sapiens
ggagagccaagaaaaacaacgccccagaacacagagagcagaggaggagggacagacgagagacaacagaaaca

SEQ ID NO: 40507 - RNA, 69 nt, Homo sapiens
agcccacggcgcggggagcccggcccggccggggcgcgaggcgcgaggcgcagggcgcacaacgaagca

SEQ ID NO: 40508 - RNA, 76 nt, Homo sapiens
agacgcggcagcaacagcgagacccggggcgaggacccccgagccagccaggcccagacagccgccgaagaaaagc

SEQ ID NO: 40509 - RNA, 72 nt, Homo sapiens
cgccccagcgggagcgaaaagggcgacagcaagccagggggcagagacccgggagcggcccgcccccggacc

SEQ ID NO: 40510 - RNA, 83 nt, Homo sapiens
aacgcacgagggcagggcggaaggaccaggccaaccggagcgcacccacgccacaagccggacggcggcagcgcggccggggg

SEQ ID NO: 40511 - RNA, 60 nt, Homo sapiens
ccgaaagggccacaaacccaagggcgacccagcaacgcggccggccaggggcaagcgagc

SEQ ID NO: 40512 - RNA, 82 nt, Homo sapiens
gcccccgccgggcccgacgggcagccaagaagagagaccgggggaggcgacgcaaggcgacgggcgacaccacgccacccaa

SEQ ID NO: 40513 - RNA, 56 nt, Homo sapiens
ccaggaacggcggaaggccaaaaccacaagcggagaaaagagggaaaaacaacagg

SEQ ID NO: 40514 - RNA, 69 nt, Homo sapiens
cccccaacggaaggcaggacgaaagcaccgaacaggaaaaggcacggagggcccaggaagcagccaacc

SEQ ID NO: 40515 - RNA, 66 nt, Homo sapiens
cccagccccaccacggccaaaacacaaacaagaccgcaggagaaccagccaaaaaagggcagaacc

SEQ ID NO: 40516 - RNA, 81 nt, Homo sapiens
caccagccagcaaaccagagaaagccgacaagagacaacccccaaaagcaccgagaccgggcagagcccagggggagaagc

SEQ ID NO: 40517 - RNA, 68 nt, Homo sapiens
aaaagcagcccgccacaacaaacagaacagcgccgaagccaagaagcgcacagaacgcacaccccaaa

SEQ ID NO: 40518 - RNA, 80 nt, Homo sapiens
ccgcaagcgcgacccgacaccccgcacacgcccaagcacacacaccaccacgggacaagccacgaaaaggcggagaagga

SEQ ID NO: 40519 - RNA, 84 nt, Homo sapiens
gcaaagggcaaccagggaaacaggagagagccgcacccgaaggaccaccccagagcgaggcagccgggggagaccggaacacac

SEQ ID NO: 40520 - RNA, 86 nt, Homo sapiens
gcccgccccaccaggaaggcggcggggagccccgccgagggcccaaacacacagaccgcaggagcgagaacccgagcagcgccaga

SEQ ID NO: 40521 - RNA, 77 nt, Homo sapiens
ccgggcacgagcaccgccaccaggggaagggggggagaggccaaaggaacggcgcggaaaaaacagcgcaaagaagc

SEQ ID NO: 40522 - RNA, 79 nt, Homo sapiens
cgcaagaggcggacaggcggaacaaagcggagcggcggacaccagaagagaaaagggcaagccagacgcacagggccag

SEQ ID NO: 40523 - RNA, 78 nt, Homo sapiens
cacacaacagccagcaggagaagaaaggaagagacgacagccagcaggcaggagcccgcccagaacaccccaaccagc

SEQ ID NO: 40524 - RNA, 80 nt, Homo sapiens
gaaaaggccaagaaggcaggaaaagaaacgagaccagaaggaaagaaaaggaagcaacaacaaagcccagagggagccaa

SEQ ID NO: 40525 - RNA, 58 nt, Homo sapiens
gcaggaaccaccaggacagagaaaagccaagaaagacccaaaagaccccagaccagaa

SEQ ID NO: 40526 - RNA, 79 nt, Homo sapiens
ccacggcagcccagagagacggaaacaggaacaccaaggaagcaaaagccccagaacccccaccaggcggggaagagcc

SEQ ID NO: 40527 - RNA, 78 nt, Homo sapiens
acgcgccgcgccaacaaggaacaggccgagagcagccagaagacaaagaggggaagacacagaaccaaccacagacaa

SEQ ID NO: 40528 - RNA, 80 nt, Homo sapiens
ccacacaagcgaaggcgcgcaccggaagcaccagcgaggaagcaacccacccaggaaggacaacaggcccaaggcacaga

SEQ ID NO: 40529 - RNA, 69 nt, Homo sapiens
acggccgcaccaaagacagcagacccaacagcaagcgcaccaggcacaacgcacagagaacaaaagaaa

SEQ ID NO: 40530 - RNA, 87 nt, Homo sapiens
accgggaaggaacaggcggaaaaggcgggaggcggcagaagcagccagaggagggcacaggcggcgcggagcgcgccgagggcagcg

SEQ ID NO: 40531 - RNA, 67 nt, Homo sapiens
aagacggaacaaccccagacgccagaagcagcgaaaaagaacacaaaacggcagaaccagcaaaaga

SEQ ID NO: 40532 - RNA, 82 nt, Homo sapiens
gaggaaaaaaaacagaacaggaggggagagggcaggaaccaccgcccaaagaaagcaaaccccacgagaacaaagcacggca

SEQ ID NO: 40533 - RNA, 76 nt, Homo sapiens
aacccccagacgcaagccaagaagggccagagaggggaagaggaaaccggaacccaaagagaagaaacgcaaggaa

SEQ ID NO: 40534 - RNA, 76 nt, Homo sapiens
aaggaggaaaagaagccagaccgaggagcccagccccaagcagcacaagaccccgcaaaggcggcaccgaaaaacg

SEQ ID NO: 40535 - RNA, 86 nt, Homo sapiens
cgggcggccgcgcgagccggcggcccggagggggcggcggaaaaggggagcggacgggcccaggagcaggagccacgcagacgggc

SEQ ID NO: 40536 - RNA, 77 nt, Homo sapiens
ggacagcacaacagagaagacagcaccaggccaaacacaagaagcaagaagacgaaggagcaagggcaacacccgga

SEQ ID NO: 40537 - RNA, 77 nt, Homo sapiens
gagacgccagagagccgccacaccccaccagcgcacgcccggcaagcaaggagcccggcagcagcggggcaccgccg

SEQ ID NO: 40538 - RNA, 66 nt, Homo sapiens
ggaggaaacagcagcccaggaacaacacgaaggggcacccgaggaggaagagggcagggcccacgg

SEQ ID NO: 40539 - RNA, 84 nt, Homo sapiens
ccaacacgcgggcagcgaacaagcgggagcaaggagggcgaagagcgaggagaagacacagcgccagcacaaagacagccccag

SEQ ID NO: 40540 - RNA, 74 nt, Homo sapiens
gagcagcggagaagacaggcgagaggccggccagcccgaaaaccaccaggagaaaagaggacccagaaggaaac

SEQ ID NO: 40541 - RNA, 74 nt, Homo sapiens
caaggagaaacccgagaagcgccagacacacggccccgaaccgaaacacaccaggagagagcgcgcagagaaca

SEQ ID NO: 40542 - RNA, 72 nt, Homo sapiens
gaagagccagcacagacccgaggggaaccaagaccaggacaaagaagacccggagagacaagccggaggacg

SEQ ID NO: 40543 - RNA, 79 nt, Homo sapiens
aacggccgcaaacccgcaggaaaaaagacgaaacggaaacggaaaggacccaggagcgaaacagaaacaaaaagaagcg

SEQ ID NO: 40544 - RNA, 70 nt, Homo sapiens
gaaaagaaggaacagagacggaggaacgaacaacacgcccccaacggcggaacaggacaagcgaaccgga

SEQ ID NO: 40545 - RNA, 82 nt, Homo sapiens
ggggccagcccagaccagagcagcgcagcagggacgcagaccaggacgggccggaccggagcaggacccgcggagcacaccc

SEQ ID NO: 40546 - RNA, 82 nt, Homo sapiens
cgaaggacgacccagaaggcacagaacacaccagaggcggaccaagaccccaggaagccccggggcaggcccagaagcaccc

SEQ ID NO: 40547 - RNA, 77 nt, Homo sapiens
gggccacaggaggcggcgggccccgcccgccgaaggcaacccacagagagagaggaaacgaagggagcgacacacac

SEQ ID NO: 40548 - RNA, 76 nt, Homo sapiens
cgcccgcgcagccgagagccgggggagcggggccccacacccccccgggggggggaggggcagccacccacgcacc

SEQ ID NO: 40549 - RNA, 72 nt, Homo sapiens
gccagcgaaaacgcccaggcccccgggccacgggcaccagggcccacagggcacagagaacgaagaggcaga

SEQ ID NO: 40550 - RNA, 72 nt, Homo sapiens
accggccgggcaagcgcggagagggagacaaggcgacaagcaggggaccaaaacaaccccggaagagaggac

SEQ ID NO: 40551 - RNA, 67 nt, Homo sapiens
cagccagaccgacccacccgcgcggggacaagagaaaaaaagggcgggcgaacaaaaagagcagagg

SEQ ID NO: 40552 - RNA, 74 nt, Homo sapiens
ccgacggccacgccgccgaccggcaagagccagccaggagcccgcccaacagccgacacggagagacaagcgaa

SEQ ID NO: 40553 - RNA, 59 nt, Homo sapiens
ccgaaacccccggcggcgccggggcccgccgcaggccgcagccaagccggaacaggagc

SEQ ID NO: 40554 - RNA, 74 nt, Homo sapiens
gccggagcaccaagcggggggaagcgaggcaggaagcccagcacgccgaaggccacgcgacccagggaccgggg

SEQ ID NO: 40555 - RNA, 72 nt, Homo sapiens
cagggggaagaagcgcaggcaccacaaacaacaaccgacaccgcagaaccagcaggaaagcggacagacacc

SEQ ID NO: 40556 - RNA, 69 nt, Homo sapiens
aaaccagaacacgccaaggacaaggacagggcagcccagagggggagagagacggacccacccacagca

SEQ ID NO: 40557 - RNA, 83 nt, Homo sapiens
gcagaaaggccgcggcagggcggcgcggccgagaaaaccagaaggcaccgacaggaaaggaaaaggagaaccaggcacccggg

SEQ ID NO: 40558 - RNA, 73 nt, Homo sapiens
gagaaaaaggaaaacgcggaaaaccgacacaacagacagaggcacaaaaggagaaagcagaagaaacaggaga

SEQ ID NO: 40559 - RNA, 64 nt, Homo sapiens
gccacgacccaccccgaagagcaacggaaccagcgccgaggagcgcgaaccaccgcggcagaac

SEQ ID NO: 40560 - RNA, 69 nt, Homo sapiens
agcacgcgccaccaccaaccagcccaagggaagaacagacaagaagccacacagcacaggaaccaggac

SEQ ID NO: 40561 - RNA, 93 nt, Homo sapiens
cccaccgaccgagcgggaggccacagcagccagccggcccgaggacaccgacaccagcagcacgagccagggagccgccgggaccggcccggg

SEQ ID NO: 40562 - RNA, 81 nt, Homo sapiens
aagcccgacgacccccgaacaccccggggcgcgccggaggccgaccgggagcacgcaggccgcgagggcccggaacagggg

SEQ ID NO: 40563 - RNA, 37 nt, Homo sapiens
aggccagcccaaacacggcaggcccccggaaggaaga

SEQ ID NO: 40564 - RNA, 56 nt, Homo sapiens
agggaagagacacaagcccaacaaagaaaggacagcaagaagacaggacacacaag

SEQ ID NO: 40565 - RNA, 124 nt, Homo sapiens
cggcagcgcacgccagagcccagccgcggggcccggggagaggaggggccggggcgggccgcagaaacggcaagagaccggggccgagcagacaggcagcagggaggaagggagacagaaggcg

SEQ ID NO: 40566 - RNA, 35 nt, Homo sapiens
gaacggcgggaaaagggaaagcaacggcgcaagcg

SEQ ID NO: 40567 - RNA, 76 nt, Homo sapiens
ccaacccaagacgaacacccaggcaccacccaacaggccaagccgccgaaagagaagagcgcgaaaagagacacaa

SEQ ID NO: 40568 - RNA, 79 nt, Homo sapiens
caggcgcggcccgcggggcgccaggcacgcgaggcccccagccgcagaacaagaacggcaggcgaaagaccgacagcaa

SEQ ID NO: 40569 - RNA, 59 nt, Homo sapiens
cacgagcgggcgcgcggagccgagcgcccaagcgcgagggcccgaagacaccccgccaa

SEQ ID NO: 40570 - RNA, 73 nt, Homo sapiens
aaagcaaaacagggcggcagccccaacggggcggcagaaggaggcacaaaggaagaccaccaacgcaagcagg

SEQ ID NO: 40571 - RNA, 71 nt, Homo sapiens
gaggccggcacagccaaggggggcacacagaaagaggcgacgaacccccagaccagacaagggacgcagac

SEQ ID NO: 40572 - RNA, 55 nt, Homo sapiens
cagcaacaaggaacaaaagaagaagaacacaaacggcaaagccagacacaggcaa

SEQ ID NO: 40573 - RNA, 79 nt, Homo sapiens
caaccgcaaccagacgccagcgggacgaggaccgagaccgcggccgggaccgaggaagacgaccccgacgcaggccagg

SEQ ID NO: 40574 - RNA, 69 nt, Homo sapiens
cggcaccagcaagcaagaaaggaaagcgagaaccccgaacagaggagccaacagaacgacacgcaagga

SEQ ID NO: 40575 - RNA, 67 nt, Homo sapiens
cccgcgccgccgaccccccggcgccgcgccggcggcgcggaagagcaacaaggaccagaagaaccag

SEQ ID NO: 40576 - RNA, 84 nt, Homo sapiens
ccccacccgggggagcgaaacagaaccgccaggagcggcagacggcaggccagcgcaagaacggaccgaagccaaagaacaaga

SEQ ID NO: 40577 - RNA, 70 nt, Homo sapiens
cccccaggcagacgccgcggaagagccgggggaccacaggcagcagcacaaaccagcaccaggaacggga

SEQ ID NO: 40578 - RNA, 79 nt, Homo sapiens
aagcccaccacgcccacggaaagccccggcagcccccaccccagcagcacaccagagacagggcagggcagcagcacga

SEQ ID NO: 40579 - RNA, 73 nt, Homo sapiens
cagcaaagcggcgaacacaacaacgcaccccccggaggcggccgagcccacgcgacgaagaacaggagaggga

SEQ ID NO: 40580 - RNA, 85 nt, Homo sapiens
ggggacgcgcacaggggacaggccaccagcccccgggccaagagcagcacggagacagagccacacaccggggcgagccacgagg

SEQ ID NO: 40581 - RNA, 63 nt, Homo sapiens
gcccgccgccgccccaacgccgcaggaggcaaagggaccccaagaaaccaaagggcaagagcc

SEQ ID NO: 40582 - RNA, 67 nt, Homo sapiens
gcaagcaggccggaggagaacggcgcagagacaaggaagggaagcggagaaaaggagcaaaaaacaa

SEQ ID NO: 40583 - RNA, 74 nt, Homo sapiens
cggccgacacccgcgcggaggggagaagaggcgacgagggagccgcagggcacaccaagaaagcaagacaggca

SEQ ID NO: 40584 - RNA, 86 nt, Homo sapiens
gcgccaggagggaacccgaagcgggcgcgcgcacggcaggacggagaaagccacaggacagggagaaaagaagggaagggaccacc

SEQ ID NO: 40585 - RNA, 80 nt, Homo sapiens
agccccgagagcgggaacaggggaacaccgcagcaggagacgcgccgaaaaagcaaagcaaaaaaaaaggaacagcccaa

SEQ ID NO: 40586 - RNA, 47 nt, Homo sapiens
cgccggggcggaaagggacccgacacgaccaaggacggcgaagagcc

SEQ ID NO: 40587 - RNA, 79 nt, Homo sapiens
cacagaccccgaccgacgagccccaccccccaacggacgcccgcccaccgcccgaacccaaaggagcgcccgaagaaca

SEQ ID NO: 40588 - RNA, 105 nt, Homo sapiens
ggaggggccgcggcccgcgcagcgccccaggccagaaggagcgcccccagagggaacaggcacgccccacccgccagccgagcccccgacgcagcacaaagcccc

SEQ ID NO: 40589 - RNA, 82 nt, Homo sapiens
cccagcccacacccaccccaaccaagggaagaccccaggacgagcaaggcaacgaggacacggagggccagccccagacgac

SEQ ID NO: 40590 - RNA, 81 nt, Homo sapiens
gcggaaaccgacgcccgggggaaacagagaaagaaggcggccaggccaaccgaaggccagaggaggaaccgaggagcggga

SEQ ID NO: 40591 - RNA, 73 nt, Homo sapiens
gccgccggggccggcacgaggaggggccgcggccaagaccaaagaaaaaagagaaggaaagcggacaaaacgc

SEQ ID NO: 40592 - RNA, 76 nt, Homo sapiens
gagaagagacccggggaggcagcgcgcgcagccgacagcgggccacgggccccaaggaggccaagaaggccccgga

SEQ ID NO: 40593 - RNA, 69 nt, Homo sapiens
aacacccgagagcaccgccgagcggaccccaagccacccggaggagaaggaggcaccagccccacagaa

SEQ ID NO: 40594 - RNA, 71 nt, Homo sapiens
aaagaaaggccagaagagggcacgcacagagggcccgagggcaggacagcaggcaccggcgaagcacagag

SEQ ID NO: 40595 - RNA, 79 nt, Homo sapiens
gggcagcggggacgcggggccgcggcgccggcagcagagaccaccagaaggggaccaaaccacagcaaaaacaccagga

SEQ ID NO: 40596 - RNA, 85 nt, Homo sapiens
cgggagcagaacggcgcagcagagcgcggcgcagaagaaccccgggggcccccccaggcagcaagccaggagccggccacccccc

SEQ ID NO: 40597 - RNA, 68 nt, Homo sapiens
gaaagagcccaccaaagagcggcaacccaaaagaccgcccagacaccccagagacagcgacagcgcca

SEQ ID NO: 40598 - RNA, 94 nt, Homo sapiens
gggaaggacaggcagagcaaacaaggaaaccccagacagccagcagcaggccgggaccagcaggggccgcgcagcagcagacgaccccagcagc

SEQ ID NO: 40599 - RNA, 51 nt, Homo sapiens
acgcgaccggcgaggcccaccaagccaggccaggggacaccagcaagcgcg

SEQ ID NO: 40600 - RNA, 84 nt, Homo sapiens
cgaccggcacgcgccgggacacagacggggggagcccaggaacggccggaggacagacgcgacgcgacggaacccggaccaccg

SEQ ID NO: 40601 - RNA, 39 nt, Homo sapiens
gaacaggagcccgacagaagaagccccggcgaggcaggg

SEQ ID NO: 40602 - RNA, 76 nt, Homo sapiens
caggagaacacccggggaagggagagaccacaaggacgcgcgcacgaaaaaaagcgaacgcaaggggccaagaaga

SEQ ID NO: 40603 - RNA, 56 nt, Homo sapiens
ggacggacaaacgccccacaacagagaaacgagaccagaaggaagcagaaacgcgc

SEQ ID NO: 40604 - RNA, 90 nt, Homo sapiens
gcgggcggcagcgcgacggggagcggcggagaccgcccgccccgccgggagaggaaacgaggcgggaagacgaaacgccaaaacacacaa

SEQ ID NO: 40605 - RNA, 83 nt, Homo sapiens
agcggggaccacacggccgaccgcagggaagggcaagcgaggccgagggggacgacgggaggcggagcaaaggaaaacaggca

SEQ ID NO: 40606 - RNA, 75 nt, Homo sapiens
cagacccggaaaaaggaagcaacgccaccagaggaaggcgccagccggaagcccgagggcagcgcccacggccgc

SEQ ID NO: 40607 - RNA, 75 nt, Homo sapiens
ccaagccgacagcagccacccagcccggcacacacaggagcccccaggcccccccacagcggcaaacaagaaggg

SEQ ID NO: 40608 - RNA, 82 nt, Homo sapiens
gggagcgcgcagccaggaaggacgcccagagaccggcagcgcaaacacccggggaggaagcccacacacccccagcaccacg

SEQ ID NO: 40609 - RNA, 79 nt, Homo sapiens
ccaagacccgacacaaggcagccccacagcaggggacagcacagggccgggcacacgccgcccaccccccaagacccaa

SEQ ID NO: 40610 - RNA, 65 nt, Homo sapiens
ccaccgcgacacacgagcacaggagaaaaagggagcgcacgggcgagccaggagagagcagcgga

SEQ ID NO: 40611 - RNA, 85 nt, Homo sapiens
gaagccgggagccgccgccagggggccgccgggagccgccccgccagcgcccccaccaggcgcaaccgaaagaagcgggacgggg

SEQ ID NO: 40612 - RNA, 63 nt, Homo sapiens
acgacccagagaacccaccccaagacgaagacaaccccaaacagccgcaacgccccagggaaa

SEQ ID NO: 40613 - RNA, 73 nt, Homo sapiens
caccgcccaggccagcccggaagaggcacaacacaggccaaagccacccccaaaggcagaggaagaacgagca

SEQ ID NO: 40614 - RNA, 85 nt, Homo sapiens
caacccaaacagggaccaaccaaagacgccaaggagaaggcagaccggaaccgaaaaaagcggcagcgcaacccagaagagggcc

SEQ ID NO: 40615 - RNA, 37 nt, Homo sapiens
cacaacaggcagacagacaaacgaaaagaaggcaggg

SEQ ID NO: 40616 - RNA, 81 nt, Homo sapiens
aaggccgaggccgcggccagggcggcgccgcgccccccacggagcgaccgggcagccagaacagcacacagcaccggacgg

SEQ ID NO: 40617 - RNA, 58 nt, Homo sapiens
gagaggcaccgcgggcaacaggcccacaggaaagcgccagcagcgaaccccagacgga

SEQ ID NO: 40618 - RNA, 98 nt, Homo sapiens
aagagcgcgggacgcgacaagagcgggccgcgcggacagacaaacccgcaggccaggccaagaaaggagcgagggacggcggcgaggaccagcagccc

SEQ ID NO: 40619 - RNA, 59 nt, Homo sapiens
aagccacagaaaaaaaggaaacggcaggcaagaaaaccgcccacgaaggacaggaagcc

SEQ ID NO: 40620 - RNA, 68 nt, Homo sapiens
agcaccgaggcagaagagaggacaaccaccaacaacgaggcacccaaaaggggaacgggacaccaagc

SEQ ID NO: 40621 - RNA, 84 nt, Homo sapiens
gagccccgcgcagcgcgacgcgcgaccagaccggcccccccgagaaggggaaacgaggcccaaggaaagagaccgcaaagcacc

SEQ ID NO: 40622 - RNA, 59 nt, Homo sapiens
aacaagaagaaacaagcacccgccgggccgaaccggaagggcaagggggcaccgaaaca

SEQ ID NO: 40623 - RNA, 78 nt, Homo sapiens
aagcaggaaaccagacccgaggaagagagcaagggcgggggaacgaccgaaccaaagagaaaccggcgcaacacccag

SEQ ID NO: 40624 - RNA, 72 nt, Homo sapiens
agggccaggcggcacaccccccaagaccggcggcccaacccaccgggagacaagcgacagagaagaagagaa

SEQ ID NO: 40625 - RNA, 61 nt, Homo sapiens
gagggcccagcccggcaggacacgaagcgcagggacgcaagccacccaaacagagccaggc

SEQ ID NO: 40626 - RNA, 57 nt, Homo sapiens
gaacgggacaacaaaagagccacccaagggaagacaaaggcgcggcaagcggggaag

SEQ ID NO: 40627 - RNA, 75 nt, Homo sapiens
ggaaccaaaccccaccgagacaggacccagagagggaccagggccaaagaagagccggggggcaggcggacagca

SEQ ID NO: 40628 - RNA, 50 nt, Homo sapiens
cagaccgaccaccaaaacagaagaaggaagcaagagaagaaccagccggg

SEQ ID NO: 40629 - RNA, 74 nt, Homo sapiens
aaacccaaccagcacacgggcaggaaaaaaaagaacaaaggacaccacgcagaggagccccggcacaaaggaag

SEQ ID NO: 40630 - RNA, 65 nt, Homo sapiens
caggccggagcgcggcacggagacggcggcagcgcggacaggggcagacaaaacagaggagacca

SEQ ID NO: 40631 - RNA, 35 nt, Homo sapiens
ccccacggggcgggcgggcccagaaggggaagacc

SEQ ID NO: 40632 - RNA, 96 nt, Homo sapiens
ggagaccgcagacccaccggcagccgcgccacaccacgccgcgcccaccaccgccgccggcggaggagcgaagacaggcggcggaggaaacaacag

SEQ ID NO: 40633 - RNA, 72 nt, Homo sapiens
gagaccaacaccaacacgagggcggcggaaaaagccgccacacgccaaagggacaaagcccccagaggaacc

SEQ ID NO: 40634 - RNA, 83 nt, Homo sapiens
gaaaccacccaaggcccaaaagcgcaaaccaccaaaaacaacacccagaaagagcgggggagagcagcggcgccagcccgggc

SEQ ID NO: 40635 - RNA, 76 nt, Homo sapiens
ccacaaagagggaccgcagaaaaagcgagcccacccccacaccaacccccggaagagagccaacaccagagaggag

SEQ ID NO: 40636 - RNA, 70 nt, Homo sapiens
aaaacaccgcccacgcccgagcaaaaaagaaaaggccccaacagagccccagcaagcacaacacgaaagg

SEQ ID NO: 40637 - RNA, 102 nt, Homo sapiens
agaaagaggaggagaaaaggacgaagaggccccaccgaacagggaagaagagaacagcaacggggcagggagggagcaaacaccagccagcgacgggaccag

SEQ ID NO: 40638 - RNA, 80 nt, Homo sapiens
aacaacaggagggcaacccagaacacaaaaacaccccacagaacagaaagaacgagacacccagcgaagaaggaagcaac

SEQ ID NO: 40639 - RNA, 68 nt, Homo sapiens
agacgggccaagacggccgagaacagaagacaagccggcccggaaaccgcccgaacggacccgcgaaa

SEQ ID NO: 40640 - RNA, 86 nt, Homo sapiens
aaagccgccaagaccagcaaaaagccaccaccgcaaaggaagaacccaaacaacgaccagacgcggaggaagaggaaaggaacgag

SEQ ID NO: 40641 - RNA, 69 nt, Homo sapiens
aggcgcgcaggagccaaggcaggggcgccaaaagaccaacacggaggaagaaacaaccagcagaaagaa

SEQ ID NO: 40642 - RNA, 45 nt, Homo sapiens
gacaggcagcacaagcagacccggcagggaccccgaaaaagacca

SEQ ID NO: 40643 - RNA, 64 nt, Homo sapiens
caccggcccgaggcgaagccagcccacaggggcaaggcaaccacgagacagacaacagaaccag

SEQ ID NO: 40644 - RNA, 63 nt, Homo sapiens
cgacccggcgccagccacggacgccacagagggaagaccccaagggccagcaaacagcgaggc

SEQ ID NO: 40645 - RNA, 69 nt, Homo sapiens
cggaacaagaagaagaccccacggaaggagagagcagagcagaagagcagcggagcggaggcagacaca

SEQ ID NO: 40646 - RNA, 69 nt, Homo sapiens
gaagccacaaaaccagaaaagagcgaaaaggccaaagcaacgagaagaccgagaggagaagacgaaccc

SEQ ID NO: 40647 - RNA, 77 nt, Homo sapiens
gccacagagggggaaagccaaggaaaaacggagagccacaaaaaaggaagcgaaaacccgcccaagagccaagggaa

SEQ ID NO: 40648 - RNA, 75 nt, Homo sapiens
gagaacgggaagcgagccaggaggcccgagggagagccacccgcccaagagaaggagacccggacccgccccggg

SEQ ID NO: 40649 - RNA, 69 nt, Homo sapiens
caggggaccagagaggacggcaccagccaggagccacagaagaccgggagggaacaaaaacacccaggg

SEQ ID NO: 40650 - RNA, 113 nt, Homo sapiens
cgagaggaggccgccagcagaggcggagcccgcagaccgcagaaggccggagacaccagcagaaaaaggcacaaacccagcacagagaagacggcgacaagcaaaagacgacg

SEQ ID NO: 40651 - RNA, 75 nt, Homo sapiens
ccagaagcaaagacagcccaaccaacccaccagccagacaacacaagaagaaacagaagacagccgaaccaaggg

SEQ ID NO: 40652 - RNA, 69 nt, Homo sapiens
acaagcgggacagcccagccaggcccagagaggcacacggcaggccaggaagcaggcaacaacgacaac

SEQ ID NO: 40653 - RNA, 74 nt, Homo sapiens
gggaaggcagcagcacgcagaagggaggagcagcccaacagaaggaggaagccagcccgagcaggcccagggga

SEQ ID NO: 40654 - RNA, 86 nt, Homo sapiens
acacgcgccggaaggggcccgaagcccccgcaggaaccacaacccaaccaggaagggcaggcgaaaaaaacgagacaagacaaaaa

SEQ ID NO: 40655 - RNA, 56 nt, Homo sapiens
aaagccaggcacaagaaagcgaaagcgcaaaggacgggcggacacagcaaggcaca

SEQ ID NO: 40656 - RNA, 58 nt, Homo sapiens
gcccagcagaagaggaacccgaaaaccccaggccagcaacagaagaaagcaagcaccg

SEQ ID NO: 40657 - RNA, 57 nt, Homo sapiens
gcgggcgccgggccaggacgggagcgggacgccccagggagcggcggccagcggcag

SEQ ID NO: 40658 - RNA, 69 nt, Homo sapiens
cgccccgggacgcacacggcaccaaacggaggaagaggagccaaaggggccggcgaaccggcaagaagc

SEQ ID NO: 40659 - RNA, 93 nt, Homo sapiens
gccgaggcggccccagagccgcgggccgggcccgaaccacgaccccgccgcggcccccgcaaaacaagccacccaagaagaagaaaggccaaa

SEQ ID NO: 40660 - RNA, 75 nt, Homo sapiens
caccccgcccgggcaaacgggaaaaaggcaacgacggaagccggagcggcaaccaggccacaaacggccaagaca

SEQ ID NO: 40661 - RNA, 39 nt, Homo sapiens
cccgggagcgggacacaggagagccacccgcacgaggcc

SEQ ID NO: 40662 - RNA, 58 nt, Homo sapiens
cggccgagaaggcagaggcgcgagggcagaaagggcccagccggcagagggaccggag

SEQ ID NO: 40663 - RNA, 76 nt, Homo sapiens
gacacgaccaccagaggccagaagagcgggacaagaccaccagcccccgggacaacggaagggaaggaaaaagaac

SEQ ID NO: 40664 - RNA, 71 nt, Homo sapiens
gggagcgaagcaaggcgaaggaagcggggcagacagccccacaaaggagaaacagaaaagcaacggcgcaa

SEQ ID NO: 40665 - RNA, 82 nt, Homo sapiens
cccgcgcgcgcccgggaggaaggaacgaggcaaggagcaaagcagcggcgcagcccgggggaccgggcggccacaaggggca

SEQ ID NO: 40666 - RNA, 80 nt, Homo sapiens
aaaaacaaagccaaggaaaccccaacacagagccaagcgccaaacgcccgcagaacaagaaggagaggggccagaaaacg

SEQ ID NO: 40667 - RNA, 68 nt, Homo sapiens
acgaccgaagcgaagcgccccccaagacaccagaaggcagcagcggagagacgccaaggcagacggaa

SEQ ID NO: 40668 - RNA, 86 nt, Homo sapiens
ccccaagcaaccccaagcaaaagggcaaacaaggagcaccacggggcccggcgacaggcaaacaaccaggacgagaccggacggca

SEQ ID NO: 40669 - RNA, 109 nt, Homo sapiens
gcacccagaaagccccggaacaaaaagccccagaccagagacagaagcagaggacgccagcgccgggaccagggcagggaccccggaaccgaagggcgacaaagagacc

SEQ ID NO: 40670 - RNA, 56 nt, Homo sapiens
ccgcccagacggcgcgcacgggacgccggggagaagagggaaggaaacgcgaacgg

SEQ ID NO: 40671 - RNA, 73 nt, Homo sapiens
gcgccagcaccgccaccagagcgcccgcgcgggaccccagaccccaaacaggagaaagcaaaacccaaccccc

SEQ ID NO: 40672 - RNA, 67 nt, Homo sapiens
aggaaccacgaagcccaagaagccacaaaccccccgccggaccaccaaggcgcaggaggacgcggca

SEQ ID NO: 40673 - RNA, 77 nt, Homo sapiens
ggggccgggcgccggcgcgcgcgccccgccccaagcaccgcaggacccagaccaggacggaacacaccaacaagaag

SEQ ID NO: 40674 - RNA, 80 nt, Homo sapiens
accgcacaaaggagcgcgccgccgccgccgccccccccccgggggcccgggaggagagaaagaaggaagacccacaagag

SEQ ID NO: 40675 - RNA, 82 nt, Homo sapiens
acggaccgagaccggaccgagagcggaccgagagcgcgaaacgcacgagaaggagcacagaccagcgcgcgaccggagcccc

SEQ ID NO: 40676 - RNA, 66 nt, Homo sapiens
ggagcgccccaggacgccaggaaccaaggacggggccggaagccgccgagccgaacggcgcagcac

SEQ ID NO: 40677 - RNA, 71 nt, Homo sapiens
aaccgccgggagcagccggacaagagaccacacccaggaagccaggcacgcacagcgaacccgagcgccca

SEQ ID NO: 40678 - RNA, 82 nt, Homo sapiens
cccggaccaagcccacggcgggagggccagggaccaacacaggaacaaggagagcgcgggcgacggggcgagagagccgggg

SEQ ID NO: 40679 - RNA, 80 nt, Homo sapiens
cgaaaggacacgggagaaagggagccgagcgagaccacgcaccacgggcgaagcagaccccacgagcgaaagggaaaaaa

SEQ ID NO: 40680 - RNA, 56 nt, Homo sapiens
ggaggaagggaggagacccgaccccagaagccagacaccaagaaggaaggcccccg

SEQ ID NO: 40681 - RNA, 60 nt, Homo sapiens
aaagagcccccagagagaaagagagccgaagcgacagaaccccaaggccacaaccacaca

SEQ ID NO: 40682 - RNA, 70 nt, Homo sapiens
gaagaagaccccgaccccgggaagcacgagcacgccaccggcgccagcgggcgaggagcgcagaaagccc

SEQ ID NO: 40683 - RNA, 84 nt, Homo sapiens
cgggaaaccaggcaccggggggcaacacccgagaacggcgggaagagaagacacgagcacaaacggacccaccaacaaccgaaa

SEQ ID NO: 40684 - RNA, 87 nt, Homo sapiens
ggaggccgagcggcaggcccgcggcaggccagcggagaaccaggagccaagcccacaaccagcaagacacaagggcgacaccagaaa

SEQ ID NO: 40685 - RNA, 70 nt, Homo sapiens
aggcgggcgcgggggccggggcgcgcgcagcccgcagcgggacaagcagcagccgcacaacacgaccagg

SEQ ID NO: 40686 - RNA, 69 nt, Homo sapiens
cgagcggggcgcgcggccacgaagaacggaagcgccccagaggagagggcggagagacggagaaaacgc

SEQ ID NO: 40687 - RNA, 59 nt, Homo sapiens
acgagcgaaaacccgacagggccgccgacggagcgaccagacccagaaggccggacgcg

SEQ ID NO: 40688 - RNA, 82 nt, Homo sapiens
gcgccgccaaacagcccagccgcgccagcgcccggcgccgcgcgccacccccgagggcccgggcagagggaaagcagaggac

SEQ ID NO: 40689 - RNA, 58 nt, Homo sapiens
gccgcccggcgccgcgggacgggagaccgggaaggccgcggacccccccccccccacc

SEQ ID NO: 40690 - RNA, 81 nt, Homo sapiens
ccgcgcagccagagcggagccggaccccggcacgcccgggaggagcggacagaaaaacggacccggcgagaagcaaagaag

SEQ ID NO: 40691 - RNA, 71 nt, Homo sapiens
accgacggccccgaggacgagcggacggaacagaccacagggaccaccgggaccagaacacacaagaaccg

SEQ ID NO: 40692 - RNA, 55 nt, Homo sapiens
agccagaccaagaacaaccgcggacacggagaggaagggcacccccaacccacgc

SEQ ID NO: 40693 - RNA, 77 nt, Homo sapiens
cgcaccgacccgacgcgccggcccacgcgcggccaagaagagaagccagccgaggcgcgcccgcagcggaggcagcc

SEQ ID NO: 40694 - RNA, 71 nt, Homo sapiens
cacgccaccaaacagcgcagagagaaagaacgacgaaacggaggagacaggcaagcggaggcaaagaacag

SEQ ID NO: 40695 - RNA, 47 nt, Homo sapiens
cgcagaagaaacacggccgaaaccccgcacacgaaggcccccacaag

SEQ ID NO: 40696 - RNA, 76 nt, Homo sapiens
cagcgcccgggaaggcgccggggccagcgcagccgcggcggagacgcacaggcccgaaagcggacgccggaagcgg

SEQ ID NO: 40697 - RNA, 43 nt, Homo sapiens
gagaggaggcaggcccgcgaaagaaccaagagggagacaaggg

SEQ ID NO: 40698 - RNA, 84 nt, Homo sapiens
gagcaaaaaaagagcccgcaagaagaacagagacagcagccaaacccccagaggagaggggcggagcgggggggcacacagacc

SEQ ID NO: 40699 - RNA, 74 nt, Homo sapiens
gcgacgccggaacaacgggaaagccgcacacccaccagcacacgccgaggagccaagccgcggcgccggcgcgc

SEQ ID NO: 40700 - RNA, 77 nt, Homo sapiens
aaacgggaagaaaacggacaaccaccacacagccgggccagaacaggaaggacaggaacaagaacaaaccgaaaaga

SEQ ID NO: 40701 - RNA, 73 nt, Homo sapiens
gagagcacaaccacgcagggaagcccaggggcaggggccggcacagcagcaagaccggaacccagaagccccc

SEQ ID NO: 40702 - RNA, 57 nt, Homo sapiens
gagcgcaagaggacaacagccgccccgagccccggccccaaagacccaaaacagaga

SEQ ID NO: 40703 - RNA, 58 nt, Homo sapiens
ccagaccaaaagaaaaaagggacccacccaggaacgggcgccgagcgaggcaccaacc

SEQ ID NO: 40704 - RNA, 76 nt, Homo sapiens
cagggacaagagaaggaggaaagagaagggaaagggggcagcaaagagaagcggagggccagacaaggggaacaca

SEQ ID NO: 40705 - RNA, 62 nt, Homo sapiens
acccgaagcagagcgcccaggacgcagaccccgagcccaaccgccagccgccggaacgcagc

SEQ ID NO: 40706 - RNA, 38 nt, Homo sapiens
gccagaggaaagaacccgagaacagggcaggaaaggga

SEQ ID NO: 40707 - RNA, 75 nt, Homo sapiens
acagcggccgaacccaagcggaccagccggggaacaccaaaggacaccagaggacgcccggcagaagggagcgag

SEQ ID NO: 40708 - RNA, 85 nt, Homo sapiens
cgcacccgagcacagccgcgcgaccccaagacccggaaaacgaagaaggcagaggcaccgccagggaggagagcggggcacgcgc

SEQ ID NO: 40709 - RNA, 87 nt, Homo sapiens
agccccgccagcacccgcccccaggccgcgccaacagcgcggagccacccgggcggaggggccagaagacagcccaggaggccgagg

SEQ ID NO: 40710 - RNA, 70 nt, Homo sapiens
caaaggggaggccacggacaaggaaaaggacaaagcaccaccccagcgaaggaccggaggaggagcggcc

SEQ ID NO: 40711 - RNA, 79 nt, Homo sapiens
aggcacacgccgcgagcaagcgagaaggccacgcgagaggcaggccgaaagaagaaaacccgagcagagaaaacaacaa

SEQ ID NO: 40712 - RNA, 64 nt, Homo sapiens
cgggaggccgaaagcggaaaacgagccagcgcaggagggccaaaacaaaggggagggaggaggc

SEQ ID NO: 40713 - RNA, 39 nt, Homo sapiens
aaaaacaagagcacacaaggagaagccgcgggagcggaa

SEQ ID NO: 40714 - RNA, 82 nt, Homo sapiens
cggcggcccagcaagagaaaagagcagacgccacggggccgcgccaagccagagaccacagagaagcccacccggaaacaaa

SEQ ID NO: 40715 - RNA, 69 nt, Homo sapiens
gagggggaacaacacccacggaagcacgcgagcacaggcagagacaagggacaggaaacgacgaggggc

SEQ ID NO: 40716 - RNA, 57 nt, Homo sapiens
gaagaaagcaagacccaggacaccccgaagccgagaaaggaccccgcaaaacacccc

SEQ ID NO: 40717 - RNA, 54 nt, Homo sapiens
aaagaaaccacgcgcggaagaagacccggagagggaagcccgcggcgggaagcc

SEQ ID NO: 40718 - RNA, 52 nt, Homo sapiens
cagacagcgagcgcacacaggaccggcgacaagcgcagagcaggcaaacagg

SEQ ID NO: 40719 - RNA, 78 nt, Homo sapiens
gggcagccacaacaagggcgccagggagcggaccaagcggacaggcaagacaggccaccacgggcacgcggaagccgg

SEQ ID NO: 40720 - RNA, 70 nt, Homo sapiens
aacaaacgagcacgcaacgccgccccagcacccgaagagcgggaagccccaccaaggggaggcgcccagg

SEQ ID NO: 40721 - RNA, 83 nt, Homo sapiens
cggcaggccggcccggggcgagccccaggccgagaggagggagacccaggaccaagaacaaggggcacccgcaagcccaccgg

SEQ ID NO: 40722 - RNA, 71 nt, Homo sapiens
ccaacaaaacaagaaagccagccgaagagggcaacacaggccaagcccaacaggggacaccggccagggcc

SEQ ID NO: 40723 - RNA, 77 nt, Homo sapiens
ggccgcgcgggccacccaagaggagccccggggaacccgcagcacaccagggggcaggcccgagacggggcgccagg

SEQ ID NO: 40724 - RNA, 81 nt, Homo sapiens
cgcgccacaaaacagagaagaagaccccacggaaagacaccggccagcggccagagcgagcagcccaccgaacccacccca

SEQ ID NO: 40725 - RNA, 81 nt, Homo sapiens
gaagaagcgcgagacccacgaggcgcggcccggaggcccagaaacgggccgcgccaccaagaaacgggagagaccaaagac

SEQ ID NO: 40726 - RNA, 60 nt, Homo sapiens
agagggcggaccccagaccaggcgggggcccgaccgaccccgccccccagcgggaccggg

SEQ ID NO: 40727 - RNA, 83 nt, Homo sapiens
aaccaaggcaggagaggagccagcccccaccccacaggcagggacggcgccaaccccccggcacgggccccaccgagccccag

SEQ ID NO: 40728 - RNA, 47 nt, Homo sapiens
gcggcagcagcggcagcggcaagcaccgaggcgggagcagaggaaaa

SEQ ID NO: 40729 - RNA, 75 nt, Homo sapiens
caaaggacagcaaagaagcagcccagggaaccacaaaaaggccaacagagacacggccagccagaccgaaaccca

SEQ ID NO: 40730 - RNA, 86 nt, Homo sapiens
gggggcacgcagcgaagccacagaccccagaaacgggcaagcgcgcaaacccagaagcaccagacacgaaagagcagaaggcaaaa

SEQ ID NO: 40731 - RNA, 35 nt, Homo sapiens
agaaaaacacgacagccagacagcagcgaagaagg

SEQ ID NO: 40732 - RNA, 67 nt, Homo sapiens
aacggggggcaaacagcaaccggagaaggggcaccaaaacagagaaggaagggaacacggacgacga

SEQ ID NO: 40733 - RNA, 68 nt, Homo sapiens
agcacaggaaagagcgaagaaaacggaaaagaaaaagcaggagaagcaacccagcgacgcgcgggaag

SEQ ID NO: 40734 - RNA, 76 nt, Homo sapiens
gcggcgccccggcgggaccgggcggcacgcacgcgggcagggaacaggcggagcggaaggcgacgcaccagaaacg

SEQ ID NO: 40735 - RNA, 59 nt, Homo sapiens
cacaaaagcgagaaaacacccaggaagaaagagggccacggacagaggcgcagcagagg

SEQ ID NO: 40736 - RNA, 71 nt, Homo sapiens
gacccaccccgaagagcaacggaaccagcgccgagaaaaagaggcgaccgagcggaagcagaggaaacccg

SEQ ID NO: 40737 - RNA, 75 nt, Homo sapiens
cacgacgacgccagaggaggccaagagggcaccacaagccgaacagccagccagcaaaagaacagcagcaccaga

SEQ ID NO: 40738 - RNA, 75 nt, Homo sapiens
cagaacagcccaagaggccgaccgagacgggcggagaggagaagcaggacacaccaccagcaaggcaaaaaaggc

SEQ ID NO: 40739 - RNA, 39 nt, Homo sapiens
cccgagagcgggagcagaaagcggggccggaaggggcca

SEQ ID NO: 40740 - RNA, 80 nt, Homo sapiens
gcgccgacgccaaaggggacagcgagcggaggaggacgaggacggaagaggaaacaaagagaaacggggacacgccgaga

SEQ ID NO: 40741 - RNA, 73 nt, Homo sapiens
agaggacgggacacgggccaagggagcgaaaagaacccccaaaaggccaccaagcagcccaggagaggccaag

SEQ ID NO: 40742 - RNA, 80 nt, Homo sapiens
acccgggaaaagagccagaaccaaccaacacccggccgcaagcccggccggagcagccggaagacagcacaagaagggga

SEQ ID NO: 40743 - RNA, 95 nt, Homo sapiens
gacgcaaccccaacggccgcaggggcggccccggcgaggcaggaggacagggccagcggcagcgagggcaccaaccagaggggccaccagaggcc

SEQ ID NO: 40744 - RNA, 74 nt, Homo sapiens
gcagcccgaagacagaccgagagggaggaaaaagcagcgaaacagacaaccccccacacaaccggaaaaagacg

SEQ ID NO: 40745 - RNA, 80 nt, Homo sapiens
aagacacgggaccaccacccaaggaacaagcccgacagagaaaggcacaacccagaccagagaagcgaccagacgcacca

SEQ ID NO: 40746 - RNA, 72 nt, Homo sapiens
cagaaagcgcagagcaaacaccaaagggcgggaagcggggaaaggaaaacaccagcacaccaaagaccgggg

SEQ ID NO: 40747 - RNA, 79 nt, Homo sapiens
cgggccagccccgccgccccgcaaccggcagccgccgccgggaagacgaaaacaccgacagaaaaaaaagccagggaag

SEQ ID NO: 40748 - RNA, 81 nt, Homo sapiens
acaaccacaacagaaagcgacaacagccaagagggcgcccagagacaacgagagaacccaaaggagccgaacccaaaaaga

SEQ ID NO: 40749 - RNA, 61 nt, Homo sapiens
ggccgagcgaggcggcgcggccagaagacaggaagggaaggggcggagacgggcggaacgc

SEQ ID NO: 40750 - RNA, 83 nt, Homo sapiens
aagaccccaggacaacaaggagaccaacagaaccacaggacacggaccaggccgcccgcgccggaacaccagcagcacggaac

SEQ ID NO: 40751 - RNA, 74 nt, Homo sapiens
gaacacacccaagagggaaacccccccacgagggccagccgagccggccaggaccagggggaacccgcagcagc

SEQ ID NO: 40752 - RNA, 79 nt, Homo sapiens
ggccgaccgcaacacgagcaggcaggccccgcaggccacccaggcccggaggcagcgcaggggagcaccggcacaacgc

SEQ ID NO: 40753 - RNA, 88 nt, Homo sapiens
ggagcgaggccaagaggagaaagaaccggccggaagacaccggaggacgggaggggcaagcgcggccaaccaaggccaagagcgagcg

SEQ ID NO: 40754 - RNA, 71 nt, Homo sapiens
acccacccgagagacgcgaaggcccccgccgaggcacacagcccgaagaagggacacaggacaaggagcca

SEQ ID NO: 40755 - RNA, 110 nt, Homo sapiens
gaacaggcggcgcgcgcggcgcgggacgcgcgcgggcacccacggagccccggggcggaggcaagcaacgagaggaaaggcggggcagcccagaccagcccaaacccacg

SEQ ID NO: 40756 - RNA, 72 nt, Homo sapiens
gagagaagcgacagccgcaggaagcgacccggaaccgggaaaccaggcaagaagcaacgaagagaacagcca

SEQ ID NO: 40757 - RNA, 76 nt, Homo sapiens
gggaggccccagggaggagagggccggcggcaacggcacagggaaacccagacgacaaggaaggccaagggaccca

SEQ ID NO: 40758 - RNA, 86 nt, Homo sapiens
caaggccacaaccgcagggaccacagcaccgaaaacaccaggaaagacaggagaccaaaaagggggagggaagcagccaagcgggc

SEQ ID NO: 40759 - RNA, 92 nt, Homo sapiens
agggagggaccaaggaggagacaaggacaccgcgcaaggccggcagaaggggacgacccaccggagcccggacgcgaacaagagaggcagcc

SEQ ID NO: 40760 - RNA, 75 nt, Homo sapiens
gccggcgaccgaggggagagggaacgcagcgaaagcggaacggagaaggaagaccaaagaaaaacacaaagcacg

SEQ ID NO: 40761 - RNA, 69 nt, Homo sapiens
aaaaccagcaagcaaaagacccacaggaccgaagaacgcggaggacacagaagggaaccaagcggacaa

SEQ ID NO: 40762 - RNA, 81 nt, Homo sapiens
aaacaagagaccacagaagggcagagcggcgggaaaccaccaacaacacccccaaaccaaaacagccggaagcgggcagcc

SEQ ID NO: 40763 - RNA, 63 nt, Homo sapiens
gccacggcaggcagcgggccaggaaaaaacggaacgggaagggacagcagcggggagcgagca

SEQ ID NO: 40764 - RNA, 79 nt, Homo sapiens
ccaacggcgaacccaaccaaaggaaaaccccaaaaaaacagacgaacccaaggaaaggcggcacacccgggacaccaac

SEQ ID NO: 40765 - RNA, 81 nt, Homo sapiens
gcgaaggcgggacaagcaacaccgggcagcggagcaccagcacggaggcacagcggaggaaggaagggcccgggggccgag

SEQ ID NO: 40766 - RNA, 63 nt, Homo sapiens
ccgccgaccccccggcgccgcgccggcggcggggaaagaaaaggcacccaaaagcccagaggg

SEQ ID NO: 40767 - RNA, 81 nt, Homo sapiens
cgggggacgccggcggcagagagagcaccaacgacaccccaaaaacggcccaggggggcggcagacacagagaaagaagag

SEQ ID NO: 40768 - RNA, 80 nt, Homo sapiens
aaggagcccaaaaaccggagaaggagaggcgggggaagggaaaggaaagaccacagcaagaccacgcccccagccggggg

SEQ ID NO: 40769 - RNA, 75 nt, Homo sapiens
caccccccagggccggcagagggcaggaccggcacccggcgccggaccccgagaaacagagaagacggcccagca

SEQ ID NO: 40770 - RNA, 76 nt, Homo sapiens
gagcgggacaccccggaagcgggaaagggccagcgagacagaccgaaacccaaagaaaaggagcgcgcccaacgag

SEQ ID NO: 40771 - RNA, 66 nt, Homo sapiens
accagcagaaagcaaaacagagcggaggaaaagaaggcacggaaggcgacacaccaaagaaaaaac

SEQ ID NO: 40772 - RNA, 73 nt, Homo sapiens
acaaacaagaccaacacaagcacccgcggcccggaaccagcaccagaccacgcgggcggaggcagggcaagac

SEQ ID NO: 40773 - RNA, 80 nt, Homo sapiens
cgccgggcgcgggcccacgcggcgcagaggaaaggagcagggcccgggaagccaccaacgcgaccacggccaagccccca

SEQ ID NO: 40774 - RNA, 73 nt, Homo sapiens
ggagccgcgacaccaccgacaacacccaagcaacagaaacggagacgcacgacccagccacagcgggccacac

SEQ ID NO: 40775 - RNA, 77 nt, Homo sapiens
gccaaagagagggcgaacaagcaagaccaggcaaaagaaaccaccgacgaagcccgagacagaccagaaaaggaaag

SEQ ID NO: 40776 - RNA, 59 nt, Homo sapiens
caccgccgccgccacccccccaagaaaaccgcacaaacgccgaagcacccacccgcgag

SEQ ID NO: 40777 - RNA, 70 nt, Homo sapiens
cagacagccccggcagaggccagcaaagcgccaaaagcggagaacgaaaaggccgaaaggaggagccaaa

SEQ ID NO: 40778 - RNA, 83 nt, Homo sapiens
ccagagggaaagcacaccaccccagccagaccaggccccccccaccgccagcagcagaaagcagcagaggccgaccgcaggag

SEQ ID NO: 40779 - RNA, 58 nt, Homo sapiens
gccggagacgcgcccgcgcgcaggggaagcgggcagaagagcccacagagaaaaaacc

SEQ ID NO: 40780 - RNA, 95 nt, Homo sapiens
ccacacaagaaaaaagagggacggcaagggggaaagaacaccgaccagagaaggaccgcaaacaacggagacagggccaagacccccaccacccc

SEQ ID NO: 40781 - RNA, 88 nt, Homo sapiens
cagggaagcgcagaaagcaggcgaacccgcggcgcaaaacgaaaacacggggaaccggaggagaacaccggaccccaggcgcgacgcc

SEQ ID NO: 40782 - RNA, 76 nt, Homo sapiens
ccgcacaggagccacaagcccccagccagccaggggaaccagacccccgggagacgagagccgaccacaggagcca

SEQ ID NO: 40783 - RNA, 55 nt, Homo sapiens
aagcaaacggaccagaccgaccaccaaaaacacgagaggcgagggacgacagagc

SEQ ID NO: 40784 - RNA, 79 nt, Homo sapiens
caagccacccgcacaccaccgagagggggccgaaggccagcaccccaggacccgcggggcccagccccaccagggccca

SEQ ID NO: 40785 - RNA, 67 nt, Homo sapiens
gacccacggaacagagccggggggacgaccacaagaccggggaggaacgaaccaaccgggaggcccg

SEQ ID NO: 40786 - RNA, 61 nt, Homo sapiens
ccaaggaagccacggcagacacacaacccgacccgacgagaccagaacagagaagaaagca

SEQ ID NO: 40787 - RNA, 54 nt, Homo sapiens
gagcgcggcgggcgcgcgccagaggagacgggacagcagaggccgggcgaaaac

SEQ ID NO: 40788 - RNA, 78 nt, Homo sapiens
cggccagcgccggaaaccaacaagaaaccaaggcaccccggagcccggaaagggccacaccagaggcagcaagagacc

SEQ ID NO: 40789 - RNA, 69 nt, Homo sapiens
agccagcggacaacagaaaggaaggcaacggaggccaggaagaaaagacgaaaagcagcagccagagca

SEQ ID NO: 40790 - RNA, 74 nt, Homo sapiens
gggaacacaccaagcaagacgggaggcagccacaccaggaacccccggcaaccagaaggaaggacacaaaacaa

SEQ ID NO: 40791 - RNA, 51 nt, Homo sapiens
aaccccaaaaaaacagacgaccaaaacagaaagcagcagagcaagcccgag

SEQ ID NO: 40792 - RNA, 81 nt, Homo sapiens
gccccaccgggagagaagggcaggggccgagagggggggaggaggaagacggagccaagaccacaagaacgagccagcaaa

SEQ ID NO: 40793 - RNA, 75 nt, Homo sapiens
acacaggccaagaccaaagccacccaaaaagagcaaacaaccggggcagacaacagagacagagacgccaaagga

SEQ ID NO: 40794 - RNA, 88 nt, Homo sapiens
ccccccggacagcaccagaaaggagacaaccgagagaccggagacccacaggaaacacaagcccgccggcgccacagagcccaaaccc

SEQ ID NO: 40795 - RNA, 50 nt, Homo sapiens
aaagaacagaggaccgcggggacgggagacccacacaggaaagagaggag

SEQ ID NO: 40796 - RNA, 70 nt, Homo sapiens
gaagagccacgaaaacaggaggcaacccaaccggcagaaggcagaggcaacagacagacggagcgccggc

SEQ ID NO: 40797 - RNA, 84 nt, Homo sapiens
gcagccccgagcgccgcggacgcgcacgagggacggggaaagggacccccggacagccaacaccaaagccgcgggcacagcggc

SEQ ID NO: 40798 - RNA, 57 nt, Homo sapiens
ccaaccacagagacaagcaagaaagaaaacccccgaccagagaggggccacaggccc

SEQ ID NO: 40799 - RNA, 54 nt, Homo sapiens
aaggcagaggcgagcagaggccaggaggggcccagcccggccaggaggcggcgg

SEQ ID NO: 40800 - RNA, 127 nt, Homo sapiens
cggggccggggggcgacgccgagggcgggggagagcgcgccgcgccccggaccgggccgcgcacgccgcccaggcgccggaccgaaggcgcgaccacgacgagaagcgggggccgcagcggggcacc

SEQ ID NO: 40801 - RNA, 69 nt, Homo sapiens
ggaccaagaaccaggcgagaccaccacaaaagaaagcggcagggagggaagagagcaagaaaaagccca

SEQ ID NO: 40802 - RNA, 80 nt, Homo sapiens
ccaccacggagaacacaccgcaccgggaaaccagaaacagcggaagaagaacacccgcgcagcaggacaggacaaaaggc

SEQ ID NO: 40803 - RNA, 73 nt, Homo sapiens
aaacaggaccacagaggacaccgggggggcaaggcggcccggcacgcacacgggcagaagagcccgaggcggg

SEQ ID NO: 40804 - RNA, 70 nt, Homo sapiens
gcaggagcggccccgacaccccgggcaccagggaccagcgaaaaggagaagacagaccaagaaagaaccg

SEQ ID NO: 40805 - RNA, 80 nt, Homo sapiens
ccgaggggacgccgcccgccgcccgccgcaggccacccgggaacggaggaggggggaacaaaggccgacaaagaacacaa

SEQ ID NO: 40806 - RNA, 61 nt, Homo sapiens
ggcaccggcgcagaggcccacgccgagacagggagcaggggaaaaggggaggggcacaagc

SEQ ID NO: 40807 - RNA, 79 nt, Homo sapiens
cccaacaccgagccagggaagggccccgaaaggaaggagcacaagccaaggacgcaacaaccagaagacgacagcacag

SEQ ID NO: 40808 - RNA, 109 nt, Homo sapiens
accaagcaaagaggcgcccagaaagcagaacaggccaccgggccaacgaaaaggagcaccgcacccaggcggaagcagggggcgacggcacgcaacccgcccccaggca

SEQ ID NO: 40809 - RNA, 61 nt, Homo sapiens
ggaaaccccaacacagagccaagcgccaacgccccacaggaagcccgcagaaggcaagccg

SEQ ID NO: 40810 - RNA, 72 nt, Homo sapiens
ggggccaggcccaccgccacgaccggggccgggccacaggaaaagaaaggaagagcagaaaacccagggaca

SEQ ID NO: 40811 - RNA, 83 nt, Homo sapiens
cacacgggaaaacacaccggagacggggggaaacaggcgaggcggcggcgcccggagggcagcgagccaccaggagagaacgc

SEQ ID NO: 40812 - RNA, 84 nt, Homo sapiens
cagagacacaaaaccggacccggaacaggccaaaagcaagagaagcgccacccaaggaacgcaccaacccagacaggcagccgc

SEQ ID NO: 40813 - RNA, 80 nt, Homo sapiens
aaagccagacccgcccaacagaaaaagagaggagggagaacacagaaacccgccccgggaaaagacgagggaagaagacc

SEQ ID NO: 40814 - RNA, 69 nt, Homo sapiens
cagacaagaggaaccgcgccccagaaggcagaggaacacaacagaaggacaggagaaacaggggccaaa

SEQ ID NO: 40815 - RNA, 78 nt, Homo sapiens
aaaaaaccaggaacaacaccaaccaggggaccggaccagagagaacacaggggccaaaggggcggaccaagccggaaa

SEQ ID NO: 40816 - RNA, 31 nt, Homo sapiens
ccccagcggaccgaacagaaagacaccagaa

SEQ ID NO: 40817 - RNA, 83 nt, Homo sapiens
caccacaccgggcgcaaaaggacacagcgacagcagccaggcgagcggcagggagacagcgcacccgcggagcgggcacacag

SEQ ID NO: 40818 - RNA, 56 nt, Homo sapiens
gggccgcaccagagcgcccggcccacgacacaggaagaagacagaagcacagagcc

SEQ ID NO: 40819 - RNA, 39 nt, Homo sapiens
ccccaaagcgcaaagagcagacggcagaaaacagacgaa

SEQ ID NO: 40820 - RNA, 78 nt, Homo sapiens
ggcagcccgcaggacagcggagcggcaacgcccacaaagagggaccgcagaccaacagcagcagaacaaaggcacaaa

SEQ ID NO: 40821 - RNA, 67 nt, Homo sapiens
ggcgccgcgccccgaaggcccgagggcccggaaaggggagcacagaggcggaacaagaaacggggca

SEQ ID NO: 40822 - RNA, 70 nt, Homo sapiens
cagcagaaagccggaaggggcaagcgaacaaagcagccccaaccacacccagaagcgaacgaagggccga

SEQ ID NO: 40823 - RNA, 77 nt, Homo sapiens
ccgcccgggccagcggccgcgcacccccggccggaggcaccagcaaaagacagaggcgagaccggacaggaaagccc

SEQ ID NO: 40824 - RNA, 36 nt, Homo sapiens
caggcggcaagcagagaggcccggcgaccggcaggg

SEQ ID NO: 40825 - RNA, 71 nt, Homo sapiens
ccacaagaagcgagcaacaaggcgccagcaaaacaagaaacaaaacgacaaggcagggaaagcacgacgga

SEQ ID NO: 40826 - RNA, 73 nt, Homo sapiens
ggacagaaaagacaggcgccaggagcacagaagagcgaggagagcagagaaagggggaggcggacccggcaac

SEQ ID NO: 40827 - RNA, 64 nt, Homo sapiens
aaagggagcagcaggagccccgcggggcagacaaccaacagggcaaaaccgccaacaagacccg

SEQ ID NO: 40828 - RNA, 80 nt, Homo sapiens
ggaaggaacgggccgaaccgggagcgaggaaccagaacgaaaagcgccagaaagcgagccggggaaaaccccagggcaaa

SEQ ID NO: 40829 - RNA, 86 nt, Homo sapiens
gagcaccaggcgggggggcgccggaagagcccaggcgcgggcgagcccagaaagcagggggccgagacaccaagacagaccggccc

SEQ ID NO: 40830 - RNA, 80 nt, Homo sapiens
acccgagggaacacggacgccgcaggagggccaagaggacaagaagagcaccccggggaaacaaagcccgagcagcccgg

SEQ ID NO: 40831 - RNA, 95 nt, Homo sapiens
caggcaccccggaccccaagaaaagaccgcacgacgcagacaagacggcaccacagagggagaccgcccccggggcgagagaccccaacccccca

SEQ ID NO: 40832 - RNA, 56 nt, Homo sapiens
ggccccagcaacacggcgcgaggcaaggccagcggacaaggagaggaggagacccg

SEQ ID NO: 40833 - RNA, 76 nt, Homo sapiens
caaggaaagagaacagaggccgaaaaaaaggaccagcagcaggggccaggacagggcaaagggagcccagaccacg

SEQ ID NO: 40834 - RNA, 70 nt, Homo sapiens
cgacaggcaggcagaagaacagagggaacagccaaggccacagacaacgcacaaaaggcgaggacaacgg

SEQ ID NO: 40835 - RNA, 77 nt, Homo sapiens
agggcaacagcccggcggaggccggaccaaccgcgaaaacaacagagcgccaaaaagaggaccccagcacagcacag

SEQ ID NO: 40836 - RNA, 90 nt, Homo sapiens
gagcagaggaccagcagagaaggacaccgaagcagaggagcagcaggaccagcaaggaccaagaacggaaggcgcggcccaaaccagcag

SEQ ID NO: 40837 - RNA, 72 nt, Homo sapiens
ggaagcaacccagaagagcgaaggacccagcgaggagggcagaggggcgggcaaaggagaggcacaggaagc

SEQ ID NO: 40838 - RNA, 110 nt, Homo sapiens
ccacagccgcacggccccagagaaaaacggcagagacagcgccagaaccacggcaaagccggggggggcacagagccccggaagacagcccccagcgaccagacccaggg

SEQ ID NO: 40839 - RNA, 63 nt, Homo sapiens
cgacacgcgacgcgccaaaacccgcccggaaaggggacaccgcagaccagccagccccaagca

SEQ ID NO: 40840 - RNA, 60 nt, Homo sapiens
cgggaggaccaggagcgccccaagcacgcagcgggcacacaaaacacacaaaaaaagaag

SEQ ID NO: 40841 - RNA, 90 nt, Homo sapiens
agaaagcagagcgacgcgcgccgcacggaggcaagaagaaacccaccgcaaagagggaagccaaaagagggacaacccgcccaggcccac

SEQ ID NO: 40842 - RNA, 75 nt, Homo sapiens
ggggcgagagcgggcaccccccaaacgacgcagccacggagaggcaacagagacccgagcggaagagaagccaag

SEQ ID NO: 40843 - RNA, 69 nt, Homo sapiens
gcgcacggggcgcacaccacggcccggaggcccacgcggaccggcagcgccaccggaccaccagacaag

SEQ ID NO: 40844 - RNA, 73 nt, Homo sapiens
ggaacaggggccccggaaccgcagaccaacgccggcaagggggaacaggcaaagggcagcaccgaccaccgcc

SEQ ID NO: 40845 - RNA, 39 nt, Homo sapiens
ggagggaaaaggcgagaagcaagcccgaccaggagagac

SEQ ID NO: 40846 - RNA, 76 nt, Homo sapiens
aggagaacaaggcccaaacccgaacacaagaaccgaccagaagcaaggccagaaacgcacaagacgagaagaagcc

SEQ ID NO: 40847 - RNA, 80 nt, Homo sapiens
gagcagagcaagacggggaagccacgagacgacgacaacagccggcagaacagggaaacaaaacaaaagaaaaagaacag

SEQ ID NO: 40848 - RNA, 78 nt, Homo sapiens
aagccccaacaacagaccggggaccgcccagcagcccaggccgagacgaaaggcaggacccaaaaggggggaacagcc

SEQ ID NO: 40849 - RNA, 82 nt, Homo sapiens
gacggaccggcccgccgcccggccaaggcccgcggaacagcggaggacgaagagcgggacccgagcccgggaggcccaggac

SEQ ID NO: 40850 - RNA, 79 nt, Homo sapiens
cggacaagcccaggagccgaccagagagcaggccacggcgcggcacaggcgccggaggcgccccggaacaaagaccagc

SEQ ID NO: 40851 - RNA, 54 nt, Homo sapiens
cagaggccaccccggggccggagggccgagccagagaagaaaaagaaaaaagaa

SEQ ID NO: 40852 - RNA, 85 nt, Homo sapiens
ccaggcccggcagcccaacccagcaggacaagccgagcgggccaggcagggacaccccgcagcccccagcagcgggcaggcccag

SEQ ID NO: 40853 - RNA, 38 nt, Homo sapiens
ccccaggggagccggcggaaaggagcgacacgcagacc

SEQ ID NO: 40854 - RNA, 65 nt, Homo sapiens
cccgggggcccgcgcagcgcggcaggaacggagggaaagcgacaaacaaccaacccacagagacc

SEQ ID NO: 40855 - RNA, 82 nt, Homo sapiens
cagccgccggagcagcggggacaggaaggggcagacaagcacgccgcccagacaaccgagcacaggcggaggcagcggaggc

SEQ ID NO: 40856 - RNA, 78 nt, Homo sapiens
caccacgccagccaccacgcggcgcacaacgcaggaacaccgcacgcgcggaggaggagagaaaggccagcacggggg

SEQ ID NO: 40857 - RNA, 77 nt, Homo sapiens
gggcaggggaacccaggcaggaacgcagaagcaccaccccgaagccgcaaaacccggggcagaaaacaccaggcagg

SEQ ID NO: 40858 - RNA, 53 nt, Homo sapiens
ccaaggaaaaggacgagaacgccgcgacagaaaggggagaagggcgcagagac

SEQ ID NO: 40859 - RNA, 80 nt, Homo sapiens
aagccacgaccaagccgccgccgcgccgccgcgccccaacgccagcgccgccccgccgccgagcccagccgaaggagaag

SEQ ID NO: 40860 - RNA, 80 nt, Homo sapiens
gagagggacgcccaccacgggaaggccagaagccaaggagcccaggacgggggaccacaacacccacacgcgccccaccc

SEQ ID NO: 40861 - RNA, 83 nt, Homo sapiens
gcgccgcagccgcccgaagagccaagagcagaccggccagccacgaagcagagagcgccagcagcccgggggcgacgacgagg

SEQ ID NO: 40862 - RNA, 70 nt, Homo sapiens
acgccaaaaccagagaaaacacagcccacccccagggaggacccaaaggcagcacaaggcagacaaaggg

SEQ ID NO: 40863 - RNA, 73 nt, Homo sapiens
cgccagcgcgcgacgcgaagagacggggcgacggggagaggcaggcgaggggacgaccggcaccgccgaggcg

SEQ ID NO: 40864 - RNA, 74 nt, Homo sapiens
acaccgcacgggaggggaagaacccccgccaaggacagcgcgagccggcacgaaacaaaggagcgagacagaag

SEQ ID NO: 40865 - RNA, 77 nt, Homo sapiens
aaaggacaaaagccaagaggaggacagcgcacacagcaagcacgagagcggcccgcgagagacagagcagcggcggc

SEQ ID NO: 40866 - RNA, 76 nt, Homo sapiens
cggggaccgcgcccgcagggaccaagaaaggcccagggaccaaagcccggacaaggcccgagcaccaggaccgcag

SEQ ID NO: 40867 - RNA, 84 nt, Homo sapiens
gaaacagcgcgaccagaggagcgcaaggaccaagagggcggagagcaagggccagagaaggaggagaaggagacaggcggcaag

SEQ ID NO: 40868 - RNA, 59 nt, Homo sapiens
gccgggcccgccagcgccgcgcgccgcgcgggcgggccggagcgagggagagcaggaac

SEQ ID NO: 40869 - RNA, 67 nt, Homo sapiens
cacaaagaagcacagaacaacgcaggcccacacgggccaacacgcaacgggacggagcgcggggacg

SEQ ID NO: 40870 - RNA, 75 nt, Homo sapiens
aaggagccgcacagccggggccaccccgggcagaagccaggaccccaccaacggacagagaaggagggaagccac

SEQ ID NO: 40871 - RNA, 91 nt, Homo sapiens
aacgagaaagaaaagaaaagaagggagccagacaacagaaagcgcccaagaagaaccgaagagacagcccgcacggaccgggaagagaaaa

SEQ ID NO: 40872 - RNA, 77 nt, Homo sapiens
cgcgggacgcggcggcgccggccccggggagaaacggaagacgggaagccaagcaggacaaccacaaaagcagcaaa

SEQ ID NO: 40873 - RNA, 82 nt, Homo sapiens
gccgcaggggagccgagagccacaggcagggaagcaaagagcacccgagcccagcaggcaagcagccggcaccaagacaggc

SEQ ID NO: 40874 - RNA, 74 nt, Homo sapiens
gagccagggacccacccccgacagggacacagggagccccagacccacagggaagagaggcgggaagagggcgg

SEQ ID NO: 40875 - RNA, 87 nt, Homo sapiens
aagaagccgaaagagccaggcgggcgcggcggcgagaaggcggacccagacagcgaccccagagaaggagccaagaccaaggagaag

SEQ ID NO: 40876 - RNA, 59 nt, Homo sapiens
ggggaggacccgagggccagacaccggagcagcaagaggacggacacaaaggaaacaga

SEQ ID NO: 40877 - RNA, 69 nt, Homo sapiens
agcggcacggccaaccggcacgggagaaagcaggcgaggaaaaccaccacacaggggaaacacccagac

SEQ ID NO: 40878 - RNA, 77 nt, Homo sapiens
acagccaaggggagaccacaccaagcgggagacacaccacgccaaggcggcgggcacaagccaaggaagagagaaga

SEQ ID NO: 40879 - RNA, 88 nt, Homo sapiens
aggaagcggcagagagggggacgaccccgaacccaggacagcaccaggcccaggacagcacgagggagaccaccgggcccacaggagc

SEQ ID NO: 40880 - RNA, 72 nt, Homo sapiens
cggccccgccacccacaggacaacaaccgacagcccccccacaaaggcaagacagagcaacggagacgcgga

SEQ ID NO: 40881 - RNA, 84 nt, Homo sapiens
ggaaacccggccgccgccccgccgccacccgaccgagccggcccaggccccccacgccgcagccccccggacacgggggcaggc

SEQ ID NO: 40882 - RNA, 50 nt, Homo sapiens
ccggagaaaaggccaagaaggcagaaagcacgaggccaagggcggggaag

SEQ ID NO: 40883 - RNA, 67 nt, Homo sapiens
cgggcgagcgcaaaggaaggcgccgggcccgacccgcgagagagaggagcaccacggcccaggcggc

SEQ ID NO: 40884 - RNA, 72 nt, Homo sapiens
acgagaaaacagaaccgaccccccgggaaacaagagacgacgggaaggcagaggcagcgacagagaaaaccc

SEQ ID NO: 40885 - RNA, 82 nt, Homo sapiens
caagaaagacccgccaaaaccggcgcacagagaagaaggggggggggacaaagcagaagcagcagccgcagcaccgagccgc

SEQ ID NO: 40886 - RNA, 55 nt, Homo sapiens
cgacccgcccggggcagcagagagcccccaaaacacagaaacaaaacaaaacagg

SEQ ID NO: 40887 - RNA, 66 nt, Homo sapiens
agcgcgccgcccggcgccggcccgcccccgcagcagcgccagcccgggaccgggagcccgggaccg

SEQ ID NO: 40888 - RNA, 78 nt, Homo sapiens
agcaggacaccagcgaaggccagcagcgggcgcaggaaggccaccgacaggaagggaccaggaccgaggagggcggcc

SEQ ID NO: 40889 - RNA, 57 nt, Homo sapiens
gcccacagccaagagacagaaaaacagcggcaggcaggacccagaagaccccacccc

SEQ ID NO: 40890 - RNA, 80 nt, Homo sapiens
ggggggcggccgcgcggccgggggcgcgggcggcggcgccggcaggaaggacccaggaagccacccgcagaggggcaagg

SEQ ID NO: 40891 - RNA, 77 nt, Homo sapiens
gaagaacaggccagggcccagcaaagcaacagccaagccagagccgggccccaacaacccggagacagcagccccca

SEQ ID NO: 40892 - RNA, 92 nt, Homo sapiens
agccaaaaaaacaaggcaaaaacaaagcaaaaccagaccacaacaagaagaggcaccagaccagagccccacagagaggaaacccacggcac

SEQ ID NO: 40893 - RNA, 85 nt, Homo sapiens
ggggcggcggcccgccggggggcagggccacgcgcagagcccgcaccgcaccaacgaccgaagcaccaggcacacccacaagccg

SEQ ID NO: 40894 - RNA, 77 nt, Homo sapiens
gggggcgcggccgcgcgccgccggcgaaggaggaggcggccgggcgccgcgcccggggagacagaaacgaggcgccc

SEQ ID NO: 40895 - RNA, 75 nt, Homo sapiens
ggccgcccccgcacgggaaagacggggccagacaaccaggaagcagggagggacgaggccgcccgggcaggaccc

SEQ ID NO: 40896 - RNA, 65 nt, Homo sapiens
gaaggaccaagaaccaggcaagcggcagccacacccggagaaggagccgcccagggacgaagcac

SEQ ID NO: 40897 - RNA, 79 nt, Homo sapiens
gcaggagggagaccccagcaagacgccaggccccggaagccagaaaggaaccgaacacagggagggccaagaacccccg

SEQ ID NO: 40898 - RNA, 86 nt, Homo sapiens
cccgcgacgccaaccacgacgaagcggaaggcagaaggaaaagaaggaggccagcgggacacacaaagaaagacgaaggacaccca

SEQ ID NO: 40899 - RNA, 65 nt, Homo sapiens
gaggacaaaccagccaaccaagaggcagccacccaagacacagcaaggcccccacagagagcaca

SEQ ID NO: 40900 - RNA, 86 nt, Homo sapiens
ccggagcggcgcagccggagggggccggagggcacacaggcccgagcacaaacacaagaaacgcacgcccgccagcgagaagagag

SEQ ID NO: 40901 - RNA, 72 nt, Homo sapiens
agccacaccagagccaccacccacacagcagcgggcaccgcggccacaagaaaagccagcccccagaaagaa

SEQ ID NO: 40902 - RNA, 67 nt, Homo sapiens
caagaagcggaagagagggggcgcccagcgccaacaccaaggccggaaaccacgcggacccggagac

SEQ ID NO: 40903 - RNA, 135 nt, Homo sapiens
aaagccacacacccaccagagccacaaggaggagagacagccggaggaacggaaacaaaccacggcaggggccgccgaaggggagcagcgccggagaaggcgggaggagcccggcccgggggacgggcggcggga

SEQ ID NO: 40904 - RNA, 75 nt, Homo sapiens
gcagcgaaaaggggccacagagggcggcgaaggcgcgccacggagccacccaagcggccgccacccggaacccac

SEQ ID NO: 40905 - RNA, 55 nt, Homo sapiens
cgccggcccccacacggcgcggaaaaaaggaaagaccacagcaagaccacgcccc

SEQ ID NO: 40906 - RNA, 76 nt, Homo sapiens
ccgccagaagaaaagcaaaaaaacaaggaaagccgcaacagaagagggcgaaccaaagaaggaaggcgacccaaaa

SEQ ID NO: 40907 - RNA, 78 nt, Homo sapiens
agaagcaagaaggcccggacacagcaaaccgggccacaggacaaaagacccacaccgaaggacgagaaacagggccga

SEQ ID NO: 40908 - RNA, 54 nt, Homo sapiens
ggagaaggaccaagaaccagacaaagaaacggcggacagagcgggggcggaccg

SEQ ID NO: 40909 - RNA, 70 nt, Homo sapiens
gagagaaaaccacggacaagaaagcgccaaaaacaacaccaaaaagccgcaggggaagccaaacaggaag

SEQ ID NO: 40910 - RNA, 89 nt, Homo sapiens
gaaacagcgaggcggcgcagcgccgaggccgcggcccgggggcccgcaaccacgccacggaaccccgagcagcccagaaagccgggaca

SEQ ID NO: 40911 - RNA, 80 nt, Homo sapiens
gggccaaggcgggggcagggaccgagccccaacacagcagcagggcagaggccaagaccggcccaagaaggagaaaagaa

SEQ ID NO: 40912 - RNA, 75 nt, Homo sapiens
cagagcccgaaagaacagcaagagacgggagaagagaccgaaaaacaggaacaagaacaagaagcacagaacgcc

SEQ ID NO: 40913 - RNA, 87 nt, Homo sapiens
aggcaagaagcggcgcgggagcgaccaaccaagaaggagcgagggaggagcagcgagacagcaagagacgaccacagagccacagac

SEQ ID NO: 40914 - RNA, 59 nt, Homo sapiens
cccccaccgaggaagagcgggagaaaggcaagaacggcagaaggggaaaagacggacag

SEQ ID NO: 40915 - RNA, 76 nt, Homo sapiens
gccgcgagcaggggacccacagaggagagaagacacacacgcacacggggcccggaggcacgagaccgccacgccg

SEQ ID NO: 40916 - RNA, 68 nt, Homo sapiens
agcgcccccaagcccacccaccagggaagcccgcacgcggaagcgccagaggagacggaagggaccag

SEQ ID NO: 40917 - RNA, 76 nt, Homo sapiens
caggaggcagcccaaagcccaaggcagcagcaccaggaaggaacgggacagcggagcagaggaccgaggacaacgg

SEQ ID NO: 40918 - RNA, 78 nt, Homo sapiens
gccgcaggaggagaaagacgaagacccaacccggagccggggacggcacacgggcgggggcaacgggaggagaagacg

SEQ ID NO: 40919 - RNA, 67 nt, Homo sapiens
acaagcccagacagaaaccaaaccaccaaggcacccaagaacgaggccgcagaggacccacagccgc

SEQ ID NO: 40920 - RNA, 78 nt, Homo sapiens
ccaccgaggcagacccaggagcccggaaacgacggagagagacaggggcaaggccgaggggaacagcacacagagagg

SEQ ID NO: 40921 - RNA, 57 nt, Homo sapiens
ggagccggacacgaaacgggaaggacagccaaacgaccacgccgcgaggccgcagca

SEQ ID NO: 40922 - RNA, 83 nt, Homo sapiens
ggcggagggggacgggggcggcccagaagaggcggaggcggggcggacagaaggcacgggggcccgcacgagaaagacacggc

SEQ ID NO: 40923 - RNA, 52 nt, Homo sapiens
aagccggcagaaaccaccaaacagccaggagagaaaccagggaccaccgaag

SEQ ID NO: 40924 - RNA, 35 nt, Homo sapiens
cggggaccagaagacaccgcgacccacaaagcagg

SEQ ID NO: 40925 - RNA, 86 nt, Homo sapiens
gcaccggagacccgagcaccccaacgggcaggaagggaaaaggccgaggcacagcgggaagaccgcaaagacgacccgagacaggg

SEQ ID NO: 40926 - RNA, 90 nt, Homo sapiens
cagacacagccggggcgggagccgcccggggcagggccgggagagcgggagggaccagggaggccgcgccgaaaccgcgcacgggagcca

SEQ ID NO: 40927 - RNA, 102 nt, Homo sapiens
gccggaagagggccacgcagaggaacaaaaaaaggagagccggcagccccgcccgcagccagccaaaagaggaacccccacggccacacaccacgccgaagg

SEQ ID NO: 40928 - RNA, 67 nt, Homo sapiens
gacgaagagccaacgaaggaaaaagagacccacaccagaagaacaaggccaggcgacccaaaagcaa

SEQ ID NO: 40929 - RNA, 78 nt, Homo sapiens
ccgccaaagcccgggcgcggaagaagccaagaaggccggcccacagcccaaaaagaaacaggaccgaaagccagagcg

SEQ ID NO: 40930 - RNA, 75 nt, Homo sapiens
gagggaaaaaccaggcgacacaaagcagcccccaacgaagaggcacaaagggaagaagaggagaacgaacggaga

SEQ ID NO: 40931 - RNA, 65 nt, Homo sapiens
agacggagccgagaggcaaagcggggaggaacacagcaagggcacgaagaacacaaagcaaaaag

SEQ ID NO: 40932 - RNA, 80 nt, Homo sapiens
gggcacgagcggaccccgcccaggccgggagcgcacaagcccaggaggcacacacgaaggaaccaggaagacagaggagc

SEQ ID NO: 40933 - RNA, 52 nt, Homo sapiens
aggcccggagagaaagcgcccaaccacgggcaagaggcgagcagggaacaac

SEQ ID NO: 40934 - RNA, 67 nt, Homo sapiens
aaaacgccggccgaacagcccacgccaagccccggcagccgaacaaaccaggcccgcgaaaaaccac

SEQ ID NO: 40935 - RNA, 37 nt, Homo sapiens
agacagagggcgaggccccagggccgccggagaaaca

SEQ ID NO: 40936 - RNA, 63 nt, Homo sapiens
gcggaaaacaaggggaagacgagggagaccggaagcagaagaccccccggagcgagggaaaac

SEQ ID NO: 40937 - RNA, 72 nt, Homo sapiens
ccccccaacagaggaacgaggaaacagaaagaacgcccaaacccaaaagaggagagaagaccaagaaaaaaa

SEQ ID NO: 40938 - RNA, 83 nt, Homo sapiens
ggcgcccaccaggcccggcagagcggacacaccacgagacccggacagcccgcggagccagagcccggggccggggagggaag

SEQ ID NO: 40939 - RNA, 35 nt, Homo sapiens
gcggagccgaccgggccagacagaagcccaacacg

SEQ ID NO: 40940 - RNA, 87 nt, Homo sapiens
agccccagccggaggccagagaccgagagcccgagcgcccagcgccgcgccgggaggcgagcacacagagaggggaagggcagcagc

SEQ ID NO: 40941 - RNA, 50 nt, Homo sapiens
aagagaagacgacaacggagaagcaaaaagccacgagggacacaaggcca

SEQ ID NO: 40942 - RNA, 54 nt, Homo sapiens
ccgcgacgcaggcgcacggagacccgccggcacgcaagccccggggcagagaca

SEQ ID NO: 40943 - RNA, 83 nt, Homo sapiens
agccgggaggaagccggggccagcggcgccgacgcacaggagagagcgaaggagaacgcagcgcccaacaccagccgggaccg

SEQ ID NO: 40944 - RNA, 75 nt, Homo sapiens
gggaggagccgccccgagcagccgacaggcggggccccggcccggaaaccccaagccggggcacaggcaagaagg

SEQ ID NO: 40945 - RNA, 75 nt, Homo sapiens
aaacagagccccagcggggcccgggcagcccggagccgccaggagcaaggcagcgacccagggcacagcggggca

SEQ ID NO: 40946 - RNA, 65 nt, Homo sapiens
gacgcaccgcaggcagacaaaagggccaaagaagggagagaggccaccgggagggcagaggccag

SEQ ID NO: 40947 - RNA, 80 nt, Homo sapiens
ggcaccggcgggcaaccagcgggcccggccgccacccgggaaagacaggccgacagcggaggaaaccgacacaaagagga

SEQ ID NO: 40948 - RNA, 75 nt, Homo sapiens
cacgaaacgacggcccaagcagacagccaaaagaccaaacaaaccagcaaggaggccagcaccaaaaagagcaac

SEQ ID NO: 40949 - RNA, 80 nt, Homo sapiens
gacccaggccgagcaggaacagggggacccagcagaaccgccagggcacaccgaaagccgaggaccccagcgagccaaag

SEQ ID NO: 40950 - RNA, 73 nt, Homo sapiens
cagcccccgagggcgggacacaggccccagcaggaggacccgccggaccagccacgaaaagccagagacaagg

SEQ ID NO: 40951 - RNA, 85 nt, Homo sapiens
ccagagccgacccccaccgcaagaaggcagggaggggaacgggggcaacccgaccccacgggcggcgagaggcacgggacacacc

SEQ ID NO: 40952 - RNA, 72 nt, Homo sapiens
ggaggacgcaggacgcacaggagagcaagagaagcgccggaccgggcaaggggaggaggaacaaaggacgac

SEQ ID NO: 40953 - RNA, 39 nt, Homo sapiens
ccccaagagcgagacgcagcacccagccgccgaaaccaa

SEQ ID NO: 40954 - RNA, 80 nt, Homo sapiens
gagccggacggcgcccagcacagccaaagcccacaccccaaccacccggcccaagcacaaccagcccacagggggcacaa

SEQ ID NO: 40955 - RNA, 91 nt, Homo sapiens
ggcaggaacagacacggggaagcgcaaaaacaagacggggcgccccacagaggggcgacggacaccagaggaccagaacccacgagaaaca

SEQ ID NO: 40956 - RNA, 62 nt, Homo sapiens
aaacgcccagagccgagccacaagcccacgagagcgagcaccaggacccgaaagaggacaga

SEQ ID NO: 40957 - RNA, 73 nt, Homo sapiens
agcaacgacgagacgaaggacagaacaaaacgaggaacaaaacagaagagggagaggaaaaagcgaaaaggga

SEQ ID NO: 40958 - RNA, 61 nt, Homo sapiens
ggggcggcgacggcgcaggcgaagcgaaacagaccagccagacaaacaaggccaagcaaca

SEQ ID NO: 40959 - RNA, 75 nt, Homo sapiens
aaaaccaaagaggagccagaccagaccaccagacaacgaagagaggaaagaagcggaaaggagggagcacacaac

SEQ ID NO: 40960 - RNA, 91 nt, Homo sapiens
gccagacccaaggcccccgaggagcgcgggcgccgagacaggacccagaccagccaaagagaagaagaaaggaagcaaaacaaagaaaaaa

SEQ ID NO: 40961 - RNA, 86 nt, Homo sapiens
ggacaagggaccgaacccagcgaacggaaggggcaaagaaaaaggagagaaaaagaggcaaaacaacaagaagaaaagagaaaaaa

SEQ ID NO: 40962 - RNA, 79 nt, Homo sapiens
ccacacccagacagagagggaagaagaccggggacaggagaaagacagcaaagaaaaggagaagaaaggaaaaaaacaa

SEQ ID NO: 40963 - RNA, 78 nt, Homo sapiens
cgcggggaagcagccgccacggaggcaaagcagccgaaagcaaggcaaaccagggggccacacagagcgcagagggaa

SEQ ID NO: 40964 - RNA, 55 nt, Homo sapiens
ggggccgacacgggcgacccacgccccgacacccagccagccccagcccggagac

SEQ ID NO: 40965 - RNA, 82 nt, Homo sapiens
ggaggcagcgcaggaaggccgccaccaggccggcaacccgcaagagggcccagggccccgcggggagcgacggggggcagag

SEQ ID NO: 40966 - RNA, 70 nt, Homo sapiens
gacccgagaaggcccacccaggaacgagaaaacacgccgagggcagaaccgcaggcccaaagccaaaccc

SEQ ID NO: 40967 - RNA, 87 nt, Homo sapiens
ccagcgcccgacaccgccggccgcggcggcggccgccaccggccagaccaaagcaccagacggccagaccccccgacgcagaaccac

SEQ ID NO: 40968 - RNA, 77 nt, Homo sapiens
caggaaaaaaaagaaaacaagcgcacgaaacacgaaaggcaggaggaaggggagaagaaaaagcagcaaaagagaag

SEQ ID NO: 40969 - RNA, 83 nt, Homo sapiens
gaacgcggagagcacgccagaaggcccgggcacgacgacaccaagaggaaaaaccaggcaaggaagcacaagcgacaagagga

SEQ ID NO: 40970 - RNA, 72 nt, Homo sapiens
caccgagagaagcagagcaccgcagagaagggcgacaaaaggggagacagggggacagagggcgggagcagg

SEQ ID NO: 40971 - RNA, 73 nt, Homo sapiens
gcgcgaagaaaacgagcgcaacaaccgggcaaccacaacaggggcgggcccgcaaggcccccagaacccccac

SEQ ID NO: 40972 - RNA, 78 nt, Homo sapiens
cccgcccggaaagcgcccagccaccagcaaccccccaggggccagagaacaagcccagacagcaagacgcgagcgcag

SEQ ID NO: 40973 - RNA, 70 nt, Homo sapiens
gacgccaacccgccgcgcaccgacccgacgcgccggcccacgcgcggccaaggacggggaggacgcacga

SEQ ID NO: 40974 - RNA, 75 nt, Homo sapiens
ccccaccaacacggccagcgcaccggccccgaggagcaggccacagaacaggacacggacgaagacacgcacggc

SEQ ID NO: 40975 - RNA, 96 nt, Homo sapiens
ggcgacaggaggaggacggagaggaggcgaggggagaagaccggacagaagaccgagggggggaaaaagaaaagggcgaagacccgaagcagcgca

SEQ ID NO: 40976 - RNA, 65 nt, Homo sapiens
aagaaaaaagaccagaaggaaggaacaaagggcccaccaagaaccgacaggagcccccgcaaggg

SEQ ID NO: 40977 - RNA, 78 nt, Homo sapiens
cccccacgcacacccgagcccgggggcgcacggacaaaacccgcaccgcacccccacccaggaccagcgcgacgagga

SEQ ID NO: 40978 - RNA, 82 nt, Homo sapiens
ccagccccagggccggacacacgggcagccacccggcggcggggccgcagcccaaggaaggggcagccacagcagcccaggg

SEQ ID NO: 40979 - RNA, 71 nt, Homo sapiens
agccgcgccccagccagcccgcggcagacaacggcaagcggagaagagcaaggccgaaccgagaggaaggg

SEQ ID NO: 40980 - RNA, 75 nt, Homo sapiens
accccgcgcaaggagcggaccaacaggcaaaagcagaccggaaaacccaccggcaagaccacacccgaggggagc

SEQ ID NO: 40981 - RNA, 76 nt, Homo sapiens
gccggccacccaaggaaacacaaacgccgaaaggacgaggaacgggccggaaaaggggacagcccaccacaagcag

SEQ ID NO: 40982 - RNA, 82 nt, Homo sapiens
cggccaaagccgcccagacggccaccggcgggaggaacaaaaggaaaggggaggagaggaaagaaggagcaaagcccaggga

SEQ ID NO: 40983 - RNA, 63 nt, Homo sapiens
aacacaacaggaggcggaggcgaaagcggaacgagagcagcccgacggccaggaggcgaagag

SEQ ID NO: 40984 - RNA, 99 nt, Homo sapiens
gcacgaaggccaagcggacaccaacagcgaagaccaggcgggaaaaagaagcaaagagaggagagagaaacaccccggagggcaagaagcagcggagaa

SEQ ID NO: 40985 - RNA, 78 nt, Homo sapiens
gccgcccggccagcgcgcgggaagggaagaaggagcggacccgacgacagccagaacggagagacgacgaagcccgca

SEQ ID NO: 40986 - RNA, 80 nt, Homo sapiens
agcgcgaaggccgggacccggccccggcccacaggggggggcaaacccgagagaacgggagaccgaggagcccaggagga

SEQ ID NO: 40987 - RNA, 78 nt, Homo sapiens
cgagccgacaagaaggacaaagagacaagccgagagaaagcaagcaaaggggcccaccacgaggacaacgaggcaaca

SEQ ID NO: 40988 - RNA, 60 nt, Homo sapiens
ggggccgcgccgcgccgccacggccagcccccgggaaggaagcagccaccccgccaggcc

SEQ ID NO: 40989 - RNA, 72 nt, Homo sapiens
cgcccggcccccgccccaccgcgcgcaaacccccggggcgcccaagagcgcaggggaacgcaacgccagaga

SEQ ID NO: 40990 - RNA, 53 nt, Homo sapiens
ccaaccaagggcagaaggaaaggcagaaaaggaccccaaacagaacgcggcag

SEQ ID NO: 40991 - RNA, 76 nt, Homo sapiens
acacgagaccaggagacagaccaacaggaagccgccagacaaaagggacggggacacagccgaccgaagggaaggg

SEQ ID NO: 40992 - RNA, 78 nt, Homo sapiens
ccaaaaaggagaaagaacgccaccgagaagcgccaccaacaacccagaaacagcagaagggacagaggggcccaaaaa

SEQ ID NO: 40993 - RNA, 56 nt, Homo sapiens
ccgggcgaggacccgccggggaagcgcacaccgggcggggccggaggacagaagac

SEQ ID NO: 40994 - RNA, 80 nt, Homo sapiens
agggggccgccccagcagacaggcacagagccaacccgacagcacaagccagcggcaagaacgcgacagagaggccggaa

SEQ ID NO: 40995 - RNA, 50 nt, Homo sapiens
aacccggcgcaaggagagggaaagggcgggggcaagacccagagaagaca

SEQ ID NO: 40996 - RNA, 75 nt, Homo sapiens
agagggacggaccacacgccagaagaggaaaaggcagcgggggggaccaggcgcagcagcgacagaacaagcggc

SEQ ID NO: 40997 - RNA, 72 nt, Homo sapiens
cgcaaaaacaaggcggaaacaacgggcaaggcgcaccacgacaaagaagagaaaacgcggcagagcaacaaa

SEQ ID NO: 40998 - RNA, 73 nt, Homo sapiens
cccccccgccccgcaccaccgccgacggccagggcacgagagagcgcacggcaggagacggaagcggaagcac

SEQ ID NO: 40999 - RNA, 77 nt, Homo sapiens
gccgcaagacgacaaggaggcagggacccggagccacccacaggacccgccaccaaagacaaggaggagcccaaagg

SEQ ID NO: 41000 - RNA, 78 nt, Homo sapiens
cgaagggcggggagcgcggcgggcgcgcgccagggacgagagacaaagaggcacgaggcggagaaacgcagaagaaag

SEQ ID NO: 41001 - RNA, 74 nt, Homo sapiens
gaaacacggcaagaccggaacgacagaccccgggcacaggaagacccgcggcgagagacccaggaggcagagcc

SEQ ID NO: 41002 - RNA, 55 nt, Homo sapiens
gagaggagggggcaccgagcaacgagggcagagagagcgcgacagcaggaaggcg

SEQ ID NO: 41003 - RNA, 75 nt, Homo sapiens
agcagcagaagccgcaacaggaaagcagcccgaaaaagacgcgagaagccacacgcagaaagagaaggcagaaca

SEQ ID NO: 41004 - RNA, 80 nt, Homo sapiens
ggacggaaccacacacgaaagagcaccggccgcagccaagacgggcggcgccccgccggagcccaggacgccggagaggg

SEQ ID NO: 41005 - RNA, 64 nt, Homo sapiens
ggagagcggcgaggcggcagccacaggaggaccgcgccaacaggacgaggagaccgaccaggag

SEQ ID NO: 41006 - RNA, 66 nt, Homo sapiens
ggcagcaggcccaaacccccacaggaggccagcagaaacagcagcagggggggagacgccaaaagg

SEQ ID NO: 41007 - RNA, 71 nt, Homo sapiens
gacccaaccagagaaagacaaccaaccccaccgaggaggacagagacgcaagaaaaccgccgccggggcca

SEQ ID NO: 41008 - RNA, 77 nt, Homo sapiens
cgcgcagggcgcgagcgcccggggcacgcccgcggccgccggacggccgggcgcggaggggggaggcagcaaaggaa

SEQ ID NO: 41009 - RNA, 73 nt, Homo sapiens
caccaaggagacgcccaaggaaccccgccggccaccggcgccggagcgggcagggcacacaaccgggcagcgg

SEQ ID NO: 41010 - RNA, 83 nt, Homo sapiens
ccaccgcgacccgggacccgcccgcccgcgggaggcccgggaggagcggggacacgaggaccccccaaaggccccaaccacag

SEQ ID NO: 41011 - RNA, 82 nt, Homo sapiens
aggaacgcgaggagaggcccagaggccggaggagcggacgggccgaagcacgaggacaaacgggaggagcggaccacaacgg

SEQ ID NO: 41012 - RNA, 82 nt, Homo sapiens
ccgggccggaacgagacgcacgacccgccgggcaggaggagggaagccgggcgaggccggcggggagcccccagggggagga

SEQ ID NO: 41013 - RNA, 54 nt, Homo sapiens
ccaagagggacccacccggcgacggggcggaagcggccaggagcggaaaccacc

SEQ ID NO: 41014 - RNA, 82 nt, Homo sapiens
cagcggacaagaagaagacagaacgcccccaccaccgcaaacaagaaggaacgagacacagagggagacgcaaagaacagac

SEQ ID NO: 41015 - RNA, 74 nt, Homo sapiens
cgaacaggcgggaagcgagcccaaaagagagcagggcagcggggaagaagaaaaggaaccgaggccccccggcg

SEQ ID NO: 41016 - RNA, 81 nt, Homo sapiens
aagacaaacaaacggacacccgacggcaccagcccgagaaaggagcccagcacacacgggaaggacacgggggagcacggc

SEQ ID NO: 41017 - RNA, 62 nt, Homo sapiens
gcgcggccagggacgccgaagcagcgaacaagggaagaggaaacaacaagaacaaacaggac

SEQ ID NO: 41018 - RNA, 66 nt, Homo sapiens
aagaaaccagggaaaacagccacggaaagaagaccaggaaaaccgccgccggggccagcaagaaca

SEQ ID NO: 41019 - RNA, 54 nt, Homo sapiens
acccggacccggaagagaagagggggcaagaaaggcgccgccggagagggaaag

SEQ ID NO: 41020 - RNA, 79 nt, Homo sapiens
gagagcacaaagaagccaggggagagcgcaccagccaagcagccagggaagcgcagaagcagaaagaggaagagagcaa

SEQ ID NO: 41021 - RNA, 73 nt, Homo sapiens
gcgcgccgccccaggccgcaagacccagcgcccaaccgcccggacgccaggacggccggcagcaaagaggacc

SEQ ID NO: 41022 - RNA, 75 nt, Homo sapiens
cgacccgccaccgccaggccaggagaccgccaaagacgacgaacccaaagaacagaaaaggcagaaaaaaagcaa

SEQ ID NO: 41023 - RNA, 72 nt, Homo sapiens
cagcccccgagggcgggaacagaaagcagccgaagccacggagaagccgccgcagcggccggagacaaggaa

SEQ ID NO: 41024 - RNA, 80 nt, Homo sapiens
gcaaagagaaaggaagcaggcccgggaaggggcggcggagaaaccaccacaaacacgaggccagcaacgaccaacaagac

SEQ ID NO: 41025 - RNA, 89 nt, Homo sapiens
ccgaccaagcgggaccccggagcgacccggacaccgacgcgccacgcggagcccgagggagaagaaggccagcacacggggaaggaagc

SEQ ID NO: 41026 - RNA, 79 nt, Homo sapiens
aaccgacgcccgggggaaacagagaaagaaggcggccaggccaaccgaaggacgaccagggccaagggcgccggcgggc

SEQ ID NO: 41027 - RNA, 83 nt, Homo sapiens
gggacaaacggcgggcccgggaagcgggccggcagcgcccggacgaggagaaaaccagacgagagacagaagacgaaagggca

SEQ ID NO: 41028 - RNA, 91 nt, Homo sapiens
gccgcgccgagcggaggaggaggaggaggcgaggaggagagacccgcccgacggcgcgaccagaccgagcgcggcggcgagcgcccgggca

SEQ ID NO: 41029 - RNA, 58 nt, Homo sapiens
cggaggcacacgagcaggaaacaaagagccccgggaaaagaaaaaaaacgccccaaac

SEQ ID NO: 41030 - RNA, 72 nt, Homo sapiens
gggggaccgaccgcaacagaacggacccggaccggaacagccacggacgggggaggaaggggcgcccgagag

SEQ ID NO: 41031 - RNA, 75 nt, Homo sapiens
ccgccgcccccccgcccgcccgccggccgcggccgggaaggcgcagccgaaaaccccgggaaacaggaaaaaaca

SEQ ID NO: 41032 - RNA, 72 nt, Homo sapiens
ccccgcgcacccgagaaaacgaggccccgagccagccccgacagcgggaacccccagggccgaaaagaaaac

SEQ ID NO: 41033 - RNA, 85 nt, Homo sapiens
caaagccacccggcgggcgcaaggcgggcacgcgcaccggagcacgagacagcgccggccccaacgagggagacaccaagcggag

SEQ ID NO: 41034 - RNA, 64 nt, Homo sapiens
gccaggggagaaggaggaaaggcccggcagcgcgcgcgccgccgcaacaggggcaagagaggcc

SEQ ID NO: 41035 - RNA, 60 nt, Homo sapiens
gcagggaggggaaaagccacgaggcggccccagcgcgggcgacaggccgacacccccaga

SEQ ID NO: 41036 - RNA, 88 nt, Homo sapiens
gccacaagccccaccagaagagggagggaccaaggaggagacaaggacaccgcgcaaggccggcagaaggcccacgccagggagcggg

SEQ ID NO: 41037 - RNA, 76 nt, Homo sapiens
ggagaagccgcccaaagaacggggaaaaagaaaagggcgaagacccgaagcagcgcaggaacagaagagaagacca

SEQ ID NO: 41038 - RNA, 88 nt, Homo sapiens
gcgcacccaagaggggaagaggacgggcaggcggaagcgccagaggagccaccagaggccggaccggaagcaggcaccacgacacagc

SEQ ID NO: 41039 - RNA, 71 nt, Homo sapiens
acgcaagagaaacaggcacacaagggaggaggcaaagccagcccacagaggaacacaaaaaacaggcgacg

SEQ ID NO: 41040 - RNA, 56 nt, Homo sapiens
ggcggcgcggagagggggcgcgagcggggggacagcaacacaaggaagagcggcca

SEQ ID NO: 41041 - RNA, 57 nt, Homo sapiens
aggcaggccaggaacagccacgggaccaaagaccagagacagagacggggaccggag

SEQ ID NO: 41042 - RNA, 95 nt, Homo sapiens
aaaacaaaaccaacaggacaggcgcaaagacagacccagaccaagagcccccacgcgcgcaggcgcgcagaaaggaagacgagggaacgagaggg

SEQ ID NO: 41043 - RNA, 66 nt, Homo sapiens
gggaaaaagcaaaaccgaacacgaccagcccaggcacccaaaggacagcccaggccaagacagcag

SEQ ID NO: 41044 - RNA, 60 nt, Homo sapiens
cccacgcaaaaaggccggaccaacgggagccgcaaggacaacagccgcggccagacagcg

SEQ ID NO: 41045 - RNA, 60 nt, Homo sapiens
ccagaacaagacagcgaacgcagggaaagcggacagacaccgcgccccgaaaaacgaaga

SEQ ID NO: 41046 - RNA, 74 nt, Homo sapiens
aaaaaccagcccagaagcagaaaggaagacagcacaaaggcggaagagaaaaagagaaagcagcaacagacaag

SEQ ID NO: 41047 - RNA, 84 nt, Homo sapiens
cccggacaggcggcggaggagggaaaggagaccgcagccccagcggacaggcccgcaggacgcaacgacagaccgcgcggagga

SEQ ID NO: 41048 - RNA, 76 nt, Homo sapiens
aggggacccagcccggggacacaagcccccaaggcgagaggaagagagcgaaacaccagaggcgggacccagagac

SEQ ID NO: 41049 - RNA, 107 nt, Homo sapiens
acggagccgcccgcgcacccagggcacagcgcgggagccgcacgggccaagcccgccgacacagccaccaagaaggcacaagcagaacgggaaaaggggcggaaaga

SEQ ID NO: 41050 - RNA, 67 nt, Homo sapiens
gggcgggcgagcacaggcacacacacgacagacccgagaaaccggacagcagaggaaacgagggaca

SEQ ID NO: 41051 - RNA, 59 nt, Homo sapiens
accgcccacccccgagccgcacagaaccaagcccccagacaccaccgaacgccccccca

SEQ ID NO: 41052 - RNA, 86 nt, Homo sapiens
aggccagaccccaggcccgaacgcggacggcacgcagacgccagcgaccacagggccgagaagcgcgcggcgcagcggaggaggag

SEQ ID NO: 41053 - RNA, 84 nt, Homo sapiens
agccccacgaccccacggccaaagccggcacgagcagcgcagccccccagccccagcagaacaaaccaaagaaaaaggagaaag

SEQ ID NO: 41054 - RNA, 55 nt, Homo sapiens
caagaacagggggccaaccacagaaaaaccaagacgggggggaccacagcggagg

SEQ ID NO: 41055 - RNA, 76 nt, Homo sapiens
cggcggcggcgagccgagagggcggccacgcagacacgacagggaggagaaaagagaaggagaaacaccggaagaa

SEQ ID NO: 41056 - RNA, 73 nt, Homo sapiens
gagaaaccggagaccgcaacaggagacaagggcggcagaggacagcggaacaagaggaaacaagccaggccag

SEQ ID NO: 41057 - RNA, 71 nt, Homo sapiens
agaagaagaccgagaggaacaaagacagcacgagagaaacagaggacgaccgggaggacaagaagaggaag

SEQ ID NO: 41058 - RNA, 79 nt, Homo sapiens
gcacccacgcggggaaagcgggagccgagaccaaagagaaaggaaaaacaaccaccagcgagcaaaaaggcaaagacca

SEQ ID NO: 41059 - RNA, 57 nt, Homo sapiens
gaacaaggccagagaaggggaggaaccgaacgagcgcacgcgggcgaggggccaaca

SEQ ID NO: 41060 - RNA, 71 nt, Homo sapiens
aagccacaaaaggggagaggcccaggaggacaggggccagagaacaagcccagacagcaagacgcgagcgc

SEQ ID NO: 41061 - RNA, 64 nt, Homo sapiens
agacccgggcagcaccagaacacaaaaggacagaaagcgggacacaagcaggagcacagacccc

SEQ ID NO: 41062 - RNA, 77 nt, Homo sapiens
cccaaaggcacccgcgagcgcaacccaagcccgcgcccggccaccacggcccgggcgcccaccggagaccaccacgg

SEQ ID NO: 41063 - RNA, 56 nt, Homo sapiens
acagaagaagagaaaaagcaccgccccagaccgcaaacagagacggggcgccaggg

SEQ ID NO: 41064 - RNA, 36 nt, Homo sapiens
cccagcagcccgagccaggcgggcaacacaacaagg

SEQ ID NO: 41065 - RNA, 79 nt, Homo sapiens
accgcaggcgaggacggcggaccccgcggcgggaggagccgccccgagaacccgccacccccacccggcgccccgcgac

SEQ ID NO: 41066 - RNA, 66 nt, Homo sapiens
ggacagcagcaagagccccaaagccaccagggggaccacacaacgagggaagagcgcaccacgcga

SEQ ID NO: 41067 - RNA, 68 nt, Homo sapiens
agggaaaaaagcagagcccaggagaaaccggacgcgacgggcggaccagcaccaccacagccagccag

SEQ ID NO: 41068 - RNA, 57 nt, Homo sapiens
aggggacacgggcggaaccccggaaccagaacagccaagggaaccaagcagaaaaca

SEQ ID NO: 41069 - RNA, 76 nt, Homo sapiens
aggaccccaggggaacaagaggccacgcagagccacgccgaacggcaagggaacgaacagggagaaacaacaaaac

SEQ ID NO: 41070 - RNA, 45 nt, Homo sapiens
cgacaccacagacaagacagaggcggagaagaacccaaccaaaac

SEQ ID NO: 41071 - RNA, 81 nt, Homo sapiens
gggcagcggcgcccccgcacccccggccccgcccggccaggaccgcacgcgccgcgggagacggcagaggcaggggaaaaa

SEQ ID NO: 41072 - RNA, 77 nt, Homo sapiens
ggagcaaaagggacagcacagcagagacgcccgcggcggacggagcaccacccccacacccaaacggccggcgcgga

SEQ ID NO: 41073 - RNA, 86 nt, Homo sapiens
gcgcggaccagaccggaacgcccaagccccaccgcgagggagaacagcagcgacccgaaccgcagacggagaacaaaggcagcggc

SEQ ID NO: 41074 - RNA, 83 nt, Homo sapiens
gaaagagagcccaaggagaaaaccagaagagcaaaggcgagagccacaaccaccgagaaggacaccgcgcgaccgagcggagg

SEQ ID NO: 41075 - RNA, 56 nt, Homo sapiens
ggaaacccaccgggaaaaggcacgaagggaggccacgcgcagccccggaagagcca

SEQ ID NO: 41076 - RNA, 81 nt, Homo sapiens
gccagcgccggccgcgcgccgcgcccgcgccacaggcagaaacggaaacagagagcgcaaggagcagccgaacaagcgcac

SEQ ID NO: 41077 - RNA, 69 nt, Homo sapiens
cggcgcgcgcgcgcgcgcggggccccgcagacggcccgccacgggccccgcagccgcgcccgagcgccc

SEQ ID NO: 41078 - RNA, 81 nt, Homo sapiens
gccaggcgcagcagacagaaccgccccaaaagagagacaaaaggacccaggaaaggaagacagcagagacaaagccgcccc

SEQ ID NO: 41079 - RNA, 71 nt, Homo sapiens
gccaacacaggagcggccacgagaagcgggcccaggacaagacagaagggcccgagggcaggacagcaggc

SEQ ID NO: 41080 - RNA, 87 nt, Homo sapiens
ggggcaagggcgagaccggcgagccgcaggaggcgcggccgagccccgacggccacccggcgggcccggccgcccaaagaacaaccc

SEQ ID NO: 41081 - RNA, 62 nt, Homo sapiens
gccggagcccccggcccaagggcgaccccagccgggcccgcgaaggaacagagagaagggcg

SEQ ID NO: 41082 - RNA, 68 nt, Homo sapiens
cgagaccccaggggaagaacgaagcaccaggacggccagaacccaggcccaagggagaacacacagaa

SEQ ID NO: 41083 - RNA, 76 nt, Homo sapiens
aacaagccgggaaagggacaagaagggcaaagccgaagaaccacacaggaaagagcagcggagcccaagagagaaa

SEQ ID NO: 41084 - RNA, 60 nt, Homo sapiens
cgagccacggcacgaggaaaccccccaggcaagaggcgcaggaccgggaagaccaacaaa

SEQ ID NO: 41085 - RNA, 62 nt, Homo sapiens
gccagggaacccggcaccgccccagcaaggagcagggacaagacaggaagcccaagcagcaa

SEQ ID NO: 41086 - RNA, 74 nt, Homo sapiens
gcaacgcacccgagacaaaaaacccccaacggacagaaagaagcaaagaacggacagcaaccgcgaccgaacaa

SEQ ID NO: 41087 - RNA, 73 nt, Homo sapiens
gggcacaggccccgcagacgccccagaagacacccggaagcaggcgaacgaaggcaaacgagcagacggccca

SEQ ID NO: 41088 - RNA, 72 nt, Homo sapiens
ccggacacccagccgggcccgggggcgagaaaggaccagcacagagaagcacgggagcacagaaggcaaggg

SEQ ID NO: 41089 - RNA, 59 nt, Homo sapiens
gcccggcgccgcgcgagcgccacccgacagagaaaaacaaaagggacagcgcacggaga

SEQ ID NO: 41090 - RNA, 61 nt, Homo sapiens
cggccgcggcacaccggagagcgacgggacccccccgcagaagcccaaacgccacaacacc

SEQ ID NO: 41091 - RNA, 56 nt, Homo sapiens
cgaccccagcgggcccggggaggcaccgacgaggagagggaacaggcacgccccac

SEQ ID NO: 41092 - RNA, 85 nt, Homo sapiens
agaagaagcgcggaagcccagacaccaggaagggagaccgacacagaaaaagagaacccaagaaggcagaagccagccccgcagg

SEQ ID NO: 41093 - RNA, 52 nt, Homo sapiens
gaaaggaggccaggacggagagggagaagaaaaccagaaggcaccgacagga

SEQ ID NO: 41094 - RNA, 75 nt, Homo sapiens
cagcagccccagagcgccagcagccacggcccggggcaaggcaacgaagagagacacggaaccagaggcagcagc

SEQ ID NO: 41095 - RNA, 69 nt, Homo sapiens
acccaaagcccccacggagccaaggaccgggagaggccaggacacgcagcacagcagaggacgagaaca

SEQ ID NO: 41096 - RNA, 78 nt, Homo sapiens
aggggaaacggagccaaacgagaggggccagccaaggacagggagggaagagagggcagaaccacagacaccaacagg

SEQ ID NO: 41097 - RNA, 80 nt, Homo sapiens
cagcggcaggccgaggcacgggcaccaggcggggcgaggcagccagcaaggagccggcggggcaccccgagaagcagcag

SEQ ID NO: 41098 - RNA, 71 nt, Homo sapiens
ccagaagcacacggaaaggagccgcaaggcacgaagcacgaagccacaccgcacgacagggcgaaacccaa

SEQ ID NO: 41099 - RNA, 67 nt, Homo sapiens
aaggacaaggagaaaaccacagagccaaagcagacccccaagcgagcggagcggaaggagcgcgccc

SEQ ID NO: 41100 - RNA, 80 nt, Homo sapiens
gaagccgcacccgaaacaaacacacccagcggaagaaggagagacgaccacgcaacagaaaaagagcgcacccaagggaa

SEQ ID NO: 41101 - RNA, 80 nt, Homo sapiens
cggaagccggcagcggagaagcggagcgaggacgaaggaaagacaaggccccagcagcaggcaaagggaaggcacagcgg

SEQ ID NO: 41102 - RNA, 89 nt, Homo sapiens
aagcagccgaccagccgcggagccgggggcagcagggccaggccgagggcccgcccggccccaggagaagaaccagccgcagaggaggc

SEQ ID NO: 41103 - RNA, 69 nt, Homo sapiens
aaggaaaaacccagcccaaaagaaagaaagagagagagcacagccgagggggacaaaggaaaaagagga

SEQ ID NO: 41104 - RNA, 76 nt, Homo sapiens
ccaacaccagaaaggaaggggaggcagggccggccagccaaagcaccggacggaaacccagagcaaaagggaggac

SEQ ID NO: 41105 - RNA, 85 nt, Homo sapiens
cgcggagagcacgccagaaggcccgggcacgacaagcagaccggaagaccgacggaagaccacaccccgagggagcccaggacac

SEQ ID NO: 41106 - RNA, 59 nt, Homo sapiens
caggcccgccgagcggcagacaagcagaccggaagaccgacggaagaccacaccccgag

SEQ ID NO: 41107 - RNA, 62 nt, Homo sapiens
ccccccggcgccgcgccggcggcggacagaaagcgggacacaagcaggagcacagaccccga

SEQ ID NO: 41108 - RNA, 81 nt, Homo sapiens
cggagcaggcagggaaaaaaaaggccgaccccgcccggaagagcacagaccccagcagggggcgaagacgacggggagccg

SEQ ID NO: 41109 - RNA, 79 nt, Homo sapiens
caagggcacgccgcccagccgccgccgccgccgcgccgcagcgccaccgggcccggccaggccccaccgccacaagcag

SEQ ID NO: 41110 - RNA, 67 nt, Homo sapiens
caccgccgcggacggccggcgcagagacaaggaagggaagcggagaaaaggagcaaaaaacaaccga

SEQ ID NO: 41111 - RNA, 77 nt, Homo sapiens
acccaggccccgccgaggcggccaggaaagacggaaaacagaagcgaaaccacagcaagagcggccagagcgcacca

SEQ ID NO: 41112 - RNA, 80 nt, Homo sapiens
ccggcggcggcgcccgccccggcgagcgggccccgcccgcgcccagccagagcaagacccacgaagggcacacaaaggac

SEQ ID NO: 41113 - RNA, 68 nt, Homo sapiens
ggcccccagcaagaacgggaacaaaaccgacaggcgacaagcgcgaaaccggagcccagaaagaccca

SEQ ID NO: 41114 - RNA, 77 nt, Homo sapiens
agcagcgcaggcaaaaaacaggcagccgccagaacggggggcagccaaggaaggacggcagaagcacagggcccagc

SEQ ID NO: 41115 - RNA, 78 nt, Homo sapiens
aggaggagaacacagaaccaccaggagagcaaggcaagggcccggcgacgacgcccgcgggggggccaggccccacgc

SEQ ID NO: 41116 - RNA, 82 nt, Homo sapiens
ccaggaccacgagggccgggccagagcgcgagggcacacaccaagagcccaggaggaggacccgaccccgcaagacagggcg

SEQ ID NO: 41117 - RNA, 84 nt, Homo sapiens
ccagcaaaggcaggggaggaagccacccgagggacagaccgagaaagggaggaaggcagcaggagaagaacggaccgcacacag

SEQ ID NO: 41118 - RNA, 75 nt, Homo sapiens
ccgcacacaccccccaaccccaggccaaaggcaggacgcgacccgcagaaggcgccacacgggagaaacccacgc

SEQ ID NO: 41119 - RNA, 83 nt, Homo sapiens
aacgccaacccaggcgagagaacccccgagggcgggaaacggcaagagaccagaggacccaaagcagaccccaaggaggccaa

SEQ ID NO: 41120 - RNA, 84 nt, Homo sapiens
aaggcaaagcaacagaaagcgggcgcaaagacaccgccagaagaccagaggaccccggaggaagcagccgaaaacaaccacgga

SEQ ID NO: 41121 - RNA, 63 nt, Homo sapiens
gaggggacgaagacaaaaaccaggagagacgagaaggccacgcggggaaggacggaacgacgg

SEQ ID NO: 41122 - RNA, 104 nt, Homo sapiens
ccaacaacaaaagcaagcaagcagcggggagacgcagacaaaaaccagagaacccacacaacaagcaccaggagaagggaagaagaggagagagaaaaacgggg

SEQ ID NO: 41123 - RNA, 55 nt, Homo sapiens
gaggaccacccagaggagcaacgcgcgaccagaagaagaacaaacagcagaaaga

SEQ ID NO: 41124 - RNA, 70 nt, Homo sapiens
acagaccgagcgggcaacaccaggcaccagcaaggggggcacacacagcaggcccgcgcgggagcgacac

SEQ ID NO: 41125 - RNA, 68 nt, Homo sapiens
cgccagaagagaaccacaaggcccagagaacagcggggagcgcccgcaggcccccaaggcggaaccag

SEQ ID NO: 41126 - RNA, 80 nt, Homo sapiens
ggagcggaggacacgggggccacaaagccccccggagacgcaaccaaggacaggacacaaaccaaccaggccccaagaga

SEQ ID NO: 41127 - RNA, 72 nt, Homo sapiens
gaaagcccgggagaaaaccaagcaaaagcacagaaccaaaggcagacccagaagagcacaaaacagagaaaa

SEQ ID NO: 41128 - RNA, 53 nt, Homo sapiens
caagggcggccagacacaaagacccagcgccccaacccagcggaaacagggac

SEQ ID NO: 41129 - RNA, 67 nt, Homo sapiens
ggcaagacggggcgggggccggaccaagaacgcaagaaccacccggcaccaccacccccagccggac

SEQ ID NO: 41130 - RNA, 40 nt, Homo sapiens
cccacccccagcggaaaggcacacaaacgaaggacaaaac

SEQ ID NO: 41131 - RNA, 72 nt, Homo sapiens
gcgccgccaggcccgcaggaccgccggagacagggcaaggcagccccgggcaaccagcaagcccagagaacc

SEQ ID NO: 41132 - RNA, 60 nt, Homo sapiens
agccgggaggaacggcccggaaacaggaggacgcacgcagcacgggggcaggggccgacc

SEQ ID NO: 41133 - RNA, 96 nt, Homo sapiens
accaggacagcggcggcgggccgggcagcccggccgacaaccacggaagacgggaagccaagcaggacaaccacaaaagcagcaaacagaagccag

SEQ ID NO: 41134 - RNA, 88 nt, Homo sapiens
ccgcgccgcgcgagccggaggggagggggcgagccccgcgcagccgccggcgcgccgccaggaccagaaggaaggggagcacccgcac

SEQ ID NO: 41135 - RNA, 57 nt, Homo sapiens
gggcggcggaaaaagccgccacacgccaaagaacccaggacgagaaaaaacagagcg

SEQ ID NO: 41136 - RNA, 83 nt, Homo sapiens
aaaggacggcccgccccggcacaccccagccccggccacagaaggaggagcacaccaccacagcggcgacccgacgcgccggg

SEQ ID NO: 41137 - RNA, 58 nt, Homo sapiens
caacaaccagcccccaagacacaaagccacgagggcaaaagcagaccggaaaacccac

SEQ ID NO: 41138 - RNA, 77 nt, Homo sapiens
gaaaaaccgcgaagacgagacaaaacgaaaggccccccaccccacagaaaaaagacgagagaaacgacaccaagaac

SEQ ID NO: 41139 - RNA, 69 nt, Homo sapiens
gagggcccaggaagaggcaagggcacgacgcaaacggagacaaagaaaggcaaacaccgagcaagaaaa

SEQ ID NO: 41140 - RNA, 64 nt, Homo sapiens
ggcacccagcccacgacacgcaggaaaccaagacgcgagagagagacaaaccaagaagaggcgg

SEQ ID NO: 41141 - RNA, 73 nt, Homo sapiens
aagagcacagcagcccacaagcagggaggcggcgacaacaggcacaaagagagaaggaacacccacagggcag

SEQ ID NO: 41142 - RNA, 88 nt, Homo sapiens
gccagcgagagccagggcccaaagaaccggccggcgcggaagaggccggcggcgggacggccccacgggacccgccccgaccacagca

SEQ ID NO: 41143 - RNA, 56 nt, Homo sapiens
gcggagcacgggcagaaaggagccggagccccagggcggagaacggaaaagcacca

SEQ ID NO: 41144 - RNA, 72 nt, Homo sapiens
caacaccacagaaacaagaaagccaggaacgacaggcgggaaacaccaagaaagaacagaagcaccaagaaa

SEQ ID NO: 41145 - RNA, 76 nt, Homo sapiens
cgcacaaaaaacaacgagaaagagaggccagaagccgcagagcagcagaacagacagaaacacgaaaaccagacag

SEQ ID NO: 41146 - RNA, 77 nt, Homo sapiens
gcggagggggcaaggccggggcccacacggagaaagccccccaggcacaggagcaccagaccgcaacaggagcagac

SEQ ID NO: 41147 - RNA, 76 nt, Homo sapiens
ccaggggaaccaccggacaagcaggcagagggccggcagggccgggcccacgcgggcacgggaaggcgggagagag

SEQ ID NO: 41148 - RNA, 49 nt, Homo sapiens
agcaggcggagcacccaaaacccgcacgccgggagcaaacgcaggacac

SEQ ID NO: 41149 - RNA, 62 nt, Homo sapiens
caaggaggggaggcgagaacacgaggagggccaagcggagaacaaccccaccagacagccgg

SEQ ID NO: 41150 - RNA, 82 nt, Homo sapiens
accacgagacccggacagcccgcggagccagagcgcgcaggcaggcacaaggcccaggcacaggccccaggaggcccaaaag

SEQ ID NO: 41151 - RNA, 75 nt, Homo sapiens
ggggccacgaggaacaaagacagcccaccaggaagagcgaaaaggacaaggggcggacagggggaagaggaggcc

SEQ ID NO: 41152 - RNA, 75 nt, Homo sapiens
ccaacacgccgcagcgacgcgcagaccgggaggggaagaagacggacagaagcaacaaaggaaaaacggggagcg

SEQ ID NO: 41153 - RNA, 84 nt, Homo sapiens
aagccaaaggaacgccaaagagagaaccagagcacaagccaaagaagccccccccaggggggccccgaagccacgaggaagcca

SEQ ID NO: 41154 - RNA, 73 nt, Homo sapiens
gaaggacgcggacagcagcaagcagcagggcgggaagcggggaaaggaaaacaccagcacaccaaagaccggg

SEQ ID NO: 41155 - RNA, 70 nt, Homo sapiens
ccagcgaccccaagcaaaccgccacagaccccgccggggaagaacaggaggggagcgaccagcacagcaa

SEQ ID NO: 41156 - RNA, 50 nt, Homo sapiens
agacacagcccaggggggaacggagaagccaaacgaaccaaggaaaaacc

SEQ ID NO: 41157 - RNA, 72 nt, Homo sapiens
gaaaccaagcacaccgacagaggcagacaaggccacccccaggagaccccgagaaggccccaagcagacaga

SEQ ID NO: 41158 - RNA, 66 nt, Homo sapiens
gcccacgggagcacaccaacaaggcccggacaaagccgaaaccagacaacaacaccaccgcaggag

SEQ ID NO: 41159 - RNA, 80 nt, Homo sapiens
cccccagaaagcaagaaacccaggacagcagcggacaacaagcagggcgaagaagagcagagcagccgaagcggggacga

SEQ ID NO: 41160 - RNA, 72 nt, Homo sapiens
cccgcgcagaacccccgagacggcgcgggccccggggccgcggcgaaaggacggggcgaaagccaagaacca

SEQ ID NO: 41161 - RNA, 79 nt, Homo sapiens
cgaacgcagacccagaaagaccagcggagccaaccggaagaaggacccagcccagccgcaggacaggccgagcgcaagg

SEQ ID NO: 41162 - RNA, 72 nt, Homo sapiens
ggaaaccaggcagaaaagggcacaaggacacagaaaagcgaaagccagaagccaggacccgaaaagccagca

SEQ ID NO: 41163 - RNA, 67 nt, Homo sapiens
gaaacagacggcagcaggagagaagagccagcacccaacgagacgaaagagccaccaagaagagcca

SEQ ID NO: 41164 - RNA, 71 nt, Homo sapiens
gacaaggaccgaaacagaaacggaacaccaagggaagaacgggcaggagaaacgaccccgcaggaaggggc

SEQ ID NO: 41165 - RNA, 74 nt, Homo sapiens
cgccacccgggccggcgggggcaggaaacgagcggcagcaacccaacccagagggcaccccaaggacccgaaag

SEQ ID NO: 41166 - RNA, 37 nt, Homo sapiens
aaggaggggacaaccagccaaggacagcaccggggaa

SEQ ID NO: 41167 - RNA, 57 nt, Homo sapiens
ggagaagcacggagcgggggaggcacagaaggggcgagcagaacaaggagaaagacc

SEQ ID NO: 41168 - RNA, 71 nt, Homo sapiens
gccccgggcaaagcggacaccgggacagaacacaagccagcaggaggcacaagcagaagaagcacaggcac

SEQ ID NO: 41169 - RNA, 62 nt, Homo sapiens
gcaggaacaggaaacgggcgcagccaggagaacgcaagaaaacccaacgacaaaacggaaag

SEQ ID NO: 41170 - RNA, 75 nt, Homo sapiens
caggaacccggagcgacagcaacaggaacaacgccccgagcgacaacagcggggaggcgcagaagcaagcgaaaa

SEQ ID NO: 41171 - RNA, 87 nt, Homo sapiens
gcagcccccagagcggaacacaggcccaggaccggggaagaacgcaggggacacgcgcccaggaggaccgccgcgacgaagcccgag

SEQ ID NO: 41172 - RNA, 71 nt, Homo sapiens
ggggcaacggagaaaacccggaaccgcgacggcggcagagacagaaagagaaaagggacagagcgaggaaa

SEQ ID NO: 41173 - RNA, 75 nt, Homo sapiens
gaaccacggacaacccagaggacaacgaaggcgggccgcgagggcccggaacaggggcacgcacgaggcggaacc

SEQ ID NO: 41174 - RNA, 78 nt, Homo sapiens
aacaaaaagggccaacacagcaaaagcaccgcccgagaaaagcaaaacacgacacgaaggcagagaggaagagcgaaa

SEQ ID NO: 41175 - RNA, 75 nt, Homo sapiens
gacaacgccccgggaccggagcagaacccccgcagagaaagcgacaaacacaagcccaagagggagccccgcaga

SEQ ID NO: 41176 - RNA, 71 nt, Homo sapiens
gcgagggcccagcggaaaaaagagcccagggccgccggggccaacagaccaagagcaggagaccagcggaa

SEQ ID NO: 41177 - RNA, 79 nt, Homo sapiens
agaaaacgcagagaaacgcacagaaccaaggacagggccaaagcggcaggagaaggaagggaccggaaacgacaaggca

SEQ ID NO: 41178 - RNA, 78 nt, Homo sapiens
cccgcggcgggaggagccgccccgagggccaaccgccccccagcagcaggcacgggcgaaccccgagccccgccccac

SEQ ID NO: 41179 - RNA, 68 nt, Homo sapiens
gaggagcaggcggagcacccaccacggagggaaagaccaggcaggagaagaccggaaggcacaagcaa

SEQ ID NO: 41180 - RNA, 69 nt, Homo sapiens
gaaggcacaagcagggccggaaaaccaagcaagcaagaccaggaccgcgcagacgcgcaggacggagcg

SEQ ID NO: 41181 - RNA, 78 nt, Homo sapiens
aggcggcagccggcgacaggaggcccagccagaacgagcggcccaaaagacggcggcaagcgcgacccccgcgaagac

SEQ ID NO: 41182 - RNA, 80 nt, Homo sapiens
aaaagaaaaaaaaagggagagaagaagcaagaccaacacgcgcaagggcggagaacggaaaagcaccaggaagcagagag

SEQ ID NO: 41183 - RNA, 75 nt, Homo sapiens
agccggggggacgaccacaagaccggggcgccgcgcccggggagacagaaacgaggcgcccccagcagcaggagg

SEQ ID NO: 41184 - RNA, 77 nt, Homo sapiens
cgacaaccaaggccggaacgagcacagagaccgaaaagggaggagaagaagcgggcagagggggaaagacgaaagag

SEQ ID NO: 41185 - RNA, 78 nt, Homo sapiens
gcggaggacgaagagcgggacccgagcccggccaaaagcacagcaagggcaaagcccggaagagggaaggggaaacgc

SEQ ID NO: 41186 - RNA, 72 nt, Homo sapiens
aaagaacgggaacccacccggaggaacgggccgacaaaggaaaccgcagggcaggaagaacaagggcaacgc

SEQ ID NO: 41187 - RNA, 85 nt, Homo sapiens
acgagacccgccacacgagaacaacaaccgaccccgcggccgacaccagacggaggagggcgaggagaacccgcacgccccacgc

SEQ ID NO: 41188 - RNA, 101 nt, Homo sapiens
gaagacccccaggccaccaggcaagcgggaccaacagagagaagggagaggaaaccgaagaaccagccccggggacgaaagagacggcagcgccggccagg

SEQ ID NO: 41189 - RNA, 57 nt, Homo sapiens
caccaggaaagacaggagaccaaaaagagccgaacacgcagcacagccagccagcga

SEQ ID NO: 41190 - RNA, 40 nt, Homo sapiens
ggagccgaacaaggagggccaccagcgaacaggccaaagc

SEQ ID NO: 41191 - RNA, 89 nt, Homo sapiens
ccgcgcccggcggcggcgggagcccaggagccgccccgcccggggacgaagagcgcagcccccggcggaccaagacacccaggagaaag

SEQ ID NO: 41192 - RNA, 89 nt, Homo sapiens
agcgagggggggcgcgccggaaaccggagcgcgcagcaggagaaagaagaaacaaagagggacccagccaccaaaaggaggcgaagggc

SEQ ID NO: 41193 - RNA, 80 nt, Homo sapiens
aaccagcacgggaagagagaaccgaggaacgaagaaacagacacaacagagcagaagccgccgaggaggaacgaagacga

SEQ ID NO: 41194 - RNA, 72 nt, Homo sapiens
agccgcgacggcccagaccaggcgaggcgcagaaggggacagaacaaagagcagaagggccggaccaccggc

SEQ ID NO: 41195 - RNA, 83 nt, Homo sapiens
ccaaggagccacagaggaccgacgcgcgcaggcagaggagaaggcagcggacaaagagaaagcaccgggaggaaagagagcca

SEQ ID NO: 41196 - RNA, 70 nt, Homo sapiens
gcgacgggcccgaaagccgagacgagagagcgcgcgagcggccagcacaaggcacaggaagagggcggca

SEQ ID NO: 41197 - RNA, 69 nt, Homo sapiens
ccgaggcagacggagcggacggaaagcaggccaaacaaaagaaaaaagaacggcggaacagcaaaaaca

SEQ ID NO: 41198 - RNA, 69 nt, Homo sapiens
accccgcgaggcaagacaagaccaggcacacgaccaagaagcagaacccacggcaaccaacgccgaagc

SEQ ID NO: 41199 - RNA, 73 nt, Homo sapiens
caaagagaaagcacggcccaccaccagcccagcccgaggcaaccgagacgccaaggccccaaaggacaaagca

SEQ ID NO: 41200 - RNA, 78 nt, Homo sapiens
acaagcaagaaccggcagagacacaaccaccagccaaacaagagaacccaccccccacggaccgacgaagcggcacaa

SEQ ID NO: 41201 - RNA, 56 nt, Homo sapiens
ggaagaggcgaacaagccgcggagaaccgaaccaacagccagccaaagccaggcag

SEQ ID NO: 41202 - RNA, 76 nt, Homo sapiens
gcgcaaagcggaaaaacagaaaaccaaacacagccacagcagccacagggacaaacagacacaaaacgagcaaaag

SEQ ID NO: 41203 - RNA, 71 nt, Homo sapiens
ccgacgccaggcagcgcccccaaacggcgggaccccccaagggaggaggagggcaggcggggaccggggca

SEQ ID NO: 41204 - RNA, 46 nt, Homo sapiens
aaaacaacgaaggaggagaaagacaaagagagaagcggggaagaaa

SEQ ID NO: 41205 - RNA, 75 nt, Homo sapiens
gacccaccccgcaaaacccaaaggaaaagaaggaggccagcgggacacacaaagaaagacgaaggacacccaaag

SEQ ID NO: 41206 - RNA, 43 nt, Homo sapiens
aacgacaccaccgcagcgacgagcagaggaccacccgcaccca

SEQ ID NO: 41207 - RNA, 85 nt, Homo sapiens
ggagaggaggacgagggagcggagagaccaaagcagggcagggacagacacgacgaggcgcccgcccaccgggggccacacgccc

SEQ ID NO: 41208 - RNA, 79 nt, Homo sapiens
gagcgaaagaacgccagacaaacagaagccgggacacgcccgcacaccaaagagcgaaggagcgcggagcagaaggaga

SEQ ID NO: 41209 - RNA, 66 nt, Homo sapiens
gcaccacccaagcggggagcaccgcaaagcaaggcgaacagccaacagagggggggcggacgggca

SEQ ID NO: 41210 - RNA, 65 nt, Homo sapiens
cgaccccggcagacccggaaaaaggaagcaacgccaccagaggaaggccagagaacccaaaagca

SEQ ID NO: 41211 - RNA, 80 nt, Homo sapiens
cgaccccacacccgcgggagacggcaaaaaacagcggagaacaaccgcaacgaacaaacaggagacagagagcaagagca

SEQ ID NO: 41212 - RNA, 36 nt, Homo sapiens
gcggccgagagacaaccgcaaccaggcggccacagc

SEQ ID NO: 41213 - RNA, 44 nt, Homo sapiens
gagcgggccgaccaccgacagggacacacaggaagacgaacacg

SEQ ID NO: 41214 - RNA, 85 nt, Homo sapiens
gcgccgcgccggcgccgggcggcgcgcgccggccgcgcgcccccgcgcccccggcggcggcccagcagcggcagggcaaagacag

SEQ ID NO: 41215 - RNA, 77 nt, Homo sapiens
ccggccggccccggaacggaaggagcccacgaaagggccagcagcccccagaagaagccagaaagccaggaaaggcc

SEQ ID NO: 41216 - RNA, 78 nt, Homo sapiens
ccggagcaacgaaaagagcccggaaggaagagacaggaggcagcagacggacaccaggggcggccccggcgaggcagg

SEQ ID NO: 41217 - RNA, 59 nt, Homo sapiens
gcagcaggagcgagcccgaggacaggagaggaaggggaagagggcaaagaacggacggc

SEQ ID NO: 41218 - RNA, 85 nt, Homo sapiens
aaagcgaagcagcagccacaaggggaagacaaaaggagccacggagaaagaaaaaagaaagaagcccgaaccggaaccggagaag

SEQ ID NO: 41219 - RNA, 77 nt, Homo sapiens
caggagaggccaggccaaagaggcaccaccggcccaggacgcagcccaaacgggggacgaagagcgcaccggacgag

SEQ ID NO: 41220 - RNA, 69 nt, Homo sapiens
accgcgacaggggggcagagaaggaaaacacgcccaagagaggggcaagcagagcccacccaccgggcc

SEQ ID NO: 41221 - RNA, 83 nt, Homo sapiens
gcgaccgaggccccccgaaccccaaggccaacagagagaagagaccagagacccgagagaccccaaaacagcaagacgaagaa

SEQ ID NO: 41222 - RNA, 62 nt, Homo sapiens
acgccagacgccgcccaagccaccgaagccccaagccccaaggaacgacaaggcgaagcccc

SEQ ID NO: 41223 - RNA, 59 nt, Homo sapiens
gccccggcagcgccgggacaaggcacgggaccaccagcgcgcagggggaaacccacaca

SEQ ID NO: 41224 - RNA, 70 nt, Homo sapiens
gacaacaagaaaaaggaaagaagaaacagaacacggccacgggagacagcccaagaggcagcaaggccag

SEQ ID NO: 41225 - RNA, 79 nt, Homo sapiens
cccaacgaaaggggcgacaccagggccgcagagaccccaacaggaaccccccggcggcagagagcagaagggccagcgc

SEQ ID NO: 41226 - RNA, 52 nt, Homo sapiens
agagaggcccccgccgagcacggaacagagagaagggcgggagaaaccaagg

SEQ ID NO: 41227 - RNA, 85 nt, Homo sapiens
agcccccgccggccgcccaacaccgaacaccgcggacgaaagaaagaaggagcaccaacgcaaagaaaaagaccaagaagaccag

SEQ ID NO: 41228 - RNA, 80 nt, Homo sapiens
acgacacccaccagcagagaagacgagaggaggaagagacgaccaaaacagaaggagaagaaaagcagcaagacaaaaaa

SEQ ID NO: 41229 - RNA, 66 nt, Homo sapiens
acgccgcggagaacacacaaccaccggaaacagaagcacaaaggaccgcccgcaaaacgggcgcga

SEQ ID NO: 41230 - RNA, 78 nt, Homo sapiens
ggaggagcagcagaccggacgggacgccccggacagaaagagggaaggcaacacccgaaaaccggaagaaagccagag

SEQ ID NO: 41231 - RNA, 78 nt, Homo sapiens
agaccagaaccggaggccagacaaggaggaccgcacgacagcggcccgcgggggcgagaaaggacacacgccaacaga

SEQ ID NO: 41232 - RNA, 78 nt, Homo sapiens
ccgggccggggagcaagcgccaggcagaaggcggcagggagcacgcaccaggagcccacggcccacccacagcgaaac

SEQ ID NO: 41233 - RNA, 74 nt, Homo sapiens
agcccccgagggcgggacaaggagcgcagggaggggaagcaagaacaggaggaaccaagcaacacaaggaacac

SEQ ID NO: 41234 - RNA, 80 nt, Homo sapiens
gcgaccccacccagccccgaaagcggaacaagcacacgccaccacacccggcgagggaaggcgccagacacagaaaagaa

SEQ ID NO: 41235 - RNA, 73 nt, Homo sapiens
ggaaaaaagcagagcccaggagaaaccggacgcgacggggacacagccgagaaagacaaaagaccccacaaga

SEQ ID NO: 41236 - RNA, 60 nt, Homo sapiens
ccggaagcaccaggacaggacgcgcgaccggggcgggggccccgcccggaaggacggcgg

SEQ ID NO: 41237 - RNA, 77 nt, Homo sapiens
cccaaggggaagcggggagcggaggaaagcaggaagcagaggcaaagaagacgcagaaaagcaagccagagcaaaga

SEQ ID NO: 41238 - RNA, 71 nt, Homo sapiens
ggggccggcaaacacgcaaaacaagaccggcagaaaccccagcgcaggaaggaagcgggacagggcgaagc

SEQ ID NO: 41239 - RNA, 75 nt, Homo sapiens
agaaaagaggaagcccagcgccagcagacaagacagaccacagaggacacgagcccagccaggcgagccagcgcc

SEQ ID NO: 41240 - RNA, 74 nt, Homo sapiens
cgagacgagacacggcagcaggcgcgcgccccccgagcaggagcgcaagccccggggcagagacacaggacacc

SEQ ID NO: 41241 - RNA, 69 nt, Homo sapiens
gcgcggggagccgcggggcggagcggggggcaggcccggacccaggggcgcaaacccggagccacccac

SEQ ID NO: 41242 - RNA, 66 nt, Homo sapiens
cagagcaaggggcacgcagaaggaccggccacgcacccaggccacagaggaggaaagagaggggaa

SEQ ID NO: 41243 - RNA, 72 nt, Homo sapiens
cgggggagagccacggaagccgacagacaaccagagacaggggccaggccaggggcaggggaagcacccaac

SEQ ID NO: 41244 - RNA, 65 nt, Homo sapiens
ccgcgcgagcagaccaaacggcgacaacaaaggagaggacaagcgggccaacacaagggagagag

SEQ ID NO: 41245 - RNA, 111 nt, Homo sapiens
aacgacacagccacccccagacaaaaccaccaaagacaacagccaccggaggacaccccaggcgaaccgcaaagaggagacagaaaagaagaaagaaggacaccgcaaggc

SEQ ID NO: 41246 - RNA, 60 nt, Homo sapiens
caaaaaccccaaaaggaggagcccccgggaggaaccgcgccaggaaggaggagccaagac

SEQ ID NO: 41247 - RNA, 82 nt, Homo sapiens
gcgcccccggcgcgcgggcccacgggccagaagggggcgccggggacgagaggacagcagcggacggccggaccaagaggcg

SEQ ID NO: 41248 - RNA, 78 nt, Homo sapiens
acagaggggcccagaaaacaagccagcagacgcaggaagcaggagcacaacacaggcagcccgaagcaacaaagagag

SEQ ID NO: 41249 - RNA, 81 nt, Homo sapiens
cgcagacgaggccgaggcggcggcgcgaggcaggaaaggaagccgaagacagaagaggagaacaccacgaccgggaaacac

SEQ ID NO: 41250 - RNA, 74 nt, Homo sapiens
ccccccgcacgcccccgggaagcccaggcccgccgcagacccccgaagccggaggccccgaagccccaaccccc

SEQ ID NO: 41251 - RNA, 76 nt, Homo sapiens
ggagccccccggccacgccgggcaccccgagccaggccgccgcaaagcagcccgagaaaagcacagcacccgcagg

SEQ ID NO: 41252 - RNA, 73 nt, Homo sapiens
cggcagccagacacaaaagacaaccgcagcgcccacagcgccaggaaaggcagacaccgcacagaaggagcgg

SEQ ID NO: 41253 - RNA, 83 nt, Homo sapiens
cgggcaccgaggagcgggccagccgcgcggcgggaagcggcggcggcggcccagcgccaagagggcaacgccaaagaaaggaa

SEQ ID NO: 41254 - RNA, 72 nt, Homo sapiens
agaccaggcccggaccccaagaccaagcgcgccacgcgcggcgcgccgagcgacgccgacaaaggaggaaaa

SEQ ID NO: 41255 - RNA, 82 nt, Homo sapiens
gcgaacgagcaaaggcacgggcagccggaaggacaccaagagcggaccgggccccggacagccaaggcgaagcaagcgccaa

SEQ ID NO: 41256 - RNA, 82 nt, Homo sapiens
ccccacagacacccagccacgacacaagccagacagacacagcacagcagccacgaagagcaaagcaagccgaaaaaccgaa

SEQ ID NO: 41257 - RNA, 78 nt, Homo sapiens
agcccaacacagacagccagccaaacggcccagcaagcagcaacagaccacagaccagcaggcgccacgcgcggagcc

SEQ ID NO: 41258 - RNA, 71 nt, Homo sapiens
cgaaaaaggccgaaggacacaacacagccggacggcaaaggagaaagaagagagaccagaaacgagaggag

SEQ ID NO: 41259 - RNA, 86 nt, Homo sapiens
agccgggcaggggcagcgggagccggccggcggccgggccagcgccggcggagggaagcgaccgcggaggcgcaccagggcggagg

SEQ ID NO: 41260 - RNA, 71 nt, Homo sapiens
gagagaccacggaaaaggaacagagccaaaccagaagaggagggcccagaagaaaaagggcggaaagcagg

SEQ ID NO: 41261 - RNA, 86 nt, Homo sapiens
gcgcaaggccgaggcccagcacaggggcacgggcgcagcggccagggaaggaagcaaagcaaaggagaaggcagcgggacggacag

SEQ ID NO: 41262 - RNA, 72 nt, Homo sapiens
gagagagcgagcgagggggggcgcgccggaaaccggagcgcgcagcaggaagaacaggagccaggagacagc

SEQ ID NO: 41263 - RNA, 79 nt, Homo sapiens
ccgaggaacagagccccgaagaggcaccagggggcggcaccccggggcacggaagaagacgacacagagaagcaaacca

SEQ ID NO: 41264 - RNA, 63 nt, Homo sapiens
acagcgccacagacagaaaagggaggcaggcgacaacagaggagaaggcgaagaaaacagcca

SEQ ID NO: 41265 - RNA, 68 nt, Homo sapiens
aaaagaaggacaggaacagaggaaagaacaaccccagcgaggaaaacgcaaaaccagaagcgcgccga

SEQ ID NO: 41266 - RNA, 36 nt, Homo sapiens
cgacccaagagaagaaaggcaccagaccagcgaagc

SEQ ID NO: 41267 - RNA, 79 nt, Homo sapiens
aaaccaaaacaaacaaaccaacaaggcaccaagacgcaggggggaaccacagcgacaaggcagagacccggcgaggcga

SEQ ID NO: 41268 - RNA, 78 nt, Homo sapiens
cagccacagacagcccacaagccaaacagcaggaggagagcaaacacacacggagaaagcgacggcgccggaaccaga

SEQ ID NO: 41269 - RNA, 66 nt, Homo sapiens
accggccaccccgaccaagcaggccaagaaaaggagacggggcggcgcggccaaagcagaaaccaa

SEQ ID NO: 41270 - RNA, 82 nt, Homo sapiens
gagccgggcgcggccggggaccggagaaacgcgggaaaagggccagggacgaagccccgggcccggaccggagcccacccgg

SEQ ID NO: 41271 - RNA, 42 nt, Homo sapiens
gcgccccgccccgcccacccggaggccgagggccggggagca

SEQ ID NO: 41272 - RNA, 81 nt, Homo sapiens
acacaccccagagggcgcaagcagagaaaaggaaaacaagcccgcagacagaagaaggccaaaccaccagacgaaggggac

SEQ ID NO: 41273 - RNA, 69 nt, Homo sapiens
aaagcgcaggaagaggagggaccacgggcgaaagaacaggaccgaaccggacacaccccagagcaagag

SEQ ID NO: 41274 - RNA, 112 nt, Homo sapiens
cagcaaagggaacaggcaaaccggcgggaagaagaccagcgggggacagaggcgacacgcgggccccagacacgacgcccccggccggcccgggccgcgccagagcgcggcc

SEQ ID NO: 41275 - RNA, 39 nt, Homo sapiens
agcccgagcaacacaaagccagagagaaagaacgcacac

SEQ ID NO: 41276 - RNA, 76 nt, Homo sapiens
accgcccccgaagaggcaaccccccagggcccagaacgggcaagcaagccaaaggcacaaaagggagaggagagac

SEQ ID NO: 41277 - RNA, 66 nt, Homo sapiens
gaccgggggaagggagaagaccaaagggaagagaaacgcaaccggcagcgcaaaaacagccggaag

SEQ ID NO: 41278 - RNA, 58 nt, Homo sapiens
cagagcagaagacagacaaaaaccaagaaacaagagacgaggacgcgcacaggaaagg

SEQ ID NO: 41279 - RNA, 55 nt, Homo sapiens
cagcgccacagacagaaaagagaggaacgccccaaaggaggagcaaaaagaacag

SEQ ID NO: 41280 - RNA, 84 nt, Homo sapiens
cggccccagcaccccagcgcgcagggccgccaggggcgccggagaacaaccgcaacgaacaaacaggagacagagagcaagagc

SEQ ID NO: 41281 - RNA, 77 nt, Homo sapiens
gagcaaggggaacgccacggacggggggcaaagaaaaaggagagaaaaagaggcaaaacaacaagaagaaaagagaa

SEQ ID NO: 41282 - RNA, 78 nt, Homo sapiens
gcaggccaaacacaccgggagaagcacggagccccaaaccaggggacggaaggcaaggagcgaaaaccccagaacaca

SEQ ID NO: 41283 - RNA, 76 nt, Homo sapiens
cccgcaagaagaacagagacagcagccaaacccccaggccaaagagcacagggacagaaaaacagcgcagacgagc

SEQ ID NO: 41284 - RNA, 49 nt, Homo sapiens
gcccggagcgcggcccgaggcccgcccagaggaaggacacagacaaaag

SEQ ID NO: 41285 - RNA, 65 nt, Homo sapiens
caaaacagggacagagggagaagacagaaaggcccaccgcacggagccacaaagcagcgaaacag

SEQ ID NO: 41286 - RNA, 63 nt, Homo sapiens
acacagaagaaacccacagccaagaagaggagacaggggagaaggggagagagaaaccacgga

SEQ ID NO: 41287 - RNA, 80 nt, Homo sapiens
acaggaagagaaagaggggagaaaaagggaggagagaagaaacggagggcagacggcagggggaaaacggcccccgagga

SEQ ID NO: 41288 - RNA, 82 nt, Homo sapiens
cgaacgaggaaaaacagccaagacggcaaagccccccagaagaccagaacaggccgcccgccgaagaaacacaagagcaaga

SEQ ID NO: 41289 - RNA, 77 nt, Homo sapiens
agccgcggacgccgcgccagcgacaaacaagacccgaacacggaagaaagacacgcaggaggccgcggccgagcagc

SEQ ID NO: 41290 - RNA, 76 nt, Homo sapiens
ggaaggcacaaaggaggaggaggaggacgacgacgaggggaacgagggagacgcgcacggaccggaaccagaacaa

SEQ ID NO: 41291 - RNA, 73 nt, Homo sapiens
gaacgcgaggccaacagccccgagaaaccggaacagagccccagcccgaaaaagacccggaggacaccgcgac

SEQ ID NO: 41292 - RNA, 70 nt, Homo sapiens
agcacacgaaaaggaaggaaaaacgcagcggaaggagcaagacgagaacaacgacaaaagaaggggcggg

SEQ ID NO: 41293 - RNA, 82 nt, Homo sapiens
cggaggaggcggccggagggccgcccgaagcagacacccgaagagcagaagccgaagggcagcagcaaaagcagcacaagag

SEQ ID NO: 41294 - RNA, 66 nt, Homo sapiens
caccggcgaccgcaccacaagggacgagaccaaacggaagagcacaagcagcaggagacccagaaa

SEQ ID NO: 41295 - RNA, 80 nt, Homo sapiens
agacacaaaagaggcacggcggcagcaccgaccaccccaaccgaggagcaggagaggaaggaaacgaggaaccaccaaac

SEQ ID NO: 41296 - RNA, 85 nt, Homo sapiens
ggaccacgccgaacgcagccgagccccgggggagacggagggcagccggaagaccacagcagccaagggccccgggcgcgggagc

SEQ ID NO: 41297 - RNA, 57 nt, Homo sapiens
gcgcgaaaagagacacaagagcaggcaaggggaaccaaaacgcaagacaaagggaag

SEQ ID NO: 41298 - RNA, 66 nt, Homo sapiens
gccaaccccgaagcagggcagaaaagaacagacccagaagaagcgaaaggggagaaagaagaaagc

SEQ ID NO: 41299 - RNA, 82 nt, Homo sapiens
cgcagacagaggagcggacccccgcggcgcgcagcccagcagaccaagacacccaggagaaagacagcggggaaaagaaaaa

SEQ ID NO: 41300 - RNA, 37 nt, Homo sapiens
accagggaccgcgaagacgcaagaggcgccccaagga

SEQ ID NO: 41301 - RNA, 53 nt, Homo sapiens
ggaacccccacggcaggaaggaacgaaggcaagaaggacagcccccaggaaga

SEQ ID NO: 41302 - RNA, 76 nt, Homo sapiens
ggagagcccgcccggcccggagaagaaagcccccaggcggccgccaaaccgagaacagcgcagaacccgcagcaac

SEQ ID NO: 41303 - RNA, 78 nt, Homo sapiens
accagaggccgccacaaccgccagacaaccggagccacgccccacgaccgccaggcaccccgcgacgaaaggaaaccg

SEQ ID NO: 41304 - RNA, 71 nt, Homo sapiens
gaaacgcaccggaaaggccaccagaaaacagaagacaccccggaagacgaaagaagacggagcggaccaac

SEQ ID NO: 41305 - RNA, 72 nt, Homo sapiens
gaagggggcacaacagaaaagcagagaccggagcgcacccggacccacagcggccaggggaccgcagcgcag

SEQ ID NO: 41306 - RNA, 80 nt, Homo sapiens
ggaacccagagagacccagccccagccccaagggcagagggagacgggcgaacacagggaagaaggacggagccagccgc

SEQ ID NO: 41307 - RNA, 49 nt, Homo sapiens
cagagaagcaaagaagcaggaaacaagcagccacaaggccgaagcagaa

SEQ ID NO: 41308 - RNA, 76 nt, Homo sapiens
gcacacacaggcgcgaaacggaaaaagggccacacgacccggaggaaacccagagcaaaacaacgaagcggcccag

SEQ ID NO: 41309 - RNA, 57 nt, Homo sapiens
gccccaccccgcaccaacagcaggaaacagcccgaacgcacagaagaaaccagcgcc

SEQ ID NO: 41310 - RNA, 59 nt, Homo sapiens
accacccagagcaacccagccgcaagcccacagacacccagaggacagggccccagggc

SEQ ID NO: 41311 - RNA, 46 nt, Homo sapiens
gcccgagcaagaacacacaggagagaggaggaggacgaggacagga

SEQ ID NO: 41312 - RNA, 97 nt, Homo sapiens
gagagaggggaaacagaaggcccacggacccggagcgccaagaacaagccaggcaaacgcagaaccaaccagcggagaggagacacaagaacagcca

SEQ ID NO: 41313 - RNA, 75 nt, Homo sapiens
acaaaaagaaacaggagaaccaggccgcagccccaaaaggccgggcaaaaagggaaagaaaggagggggacacag

SEQ ID NO: 41314 - RNA, 67 nt, Homo sapiens
gccggggcgcccggcgccggccgagaaggcagaggcggcaagacaacagagaacgccacggacaaag

SEQ ID NO: 41315 - RNA, 78 nt, Homo sapiens
gagggcccaagaggagaagacggcggcggcgagggggggcggccgccgacacgcaccgccgccggaaggaagacgagc

SEQ ID NO: 41316 - RNA, 79 nt, Homo sapiens
gcgagcgagggggggcgcgccggaaaccggagcgcgcagcaggcaaaagcagaccggaaaacccaccggcaagaccaca

SEQ ID NO: 41317 - RNA, 79 nt, Homo sapiens
aaaaaagggcaggaaccacgaaggacagaagacaccacagagaaggggcagaccaacaccacccagcaaaaaccccgac

SEQ ID NO: 41318 - RNA, 73 nt, Homo sapiens
ccacaggaggagacacgagggaaagaccaggagcaggccaagggcgcagaaaacgccaacgaagcaaagggac

SEQ ID NO: 41319 - RNA, 72 nt, Homo sapiens
gaggcggaaaaaacgcagcaccgacggaccgaagcgcgcagccgaccaccggagaggacagcgcccccgaag

SEQ ID NO: 41320 - RNA, 53 nt, Homo sapiens
ggcaggaccggcgcccaaggagaggccaaagggccacgacgccccgggcgcac

SEQ ID NO: 41321 - RNA, 46 nt, Homo sapiens
caggacaagaggccaggacaaaagaaaccacgagcggggagaaaca

SEQ ID NO: 41322 - RNA, 66 nt, Homo sapiens
gaaccaaggaacacggggaacaaggaggagaagaaggagaacggccgagcgaccaggagaggagcc

SEQ ID NO: 41323 - RNA, 37 nt, Homo sapiens
ggaaaaagagcgagcggagaccggaaacgagagaaac

SEQ ID NO: 41324 - RNA, 86 nt, Homo sapiens
aacccacgaaaaacaacagacccaggccaagaggccaaccagccacaaaagaagacccaaagcaccaacaaaaagcaacgagaaca

SEQ ID NO: 41325 - RNA, 53 nt, Homo sapiens
cggcggcgccaggcagggcgcaggacccacccaggaggcagaaacacgccgcg

SEQ ID NO: 41326 - RNA, 76 nt, Homo sapiens
gcgaagcccagcgggccggacggggcggggggaacgggacaaacgagaacgcccccgagaaagaaaaaaacaagac

SEQ ID NO: 41327 - RNA, 75 nt, Homo sapiens
cagggaggagagacggggagagccccgcacagggccacgcgccccggcccaagggcgcacgaaggggaaccgaag

SEQ ID NO: 41328 - RNA, 83 nt, Homo sapiens
acaagccgcccccgcaggaccacgcaccccaacccacagcggagggccacggccaagaacgacagaaccggcaccgcacgaga

SEQ ID NO: 41329 - RNA, 78 nt, Homo sapiens
gggggcagaccccagcccacaacccacgcgcaccggggccaacagccagacaaaaccacaacaccgccaagcaaaagg

SEQ ID NO: 41330 - RNA, 79 nt, Homo sapiens
caaaaccaaacaccccagcccacagagagcaaaacacaagagagcagggaggagaagccgggcggaagcccacgcacag

SEQ ID NO: 41331 - RNA, 72 nt, Homo sapiens
cgagaccgggccggaacgaaagcaggacggaggagcgaccaccgggaaacacaaagaagacaccagaagggc

SEQ ID NO: 41332 - RNA, 77 nt, Homo sapiens
ccggagagggggaagggcccaaagccagaagaaggccggcccacagcccaaaaagaaacaggaccgaaagccagagc

SEQ ID NO: 41333 - RNA, 68 nt, Homo sapiens
acaggagaaaacacaaccgagacaccaaaaaggaagggcgcgcaggaacaagaagaagggcaaccaca

SEQ ID NO: 41334 - RNA, 60 nt, Homo sapiens
cgacgggaggaaccaaggaaccacacagaaagaggcgggcaaccagaaccaaagaaaaga

SEQ ID NO: 41335 - RNA, 76 nt, Homo sapiens
acaagacgcgggaacccaccaaagaagaggggggagaagggaccaggaagacacgggggcaggcagagaaggcacc

SEQ ID NO: 41336 - RNA, 37 nt, Homo sapiens
cacaaggccacaaacccaggcaaaaaaccagggaaaa

SEQ ID NO: 41337 - RNA, 76 nt, Homo sapiens
acggcacacccaccaagcacccaacagaagaagagcagggcagaaaagaacagacccagaagaagcgaaaggggag

SEQ ID NO: 41338 - RNA, 72 nt, Homo sapiens
aagacgccacggcaccccgcacgcacgcgggcaggcaccagacccggaggagcagcaccccggcaggcagac

SEQ ID NO: 41339 - RNA, 83 nt, Homo sapiens
gaaaaccaagagaccagacaagccccccggacgaaaaacaaccaccagcgagcaaaaaggcaaagaccaagaccaccaagaag

SEQ ID NO: 41340 - RNA, 58 nt, Homo sapiens
aaggccaagaaggcagcaggacaagggaaaaggagaaccccagcgggaaccgcaccgc

SEQ ID NO: 41341 - RNA, 71 nt, Homo sapiens
gaaagaacaggcgcaaaaagaaaccacgacgagcgaggacagagaaaaaggaaggcaaccccacccccagg

SEQ ID NO: 41342 - RNA, 82 nt, Homo sapiens
ggaagaggccccgaacaggagaaagaaggcggaacaccacaaggcaccgcaagagcaccaagcggaaaacgagacgaaggac

SEQ ID NO: 41343 - RNA, 76 nt, Homo sapiens
gcagcccagggagaaaaaacgcaggcaaagccgaaaggaggccaagaacacagaaacggaaacgaaaaagagaaaa

SEQ ID NO: 41344 - RNA, 85 nt, Homo sapiens
ccgcagagcagaccagcagagcagcagacgccgacaccccaggccacgagccccaggccacggcagcaggcccagcccccagcga

SEQ ID NO: 41345 - RNA, 75 nt, Homo sapiens
caaacagagagaaggaaccacccacgcaggcagcaaccaccgaaacgggcgaaaaagaagaacagcaaaacacga

SEQ ID NO: 41346 - RNA, 62 nt, Homo sapiens
gaagagcaaccccagaaggcaacgcgccgcaaaacagaacgcgaggagcaccggcccaggcg

SEQ ID NO: 41347 - RNA, 41 nt, Homo sapiens
cgccgagcgccgggcgacggcagagaacggaccccaccgac

SEQ ID NO: 41348 - RNA, 60 nt, Homo sapiens
ggcaaaaacgaaagcaacggagccaggagccaagaggacaccagaaaccagaagggacga

SEQ ID NO: 41349 - RNA, 84 nt, Homo sapiens
cgagacccgcaaccggagaacgccaagcgccgccacgacaagacagaagcccgggggagcggaggaagagaggacgagaggacg

SEQ ID NO: 41350 - RNA, 62 nt, Homo sapiens
aaccgacccagccagccaacaacaacagagcgacagaggcagagcccacagcgaaaaaagcc

SEQ ID NO: 41351 - RNA, 88 nt, Homo sapiens
ggaagaggcggcggcgaaaggaacggcgaaggcccacgggagaaaaccgggcgcaagggggcacccgaggaggaagagggcagggccc

SEQ ID NO: 41352 - RNA, 102 nt, Homo sapiens
caaggaaggccgagaagaagcaaagggcaaccagggaaacaggagaggcgggagagcagcagaaagcggaccacaggcggccagcgccggcgaagcagcaac

SEQ ID NO: 41353 - RNA, 81 nt, Homo sapiens
cgcacacaaacacacccagcacaaccaggagccgccggccaacacgaggacacgcggggggggaagagaaggcagaacgaa

SEQ ID NO: 41354 - RNA, 79 nt, Homo sapiens
agaggcccccgagccccccgagaagacccagacaaacagcgggagccggaggagaacaccggacccgaggcgcccggcc

SEQ ID NO: 41355 - RNA, 40 nt, Homo sapiens
caaggaacgggcgcagcgagagcggaaaaagggcccagac

SEQ ID NO: 41356 - RNA, 58 nt, Homo sapiens
gagggccacccgccccaaggacagggcagaccgccagcagcacagcaagccacagaga

SEQ ID NO: 41357 - RNA, 67 nt, Homo sapiens
gccgggccagaacacccgaggggaccagccacaggaggcggccgcacaaagaagcaggagacaacga

SEQ ID NO: 41358 - RNA, 78 nt, Homo sapiens
aagggcaggaggaggaggaggggcccggcggcggggaggaccaaaggacccaggagaggaaacagccccgcaggccac

SEQ ID NO: 41359 - RNA, 55 nt, Homo sapiens
acaaagagacaagccgagagaaagcaagcaaagacggagccaccaccaccccgag

SEQ ID NO: 41360 - RNA, 62 nt, Homo sapiens
gaggccgagggcaaggcgccagaccaagggagacggggcacgcccagagcaggccgccagcc

SEQ ID NO: 41361 - RNA, 61 nt, Homo sapiens
cagcgccagcagcggacaggcacagacaaccagggagccaggacaacgggcggccgcagcg

SEQ ID NO: 41362 - RNA, 70 nt, Homo sapiens
caagagaaacaccaaacaagacccgggccccgagcagccacgcgagaaaacaaacagagcaaaccgaccc

SEQ ID NO: 41363 - RNA, 79 nt, Homo sapiens
cagcagccggcccgggcgggcgcccgccggcacgccgccagccccgggggccacgagcggagagaacagaggagcgaaa

SEQ ID NO: 41364 - RNA, 79 nt, Homo sapiens
agaggccccccccgggacagagacagaggccgggaacccaacaagggagcaaacagagaaagaacccaaacacacagaa

SEQ ID NO: 41365 - RNA, 76 nt, Homo sapiens
caccccgccggacacgaacgaagggagccgccaccaaaagcagacggaaaacccacggggaagaccacaccccgag

SEQ ID NO: 41366 - RNA, 72 nt, Homo sapiens
cccagccggaggcgaccgaagagaccacccaagaagcaacacgagaaaaaggagacaggaaccaaaaagcaa

SEQ ID NO: 41367 - RNA, 80 nt, Homo sapiens
accaccaagaaaagaagagccggcgcacacaagagagaccagcccccaccaaagaggacccgaaggagacaaacgccccc

SEQ ID NO: 41368 - RNA, 72 nt, Homo sapiens
ggcacacagcagcaagagcccaaacgcggccaggccgagcacgggcacgcaggcagcggggggccgcaccag

SEQ ID NO: 41369 - RNA, 81 nt, Homo sapiens
cgggccagcacccggccgagacggcggcagcagcggcacagaaaccgaccagagggcaaaggggagacaggggggagggcc

SEQ ID NO: 41370 - RNA, 87 nt, Homo sapiens
caccaggcagagcgggacagccaggaggaagggcagcggcagagcccagccaaaacggacaagccaaggcacgagccaaagaaacaa

SEQ ID NO: 41371 - RNA, 72 nt, Homo sapiens
aaggcggaaaaggcgaagcacggcccaggacaaagagcaaaaggcaccggcccagagacagagaagagacac

SEQ ID NO: 41372 - RNA, 82 nt, Homo sapiens
cgggggagaaggccgagggccgggagcccgcaccgggccggcaggaggaggaagccaagaacgggagcgaagccacgcagcg

SEQ ID NO: 41373 - RNA, 67 nt, Homo sapiens
acagcagcgcaggcaaaaaacagggcaggcacccggccacgcccaacaaaccaaaaagagaaagaag

SEQ ID NO: 41374 - RNA, 93 nt, Homo sapiens
gaggacccgagccaggcggggacaggacggcggggcgagccaggacagaaaccaaggccgcgaacaacaggggccccgcacaagcgcagcaag

SEQ ID NO: 41375 - RNA, 77 nt, Homo sapiens
caccggcgagaacccaacaacccacagacagcacccagagcgaagcagccaagagaaacggcgaggaaagagaggag

SEQ ID NO: 41376 - RNA, 67 nt, Homo sapiens
gccgcggccggggcccgaccgcggggacccgccaagcaggggacagcacgagggcagcacacaacac

SEQ ID NO: 41377 - RNA, 82 nt, Homo sapiens
cgccgcggcccgcgaggccgagggggggcacccgaggaggaagagggcagggcccacggaaagaagggaaacccggggagaa

SEQ ID NO: 41378 - RNA, 61 nt, Homo sapiens
acccgccaccgggagcagacggcaagccaaggccaccgagccacaagaccacagcaccgac

SEQ ID NO: 41379 - RNA, 87 nt, Homo sapiens
cgggacccacggccagagccgggacgcgggaagaacgccgggagaggcggcggcagaacggaaaagcaggagaagcacccaccagcg

SEQ ID NO: 41380 - RNA, 59 nt, Homo sapiens
aggagccgaggaaagccagcgaaagccgaagccaaagaccgaccaagagcacagaggag

SEQ ID NO: 41381 - RNA, 74 nt, Homo sapiens
aacgcccgcgagggaaccgcagacaggcggagaacggaaaagcaccaggaagcagagaggaccgcagaagggaa

SEQ ID NO: 41382 - RNA, 82 nt, Homo sapiens
gcgcaccgcgacacgacccaagaacgccgcgggggaccgccccgcccggagcgaggacccgcggagcaggcccagaaagaac

SEQ ID NO: 41383 - RNA, 68 nt, Homo sapiens
gaggacagcgcagccaccgagacacaccgccaacggggcggcacacaaggagcgaagggcagggagaa

SEQ ID NO: 41384 - RNA, 79 nt, Homo sapiens
gagaacagccgaaaggcggggacgggccggcccgcggaagagaaaccgcaccagggacagcagaaacaaaagcgagcga

SEQ ID NO: 41385 - RNA, 82 nt, Homo sapiens
ccgcccccgaggcgcagaagggagaggacaccaggcagaaagagcccacaagacaaaaaagcagacggaaacaggcagaaga

SEQ ID NO: 41386 - RNA, 71 nt, Homo sapiens
ccaacaacaccgcgagacgaggaagaccgcaggaaagcaggaaggcaagaaagccaaggacgaaacccaca

SEQ ID NO: 41387 - RNA, 38 nt, Homo sapiens
gcgaacccccggaggccgccagacggaaggcacgaggg

SEQ ID NO: 41388 - RNA, 39 nt, Homo sapiens
ccagcacccacacccacaaggggcgaaacacaaccacgc

SEQ ID NO: 41389 - RNA, 75 nt, Homo sapiens
cacaccagacaacgaagagggcccagggcgggggcgggcacagcacgcacccgccccgcccaacagccggggggc

SEQ ID NO: 41390 - RNA, 48 nt, Homo sapiens
agaggggaagcaaagcaaggccagaacgcggagacggacaagaagcga

SEQ ID NO: 41391 - RNA, 105 nt, Homo sapiens
aacgccaggacaaaaacaaagcgcgcagaaagggcgaccaccaaaaaaacggacaacaacaaacagggggcgggagaaggccaacaccaaacaagagacaagaag

SEQ ID NO: 41392 - RNA, 75 nt, Homo sapiens
gacacgcggcccgaggcaacggccacagggacgagggcggaaaggggacgagggcagacaaacccggccggagca

SEQ ID NO: 41393 - RNA, 70 nt, Homo sapiens
cagcgacccccacgacagcccgccccccagaggcaggcccaacacaagcgggacggaagaggcccggcga

SEQ ID NO: 41394 - RNA, 80 nt, Homo sapiens
ccagaaaagaaaggggacaggccgaaagaccgcaaaggcaaccacgagaaaacggaaccgaaagcaagaggacaagaaga

SEQ ID NO: 41395 - RNA, 70 nt, Homo sapiens
ggacaggaaagggcacaaggaagaacggcgaggggacggggccgaaagggggcaaacagggacagaagaa

SEQ ID NO: 41396 - RNA, 69 nt, Homo sapiens
gacccggggaccgaaccccggcgaacagcaaggcacaagcacccaccaggagccggcggggaggggacc

SEQ ID NO: 41397 - RNA, 83 nt, Homo sapiens
gcaggaacaggcaagggcgaggaagcaggcacgcaagaagaagggcgcagcccagcccgaaagcagaacgacgccggcgagcg

SEQ ID NO: 41398 - RNA, 74 nt, Homo sapiens
cagagacgggcgccgcaccaggagcgaagagcgccgacaagggcaggacccgaggcgccagcagcagcaagacc

SEQ ID NO: 41399 - RNA, 79 nt, Homo sapiens
agagcaaagacccagaacaccaagcaaagaagaggagcacaacaggaccgaagaacgccggcacacaaaaagcgaaaaa

SEQ ID NO: 41400 - RNA, 70 nt, Homo sapiens
ccgcaggaagaagcgaagagacgagaaaacagcgagcccggacagaagcgaaaaacagaagcggacgagc

SEQ ID NO: 41401 - RNA, 66 nt, Homo sapiens
caaaagaagcacaccgcagagaaagcaagagacgcaaccgaacgcagagcggagaacggcggcaag

SEQ ID NO: 41402 - RNA, 55 nt, Homo sapiens
cagaccaggaaaccaggccaggcaagcgaacagcagaaaccagaaggcagcccag

SEQ ID NO: 41403 - RNA, 76 nt, Homo sapiens
ccgggaagggcaacacaggccaaggagaccccccgacaacagaagaacccaccgggggaagcaggcccaacgagag

SEQ ID NO: 41404 - RNA, 67 nt, Homo sapiens
aagcgacagccggccacacgcgaggaagggaaaaggccgaggcacagcgggaagaccgcaaagacga

SEQ ID NO: 41405 - RNA, 74 nt, Homo sapiens
cagcgacggggcgcgccggcccaggcgcacacggaaggggaagcgcaagaaagcacagagagccaaagaaagac

SEQ ID NO: 41406 - RNA, 81 nt, Homo sapiens
aaagccaagaggaggacagcgcacacagcaagcacgaggagaaaaaccagaggcgaagaaaccgccggcaacacaaagccg

SEQ ID NO: 41407 - RNA, 71 nt, Homo sapiens
aacaaacccccaagagaggaccgaaaaggaacgcccaagcaggagaaggagaggaggaagaagaggaaaag

SEQ ID NO: 41408 - RNA, 82 nt, Homo sapiens
gggggcacgacagcgcaaggaggccgcacccaaggccgcagacaaggcgcgacgagaaaccaaagaaaaaggaaacaaagga

SEQ ID NO: 41409 - RNA, 42 nt, Homo sapiens
ccccgagggcgggacacaggggcagagaggaaccgccacgag

SEQ ID NO: 41410 - RNA, 53 nt, Homo sapiens
acaaccacacccgagggcggccaccaagagccacaaacccagaaaagcgccag

SEQ ID NO: 41411 - RNA, 78 nt, Homo sapiens
aggagacagacgacgggaggaccagaaaaggggaaggaacaaaccaaagagcagaccccccggaaaaaaaagagaaac

SEQ ID NO: 41412 - RNA, 32 nt, Homo sapiens
aaccagacaacacgcagaggagccaccgcccc

SEQ ID NO: 41413 - RNA, 70 nt, Homo sapiens
cagaacgggaagaaagccaaacagacaggagacaaagggccgccgcaggcaccacaagccgaacagccag

SEQ ID NO: 41414 - RNA, 75 nt, Homo sapiens
gccagagcacaagaaagacaccccgagagcggccgagggaagaaaccagcgcaagccgaagaaaagaggaaagca

SEQ ID NO: 41415 - RNA, 73 nt, Homo sapiens
ccagccggggggccgccagggcagcgacacccagacccaccggaccaggcccacccagaagcaacagcccaac

SEQ ID NO: 41416 - RNA, 71 nt, Homo sapiens
cggcaacgagggcacagagggaagaaaagccaggggcagcagcaacagggaagagcaaggccagcagagcc

SEQ ID NO: 41417 - RNA, 73 nt, Homo sapiens
accggccccaccaaaaagaagaagagccaaggaaaacggccaccacgcccccgaacgacaaagcaacgagaca

SEQ ID NO: 41418 - RNA, 82 nt, Homo sapiens
gaccgggcccagcccgccgaagccgcgccagaacgaccccgagaggcgcccgccccgagagcaaggagacccagggcccacg

SEQ ID NO: 41419 - RNA, 63 nt, Homo sapiens
aggcccgggcgggacgcggaaaccgacagcgcagccagccgcaacgaaaaaaggcagcggaaa

SEQ ID NO: 41420 - RNA, 60 nt, Homo sapiens
cgaaggaggccagaagaccagaagcgacaacccagcgaggcccaagaaaacagaagaggg

SEQ ID NO: 41421 - RNA, 83 nt, Homo sapiens
cgcaggcgaggacggcggaccccgcggcgggaggagccgccccgagagggcaacagcaccgacccggaagcgagacaagccgc

SEQ ID NO: 41422 - RNA, 36 nt, Homo sapiens
agaaccaagcaacagaagcacagccacagccgcaag

SEQ ID NO: 41423 - RNA, 79 nt, Homo sapiens
cagcgcggagaccccagacccccagcgcggcacgaaagcgagaaccccgaacagaggagccaacagaacgacacgcaag

SEQ ID NO: 41424 - RNA, 71 nt, Homo sapiens
cgcacaggggcagggaaccgaaagacaaggaacgccccacaccacgagcccagccaagggagagacgaagg

SEQ ID NO: 41425 - RNA, 52 nt, Homo sapiens
gcagggcgcccccgacaagaggaaaagggagaaccaacaaagagggcaccac

SEQ ID NO: 41426 - RNA, 78 nt, Homo sapiens
ggcgccgcgccccggcgcggaacccgcccagcggccgaggccccgagagcagggaccgggccaagacgagcgacagga

SEQ ID NO: 41427 - RNA, 67 nt, Homo sapiens
caagccggacagaggagcagagaagcaaagaacacgagccagccaaacgagaggcccacgaacagaa

SEQ ID NO: 41428 - RNA, 62 nt, Homo sapiens
cagaacacgcgcgggaccccgggcacggcgcgcgggagagagacagcaaagccccacccaga

SEQ ID NO: 41429 - RNA, 67 nt, Homo sapiens
cgacaagagagcccccaaacagcaagcgaaacccgaacaaagaagggagaagaaggaaggagagacg

SEQ ID NO: 41430 - RNA, 101 nt, Homo sapiens
cggcagggggaggggaggggagggggcgcggggaacgggagcggagagaagcaaacaggggcaggaaaacccaaaacgaaaaacaaagccagggcgggaag

SEQ ID NO: 41431 - RNA, 74 nt, Homo sapiens
gaagagaccaacacagagcagcggaaccagacaggcaggaaaagacaggagcagaagcacaagcagaggaaggg

SEQ ID NO: 41432 - RNA, 75 nt, Homo sapiens
cccccccacgccacacagggaaggcacacagcagggcccaaacccgagcccgcaagcagagaccgggagcaaaga

SEQ ID NO: 41433 - RNA, 76 nt, Homo sapiens
gcacagcagcaccacagagcaaaaaaagacagacgcagccgaggaaggggcacccacagccaacccaacaagaggg

SEQ ID NO: 41434 - RNA, 81 nt, Homo sapiens
aaggaccaagaaccaggaagaagaccaaaggacaaaaaagacggagagagaacaggccaacgggagcagggcaagaagcca

SEQ ID NO: 41435 - RNA, 84 nt, Homo sapiens
ggcgggggaggcgagcgcgccgcccggagccgcgcacacgccaagaaggacaagaaggggagaagaaaagaaacggcaaaagaa

SEQ ID NO: 41436 - RNA, 76 nt, Homo sapiens
ggcccagggaggcaggggcagaaacagagaaggaacagacagcagcgcccaaggacaagccaagcggcccaaaacc

SEQ ID NO: 41437 - RNA, 72 nt, Homo sapiens
gccggcccaggcgcacacggaaggagccaccaaagaacaacaagagccgcagaaggcagcagggaacggaca

SEQ ID NO: 41438 - RNA, 77 nt, Homo sapiens
acgagcgaaggccagcggcaccgacagggacaccaccgaaccccagcccaagccgcgcccggagaggagccaagccc

SEQ ID NO: 41439 - RNA, 72 nt, Homo sapiens
gccggcgaaggaggaggcggccgggcgggacaagggcgcaccggggcgcagcgagggaggacaacggggcgg

SEQ ID NO: 41440 - RNA, 58 nt, Homo sapiens
agaaccaagcagacagccaacaaaagaacaccggaagaacagacacacagagccacgg

SEQ ID NO: 41441 - RNA, 70 nt, Homo sapiens
cccgcgggggacgaacgacagaggcgagaccaaagccaacaacaggccagaacaagaagcacaaaccacg

SEQ ID NO: 41442 - RNA, 67 nt, Homo sapiens
cgacgggacacaaaaagcgggacaaaaaccgggaaagaccagcaccgcgacaagaagagaaagaaca

SEQ ID NO: 41443 - RNA, 100 nt, Homo sapiens
ggagccgcaggagccccgggcggcggacggcgcccgggcgacggggaagaccgcaggaaagcaggaaggcaagaaagccaaggacgaaacccacacggag

SEQ ID NO: 41444 - RNA, 50 nt, Homo sapiens
agcaaacacaaaagggcgcaggcgggagcaccgagggccagagcccagaa

SEQ ID NO: 41445 - RNA, 68 nt, Homo sapiens
gggcaccgacccacgaacaacgggaaaagagaaagccagaacgcccagcagcccagaacgaaccagcc

SEQ ID NO: 41446 - RNA, 75 nt, Homo sapiens
agccagagggacacgcgggcacggccggagggaaaggaaggagacgccccgacggaaaacagaccacagaggagg

SEQ ID NO: 41447 - RNA, 52 nt, Homo sapiens
ggcccgaacgaagcgccaaacaagacggaaaagggaggaagcaccgaggaga

SEQ ID NO: 41448 - RNA, 74 nt, Homo sapiens
ccgagaacgccaccgaggaccgagcccagggcgacggcagcgaaccggcgcaggccagcggaagccagaaagcc

SEQ ID NO: 41449 - RNA, 78 nt, Homo sapiens
cccaagcggccccccaccacaagagagaaagacagcaaagaaaaggagaagaaaggaaaaaaacaaccccgggcaccc

SEQ ID NO: 41450 - RNA, 66 nt, Homo sapiens
cccggagcgcgaggacccggccacaaaagccaccaacgaaaggagaagagaacccgagcaagaagg

SEQ ID NO: 41451 - RNA, 78 nt, Homo sapiens
ggcccagcacggggcccgaggcagccaggaggccgccccaccggccccacagggggaacgcccacccaagccaaggag

SEQ ID NO: 41452 - RNA, 74 nt, Homo sapiens
agccgagagaaggcgggaaggagaccggaaaccgagagaaacgaagacgaagaaacagccgcacacagaagaaa

SEQ ID NO: 41453 - RNA, 79 nt, Homo sapiens
ccccggcaccgacccggaccccgcggagcccgcccgaggaaccaaccagaggcggggccaaagcacagaacaaacccag

SEQ ID NO: 41454 - RNA, 79 nt, Homo sapiens
gaacaacccccaaagagagacacaagcgggacagcccagccaggcccagagaggaggaacaggagcaccacgagagagg

SEQ ID NO: 41455 - RNA, 96 nt, Homo sapiens
cccccggccggaaaagacagccagcaccacgcaggcccagagacggaaagacaaagacagaaaaacaccgcccaaggagcaagacccaaaaccgaa

SEQ ID NO: 41456 - RNA, 80 nt, Homo sapiens
ggccaccggccaccaaacgcaccacgggaaagaccacagcaagaccacgcccccagccgggggaccaggccgaacgaccc

SEQ ID NO: 41457 - RNA, 59 nt, Homo sapiens
gcaaagaagaaccaaaaaagaccaagccccagagccaaaagaacaacacggaggaaacc

SEQ ID NO: 41458 - RNA, 87 nt, Homo sapiens
caggccgcgagcagcggacgccggccgccgcaggagggaagaacaacgccgagagacgaagggaacgcacgagaggccacacaaaac

SEQ ID NO: 41459 - RNA, 54 nt, Homo sapiens
ccaggacccgccaccaaaccgcccgagggaccaggccagcaacagaagaaagca

SEQ ID NO: 41460 - RNA, 85 nt, Homo sapiens
gggcggggcgaccccaaaggcaccagaagacccaaaacggaaggcgcgcaagaggcccgacaacaagccaaaacgcaccaaaggc

SEQ ID NO: 41461 - RNA, 74 nt, Homo sapiens
aaacacggcaaaaagaaaaaccagcgaagcacagagagaaaaggaacagccgaagccaggggcaagcgaaacca

SEQ ID NO: 41462 - RNA, 55 nt, Homo sapiens
aaggcagcagcgaccagaaagaggagcaacagcccagcgacccaacagagacccg

SEQ ID NO: 41463 - RNA, 75 nt, Homo sapiens
ggggcaggggcgggcgcagcgggaccgaagcccccaacaggcagagaaacggggaacccggaggcaagacacgag

SEQ ID NO: 41464 - RNA, 77 nt, Homo sapiens
ggcacgccaacccacacaccgcaccaagccacgcccccgagagccgccaacacccggccgagggcacacacaacggg

SEQ ID NO: 41465 - RNA, 70 nt, Homo sapiens
agccgggaaaggccggaccggcaggagaacggaggagaaaaagaacgggaacaagagagggggccacagg

SEQ ID NO: 41466 - RNA, 89 nt, Homo sapiens
gacggaccgagaccggaccgagagcggaccgagagcgcgaaacgcacgagaagcgagaggcccggccagagaccgccgggggagcaagg

SEQ ID NO: 41467 - RNA, 80 nt, Homo sapiens
gcagccgccaccccgcgcagagccgggcacacgggccgcagcccaccacagcccccaggaacgaagaccgaagaccccag

SEQ ID NO: 41468 - RNA, 82 nt, Homo sapiens
agacgggacaagacagggcaaaggacagaccagggcacgcagacgcagcaggagggaagcgcgcagacgggcaggcgcgcgg

SEQ ID NO: 41469 - RNA, 75 nt, Homo sapiens
cagcagcacaacaacgcaaccacagaaacaagggacagggagcgggaaacgcacaacagagaacagaaaagaccc

SEQ ID NO: 41470 - RNA, 124 nt, Homo sapiens
cagaagcagcgcaggccgaggagacggcggcccgaggagggagaggacacggcccacccggcggcagagaggcgagacacggaacggcgaagaagcgcacgggcccggcgccaccacccgccga

SEQ ID NO: 41471 - RNA, 74 nt, Homo sapiens
aggacacagaaccgaggccagggcacccccgagaggacaacaggcacggaaggccccgccaccggggcacgccg

SEQ ID NO: 41472 - RNA, 72 nt, Homo sapiens
gcacagaggaacacaccccaaaacggcccacggcgaggccaggggccaaaacaacgccggagcccccagaaa

SEQ ID NO: 41473 - RNA, 77 nt, Homo sapiens
ccccggacgcgagcccgcccccgacgacccggcaccggacgggccccgcaggggcgcacagccagcgcacggggaac

SEQ ID NO: 41474 - RNA, 87 nt, Homo sapiens
caccaccacccacacccaccaacaacaccacaaaaccacagccaaggaaaagacgagggaagaagaccgacaacaaccaggggaagg

SEQ ID NO: 41475 - RNA, 82 nt, Homo sapiens
agcaaggcggaaggagaagaggccgccgcgccaacgcgagcggcgacggcgaagcgggaaggcagagcagcacgcgaagaga

SEQ ID NO: 41476 - RNA, 68 nt, Homo sapiens
ccagacacacacacccaacccaaaccaaggaaaaccgccgccggggccagcaagaacaaaaagcacca

SEQ ID NO: 41477 - RNA, 113 nt, Homo sapiens
gcccaagcagcagcgccggagcccgagggacggggacggagagaacacgagcccacagagcccccgcccacagcagggcaagcgggcgaagacagggcgcggcgagccggacc

SEQ ID NO: 41478 - RNA, 74 nt, Homo sapiens
acccccaccggccacgggagaaggcggccacagggcgagacgggacacccccggaacacaggcccaggcaggca

SEQ ID NO: 41479 - RNA, 65 nt, Homo sapiens
aagcccacgacagcggcaaagaaggaccaagagagaacacaagcggccgcgcggaaagacacggc

SEQ ID NO: 41480 - RNA, 63 nt, Homo sapiens
ggcaggaaagcagaacgggaagggacgcgaagaaccccaaggacaagaaggaagcgacgaaaa

SEQ ID NO: 41481 - RNA, 82 nt, Homo sapiens
acccccgaacccccagcccaaacccggaaacccagcggcccagccggcccgggaccgggagcccgggaccgggagccggggg

SEQ ID NO: 41482 - RNA, 78 nt, Homo sapiens
cacgccgccgagcccgccgccagggaacggggcgcgaggagggggcagcgcacccccggagaaggccccccgcccggc

SEQ ID NO: 41483 - RNA, 67 nt, Homo sapiens
gagcaaaaggaagcaacccagaagagcgaaggacccagcgaggagggaccagcgaagcgcggcaaac

SEQ ID NO: 41484 - RNA, 50 nt, Homo sapiens
ccaccgccggccacagcgcagaaggagaaaagcaacgagggggaaccaag

SEQ ID NO: 41485 - RNA, 58 nt, Homo sapiens
caagaaaaaggaagaggacagcaagcggaaagaagagaaccaacgaacaccgaagaga

SEQ ID NO: 41486 - RNA, 83 nt, Homo sapiens
gacacaccaagggaaacgaagaagaggaagccaccaccgcccgaacgcgcggacgcgggccgcgcaggccgcacagcagcgca

SEQ ID NO: 41487 - RNA, 87 nt, Homo sapiens
agaggaaggccaagcgagggccaagacgaagacaggcccgccccaccgggggccaccccagggaggagaagagggacccagaaggcg

SEQ ID NO: 41488 - RNA, 77 nt, Homo sapiens
cacagcccgcagccccgccagccacccccaggacaagaagacacaaggcagaagcccaggcgagagcccgccccccg

SEQ ID NO: 41489 - RNA, 61 nt, Homo sapiens
cgggcccacacaacccaggcaaccaacagggggccgagacaacaagaaggggaggaacaaa

SEQ ID NO: 41490 - RNA, 81 nt, Homo sapiens
ggggccgacccgcagcgcccggccccagccccaccggaaccgcacgcaaagaaaccccaaagccagcaagaccacagcagc

SEQ ID NO: 41491 - RNA, 75 nt, Homo sapiens
cccgccccggaccgcggaggcaccgagaacggacgcaagcggggaggggaagggcggagaacggaaaagcaccag

SEQ ID NO: 41492 - RNA, 72 nt, Homo sapiens
ccaagggccaaggcggcggggagacgagaagaagagaacacagcacggggaagacacgacgaaaacaggcag

SEQ ID NO: 41493 - RNA, 72 nt, Homo sapiens
ccagacaaaagaccgggggaggaaagaagggggcgaggggacggaaagagagccgcagcgcagaacaaggga

SEQ ID NO: 41494 - RNA, 62 nt, Homo sapiens
accggaccgagagcggaccgagagcgcgaaacgcacgagaagaccagaggggaggccgcgag

SEQ ID NO: 41495 - RNA, 71 nt, Homo sapiens
gaggaaaaaggcggggagcgcagcagcccggaagcgcgaggaccacgccgcgaggcaaacgcaagggaaaa

SEQ ID NO: 41496 - RNA, 72 nt, Homo sapiens
cgacagcaaccaacggcgcggaagggcagcgacacccagacccaccggaccaggcccacccagaagcaacag

SEQ ID NO: 41497 - RNA, 74 nt, Homo sapiens
ccaggagccggggcggcgcaggaggagccgaggcgagccaacagcacaggagggcgcaaggaagcaagagcacg

SEQ ID NO: 41498 - RNA, 34 nt, Homo sapiens
gagggagcgcaggggaagacaagcaacgaaagcc

SEQ ID NO: 41499 - RNA, 82 nt, Homo sapiens
cggggacgcacggaccaaaaacccgcaacagcccccgcccaagggaaggaacaaagcagagaaaccaaaaggccagacgaac

SEQ ID NO: 41500 - RNA, 36 nt, Homo sapiens
caacaggcggacaggagaacagaaccaagggaaagc

SEQ ID NO: 41501 - RNA, 56 nt, Homo sapiens
agaaaggggaaccccggagaaaaggccaagaaggcagggcggagaacggaaaagca

SEQ ID NO: 41502 - RNA, 72 nt, Homo sapiens
ggcgcgcagcgacagcgagacaccagaccccgccaaacaaaagcagaacaaagcaggaaccagacacaaaga

SEQ ID NO: 41503 - RNA, 70 nt, Homo sapiens
ggccacgcgggaccaccggcaccaccaaagaggcacccagggcggagaacggaaaagcaccaggaagcag

SEQ ID NO: 41504 - RNA, 81 nt, Homo sapiens
gacagccagcacaccccgcgagcaaggaccgccagcagcagccgaaaacgcacaagaccaacagaccagcgcagcgcagcg

SEQ ID NO: 41505 - RNA, 81 nt, Homo sapiens
gcggcgcgcgaggcccgagggacaacacgcagcgaaggaggaggcggaggagaggaaaacccaaggagcgcgacaggaaag

SEQ ID NO: 41506 - RNA, 57 nt, Homo sapiens
ggcagaggcacagcgcagggacggaaaaggcgcacacgacccggagaaccccacgaa

SEQ ID NO: 41507 - RNA, 42 nt, Homo sapiens
ggacgacaggccgggagcgcagaaccggccgaaaagcacaaa

SEQ ID NO: 41508 - RNA, 72 nt, Homo sapiens
ggaggcagcaagacaggcaaagagccagaagaaagggacagaggacccaaagacaacggacgaagcggaccg

SEQ ID NO: 41509 - RNA, 71 nt, Homo sapiens
gaagaaaccacggggccacccacagacgcccgacccacaccagcggccgaggaaggcgggggaggagacag

SEQ ID NO: 41510 - RNA, 67 nt, Homo sapiens
gggcgggaggcgcggggccggggccgcgcgcccacccaacccgagaagagaccgacccaaacccacc

SEQ ID NO: 41511 - RNA, 81 nt, Homo sapiens
gcaggggcgggcagcgggcccacggaccacgcagggcacaccgaccggcggcagagggacgccggaaaacagcggaagagg

SEQ ID NO: 41512 - RNA, 71 nt, Homo sapiens
gagggcacagagagcgaaggaccaagggaaacacagcagaaagggccccagcgagagaacagccgggaccg

SEQ ID NO: 41513 - RNA, 78 nt, Homo sapiens
cccagccccgagagcgggacacaggcacagaagcaaagagaaaggcaaaagagacggacagcaggcagacggccggcg

SEQ ID NO: 41514 - RNA, 71 nt, Homo sapiens
gccggagagccaggacaccgaaaagcaggacaaggggagacggggacgcaggacaggcggagagggcacaa

SEQ ID NO: 41515 - RNA, 67 nt, Homo sapiens
cccggcacccgccaccgagaggaggagcaaagacaagaccaacagccacgccaaaagaaaacgacac

SEQ ID NO: 41516 - RNA, 40 nt, Homo sapiens
agagaaggaggcgcgagaccaaacagagcagaacgaaaca

SEQ ID NO: 41517 - RNA, 74 nt, Homo sapiens
gcaaggaccgaaaggcaacaaagaaggagcgaagggcaaaagcacaaaccaggaccgagcaagggaccccaagg

SEQ ID NO: 41518 - RNA, 71 nt, Homo sapiens
accccgcccggggagaagcacagccacagcaacccccagccacaacgcgaaccgggcggacgaaggaggcg

SEQ ID NO: 41519 - RNA, 78 nt, Homo sapiens
aaggggaaggaggggcagcggagaaccggggcaagagacggcagacaaacacagccgagagaaggcaggcgacgggca

SEQ ID NO: 41520 - RNA, 67 nt, Homo sapiens
ggcagggccggggaagcaccaaaggccggaggcaccacaacaccgcagaaccggccgaaaagcacaa

SEQ ID NO: 41521 - RNA, 48 nt, Homo sapiens
ccaaccccacggaaaagaaaaccccgccacagaaaggagcgaacgcgg

SEQ ID NO: 41522 - RNA, 83 nt, Homo sapiens
gggaagcggccaccgacacgcagcagcggccaggcgaggaaaaggcagagccgaaaaggagcgcgagaccaaacagaaggaga

SEQ ID NO: 41523 - RNA, 74 nt, Homo sapiens
cccagcaagagaaaagagcagacgccacggggccgcgccaagccagagggccagcggaccaaagggagccacag

SEQ ID NO: 41524 - RNA, 67 nt, Homo sapiens
gcgaaagagccgagcggccccccaccacgcgggcaggagaaacaccccagacaacccaagaaaaggc

SEQ ID NO: 41525 - RNA, 78 nt, Homo sapiens
gcagcagacccaccaagaacgaggccaggcgaggagagcgaacaaccccagaagagacacgcagcggccgaggcaggg

SEQ ID NO: 41526 - RNA, 60 nt, Homo sapiens
cccccagggggaacgacacaacaagccggaagggaagcagcccgagaaaggaggagaaac

SEQ ID NO: 41527 - RNA, 62 nt, Homo sapiens
gagcggggggacgcgccaggcacagcagcaggggcagagagaagagcacacagaaggccagg

SEQ ID NO: 41528 - RNA, 83 nt, Homo sapiens
cgcgccggcaggccggcccggggcgagccccaggaggccgagcccgaaacaaccccaccggccccccccccaccagcccagcc

SEQ ID NO: 41529 - RNA, 77 nt, Homo sapiens
aaaggcggcgccgaggagcgggacaacccaggagcagacagagaagcgcgcagcaggccggagagacacagggccgc

SEQ ID NO: 41530 - RNA, 67 nt, Homo sapiens
agacgaacaaacagcaagaaagaccacaagaccaaacaaaccaggggagggaaacgagaaaaacgac

SEQ ID NO: 41531 - RNA, 76 nt, Homo sapiens
ccagagcgccaagcagcaaaggagagggcaccgaaggcgcgaaggacgaggacgcggagacggagccacaaggaga

SEQ ID NO: 41532 - RNA, 74 nt, Homo sapiens
ccaaggaaaacggggcagaggggggagaaggaagagggcagcgcaagccacaggaacgagccacgagaagcccc

SEQ ID NO: 41533 - RNA, 86 nt, Homo sapiens
aagggaaggccaagggaaaacccggaggcgcccaagccccacccgggcggccccgcgccccccagaggagaacgcagaaagccgaa

SEQ ID NO: 41534 - RNA, 75 nt, Homo sapiens
agcagcagaagccgcaacaggaaagcagcccgaaaaagacgcgagaagccacacggccaagacaaggccgagacc

SEQ ID NO: 41535 - RNA, 39 nt, Homo sapiens
gggccgccgggaagagggaggagacggaagggaccagca

SEQ ID NO: 41536 - RNA, 71 nt, Homo sapiens
acccggaggaggaagaagaaggaagccaaagaaggcaggaaggaagggaacacggacgacgagacacgacc

SEQ ID NO: 41537 - RNA, 70 nt, Homo sapiens
ccacgcaggaaaacagagaaccaagcggcaaagcaccgaacgaccgaaacaaggaccccccgggagaaga

SEQ ID NO: 41538 - RNA, 36 nt, Homo sapiens
cccggaccggggggagacccggaaggacacagacaa

SEQ ID NO: 41539 - RNA, 62 nt, Homo sapiens
cagcaccggcccaaggccacaccggacacgaggacgcacagaagggacgaacagcggggacg

SEQ ID NO: 41540 - RNA, 81 nt, Homo sapiens
acaggagaagcggagagcgaggagaggagcgccccaccaagagccgcgcgcccagccgcgacaacaggcacaaagagagaa

SEQ ID NO: 41541 - RNA, 74 nt, Homo sapiens
gcggccgcgacgcaggcgcacggagacccgccggcaaggccgggaagcaccaccgacacaggacccggccgcga

SEQ ID NO: 41542 - RNA, 63 nt, Homo sapiens
gagcccgccgccgccgccaccacccacccggacacaggacggaccagcgggggagacacgcag

SEQ ID NO: 41543 - RNA, 77 nt, Homo sapiens
ccggcacgccaccgacaagcaagccgaagagaaaggcgaacagccaaagaagagcagaagcaaggcgaagcagagaa

SEQ ID NO: 41544 - RNA, 67 nt, Homo sapiens
aaacaggagcccagccccggagacccccgaggaacccggcccagcggaagcaaggccaaccggccac

SEQ ID NO: 41545 - RNA, 58 nt, Homo sapiens
cgccccaacaaagggccggccgcccccaggggccaagccccaccgggcgcccccgcgc

SEQ ID NO: 41546 - RNA, 85 nt, Homo sapiens
gaggagagcacgacggaccaagacgagcccagcgcaaccccaagcgcccaaagaccagcccaccgcacccagggaaaaaacagca

SEQ ID NO: 41547 - RNA, 64 nt, Homo sapiens
gacaccagagacccgcacagcaacaaagcccacaggaacagagcgcgaacggagaacggggaaa

SEQ ID NO: 41548 - RNA, 50 nt, Homo sapiens
cagccggaacgccccaaaaaaggccaggaaaacccgaagaagccaccaaa

SEQ ID NO: 41549 - RNA, 80 nt, Homo sapiens
gaacagaaacaccaggaagggagaacggagacagacccagcacggaccccccccccagccgggcgaggccccgaaacgca

SEQ ID NO: 41550 - RNA, 83 nt, Homo sapiens
ccaagagcagcccacaggggggccgacacaagagcgcgagaccaacaggaagcagccgacacgagcggcaaaaacagcgaaag

SEQ ID NO: 41551 - RNA, 82 nt, Homo sapiens
agacgccaggaccccggaagccagaaaggaagagagaagggcacagaccaagacaacgaaccccggccaggacaggccccca

SEQ ID NO: 41552 - RNA, 73 nt, Homo sapiens
gacaaggccaagaccgccagcaaaggaagacgagacaggaagggaaggggcggagacgggcggaacgcaggag

SEQ ID NO: 41553 - RNA, 85 nt, Homo sapiens
gagccgacggagccggaggcgggagccgcggcggccgggagaccacagcagacacagagacgggcggacacaggccgacaggacc

SEQ ID NO: 41554 - RNA, 82 nt, Homo sapiens
caagcaaaaggaagacaaccgccccagaaagcgaaagcgaaagaggcgccggcgcggacccggacacaaggcgggcggcgac

SEQ ID NO: 41555 - RNA, 82 nt, Homo sapiens
gccaccagcagccacaacagacagaaagcccacgccaggaggcaggcgccaccgggcgcacaacaaaggcgcccccgaacca

SEQ ID NO: 41556 - RNA, 71 nt, Homo sapiens
gcggagcgacgccgacggggcggagaacggaaaagcaccaggaagcagagaggaccgcagaagggaaggag

SEQ ID NO: 41557 - RNA, 80 nt, Homo sapiens
acacgcgcgaaaaagcgcagagaagaaaaaagaaaaggaagcacacgaacagagacggcaaaaacagagaggaccgagcc

SEQ ID NO: 41558 - RNA, 63 nt, Homo sapiens
aaaacccccagaagacgacaccgaccaggacgggaaggaggacaggaccacaaccgaagaagg

SEQ ID NO: 41559 - RNA, 55 nt, Homo sapiens
cggcgcagcggccccggccaggcgccaagcccacgggcgcaccaacggagagcca

SEQ ID NO: 41560 - RNA, 64 nt, Homo sapiens
ccgcggagagcccaaacaccaccaccaaggccagagggaaccggaagacaaaaaaacacacagg

SEQ ID NO: 41561 - RNA, 52 nt, Homo sapiens
aaggcaacggcagcagcagaggcagcagcgccccgagccccggcggcaacac

SEQ ID NO: 41562 - RNA, 53 nt, Homo sapiens
caaagcgacaagagacagcagacccaagaccgcagcgggcaggagaagacgag

SEQ ID NO: 41563 - RNA, 73 nt, Homo sapiens
ccccggcccgacaggagcacaggcgcgaacggcggaggcaaaaaaggagaaagaacaccaagcagagggaaga

SEQ ID NO: 41564 - RNA, 71 nt, Homo sapiens
caacaggcagcagcgggccccgccaccggcacaccgaagggagacgggacgcgccagcccacaagacacca

SEQ ID NO: 41565 - RNA, 70 nt, Homo sapiens
gccacgaggcaaccagcaagcgaaggaggaccagacaagaagagaagggcgaagagaaacaaagaagaga

SEQ ID NO: 41566 - RNA, 82 nt, Homo sapiens
gagaggacggagcgccaggaggccccccaagccggccaaccccccgcaccaaagcacgcccaggagagaggaccggaaaacc

SEQ ID NO: 41567 - RNA, 79 nt, Homo sapiens
cacagcaagcaggcacggagaaggcagccacaaggaagaccggggcgcggcaagccaagaccgaagacccaccccaagc

SEQ ID NO: 41568 - RNA, 81 nt, Homo sapiens
ccgccgcgccccgcggggccagggccgcacagcacaggccgagccgccggccaacgcccagaggagccaccggcccaggcg

SEQ ID NO: 41569 - RNA, 66 nt, Homo sapiens
cgcacccaggggacagaagccccagcagggaccgggaggacggggaaggccgcccagcggccaggg

SEQ ID NO: 41570 - RNA, 78 nt, Homo sapiens
aagaccagcaaagcagcgggagaaaacagagggaaacagggagcagaacagagaacgaggaccgcggccgccagaagg

SEQ ID NO: 41571 - RNA, 87 nt, Homo sapiens
gcagcacccgccaccgcgccggccgcccgcacgccgccggaaacaaagccagaccgccgaggggggacgaacccaggagggaaaccg

SEQ ID NO: 41572 - RNA, 74 nt, Homo sapiens
cgccacccacagcagcccgcgagaaagcacagcggagagagagaccggacagaggggcgaaacgcaccagccgc

SEQ ID NO: 41573 - RNA, 68 nt, Homo sapiens
cgagaaccccgacccaccagacaagggagcagcggcaagaggaggacaggcggcgcaaccgaccccag

SEQ ID NO: 41574 - RNA, 75 nt, Homo sapiens
aggcgagagcagcaaggaaaaccaggaccagaggccagcccacagcagaagagggcaaacgccagcgggggcagg

SEQ ID NO: 41575 - RNA, 71 nt, Homo sapiens
ggccacccggcccccggcaccaggccgaaaacgaagcagaggaacaacaagagagcaagcgagacacgccc

SEQ ID NO: 41576 - RNA, 83 nt, Homo sapiens
gagccccgcgcagccgccggcgcgccgccaggaccagggccaagccaggaccccagacgagcagacaagcggagaacaaaccc

SEQ ID NO: 41577 - RNA, 75 nt, Homo sapiens
ggcaccggcgggcaaccagcgggcccggccgccacccgggaaagacaggccgacagcggcaagccccaaggccac

SEQ ID NO: 41578 - RNA, 80 nt, Homo sapiens
aacgggacaagcggggcaaccggacgagcggggcaaccgaccggcgcggagggggcccaagaaagaggaaaagggaaaca

SEQ ID NO: 41579 - RNA, 72 nt, Homo sapiens
aaccaagcaagaacagcaaaagaaagccacacacacccgcccccgaaacacagggcacccacagaggcaacg

SEQ ID NO: 41580 - RNA, 54 nt, Homo sapiens
cgggagcaaccgaagacaagaaaagaggacgggcgaaaacacgccgagagcggc

SEQ ID NO: 41581 - RNA, 111 nt, Homo sapiens
gaccaagaaggacaggggccgcagccaaggaaggaggccgcaaacagacaggaagagggaagccaccgcaaaaggggacgcaacggccacagccaagggacaccaaagccg

SEQ ID NO: 41582 - RNA, 71 nt, Homo sapiens
gccgccgcgggcgccagaaggaagaggcggacggaggagcaggcgagaagagaaggaaccgcgcgcgcgac

SEQ ID NO: 41583 - RNA, 74 nt, Homo sapiens
cccggacgcgcggcggaggggccgcccgcggagccaggccagggagaccaagcaacacagcaacagacacaggg

SEQ ID NO: 41584 - RNA, 37 nt, Homo sapiens
cccggaagggggaacgagagcggccaggcggaggcag

SEQ ID NO: 41585 - RNA, 105 nt, Homo sapiens
cggcaggcgaagccccggagaaccacccggaggagacggggcagacaacggagcccggggagacgagcgccaaagacagaagcaagcagaaaagagcaacaccgg

SEQ ID NO: 41586 - RNA, 79 nt, Homo sapiens
ggcgcgaggagaacggcggggggacgccacacagcacaacacaacacgccccgaagggagacggacggaacgcggcgcg

SEQ ID NO: 41587 - RNA, 75 nt, Homo sapiens
cggagacaaaaacggcccggagaggaggcagaagaaggaacgaccgaggaaggagaaacagagcaagaggaagac

SEQ ID NO: 41588 - RNA, 73 nt, Homo sapiens
gcaccaggccaccacagaaacaaaagcaacaaagagggaaacaaccgaaggcagcaagagcagacgacaaaac

SEQ ID NO: 41589 - RNA, 69 nt, Homo sapiens
cagcaaagcccacaggcaagacaagagcacacagggcacgagggggaacagagcccggaaaaggggacg

SEQ ID NO: 41590 - RNA, 98 nt, Homo sapiens
gccccgcgccccggaaacgcgcacggcgccaccccacaaagggacgcggcacagaacgaagaagaaagcagaagcaagagaaaaaagaaacaccgaga

SEQ ID NO: 41591 - RNA, 69 nt, Homo sapiens
agcagacacggaaaacgggaagagacaacgaagaaaggagcacaaaagaacaaacacacgagccaaaag

SEQ ID NO: 41592 - RNA, 78 nt, Homo sapiens
ccgggggggcaagcagaccccaggaccagacacggccggacaggccggaagaaacgcggaccgcggagggccggagag

SEQ ID NO: 41593 - RNA, 43 nt, Homo sapiens
caacacccagagacgaaagaaagaaccaagagggagacaaggg

SEQ ID NO: 41594 - RNA, 89 nt, Homo sapiens
ggacaggcggcggcggaagagggccgggggcgcggccgcgcgccgccggcgaaggaggaggcggccgggcccgagagagaaagggaaag

SEQ ID NO: 41595 - RNA, 96 nt, Homo sapiens
gggaaggccgagaagccggaagcaagggggccggagcagagcaaggagacaggacaagagagggcggcagaaggaacaccgagaaaccgcacaccg

SEQ ID NO: 41596 - RNA, 59 nt, Homo sapiens
cggccgagacggcggcagcagcggcacagaagacgaccccgacgcaggccaggagccgc

SEQ ID NO: 41597 - RNA, 71 nt, Homo sapiens
cccaacacaggaggaggagcaagaagaacccacagggagcaggcccgagcccaagcaagccacaagcccgg

SEQ ID NO: 41598 - RNA, 57 nt, Homo sapiens
cgggaaaggaagcgcacaggaagccggaaacgggcacacggcacggacagggcggga

SEQ ID NO: 41599 - RNA, 77 nt, Homo sapiens
ggcaaggccaccacgccccgaaaaggcaccgggggaggccgcagggcaccaccgcaacagccaggaggcggaggccc

SEQ ID NO: 41600 - RNA, 80 nt, Homo sapiens
aaaccccaggccaagcagccaccagcagcccccagagcgggaccacaggccggaaaccccccggaaggggaggaggcggg

SEQ ID NO: 41601 - RNA, 70 nt, Homo sapiens
gagacagcaggccccagcacgacaaacaggggaagcagggcgacccggggcccacagagccaggccggca

SEQ ID NO: 41602 - RNA, 77 nt, Homo sapiens
cgcccccccaccgcgggcgccaccagggaaccccggcccacggcgcagccgccgggaggcccagcccccgcgcggcc

SEQ ID NO: 41603 - RNA, 54 nt, Homo sapiens
cacggagagaaaggacccgaaggaaggccacacagaaggggaccaacagggcgg

SEQ ID NO: 41604 - RNA, 57 nt, Homo sapiens
cggccgggagcgcgccccccaccccgagacagaggcaagaaagacacaaagacgagc

SEQ ID NO: 41605 - RNA, 53 nt, Homo sapiens
ccgccccgaccgccgaacaaggcaacgcgcccaagaggacagcgccagaaagc

SEQ ID NO: 41606 - RNA, 71 nt, Homo sapiens
acacgacggacaacggacagcagaccacagcccggcaggcccaaaaacccaaagggacagaagcaccccgc

SEQ ID NO: 41607 - RNA, 78 nt, Homo sapiens
ggacccagagcagacacaccccagagggcgcaagcagagaaaaggaaggagccacaagaccaagcgccacaagggagg

SEQ ID NO: 41608 - RNA, 38 nt, Homo sapiens
ccgcccgccaggacgacggccgggccaggcggaaagca

SEQ ID NO: 41609 - RNA, 75 nt, Homo sapiens
ccagagaagccaggagcacccggcgcccagacaagacccagacagacggcacgcccacagaggagcgggcgaacg

SEQ ID NO: 41610 - RNA, 79 nt, Homo sapiens
agaaagaaaggagcgccccaaaaggaaacagcacacacaacgaccaagccaaggaccagccaaagaaagcagacccgcc

SEQ ID NO: 41611 - RNA, 61 nt, Homo sapiens
aggacccaccgaccccaggcaccacgagggcccgaaaccaacagaagggccgaaacggagc

SEQ ID NO: 41612 - RNA, 65 nt, Homo sapiens
cccagaaaaaggaaagacccagaggccagagggaagcccagaaaaagcgaacacagaagggaggg

SEQ ID NO: 41613 - RNA, 62 nt, Homo sapiens
gaagaaacagaagaaccaagagagaagaagcaaaccgggaccggaagcaccaaggagaaaaa

SEQ ID NO: 41614 - RNA, 72 nt, Homo sapiens
cggcccagccggaagaagaacggggacagcagcaaggaacagcgaagcagcggaaacacgcaacggaagcca

SEQ ID NO: 41615 - RNA, 82 nt, Homo sapiens
acaacgggcacccacaacagaagacagccggcaaccaagaagaaaagaggacagcagagaggaccccaccacagcagccgga

SEQ ID NO: 41616 - RNA, 71 nt, Homo sapiens
aaacggcaccccaccagccaaggagaccgggagagagacgaaggacgcgcaggggcagcagacacggaaac

SEQ ID NO: 41617 - RNA, 88 nt, Homo sapiens
agcgcaggggaccaaggaggcaaaacgacgacagagcaagaacccccaagaagaaaacagaaacgacaggccggcgaccaaacaacca

SEQ ID NO: 41618 - RNA, 75 nt, Homo sapiens
aaacccgcagagcagaggacggccaccaggcccccggagcagggaggcgacagaagagagaaccgagccaccgca

SEQ ID NO: 41619 - RNA, 79 nt, Homo sapiens
ccaaaaacaacagcgagggaacagcagaaagcccagaaaccaaaagagaagacggacacgaacaagaaggcagcacagg

SEQ ID NO: 41620 - RNA, 89 nt, Homo sapiens
aggacgaccgcggcgcaccccagggcgagagagcgcagcacagcgagcagaaagcggggcggagaacacggggcagagacggaggccgc

SEQ ID NO: 41621 - RNA, 116 nt, Homo sapiens
cggccccgggggcgcccccgcgacccggaccaccgggcgcggcgccccagccgccaccaggagagaacgccgcgccgcgcgacaacggcccggcaggcaaggccggccgcgggcga

SEQ ID NO: 41622 - RNA, 88 nt, Homo sapiens
gccagaaacggggcgcgggggccgcgcgaagacaggaccagggcacggagaccagagacaaggccccgagggaggagcccgaaggcgc

SEQ ID NO: 41623 - RNA, 72 nt, Homo sapiens
gaacacaggcaaaagggaaagcgaggggcacagaggcaggcacaaaaccacaagcgacaacagaagacacgg

SEQ ID NO: 41624 - RNA, 78 nt, Homo sapiens
ggaacgcaagacaggaagagaggccggcccccagagacaggggccaggccaggggcaggggaagcacccaaccaacga

SEQ ID NO: 41625 - RNA, 60 nt, Homo sapiens
gcgcggaaggcagcgcccagcagcgcagaccgagacaggggcccggcaccgcgcccgagc

SEQ ID NO: 41626 - RNA, 76 nt, Homo sapiens
gcccagccaaagccagacgagcagccagggacccgggagagaacgcagacccagcagcccagcgccgagcgcaggg

SEQ ID NO: 41627 - RNA, 72 nt, Homo sapiens
gcgagggaacccggcgcaccgcgccccaccggcggcccgcgcccccacccggcaacagcaagacaaaacgcc

SEQ ID NO: 41628 - RNA, 67 nt, Homo sapiens
aagaaaggaaaaaaacaccaaaaagcgaagccacccacccaccgacaggcggaggcggggcggacgg

SEQ ID NO: 41629 - RNA, 122 nt, Homo sapiens
gagcgaagggcgcagggacccccagggagccccagcacgccggacgaggaaggcgagaccagaggggccccaggcggggccagaaaaggacacgacccaccgaggggcgaccggggcagcag

SEQ ID NO: 41630 - RNA, 75 nt, Homo sapiens
caaacacacagcagaaagaagcgaagcgaggggggaggggccaccacgcccggaacgggacacacgaccccggga

SEQ ID NO: 41631 - RNA, 77 nt, Homo sapiens
caaaacgcccccaacccagcgcaaaggaagaggaaggcgaccggcccgaggaccgccgcacgaccaaacgcagaacc

SEQ ID NO: 41632 - RNA, 78 nt, Homo sapiens
gccgccaggaagaaggcggccccccaccccaccaccagaaggccgcgaaccagggcgcgggagcagcaacccaagaga

SEQ ID NO: 41633 - RNA, 82 nt, Homo sapiens
cagcgcaggccgggaagccgcgagcccagcgcgcggccccgcccggcggccgggcccaggcaaacccacacgaaaccccgag

SEQ ID NO: 41634 - RNA, 75 nt, Homo sapiens
gcacaaagcagaaacccccgggagacaggccccccgggcagaagaaacaccaccagcgagcaccccagagagagc

SEQ ID NO: 41635 - RNA, 98 nt, Homo sapiens
caacccacagagagagaggaaacgaagggagcgacacacacccaagaaccagacaaagcagaggaacgcccacgagaagaacaagagaagaaacccac

SEQ ID NO: 41636 - RNA, 81 nt, Homo sapiens
cggaggggaggccggccaggcagggccggcggcggaaccgccaggccgagccggccgggaagaaggccgaagaagaacccc

SEQ ID NO: 41637 - RNA, 76 nt, Homo sapiens
caaagaaccaagcagacagccaacaaaagggacaagcaaggggccaaggagccaaggaggaaacccacaacagagg

SEQ ID NO: 41638 - RNA, 70 nt, Homo sapiens
agacacacagaaaggaacggaagcagccgcggaaagcgaagacgcgccgcccgaaccgcacaaccgacca

SEQ ID NO: 41639 - RNA, 68 nt, Homo sapiens
aacacaggagcggaagggaaagaaggaagagagccggaagagcgcagaagccggaagagagccaagcc

SEQ ID NO: 41640 - RNA, 84 nt, Homo sapiens
ccgcggcgggagcgcggcggggccgcagaggaagccagcagaccgcagaacggccccgggacccacccaccaaaaccaacagga

SEQ ID NO: 41641 - RNA, 72 nt, Homo sapiens
aaggagaccccccgggaaagcaagaaagaaacaaaagcacccgcgaaggagaaaccccagaggaacccacga

SEQ ID NO: 41642 - RNA, 76 nt, Homo sapiens
gaaggagggacgaagggggacacagaagaccaaggcaaggaaacgaccaacccaggacagaaaggaccggacaaga

SEQ ID NO: 41643 - RNA, 55 nt, Homo sapiens
agagaggagggagaacacagaaaccggccccaggagcccacgcagcggccagcag

SEQ ID NO: 41644 - RNA, 77 nt, Homo sapiens
cgaagggagcgcaaagggggaaaaacacaaggccccacgaagcagaagcccggcacagagccagggagaacaaggaa

SEQ ID NO: 41645 - RNA, 85 nt, Homo sapiens
gcgggaacaggaccggcgggccggaagacggcagcggccccggagacacaccgacagagaagcagccaggccacacggagcaggg

SEQ ID NO: 41646 - RNA, 78 nt, Homo sapiens
gaaggacgaggagccagagggacccagaaggaaagaaagacgcagacccggccgccccaagagggagcaaacgaaaag

SEQ ID NO: 41647 - RNA, 77 nt, Homo sapiens
cacggcaacaagaccacccaacaggcgcagagccagaaggcaaacacaaccgcagcggcagagaacaacaagagcag

SEQ ID NO: 41648 - RNA, 73 nt, Homo sapiens
caaaggcacccggggcagaccggaccaaggcggagccgggagcggaggaggccagcagccaggcagcaggccg

SEQ ID NO: 41649 - RNA, 77 nt, Homo sapiens
cccagcacgggagcccgagggggacccaagcggggaagagggccagggacgaggggagccaggacaagagcgaagag

SEQ ID NO: 41650 - RNA, 63 nt, Homo sapiens
ccaggccgacagccgcggccgggcccgagggaaacagcgcccccgaaccacgggaggcacggc

SEQ ID NO: 41651 - RNA, 77 nt, Homo sapiens
gcggcaagaggcaaggacgcacacagcaacacgacggagaccggcaggacggagcccgcgcgcggcgccaccagcgg

SEQ ID NO: 41652 - RNA, 71 nt, Homo sapiens
cccaacgaagcacccaagggcgggagaaccaggaagccgaaaaccagaaggcaccgacaggaaaggaaaag

SEQ ID NO: 41653 - RNA, 78 nt, Homo sapiens
aaagaagaaacacggcggcaggaccacgcagacaaagacaagaggcccagggccaagggagagacgagcaagaagaaa

SEQ ID NO: 41654 - RNA, 77 nt, Homo sapiens
gcgcaacggggccccggagggccagagcgggcaccgccgaggcagacccgaagccagaaacgcacccaaggcaaggg

SEQ ID NO: 41655 - RNA, 71 nt, Homo sapiens
caagaccccccacagaagggcaagccaaaaaagcccaggaagaagacgaggaggacgaggaggggcagcaa

SEQ ID NO: 41656 - RNA, 76 nt, Homo sapiens
accgcacgagggcacccacaccacgacaccgaaaacccaccgagcccgccaaaggaggcacggacaaaacgcaggg

SEQ ID NO: 41657 - RNA, 71 nt, Homo sapiens
cacgcaccacggcggccgccacagaacaccgccccagcagcccacggccagcccaccagcgagcagcccgc

SEQ ID NO: 41658 - RNA, 68 nt, Homo sapiens
ggcagcaacccccacacccagcaccaggacgcggaccaaaaccaaagacggccagaaggagacggcaa

SEQ ID NO: 41659 - RNA, 53 nt, Homo sapiens
aagccaaacaaaagaacacaacaaaggaggagacaggccgagaccgagggccc

SEQ ID NO: 41660 - RNA, 58 nt, Homo sapiens
cccgaaaaaaagaagaacgaaggcacacggacccacgagcgcaccgggcgggcacggg

SEQ ID NO: 41661 - RNA, 73 nt, Homo sapiens
acgcaggcgacaaaagaaaacgacggaccagaggcccacgaaagaccgcgaagcccagagcacccaaggacca

SEQ ID NO: 41662 - RNA, 72 nt, Homo sapiens
cgcgcgacaaaaggaccagacaaacaaaagggggaccgacagggcagggaaccagagaccacaaggccaccc

SEQ ID NO: 41663 - RNA, 77 nt, Homo sapiens
gccgagcaggcgccgccccagcccgcgaacgacccgaaaaaccgcgccggagaagaacccacagagccaccagccaa

SEQ ID NO: 41664 - RNA, 54 nt, Homo sapiens
cgagggaggagagagggagagccaaagaagcggaagaagcccaagaaccaacaa

SEQ ID NO: 41665 - RNA, 81 nt, Homo sapiens
gcaaccccagcaccccagggccacgccaccacgccgagaggacccgaaggaccaacagagcaaggggaacaaagcggcaaa

SEQ ID NO: 41666 - RNA, 76 nt, Homo sapiens
gcccaccccccacccgcggacccaccacagggggggacacaggccacacaacaggcgagagagcacgggagcagga

SEQ ID NO: 41667 - RNA, 57 nt, Homo sapiens
caaggaacccaaacaacaacagcagcgagagagaaaagaaggaaggcaggacgggca

SEQ ID NO: 41668 - RNA, 75 nt, Homo sapiens
acccaggcccaggcaaccaaaagcgcgccgcccccccaccgcggaagagcaagggaagcacaacacccagccggg

SEQ ID NO: 41669 - RNA, 117 nt, Homo sapiens
agccagcggcgaggaggggccccagcagcccccgaaggcccacaggacaggagagaaagacgacggccgcccagaccagccagcccacacaaaagaagacagagcgaaccaaggggg

SEQ ID NO: 41670 - RNA, 68 nt, Homo sapiens
gaaagacacgaggcgacgggacggaggaaaccgggagccaaacaaccccgggccccaccaaagccccc

SEQ ID NO: 41671 - RNA, 83 nt, Homo sapiens
ggcagccccgcccggggacacagcacgacccccggcggcacgcccagcaccaccccgggaggacaaaccggcgaccacacacg

SEQ ID NO: 41672 - RNA, 69 nt, Homo sapiens
ggagaccccaaccgcagagcgcccgacacaaaggacacacaacgcaagcgacaagccaaaaggacgcag

SEQ ID NO: 41673 - RNA, 71 nt, Homo sapiens
gcccccgagacaagcacccccgcgaggacagggcagaccgccagcagcacagcaagccacagagagggccg

SEQ ID NO: 41674 - RNA, 68 nt, Homo sapiens
agaccggagcccagggagcaagagccacaccgccgaccgggggggaaacaaggccgacccaggacaac

SEQ ID NO: 41675 - RNA, 77 nt, Homo sapiens
ggaggagggaccggcgggaggagaaaccgaaaccagcccccaaggggaaccagccagacccacggacagcacaggaa

SEQ ID NO: 41676 - RNA, 80 nt, Homo sapiens
accagcccaaccacacgcaacaaccagcagcacagaggcacccccaacccacgcgcagagaaacaaaggaacagccccac

SEQ ID NO: 41677 - RNA, 53 nt, Homo sapiens
ggagacagcccagaagaacgaggggggagaagagggagacccgaacgaagacg

SEQ ID NO: 41678 - RNA, 78 nt, Homo sapiens
ccgccgaggcacggacagaagaggccagaacccgggagcacagaacgggaagagagcgagccccagagccccggaaga

SEQ ID NO: 41679 - RNA, 68 nt, Homo sapiens
ccggccgggccggccagcgccggaaaccaacaagaagaggaggaaagcaccgcagaacaaacccaaac

SEQ ID NO: 41680 - RNA, 82 nt, Homo sapiens
cgcgggcagcaggccgaggccagcgaccgcccgcggggccgccacccacggaccaaggagaaggggcgccaacccccaaccc

SEQ ID NO: 41681 - RNA, 83 nt, Homo sapiens
agcgaccgcgccggcagcgccgcgaaggcgggccgggccagcccccgccgcccgggaggacagccggggaacggagaacaaga

SEQ ID NO: 41682 - RNA, 63 nt, Homo sapiens
ccgccgcagcccaggcgcgggggcgacgacagcgcaggcgggaggcggaagccacccagaccc

SEQ ID NO: 41683 - RNA, 66 nt, Homo sapiens
gagacaagacggggccacacggcggagaccccccagacaaaagaagccgaccagaagaagaagaac

SEQ ID NO: 41684 - RNA, 78 nt, Homo sapiens
cgcgaccgaggggacgccgcccgccgcccgccgcaggccacccgggaacggaggagggaagcacacccacagaaccaa

SEQ ID NO: 41685 - RNA, 82 nt, Homo sapiens
caggcacgccggcgaacggagcgccgcgccagggcgcggggcggggaggcgacaacaggcacaaagagagaaggaacaccca

SEQ ID NO: 41686 - RNA, 82 nt, Homo sapiens
cccgcccgcgccccgccgcggggcgcgcggcgccggcggcgcgcgacccccgcgcaggccggcaaagcaccaggcacagcaa

SEQ ID NO: 41687 - RNA, 71 nt, Homo sapiens
ggacaggcagggcccaagaccaaccaccacccaaaagccaccagcagaagaggcaaaccacgaagaggaaa

SEQ ID NO: 41688 - RNA, 80 nt, Homo sapiens
cggcggagcggcccagcgcaagcacgcagcccaccagcccagcggccaccaggggacaacagagccgacacagccaagaa

SEQ ID NO: 41689 - RNA, 83 nt, Homo sapiens
gccacccagggggccacccaggacagacggccggacaaggagcccggcacacccaacccgaggccccggccgccaggccccac

SEQ ID NO: 41690 - RNA, 73 nt, Homo sapiens
gaggcgaccaggggccagaacagagaagccccacagacacgccagggagacgcccaggccggacccagcaggg

SEQ ID NO: 41691 - RNA, 78 nt, Homo sapiens
ccacacccacccaacagacgcacaggaacagagagcaaccaaaacaggacaagaaacaccaaacaagcaacagccaag

SEQ ID NO: 41692 - RNA, 68 nt, Homo sapiens
agcagcaaacgcaaggggaaagagggggacccaaggacgcgaaaggcaaggacagacgcagaagacca

SEQ ID NO: 41693 - RNA, 85 nt, Homo sapiens
cgggcaggggcagagcgcccgggggagaaggccgagggccgggagcccgcaccgggccggcagcccacaccacgggaggggcaca

SEQ ID NO: 41694 - RNA, 53 nt, Homo sapiens
cacggcaaaagaccaagagcacagcagaagcagaagaaggaagcaagagaaga

SEQ ID NO: 41695 - RNA, 76 nt, Homo sapiens
agaagccacccagagagaaccagcaagccaggcggcagacaaacggaaccaaccaaagcaaaacagggaaccagaa

SEQ ID NO: 41696 - RNA, 76 nt, Homo sapiens
gaaagaaccacgccagccagcagaccaacacaggacacaggcccgacacgagccccagggcaaacggaagaacagc

SEQ ID NO: 41697 - RNA, 104 nt, Homo sapiens
caaaaagaagggcggagcacacaggagcacacccaggacagacagccccaggagaggcgcagcagccccagccaggcaggaaacacccccaggagaggcagcca

SEQ ID NO: 41698 - RNA, 119 nt, Homo sapiens
cagggcggcagcggcggcgggcgggggggaaggacgggcgggccggcgccggagacgagccggccagaaaagcagcaacgaggcgcggacccagaggagcggaaggaggcagacacaca

SEQ ID NO: 41699 - RNA, 68 nt, Homo sapiens
ccaacagcccaggccgccgacgcacgagaagcccaccagccggacacccgaagcagaagcgcggccaa

SEQ ID NO: 41700 - RNA, 86 nt, Homo sapiens
ccccggacaggaggcaggccgccggccgaaggcccgagcgcccgaggcgcgggaggggggaccggagcgaaagccaggaggagcgc

SEQ ID NO: 41701 - RNA, 70 nt, Homo sapiens
ggaaggacagcagagcggaacggacacaagcgcaacgaacgaagagcccgagccgccaggggggagaaca

SEQ ID NO: 41702 - RNA, 64 nt, Homo sapiens
acacaccgaaacccacggacagcagaccacagcccggcaggcccaaaaacccaaagggacagaa

SEQ ID NO: 41703 - RNA, 84 nt, Homo sapiens
gccgggcgccgccacccgccggcgcagggaacgcaacgccgagaggccacgaggcccgaaggagagagccgagagggcaaggga

SEQ ID NO: 41704 - RNA, 76 nt, Homo sapiens
agaaaaaccacaaggggaaaaaaaacccaaggcagaaaagcagaaccaaaggggcagagagacagcgaaggacaaa

SEQ ID NO: 41705 - RNA, 102 nt, Homo sapiens
gggacggaccgagaccggaccgagagcggaccgagagcgcgaaacgcacgagaaggggaacgcccgcggacggcagggcgcgacaagaagcgcccgcccgac

SEQ ID NO: 41706 - RNA, 73 nt, Homo sapiens
gaggacggaggcgacaaggaaaggggcgcgaaagcacccagaaccggagagcccagaacgcgggcagcccgaa

SEQ ID NO: 41707 - RNA, 56 nt, Homo sapiens
gcaggcacagggacgagggggcggaagcggcccagggcagcagcagcagcccgcca

SEQ ID NO: 41708 - RNA, 43 nt, Homo sapiens
ggaacacaccgcaacacggacgcaagagccccgaagaaagagc

SEQ ID NO: 41709 - RNA, 62 nt, Homo sapiens
ccaccccccagaaaacgacaaacaggagcgaaagcaagaccgaacccagaggaccgcaaccc

SEQ ID NO: 41710 - RNA, 71 nt, Homo sapiens
ggccaagacgacaccaaacagcccccgaaaacacaagaaaagcacgcacagacagagccaacaccgcagcc

SEQ ID NO: 41711 - RNA, 70 nt, Homo sapiens
agcgcggacaacaccaggaaaagacagaggaggcccacccgacgcggagcgaccggcacgggcggccgac

SEQ ID NO: 41712 - RNA, 82 nt, Homo sapiens
cgccccaggagcgcgagcccacaacacccccagcggccgccggccccccacgaggaaaagaaacgagaccagaaggaaagaa

SEQ ID NO: 41713 - RNA, 82 nt, Homo sapiens
aaggaggagaggcgccaggaggagcagccaacaaagaggagaacaaccgcaacgaacaaacaggagacagagagcaagagca

SEQ ID NO: 41714 - RNA, 91 nt, Homo sapiens
aaagaaacccgcgaaaagagaaagaagaagaacccacaagagccccagaaaagagcagcagggagaaggaagggaaaacgaagaaagaaac

SEQ ID NO: 41715 - RNA, 82 nt, Homo sapiens
ccgccagcgccaggacgcccacagggggggacgagcggccaaggagaagggcacggagaccaccagggcagaaaaagagaag

SEQ ID NO: 41716 - RNA, 80 nt, Homo sapiens
cacgagagacagcaggccgagcccgagcgcgggaagaaagaaacgaaggaggcccaaccacaaaaggagccgacggaacc

SEQ ID NO: 41717 - RNA, 71 nt, Homo sapiens
ggaaagaaggcaaaacacggacccccgcacggcacaaaacgggccacgagaaccaggccaggaaacaggca

SEQ ID NO: 41718 - RNA, 72 nt, Homo sapiens
cccaaacggaaggaacggaggcgaacgggaccccgagacaccggcagaacaaaacaccgagcaaagagggcg

SEQ ID NO: 41719 - RNA, 53 nt, Homo sapiens
cgggagaagccggaagacaaagaaggggcaaaccgcccggaaggagcaccgag

SEQ ID NO: 41720 - RNA, 79 nt, Homo sapiens
cggcccggcggcgggcccgccagcgcaggggaccacgagcccaggacaggaacaagcgaaagcggaaccaagcagggag

SEQ ID NO: 41721 - RNA, 80 nt, Homo sapiens
ggggcggaaagcggacggcccccggggacaggagaaggggcccagcgcacaggcccacacacgaggaaggcgcccccgac

SEQ ID NO: 41722 - RNA, 48 nt, Homo sapiens
gaaggaccaccgggccgcccaccaggagcggagggaaaccccgcagac

SEQ ID NO: 41723 - RNA, 83 nt, Homo sapiens
ggccccaagcccccgcccggaaacggagggcagacggcagggggaaaacggcccccgaggaagaaaaggagccggggaaggag

SEQ ID NO: 41724 - RNA, 79 nt, Homo sapiens
gcggcgcgcgcggacgaagagccccccccccaacaccgcgacacgcagcacgccgagaggagcgaagcccaacgcagga

SEQ ID NO: 41725 - RNA, 80 nt, Homo sapiens
agaacagcccaagaggccgaccgagacgggcggagaggagaagcacacggaaaccgcaaaacccagcagacagagccggc

SEQ ID NO: 41726 - RNA, 76 nt, Homo sapiens
gggcgcgggcccggccggcacggcgaaccacgcgaggggcgggagccgcgcacaccaccacacagcggaaggaacg

SEQ ID NO: 41727 - RNA, 55 nt, Homo sapiens
gaagaggcggcgggcaaacgggaagacagggccaccgcagcccaggccgccagga

SEQ ID NO: 41728 - RNA, 84 nt, Homo sapiens
cgaggcgcagcgaccccaaaggcacgcccccggggcaaagggaaagcaggcaggagggagagcgccgaagaaccaccccccgcc

SEQ ID NO: 41729 - RNA, 77 nt, Homo sapiens
acagacggcgaaggcagccacagcgcccagagagggaccaagaaaggcccagggaccaaagcccggacaaggcccga

SEQ ID NO: 41730 - RNA, 76 nt, Homo sapiens
gaaacccccggaggaaaccggcagaccccagacccaaacaacggcagaagcagcaggacggggagcaacacagcaa

SEQ ID NO: 41731 - RNA, 105 nt, Homo sapiens
cgccgagcgcagagcgcagccgccgagccggacggccgcgaagaggcgggccggccaggaaaaaccggaagaggggccacgaagaccgccgcgcgcgcccgccgg

SEQ ID NO: 41732 - RNA, 71 nt, Homo sapiens
ccgggagagcaggaccgaggcccaggaaagccacgcaggggccaagaagcccagggccgaagaggacggca

SEQ ID NO: 41733 - RNA, 61 nt, Homo sapiens
cgcccaccggaccagcggccccgcgcgcgcacgaagcgacgggcgcccagcggccggggag

SEQ ID NO: 41734 - RNA, 105 nt, Homo sapiens
cgccacacggccgcaccgcgcgagcacgggcggagcgaacgggcggggacaccggagcacccgagaagcgacgcgacagaggcaagggaggccgccaggaagaga

SEQ ID NO: 41735 - RNA, 80 nt, Homo sapiens
cacgcggcgcgccgaccccggcaccggcgcccagcgcgcccgggccgcgccgccccgccccagagaagaacggcacacac

SEQ ID NO: 41736 - RNA, 71 nt, Homo sapiens
gggagcgcgcggaccagaccccaggcggaaaacaaagagggaaaacggagaaaagcccccccaggccagcg

SEQ ID NO: 41737 - RNA, 69 nt, Homo sapiens
cgcgcaaagaaacgaacaacgcgcaaaagaaggcgacagccaacagaacccagccaggaggagacgcga

SEQ ID NO: 41738 - RNA, 65 nt, Homo sapiens
aaaggcccggcagcgcggacagggacaagcgcacagcggagaaagcagcgcggccaggaggcggg

SEQ ID NO: 41739 - RNA, 83 nt, Homo sapiens
agcgcgcgggcggggcgggagcggcgcgcagccgggccaggggcgccccaggcggaaagaagagaaccaacgaacaccgaaga

SEQ ID NO: 41740 - RNA, 56 nt, Homo sapiens
accgccccgaccgcgcagggacggaaaaggcgcacacgacccggagaaccccacga

SEQ ID NO: 41741 - RNA, 76 nt, Homo sapiens
agggagaccacagcaagacgccaggacccacggaagccagaaagggccaaccgccaggaaggaagagggacaagga

SEQ ID NO: 41742 - RNA, 73 nt, Homo sapiens
aagaggccagagagcagaagcaacaacacacaaacggagcaacaaaaagccaggcagacgacacacaagagcc

SEQ ID NO: 41743 - RNA, 67 nt, Homo sapiens
ggagcaaggaaacgagggagcggccaagaaaccaggaggaacagggagaaggacggcccggaacgaa

SEQ ID NO: 41744 - RNA, 77 nt, Homo sapiens
gccaaaccagagaaagaaacacccgaacagcgacaccaggacgagcagggcgaaggggggggaggcacccgagcggc

SEQ ID NO: 41745 - RNA, 106 nt, Homo sapiens
cagcggaggcgagggggcggacgcgcgcagcccgcccgcccggcgaccagcaaggcgccaccccaggggccagggaacgacccagaggccacggcacagacgggcg

SEQ ID NO: 41746 - RNA, 80 nt, Homo sapiens
cacgggcgcagacccgcgggagagcggagaagcgaaggccccacacagagacaaggcgcaggacgagacagccaagcacc

SEQ ID NO: 41747 - RNA, 67 nt, Homo sapiens
cgccagcggggacaagacgcagcagacaggaaggaaaggacagggaagagcaaaagaagaagaacaa

SEQ ID NO: 41748 - RNA, 68 nt, Homo sapiens
gggcagccaggcagccccaccagcgacggcacggaagacgcacaggcgacgccggaccgcgaagagac

SEQ ID NO: 41749 - RNA, 78 nt, Homo sapiens
ggcacacccgaaaccacacccagacgaagaaccccccaaaaaaaagcaagagaaaaaagcaacgaacaaaaagcagag

SEQ ID NO: 41750 - RNA, 69 nt, Homo sapiens
ccagaacaacaaagaggaggcagccaccagcaggaggaaaaccaacgccacgaccagagacgaagaagg

SEQ ID NO: 41751 - RNA, 57 nt, Homo sapiens
ggacaaagaagccacgaagcaaaaagacccccaagccacaaacccccccacgacacc

SEQ ID NO: 41752 - RNA, 80 nt, Homo sapiens
cggacggggagaggcgacgccccgaccggaacaggagacccccgcagggccggagcgagggagagcaggaacacagagag

SEQ ID NO: 41753 - RNA, 112 nt, Homo sapiens
acaggggccgcccagaccccagaagagacggaaagccaagaggcccaaggcaaacggagagcaggagccacaggaaagagcagaaccagaccagcaaacaacagagacacga

SEQ ID NO: 41754 - RNA, 79 nt, Homo sapiens
gccccagcgccaccaaagaccgcgacgccagcacgagccagggagccgccgggaccggcccgggagacgacaacccaaa

SEQ ID NO: 41755 - RNA, 65 nt, Homo sapiens
aagccccggggaccaagaggaggcgggccgaagcaacaagggaacaccgcagagaaccgcgacgg

SEQ ID NO: 41756 - RNA, 72 nt, Homo sapiens
agagcgaagaaggaccagaccaagaagaagccaaaggcagaaggcagagggggcgagggaggaaagggggca

SEQ ID NO: 41757 - RNA, 61 nt, Homo sapiens
gcccccccccacagagagagcgcccggggagggaagacaagagcaccaacggacaagcaca

SEQ ID NO: 41758 - RNA, 73 nt, Homo sapiens
gcgaggaaaaccgaaacagaacggaaaaggggcccaaaaaagggaaccgcacagcgagacaccccacacagag

SEQ ID NO: 41759 - RNA, 79 nt, Homo sapiens
ggcgaacagccggcgcccggacgcgaggggggagggccagggcagaaaagaggaaaaaaggacaggcaccgccccaaag

SEQ ID NO: 41760 - RNA, 76 nt, Homo sapiens
agaaaggccaggaagcggagcaggaccacaaacaacccccaccacgccaagagaaggagagagaaaggacaagaaa

SEQ ID NO: 41761 - RNA, 70 nt, Homo sapiens
cgcacggacgggggggggccgagccgagcacaccagccagcgggccccccggagaaagggcacccgcacc

SEQ ID NO: 41762 - RNA, 81 nt, Homo sapiens
gagaagccaacaccagggaccagagcgcgaccggccaaaagaacggcaaagagccagaaacacgggagaagggagcgaagc

SEQ ID NO: 41763 - RNA, 38 nt, Homo sapiens
gaaggaggcgaacaggaagagagaccccgagaaacaag

SEQ ID NO: 41764 - RNA, 75 nt, Homo sapiens
cccgagaagggaacgccggggaagaaaagggcaaggcccgagaagccggcggaagaggaccaagaagggggcagc

SEQ ID NO: 41765 - RNA, 69 nt, Homo sapiens
gaagacaggccccagccaacgaaagggaaggaggaaacgcccagaccagccaaaaagaacgcaagcagc

SEQ ID NO: 41766 - RNA, 72 nt, Homo sapiens
cgcacaaacgagaaaaaggaaggagcagcagaacgaaaagaagaagggagaccgggagagaaaagagaagca

SEQ ID NO: 41767 - RNA, 98 nt, Homo sapiens
cagcgggccgagaggagacacggagaaagccaaacagagaaggaaggggaccgacaggagccagcagaggaagaacgagaggcagaaaaaagaaaacc

SEQ ID NO: 41768 - RNA, 79 nt, Homo sapiens
cccaccacaaccgcccacggcgcccgaccagaggcgacgggcaacgaggaacaggccaagaaacaacacagccaaggcc

SEQ ID NO: 41769 - RNA, 66 nt, Homo sapiens
ggagaaggaccaagaaccaggcacccgacgagcaccgaagaaaccgggggcgacaaccgcacagag

SEQ ID NO: 41770 - RNA, 74 nt, Homo sapiens
cggggcggggaagcgggggcaagccagccaccaaaccagagcagggaccacccagcgcaaggacagcgaaggaa

SEQ ID NO: 41771 - RNA, 79 nt, Homo sapiens
ggagagcgcaagccgggcagcagcccagcggcagcagaaagagcaggagagagaaggcccaaaagccaggggccgacgg

SEQ ID NO: 41772 - RNA, 83 nt, Homo sapiens
ggaaaacaaagggccccaaggcccccggacgcaaagaccgaggccagggccgggcaggcagcaccgagccaacaggaaccaga

SEQ ID NO: 41773 - RNA, 91 nt, Homo sapiens
ccaaacgaggacccagcggagcaagaagaggaccggcagggcagagcaggaggccccccgagcagggcacggaccgaagagggcggaaccc

SEQ ID NO: 41774 - RNA, 76 nt, Homo sapiens
cacgcgcccggaccccgccaccaaggagaaaggaggacccgggaagacagagacgggcaacggaaagcgaacacca

SEQ ID NO: 41775 - RNA, 75 nt, Homo sapiens
cggcgcgagagaggagagccacacaacccacccacagcaccaagcagcaagccccacggacccagaacccagcgc

SEQ ID NO: 41776 - RNA, 71 nt, Homo sapiens
ccaaaaggggccaccccacacgggagaggacaggagaccggaacaggcagcccgagccaaaaagcaccacc

SEQ ID NO: 41777 - RNA, 76 nt, Homo sapiens
agcggacgacgcagaagacagggacgcaccgacgagggccggcccagggagaacgcaaaaccaccacccccacaaa

SEQ ID NO: 41778 - RNA, 71 nt, Homo sapiens
gccgcgcccgcccgacccgccaccgccaggccagaacagagaacgaggaagaaaaggaaacccaaaaagac

SEQ ID NO: 41779 - RNA, 55 nt, Homo sapiens
agcgccccccccaccaccacagccccggaggacaggacgcacgacgaggcggggg

SEQ ID NO: 41780 - RNA, 73 nt, Homo sapiens
cagaaccgacccaccacaccacgggcggccccagaagagagccaacggaccacaacagagaaccaaggacggg

SEQ ID NO: 41781 - RNA, 48 nt, Homo sapiens
gccagcgaaaacgcccaggaacagaccaacaccaaggacccgcacggg

SEQ ID NO: 41782 - RNA, 69 nt, Homo sapiens
ccaaaagacgaaagggggcgaccacagcacaggccccagacacgaggccagcgcagcgacggagaaacc

SEQ ID NO: 41783 - RNA, 50 nt, Homo sapiens
aggagcaggcgagaagagaagacaggagaacggcggccccgagccaagga

SEQ ID NO: 41784 - RNA, 79 nt, Homo sapiens
acggcagcccagagagacggaaacaggaacaccaaggaagcaaaagccccagaacgaccggaaaacgagcccaaaggaa

SEQ ID NO: 41785 - RNA, 83 nt, Homo sapiens
gccccccaagcgggggaaagagaagcgaagaaggcagcacgccagacgggcccagcgcacaaggaaagaccacagcaagacca

SEQ ID NO: 41786 - RNA, 80 nt, Homo sapiens
cgaacccagaaaagaagaagagaagaagagggaagccaggagggaagcccagaagacgcacaagagagaccgaccaaacc

SEQ ID NO: 41787 - RNA, 81 nt, Homo sapiens
gcaaaccgcaagcaccgaaccgcacagcaagcccaggccaacagaaagggacgcggcacagaacgaagaagaaagcagaag

SEQ ID NO: 41788 - RNA, 73 nt, Homo sapiens
agacgggagggacgggcgcacgcgaagagcaccgcagacccaagggaaaagcacagggccaggaagcagaggg

SEQ ID NO: 41789 - RNA, 58 nt, Homo sapiens
cagaggacccgaaaagcgaaaagaaacagaggaagagagaccaaacaccaagcgccca

SEQ ID NO: 41790 - RNA, 60 nt, Homo sapiens
aggggagccgccggacgaggcagaggagaccaggccccccacacagaggaggaggggaag

SEQ ID NO: 41791 - RNA, 84 nt, Homo sapiens
cgggccggagcccaggccggcgcggcggcgcccgccaggcgggagagagaacggaaaggagccaaggaaaacaaaagggcgagc

SEQ ID NO: 41792 - RNA, 54 nt, Homo sapiens
cagggccccagggacgcagggggcagggcagaggacagggacacaaacggcaaa

SEQ ID NO: 41793 - RNA, 80 nt, Homo sapiens
ggcgcccccaggacgacgggggagccggaccgcccccagccgacagagagaagcgcagaggccaaaagaacacagaagaa

SEQ ID NO: 41794 - RNA, 42 nt, Homo sapiens
cgaggccccagagcaggagccccccgagggcagccaaagcca

SEQ ID NO: 41795 - RNA, 64 nt, Homo sapiens
gcgaagacccggcccaccagggcgcaggcgggagagacacagcgaccaaagccaggggagcagg

SEQ ID NO: 41796 - RNA, 58 nt, Homo sapiens
ggacgggggcacgaagcagggccgacacaagcccgcagaaagaaaagaaggggagaac

SEQ ID NO: 41797 - RNA, 77 nt, Homo sapiens
gaaaaagaagagacccaacgagagaaagaccaagagcaagaaacgagccagacaagcaaaagaggcggcaaggcagc

SEQ ID NO: 41798 - RNA, 68 nt, Homo sapiens
gcaggagcaacacacagcagacagcagcaggacaagccagcgcacagcaacagagacagcgaaaagac

SEQ ID NO: 41799 - RNA, 59 nt, Homo sapiens
ggagccaacaggcagcggggcgggcgagcgcaggaacaacaagaaggagaaagacacaa

SEQ ID NO: 41800 - RNA, 63 nt, Homo sapiens
ccgacagcgacgacaggggaggcaccaaagcggagaccaggaaaaaggccagcgggcaaggaa

SEQ ID NO: 41801 - RNA, 60 nt, Homo sapiens
cgcccagcccggcgcacggcccagcagaccgaaaagggcggaaaaggaccaaggcccgca

SEQ ID NO: 41802 - RNA, 74 nt, Homo sapiens
agacagccacgcagacggaaacaaggcaacagaaagagcaacagcagggcaacaggcaaaaggccaaaacggaa

SEQ ID NO: 41803 - RNA, 52 nt, Homo sapiens
cgacacaaacggaacgccgcgcgaggacgcggaggacccaagaagaccagcc

SEQ ID NO: 41804 - RNA, 76 nt, Homo sapiens
ggagacgacccgacgaagcccacgccgggacccagcgcagagccacggcaggaagcacagaacccgggccgccaga

SEQ ID NO: 41805 - RNA, 75 nt, Homo sapiens
agcccacgaacagcccacgccaaaccagaccccaggccgccagcccagcgagagcgccaggaaggcaacacaaca

SEQ ID NO: 41806 - RNA, 74 nt, Homo sapiens
ccccacagaggggcgacggacagccagccaaagaaccagccagcaagaacagcacgcaacaaaagacaaagggc

SEQ ID NO: 41807 - RNA, 83 nt, Homo sapiens
ggagaccccgagcgggccggagccggcgggcggagcccacaggacccagaagccaagaacaaacgcggaccagcgggggcagg

SEQ ID NO: 41808 - RNA, 42 nt, Homo sapiens
ggccggagggcagcgccagagcacggggcaccgggcccagag

SEQ ID NO: 41809 - RNA, 78 nt, Homo sapiens
caacccccagacgcaagccaaggcacagcacccaggaagcccgaaaagaaaccccagacaaagccggccacagaaaag

SEQ ID NO: 41810 - RNA, 71 nt, Homo sapiens
caacacagccagccccccgagggagggacaagacaggaagggaaggggcggagacgggcggaacgcaggag

SEQ ID NO: 41811 - RNA, 62 nt, Homo sapiens
gacacccaggacccacgaagcaagaagccaagggaaaagcagagggcacgcagcaagcaaac

SEQ ID NO: 41812 - RNA, 76 nt, Homo sapiens
ggcaacaagcccacccgaaaccacaaggccgagccagccagcacgagaaagaaaagagaggagaacaaagcggaaa

SEQ ID NO: 41813 - RNA, 79 nt, Homo sapiens
gggcaagggaccagcaaggcggcagagcaaggggcacgcagaaggaccggccacggcagcgcacccagacaccggggcc

SEQ ID NO: 41814 - RNA, 92 nt, Homo sapiens
cgggcaagaggcgcaaacaagccaacccaggaggaaaaacggcacacaggaccccgcgagccagcggcgacgggaacaagccccaaagagcg

SEQ ID NO: 41815 - RNA, 37 nt, Homo sapiens
ccggggcacgacacaaaaacagcacagggaacaccag

SEQ ID NO: 41816 - RNA, 69 nt, Homo sapiens
cgggcggacacgcggaaacgaggaaccaaaggcgagacaccacacaacagaggcagcagaccacaaaac

SEQ ID NO: 41817 - RNA, 72 nt, Homo sapiens
ggaacacagcccgacggaccagcacaagagaaaggcagaaagacggaagcaaacaagggggaaaacacggca

SEQ ID NO: 41818 - RNA, 82 nt, Homo sapiens
cggaaccgccgggccgaacagcagacgccgcggagaacacacaaccggcagaacaagaaaacaagagacgaaaaagagggag

SEQ ID NO: 41819 - RNA, 49 nt, Homo sapiens
accgagagcagccgccggggcggaggacgccaacaaggagagcagcaag

SEQ ID NO: 41820 - RNA, 74 nt, Homo sapiens
aaggagaaagagggaagagaagaagaagacccgggaaaagagacacaaaccaggaaaggacagcccaaggcgga

SEQ ID NO: 41821 - RNA, 74 nt, Homo sapiens
cgccgcggggcgcgcggcgccggcggcgcgcggcccccgcgcagcacccgacagcacacagccgagcaggagga

SEQ ID NO: 41822 - RNA, 60 nt, Homo sapiens
agcggccgggaccgaacaggcgagagagccggagggcaggaagccgccaccaggaacccc

SEQ ID NO: 41823 - RNA, 67 nt, Homo sapiens
gaccaaaagaagcaaaaacaaagggcaaaggacacaccgcacaaacggccgcgcaccacacaacacc

SEQ ID NO: 41824 - RNA, 76 nt, Homo sapiens
agcaaagaaacacacagcgcaggagaagaagagcaggaaaaagaaccagagaacggaagccagaaagcggcaagca

SEQ ID NO: 41825 - RNA, 75 nt, Homo sapiens
gcggagcccgacccacccaaggccggcacaggaccaacgcggggggggaacggcggccgaacaggaagcccagac

SEQ ID NO: 41826 - RNA, 82 nt, Homo sapiens
aggagaaggcagcgggacggacaggcagggaagcaacgcagaggagcgccggaccagcgcgagcgccacggcacggccccac

SEQ ID NO: 41827 - RNA, 73 nt, Homo sapiens
ggggagggaaaggcccaggaaaaagaccaagggggagccgggagaaagaaaaaacaaagaagcagagcaaggg

SEQ ID NO: 41828 - RNA, 70 nt, Homo sapiens
caccgcggaagcaaaccaagcgcgggggaagaagagaaagaaaaccaggggaggcgaagaggagcagcac

SEQ ID NO: 41829 - RNA, 69 nt, Homo sapiens
agcaaagcagcggcgcagcccgggcccggaccccgggaaacacaagaacaacggagacgcacgggcgac

SEQ ID NO: 41830 - RNA, 67 nt, Homo sapiens
cggccggcaagaacggacgggcgccacaagccacacggagcagggagcgaacagccgaagaggacga

SEQ ID NO: 41831 - RNA, 50 nt, Homo sapiens
gggcgcaagagaaggcaccaagagggggcagaaacgggacgggagcgcca

SEQ ID NO: 41832 - RNA, 88 nt, Homo sapiens
gcggcccaaagacgccaacgcccgacgagcgccggcgggagcgcccccgggggagaccaggaccgcacaggaggagggagaggaaaac

SEQ ID NO: 41833 - RNA, 63 nt, Homo sapiens
ggacaggcgaggcgagccagggcccgcagcgaggcaagcacgaggagcggcaggacgagcagg

SEQ ID NO: 41834 - RNA, 95 nt, Homo sapiens
ggacagcgcacgccgcccgcccgggcgccgcgccacagccgcgcggacagggcacagagagcggagcgccaacaccccaggcagcacgggaaagg

SEQ ID NO: 41835 - RNA, 51 nt, Homo sapiens
cagcggcgacgacacggccagcgcaacaggagacgaacccagaccagcaaa

SEQ ID NO: 41836 - RNA, 73 nt, Homo sapiens
ccggaggaacacagcagcacgcgaacagcaaggaaagcgaaaaagcacaaggcagggaaaaccgggaaacgcg

SEQ ID NO: 41837 - RNA, 81 nt, Homo sapiens
cgggcagggccaggacccagcgaggggggccagggcaagcagaagaggaacagaagaagcagagcagagacggagcagcag

SEQ ID NO: 41838 - RNA, 81 nt, Homo sapiens
ccccgcgccgagggacgccaccgcacacgcgcgagccggcccggccgaccagaagaagggccccagggcaggccaaccgca

SEQ ID NO: 41839 - RNA, 59 nt, Homo sapiens
gggacggggccaagcaggagggaaagaccggaacacgaaagaggcagagcgggaaaaga

SEQ ID NO: 41840 - RNA, 103 nt, Homo sapiens
cagacagacgccggggaggcagcgcgggacccagcccaggcggcgcggacggggcgggggagaagcagaccgcaccaggcgggaccccgaaaaagcccaaaca

SEQ ID NO: 41841 - RNA, 84 nt, Homo sapiens
gggccggggccggagcccagggccggggaaccccgcgcccgggccggcggcagagaccacgcccagcaggagcggcgcaggcca

SEQ ID NO: 41842 - RNA, 70 nt, Homo sapiens
gcagcacaccaaccacaaaaaggaagacacccgaagacaagaggaccaagaagaagcaaggcgaagaaaa

SEQ ID NO: 41843 - RNA, 42 nt, Homo sapiens
ccagcaagcgcaagaggagccgcaagggacgggccacccgcc

SEQ ID NO: 41844 - RNA, 90 nt, Homo sapiens
ccaggcaacaaggagagcggcaagaaggcaccgcaagccgccccggccacgcgggacggcccacccaagggccagagaccgcaaaaccac

SEQ ID NO: 41845 - RNA, 40 nt, Homo sapiens
ccacagaccagcccagcacaggcccaacaggagcacaaga

SEQ ID NO: 41846 - RNA, 79 nt, Homo sapiens
gaaccagcaaccagcagcaccgagaggccaaaacagaagaggcaaagcccagccacagcagcagcccagcagcaaacaa

SEQ ID NO: 41847 - RNA, 54 nt, Homo sapiens
ccacccccgagcccagcaccgcgggaagggggcccccaaagggaagccaaacac

SEQ ID NO: 41848 - RNA, 49 nt, Homo sapiens
ggacgccccaccgccgacgcccccagccaccagacaggacacaaaggaa

SEQ ID NO: 41849 - RNA, 77 nt, Homo sapiens
caaggagcgaccgggcccacagacaagagcggcacaacccccaaagacaggaggagccacaccgcagcgggcgggcg

SEQ ID NO: 41850 - RNA, 69 nt, Homo sapiens
agaaggaagaaccgggaggagcaaaagccagaaggcagagaggaaggcaacagaagccagcaacgcgcc

SEQ ID NO: 41851 - RNA, 78 nt, Homo sapiens
ggacccaaaggggacaaacccgggagaacacccccccaggaggcgagggcaagaggagaagagaaaacaaaagccgaa

SEQ ID NO: 41852 - RNA, 72 nt, Homo sapiens
ggaaagccacagaaaaaaaagaacggagccagaagcgggaggacggaggggggaggagcaggcccccaccgc

SEQ ID NO: 41853 - RNA, 74 nt, Homo sapiens
aaaagacagagaggggaaaccccgaaaggggggcagggagagaagcggcagcccggaagaagaaggaagccccg

SEQ ID NO: 41854 - RNA, 74 nt, Homo sapiens
cccacacaagcgaaggcgcgcaccggaagcaccagcgaggaagggagccaaggccgcgagacacggcaggacaa

SEQ ID NO: 41855 - RNA, 74 nt, Homo sapiens
aaacagccccgggccagcaggcagaggggcgggcaaaggagaggcacaggaagcagaggcaagaaacgaaggca

SEQ ID NO: 41856 - RNA, 87 nt, Homo sapiens
agggagggccgagccagccgcggccggaggagcccccaggccccaggggacagcgccccagcccggggccgcagcgagggagcaggg

SEQ ID NO: 41857 - RNA, 74 nt, Homo sapiens
ggagcccgacccacccaaggcagacaaagacagagaagcacaaaagacaagaagggaccgcaaaccgggcaccc

SEQ ID NO: 41858 - RNA, 86 nt, Homo sapiens
aaggaggcgcggacgcggagcgggccagcccgagcccagggggcagcaggacagcagccggccacagacagcaagagcagccccgg

SEQ ID NO: 41859 - RNA, 76 nt, Homo sapiens
cccaagaccccagaagggagggcaagaagaagaaccgagcccagcaagacccccagcgcccaaacaacaggccagg

SEQ ID NO: 41860 - RNA, 72 nt, Homo sapiens
gaccaacggagcgcgaggcgggcgcggagaagcgcggagcccccggacggagagagcagcgcgcgccccacc

SEQ ID NO: 41861 - RNA, 38 nt, Homo sapiens
gggaaccgccgagccaccagaccaaagacggaaagagg

SEQ ID NO: 41862 - RNA, 76 nt, Homo sapiens
gcgggccagacagaagagggcaccgagcaaacaagagcacgagcacaccgagcaggacggaaagcaacgcgaagcc

SEQ ID NO: 41863 - RNA, 88 nt, Homo sapiens
gcgccggagccgacgccgggaacccgccgcgcgccgcgaccccaagcaggaccgaaggagaagaaggagaaggggaggagaaggcaag

SEQ ID NO: 41864 - RNA, 70 nt, Homo sapiens
agcacagaaacaccacggcggcgccgaggccccaagcaccgccggccaggaggagagcgcaccaccaaaa

SEQ ID NO: 41865 - RNA, 79 nt, Homo sapiens
ggcgagaggggaagaggcgccgggacaggccccaagagacgacagaaaggcagagaaggaaaaaaggaccagagacgga

SEQ ID NO: 41866 - RNA, 74 nt, Homo sapiens
agggcgagaccagagcaacagcagcagcagagccaaagacagcaggcgcaaaaacgaacccacaaccgaacgac

SEQ ID NO: 41867 - RNA, 94 nt, Homo sapiens
cgccgccaccgcccaggaccgccggccgggggacgagccggagcagcagccagacgccgacaccccaggccacgagccccaggccacggcagca

SEQ ID NO: 41868 - RNA, 77 nt, Homo sapiens
cgcccacccgcgccagagaccagaaaagacagggacaagcgcacagcggagaaagcagcgcggccaggaggcgggaa

SEQ ID NO: 41869 - RNA, 84 nt, Homo sapiens
gggcccgggaccgagcgaggggaggccggagccgcggccgagaccagggaaccgggcagcagccgcagccgcccccgggacggc

SEQ ID NO: 41870 - RNA, 76 nt, Homo sapiens
ggcccgccacagagaaaaaggagcacacagcaagggcggacggcagacaggcagcaaccggccccgcccaccagcc

SEQ ID NO: 41871 - RNA, 75 nt, Homo sapiens
cgccaccaaaagcaccaggccaggaggggaggagggagggccacggcaagggaagcacaaaaagagccgcagagg

SEQ ID NO: 41872 - RNA, 82 nt, Homo sapiens
aagacgccaggcgccgagcaggaaaaggaaggagcagagaggaacaacgaagcccaaagggggcaaacaaggcacacaacaa

SEQ ID NO: 41873 - RNA, 69 nt, Homo sapiens
acggcgcggcgacaagaggcagcacggcaggagacgaggagaggacagcaggacacccggaccccaccg

SEQ ID NO: 41874 - RNA, 77 nt, Homo sapiens
caccacagccagcaccaccaccaccacgccacgacagcagcagaggagcaccagcccaggcggaggcaacgggcgac

SEQ ID NO: 41875 - RNA, 87 nt, Homo sapiens
ggcgggggcggcggcggccagcgccagcagaagaccgaagaagcagccgaacacggagcagaaacgagcgcgaacgggacccaacag

SEQ ID NO: 41876 - RNA, 49 nt, Homo sapiens
ggcagggacagcgcaggcagcagacgccgcggcccgacaggagccagac

SEQ ID NO: 41877 - RNA, 83 nt, Homo sapiens
ccaaaagagggagaaagcacgggccagcacagagcgcacaacccagagggagagaaagccgaagcacaaacggaaagggccag

SEQ ID NO: 41878 - RNA, 74 nt, Homo sapiens
aaggagagaaacagccaaaacagcacaacagcgggaaaaagaaaagggcgaagacccgaagcagcgcaggaaca

SEQ ID NO: 41879 - RNA, 79 nt, Homo sapiens
gcaggaaccaccaggacagaaccaggccagagagcacgcagacacgaccgcccagcacggaacgcaagaggagaaccga

SEQ ID NO: 41880 - RNA, 79 nt, Homo sapiens
gacgggggaacccggggccagaggcgggcaaaacgccgagcccgagaacgaccccagaaggaaggagcgaggcacggga

SEQ ID NO: 41881 - RNA, 83 nt, Homo sapiens
cgggaccaggcccgggggcggcggccacgccaaggacggcacggcccaaagaagagcaggccaaggaacaagaagagaaacga

SEQ ID NO: 41882 - RNA, 72 nt, Homo sapiens
aaggcgggccgcaacgccacgacagaaggcgccaggcgggaaaccggcccagcggcgcaaggacacggagcc

SEQ ID NO: 41883 - RNA, 80 nt, Homo sapiens
aaggcacgcagggcggcggcggacccgcgcacgacccagacgggaacgccaggaaccagcaagagcaggagagagaggaa

SEQ ID NO: 41884 - RNA, 83 nt, Homo sapiens
gggagccaacacaaaaagaccagccagagacaaggcagagacgcaagaacaagagccacacgaagcagcaagacagcaccacc

SEQ ID NO: 41885 - RNA, 70 nt, Homo sapiens
gaaggccacgcggaaacaaggcgaccccagaaagaaaaccagaacgaggccagcagccagacaacaccaa

SEQ ID NO: 41886 - RNA, 88 nt, Homo sapiens
caggggcgcaggagaaagagaaacggcaggggccgacggagcaagagcgaggaacagcggaacacggagcggccccgccggccccagc

SEQ ID NO: 41887 - RNA, 78 nt, Homo sapiens
agccgcgccgagcgcgcggagaaccagagaagccggggcaagaacgccccggcaaggacggaggcaggcaccaccaac

SEQ ID NO: 41888 - RNA, 70 nt, Homo sapiens
ccagcgcgcaaggcagcccgcaacgcaccagacaggaagaagaggaacgaggccgggcgaaaggcagacg

SEQ ID NO: 41889 - RNA, 71 nt, Homo sapiens
gagagacagagacggcaggaaaccagaaaccgggcaagacaccgccagccaaaagcaggccggcaccggag

SEQ ID NO: 41890 - RNA, 62 nt, Homo sapiens
cccacacccaccaaaggggcggcacggagaaacaggccgccgacccccggcaaagcaccaga

SEQ ID NO: 41891 - RNA, 80 nt, Homo sapiens
cgacgacccagaaagagcaaccggagcagcaggagagccgagagccaaggcggacaaagcaccacccagcacaacagcaa

SEQ ID NO: 41892 - RNA, 78 nt, Homo sapiens
ggcgacaggcagaggagcggcgggaacgggagagagacgcaacagccgaaggagccgcaggaccggaagacagcacac

SEQ ID NO: 41893 - RNA, 87 nt, Homo sapiens
cccgggggcggacacaaccgcgggcccgggacagacacaggggagccgccaccaaaagcagacggaaaacccacggggaagaccaca

SEQ ID NO: 41894 - RNA, 81 nt, Homo sapiens
cagagcaaggcaaccgaccaggcgaaccgaccaagaacaacacccagagggccaggagaaggcgaagagagcagcgaccaa

SEQ ID NO: 41895 - RNA, 40 nt, Homo sapiens
gaagaggaccaggagcaaacagaaacggcagcccagccac

SEQ ID NO: 41896 - RNA, 43 nt, Homo sapiens
gagcgcgggcaacaaggcaacgcggggcgagccacagagacaa

SEQ ID NO: 41897 - RNA, 78 nt, Homo sapiens
gcggggccggagcggcgcagccggagggggccggaggaacaggagacagcggagaaagagcccgggaagcacgaagcc

SEQ ID NO: 41898 - RNA, 49 nt, Homo sapiens
ccccaagcaagaaaccgaaagggaaacaaagagccgcgcaagaccgcag

SEQ ID NO: 41899 - RNA, 76 nt, Homo sapiens
agcagcaaacagcgaccgccaagagacacacagggcaccagaccgggcggagaacggaaaagcaccaggaagcaga

SEQ ID NO: 41900 - RNA, 75 nt, Homo sapiens
acagagacccagaaaagggcaccaacacagccccaacagccaaggacgaggaggcggagggacccggaacgacag

SEQ ID NO: 41901 - RNA, 72 nt, Homo sapiens
agaagaagaagcggacccggacgcaggagaaacaggaagaacccgagcgaggagccaacacaggccagaaag

SEQ ID NO: 41902 - RNA, 53 nt, Homo sapiens
gcagggcgcccccgaaggcaaccaagcaacaccaggcaggaggagagcgacac

SEQ ID NO: 41903 - RNA, 70 nt, Homo sapiens
ggaacgggaacacacgaggcacagcaggacgggacagcagaccgaaaagggcggaaaaggaccaaggccc

SEQ ID NO: 41904 - RNA, 63 nt, Homo sapiens
gacccaacgccacggaccagaagaaacacgggccgggccgcaacccgggaccggacaacaaca

SEQ ID NO: 41905 - RNA, 78 nt, Homo sapiens
ggccacggacccggcgacaacacccggccccgagacagaagccggacaccccccaggcacagccacaccccagcggcc

SEQ ID NO: 41906 - RNA, 73 nt, Homo sapiens
ccgcccaaggaggcccagcggccagcaacagaagaaagcaagcaccggggaaagcggcccgaaacaagcagaa

SEQ ID NO: 41907 - RNA, 79 nt, Homo sapiens
gcggagcggaggaggagccggacccaggaaagaaggagaaggaagagaaacaaagagaaaacacgccgagaaaccagag

SEQ ID NO: 41908 - RNA, 80 nt, Homo sapiens
cagccaagccagagccgggccccaacaacccggaccccaagacgccgagacagaaacagaacggcgaagggagaaaagac

SEQ ID NO: 41909 - RNA, 83 nt, Homo sapiens
caaacaggggaaacccgcaagaggagacggaggcagagagaagagggagaggccggaggaagggaaggggccgggccgaggac

SEQ ID NO: 41910 - RNA, 60 nt, Homo sapiens
cacaggagcaagcagggggcacccaagcaggagagacgaggacgcgcacaggaaaggacg

SEQ ID NO: 41911 - RNA, 51 nt, Homo sapiens
aaagagaccacgagcccgaacaggggagcgggacgggcggcgagcggaccg

SEQ ID NO: 41912 - RNA, 76 nt, Homo sapiens
ccaagaacacggccacccaacagaaggggaaaagagacgcaaaccacgaggacagagaagagagaagccaccagca

SEQ ID NO: 41913 - RNA, 53 nt, Homo sapiens
gccaacacgaaggccaccgaggccggccaccgacacgcacggaaccagagagg

SEQ ID NO: 41914 - RNA, 72 nt, Homo sapiens
cagcacacagaggagagcgacgagaagggaaaaaagaagagaagcagaagcgaccacagcagaaggaagaga

SEQ ID NO: 41915 - RNA, 84 nt, Homo sapiens
agaagacagcaagaggcaaaaccggacaagaggccaaccaaccggaggccccgacacgccacgggcacgcaccccgccagccgg

SEQ ID NO: 41916 - RNA, 75 nt, Homo sapiens
ccacccagcggggagcacggcgagcagccaggccaggagagaaacgaaggaggcccaaccacaaaaggagccgac

SEQ ID NO: 41917 - RNA, 58 nt, Homo sapiens
cgcgaaggagaaagaaaagcccaaggacaaggcgcgaacggcggaggcaaaaaaggag

SEQ ID NO: 41918 - RNA, 78 nt, Homo sapiens
caacaggcaggagagcccaccaaggagccccacggcggggaccaggagcgagcaccaaaagggcgaagcagagaaggg

SEQ ID NO: 41919 - RNA, 37 nt, Homo sapiens
acccccgacaaaccagggaagggccgagcaaaacccc

SEQ ID NO: 41920 - RNA, 72 nt, Homo sapiens
cgacacaaacccaccacggcacacaggcaccccacacaacagccgaagaccaaacgggccacacgaccggac

SEQ ID NO: 41921 - RNA, 93 nt, Homo sapiens
ccgcgaggaccgcacggaggaggagcaggagcgcggagccgcgagccccgagccccgagcccggcgccggcgagaaacaccccaccagaccac

SEQ ID NO: 41922 - RNA, 72 nt, Homo sapiens
gacacaccaagcacccacggaggacccagaccagaaaaagagcagcccagcgggggcaggggacaagaccgg

SEQ ID NO: 41923 - RNA, 88 nt, Homo sapiens
ccgggccgggggcgccggaggagggcggcccgccggcgaggccgaaaagaacaggaacagacgacagggaacagcccagaaacacagc

SEQ ID NO: 41924 - RNA, 83 nt, Homo sapiens
gaacccccagcccaaacccggaaacccagcggcccagccgggcacaacagcaacgccagaaagagacggccccgaaacaaagg

SEQ ID NO: 41925 - RNA, 77 nt, Homo sapiens
cccagaaagagggcaacaaaaagacaagaaccccgggagcaacgcaacaggacggcaagagccacgcccacgagccg

SEQ ID NO: 41926 - RNA, 72 nt, Homo sapiens
ccaaaagcagggaggacggaccaaaaaaagaggcaaaccgacaccagcgacacaagcgcgagggaaccacag

SEQ ID NO: 41927 - RNA, 76 nt, Homo sapiens
cgggccagcggccgcgcacccccggccggaggcaccagcagcagagggaaggcaacacgagcggaagaacacacac

SEQ ID NO: 41928 - RNA, 53 nt, Homo sapiens
cggccacgacgcccccccaggccccacgacggcaggcgcacggaacagcgagg

SEQ ID NO: 41929 - RNA, 54 nt, Homo sapiens
gcgccaccacaccccaggcgccaccaggggccagaaccgcccacggcccccaca

SEQ ID NO: 41930 - RNA, 67 nt, Homo sapiens
gaagacacaaaggacggaggcacggccaccggagagaagacagggacgcaagggcagccgcgcgaac

SEQ ID NO: 41931 - RNA, 71 nt, Homo sapiens
cacacacacacaccacacacacacagagcagccacagggggagagagacgcgggaaccgccagcaaaccac

SEQ ID NO: 41932 - RNA, 121 nt, Homo sapiens
ccgacgacaccacacaccccgcagcagccccgagcgggcgcgcaggcacccgcacggcacagagaggaaaaagcgcggcaaagcgcggcccacacaggagccaaggaaagcccaacaagga

SEQ ID NO: 41933 - RNA, 75 nt, Homo sapiens
cgccgccccgccgcggcggggacgcagagccacccaggaccccaggaccagaaggcaaccaacagaaccaccaga

SEQ ID NO: 41934 - RNA, 75 nt, Homo sapiens
gagccaaaccagaagaggagggcccagaagaaaaaggaacagagacagacccgggggcccccaaggagagggaag

SEQ ID NO: 41935 - RNA, 69 nt, Homo sapiens
caccgcaagaccccgaagcccagagcaccgccccgggacaggagaaaaagcccgagagaaacaaaaaac

SEQ ID NO: 41936 - RNA, 84 nt, Homo sapiens
ggaagcagcgggcagcaggcacacccaacagaagaagcgcaggcacgacggccaggaccaccgagcggaaacaccgcgagccag

SEQ ID NO: 41937 - RNA, 78 nt, Homo sapiens
ccgcgccgcgccgcgccgcaccccgagcgaccggcagacgcagccgccggagggcgcggagcggggaccgcacaccgc

SEQ ID NO: 41938 - RNA, 74 nt, Homo sapiens
ggaaccgcaccagaggagaaccgcccacgagagagaaccagccgagggcggcgacggcggcgcgaggaccgacc

SEQ ID NO: 41939 - RNA, 75 nt, Homo sapiens
ggcaccgaagaaggcagaaacaggacaaaggggacgagacagggcagcaggagcagagagaccaagggaaaccga

SEQ ID NO: 41940 - RNA, 70 nt, Homo sapiens
ccggcgcgcgcgcccccagccccaagaaagggggaaacccgcccagggcgggagaccgccaagaaacacc

SEQ ID NO: 41941 - RNA, 112 nt, Homo sapiens
gccgcgacgcaagaccagcaacagaacgcgccgagcccccgcgacccaccgaaggccggggaccggagagcaaggggacccgcacacgcaacccgccccagggcaagggccc

SEQ ID NO: 41942 - RNA, 71 nt, Homo sapiens
aaaaagacaagaaaccgcacaagaccgggagggcccggcaaaacaaaagcgcaagggacaaagacgaggcg

SEQ ID NO: 41943 - RNA, 81 nt, Homo sapiens
aacgggccaggaggaccgggagaggcgcgggaggcgaggaggcggcggcggagacgggggagccgccaccaaaagcagacg

SEQ ID NO: 41944 - RNA, 80 nt, Homo sapiens
ggggggcgcgccacggcgacgccccagcccgcccaaagaaagaaggagccgacggccaggagaaagccaccaagaagaag

SEQ ID NO: 41945 - RNA, 78 nt, Homo sapiens
gcggcacggggaacgcagggcaggcacccaacagaagagcgaacaagcgcagcacaggcaaagagcgagaggaacagg

SEQ ID NO: 41946 - RNA, 81 nt, Homo sapiens
cacgcaccccagcccgccggggcgcggacaagaaggagccaggcagcaccccgagcagaaggcagaccggaggaacaaacc

SEQ ID NO: 41947 - RNA, 75 nt, Homo sapiens
cccccccccagcccaacgcagggcaaggcggggagagaggcccggcaacggcagccagacacaccaacccaaagg

SEQ ID NO: 41948 - RNA, 76 nt, Homo sapiens
acacgaaacagagaggggaaggagcccagcgacgaaagagcagaacgcccaagggagcaggagggaacccgacagg

SEQ ID NO: 41949 - RNA, 72 nt, Homo sapiens
cgagagcgggcgggggcccgcgccgcgccccgccagggccagcacgcacggacacggagagcaccccagaac

SEQ ID NO: 41950 - RNA, 57 nt, Homo sapiens
gacggacccacgcaggacagcgacacaggcaggcggccgaccaagaagacaggagca

SEQ ID NO: 41951 - RNA, 63 nt, Homo sapiens
gaaggcagcggaaacgcagacacgaacgggccgaagagaggcgcagggagcggccgcccagga

SEQ ID NO: 41952 - RNA, 83 nt, Homo sapiens
cgaggcgcggcgccggaggcgccgccaccgccgcaggacgcgacgcgcggcaccaggggcaagcgccgccgcgcggccgcccc

SEQ ID NO: 41953 - RNA, 81 nt, Homo sapiens
gagacgagccaggaacagcaggcgggccacggcccccagaccacaggcggagcagcagcagccggagccaggaccgcggag

SEQ ID NO: 41954 - RNA, 90 nt, Homo sapiens
gccggggcgccgcgcgccagcccaggaaaggcgccgaagagggcaggaggaggaagcccccccacacacaaaagggcaaggacagaacag

SEQ ID NO: 41955 - RNA, 58 nt, Homo sapiens
gcccaccgaagcgagaggaccaaccccccagagagcccagggcagagaaagagcgaga

SEQ ID NO: 41956 - RNA, 64 nt, Homo sapiens
ccaggccgaggagcccacaggaaccaaggagcaggaacagcagcacacagagggaagccggcac

SEQ ID NO: 41957 - RNA, 76 nt, Homo sapiens
agaaagccagggcaaagaccagaagacgaccccgacgcaggccaggagccgcggacagaagccgagcacggccgag

SEQ ID NO: 41958 - RNA, 62 nt, Homo sapiens
ggagaagcaagaaggcccggacacagcaaaccgggccacagcacgggagcaacaaaggcaac

SEQ ID NO: 41959 - RNA, 81 nt, Homo sapiens
ccgggcggaggaggaagagggggcacccagcacacccaagacgcggcaacaggaaccaacagggcgaggaagagggcagca

SEQ ID NO: 41960 - RNA, 70 nt, Homo sapiens
gggaacaaagaagaaggcaagagaagaccgaaagagagaagaagcaaaccgggaccggaagcaccaagga

SEQ ID NO: 41961 - RNA, 74 nt, Homo sapiens
agagacagggaacacggaaaagcagagcgcagagcccgaggaagagcagaagacgaaaggcggacaggagagcg

SEQ ID NO: 41962 - RNA, 53 nt, Homo sapiens
gagcgcgcacagagagcccccgagccccgcccaagagcagaagcagagacaac

SEQ ID NO: 41963 - RNA, 75 nt, Homo sapiens
aaagcgggagaagggggaagaaaaagagaaggggggcagaaagaagaggaggacaacaagccaacagagagagac

SEQ ID NO: 41964 - RNA, 99 nt, Homo sapiens
gcacacgacagcaacaagacacggagcaaggaggaaaacacacgagacaacccgagccagggcgcagcagggccgcccccccacaccccgcagccccga

SEQ ID NO: 41965 - RNA, 76 nt, Homo sapiens
gcaacaaaggacacacagggagaaaagcgcacacccaaagcacacaaggaccacaaaacaaaccacccaacacaag

SEQ ID NO: 41966 - RNA, 75 nt, Homo sapiens
cggcgccgccgggcgggcgggacagcccaaggcggaaaagcgaaggaagccacaagcacagcccacacaaaccag

SEQ ID NO: 41967 - RNA, 65 nt, Homo sapiens
caacagacccaggacaacgccaacaaaccgcggggcagagagccgcagccgggcaccagaaagca

SEQ ID NO: 41968 - RNA, 53 nt, Homo sapiens
aggcgaccgccccaaggaaccacggcgccaaacggacgaagcaaaaacacgga

SEQ ID NO: 41969 - RNA, 52 nt, Homo sapiens
gcggcaggaaagcagaacgcggaagccgcagaaggaccggccagaagcaagc

SEQ ID NO: 41970 - RNA, 62 nt, Homo sapiens
ggaagaccccaagaaggggaccaacagggcggaacagccacagcgcaagccggcacacaggg

SEQ ID NO: 41971 - RNA, 84 nt, Homo sapiens
gcggaggaggcagcgggggccgcgcgggcagccaccagggaccaaccaccccggacccaccacagagcaaaaaaaggcccagag

SEQ ID NO: 41972 - RNA, 81 nt, Homo sapiens
gcggccggggccggggcgccgccgggcggccgggcgcggcgagcccagggacccagggcgagggcaacgaggcgccgccga

SEQ ID NO: 41973 - RNA, 40 nt, Homo sapiens
gaccacgccacgcccggagggacaggcaagaaggaagaag

SEQ ID NO: 41974 - RNA, 78 nt, Homo sapiens
aggaggcggcgggccccgcccgccgaagggagagaaccaccaccaagccgagagacaaaaacagcgacacaggagcac

SEQ ID NO: 41975 - RNA, 74 nt, Homo sapiens
cagaggagacagccacaagaggacaaaggggcagggaaaaaaagacggagccgccgccacccagacggaggccc

SEQ ID NO: 41976 - RNA, 52 nt, Homo sapiens
cggcaagacaggagcgcccgagacacagacccgagccccaaagacagaaaag

SEQ ID NO: 41977 - RNA, 67 nt, Homo sapiens
agggagccaggccagaaaacggggcaacccacaacagaggaaaagggcaacgccggaaagacacacc

SEQ ID NO: 41978 - RNA, 90 nt, Homo sapiens
ccccggacccggagacaccccgcagcacagccgcgaccaagggagggcaacagagagaaaagcgaacacccaggcgcgcagagaccgaca

SEQ ID NO: 41979 - RNA, 36 nt, Homo sapiens
aaaaggaagcacaccaagggcgcaggaggcccacag

SEQ ID NO: 41980 - RNA, 90 nt, Homo sapiens
acgcgcgcccagaaccgcacccaccgcggcgagagcgcaaggagccccgcccggcccgaaagccgcagcgacagcgaaaagggcaagacg

SEQ ID NO: 41981 - RNA, 73 nt, Homo sapiens
cgacaacagaggagaaggcgaagaaaacagccaagcaccagaaggagagaagcccccccacggcaggagccag

SEQ ID NO: 41982 - RNA, 61 nt, Homo sapiens
cacaaaccgcgccagaaaaggggagaggcaccagcaacagaccaaccgcagcaagcacaga

SEQ ID NO: 41983 - RNA, 75 nt, Homo sapiens
cacagagccgaggcagccgaggggcacaccagaacaacacacacaggagcagggagccaaccacaccagcacaca

SEQ ID NO: 41984 - RNA, 42 nt, Homo sapiens
ccacagaagcgcagaggagagacgggcccgcccgccgacccg

SEQ ID NO: 41985 - RNA, 78 nt, Homo sapiens
gacagggcgccggggaagcggcaaggcgccaccggaagaaacgggaggggaggagccgggaaagacagcgccaagcca

SEQ ID NO: 41986 - RNA, 63 nt, Homo sapiens
cgcagggcgcccccgggcgaggcaagcgaagaagcgcggagcgcaaggcacgcagaccaaaac

SEQ ID NO: 41987 - RNA, 66 nt, Homo sapiens
caaacgaccaggcgggaccaagaggggacccccgaaacaccccccaggaaagccgcagcggggaga

SEQ ID NO: 41988 - RNA, 72 nt, Homo sapiens
agcaggcacgcaagaagaaggaccaaaagaaggggagcccagaagcgagaggaaaaggcaaacgacgcagac

SEQ ID NO: 41989 - RNA, 75 nt, Homo sapiens
gcaaccccacccccccagcggccgcagggccgacaagcggaccaagccagacccaaggagacaagacgagggaga

SEQ ID NO: 41990 - RNA, 76 nt, Homo sapiens
ggacaaagccagacgcaccaagaaacgacacaacacaaagagccaaaacaaggcacagaagagaaggcacgaaaac

SEQ ID NO: 41991 - RNA, 83 nt, Homo sapiens
cacagaaaacagcaggcggagaacaacgaaccaaccacaaggccgaaggcaggacgccaggaaagcaggcagagcaaccccca

SEQ ID NO: 41992 - RNA, 73 nt, Homo sapiens
gagagccacaaaaaaggaagcgaaagccagccaaagcggcaccacaaaccccgcccaccagggaggcagggcc

SEQ ID NO: 41993 - RNA, 88 nt, Homo sapiens
ccggacgaaccacaggaagcgcggggcggcggcgaaaggacggcgccggaccgaaggcgcgaccacgacgagaagcgggggccgcagc

SEQ ID NO: 41994 - RNA, 55 nt, Homo sapiens
ggagcgagaagccacaccaagggccaaacaaaagcggaaccgggacgaggaacgg

SEQ ID NO: 41995 - RNA, 67 nt, Homo sapiens
acagaacagcaaagggaaacaagcaaacagacccaagcagggcccaagagccgggccagcgaaccac

SEQ ID NO: 41996 - RNA, 38 nt, Homo sapiens
agcacaagaagaagacgaggccccgacggcagcccacc

SEQ ID NO: 41997 - RNA, 39 nt, Homo sapiens
cagagggagcggagggcagaaaaccagacgagagacaga

SEQ ID NO: 41998 - RNA, 74 nt, Homo sapiens
gcaaaggagacccaaggaacaggccaagagagccgaacccaccgagccagggagcagagccccgagaggggcgc

SEQ ID NO: 41999 - RNA, 71 nt, Homo sapiens
ggcccgcggccggcgcgcagacgcagaaaacagacacacagcggagacaagcagggccggcaggaggcggg

SEQ ID NO: 42000 - RNA, 73 nt, Homo sapiens
ggcgggaagaagcaaacgaagggcaagaacaaaaagggagccgccaccaaaagcagacggaaaacccacgggg

SEQ ID NO: 42001 - RNA, 39 nt, Homo sapiens
cagcccagagcgcaaagagacgggggcaaccggacagag

SEQ ID NO: 42002 - RNA, 64 nt, Homo sapiens
caggcgccaagaaggcccgcccagggcaggccagaccacggacggagccagggaaggggacgcg

SEQ ID NO: 42003 - RNA, 78 nt, Homo sapiens
cggccaaccggcaagaccagacgggaacgggagacaagcgcagcgagaagaggccccaggaccggcgaggcccccccc

SEQ ID NO: 42004 - RNA, 69 nt, Homo sapiens
cggaaacgaacaggcaggaagaacacccagggaagagccgacgcaaggccagggggacagagggcaaaa

SEQ ID NO: 42005 - RNA, 77 nt, Homo sapiens
agagccacgagcagccgaggggaaagcacagagagcaggaacaaggcagccaagcacaaggacgagacccaagcagg

SEQ ID NO: 42006 - RNA, 85 nt, Homo sapiens
agccagccaccagcagaaggccccggaggccagaagcggacccagaagaggggagcagcaaggaggaagacagccggggccggag

SEQ ID NO: 42007 - RNA, 75 nt, Homo sapiens
cggcgcggaaggacgaggcgaggcgagaaacgagggaagccgagaacgagcaaaaagcagaccccaccccggacc

SEQ ID NO: 42008 - RNA, 83 nt, Homo sapiens
aaacccagcaaaagcgggaagaacaaaggaaggggagcccgggacccccgggggcgcagcacacaaagggagaagaccacaga

SEQ ID NO: 42009 - RNA, 96 nt, Homo sapiens
gaacagacgggcagccaaaggagcagacgcccgagaagcccagcggaggcacccaccacgggccaggcgggccagaggcaagccgcgggagccacg

SEQ ID NO: 42010 - RNA, 45 nt, Homo sapiens
cagcggccgccggccccccacgagagagaagaaagacgggacaag

SEQ ID NO: 42011 - RNA, 77 nt, Homo sapiens
acccgcccagaagacaacacaggcggagccaagaaccgaagcaagcagacagagggaagcccagcgcaggaaaagag

SEQ ID NO: 42012 - RNA, 81 nt, Homo sapiens
gaaccaccagcacgacgggcacacaaggccaagggccaaggcggcggggagacgagaagaagacggggacagagagcgcag

SEQ ID NO: 42013 - RNA, 50 nt, Homo sapiens
cccagcaccgcagggcccgaaggacaaaagcgacagcccggggcgagaca

SEQ ID NO: 42014 - RNA, 107 nt, Homo sapiens
gcaggagcccagacgccaagaacacaaaaaccaaaaaaggaaaccagacccgcccccaggagcggaacccaaagcccaaagaggaaggaggagccccaggcccacca

SEQ ID NO: 42015 - RNA, 77 nt, Homo sapiens
aagcaaggaaacgcaggaagaagaagaccggcagaaagacagcggggaaagacacgaaaagaaagcgggaagcacga

SEQ ID NO: 42016 - RNA, 77 nt, Homo sapiens
ccggggcggcccaccccccacgcaccgcacaacaagaggccggcggggcgacaggaaagaccacagcaagaccacgc

SEQ ID NO: 42017 - RNA, 82 nt, Homo sapiens
cgccgagcgcgcggaggcggaggcgggggccaacgggccaacgccggcaggggacggcccacgcgaccggagcccggcaccg

SEQ ID NO: 42018 - RNA, 54 nt, Homo sapiens
cagggcacaagaccgacagacaacagcagaaggcccgccagcaagaggaaaagc

SEQ ID NO: 42019 - RNA, 69 nt, Homo sapiens
gaagaggcgccgggacaggccggaccagaaaaagccgaggacgggcccggagcagagggagaacggaac

SEQ ID NO: 42020 - RNA, 86 nt, Homo sapiens
acgcccgccggaccgcgcccaggccccccagggagaagagccgcgaggcaggaggccggcccgcaggagggagacagccagaggag

SEQ ID NO: 42021 - RNA, 43 nt, Homo sapiens
gcgggaagaagacccgcgccgggccgcacaggagacagcacca

SEQ ID NO: 42022 - RNA, 79 nt, Homo sapiens
cgcccggccccgcgcgggcggacggcggaggcgcccccagcaacgcggaccagcagcggaagcccccgagagcggcgac

SEQ ID NO: 42023 - RNA, 55 nt, Homo sapiens
gacgacagcagccagaaccgaacacccaacaagaaggcaacgacaaacagccaag

SEQ ID NO: 42024 - RNA, 80 nt, Homo sapiens
gccaaaaggaagacccagccagaccagggacaaagagcaaacagacagggccgcaggacgggaggcacaagaccgcacca

SEQ ID NO: 42025 - RNA, 78 nt, Homo sapiens
cgacgaccgacaggggggaaagcgcccgagcggcgccgacacgggaagagacgcggcgccggcgacgaggcgaacccc

SEQ ID NO: 42026 - RNA, 74 nt, Homo sapiens
aaggaggccgcaaagggcacgaagcaggaaagaacgacgccagggaggccagaacacccagcgaaccaacagac

SEQ ID NO: 42027 - RNA, 51 nt, Homo sapiens
accggcccgccgcccggagcacggaagagagccacaagcgaaaagagcgag

SEQ ID NO: 42028 - RNA, 59 nt, Homo sapiens
gggagaagacgaggagagcggaaaaaccccaagccagcaggacaggcacacccgggcag

SEQ ID NO: 42029 - RNA, 75 nt, Homo sapiens
ccgagccgccaccagcccccacagccccccagggagaccagaagaaccaggacaagaacgcgccacaaagacgaa

SEQ ID NO: 42030 - RNA, 55 nt, Homo sapiens
gcaaccgggagcccaggaagcgcagacacagaagaggaggacgcagcagagaggg

SEQ ID NO: 42031 - RNA, 87 nt, Homo sapiens
ggcgaacacaaaaggcgccgaagcaggacccgaagccaaaccaggaggggacagagagccgaaagccgggcaaggggaaagaaggcc

SEQ ID NO: 42032 - RNA, 70 nt, Homo sapiens
cgcgcgccaggagacggccgacccgccagaggaggccccccagccacggaaacaaaacaacccgcgcaca

SEQ ID NO: 42033 - RNA, 76 nt, Homo sapiens
gcaggcagcaggaccacgggcgggcggaggggagcgcaggcaggagggagaaggacccagaaaggaggcacaggag

SEQ ID NO: 42034 - RNA, 79 nt, Homo sapiens
cccggaacggggcgccgccccgggccccccagcagaagaccccggcggacacaggggacgaagggaacccgccgggcgg

SEQ ID NO: 42035 - RNA, 74 nt, Homo sapiens
cagccggaagcacacggagaaccaccaaacacagggcagaaagccagacaccaggacaaggacacggaaaagcc

SEQ ID NO: 42036 - RNA, 57 nt, Homo sapiens
cggcggcgccccgcgcgggacggcgcagcggcgacacggccaaccaaaaaccccaac

SEQ ID NO: 42037 - RNA, 88 nt, Homo sapiens
acagaacccaaagccgcccccagccccgggcacagaaagcgagagagccaaagacgagaggagaggaagcagccacacggagagagga

SEQ ID NO: 42038 - RNA, 66 nt, Homo sapiens
aaggaaaccaacaaggcacacgaaacagacgcacgccgaaaaaaaacgaaccaggggagaaaacca

SEQ ID NO: 42039 - RNA, 77 nt, Homo sapiens
agaaaagaagagaagaaacagagaaagacagcaaagaaaaggagaagaaaggaaaaaaacaaccccgggcaccccgc

SEQ ID NO: 42040 - RNA, 77 nt, Homo sapiens
acggaaaaccgaggaagccaaaggcggggacaggcacaaggcagccacccgcccaggaagagaggagccaggaagag

SEQ ID NO: 42041 - RNA, 75 nt, Homo sapiens
gaagggaaccaaaaacaggcacgccgaaaacccgaccccaacaagcccccgacagcaaaacggcgaggaaagaga

SEQ ID NO: 42042 - RNA, 74 nt, Homo sapiens
gagagccagaggccgacgcgaggagcggagaacgcacagaacacccggccccccgccagcccgacgccggccgc

SEQ ID NO: 42043 - RNA, 72 nt, Homo sapiens
cccgaacaaggaaaagaggccgagcagaccaagagaagacagaacacacgacaccagaagaaaccagaacag

SEQ ID NO: 42044 - RNA, 54 nt, Homo sapiens
cgagcaggaaccccaggaaacggccagggggaacaggcaagcaagagcacccca

SEQ ID NO: 42045 - RNA, 66 nt, Homo sapiens
aaagggcagaagcaaaacaggacgacccgaggaacagaggcgggcgcggacggcaggggcgccggg

SEQ ID NO: 42046 - RNA, 77 nt, Homo sapiens
ccagaagcgcaccaagaaacaagaaccaacaccaggaacgggacggcagacaaggaaagcagcacacgcaccaaaga

SEQ ID NO: 42047 - RNA, 80 nt, Homo sapiens
cgagcacgcgggcgcacagcgcgacgggcggacggaggaggacccaaagacaggaccacgcaccagcagagaaggaaagc

SEQ ID NO: 42048 - RNA, 57 nt, Homo sapiens
acgacgccggcacccaaccagagaggaagacaacgaggcggaggcaaggcagaccgg

SEQ ID NO: 42049 - RNA, 80 nt, Homo sapiens
caacgaaagagccaaggcaaaggcaggaaccgccgccccggaccagcaggagaggcaccagccacacaagacacacccac

SEQ ID NO: 42050 - RNA, 87 nt, Homo sapiens
ccgaaggaagaagcaagcagagaagagagggcagcacggcgcaaagacggacccgaggaagcggaacaaggggagacaggaaccgag

SEQ ID NO: 42051 - RNA, 85 nt, Homo sapiens
cagcaagcccacaccccggaaaccaggacacagagaccccaaggccggcccaggccgcccaaagagaagcccaggaggcggcgcc

SEQ ID NO: 42052 - RNA, 62 nt, Homo sapiens
agaaggccggagacaccagcaggacagagcgggagccaccagcgccaaagggaagccaggag

SEQ ID NO: 42053 - RNA, 58 nt, Homo sapiens
ccggaggaacccggacccggcgagcgaccagcgccaaccgaggaagcagagggagcac

SEQ ID NO: 42054 - RNA, 77 nt, Homo sapiens
aacaaccaagagccgcccaggggcgccagccccagggagccccaggcaagaagaaccaccccgcacaagggcagcag

SEQ ID NO: 42055 - RNA, 73 nt, Homo sapiens
agcgcccagcagcgcaggagacccccgcaacggggcgagagaaaggggggacccacggcagggccaccgcgcg

SEQ ID NO: 42056 - RNA, 56 nt, Homo sapiens
ggaggacacaccaaacagggaacccaagccggcaaaagggcaacaaggaccaaagg

SEQ ID NO: 42057 - RNA, 77 nt, Homo sapiens
gaggggcccgggcccagagcggaagacaagacgggcggagaacggaaaagcaccaggaagcagagaggaccgcagaa

SEQ ID NO: 42058 - RNA, 84 nt, Homo sapiens
ggggccgggccgggagccccagggcagccgccccgccgagcgcaggaggcagcacggcaggagacgaggagaggacagcaggac

SEQ ID NO: 42059 - RNA, 83 nt, Homo sapiens
gggcgacggggcccagcagacagccgaggggagcgcggggcccggcagaaaggaccaaagccccccgaggcaaggaacacaag

SEQ ID NO: 42060 - RNA, 84 nt, Homo sapiens
agaggcaggcggagccgaccgggccagcaggacggcacaaacaagcacacaggaaagccaaaacacaaaaagagggagaagagc

SEQ ID NO: 42061 - RNA, 58 nt, Homo sapiens
ccaccaggccacgaggagggcgcgagaagacaaagggaaagacaaggagccgggccga

SEQ ID NO: 42062 - RNA, 55 nt, Homo sapiens
ccgcgagagaggcaagccggggagcccaaaagcaaagcagggcagcaaagaacac

SEQ ID NO: 42063 - RNA, 82 nt, Homo sapiens
agcgcagcccccaaagccgcgcgagaggagccgggacacgccagcgcgggcccaggaaaaggaccaggaagaagcaggacga

SEQ ID NO: 42064 - RNA, 82 nt, Homo sapiens
cagggagaaagccaagcagcaggaggcccaaggaacagcacagcagcgacacacggaccggagcagcccacagccacaggac

SEQ ID NO: 42065 - RNA, 73 nt, Homo sapiens
cgaagacaacacgccacacgcccaccagcccgacaaggccggagcgggaaggagacaacggcagcgggccgca

SEQ ID NO: 42066 - RNA, 79 nt, Homo sapiens
cgaaagacacagacgccgcgggggacaacaggcacaaccgaagaagcggagaaaagaagaagacacgcagaagaaggaa

SEQ ID NO: 42067 - RNA, 71 nt, Homo sapiens
ggccggcagccagggcagcaggcgggcagaaagaacgcaaggagggacaggacggaaggagcggaggaaga

SEQ ID NO: 42068 - RNA, 73 nt, Homo sapiens
ccggggaacaaacacaccgaaccagagagaagaaagggggcccagccgcccaacagcacaagaagcgccacca

SEQ ID NO: 42069 - RNA, 55 nt, Homo sapiens
cgcacagaaaaggaggcgcagaccgccgaacggggagggccagacaaggggaaca

SEQ ID NO: 42070 - RNA, 84 nt, Homo sapiens
cccggccaacccagaaccccagcaccgaaagggaccgaaaggagagcaaagggaacccagaaccgcggaccacagcaaaccaag

SEQ ID NO: 42071 - RNA, 57 nt, Homo sapiens
ccacaccgcaagccaaacagagaaggcgggacacgcagccaagcgcgcacccgccgg

SEQ ID NO: 42072 - RNA, 78 nt, Homo sapiens
caaaacaacgaccagaccaggagaacaacaaggcagaaccaacacccgggaaccgggggcgaaggacagggacggccc

SEQ ID NO: 42073 - RNA, 69 nt, Homo sapiens
gaaggccggaagagaaggggaaaagacgcacgcaagaggaggcagccaccagcaggaggaaaaccaacg

SEQ ID NO: 42074 - RNA, 121 nt, Homo sapiens
acccaggcagccggggcagagacaccgggagaagcccggacggaaaacggcacgaaggagaccaacagagaaaagccagaggagaagaggaggaggaggaggaagagagagaggaagaaga

SEQ ID NO: 42075 - RNA, 88 nt, Homo sapiens
cagcaagaacagagaggcggggagagacggccaagcagcaccagcggccggggaaaggggacagaagagacaggacaggagaagcagg

SEQ ID NO: 42076 - RNA, 78 nt, Homo sapiens
cgccacgagcgccccccgagcggggggacgcgccaggcacagcagcagacaaagagacgggaacccgggagggaaacc

SEQ ID NO: 42077 - RNA, 83 nt, Homo sapiens
gggcgggggaggggacgcgagggcccaggcgaaaaccgaaggccgcggaaagggagcgcggagccagcgcccggcaaggagcg

SEQ ID NO: 42078 - RNA, 38 nt, Homo sapiens
gagccgcgcacgcacagacaaggggggcaggccggacc

SEQ ID NO: 42079 - RNA, 76 nt, Homo sapiens
ccggcgccggggacgaggagaggaccaggaggaggaggcagaggcaaccaaacgggcgaacaaaaccagccacgga

SEQ ID NO: 42080 - RNA, 76 nt, Homo sapiens
gcaacaggagggcgaccacaagcaaacaggagcagccacagggcggacagccggaagagacagcgcacagacgcag

SEQ ID NO: 42081 - RNA, 71 nt, Homo sapiens
caaaaagacgaccaacgcagggcggggagaaggcaccaacagggcagaaagcaacagaagcagaagaaagg

SEQ ID NO: 42082 - RNA, 74 nt, Homo sapiens
ggcccgggccgggagcgggcagacggcccgagcacacgcaagagaccacaggcagcccccgggaaggcccacga

SEQ ID NO: 42083 - RNA, 80 nt, Homo sapiens
gggccaggcgcaaggccagggccaaggagagacagaagggccaagcccacgcagagcaaaggagaagcggaggcagacgc

SEQ ID NO: 42084 - RNA, 41 nt, Homo sapiens
cgcagccagggcccggaaagaaacagcgggaggcacggcag

SEQ ID NO: 42085 - RNA, 81 nt, Homo sapiens
accccccaaggagaggccccggccaaaacagaagaggcaaagcccagccacagcagcagcccagcagcaaacaaccaaaga

SEQ ID NO: 42086 - RNA, 82 nt, Homo sapiens
cgggacaaaaaccaaagcaacagaaccggaagaccggaaggcgcgagaaagaacgggaaaggcggaacaggaaacagcaggg

SEQ ID NO: 42087 - RNA, 76 nt, Homo sapiens
aagagccacagggaccaaaacgaggaaggccaggaacgcagaagaccgcaggggaaaaccaaagaccgacaagacc

SEQ ID NO: 42088 - RNA, 76 nt, Homo sapiens
gaaggcaggccaaaccaccgaccagaggaagcacccgcgagaaagaagggcacagcgaaacagcccggccaaaaga

SEQ ID NO: 42089 - RNA, 38 nt, Homo sapiens
acaggggaacggccacccgacgacgccacccacaaaga

SEQ ID NO: 42090 - RNA, 80 nt, Homo sapiens
cgaacagggagaagacagggcagacagaagcgaagaaccaccacgacgccaaccgccacggcggaagggccaaacccgaa

SEQ ID NO: 42091 - RNA, 74 nt, Homo sapiens
ggcggcggagggagacacacaacaccacaaagacaagccagcgccagggagcacaaccacaagcccaggagagc

SEQ ID NO: 42092 - RNA, 81 nt, Homo sapiens
ggagaggacaagaccacgagccaggcacggaaggacgagcgcacaggagccggaggaaccacggacaacaacagcggggga

SEQ ID NO: 42093 - RNA, 57 nt, Homo sapiens
gacgggcacagcgagagcccgccacgccacaccgcaggaggagcaagcacaacaggc

SEQ ID NO: 42094 - RNA, 36 nt, Homo sapiens
gcccgcggaggcagcggagcggcacgggccggccca

SEQ ID NO: 42095 - RNA, 82 nt, Homo sapiens
gagccgaggcagaagacggggcccgggaccacaggccccggcccagagcccccccagcgccgccgcccagccagccccaggg

SEQ ID NO: 42096 - RNA, 83 nt, Homo sapiens
cagacagacgcgcaggaagaagagggaagccaaggcacaggggcccgacccagcaggacagaaaggcaccacggacgcaccag

SEQ ID NO: 42097 - RNA, 46 nt, Homo sapiens
caccgggagcagcagaggaaggggccggccaggacggggccgaagc

SEQ ID NO: 42098 - RNA, 80 nt, Homo sapiens
gcgacccgggagacacgacgcgagcacacaagaaaagaacagaacagccaggccccaagaaagagaggggacgaggacac

SEQ ID NO: 42099 - RNA, 36 nt, Homo sapiens
acggaggcgagagaccgcgaaaagcgccaggcaggc

SEQ ID NO: 42100 - RNA, 32 nt, Homo sapiens
acagccgcggacccagaaggagcgacgcgcac

SEQ ID NO: 42101 - RNA, 48 nt, Homo sapiens
aagcagaagggcgaaagcaccagcgcacagagacggccggcaacaagc

SEQ ID NO: 42102 - RNA, 67 nt, Homo sapiens
gaggcccgcccagagcgagacgacgggaccgaaggaccccgccagagacaaccgagcgccaggagag

SEQ ID NO: 42103 - RNA, 76 nt, Homo sapiens
ggcaccggcagaaaggaggaggaaaacacccccaagaaggagaagcggcgaggaaggaagccgacgcccagcagcg

SEQ ID NO: 42104 - RNA, 84 nt, Homo sapiens
ccgaaggcagcacaacgcccaggccgcagccacgccccagggcgcgccagacacacaggagggcaagggggaccgcggcagcag

SEQ ID NO: 42105 - RNA, 109 nt, Homo sapiens
gagcgaaaacagccaaaagaaaggccagcaccgaagaagagggcgcgcccgagagggagagcacggaagagcgcggcggggcgcggggcccgcggccccacgcgcaccc

SEQ ID NO: 42106 - RNA, 85 nt, Homo sapiens
gcgggccggaggggagacgggaggcaggagaccagccacaacggggcgacacaggacccggaggacgagggccccaagggcaccc

SEQ ID NO: 42107 - RNA, 58 nt, Homo sapiens
aacaaggaaaacgcagagagaacacgggcccaaaaaacaaagagaaaccaggcgggga

SEQ ID NO: 42108 - RNA, 72 nt, Homo sapiens
acagagagccaggaggaggggaccacaagacccacggaaccaaagcagacaaccggggcccacagcgccaaa

SEQ ID NO: 42109 - RNA, 72 nt, Homo sapiens
cgacagaggaccgcccgcagcaaccaaaacccacgcacagaggccaccagcagccagaaagacccagagaag

SEQ ID NO: 42110 - RNA, 78 nt, Homo sapiens
ccaaggacacccaagagggcgagcaggacgaagcgcccgccaccaagaaaaacaaccaccagcgagcaaaaaggcaaa

SEQ ID NO: 42111 - RNA, 72 nt, Homo sapiens
ggggacacccggcacgcagcggagagcccgccaccaaccccgacaggagggcaccaccgcagccggcccagc

SEQ ID NO: 42112 - RNA, 92 nt, Homo sapiens
cccgagcaggcagaaaaccgcggaagcgccaaccggacagccaggacacggccaaggccggcgagaacgcccgcggcagcgaggggaccaag

SEQ ID NO: 42113 - RNA, 58 nt, Homo sapiens
gaggcgacggcaaagaggagaacgacccccaggagggcaaaccgacacaaagcgagag

SEQ ID NO: 42114 - RNA, 70 nt, Homo sapiens
ccaaaccaagaccagaagaccgacaggaggccccggaagacggaacgaagaaccccaacgggagaacagg

SEQ ID NO: 42115 - RNA, 77 nt, Homo sapiens
aaaacagcggcagaacaaagcaaaagaacgagacgacgccaagaaacccgggccggcgcacacggacacccaaagaa

SEQ ID NO: 42116 - RNA, 80 nt, Homo sapiens
cccggacgcagagcccgcgcccgcgccggcggcaagaagacggagccggagcacggggagagaagaagaaggaggccgcg

SEQ ID NO: 42117 - RNA, 83 nt, Homo sapiens
cgccacgcgcggcgcgccgaggacggggagccgaggaggagcaggagccgggacaccggggaggaggaggaaggcgggacgag

SEQ ID NO: 42118 - RNA, 80 nt, Homo sapiens
accaccgggcgccgagccggcggccgcacgagagaagagggaggccgaggaccagcccggacagagaaacggcgcgggaa

SEQ ID NO: 42119 - RNA, 75 nt, Homo sapiens
gagaccgcgacacccacacccacaccacaagccgcccggacaagagccgggaagcgggaaggcacggagcaccag

SEQ ID NO: 42120 - RNA, 82 nt, Homo sapiens
ggggaccaaggccgagagccggaacaaacgagggcccgggaggaccgacgcagccagacacccagacagcccgaacacggaa

SEQ ID NO: 42121 - RNA, 70 nt, Homo sapiens
caagaaacaccaacacaaaaaaaaccaacagccccccaggaggagagcaaacacacacggagaaagcgac

SEQ ID NO: 42122 - RNA, 84 nt, Homo sapiens
cccggagcaagcggagccccccaagagccggaaaggaacgaggcgcgacacaccagcggagcgggggaacccccccgggcagcc

SEQ ID NO: 42123 - RNA, 75 nt, Homo sapiens
ccgagccccacgcacccaggccacgcgaagagggaaaagcccggacaaggagaacaccaacaccagcagcagagg

SEQ ID NO: 42124 - RNA, 51 nt, Homo sapiens
gaagaagggacaaaagaacaacgccagaaagaaagccaccagagagggcag

SEQ ID NO: 42125 - RNA, 82 nt, Homo sapiens
gcgccgcggcgaggagcgagcgcgcgaggggcggccgagcagaagaggcggccacccacgagccgacggcaaacgccaggga

SEQ ID NO: 42126 - RNA, 69 nt, Homo sapiens
gggaagcagcacgagagcgggacggagcgcgaaccaccgcggcagaacggcggggccgaggaccaggag

SEQ ID NO: 42127 - RNA, 80 nt, Homo sapiens
agcgcaacaacgacagcaggccagggacaggagagcgggcaagaggggaacgcgcgcacgaacccagaggaccagaacgg

SEQ ID NO: 42128 - RNA, 51 nt, Homo sapiens
cggcggaggacgacgcgccaaccagacgcgcgggaggaacagcagaagcag

SEQ ID NO: 42129 - RNA, 81 nt, Homo sapiens
agggccgcccaacgccgagagaacccaccgcaagagaccaaaggccaagagcaccgcagccaccagcccggaacccgccaa

SEQ ID NO: 42130 - RNA, 78 nt, Homo sapiens
cgcgggcggcgggagagcgaggcacggcaaggggccggagggccggcccagaacgcagcagagagacgcaggaaaacc

SEQ ID NO: 42131 - RNA, 82 nt, Homo sapiens
aggaagcggcaaagccagaaagaggaggccagagcggcccaaagggagaagaaagaacaaagacaaggaacagcggcgccaa

SEQ ID NO: 42132 - RNA, 70 nt, Homo sapiens
ggggcgaagaagagcgccagacccacagaagacaacgaggcaagagagcaaagcgaacaaccagaaaccc

SEQ ID NO: 42133 - RNA, 72 nt, Homo sapiens
cccaaccgccgagcaagggggggccacaaagccagcagcccaggcaaacaccacagaaacaagcgaggaccc

SEQ ID NO: 42134 - RNA, 73 nt, Homo sapiens
gagagcgggcaccccccaaacgacgcagccacggagaggacgaaggacagagagggacgggcagacgccccga

SEQ ID NO: 42135 - RNA, 51 nt, Homo sapiens
caccaaaggggaaacagaaacaagggcgacgccaggagcacaccgaaaaga

SEQ ID NO: 42136 - RNA, 71 nt, Homo sapiens
gaaagcggggcacaggcgggcacgcgcccagagagggccacgggcccaggcggccaacccggggcaaacag

SEQ ID NO: 42137 - RNA, 67 nt, Homo sapiens
gaggaagaacgccgccaccagccaccaccaaggcaagagcgaaggagaaaggcaacaaggcccgagc

SEQ ID NO: 42138 - RNA, 63 nt, Homo sapiens
cggcggcgcggagccagcgcgcagaccagcgggacaggggggacacagccggggccacgacag

SEQ ID NO: 42139 - RNA, 47 nt, Homo sapiens
aacccaccgcccggcaagccccgccagagagggcgaaccaaagaagg

SEQ ID NO: 42140 - RNA, 71 nt, Homo sapiens
accccagagccagccagacggcggggagacacagggcccacccaagcaagaagacacagagaagcccggcc

SEQ ID NO: 42141 - RNA, 76 nt, Homo sapiens
ccgcggccccccgggcgcacaagcagagggccagaaccaccgccagagccgccccgcccacaggcggcgcgcacgg

SEQ ID NO: 42142 - RNA, 76 nt, Homo sapiens
caaccagagaagacccaaacccagcaagccagcaggccagagagaagaacagcagaaaggaccacgagagcgaagg

SEQ ID NO: 42143 - RNA, 58 nt, Homo sapiens
ggaagccggaacccccccggagggaaaacaccaagcgggaagagggcagcagaagaca

SEQ ID NO: 42144 - RNA, 77 nt, Homo sapiens
aggggcccccaccacccggaggagcagcccgccccgccgggggagacgacccccgccaggccagaccccgaggcccc

SEQ ID NO: 42145 - RNA, 70 nt, Homo sapiens
gacaaaggagaacagggcagacccggagcccaagggcaccaaagcgaagaggaagaggccgaagggggag

SEQ ID NO: 42146 - RNA, 82 nt, Homo sapiens
caaggggaagaaaaagacaagaggaagaagcgcggacccaggaagggaccacagaccagcacgccggcgccacgaaccgagc

SEQ ID NO: 42147 - RNA, 80 nt, Homo sapiens
gggcagacgaggccacagcccaggcacaggaaaggaagggccgcgcggaaggggacaggcacggcgacaacggacgccca

SEQ ID NO: 42148 - RNA, 76 nt, Homo sapiens
ggcgaggggaagcggggacgcccagcgagcacagaagacgaccccgacgcaggccaggagccgcggacagaagccg

SEQ ID NO: 42149 - RNA, 83 nt, Homo sapiens
aaaggaaaggggaaaagccagcgaaaggcggagccacacacccccacaccaagcccccaacaagacccggacgcacacgaaag

SEQ ID NO: 42150 - RNA, 76 nt, Homo sapiens
gcggacgggcgaggagaacacccggaccggacacgccgagcggccccccccccccggggcagcagccaccagccgg

SEQ ID NO: 42151 - RNA, 91 nt, Homo sapiens
gcggcggcggcgcggcgaagaaggggacgccgacaaggaaacacgcacaggagaccccgacgcggggaggccggccgagccggggacccgg

SEQ ID NO: 42152 - RNA, 65 nt, Homo sapiens
gaggccaaaaaggaaaaaaggaacccggacccccagaagaagaggggaacagccgcagaggcaga

SEQ ID NO: 42153 - RNA, 71 nt, Homo sapiens
aggcagggagggaggggaaagacccacaccaagaggcagaacgggaggcagccagggcccaaggcacagag

SEQ ID NO: 42154 - RNA, 64 nt, Homo sapiens
aaggaggcgacgaaggacacgcaacccccagcacagggcaacaaggacccagacaaggcggggc

SEQ ID NO: 42155 - RNA, 59 nt, Homo sapiens
ccacagacgacggacacggaggggacaccgccagcggaagccagaaagccacgcaggac

SEQ ID NO: 42156 - RNA, 56 nt, Homo sapiens
gcaggagaaaacgaaacccggagagagacgagccgaggagggaggcggagcgggcc

SEQ ID NO: 42157 - RNA, 60 nt, Homo sapiens
ccgccgacggacagagggacgcaacccaccacgaagcggagagcaggaaggggggccaac

SEQ ID NO: 42158 - RNA, 67 nt, Homo sapiens
gcagcagcccagcggcagcagaaagagcagagcagccggccacaccgcaggagaaagaagagcacaa

SEQ ID NO: 42159 - RNA, 70 nt, Homo sapiens
aacaagaaaaagaaccaccgaggcaaacaaggcgaaaaaaccagaagcgggacagggagacggcacggca

SEQ ID NO: 42160 - RNA, 86 nt, Homo sapiens
gccgcgcgcgcgcgaggccgggccggccgcccagacgcgcccgcgggcccggccacggcggagccaaggacaccccgggccaagag

SEQ ID NO: 42161 - RNA, 72 nt, Homo sapiens
cgcggggggcggggcaggaagaaaggcgggccaaagaacggcgaccgaggaacgcaaacgcgaaaagggcgc

SEQ ID NO: 42162 - RNA, 86 nt, Homo sapiens
gcagagcccagggccggccaggaggcccaagacaccacagaagcccccgagcccaggagggcccccggacccgggagcggacccgg

SEQ ID NO: 42163 - RNA, 101 nt, Homo sapiens
agagggacggaaccaccagaagccagcccccaggcggaacgcccgccccgcagagaggacacagaagaacgcagcccggggagcagcaccccacaggcacg

SEQ ID NO: 42164 - RNA, 69 nt, Homo sapiens
cacacagcagagccacgggacccacaccgcggaaaggagggaaagcccagccccgggcaagcccaggag

SEQ ID NO: 42165 - RNA, 72 nt, Homo sapiens
gcaggggccggaggccgggccaggccaccggacagagacgccggcccaccagccagcggggagccgcccacc

SEQ ID NO: 42166 - RNA, 64 nt, Homo sapiens
agaacacgaacaaagagcgaccgagaaaaaccgaaagagccaaacacgcccaggacgggacaga

SEQ ID NO: 42167 - RNA, 74 nt, Homo sapiens
gcagcggaggcccaacgcacgaggaaagggccggaaaaggcaaaccagaagagaagaaaacaacaaaaaagggg

SEQ ID NO: 42168 - RNA, 79 nt, Homo sapiens
cgggcgcgcacgacgacggcggacgcagcggcgggggcagcgcgcagggccagccacaaggcaagcacaagcgcacacc

SEQ ID NO: 42169 - RNA, 76 nt, Homo sapiens
acaacccgaggacgaaccaccccgcgccagcagcacagcacggacgcaaggaccaaaaaacaaagggcggaaagaa

SEQ ID NO: 42170 - RNA, 67 nt, Homo sapiens
aggggcacgagcgccacaaccccagccaccggggaccgcaaggccgcggggcccaacaaggcaagac

SEQ ID NO: 42171 - RNA, 77 nt, Homo sapiens
gccacgccaaccagaacgcgaggcccagaaggaagagagaagggcacagaccaagacaacgaaccccggccaggaca

SEQ ID NO: 42172 - RNA, 113 nt, Homo sapiens
ggaggcaccacagcggcagcgacaagcaggcagcgggcgccagcaaaaccgaaacagggaacgcgccaggccacgggccagagaacaggaaggagagcggaggaggagaacag

SEQ ID NO: 42173 - RNA, 86 nt, Homo sapiens
gccaggaaacagcaggcacaggaacaagggacggccggccaaggccccagccacggaaagagagaagaagccacacacagaagacc

SEQ ID NO: 42174 - RNA, 80 nt, Homo sapiens
cagacaggaagcaagagaacaacaagcacccccacagaagaagcggggaccgagaaacaacgaacgagcaaggaagggcc

SEQ ID NO: 42175 - RNA, 55 nt, Homo sapiens
caggaacacggaaaaagagcacaagccggccaaccagaagacggagcaggcaaag

SEQ ID NO: 42176 - RNA, 61 nt, Homo sapiens
cgacggcggaacccggggccgggacgcagcccggcggcagcagcgggagggacaggagaac

SEQ ID NO: 42177 - RNA, 39 nt, Homo sapiens
ggcggcagccaccgccgagccccagaccggagcgaaaga

SEQ ID NO: 42178 - RNA, 94 nt, Homo sapiens
aaccgccaacaagacccgcaaagaaaaaaaccaagcgaacaaagccccaggcagggaaagaacgccggacaacagcggcgaagaaggcaaaccg

SEQ ID NO: 42179 - RNA, 77 nt, Homo sapiens
cacagcagggaagccacccccccggaccccacccacacccccccccaccgcagcagcacccgacagaccagaccgcc

SEQ ID NO: 42180 - RNA, 70 nt, Homo sapiens
gaccgcgcgggggcagaaacccaaaccagcagagaggcacgaggccagagaggagccaggacaaaaccag

SEQ ID NO: 42181 - RNA, 65 nt, Homo sapiens
cacagaagaaagcacagccgacagaagccccccaggacaaagcggcgcacgcacggagacgacgg

SEQ ID NO: 42182 - RNA, 69 nt, Homo sapiens
cgcaacacaagccaacccaacagaaccccaaacagaggaagaagcacagggaggaaaagcacacaaaaa

SEQ ID NO: 42183 - RNA, 73 nt, Homo sapiens
ggaaaagagaaagacagcaacaacaaccagcagcaacaaggaaacaggaccagcaagacagaagacgacaacc

SEQ ID NO: 42184 - RNA, 53 nt, Homo sapiens
cgaccgcacggaaacgaagcgacacggcccacggaaaagacggagcagggcac

SEQ ID NO: 42185 - RNA, 82 nt, Homo sapiens
acaaaggaccagcggcagcagggcggaagcagcgcagcacagcgagcaacacgacaaacgcccgggacaggagaggcagggc

SEQ ID NO: 42186 - RNA, 72 nt, Homo sapiens
gaccggacccggacccaaaggccagcaacggcagaaccaagaaagaccaacagcaacagcaagggacgagcc

SEQ ID NO: 42187 - RNA, 69 nt, Homo sapiens
cgcgaccgggaggcccagaacgaagggcacacgaacgaaaggaaacacaggcccaagcacagaggaaac

SEQ ID NO: 42188 - RNA, 58 nt, Homo sapiens
ggacgcggggcaaagggaccacggcaccgccccagggggacggcgcgaagaagagaag

SEQ ID NO: 42189 - RNA, 73 nt, Homo sapiens
gagcccaaggcaagacccaaggcgacgaccgacaggggggaaagaggaacggcagaaagcaaaacgccaacga

SEQ ID NO: 42190 - RNA, 76 nt, Homo sapiens
cacggaacgcccaccacagcagggccagagagggacaaggaaagcaaacaaacccagacaccgaggaagcgagcgc

SEQ ID NO: 42191 - RNA, 85 nt, Homo sapiens
cgagaagccgaaaagcgcagcgagcggagccgccggagcccgagcacacggaaacccacccgacgaaacagacccgaagagaagc

SEQ ID NO: 42192 - RNA, 72 nt, Homo sapiens
cgcccgggccagcggccgcgcacccccggccggaggcaccagcccgcagagacgcccgagccagcggcacga

SEQ ID NO: 42193 - RNA, 68 nt, Homo sapiens
gcagcgggagaggagggcacgcaaaaaaaccaagggaaaagagacaagaccgagacacaaaaaaagca

SEQ ID NO: 42194 - RNA, 72 nt, Homo sapiens
agaggggaaaaaggaagcccagaagaacggaagagcgggccgcaaggccaggcgcgcagaggcacccaacgg

SEQ ID NO: 42195 - RNA, 33 nt, Homo sapiens
cccacccgcacagccgagcggggacgagagccc

SEQ ID NO: 42196 - RNA, 38 nt, Homo sapiens
gaaagagcaagaacagaaggaagaggaccccaaagcaa

SEQ ID NO: 42197 - RNA, 85 nt, Homo sapiens
ggaggccaaagaagccaggcgggccagcggagaagacaggagaaaccgccccgagaaaacaaacaaggagaccaccagagaaaac

SEQ ID NO: 42198 - RNA, 71 nt, Homo sapiens
cccacaaggcaaaacagcaagggagaagggcagcgcacgacgagcagaagaagggaacaccaccagaccaa

SEQ ID NO: 42199 - RNA, 82 nt, Homo sapiens
gacagaccccaaacgcaagaaacccggcaaaccgacgcgaagacccgagagaaacccaaaacaccagggggagaagaggaac

SEQ ID NO: 42200 - RNA, 82 nt, Homo sapiens
cacggggggcgaagaagagcgccagacccacaggacaccgcgaccagcaccacccaaacaagaccacaagaccaaaaagcaa

SEQ ID NO: 42201 - RNA, 73 nt, Homo sapiens
ccaagaacccaccacccagcagcagggcacaagggacagacagcaggaaagcagcgaacacgccgagccaaag

SEQ ID NO: 42202 - RNA, 31 nt, Homo sapiens
ccaaagcggaaggccgcgggagagccaggga

SEQ ID NO: 42203 - RNA, 77 nt, Homo sapiens
aaggaccagaacccgaagcccacagacccacagacagaaaagccgagaccacagcgagaggaaaacagaagacagga

SEQ ID NO: 42204 - RNA, 82 nt, Homo sapiens
agcggggaggccgcccggcgcagcggggaccggcggcggcgcccaggcacccggcccgggccaggcagagcagcccaccagg

SEQ ID NO: 42205 - RNA, 75 nt, Homo sapiens
gaaggaccaagaaccagcaaaaacccgggcagcgacggggaaccccggaccgcggaagcagaaaaaagagaaaaa

SEQ ID NO: 42206 - RNA, 76 nt, Homo sapiens
gcgcgcgcgagccacaaggagagcgaagcaaggcccggcgcaaggccaggacaaagcggcgcacgcacggagacga

SEQ ID NO: 42207 - RNA, 93 nt, Homo sapiens
ggaacagcccagcaccagcacaccacacgcagcgcgcaacaccccacaggagaacaccggaaacgccaggccacaagggagcaaacgaaaagc

SEQ ID NO: 42208 - RNA, 67 nt, Homo sapiens
ggacaagccgcgcggggacccgacgcccgcacgacagcgaacccacccaacacggcaaaacaaagac

SEQ ID NO: 42209 - RNA, 81 nt, Homo sapiens
ccgccgccccacgccggaggaaccgagaagagcagagcggagggagccccagacacggccccggggaagggaagcaggggc

SEQ ID NO: 42210 - RNA, 72 nt, Homo sapiens
cgcaccgcgccacccgccggcccgcgggcaccccaaagggaacacagccgcacccgggcggccagcgggggc

SEQ ID NO: 42211 - RNA, 67 nt, Homo sapiens
ccgagagcggaccgagagcgcgaaacgcacgagaaggccaggagggccgagggccacacggggccac

SEQ ID NO: 42212 - RNA, 80 nt, Homo sapiens
gacacagacaccaagggaggccacagagacaagagagagggacccggcagcaaccccaacaaacgccagaggcagccccc

SEQ ID NO: 42213 - RNA, 84 nt, Homo sapiens
ccggcgggagcgcgaacgagcgacggcggaacccggggccgggacgcagcccggcggcagcagggaaacccagacgacaaggaa

SEQ ID NO: 42214 - RNA, 71 nt, Homo sapiens
accgcccggagcacgaccgaggcggaacggagaaaagcaggaaaagcgccagccaacgcgacaccaaaagc

SEQ ID NO: 42215 - RNA, 55 nt, Homo sapiens
agcggaccaccgaggcacggcgacaggggacggaggaccacggacgcgagggcag

SEQ ID NO: 42216 - RNA, 70 nt, Homo sapiens
ggacaaaaggcagcaaaggggcagcacgaaccaagcggagacagcgccgggaccagggcagggaccccgg

SEQ ID NO: 42217 - RNA, 56 nt, Homo sapiens
cgagggggggcgcgccggaaaccggagcgcgcagcaggaccacccgagcaggaaga

SEQ ID NO: 42218 - RNA, 84 nt, Homo sapiens
aagaagcgaccgcggcggcgcgggcgccaggacccccccagagccaagacccccagaagggaccccccccccaccaccaccaag

SEQ ID NO: 42219 - RNA, 83 nt, Homo sapiens
gccacgacaaccgcaccaacaaagacagccgggcccccagagagagcgcacccaggccagcaccagcgccagccaccagcagc

SEQ ID NO: 42220 - RNA, 58 nt, Homo sapiens
cggggcacgaggaacagggaagggcgcgagcggggacaaagcgccaaagccaccccca

SEQ ID NO: 42221 - RNA, 78 nt, Homo sapiens
agggggaaaagcccaggaggaagcaggagcagcccaagcgccccccacggaaaaagggagaaaagaagagaagacggg

SEQ ID NO: 42222 - RNA, 58 nt, Homo sapiens
cggaaaggaccagaccgcccaggaaacggagagagcgaagcaccgcgcagaccgaaag

SEQ ID NO: 42223 - RNA, 58 nt, Homo sapiens
gggaaccgaaagacaagcagcagccgcccaaaacacaaaccaaagaagaaacccgaag

SEQ ID NO: 42224 - RNA, 68 nt, Homo sapiens
aagcccggaaaaacggcccaaggacacagcccgacagggcgaccgggcgaaggccagaacacagaagc

SEQ ID NO: 42225 - RNA, 75 nt, Homo sapiens
cggagcaaaaagcgcacgcaaggaaaccgagacccaaaacccaagacacgaagaaaggaaaggccaaacgaaaca

SEQ ID NO: 42226 - RNA, 82 nt, Homo sapiens
ccagaacccagccagggcagccgaccggaccacagccagcagaacaaagccagaccccccggagcacacgaaagcgccaaac

SEQ ID NO: 42227 - RNA, 83 nt, Homo sapiens
gggccgcgcgccggagaccgaaggacaggacacagaacagagaagaagcagacgagacagaaaaagaaccagacagagaaaac

SEQ ID NO: 42228 - RNA, 78 nt, Homo sapiens
gacgcagggcgcccccggcggggagacaaccccccccaagaagcgagggacaagcacgacccacccacacaaggagac

SEQ ID NO: 42229 - RNA, 75 nt, Homo sapiens
accccagcgccgggcagaagcggagcggacggaggaggcacccgcaggagagggcggagaacggaaaagcaccag

SEQ ID NO: 42230 - RNA, 79 nt, Homo sapiens
aggaaaggccaaccaagagaaaaaggccgaagaagacacagacaacaaagagaggcggggacggacagccaggaccgcg

SEQ ID NO: 42231 - RNA, 77 nt, Homo sapiens
aagccgccagcagggacagccgggagagaccagggaccaggccaagaagggacccagacacgacccggagaaaaagc

SEQ ID NO: 42232 - RNA, 83 nt, Homo sapiens
ggcgccccgggcccacgcgaagccgaggccccgcaacggcaaggcacccggaaaggcagcggacagaaaggaagaacagaaga

SEQ ID NO: 42233 - RNA, 52 nt, Homo sapiens
agcgcccacccacccagaacacaacgaagagaggaaagaagcggaaaggagg

SEQ ID NO: 42234 - RNA, 46 nt, Homo sapiens
aggggcccacccccgccagaggcacgacacagcagggcggccagcc

SEQ ID NO: 42235 - RNA, 82 nt, Homo sapiens
ccgaccaacccaccacgggccacaagagaagagcaccccagcagcaccaagggagaccgcaacgagggcgagcggccagcaa

SEQ ID NO: 42236 - RNA, 73 nt, Homo sapiens
acgacaccaggccaccaccgcgcacgccagcagcaaccaccccaagcgcccaacggggcacccccgacccagg

SEQ ID NO: 42237 - RNA, 65 nt, Homo sapiens
cccaggggcgggaacaggaggcacacgcagagggcaagcccccagcaccgagaagcgcaggcgcg

SEQ ID NO: 42238 - RNA, 76 nt, Homo sapiens
acagaacagagacagacggagagagacaacagagaagggaggaagaaccaagaaggacaagaaggggagaagaaaa

SEQ ID NO: 42239 - RNA, 76 nt, Homo sapiens
ggagcgggcagccgccgccaccccgcggccgcacccccgccccagaacgccagaacaaacagcgagaaaaccgacc

SEQ ID NO: 42240 - RNA, 39 nt, Homo sapiens
ccacccccgaggcccgaccgcagccaaaccaagagcaac

SEQ ID NO: 42241 - RNA, 53 nt, Homo sapiens
aaccgagcaacagacaaagcccgggaggagcaagacaacaaaagggaaaaacg

SEQ ID NO: 42242 - RNA, 94 nt, Homo sapiens
cccagagaagccgcaggacagcagccccgagcacgggccgaggcccaccgcgacacaccgccaggaaccgaccacccagacccgggccagggaa

SEQ ID NO: 42243 - RNA, 74 nt, Homo sapiens
agacggacaaccaacaggaacacaggaccagaacagaagcacagagcgcagaacaggcaacccgaaaccgccgg

SEQ ID NO: 42244 - RNA, 56 nt, Homo sapiens
ccggggcacagacaaggagccaggaccccggaccagcagcacacgaccgcgagagg

SEQ ID NO: 42245 - RNA, 72 nt, Homo sapiens
aacacggggccacgaccgaggcagcacggcacagccagcggaggagggagcggcgagcgggcacggaagaga

SEQ ID NO: 42246 - RNA, 95 nt, Homo sapiens
acacaaggagcagagacaaaaccaagccaaacacaagcagaaggagcgaagaagaggagccgcagcccaaagcaagaagagcgaggccccgaaag

SEQ ID NO: 42247 - RNA, 77 nt, Homo sapiens
ccgaagggcgcgggccaggcccccaagccaccgaagccagcccccggagcccaacggccccagggaaaggaccgagg

SEQ ID NO: 42248 - RNA, 55 nt, Homo sapiens
gcgggcaggagccggcgaggagcaccccccgccggaaaggagagaagaagagccc

SEQ ID NO: 42249 - RNA, 64 nt, Homo sapiens
cgacaagagacacaagaacaaccggagaagaaccaacagcaacccaacaggagccgccggccca

SEQ ID NO: 42250 - RNA, 80 nt, Homo sapiens
cggccggcccccccccagggccaggcgccgccagaacggaaaggcacaaggaagaagcggaaggggcagggggaaagcag

SEQ ID NO: 42251 - RNA, 76 nt, Homo sapiens
acacgcggcagagcgagcggggacccacaccagggacccgaagggcgaggaggagagcggccggggggccagaccc

SEQ ID NO: 42252 - RNA, 66 nt, Homo sapiens
aagaaccagcggccgggaagcaagacccaaccagagccgcaacaggccgccagaagcccaaaacaa

SEQ ID NO: 42253 - RNA, 79 nt, Homo sapiens
ccagggaaccacggagcacgagaaaacggcgggggcggagaacggaaaagcaccaggaagcagagaggaccgcagaagg

SEQ ID NO: 42254 - RNA, 71 nt, Homo sapiens
gagggggggcgcgccggaaaccggagcgcgcagcaggaagggaggaacaagccaccgcacgagggcccaag

SEQ ID NO: 42255 - RNA, 80 nt, Homo sapiens
gacagcgcccgaagccaccagccccgggacccgccagcgagccgaagagggggagacagaggccccccccaccgccaagg

SEQ ID NO: 42256 - RNA, 68 nt, Homo sapiens
agagccccgagggcccgggcagagaaagccggaagcgaccccacgagaacaagacacagcaggggcca

SEQ ID NO: 42257 - RNA, 81 nt, Homo sapiens
gcggagggacaggcgcggggccgccgggcaggagcgcaaggcgcgagcaggacccaaagaaaaaggcacaaacccagcaca

SEQ ID NO: 42258 - RNA, 58 nt, Homo sapiens
ccagcggcagacggaaacgacagaagcagaggcaagccacagccaggaaacaccagcc

SEQ ID NO: 42259 - RNA, 58 nt, Homo sapiens
ccaaggaaaccccaacacagagccaagcgccaaagagcagaggagcaaggaagaaagg

SEQ ID NO: 42260 - RNA, 72 nt, Homo sapiens
gggagacccaggcgggacagagggagccaggcagaggcgggaaaacggcacaaggcgacgagggagggcaga

SEQ ID NO: 42261 - RNA, 39 nt, Homo sapiens
gaagcgaccaagcagaaggcaaagaacgaaggaggcgca

SEQ ID NO: 42262 - RNA, 74 nt, Homo sapiens
gaagagggaacacaacaaggaagggacaacacgaccacccaaaacagaagagcaacgacgccgaagccgaccac

SEQ ID NO: 42263 - RNA, 73 nt, Homo sapiens
gaacagcacagggcgcaacaagagcgacaaacgcagggaagagcgagacaagagccaaggacagggcccgcca

SEQ ID NO: 42264 - RNA, 78 nt, Homo sapiens
gaaggaccaagaaccagggaagaagcaagccagaaagaaaccacccaagaggacacaaggaaaaccgaacccaggcag

SEQ ID NO: 42265 - RNA, 70 nt, Homo sapiens
gaggcccagaccccgcccccagcccaggagcgaccaggccagagccgacacggccaccagccacccgggc

SEQ ID NO: 42266 - RNA, 73 nt, Homo sapiens
gccccggcagaagcggcagcaaagcagcagggagaccagaccaggacagaccggcaggagggagcagcagcgc

SEQ ID NO: 42267 - RNA, 57 nt, Homo sapiens
acagcaaaccgggccacagaccaagacacccaggagaaagacagcggggaaaagaaa

SEQ ID NO: 42268 - RNA, 73 nt, Homo sapiens
gccagcacgggaccccccaagagaagcgcaagagcaacaccccaccccaaggccagaggcagaggcagcaggc

SEQ ID NO: 42269 - RNA, 75 nt, Homo sapiens
cagggcgcccccgaggcgaagagccggaggagcccgacaccacaacacgggacagaagggcgcaacgacagggag

SEQ ID NO: 42270 - RNA, 77 nt, Homo sapiens
cgcacaccaccgcgcgcggcgggaacaagcagaaagcacgaacaacgagaacaagacacgagcaaaccccaccgagg

SEQ ID NO: 42271 - RNA, 70 nt, Homo sapiens
gagcacccgcacacccagaaaggcgagaaaccagggcccagcaagaaacacaaagggggagagcggagaa

SEQ ID NO: 42272 - RNA, 81 nt, Homo sapiens
cacccaggcccggaggcagcgcagcaacacacgcgcgcacggaccgacgcccgcgggacgcacacgcgcgccggaagggaa

SEQ ID NO: 42273 - RNA, 74 nt, Homo sapiens
aaaggagaacgcaaaggccacagagcaggaaacacggaggcccgagacaagaggcgcgcgaagcaaagcaagga

SEQ ID NO: 42274 - RNA, 79 nt, Homo sapiens
ccggcccggcccgacaccgcgggccgccagacgggaaggacaacaggcggcccgggcggagggacacggaggggccgga

SEQ ID NO: 42275 - RNA, 75 nt, Homo sapiens
cgggggacccgagacaaggcgcagccccagacaaacccagaaaggaggaacccaagagggacagaaaaaaaccaa

SEQ ID NO: 42276 - RNA, 64 nt, Homo sapiens
gaacaggaaaggaaacgcagcaagcaaggcagcgaggcaggagacagagagaaagcaacagcag

SEQ ID NO: 42277 - RNA, 82 nt, Homo sapiens
ccaggcgggaaaccggcccagcggcgccacaccacgaggcgagccaagagcgaggcagccgccggaccacccgcagacacga

SEQ ID NO: 42278 - RNA, 72 nt, Homo sapiens
gacggaccagcggaaacagaggcaagccgggaacgcaaaaggaccagccagggacaggagaagcggaaacca

SEQ ID NO: 42279 - RNA, 52 nt, Homo sapiens
cggggccaaacgcaccccaggcgcccggagacgccgcacccaggcggaggca

SEQ ID NO: 42280 - RNA, 70 nt, Homo sapiens
agcacccacccacgcgcacgcgaccaggcgcgagagcgcggagagccagagggccgccgaaggaacaccg

SEQ ID NO: 42281 - RNA, 79 nt, Homo sapiens
caaaaggcggagcgagccacgagcagcaaggacaagcacgaccgaggggaacgggagcagcccagccacaccagagccc

SEQ ID NO: 42282 - RNA, 74 nt, Homo sapiens
gcggaacccagcaaggggccaccagcgaagacaccacccgcaccgcgacccgagcgagaggagggaagaaaaac

SEQ ID NO: 42283 - RNA, 75 nt, Homo sapiens
gaagaccaagacacgagaggcacacacaacgaccaagccaaggaccagccaaagaaagcagacccgccggccggg

SEQ ID NO: 42284 - RNA, 73 nt, Homo sapiens
cgaacccagagcgagggggggaccaccgccggccaggggcggaaacgcccaaaacggagaacgcggcaaagga

SEQ ID NO: 42285 - RNA, 80 nt, Homo sapiens
gggaccgcaggcccacacggcccgggcaagccagggcgcccaccacgacagccggagagccgcaggaaaaccagagccca

SEQ ID NO: 42286 - RNA, 74 nt, Homo sapiens
ggggcgagcggacccgcagccccaaaggagaccgaaggaccaccggcagcgggaaaaaacgaccaagacaaaca

SEQ ID NO: 42287 - RNA, 91 nt, Homo sapiens
caggagagcgccccagggcaagccccgcccggccaacaagaccgaaggagaagaaggagaaggggaggagaaggcaagccggaaagagcga

SEQ ID NO: 42288 - RNA, 69 nt, Homo sapiens
gcacccgcgacgacgagacgacacccaaagcgcggcacgaagacccgaagaaacacacgggcaggcgga

SEQ ID NO: 42289 - RNA, 82 nt, Homo sapiens
aaagggcagaagagaagcaggaaggaggcagaggcacaccgaaagggcagaaaagcccggccggagggacggcgcagacacc

SEQ ID NO: 42290 - RNA, 67 nt, Homo sapiens
cgcaccgcgcacagaggaggcagccaggggccagaagggaagaggccggaaaggaaaaacaccagaa

SEQ ID NO: 42291 - RNA, 76 nt, Homo sapiens
aaccgaaacaagggacggggaaccaaagaccgggaccgggccaacagagaccccaagcaggcaccaagcagccacc

SEQ ID NO: 42292 - RNA, 77 nt, Homo sapiens
cagacgcagcgcaccggaccgccccgggccccaaccgcggacaggcggaggaacagcgagagcaccaagaaccaagc

SEQ ID NO: 42293 - RNA, 80 nt, Homo sapiens
gaaaacacacagacgaaggcaaaagaggacaggagaaggcggggaaaaaaccagagaccacagaaggacgggagaacacc

SEQ ID NO: 42294 - RNA, 67 nt, Homo sapiens
cgaaaaaaccaaaaaggacaaggagaaacggcaacacacccaccagaggcaagcggacccaggaaaa

SEQ ID NO: 42295 - RNA, 83 nt, Homo sapiens
ggggcacccagacacccgaaccagggggaacaaagagcggggggcaagccggggcacaggaccgagcggagaaagccgaacca

SEQ ID NO: 42296 - RNA, 77 nt, Homo sapiens
agaagaaggaacgcgaacaagagcagacaggcgcgccggagcaagggaggaaaaggcgaaagaaggaaccaaacggc

SEQ ID NO: 42297 - RNA, 68 nt, Homo sapiens
cagagacacagaaccacacgcccaagggcagcaagaaagggaaggaggagccagcccccacagagcgg

SEQ ID NO: 42298 - RNA, 67 nt, Homo sapiens
caaaagggcaaaggacacacaaagccggaaacaagacaccgaaaggggcgacagacaaaggcagaaa

SEQ ID NO: 42299 - RNA, 63 nt, Homo sapiens
gcaaggagaagcgcacgacgggaccacaaggcccgcaggaggccaagacaaggccgagaccgc

SEQ ID NO: 42300 - RNA, 68 nt, Homo sapiens
gcccgaagaaggcaagagcagaggccccagaccgccaagaggcacagacgccgcacaaaagccaccag

SEQ ID NO: 42301 - RNA, 74 nt, Homo sapiens
cgggggagcggggccccacacccccccgggggggagaaccgcagggaggagacgacgaacgcccgcacgggcag

SEQ ID NO: 42302 - RNA, 75 nt, Homo sapiens
ccgccaccaggccccccgccccggccgccaggagcagccgccggcgccaagagccaagccgagcgcccagccgcg

SEQ ID NO: 42303 - RNA, 72 nt, Homo sapiens
cgcgcgggagagggccaccgcccgccacccgcgcgccgccgccgaggagaaagggacgggagaaagaacaga

SEQ ID NO: 42304 - RNA, 78 nt, Homo sapiens
cagagaagaaaccgcaaggagggagccgcacacaccaggaggcagccgcgaacccccagaaccgaaacgaccaccgag

SEQ ID NO: 42305 - RNA, 62 nt, Homo sapiens
cgggacccgcaggaagcgagggaagggagccagcggccggcgccggcgcacacacgccggac

SEQ ID NO: 42306 - RNA, 84 nt, Homo sapiens
gacgagagaggcaggaagggacggagcaccgcaggcgcaccagcagggggagacagcggccaagggaggccgccagccgaggcg

SEQ ID NO: 42307 - RNA, 100 nt, Homo sapiens
aagcgaacaagacaggacacagcagacagacggagaacaagaaggccaaaacccagagaagaaagaagaagaaagcggcagaagagagcagaaaacaaaa

SEQ ID NO: 42308 - RNA, 50 nt, Homo sapiens
gggagagcaggccaaaaagagagggggaaacccgcccagggcgggagacc

SEQ ID NO: 42309 - RNA, 81 nt, Homo sapiens
ggcagcagcgcgacccgagccggcgcccgggccggccaggacgacccgaaaaggaagcacggagaaaaggaggcccagaaa

SEQ ID NO: 42310 - RNA, 52 nt, Homo sapiens
cccaacaaccagggcaaagaagcagccaagggacaggaagcaagggagagaa

SEQ ID NO: 42311 - RNA, 71 nt, Homo sapiens
agaacgggcagccagcaagcccaaacccaaaggggagaaccaaaggcaagaaccggagcaggagaaaagcc

SEQ ID NO: 42312 - RNA, 71 nt, Homo sapiens
gcccccagacggaacagccagggaggaaggccgaacaagccgaaaaggggcaaccgccaaagaaaacccca

SEQ ID NO: 42313 - RNA, 81 nt, Homo sapiens
ggggcaccacagagagcgggcaaggacggggacacaagaccagccagcccagccacagagacaggccgcccagagcgaccg

SEQ ID NO: 42314 - RNA, 42 nt, Homo sapiens
ccggccccacaccggcacacagcaaaaggcacggacgccaca

SEQ ID NO: 42315 - RNA, 70 nt, Homo sapiens
aagcaacgcgagagcaaagcgagggggaagaaaagggaggggacaaaagaccaccaccagaaagaacaga

SEQ ID NO: 42316 - RNA, 80 nt, Homo sapiens
ggaaaggccgcgggggcaacggagaaaacccggaaccgcgacggcggcagcacgacaagaacgccccgagaaaaggagcg

SEQ ID NO: 42317 - RNA, 57 nt, Homo sapiens
agcgcccgacgcacccgccgggggacgccaggacgcacagccacggggacaggcaag

SEQ ID NO: 42318 - RNA, 66 nt, Homo sapiens
ggccaccaccacagcacgcgagcagaccgaccgggcaccgccgggacccgagagggaagacaaggc

SEQ ID NO: 42319 - RNA, 82 nt, Homo sapiens
aagaagcaccgaaggaagaaaagcacagcaaccaaagccgacggccgccggcacgcgaagcgcaccccccggaggcggccga

SEQ ID NO: 42320 - RNA, 73 nt, Homo sapiens
agccggccgcccagaacgccgccaccaaggaagaagagcgccaaaagacaggaccaagagccggcagccggaa

SEQ ID NO: 42321 - RNA, 57 nt, Homo sapiens
cgcgcagcggaccagaaacccaaacgcaccaacaggggggccgaaacccacgaggac

SEQ ID NO: 42322 - RNA, 35 nt, Homo sapiens
ccagccggagaagcgagcagcgcagacaggggcag

SEQ ID NO: 42323 - RNA, 59 nt, Homo sapiens
ccgggcggggcagagcagcccccagccagccgcgaggcacacgagccccgccagggccc

SEQ ID NO: 42324 - RNA, 79 nt, Homo sapiens
cggcgacgagaaaggcgcaaagacggcccgccacgggccccgcagccgcgcccgagcgcccgagcagggacagcgacca

SEQ ID NO: 42325 - RNA, 82 nt, Homo sapiens
gaggcaggccgccggccgaaggcccgagcgcccgaggcgcgggaggggggaccgggacgaaggacagagagggacgggcaga

SEQ ID NO: 42326 - RNA, 69 nt, Homo sapiens
aacacaaggaagcaagggccaccgcccagccaaccacagacacaagcgggacggaagaggcccggcgac

SEQ ID NO: 42327 - RNA, 72 nt, Homo sapiens
accccaccagccaggagcgcacccagcgcaggggacgcgaagaagcccccaccaccacgagaccgacccagg

SEQ ID NO: 42328 - RNA, 71 nt, Homo sapiens
ccaggagggccggggccgcgccggacccgggcgaaagacacacagaagccaggaaaggaacaaacaaacca

SEQ ID NO: 42329 - RNA, 42 nt, Homo sapiens
cccagcacccacacccacaaggggcaagccagccaccaaacc

SEQ ID NO: 42330 - RNA, 74 nt, Homo sapiens
gcggaggcagcagagccagcagcagcgcagggagagaaggcgcgcaggagagcgcagagacccgcccggaagcg

SEQ ID NO: 42331 - RNA, 112 nt, Homo sapiens
ccgccggccacgacgggaccacggcagaagaggacgaggccgacagcacgccgagaagcacaagagggccagggaccaggggacgcccaagacggccacccgcgaaggggcc

SEQ ID NO: 42332 - RNA, 75 nt, Homo sapiens
aaggaaagcccggggacgccggaagacgcgacgaagcacgcggaacaccaccacaggacgaacgacaccgggccc

SEQ ID NO: 42333 - RNA, 71 nt, Homo sapiens
gccggaggagaccagagcaaaaaaaggcaggcaaaaggaccgggaagaggaaccagccaccagaagaccaa

SEQ ID NO: 42334 - RNA, 54 nt, Homo sapiens
cgagcgcgcccgagggcgagaagaaggggggccgaagaagccagggggaggaaa

SEQ ID NO: 42335 - RNA, 48 nt, Homo sapiens
caggggccaagcaaccgcggaacagccaccacgcaccggaagcgagac

SEQ ID NO: 42336 - RNA, 77 nt, Homo sapiens
acaccacaacaaagaagaccacacacgggaaacacaaaaccaaacaacacccaacagcccaaagcaaaggagcaaca

SEQ ID NO: 42337 - RNA, 78 nt, Homo sapiens
ggggccgggagcgggaacgggcgcaaccagcgacacaggaagaacagggcgaggacgaggcacgggagcgcggggacc

SEQ ID NO: 42338 - RNA, 72 nt, Homo sapiens
ccaaaacacagcgaggagacagagggacgcagagcgcaacccagcaccccccacagaggagacacaacaccc

SEQ ID NO: 42339 - RNA, 77 nt, Homo sapiens
cagcagccgaccgaacaacggggcccgccgagagcagcccgacggccaggaggcgaagagacgaggaagcccaggag

SEQ ID NO: 42340 - RNA, 74 nt, Homo sapiens
caggcaaccacccaacccgggaagggacaggcccgagccgacacaaaaagacacggaaccccagaacagacaga

SEQ ID NO: 42341 - RNA, 79 nt, Homo sapiens
ccgaggagcgggccagccgcgcggcgggaagcggcggcggcggcccagcgccaagaggagaccggaaaccgagagaaac

SEQ ID NO: 42342 - RNA, 71 nt, Homo sapiens
gggaagaccacggagcggggagagccgccgcaaacccagaccgccggcgccacccagaaccaagcgcacag

SEQ ID NO: 42343 - RNA, 75 nt, Homo sapiens
accaaaccaagccgaaggaaaggcagaacgccgaacaggagcaacagcaggagcgcaaggcgcgagcgaaagaac

SEQ ID NO: 42344 - RNA, 110 nt, Homo sapiens
gcagccacgcagaagcgcggcagggagcgcgggggcccgcgcagcagcgaccacgcaacggggcggcacacaaggagcgaagggcagggagaacgccaggcacagcacga

SEQ ID NO: 42345 - RNA, 64 nt, Homo sapiens
acgacgcaccgcaggcagacaaaagggccaaagaagggagagcacaagcaccaacaagaaggcg

SEQ ID NO: 42346 - RNA, 79 nt, Homo sapiens
gagcaagggaagaccgagaaagaggcgcacaccccgcacagcagcacacagacacagaggcaagcgagaagcaggcgga

SEQ ID NO: 42347 - RNA, 80 nt, Homo sapiens
accccagccaccccaaacaggaaggcaacacacagagcccccgaaggaaggcgcacgcggggacggcgagcagacacccg

SEQ ID NO: 42348 - RNA, 64 nt, Homo sapiens
ggggacaagccgcaccacgccaaggaaagcaccaggaagaagaggcggaagaaacaacaagcgc

SEQ ID NO: 42349 - RNA, 75 nt, Homo sapiens
aacaaagaaaacgggaagagcacccggagagaagaaagagcggcccgcgcagaacagcggggagaaaacgaccga

SEQ ID NO: 42350 - RNA, 85 nt, Homo sapiens
gagaccacagcaagacgccgggaccccggaaaccagaaaggagcaaaagaaaaggccaaaacgaaaaaccaaacagagggagcag

SEQ ID NO: 42351 - RNA, 69 nt, Homo sapiens
ggaccaccgaaaaaccccaaacccacaagaacaccagaagcagccgaaacgaaccaagaaccgaaggaa

SEQ ID NO: 42352 - RNA, 75 nt, Homo sapiens
ccagggccggacacacgggcagccacccggcggcggggccgcagcccaaggaaggacgaccgaaaacccagccag

SEQ ID NO: 42353 - RNA, 73 nt, Homo sapiens
aagccagcgccccaccggggcaagcagggggcagcacgccgaaggagagaccagacaacaggccagggaaggg

SEQ ID NO: 42354 - RNA, 78 nt, Homo sapiens
cccggaacagcgccgaggcccaaggcagaggcgaggcggaagggcaccccacccggagacgaagaaacaaaaaaccac

SEQ ID NO: 42355 - RNA, 77 nt, Homo sapiens
ccagcgcggccagcagaaggagcaggacacgagacacaggccgcacgcacgcgggggaccccaagggaaaccggccg

SEQ ID NO: 42356 - RNA, 74 nt, Homo sapiens
gcagaaacgcagcgagacggcagaaggcggcagggagcacgcaccaggagcccacggcccacccacagcgaaac

SEQ ID NO: 42357 - RNA, 79 nt, Homo sapiens
cacccgcgcgcgcccgggaggaaggaacgaggcaaggagcaaagcagcggcgcagcccgggaaaacagaaacgccggag

SEQ ID NO: 42358 - RNA, 55 nt, Homo sapiens
ggaaaaccggcccccaacgacaaaagccagaaagcgagcgacggaacacaaacag

SEQ ID NO: 42359 - RNA, 64 nt, Homo sapiens
cccgcgccagggagcgccgcggcggagcgggcaaaggaacagagcacacagaccacaaggcagc

SEQ ID NO: 42360 - RNA, 73 nt, Homo sapiens
ccgcagcacgaccagcaggaacgggaccgggaaaggggaaaggacgcgcagcggagccgcagacgaacaaaga

SEQ ID NO: 42361 - RNA, 78 nt, Homo sapiens
ggagaggagcagaaggagcaaaaggcggacaggcagccgaacacaaccccagagccggcagcgggccccccgccgcgg

SEQ ID NO: 42362 - RNA, 78 nt, Homo sapiens
caggaaaagggccccgagccagagcccagcagccgagggcgggccgaggcggaaaggggaacaacaaccagacgaccg

SEQ ID NO: 42363 - RNA, 51 nt, Homo sapiens
ccaggacaagccaaagagaggaggaggaggcgaaacaaggcgaccacaacc

SEQ ID NO: 42364 - RNA, 85 nt, Homo sapiens
aggaagagaaggcgggacacacagcagggaccacccccagcacccccgggaccaagaaaggcccagggaccaaagcccggacaag

SEQ ID NO: 42365 - RNA, 85 nt, Homo sapiens
gcacagcgaggggccaaggcagaagaaacggagaagggcaaagaaacggcgaggaaagagaggagccccggaaagaaaaggacag

SEQ ID NO: 42366 - RNA, 85 nt, Homo sapiens
aggcgaggagcccgcgggcggccggcgggcggggcggcggcgcgacaggacgccaagaggccgaggagaggcccccagacacggg

SEQ ID NO: 42367 - RNA, 79 nt, Homo sapiens
gccccgccgggggagacgacccccgccaggggagcaaaacgcccaccacggaggcaccgaggacgacgggggcggcaag

SEQ ID NO: 42368 - RNA, 79 nt, Homo sapiens
agaaccaccaccaccgaaaaaaaaagaaaaggaaggagagaagagagagaggccagaccacagacgccacacccggaaa

SEQ ID NO: 42369 - RNA, 76 nt, Homo sapiens
gagggcgcggaggagaggagcgagcccaggagccagcaccgccgaccgccagcgccagaagccagagagggcggac

SEQ ID NO: 42370 - RNA, 67 nt, Homo sapiens
aaggaccaagaaccagaggggcgccgcaagagccgagcaaaccagcccagcagcccaccaacaaggg

SEQ ID NO: 42371 - RNA, 57 nt, Homo sapiens
aaaacacaaagaggcagcaaagaggccgggaagaaggagggacacagcagcgcggag

SEQ ID NO: 42372 - RNA, 61 nt, Homo sapiens
agcacagaaagagaccgcccgcccaacgagacgaggacgcgcacaggaaaggacgcggaac

SEQ ID NO: 42373 - RNA, 80 nt, Homo sapiens
ccacggccacagccgccgcagacccagcagccaagagggaagcagacgagagcaaggaaagaccacagcaagaccacgcc

SEQ ID NO: 42374 - RNA, 88 nt, Homo sapiens
gcgggggccggacaagcggggcgcagacaggcaccagcagcagagagggaaaagaaacaaacaacaagaagaaggacaaggaacgaag

SEQ ID NO: 42375 - RNA, 76 nt, Homo sapiens
caccggccccgaaagagccgcacgcggggagggggccagggcacccccgagaggacaacaggcacggaaggccccg

SEQ ID NO: 42376 - RNA, 75 nt, Homo sapiens
aaaccccggacaaggcacgccagacgggggccccaggacccggacagacccaaaagggaaaaaggaaaaccagaa

SEQ ID NO: 42377 - RNA, 95 nt, Homo sapiens
aaccacccagacaagagcaccacgggcaggaaggcagcgcacgacagcaaaagcgaagaagcacgagggaaccagaaggagcgcagaagagacaa

SEQ ID NO: 42378 - RNA, 70 nt, Homo sapiens
aagccgcggaaccgcgacaccaagagggaagcacaggcacagcgaccgaacgaggccaaagcaaacccgg

SEQ ID NO: 42379 - RNA, 67 nt, Homo sapiens
aagggagggcaggggacacacggcagaaacggaccgagaaacggggacgagagccccggcacaaacg

SEQ ID NO: 42380 - RNA, 73 nt, Homo sapiens
ccaggagcgggggggcacaagaaacacaaggagacagaagagcccgggacagagcgggccgaggcggccccac

SEQ ID NO: 42381 - RNA, 60 nt, Homo sapiens
cacgcagacgacgagcgagccaaaaggggggacacccaagcgaccggcagcaccagggaa

SEQ ID NO: 42382 - RNA, 64 nt, Homo sapiens
cgcggggaggcgaagggacgccgggaggcaagcggccccggaggcggcagcaggaggcaggaca

SEQ ID NO: 42383 - RNA, 78 nt, Homo sapiens
cacgggaaaagaggaaacagcaaggccaagacaggggacagccggccgaacggcagccccgggacccaaacagaccca

SEQ ID NO: 42384 - RNA, 75 nt, Homo sapiens
cgggggcgagcgagcaccgagcaacacacgcaggggcccgggcagagggaaagcagaggacggaacaacccgggg

SEQ ID NO: 42385 - RNA, 81 nt, Homo sapiens
gcgcccagaagggcgagaaggccgcgagcaggaacggcgacgggggccaggccaccggaggcgaggacaacgggcagcccc

SEQ ID NO: 42386 - RNA, 86 nt, Homo sapiens
ggcgggagccagcgagccacgggagcgagccagggccagaagcccccaggaggagaacgagcaacggaagccagaagaagcacccc

SEQ ID NO: 42387 - RNA, 75 nt, Homo sapiens
cgacaggggccaggacaacagagaggggaaccaaaaccggcccaccgagggacagaggcgccacaccgcaaagac

SEQ ID NO: 42388 - RNA, 87 nt, Homo sapiens
ggcgaggacggggcgccggcgccgccgcccccgggccgcggccgcagcaggaggagcaagcacaacaggccgaagaggccggagaag

SEQ ID NO: 42389 - RNA, 88 nt, Homo sapiens
gcccgggcagagggacgagaagccggacagggcccgcggacacgaaacggcgaggaaagagaggagccccggaaagaaaaggacagac

SEQ ID NO: 42390 - RNA, 88 nt, Homo sapiens
cgccgccgggcccggccacagccgcagcggagcccacgagaggcagcgccaggcggagcagaccaccggagaacccacacaacaagca

SEQ ID NO: 42391 - RNA, 107 nt, Homo sapiens
gagcggcggcgcaccaaccgcgcgcaccgccgacccggaagaccgccgccggaccaagggggaggaacaggcgcaaagaccccggcgagacagcccaaacaacagca

SEQ ID NO: 42392 - RNA, 86 nt, Homo sapiens
cgggcaccggggagccggccggacacggagagcagcagcaagagaggccgccgccgcccaagaccggcaacgggcaccggagacgc

SEQ ID NO: 42393 - RNA, 92 nt, Homo sapiens
aaaaccagcacggcgcaacaggaccacagcaagacgacaagcacggcagacaaagacagagaagcacaaaagacaagaagggaccgcaaacc

SEQ ID NO: 42394 - RNA, 86 nt, Homo sapiens
ccacacggagaggggcgagcggggccacgaccccgaccccggcccggggggagaagcccaccacgcaacgggacggcgcggcggaa

SEQ ID NO: 42395 - RNA, 75 nt, Homo sapiens
cagagaggagggagaacacaagaaccaaacagaaggacaggagaaacaggggccaaaaaaccaaaggagaagaaa

SEQ ID NO: 42396 - RNA, 75 nt, Homo sapiens
aaacaagcggaagacacaaacagcagggagaagagacaacaagacaggagcgaaccgagccgacagagagaaacg

SEQ ID NO: 42397 - RNA, 66 nt, Homo sapiens
aggacaagaccaccggacgcgcagcagcgaacagaggcaacacagccgccgggacccgcccggggg

SEQ ID NO: 42398 - RNA, 67 nt, Homo sapiens
ccaggcgaggcgcagaaggggacagaacagcgcccggcgcaggccaaagggcccccgaaccagcgaa

SEQ ID NO: 42399 - RNA, 82 nt, Homo sapiens
caaagagccggacgcaggccccgccaccccccaccggggacagaccaaacagagcagaacgaaacagcacagggggaagaaa

SEQ ID NO: 42400 - RNA, 126 nt, Homo sapiens
agaggcccagcaacaccgcacaaacaccaacgcacagagagaacccaagaccgcaaggagcagagccgcagccaaggcaccaaagaagagaaaagcaggaagaaaagaagaagacaaccccaaagc

SEQ ID NO: 42401 - RNA, 57 nt, Homo sapiens
ccacccacaaagccaggagagggcggggacacagcgggcaggaagaagacgccgagg

SEQ ID NO: 42402 - RNA, 74 nt, Homo sapiens
gcaaaacccgaaagagggagcccaagagacacaggcagaagaagaccgcaaggaagaagagggacaggcagagc

SEQ ID NO: 42403 - RNA, 75 nt, Homo sapiens
caagaagcaacaaagcgaagaaccacaggggaccggaggaagggggaaaaaccagaggcgaaaaagcagaaaaga

SEQ ID NO: 42404 - RNA, 72 nt, Homo sapiens
cgcacccccggccggaggcaccagcccacgaaaacgaagcaaggaaggaagcaaccaggaaaaaaagagaga

SEQ ID NO: 42405 - RNA, 71 nt, Homo sapiens
ggggacggcgccggcgcggaaggagagagagagggacgaaaaggagcagcgaggaaggacaacaaaagacc

SEQ ID NO: 42406 - RNA, 81 nt, Homo sapiens
agcaacaggagaaaaggggagaggcaccaacaggagcaggagagccggcccaacagagaacggcaaacagcgagaaaccac

SEQ ID NO: 42407 - RNA, 91 nt, Homo sapiens
cgacaagccgcggcagccgcggaccaccgccgccagggggagccacgaagcccccacccacaggcgacagaggcaccgcaccagagggcca

SEQ ID NO: 42408 - RNA, 78 nt, Homo sapiens
ggcaaggccacgcgcaaccgggcccgcccgccgggagaggaggcagagagccccgcgacgagagagacagagagacca

SEQ ID NO: 42409 - RNA, 54 nt, Homo sapiens
accaacagcccgggaaaccccacaagggcaggaaagaccgacagagaagcccca

SEQ ID NO: 42410 - RNA, 73 nt, Homo sapiens
gagaccggggcacggacgcacgccacccgcgaccagaacggccgagcgaccaggagaggagcccccgcccgaa

SEQ ID NO: 42411 - RNA, 77 nt, Homo sapiens
cagaccggaggaggcgggggcgccggcagaggaccaggcaccaccggccccggaaggggaggcaagcaggggggcaa

SEQ ID NO: 42412 - RNA, 63 nt, Homo sapiens
caacagcccacagaggcaccaaaccagcgccggggcagcaaccggagccggcaagacacgaac

SEQ ID NO: 42413 - RNA, 61 nt, Homo sapiens
cacggagacacgaccgaacggcgggcgcaccgcacacggagccgacgaagaggcagagacc

SEQ ID NO: 42414 - RNA, 69 nt, Homo sapiens
aagaggacacgggagcggaagcgaaagggggcagacagaagagagacgagcaacccacgcaaaaaggag

SEQ ID NO: 42415 - RNA, 67 nt, Homo sapiens
caaagcagacaacggacgacccaaaagggagaaacacaccagaacagagcgcaacaacagaaaagca

SEQ ID NO: 42416 - RNA, 84 nt, Homo sapiens
accggcggagacacggcagggccagaaacgcgcgcagcgggggcgggaggcgagagaaccccacccaagagacaaagaccaacg

SEQ ID NO: 42417 - RNA, 81 nt, Homo sapiens
ccgacgggcggggccgcacgggaccccggaacccgcgcgcgcccacgacgccgagagccggcggcacgacagcaaaagcca

SEQ ID NO: 42418 - RNA, 80 nt, Homo sapiens
ccgggagggcccagggcggggcccgaggcgaacagcgcggagaacacaaggaagaaaagaaagcaagacaggcaaggaag

SEQ ID NO: 42419 - RNA, 77 nt, Homo sapiens
aagaaaagggaccagaagaacaagaccaagagccacaggaccgcagaggcggagaagaacccaaccaaaaccaggcg

SEQ ID NO: 42420 - RNA, 67 nt, Homo sapiens
aagaacacccccaccggccaggcgagaaaggcagcccccgaaaacacaagaaaagcacgcacagaca

SEQ ID NO: 42421 - RNA, 78 nt, Homo sapiens
ccgcgacacgggggccagaaggaaagcaagaggcagaggagaccaggccccccacacagaggaggaggggaaggacac

SEQ ID NO: 42422 - RNA, 58 nt, Homo sapiens
gcagacggccccgggccacgggcgcgaaagaggaggggggggagagaaaccagcccag

SEQ ID NO: 42423 - RNA, 78 nt, Homo sapiens
gaagaggagaaaggaaacggaagaaaaaagaaaagaaacgacaaaaacacgagcgaagaaacaggggagaaaccccgc

SEQ ID NO: 42424 - RNA, 58 nt, Homo sapiens
ggaagcgcgacaacacacacacagcgacagcacaagaagaacgcgaacccaggaggca

SEQ ID NO: 42425 - RNA, 73 nt, Homo sapiens
aaaaagcgcggaagaggaagaacagcgccagaaagcggcggaggaacagcgcgcgagagcagccaaaagagca

SEQ ID NO: 42426 - RNA, 75 nt, Homo sapiens
gagaggccgacaggagggagccggaggcccccagaaggcaccacagggcccaggcccccagaagccgccgaacgc

SEQ ID NO: 42427 - RNA, 82 nt, Homo sapiens
cacccggacaccacgaaaggaaaccccaaccaggaacaaacaccgccgcaaaaggaaagggagaagaggacagaaaaagacc

SEQ ID NO: 42428 - RNA, 72 nt, Homo sapiens
ccaaccccggaccgacggggacaggccacaggcaccggcaggcagacccccccgggaggacacaaccccaga

SEQ ID NO: 42429 - RNA, 81 nt, Homo sapiens
gccgcccgcgcgacggggaaccgcgaccgagacggcaggcggcggaagcgaaaccccgagacccaggaagcgaggagggaa

SEQ ID NO: 42430 - RNA, 80 nt, Homo sapiens
aggaccaaggagccacagaggaccgacgcgcgcaggcagaggagaaggcagcggacaaagagggcagagcggcgggaaac

SEQ ID NO: 42431 - RNA, 74 nt, Homo sapiens
cgcggcccccggccaagaggccgcagaaggaacggcagccacacagcccggcaacaccaggaaaaaaacaaaga

SEQ ID NO: 42432 - RNA, 53 nt, Homo sapiens
gagaggcaccgccccaggacaaaagggggccaaacaaagacagaagagcacca

SEQ ID NO: 42433 - RNA, 57 nt, Homo sapiens
cacagcgaaaccggaaaccagccccccaaaagggccgagacagagcaaaggcgggag

SEQ ID NO: 42434 - RNA, 84 nt, Homo sapiens
gagcgccggacccagcacggagggaccgcagagagaggcgcagaaggaccgggagcacagccgccgagaggcacgcagaccacc

SEQ ID NO: 42435 - RNA, 79 nt, Homo sapiens
cggaccaccgcagagccgaaggcaaccccaagccgagacacggcgcgaaacaaagggcgaaccaaagaaggaaggcgac

SEQ ID NO: 42436 - RNA, 67 nt, Homo sapiens
gaaagaccccaaggacacagagcacaagcccgaagaaggccccagacgaaggagcggacggaaaggc

SEQ ID NO: 42437 - RNA, 73 nt, Homo sapiens
gccaccgacaagaaaccagccagagaaccagccagacggacacacaaccccgagaagagcaggacaaaaggaa

SEQ ID NO: 42438 - RNA, 45 nt, Homo sapiens
ggccggcgagcgcgcgccaccaggggaccacgggagaggaggaag

SEQ ID NO: 42439 - RNA, 76 nt, Homo sapiens
agcggaggacacgggggccacaaagccccccggagacgcaaccaaggacagaacaaggaaagaaaccaaaaaagaa

SEQ ID NO: 42440 - RNA, 97 nt, Homo sapiens
agcgcagcacgggacgcgaccggaaggcaggccggcagcacgaagacaggaggaacggagcccaggccggcccggggcgccggcccgggcaaaagga

SEQ ID NO: 42441 - RNA, 109 nt, Homo sapiens
agcgaacgggggcgaacggggcgagccggaggagcacccaaccccgcgccaaaggacgcccaaggagccagggcagcacaaggaaagcgccaaaagagcaaagggagga

SEQ ID NO: 42442 - RNA, 76 nt, Homo sapiens
agcaccccaggccacccacagacagggccggcaccaacaaccccagcacccagccaaggggcagagcagacccacg

SEQ ID NO: 42443 - RNA, 74 nt, Homo sapiens
agcagcacgaccccagcacagagcagacgcccaagaagccccgcagcagagggacggagacgagacgacgcaag

SEQ ID NO: 42444 - RNA, 54 nt, Homo sapiens
gaaggggagagacaccaccccccccgccccaaagcgcgcgagccaagcaagaca

SEQ ID NO: 42445 - RNA, 81 nt, Homo sapiens
acaccgccgcaggcgcccccggggcagccgggccaggggcccccaggggacaagggccaccaggaacaaggacccgggacg

SEQ ID NO: 42446 - RNA, 78 nt, Homo sapiens
ccaagagaaggacagggcaaagggccacggaacaggagccgcaagccagccaccaccacagacacggcagggaaagga

SEQ ID NO: 42447 - RNA, 81 nt, Homo sapiens
gagccgaggcgagccaacagcacgcccgaaaagaaagcgaacacacaaaacaagaaaaggcacgcaaacccacaagaacgg

SEQ ID NO: 42448 - RNA, 78 nt, Homo sapiens
accgagccgggccgcccacagggggaagaggcgccgcccgggggacggcaggacaagaacagccaacgccaaagccgc

SEQ ID NO: 42449 - RNA, 75 nt, Homo sapiens
gcgggcccgcccagaggaagcgaccgagaggaggggagaacaggaaccgcgcagggaaggcacaggggcgcaacg

SEQ ID NO: 42450 - RNA, 70 nt, Homo sapiens
acggagagcacggcaaggaagggagacaggcaggcaaaccacgaaggacacgcaacaccaaagaaaggac

SEQ ID NO: 42451 - RNA, 78 nt, Homo sapiens
gccaacccccccacccaggccccgcaagaagggccgggggcgagccggagcgaccccggcagggacaaaggaaaaaga

SEQ ID NO: 42452 - RNA, 68 nt, Homo sapiens
gcggccaaagccgcccagacggccaccggcgggaggaacaaaaggccccaaagcccaagaggaagggg

SEQ ID NO: 42453 - RNA, 67 nt, Homo sapiens
gggccgaagcacaccagccagagcaaaacgagccaaacaaaccacgccagggacaacagaaaaaaca

SEQ ID NO: 42454 - RNA, 90 nt, Homo sapiens
acgacagcagaccgaaaaaacagacgaaaggccgccaaagccaagccaccaaacgaagagccccagcaggaggaaaagcggcacgagggc

SEQ ID NO: 42455 - RNA, 63 nt, Homo sapiens
gaccgagcagaacccacacaggggaacacagccaacgaggcaagaagcaagcaaccaggcgcc

SEQ ID NO: 42456 - RNA, 83 nt, Homo sapiens
ccggggagcccggggaggacgcgggacccccaaagccccgcaacgaggggagaggagaggcccagagaagagaggagcgggcc

SEQ ID NO: 42457 - RNA, 88 nt, Homo sapiens
agcagcgccggagcccgagggacggggacggagagaacacgagcccacagacggggcagcaccacccggcagggggagaccgacacga

SEQ ID NO: 42458 - RNA, 76 nt, Homo sapiens
ggaaagaggagaaagaacacggaacagaacaacccagaacggaagccccccggaaaaggcaccaagcagccgaaga

SEQ ID NO: 42459 - RNA, 75 nt, Homo sapiens
ccgcggaagagccggaccaagcccacagcagagcggacaggacacaaaaggcgaagaagggagaaaggcaggcag

SEQ ID NO: 42460 - RNA, 79 nt, Homo sapiens
ggagaaggcacagagcggccgcgccagcgaccacagaaagaagacacccgccacacaggacagagaagccaaagaaaac

SEQ ID NO: 42461 - RNA, 79 nt, Homo sapiens
cgcaaggagggcggcgggacgcaccgaggccagaccgccgaggaggaccagaccacggagacgccacagagacaaggcc

SEQ ID NO: 42462 - RNA, 67 nt, Homo sapiens
aaagacagcacaaagaagccgagacaaacggcaccaagaggaaaaggcgaaagaaggaaccaaacgg

SEQ ID NO: 42463 - RNA, 87 nt, Homo sapiens
ggggcgcccccccgccaaggcccggcgaggggggaacgccaagcacaacggcagcagaacacccacaggcaagaaaggaaggggggc

SEQ ID NO: 42464 - RNA, 63 nt, Homo sapiens
gaggacggcgagaaggcggcgcgcgaggcaagcgcgcgccgcggaggcacccaccacgggcca

SEQ ID NO: 42465 - RNA, 73 nt, Homo sapiens
ccgagcgacccaggccccacccggcaggaacccaagccccacaggagcggaagaaggcagagacccagagaac

SEQ ID NO: 42466 - RNA, 72 nt, Homo sapiens
gagcgagggagcgggcccgcacccagccccggacagcaaagcaagccaagagggcccagccaagaagcacgg

SEQ ID NO: 42467 - RNA, 75 nt, Homo sapiens
gcgccccagaggcagccagaggccaccagaccgccagaaaaaagaccaggaaacaggccgacagcggaaaagaac

SEQ ID NO: 42468 - RNA, 78 nt, Homo sapiens
acacccaaaaccgcccaaacaggaaaggacccccgcccacccacccccccgagccccccccaaggcagccgagcaggg

SEQ ID NO: 42469 - RNA, 77 nt, Homo sapiens
gcgcagccgggcccggccccagccgacgaggccgagaaacaagcagcaagaaaagaacaaggacaaaccccgacgca

SEQ ID NO: 42470 - RNA, 57 nt, Homo sapiens
aaagcaccaaagacgaggcacgccggcggcccaacccagcaggagaagggacagagg

SEQ ID NO: 42471 - RNA, 82 nt, Homo sapiens
cgggaagagccgcggggcaaaaacacaagaagagagcgagaacaccgcaagggccgggggcccgccccggaacccggagccc

SEQ ID NO: 42472 - RNA, 108 nt, Homo sapiens
ggaagagccgcccgagggaggcgacgggggcgaagagcgcgccgcccccgcccacccagcccccaaaacacaagaggacggagaagcgacgaaagaagccgggacaag

SEQ ID NO: 42473 - RNA, 52 nt, Homo sapiens
accagacaacaacagagaaggacaggagaaagaagcaccagcaccaagacca

SEQ ID NO: 42474 - RNA, 50 nt, Homo sapiens
acagaacccccaccaccacggacgaggggcccccccagcgaaggggcgaa

SEQ ID NO: 42475 - RNA, 75 nt, Homo sapiens
gacgacgggaggcggagggcgcccggcgaggagcgccaggcgagagcccaaaaggcagagcgaggagagaagaag

SEQ ID NO: 42476 - RNA, 50 nt, Homo sapiens
gaaggccgcaaaaggacaagacaggaggacacccgaaacaagggggcgcg

SEQ ID NO: 42477 - RNA, 69 nt, Homo sapiens
ggaagccaggcgggccacaaggcggagcacgacgaagacacgcacacacagggacacgcggcacaggag

SEQ ID NO: 42478 - RNA, 66 nt, Homo sapiens
cagaaacccacacggcaagggaccaagaaaggcccagggaccaaagcccggacaaggcccgagcac

SEQ ID NO: 42479 - RNA, 103 nt, Homo sapiens
gcggcaggaacgcaaacagaacagaacaaagggccgaggccaaccagcacacggacccgacaccggcgccagcgcaagaaacgagcagaagaggaacaagggg

SEQ ID NO: 42480 - RNA, 56 nt, Homo sapiens
cgcgaagcgccaaagccagacaaagaaacacccagcccagccgacgaaaacggaaa

SEQ ID NO: 42481 - RNA, 63 nt, Homo sapiens
agggccagcaacaccgccgcagcaagcacggcagcagcgaccccacgcacggaaggggacaag

SEQ ID NO: 42482 - RNA, 78 nt, Homo sapiens
agcaccgggcgaaaaggaggaaaagaagccagaccgaggcaaaacccaaggcggggcgcccggcccagagggaccgac

SEQ ID NO: 42483 - RNA, 101 nt, Homo sapiens
gaagccaccaaccgaggcgagaagagagcagaaccccacccaccaagcagcgggcggaagaagcaagaaggcccccaaaagcaagagccgaagggccccag

SEQ ID NO: 42484 - RNA, 88 nt, Homo sapiens
ggcccggccaggcacaagggcaccacaaagggccaccaaaaaacaaacgcgaaaaagggagaaaaaccaaccccaaaaagggagaggc

SEQ ID NO: 42485 - RNA, 110 nt, Homo sapiens
caagccgggaaagaaagacccaacagaaacacggaccgaaagagggccaaagagggaagaaaacgacgaagccaccgcagacgaacaagaaggcaccacgaggacagagc

SEQ ID NO: 42486 - RNA, 77 nt, Homo sapiens
aaggagcccggccccacaccggcacacagcacagggggccaacaaaacacagacggaaaagaaaagaacaaagaaaa

SEQ ID NO: 42487 - RNA, 62 nt, Homo sapiens
gggaaagcccggggcaggaaagcaccgggaggaaagagagccacacgaagaacacggccaaa

SEQ ID NO: 42488 - RNA, 65 nt, Homo sapiens
gaggggagaagagcccagagagaggaaagacagcgggaaacccacccaccacccaaacccgagag

SEQ ID NO: 42489 - RNA, 68 nt, Homo sapiens
cgagcaggaaccccaggaaacggccaggaaaaggcagaaaggcccggaacacaaaacaggaaaagacc

SEQ ID NO: 42490 - RNA, 81 nt, Homo sapiens
gggaagcggaagaggggaggcacaaccgaagacacgagaaggccccagccggcaggaacaagcacacagagacggggacgg

SEQ ID NO: 42491 - RNA, 83 nt, Homo sapiens
agagcgccggcaagagccgggcggagaaccggggccgccagacaacacagggacacaacaaacacaaccgccacagaagcaca

SEQ ID NO: 42492 - RNA, 54 nt, Homo sapiens
ggcagagcgccgcaacgagcaagccagaccccaaccgaccagcaggccacgggg

SEQ ID NO: 42493 - RNA, 82 nt, Homo sapiens
ccgagcaacaccccggccaccgacccacaagcgccgcgccaggacggcagccagacgagcagggccgcagcaggccgcagcg

SEQ ID NO: 42494 - RNA, 77 nt, Homo sapiens
ggcaaggagagaagagaagaacagcacaggacagggcggagaagacaagaaccaaaggggccgggaaccgcggcaca

SEQ ID NO: 42495 - RNA, 70 nt, Homo sapiens
aacacggccgcgcgcgcagggagggggggcggcacaagaccaggagaggcaagcagacagacccacaagc

SEQ ID NO: 42496 - RNA, 74 nt, Homo sapiens
cagacccagacccaagcgaggaagaaacagaaaagaccaagaccaccaaggcaaagaaagacgagaaccaggac

SEQ ID NO: 42497 - RNA, 73 nt, Homo sapiens
cagcagccgaagaaagcaggccgaaagacagacccccaagaaaaagacccaaccagcccacagaggccggaca

SEQ ID NO: 42498 - RNA, 83 nt, Homo sapiens
gccccccacgggcaccgcaagacccccaaggacaaggaggaaaggacgcgacgagcccggcaaggaggggccgcaaggccagg

SEQ ID NO: 42499 - RNA, 79 nt, Homo sapiens
aaggggccgaggccccggagcagaccggggccgaacgcaccggacgaaggacgggggacaacagccaggaccacgcagc

SEQ ID NO: 42500 - RNA, 53 nt, Homo sapiens
caagccagcagcaacagaaccccagggagggcgggggcggcagagggcacgcc

SEQ ID NO: 42501 - RNA, 76 nt, Homo sapiens
aaggaacagcgagcggaccccgaccccgaggcgagacggaaagacaaggcaccaggagaaagagcgcccccccaga

SEQ ID NO: 42502 - RNA, 85 nt, Homo sapiens
gaaacagccaggagagccaaccgagccggcgacacgccacgggccgagccagaagggaaaaagaccccaagaagaagcggaagag

SEQ ID NO: 42503 - RNA, 82 nt, Homo sapiens
aacacagaagccgacaaggcgcaagcgaaaacagaccgcgagcccagagcggggaacacaacccgaggagcaccagggggcc

SEQ ID NO: 42504 - RNA, 59 nt, Homo sapiens
cgcgggcagcagcaggccggccccaggagagggcacgagaaaggagaccgaaaagggag

SEQ ID NO: 42505 - RNA, 71 nt, Homo sapiens
aaaagaagaacagaaaacagcgggagagaacgccccaacagaccagcgcccagcgacaaagaaaagccagc

SEQ ID NO: 42506 - RNA, 76 nt, Homo sapiens
ccggcgacaccccggcagagggccccggaggccgccagcagagccgagcagcgggagagcggccaaaggagccaac

SEQ ID NO: 42507 - RNA, 38 nt, Homo sapiens
ccgccaaccaaccaggacaacacacaaaccaggaagag

SEQ ID NO: 42508 - RNA, 70 nt, Homo sapiens
aaacccagaacacgggagaaaaaggaaaacgcggaaaaccgacacaacaggcgagcacacagagagggga

SEQ ID NO: 42509 - RNA, 53 nt, Homo sapiens
cagacagaacagaacccaaaagccgacaaccccagaaacagcaccagcgcaag

SEQ ID NO: 42510 - RNA, 73 nt, Homo sapiens
aacacaccgcagccagaggaagacggaccaggagcggacgaaagcaacgcagaagcaacaggaccagagagcg

SEQ ID NO: 42511 - RNA, 81 nt, Homo sapiens
gagggcagaagcgaacgacaaagcggaaaccggaggccaggcacggcccaaggggccggaggccagggccagggcaaccgg

SEQ ID NO: 42512 - RNA, 74 nt, Homo sapiens
aaccccagaagaaaaggaacgccaccgcgcggcgccacccaggggaacgaggccaggagccacagccacgccgc

SEQ ID NO: 42513 - RNA, 72 nt, Homo sapiens
aacccagcacggagcccaccgcgggcacaggcgggaacaaaaaagcggggaaaacaaaaaaaagaaggaggg

SEQ ID NO: 42514 - RNA, 49 nt, Homo sapiens
cggcccacgcccgcggagcagccggagaagcaaaaagccacgagggaca

SEQ ID NO: 42515 - RNA, 81 nt, Homo sapiens
caaagaaacgccggggacagaacaaggcgaaggaaacagaaggacgagacaagggcaacgagacacccagcggcccggccc

SEQ ID NO: 42516 - RNA, 84 nt, Homo sapiens
ggggagagcgcgccaagaccgcgcagccgcggcgagaccggcacggagagggcgcccggcacgcggcgacggcgccggcggacc

SEQ ID NO: 42517 - RNA, 38 nt, Homo sapiens
gagaaaagaagcgggcaggcccaccccaggaccccacc

SEQ ID NO: 42518 - RNA, 76 nt, Homo sapiens
aaccagaccccacccaaggaaagagcaggaaacacaaaccagggagggaggacacaaaaaaacaaaagcacggaga

SEQ ID NO: 42519 - RNA, 70 nt, Homo sapiens
cgagaccacaccaggcagcccccagcagcagaccggaagaggaccgcgaagcccagagcacccaaggacc

SEQ ID NO: 42520 - RNA, 92 nt, Homo sapiens
ccccaggaggggcgagagggagccgcagcgagcaggacaggaacacaagacacaaacaaaccacagggagggaccaaccagaaggccagaca

SEQ ID NO: 42521 - RNA, 39 nt, Homo sapiens
ccgcgcacgcccggagagagaacgccaacggcaagaaag

SEQ ID NO: 42522 - RNA, 78 nt, Homo sapiens
cggccccgcgccgcaccagccgccagaggcgcacacacaaaggggagccaggaagaagacaaaacagagaggaagcag

SEQ ID NO: 42523 - RNA, 84 nt, Homo sapiens
gagacccggaaggccaaaggcgcgcaaggaggaaggccaaaggcacagcagccaagcaccagacgcggccgacgcgcccaccgc

SEQ ID NO: 42524 - RNA, 69 nt, Homo sapiens
gagggagccgcgcacgccggccagcagcgggacccaaagggcgagccgagaagacgcccaaacggaaca

SEQ ID NO: 42525 - RNA, 37 nt, Homo sapiens
gggacaccccggaagcgggaaagcccaccaaacaaag

SEQ ID NO: 42526 - RNA, 68 nt, Homo sapiens
gggaaggccggggcgcccggcgccggccgagaaggcagaggcgcaacacgaagaagagacgaagaagg

SEQ ID NO: 42527 - RNA, 68 nt, Homo sapiens
cggcgccggccgagaaggcagaggcggagacaaaggacaggcagaaaccagaacaggcaaagggcccc

SEQ ID NO: 42528 - RNA, 65 nt, Homo sapiens
cccaccacaccgagcccaagcggaaagcacgcgcacagaggaagaagagagggcgaaggaggcca

SEQ ID NO: 42529 - RNA, 57 nt, Homo sapiens
cgcaccggaagcaccagcgaggaaggccagagggaaaggagaaaacaagggggaggg

SEQ ID NO: 42530 - RNA, 78 nt, Homo sapiens
caacggccaaccggcaagaccagacgggaacgggagacaagcgcagcgagcgcaagccccggggcagagacacaggac

SEQ ID NO: 42531 - RNA, 76 nt, Homo sapiens
agacggcaaagcacccagccgcagcgccagcagcggacaggcacagacaaccaggcacgaagggcagcagcacagg

SEQ ID NO: 42532 - RNA, 74 nt, Homo sapiens
ccaccgacggggaaaacagcaagagccggaagaaaggaaagaggacacacgcaccaggacaaaagaagggcagc

SEQ ID NO: 42533 - RNA, 73 nt, Homo sapiens
cccaggaggcagaagccagacccagagagggaccagggccaaagaagagccggggggcaggcggacagcaagc

SEQ ID NO: 42534 - RNA, 74 nt, Homo sapiens
aaacccgagcaacccaggccagccaaaagggcaagcagaaaccgggaagggggcgccggcggacgcacccggac

SEQ ID NO: 42535 - RNA, 79 nt, Homo sapiens
cggcaggggcaggccaggaccgacagcccccacaaggcccggccgggcccggaagcagggcagcaccacggacaacgcc

SEQ ID NO: 42536 - RNA, 76 nt, Homo sapiens
gaagggagagagaccaaagacgagaggagagccgagagccaaggcggacaaagcaccacccagcacaacagcaaca

SEQ ID NO: 42537 - RNA, 71 nt, Homo sapiens
gcccacggcagagagagcagccggcagagacagacagacggagggagccgggggaccggccaggaagaaac

SEQ ID NO: 42538 - RNA, 69 nt, Homo sapiens
ggaaacagaacaacgcaaagccacgccacccgacccacgcgggaaacggccagcaaaacagaacgcacg

SEQ ID NO: 42539 - RNA, 82 nt, Homo sapiens
cgagcccgcgcgccaggccgcggcccgaggcgcagcagcaggaggaggaccgcagcaaggaagaaggagaaagacaaagccc

SEQ ID NO: 42540 - RNA, 83 nt, Homo sapiens
cgcccgccccccgcccgcaggggagcaggaaagaagaggaccaagcacacccaagaaagagaagcaagagcggacccaaacaa

SEQ ID NO: 42541 - RNA, 79 nt, Homo sapiens
agagcggaccgagagcgcgaaacgcacgagaagggcgggccgaggagaacgggacccgcaccacgggagaaccagacgc

SEQ ID NO: 42542 - RNA, 78 nt, Homo sapiens
gaagacaggacccacagcacaacaccgcacggagaaccaaagccgagccaaccggaagcaagaagcagagggaaagaa

SEQ ID NO: 42543 - RNA, 81 nt, Homo sapiens
cgggagcgcgaacgagcgacggcggaacccggggccgggacgcagcccggcggcagcaggccgccagcgggagccgacaag

SEQ ID NO: 42544 - RNA, 82 nt, Homo sapiens
accgcccgcccccaggaaaccaagggagacgggaaggcgggcacaggcgggcacggcgaccagggacaaacggggccaagca

SEQ ID NO: 42545 - RNA, 70 nt, Homo sapiens
cacgccaacccgcgaaagcaggaaagggcaaaagcggcaaagggaaaaaggcggggaaaggcagggcccc

SEQ ID NO: 42546 - RNA, 62 nt, Homo sapiens
ccggaagggcggagcccgaacgaggcaggaggggggaaaggcagggccccgaagagacagaa

SEQ ID NO: 42547 - RNA, 45 nt, Homo sapiens
aagcacccaggaaccggcaacagggccgacgccaccgccgagccc

SEQ ID NO: 42548 - RNA, 77 nt, Homo sapiens
ggagcgcccgcgccagccgcgcacaacggggcaccgagccggccgggaacgggaaacgcgcgccgagaagccacccg

SEQ ID NO: 42549 - RNA, 82 nt, Homo sapiens
gcccgcacccggggggagaccggccggagccccagggccgaggacagggcagaccgccagcagcacagcaagccacagagag

SEQ ID NO: 42550 - RNA, 39 nt, Homo sapiens
aacccgcgagacacaaccacacaaacaacacccaacagc

SEQ ID NO: 42551 - RNA, 75 nt, Homo sapiens
accaccccgaaacccccggcggcgccggggcccgccgcagccgagacagaagcgggcggccacggacacaacaag

SEQ ID NO: 42552 - RNA, 85 nt, Homo sapiens
ggagggaagggcaggagaaaaccaagaaggagagaagagcagaacccaggaacagaagggcccggccagggagaaccccccggag

SEQ ID NO: 42553 - RNA, 71 nt, Homo sapiens
agcacaaaaagaccgcagagccaagccccaagccaaaggccgaagaggggagagaacggagaccagggggc

SEQ ID NO: 42554 - RNA, 92 nt, Homo sapiens
cggaaaaggccgccgccgccgccgccgcgccgagcggaggaggaggaggaggcgaggaggagagacacagaagcgaaggggacagggggaga

SEQ ID NO: 42555 - RNA, 81 nt, Homo sapiens
ccgggcccgcaggcgcgggcgcgcgcagccaggcaaaaaacaccagcaaccgacggcagcaacaaggacaggcacagcccc

SEQ ID NO: 42556 - RNA, 72 nt, Homo sapiens
caagccaccgaagccggcaaacgcgaagaggaggagaagccaagacaccgcgaaagggagacagggcaccac

SEQ ID NO: 42557 - RNA, 79 nt, Homo sapiens
agaaaggcagaagaccggaaacaagaagcaacagcgagaaaaccagacaaaagcacagaaaaagcaggacacgaaggaa

SEQ ID NO: 42558 - RNA, 78 nt, Homo sapiens
gggccccgagaagaaagacccaggcaaagacacaccagaacacagcagggacagagaaagaccagggcagaggaagaa

SEQ ID NO: 42559 - RNA, 71 nt, Homo sapiens
gaaggccaagaggcggcgggagaccccaaccgcagagcgcccgggggccaccgggcacagagagggcccgc

SEQ ID NO: 42560 - RNA, 80 nt, Homo sapiens
cgccgagcagaggaggagacagagcggcccgcagagccacagacgcaggagggccacaagggccggggacacaagcaaca

SEQ ID NO: 42561 - RNA, 76 nt, Homo sapiens
gacccagggacaccacccagccccgacgacgggacaggcagagccaccgcccggccaagagaggagccgccgcacc

SEQ ID NO: 42562 - RNA, 64 nt, Homo sapiens
aaaagcaaaaaaacaaggaaagccgcaacagaaggaaacaagcagcagcacgaccacaccgccc

SEQ ID NO: 42563 - RNA, 66 nt, Homo sapiens
acacaaaaccccacgcgcgggaggagacgggcccccccagacggcaccaaacggcaaggaggaaaa

SEQ ID NO: 42564 - RNA, 73 nt, Homo sapiens
cacaccccccccagcgaaagacccagaaccccaaaaaaagggggagagccagcaaccggaagcaggagaagag

SEQ ID NO: 42565 - RNA, 68 nt, Homo sapiens
aaccacacggccaggaaagccccaacccagagcaaagcagaagaagccccccaagaccggagggccag

SEQ ID NO: 42566 - RNA, 34 nt, Homo sapiens
acaaaggagccaccaagagagagcgcgcacaccg

SEQ ID NO: 42567 - RNA, 71 nt, Homo sapiens
aaaaaaagaccgaccgcccaggagcacccccaaaacagccgcagaacccgccccgaaccgagaagaaggaa

SEQ ID NO: 42568 - RNA, 76 nt, Homo sapiens
cagcccagccgggggccggaggcagggcggagaagggccagagaggggaagaggaaaccggaacccaaagagaaga

SEQ ID NO: 42569 - RNA, 79 nt, Homo sapiens
cgggacccggccaccagcaagccgggggaagagaccgaaaccaagggggaaaggcacgagggcaacccgcccaagcccc

SEQ ID NO: 42570 - RNA, 77 nt, Homo sapiens
caccacggaccccaaggaagccacggcagacacacaacccgacccgacgagcagcccaaggccaaccccacgcaccg

SEQ ID NO: 42571 - RNA, 75 nt, Homo sapiens
cagaaggaacggagacaaaaacggcccggagaggaggccaaggggcagagcacaagaacagccggggcggggaaa

SEQ ID NO: 42572 - RNA, 83 nt, Homo sapiens
cacggcgaagaggacggaaaaaccagccgcacgccaaggaaacagaaacgcacagccgaggaaaacgggacgggggccaggcg

SEQ ID NO: 42573 - RNA, 95 nt, Homo sapiens
gccgccccgcgagcacagagcccgccgccgaccgccgcccgccacacccgccgccagagaaggagggggcagagcacggcaggcagaaggggcca

SEQ ID NO: 42574 - RNA, 81 nt, Homo sapiens
caagcgcagaacgccaagcaccacaaggaaaagccaggccccgaggacaaggcagagcaggaccgcggcaagcgggagcgg

SEQ ID NO: 42575 - RNA, 78 nt, Homo sapiens
ggaggcgcggcaggagggagcaggagcggaccggcccggaaggaagcaccacacccacccaaggagccccagagcacg

SEQ ID NO: 42576 - RNA, 75 nt, Homo sapiens
gagaccggcacccagacaggggcgaaggcagaggagcggcgagccagggagcgcgagaacgcccaaggagaaaaa

SEQ ID NO: 42577 - RNA, 70 nt, Homo sapiens
aaaagacgcccgagcaccccagaaagcgcagcccgaaggccgaaaagaacaggaacagacgacagggaac

SEQ ID NO: 42578 - RNA, 75 nt, Homo sapiens
cagggacacacagcaggagaaacccgcaagcaccaccacgaggagaggagccaagcccaacgggacgggaaaacg

SEQ ID NO: 42579 - RNA, 81 nt, Homo sapiens
gggaacagacgcagggcagggccccgcccggcggggaaggcggaggcagggcgagaccgaccacgcaggcccgacccccag

SEQ ID NO: 42580 - RNA, 81 nt, Homo sapiens
cacacccgcgcgcgcccgggaggaaggaacgaggcaaggagcaaagcagcggcgcagcccgggccgacaaccccggaacgc

SEQ ID NO: 42581 - RNA, 72 nt, Homo sapiens
caggacaggagagaaagacgagaaggccgaggaggagacaagcagaagcagaacacagccaaagccgaccag

SEQ ID NO: 42582 - RNA, 67 nt, Homo sapiens
agcgcgagaaacagaaggagggcaccccgccagagcccaggcccaaaccacccagaccaggaaacaa

SEQ ID NO: 42583 - RNA, 51 nt, Homo sapiens
ggggcgaagacgaaagagcgaagggggcagaaggggaggggccagaaccag

SEQ ID NO: 42584 - RNA, 84 nt, Homo sapiens
cgaccaggaggcggccgccgcagcccaggcgcgggggcgacgacaggacaagagcaccaagagagaccaggacacaccacggga

SEQ ID NO: 42585 - RNA, 83 nt, Homo sapiens
caacagggccggccggccggcccccaaacgcgcccgcccccaggaaaaaaccagaggaggagaagagccgcagggcccagcgg

SEQ ID NO: 42586 - RNA, 73 nt, Homo sapiens
aggggccgcaggggagaggagcaccaggagccacggggaaaaggaggccgcccaccgagagcccaagccccgg

SEQ ID NO: 42587 - RNA, 71 nt, Homo sapiens
cagaccggcccccccaacagaacaggccagcaacagaagaaagcaagcaccggggaaagcggcccgaaaca

SEQ ID NO: 42588 - RNA, 63 nt, Homo sapiens
agaggacgaggccgacagcacgccgagaaggaagcccggggcggcgacggagcacgacccaag

SEQ ID NO: 42589 - RNA, 77 nt, Homo sapiens
aagcaggaaacgaaaccagggcaaaacaccacccccccacaggaaacagcgccccggggaagacggaagagacgcca

SEQ ID NO: 42590 - RNA, 63 nt, Homo sapiens
ccccgcggggcgcgcgagacgacgggaccgaaggaccccgccagagacaaccgagcgccagga

SEQ ID NO: 42591 - RNA, 89 nt, Homo sapiens
cgcagcagaggggccacgcgggcccgaggcgcaccaagggcgaaggagccggcccaagccccagcagggagagcaccacagcaaccagg

SEQ ID NO: 42592 - RNA, 76 nt, Homo sapiens
caagggacgcagcggaagaaaagaaagggccacagagcaaccaaaaaccggccgcaggcacaaaagaagacgggaa

SEQ ID NO: 42593 - RNA, 76 nt, Homo sapiens
agagcgcggccaagaacagaggaagggggagacaggcaggcaaaccacgaaggacacgcaacaccaaagaaaggac

SEQ ID NO: 42594 - RNA, 73 nt, Homo sapiens
gcagcccccggagacagcggcacagagggccgccaggaaggacacagacaaaagaccaggagagagcagcaaa

SEQ ID NO: 42595 - RNA, 78 nt, Homo sapiens
agccagaaaggggagagcgcgaagcaaaggagcaagcggccgagccgaggaccgcagcgaagcacagcagaaggggcc

SEQ ID NO: 42596 - RNA, 77 nt, Homo sapiens
cgcgaccaaagccgacggggcaaggcagaccagggccagagcaccagaccagcagaggagcgccgccaggcgagacc

SEQ ID NO: 42597 - RNA, 55 nt, Homo sapiens
gaaacaccgccacccaggcggcagagggcggcgggcagacaaccgcgcagcgccg

SEQ ID NO: 42598 - RNA, 84 nt, Homo sapiens
gagagccggcgcagcagcaagcccacggaggacccccgcccgaaccgagggaacagagccggacgagcgggagaggacaccaca

SEQ ID NO: 42599 - RNA, 53 nt, Homo sapiens
ggagagaggaccacccagaggagcaacgcacggcagacacaccgaccagagga

SEQ ID NO: 42600 - RNA, 64 nt, Homo sapiens
gcaggaggagcaacaaggggacaacggacggaggggggaggagcaggcccccaccgcgacccac

SEQ ID NO: 42601 - RNA, 77 nt, Homo sapiens
aaaggacagaccagacagaggagaaacaccaagcacgggggaacgcaaggcggggaaaaaaaggcagcacacagacg

SEQ ID NO: 42602 - RNA, 68 nt, Homo sapiens
agacgcaaaggacaaccagccaggaaaaagagaaagccccgaaacagcgagacagaagaaagcgagga

SEQ ID NO: 42603 - RNA, 98 nt, Homo sapiens
aagcccaaaccccaggccaagcaaccaccagcagcccccagagcggaacacaggacgcaaaccagaaggagaaaaaggaacgggggccccgaaaaaag

SEQ ID NO: 42604 - RNA, 76 nt, Homo sapiens
aaaacgcggaggggaccagagaccaaaaaaaaaacgcgaacaccgacggagccaggaccccaaaagagacagacag

SEQ ID NO: 42605 - RNA, 60 nt, Homo sapiens
gccgacccgcgcccgccccccagcaccgggcggacggcagcccagaaacaggacagcacg

SEQ ID NO: 42606 - RNA, 84 nt, Homo sapiens
caggagacgcagagaaagggcgccaaacaagggaaccgacccagagaggaaagaaacaaggcagaaagagacgacgacagaaaa

SEQ ID NO: 42607 - RNA, 72 nt, Homo sapiens
gaaggaggaggaaaaaaggagcaaaaggaacacacgcggcccgagccccaggagagccgaggacccaccccc

SEQ ID NO: 42608 - RNA, 69 nt, Homo sapiens
cagaaccccaaaccccaacaaggcggccggggacccccgccgggaccgacgcaccccacggggcagccg

SEQ ID NO: 42609 - RNA, 84 nt, Homo sapiens
ggcccagcgcccgacccgggcagaccccgccagaccacgccaaccacgaggcgcaaggaagaagagacgccgcgcggcagacaa

SEQ ID NO: 42610 - RNA, 58 nt, Homo sapiens
ccgggggcgcggccgcgcgccgccggcgaaggaggaggcggccggggggaaacagcag

SEQ ID NO: 42611 - RNA, 54 nt, Homo sapiens
ccacaccagccacgccgaacgcaagggcaggccgccagaggaccaggacagcgc

SEQ ID NO: 42612 - RNA, 80 nt, Homo sapiens
cgggcgagcggggcgcgccgcagagcggcaccgaaggacaggagcaaggggcgaacgccacggggggcccgccgcgcaaa

SEQ ID NO: 42613 - RNA, 80 nt, Homo sapiens
agaagagagagaaagaccaagaccagcaccagacagcgaaaaagaggacccaaaaaagagagaaaaggccaaagagaggg

SEQ ID NO: 42614 - RNA, 69 nt, Homo sapiens
gcccagccccgagagcgggaacagagcaacaagaggccggccagagaaccgggggaccgaagaaaagcc

SEQ ID NO: 42615 - RNA, 76 nt, Homo sapiens
gaggaagcacaccaccaaggaacgggcgcagcgagaggagcaaaaggagggaggacagagaaccccagacgcacgg

SEQ ID NO: 42616 - RNA, 59 nt, Homo sapiens
acaggaggccccggaagacggggggaggaacagagggacgcaagaacaggaaggggccc

SEQ ID NO: 42617 - RNA, 75 nt, Homo sapiens
gagcggaagggacagaggacaacgggggccgggcaccacagagaagaggaaaaccccaagacaccaagaaggggc

SEQ ID NO: 42618 - RNA, 73 nt, Homo sapiens
gaggccgggcgagcagcaggagcaccggcccaagaaacaggggggaaggagcaccacgggcacaccacgaggg

SEQ ID NO: 42619 - RNA, 81 nt, Homo sapiens
cgcagccgccccgaagagggggacacgacccggagcacccgaccccgaaccgccagagcggaacgaccccagagcgagccc

SEQ ID NO: 42620 - RNA, 80 nt, Homo sapiens
caaaccggccccgccggggcggcgcccccgcgggcggacccgggcgccccagggcacaggacgggacccggaggacgacg

SEQ ID NO: 42621 - RNA, 83 nt, Homo sapiens
aagcgaagagaaaaaagagaagaggagaaggaaaaacaagcgaagaaaggcacaggacggaaaaaggacaaggaggaaagaaa

SEQ ID NO: 42622 - RNA, 71 nt, Homo sapiens
ccagggagcggcggcagcaggaacagcaagccaaagagcggcgggccacccaagaagcaggaggaccagca

SEQ ID NO: 42623 - RNA, 69 nt, Homo sapiens
gacagggaccccccaccaccgggaagccagggacacacggaacaaaacaccggggcccacaggacagcc

SEQ ID NO: 42624 - RNA, 56 nt, Homo sapiens
aaggcccaagcccagccaagcggagcagaccaccgcccagcaaaaagcggcggaaa

SEQ ID NO: 42625 - RNA, 78 nt, Homo sapiens
cgcgcccaagagcccagccgagccggccgaggccacgcgcagagcgaacaccaccgcgaagacgcagccacccgcgcc

SEQ ID NO: 42626 - RNA, 72 nt, Homo sapiens
ccgccagaggcagcagggccaaccagagcgacgaagcagacagccccggcagaggccagcaaagcgccaaaa

SEQ ID NO: 42627 - RNA, 89 nt, Homo sapiens
gaaagaaacaaggggccagggcagagggcaccgagcggcggagagccgggagaaacacaaagagcaaaccaagccaggcccgaagagca

SEQ ID NO: 42628 - RNA, 63 nt, Homo sapiens
cgcaaaggcacccggggcagaccggaccaaggcaccgcagaacaggccaggggaagacaacca

SEQ ID NO: 42629 - RNA, 85 nt, Homo sapiens
gcgaggcggagaccgagggggagccccgcgcgcggcgcggaaaggcaggagaggagcagcaaacaaaagagggccaccaaaccaa

SEQ ID NO: 42630 - RNA, 43 nt, Homo sapiens
ccgacaaccagaagcgacacagaccaagccagggaggaagcag

SEQ ID NO: 42631 - RNA, 79 nt, Homo sapiens
cccggaaccgagagccccgaggggggcgagcagacccaggcagccgcgcaaggggggcaagccgagcggcaacgaaaca

SEQ ID NO: 42632 - RNA, 78 nt, Homo sapiens
gcaagcaagaacagaccgccacaccagaaagagaaggaagaggagaaaggacggcacgaggcgagcagggggagagag

SEQ ID NO: 42633 - RNA, 56 nt, Homo sapiens
ccgggagagccgagcagccccagcagggcgccagggaaggaccgcacacaagccgc

SEQ ID NO: 42634 - RNA, 106 nt, Homo sapiens
acacccagggccggagaagcgcacccgagccggaaaaggggcaaaggacaaccaaaagggcacaggagaggggaccgccgggcggccggaccagggcgccgggagc

SEQ ID NO: 42635 - RNA, 32 nt, Homo sapiens
ccggcacagcccccggggaagaaaagggaacc

SEQ ID NO: 42636 - RNA, 34 nt, Homo sapiens
gaacgacccaaacagagagacacagacagaaaac

SEQ ID NO: 42637 - RNA, 68 nt, Homo sapiens
gggcggaaaaggccggcagaagggaggcacgaggaaagaagggacgaggagggagaagacgaggagag

SEQ ID NO: 42638 - RNA, 88 nt, Homo sapiens
ggggacagacgagagaacgagaccccaagaagaagcggaagaggagccgcggaaccaagacacaaggaacagaagacaggaccaggaa

SEQ ID NO: 42639 - RNA, 79 nt, Homo sapiens
agcggcaacaccacgcccacgggacgaggagagggagggaaccgggcagaggacaggagagacaacggaggcaagaaag

SEQ ID NO: 42640 - RNA, 96 nt, Homo sapiens
acagacaacgccacgccccccgcccaggccagcaacacacgggcaccagggagagggggagggcagaaggacccacgagggagaagcccagagcaa

SEQ ID NO: 42641 - RNA, 73 nt, Homo sapiens
gcgaggcggcgcggccagaaggaccagaggaaggcggggaggcggaagaccaggagaaagcacgacccacaaa

SEQ ID NO: 42642 - RNA, 71 nt, Homo sapiens
agccagggcacgaaccagacagaagacaggagccgacgcagagcagggccggcaacagaggaaaaaacacc

SEQ ID NO: 42643 - RNA, 41 nt, Homo sapiens
gagcggggcaacaacccagacgaccggagaagaacaagccg

SEQ ID NO: 42644 - RNA, 80 nt, Homo sapiens
agaggcaaggcagcacgacaaagcccccgacggggcccccaggaggagcaccgaggcacagcccaggcccggggggcaac

SEQ ID NO: 42645 - RNA, 71 nt, Homo sapiens
aagacggcgaagcaccaacgccaagacaagcagaccggaagaccgacggaagaccacaccccgagggagcc

SEQ ID NO: 42646 - RNA, 69 nt, Homo sapiens
gaggcgacagaacacagaacacacaagggagaccgaaaaacgagagaccaccagagaccagaaagagca

SEQ ID NO: 42647 - RNA, 62 nt, Homo sapiens
gcacaagaggaacagaggggacgagagccacagggagaagcagacacacagcgcgagacggc

SEQ ID NO: 42648 - RNA, 85 nt, Homo sapiens
ccgagcgggaagaagcgcgccagacacagcggaagacgcagagggagacaggaaagaacagaggcccggaaacacaagaggaaga

SEQ ID NO: 42649 - RNA, 70 nt, Homo sapiens
aagacacacgcaccgcaacaaaacacgaaagacacggaagcacacccacgggccacggaggccacccagc

SEQ ID NO: 42650 - RNA, 82 nt, Homo sapiens
gacggcagcccagcgagcaagacgcggcgggcggcgcgcccggcacggcaccaggacaccagaggaccagaacccacgagaa

SEQ ID NO: 42651 - RNA, 79 nt, Homo sapiens
gagcggcccgcacaaggccggcagggaaagggagcagcaccggccacacccacagcacgaccggaacccagcgaccgac

SEQ ID NO: 42652 - RNA, 55 nt, Homo sapiens
gaagccaccaaggagcaggaaaacggacaagcccccacgaggaaaacccccccac

SEQ ID NO: 42653 - RNA, 38 nt, Homo sapiens
gccaaggcgacgcaacacacgagggagccaacccagcc

SEQ ID NO: 42654 - RNA, 76 nt, Homo sapiens
aggcgcagcagcaggaggaggaccgcagcaaggagacagacccagcacggaccccccccccagccgggcgaggccc

SEQ ID NO: 42655 - RNA, 53 nt, Homo sapiens
gccagcgccacggccgcaccagggacacacaggaagacgaacacggaacgggc

SEQ ID NO: 42656 - RNA, 69 nt, Homo sapiens
agaccaaacaacaccgcaaacaacggaaaaggcagaaaggcccggaacacaaaacaggaaaagacccag

SEQ ID NO: 42657 - RNA, 69 nt, Homo sapiens
gggcgaagaagagaaagggagagacaaggccgcgccaggcacaagcagaggaaccagggaaccgccgcc

SEQ ID NO: 42658 - RNA, 76 nt, Homo sapiens
cgagcccgccgcaggagcggccaggccggagccggaccgcgaggaaagcgaagccaacaaagaaaggaccggggca

SEQ ID NO: 42659 - RNA, 80 nt, Homo sapiens
gccccgcagaagacgccgacgaggaaggaccaacggggggacacaaaaccgaaagacacaaaaaggggagccgggaaccc

SEQ ID NO: 42660 - RNA, 73 nt, Homo sapiens
cacgcagacacaccagacgaacagaaaagacgaacgagccacaagcagcagagaagaccaggaaagacaggag

SEQ ID NO: 42661 - RNA, 56 nt, Homo sapiens
gagagcggggcaagcacagaaaagaagcaacagaagaagagccggagcccacccag

SEQ ID NO: 42662 - RNA, 81 nt, Homo sapiens
gagcccaagggacagccgccccgggcacacaccccgacccgcccccccagaaaggcacccgaaaggggaaggaaaagaagg

SEQ ID NO: 42663 - RNA, 73 nt, Homo sapiens
agccagcgccaaggcggaaaagcccaagaaacaaacaggcggagaacggaaaagcaccaggaagcagagagga

SEQ ID NO: 42664 - RNA, 72 nt, Homo sapiens
gcccaaaacgccaaagcacacggaaaagccgggccacagaagcaccaccacaagccacaccaacaaacgacc

SEQ ID NO: 42665 - RNA, 74 nt, Homo sapiens
acccagagccgcgcaacgcgaccagcaggggaggaccacgaccccgcagggaacacgcccgcgccccgcccaca

SEQ ID NO: 42666 - RNA, 80 nt, Homo sapiens
ggggggaaacaggcgaggcggcggcgcccggagggcagcgaggcacaagcagaggaaccagggaaccgccgccagcaacc

SEQ ID NO: 42667 - RNA, 79 nt, Homo sapiens
ggaaagcagcaagagaagagaagccgccgagaaagggaaaaagaaaagggcgaagacccgaagcagcgcaggaacagaa

SEQ ID NO: 42668 - RNA, 77 nt, Homo sapiens
gagggaggcgcaaacccagaggcggaaaaggccggagcgcgaagacgcagggaaagcggcacacgaaaggggcacgg

SEQ ID NO: 42669 - RNA, 83 nt, Homo sapiens
gggggggcccagcacgcaagagcagcccaccaagaagggccgggacagagcacgagaccaccacaccaagcggagaaccaaga

SEQ ID NO: 42670 - RNA, 70 nt, Homo sapiens
gccaccgaggcccccccgccccccaggaggcagaaggcaaagcaagcccgcacagccggagacacaccca

SEQ ID NO: 42671 - RNA, 70 nt, Homo sapiens
gaagaagaggaaaaaacgaagggagagagaacgaaacccaaccaagacccagcacacgggaaagggccga

SEQ ID NO: 42672 - RNA, 75 nt, Homo sapiens
gaggagcgaagaacaaacacccgagcgcgaggcgcccagcagaagacagccggggcccaggccgcacagggcagc

SEQ ID NO: 42673 - RNA, 74 nt, Homo sapiens
cacaggagagcgcccaggcggacaagaaccgcaagagcgaggacccagcacacaccacacaccacggccacacc

SEQ ID NO: 42674 - RNA, 77 nt, Homo sapiens
cggcggacacacagacccccaccaagcagggaaaggaaagcaagccaggaggaaacgacaccaaaccggggggggcg

SEQ ID NO: 42675 - RNA, 71 nt, Homo sapiens
caaaccaaaccccaacaagagaacccacagaaggcccagcaggagcggaaaaacaaaaggcagacacaaca

SEQ ID NO: 42676 - RNA, 75 nt, Homo sapiens
ggagaccacaagcgagaagccaagagcaaagcggcggagaaaccaccacaaacacgaggccagcaacgaccaaca

SEQ ID NO: 42677 - RNA, 61 nt, Homo sapiens
cccccacgacgcgcggaaaagagcgcccgcgagcagacacggaacgagaaggaacaaggca

SEQ ID NO: 42678 - RNA, 85 nt, Homo sapiens
gagccacaaaacacagggagggccccgagaacccgaaaaccccccacggaaaggacgaaagaaagaagcagccccagaaagaagg

SEQ ID NO: 42679 - RNA, 60 nt, Homo sapiens
ccgagagcgcgaaacgcacgagaagggagcccgcgcgagccccggcagggcccgggcccg

SEQ ID NO: 42680 - RNA, 98 nt, Homo sapiens
agcaaaacaggcagaaaggaagcaagagggaacagcaagagaaagaaggacaagaacccaaccagcagcaaaacaccaaggaaagggagcagcaaccc

SEQ ID NO: 42681 - RNA, 79 nt, Homo sapiens
aagcacgaaagcgggagagggaccggaacggcggcgacaaggggcccgaacagaggggccagccaggaaagcgggagcg

SEQ ID NO: 42682 - RNA, 70 nt, Homo sapiens
ggagagccgacccgacacgagccaagaaaagggacaggcccagggagggcacgacagcagagaggaaggc

SEQ ID NO: 42683 - RNA, 74 nt, Homo sapiens
ggacaaaaaggacgggacaagaaacgaaggcgaacccaggcacccagagacggagcggaaaccaaggaagaaaa

SEQ ID NO: 42684 - RNA, 68 nt, Homo sapiens
ggaagagcgcggccagcaccccaacgggccaaagaaagcgggcacagccacaccaccccaaaggccga

SEQ ID NO: 42685 - RNA, 61 nt, Homo sapiens
cgacccgaggagcgcgggggcggcccgccccggacccgagcagagaggcccacgcggaccg

SEQ ID NO: 42686 - RNA, 78 nt, Homo sapiens
aaggcggaccagaaaccccagagcgcgaccgcagaggagaaagacagcaaagaaaaggagaagaaaggaaaaaaacaa

SEQ ID NO: 42687 - RNA, 77 nt, Homo sapiens
gaagggaggagacccgaccccagaagaccggagggaagacaagggccggcgagaggaggaagacagaccagaccggg

SEQ ID NO: 42688 - RNA, 76 nt, Homo sapiens
caagccagaacgcgacacaaggaacacacagggagagaacagcacacagaggcgcaaggggaagagaaaagacaga

SEQ ID NO: 42689 - RNA, 77 nt, Homo sapiens
aagaacaacaaagaaacagagacaaacagggcacagagagggccaggagaagaacagccagacccacacacaaccac

SEQ ID NO: 42690 - RNA, 77 nt, Homo sapiens
aacaaaaacacacccagggaggcaagcagagcgcggccaagaacagaggaagggcacaacaacagcaacggaggcgg

SEQ ID NO: 42691 - RNA, 62 nt, Homo sapiens
ggagcgggagcgcagcgaccacaccgaaggcggcgagccagaggccaacgcagaggaacgga

SEQ ID NO: 42692 - RNA, 81 nt, Homo sapiens
gcccgccacccaggaggggagaaccaaagggagacggggacgcaggagccaggacacaccggacaagcaccggaagggcgg

SEQ ID NO: 42693 - RNA, 75 nt, Homo sapiens
ccaaagacacggaaaagcagaggagaacacagaccgcgagaaaccgaaaggaacaagacggaaaggacagcagga

SEQ ID NO: 42694 - RNA, 71 nt, Homo sapiens
ggacggggcccgcagggcccggcccccgaaaggagcacccgaagaagacaagacaggggaaagacagccca

SEQ ID NO: 42695 - RNA, 77 nt, Homo sapiens
caaagccggcgcacaccagacccggacagcaggagccaaagccgcaggcccccccccacaccgggaacagcccgggc

SEQ ID NO: 42696 - RNA, 73 nt, Homo sapiens
aaaagaagaagcagcaaggaaagagaaaggagaccacaagaccccgcgccaccaaagggagggcggccaaccg

SEQ ID NO: 42697 - RNA, 82 nt, Homo sapiens
ggcgcgcccagggaccgaggcgcgaggaaaagcgggacgcccagaaggaagaaaccaaacgaaacacaacgaccaacgggaa

SEQ ID NO: 42698 - RNA, 77 nt, Homo sapiens
ccgcgccccccacgggcagcccccgggggggcgaccgaagcaggcgagaagaaccgcaggagaagcagccaggggag

SEQ ID NO: 42699 - RNA, 78 nt, Homo sapiens
ggcggaggagcccccacacaccaggaggccagagcacccccaccaagccgaggaagcccccacgacgaccgcccgcaa

SEQ ID NO: 42700 - RNA, 82 nt, Homo sapiens
gaccagccaaaggccacaaggagaaggcccacgccagggagcgggaggacgaggaggaggccgccacgagcaagccagcaga

SEQ ID NO: 42701 - RNA, 60 nt, Homo sapiens
acaacaacagccaagcaaccagcagggaagcgcaaacgcgaaagggccaagggccgggga

SEQ ID NO: 42702 - RNA, 73 nt, Homo sapiens
ccagcagaccacgaggccaccgcaaggacaacagcccagaacggacgcaccgggacggaccggaggacacagc

SEQ ID NO: 42703 - RNA, 56 nt, Homo sapiens
gcaaaaacaagacggggcgccccacagaggggcgacgagaacaaaacggagaaaaa

SEQ ID NO: 42704 - RNA, 73 nt, Homo sapiens
cggccggcggcacccgcacccggggacaagcgcgggaacggcgcggaagaagaagagccgccccacacgcaga

SEQ ID NO: 42705 - RNA, 75 nt, Homo sapiens
ccccgccggcccgggggcaggcgggcacgaggaccagcgggccggagccccgagaagagaacaaggagcggccca

SEQ ID NO: 42706 - RNA, 99 nt, Homo sapiens
cgagcggagagaaggccggcgggggaggaaaacggggacgcacaaaaaaccggaggagcggcgcggaacggcacaaggcaacagggagcgcagaaaacg

SEQ ID NO: 42707 - RNA, 88 nt, Homo sapiens
gagaagccgcaggacagcagccccgagcacgggccgaggcccaccgcgacacaccgccaggagcgggggccccccccgggcacggggc

SEQ ID NO: 42708 - RNA, 61 nt, Homo sapiens
gaggaggaaggagcagagagaaaggagagaccgccagaaaacaaagacagagagaaaagga

SEQ ID NO: 42709 - RNA, 76 nt, Homo sapiens
acagagaagaaacgccaacacaccaaaggggaacgcaaagggaaggacagaggcgaacagcaaggaagccgaaaaa

SEQ ID NO: 42710 - RNA, 58 nt, Homo sapiens
aacggccaaacacgaagcaaggaagacggaaagggccaggacccaccggccagcacca

SEQ ID NO: 42711 - RNA, 79 nt, Homo sapiens
ggcgccgccgcccccgggccgcggccgcaggaacaagagaaaggggggcacagaagaagaagaaagcggggagaaacaa

SEQ ID NO: 42712 - RNA, 101 nt, Homo sapiens
gcaagagcccgacgaagggaaaacaagcaagcgccacagagcagggggagaccagcccgaaccggggggagccagcacgaggggcgaaccacggaaaggag

SEQ ID NO: 42713 - RNA, 77 nt, Homo sapiens
aaaaaaggaacgccaaagaagagaaaacaggacaccaaccgaaagagcccaaaacgcgggacaaggaagaggagccc

SEQ ID NO: 42714 - RNA, 78 nt, Homo sapiens
gcagccgcgggaggaggagccacaccaagggagaccggaggcccgcggcaggcggggccaggcccgagccagaaggag

SEQ ID NO: 42715 - RNA, 72 nt, Homo sapiens
agaagaagaccgaaacgccagccggacccaagagccagaaagaagggagaacggagaagaaacagccacgga

SEQ ID NO: 42716 - RNA, 55 nt, Homo sapiens
cagggccccaacccagaagacaaccgaccaacagagaagaagacaagaggcccca

SEQ ID NO: 42717 - RNA, 89 nt, Homo sapiens
cgacaccaccgcagcgacgagcagcaggcaccccccgagcccagcccacacaccgccggaccccccccaggcggagcggccccgcccag

SEQ ID NO: 42718 - RNA, 58 nt, Homo sapiens
cccaagccccacccaccgcgcgggagggcggacgacaggaaccccgcaggcggacacc

SEQ ID NO: 42719 - RNA, 37 nt, Homo sapiens
ccggcacgaaaaacccgcagcaccaaaaagcccgggc

SEQ ID NO: 42720 - RNA, 69 nt, Homo sapiens
ggaagaggcacgcgagggggcgcgaggggaacggaggccagagcgcgggcgcgcggcccggcacaccag

SEQ ID NO: 42721 - RNA, 99 nt, Homo sapiens
ccagagcgcccggccgcggccagcggagcccgggcggggcaggagccgccaggagccagcaaagaaccggggaaaaaagagacaccagaggaaagacac

SEQ ID NO: 42722 - RNA, 70 nt, Homo sapiens
agaccacggcccggagagagcacgcccaccgcgccggagccaaaggcaggaccgaaaaaagagcgaacca

SEQ ID NO: 42723 - RNA, 75 nt, Homo sapiens
ggccggcccgagaccgcaccacccgcccgggccccagacagcggccaggcggccggccccacagggcccacaaga

SEQ ID NO: 42724 - RNA, 71 nt, Homo sapiens
agcagcgggaggagcagcaacaccaaaaagagacccagcccaaagaaagccagggcgaaaggcacacagcc

SEQ ID NO: 42725 - RNA, 81 nt, Homo sapiens
aggcaggacacgcgagcagaccgcgaccccggaggccggcggacaggccgcacaaaaagggaaaggagaccgcagccccag

SEQ ID NO: 42726 - RNA, 81 nt, Homo sapiens
cacaacaccgagcaagaacacccgcaccaacgagaagcgacacggaacaggagcggcaagacggcccccaagagcagccga

SEQ ID NO: 42727 - RNA, 70 nt, Homo sapiens
aagaggagaccccaggcaccacagcccgaggcccggagcgaccagccgaagcaggacacaaagaaaagac

SEQ ID NO: 42728 - RNA, 79 nt, Homo sapiens
gaacaccccgggaagcgccggggaagcagaagcacagggcacgccaacccaggacgaacgccagcccgaagaaggaaag

SEQ ID NO: 42729 - RNA, 77 nt, Homo sapiens
cccgaaaccagaagggggaaaggcaccgacgagagggcgcaccgcgccggagcccgaccgcggggacccggagcccg

SEQ ID NO: 42730 - RNA, 74 nt, Homo sapiens
ggaggccagggggcgccagccggaacgcgcgccacccggcagaaacgcacccagacgagagcggccagaccgag

SEQ ID NO: 42731 - RNA, 49 nt, Homo sapiens
ggcaggccggggaccacgaggaaagaagacaaggcggaagaccagcaag

SEQ ID NO: 42732 - RNA, 76 nt, Homo sapiens
gcccggggcccgggacgagggaagccagagcaagacccacgaagggcacacaaaggacccaccgggaaaggacaga

SEQ ID NO: 42733 - RNA, 79 nt, Homo sapiens
ccgccggcccgcgggcaagggaaaaaggaaccagagggcagcacgacgcagaaaacagacacacagcggagacaagcag

SEQ ID NO: 42734 - RNA, 107 nt, Homo sapiens
gcagcccacgccagacgaccccacccgcgccgcgacccgccggaaccaaaaagaagccccagagccggggccaggagccccaagcgccccagcagcaaacacagaag

SEQ ID NO: 42735 - RNA, 79 nt, Homo sapiens
ggagagaagccgaaggaagccaaggcgagcacacagagaggggaagggcagcagcagcagagaaccaaacccaaagcga

SEQ ID NO: 42736 - RNA, 41 nt, Homo sapiens
accaacaccacggaaccaacaccgggaagcccacgggaccc

SEQ ID NO: 42737 - RNA, 77 nt, Homo sapiens
cggagagccggagaagcggaggcacccaaccgcgggacgccgcaccgcgaggaacccgagcccaccggcagcaccgc

SEQ ID NO: 42738 - RNA, 86 nt, Homo sapiens
cggcgggcacaggcaaaggcacgacccagaaagccaaggagccaaccgcacggccgagccagcagcagcgggccggagccacccca

SEQ ID NO: 42739 - RNA, 76 nt, Homo sapiens
cacccacccacgaagggaggaaaagggcagggacagcgcaggcagcaggaagccaaagcagaaccaagacaaacga

SEQ ID NO: 42740 - RNA, 72 nt, Homo sapiens
aacgagggaagccaccaacaggaggaaacaaccaggacacgcagagccaaggagcaccaggaagaggcaacg

SEQ ID NO: 42741 - RNA, 60 nt, Homo sapiens
ggcagacaaaagggccaaagaagggagagaggcggagcaggccagaaaccccccacagca

SEQ ID NO: 42742 - RNA, 79 nt, Homo sapiens
ccccagcggacacggccacgggcagggcccgcgggaaagggaagaagagaaagccgaaaaagacaaggggaggacagcg

SEQ ID NO: 42743 - RNA, 81 nt, Homo sapiens
acagcccggggagcccacagcgccacgccggaacaaggaccgcacccaaccgcaaggcgcccagaccgacgccggcagccc

SEQ ID NO: 42744 - RNA, 69 nt, Homo sapiens
ccaccgaagaagaaagagaagaaacgccagcggaaggaggagcccacggcagccagcggaagagagcgg

SEQ ID NO: 42745 - RNA, 56 nt, Homo sapiens
gagaggccggaggacaccaacaggaccgcgaagcccagagcacccaaggaccaccc

SEQ ID NO: 42746 - RNA, 69 nt, Homo sapiens
cagggaaaaaggagcagcccgggcaccacagaaaagacaaaggcccacgcacaaaggggaacggaaaac

SEQ ID NO: 42747 - RNA, 89 nt, Homo sapiens
cgcgggaagaccgaggggcacaccgaccagccgcacgccgaccggcgccgggagaccgggagaacaaggggcgggaaacagagaaagga

SEQ ID NO: 42748 - RNA, 77 nt, Homo sapiens
gccaaagacaccagcagaaaaggcagagcgggaccaacccagggccagcggaaaggagcggcgcccggaacaccacc

SEQ ID NO: 42749 - RNA, 73 nt, Homo sapiens
gggcgaggacaagcaaggaccgcaggacccaggccagaccggagcagcggggacagaaaaagcggggaagggg

SEQ ID NO: 42750 - RNA, 54 nt, Homo sapiens
gcacccggggacaagcgcgggaacggcgcggaagaccgacacagacaacgacga

SEQ ID NO: 42751 - RNA, 61 nt, Homo sapiens
agacgagaacgccagaaacacaagcacgaggaccacagcacggcccacgacaccagaccag

SEQ ID NO: 42752 - RNA, 77 nt, Homo sapiens
ccgaccagaccacaaagagccaacggagcgccggccagaacacgacaacaaggaaccagacgagacggaggcacacg

SEQ ID NO: 42753 - RNA, 76 nt, Homo sapiens
cggagggggacacccgggcggggcagagcagcccccagccagccgcgagagcccaaaaggcagagcgaggagagaa

SEQ ID NO: 42754 - RNA, 75 nt, Homo sapiens
cccgaaacagccacgccgggcaggaaaccggagcgaagaaaaagccaagacgaccagaggaacacggagccagga

SEQ ID NO: 42755 - RNA, 76 nt, Homo sapiens
aaggagcaacacggcggaccacacaagcaaaagaacccaacagaggaagccgcaagaaacgggacgacaggaaggc

SEQ ID NO: 42756 - RNA, 72 nt, Homo sapiens
agccaccagagccggcagcaaagagggaacagaaaaaaccgggaagaccgacggagccccagcagaagacca

SEQ ID NO: 42757 - RNA, 78 nt, Homo sapiens
cacccgcgagcgcaacgggaagaggaccgggaggaaggcaagggccacgagacccgagcacgaggaggcaggagccca

SEQ ID NO: 42758 - RNA, 67 nt, Homo sapiens
gagagaacgcgagggaagaacaaaccaggggagggaaacgagaaaaacgacgccagcggcggcaagc

SEQ ID NO: 42759 - RNA, 78 nt, Homo sapiens
gaccagagccagcaaacacggacaacccaccccgcacgggccaaggagcacgacaaggccccgggacccgccccgccc

SEQ ID NO: 42760 - RNA, 90 nt, Homo sapiens
caaccagacgccagcgggacgaggaccgagaccgcggccgggaccgagggaccgaaggagaagaaggagaaggggaggagaaggcaagcc

SEQ ID NO: 42761 - RNA, 80 nt, Homo sapiens
gcggccggaggagcccccaggccggcgacagcaagagggcgcccggaagaggaaaggacgagagagacacaaaaccccag

SEQ ID NO: 42762 - RNA, 73 nt, Homo sapiens
ggccgaagggaccacggcccagccagcacgacaccccagcggcaaccggccagcaaggggacagccaccaccg

SEQ ID NO: 42763 - RNA, 72 nt, Homo sapiens
gacccccccccccccccaaggaagaccgaggagcagggagcaaccacaaggaaaggaaaccaccgaaccgag

SEQ ID NO: 42764 - RNA, 67 nt, Homo sapiens
ccacggaaaaaacaacccaaagcgcacacacagaagccgaggccgccagcgccaagaaaaaaacaag

SEQ ID NO: 42765 - RNA, 75 nt, Homo sapiens
cagcgcgaacaggacgccgcaacgcccaaccaggaggcgggcaacacaacaaggcgcggacacccagacaagcgc

SEQ ID NO: 42766 - RNA, 47 nt, Homo sapiens
gccacaacacccacaaaaaagcgaaggaaaaacgaggcaaagaggaa

SEQ ID NO: 42767 - RNA, 77 nt, Homo sapiens
accccgagcgcgcacgggacgaaaaggccaggaggcccaggaggccgggggacccagggcgcagggaggccgggagg

SEQ ID NO: 42768 - RNA, 73 nt, Homo sapiens
ccgcaaagcccgccagcccgcaccagacgaggcaaaacagcaggaccgagacgcaacaggcagcggcggccgc

SEQ ID NO: 42769 - RNA, 73 nt, Homo sapiens
caaccgcagagcgcccggcagaacaaagaaggaaccccagaagagaagaccacacaagaaagggagggaggcc

SEQ ID NO: 42770 - RNA, 58 nt, Homo sapiens
gccggggccgccaccacacgaaacagggcaaggaaaaacaagaaggggggcacagcag

SEQ ID NO: 42771 - RNA, 64 nt, Homo sapiens
gaggcagcgcgggacccagcccaggcggcgcggacggggcggggggcggccaccagacagccga

SEQ ID NO: 42772 - RNA, 70 nt, Homo sapiens
ccaaagacaagcggaggaccacaaggaacccaagaaaggaaacagcagaagaaagaagcgacaaaacagc

SEQ ID NO: 42773 - RNA, 71 nt, Homo sapiens
gcgaagaagcagcacaaggcgagccaggacagggacaagcgcacagcggagaaagcagcgcggccaggagg

SEQ ID NO: 42774 - RNA, 70 nt, Homo sapiens
ggcagggacagcgcaggcagcagggcggagaacggaaaagcaccaggaagcagagaggaccgcagaaggg

SEQ ID NO: 42775 - RNA, 73 nt, Homo sapiens
gggaggaaaacaaccgagggcagaaaaaacaccagcaaccgacggcagcaacaaggacaggcacagccccgcc

SEQ ID NO: 42776 - RNA, 77 nt, Homo sapiens
ccaccgccccagaaagccccagacggaaagagcacgcgagagagagagcggagacaaggccacagcaggccacggcg

SEQ ID NO: 42777 - RNA, 66 nt, Homo sapiens
agcgcagagccaagacggagaaacaagggggcaaaccgagggacacccagcgagcacaagcacaag

SEQ ID NO: 42778 - RNA, 68 nt, Homo sapiens
gcacggacaggaaaacaaggaaaaggccgcgggaaaaaaaggcccagaaacaaagacgcaaacgaagg

SEQ ID NO: 42779 - RNA, 72 nt, Homo sapiens
agaacaagaccgacaggaggccaaccacgagaaggcaaacgaaaggcacaggcaggaccaccggaggagagc

SEQ ID NO: 42780 - RNA, 78 nt, Homo sapiens
gccaccaagagcggggccgcgagcagcgcacgcgccgggccgcgaggagcgcgccagggaaagggagcagcaccggcc

SEQ ID NO: 42781 - RNA, 75 nt, Homo sapiens
aagcaaggacagggcaaacacgcagacacagacaagccggagaacgcccagaccgaaaaccagaaaacgaaaaaa

SEQ ID NO: 42782 - RNA, 43 nt, Homo sapiens
acacccagcagcccgagccagggaggccacaaaccagagggac

SEQ ID NO: 42783 - RNA, 65 nt, Homo sapiens
gcgcgcggcggcccccaggccccgccagaggcaaacagcagacacaaccagagacgacagccaaa

SEQ ID NO: 42784 - RNA, 72 nt, Homo sapiens
ggacagcagcgcaggcaaaaaacagggcccgagggcaggacagcaggcaccggcgaagcacagagaggcgcg

SEQ ID NO: 42785 - RNA, 83 nt, Homo sapiens
ccgcccaggggccaggcgaagcacgagcagaccggcccgaccgcccacagacccaaacaaagaaaaacaaccaccagcgagca

SEQ ID NO: 42786 - RNA, 80 nt, Homo sapiens
cagcggagagcgagagaggggagcaggcaaagaagaaagaaagaaagaagaagagacaagcaaaaaaggcaggcccaaaa

SEQ ID NO: 42787 - RNA, 39 nt, Homo sapiens
gacacagcggcgaagcgcggccaccaccaccacagacag

SEQ ID NO: 42788 - RNA, 54 nt, Homo sapiens
ggagccggacagaaacgccccccaggcccaaaccaaagcaccacccgccaaaaa

SEQ ID NO: 42789 - RNA, 77 nt, Homo sapiens
accgagaaggcgcaaaagggacagacaccagacgaaaaaacgggcgaaaaaaaggggagcccccggaacagccaacc

SEQ ID NO: 42790 - RNA, 82 nt, Homo sapiens
cggggcgcgggcgagagccgggggggagaggaagcccggggaaacgcccagggccggcccagggagaacgcaaaaccaccac

SEQ ID NO: 42791 - RNA, 74 nt, Homo sapiens
gcagccgggacagaacgaacaggcaaagcccaaaaggcaaggcacaagaaggccggcccacagcccaaaaagaa

SEQ ID NO: 42792 - RNA, 81 nt, Homo sapiens
gggaccaggcgaagcggccgagcaggcgagcgaacgacggccaagacaaggggcgcagagcggggggacaggcgcaagacc

SEQ ID NO: 42793 - RNA, 72 nt, Homo sapiens
ggcacccacccacgaagggaggaaaagggcagggacagcgcaggcagcagcgaggagaccgcagccgagcag

SEQ ID NO: 42794 - RNA, 72 nt, Homo sapiens
gggcggggcagagcaggggccggaagcaccaggacaggaggagcaaaaaggacagagcacagagccagcaca

SEQ ID NO: 42795 - RNA, 83 nt, Homo sapiens
agggagaagaggcggggccggaagaaaaaacagcgagaacgaggaacgcagacagcagaaagcggggccggaaggggccaaac

SEQ ID NO: 42796 - RNA, 79 nt, Homo sapiens
cgcagagaagagcgaccaagagcaggagacgaaaggggcgaggccggacaaggcaaaaccagcaagcggacccagacaa

SEQ ID NO: 42797 - RNA, 67 nt, Homo sapiens
ggaagcccgccccagagcagcaccaacagggacgcagcaacgggcaggaaggaaggaaggcaaagac

SEQ ID NO: 42798 - RNA, 76 nt, Homo sapiens
cacaccccgacccccgaacccccagcccaaacccggaaacccagcggcccagccgggacccaaagacaggaccacg

SEQ ID NO: 42799 - RNA, 63 nt, Homo sapiens
gccaccaccgcagaggccgcgaaaaaccacggagccccggaacagccgcccagagggaagggg

SEQ ID NO: 42800 - RNA, 54 nt, Homo sapiens
cgacgcagggaggaaggccgcgagcaggaagaacccccccaaaccggccccaca

SEQ ID NO: 42801 - RNA, 77 nt, Homo sapiens
ccacaagcaagcgaaggaggccagaagaccagaagcgacagccaccgaaagacacagggagggcagccagaacgggc

SEQ ID NO: 42802 - RNA, 84 nt, Homo sapiens
gcgaccgacgcgccacccgccgacgcccagccgcggggcccgcacggaccccaccaggaagacagccgccaccaggcgcccccc

SEQ ID NO: 42803 - RNA, 87 nt, Homo sapiens
ggccaagaaggcaacaccgcgagcgcgcggcaccccgggcgaggagcggccacaccacgaggcgagccaagagcgaggcagccgccg

SEQ ID NO: 42804 - RNA, 74 nt, Homo sapiens
gcgccagaaggaagaggcggacggaggagcaggcgagaagagaaggaccggaggaacgcgaccagaccagcgcg

SEQ ID NO: 42805 - RNA, 79 nt, Homo sapiens
gacggcgccggcagccgaccaggcccgcaagccaaggaacaagaacggaaaacgccggccgccaccagaaagaaccaaa

SEQ ID NO: 42806 - RNA, 79 nt, Homo sapiens
gaggggagcaccaggaccgggccggaacgagacgcacggcaaaagcagaccggaaaacccaccggcaagaccacacccg

SEQ ID NO: 42807 - RNA, 75 nt, Homo sapiens
ccggacaaccagaggcagccagcagggggagcgaagaaaagccggaggcacgaagggccaccccagagagaagaa

SEQ ID NO: 42808 - RNA, 105 nt, Homo sapiens
gaccggaccgagagcggaccgagagcgcgaaacgcacgagaagggaaaggaagaggaaaaccaccggcagcaaccaggaagaaggaagaggaaacaaagaggaag

SEQ ID NO: 42809 - RNA, 36 nt, Homo sapiens
ccaggaggcgagcaacagcaacaggccaacccaagc

SEQ ID NO: 42810 - RNA, 54 nt, Homo sapiens
ccgacacggggcagacaaacacagggccaagcgaccacgcaaaacaaacacgcc

SEQ ID NO: 42811 - RNA, 77 nt, Homo sapiens
cagggccccgcagggaagcgggccaaaacgaaacccagcaagacacgggcaccagagccccccccagcgccgaaggc

SEQ ID NO: 42812 - RNA, 35 nt, Homo sapiens
gcccagccggaagaagaacgaaggaaagagcggcg

SEQ ID NO: 42813 - RNA, 71 nt, Homo sapiens
cgcacacacccagagggcgggaagcccagaggcacggggcagaacaccaacagagggccgaccgggggagg

SEQ ID NO: 42814 - RNA, 60 nt, Homo sapiens
cgacgagcgacccgggagacacgacgggaaaagcacagggccaggaagcagagggacagc

SEQ ID NO: 42815 - RNA, 76 nt, Homo sapiens
ccggaccagggagaccggccgggaacagacggggaccccaagaccagaagccagaggggagcagaagaggagaagg

SEQ ID NO: 42816 - RNA, 71 nt, Homo sapiens
cgcggagaagcgcggagagggaacaggcacgccccacccgccagccgagcccccgacgcagcacaaagccc

SEQ ID NO: 42817 - RNA, 76 nt, Homo sapiens
acccacgggacggaacaccccgagaggcgccgcagcgccccggacaccgggaagaacgcagccccgcagcgcagaa

SEQ ID NO: 42818 - RNA, 74 nt, Homo sapiens
gggaggaacagacacgcggaggggagggcagaacaacagcagcagaacggaggacaggacaacccagaagacgc

SEQ ID NO: 42819 - RNA, 75 nt, Homo sapiens
cccccgaagcgggacacaggaggccccaaacaaccagagggcaagcacccccacaccacccgggcacgacgaaac

SEQ ID NO: 42820 - RNA, 74 nt, Homo sapiens
caaggagagcccacgcgcccaggggaggcaagcaggggggcaaaggaaagaaggcagaaagggaggccaggagc

SEQ ID NO: 42821 - RNA, 52 nt, Homo sapiens
ccgcaggaggaggcacgccccgggcggcacgggaaacaggagaaccgacaga

SEQ ID NO: 42822 - RNA, 76 nt, Homo sapiens
aaacccaggcgacgagccgaccccagaggacaggcgggccagcggcagagcccagagagggccgcacaaaaaggca

SEQ ID NO: 42823 - RNA, 73 nt, Homo sapiens
ccgggcggagccggacgagcgcggccaggcacagagcacacagagcggaagcggagaaaggccagagcgagcg

SEQ ID NO: 42824 - RNA, 73 nt, Homo sapiens
gccaaggagcccagaaacaggcagaccagggccagagcaccagaccagcagaggagcgccgccaggcgagacc

SEQ ID NO: 42825 - RNA, 73 nt, Homo sapiens
caaggagcaaaaggaggagaggaggacagacaaaaggaggcaaggcgagaccaagacaacgaagacgacaggc

SEQ ID NO: 42826 - RNA, 86 nt, Homo sapiens
aggagagaaaggagacccgacgcaacgcggagcgcaaggcgagggacgagaacgaggccggggaacaagaccaggaggaaagcagc

SEQ ID NO: 42827 - RNA, 63 nt, Homo sapiens
gcccagaccggccaaggacccagcagggacaaaaaggcaagaacgagagaagccgaaaaaacg

SEQ ID NO: 42828 - RNA, 71 nt, Homo sapiens
gcccggcgcagaaccgccgcgaggacacccggcgcagccccacccaggcacgccacacgaaaacgacggca

SEQ ID NO: 42829 - RNA, 63 nt, Homo sapiens
ggaaacagcgcggagaccccagacccccagcgcggcaccgcaccacgacaaagaagagaaaac

SEQ ID NO: 42830 - RNA, 77 nt, Homo sapiens
gcagggagaaggaagaggggaaaagacaacaggcacaaagagagaaggaacacccacagggcagacagagaaagaac

SEQ ID NO: 42831 - RNA, 71 nt, Homo sapiens
accaggcgaggagccgccgggggccggcaaggaaacccaaccccagggaaaaaagaagagaagcagaagcg

SEQ ID NO: 42832 - RNA, 92 nt, Homo sapiens
ggagcagggagaggagcgggaaacgggagggaaccagcaacaagccgaaaagagcaccgcaaggggcagcgaagcggcagggaggaagccca

SEQ ID NO: 42833 - RNA, 70 nt, Homo sapiens
cgcgccggcccgcggaaaggccaaagcccagccccaggcacagaccccagcgagcaaacgaggaccccac

SEQ ID NO: 42834 - RNA, 85 nt, Homo sapiens
cgggcccgaggaggcagccaagccgagccgccacccggcggcggagggggcagggcagaaggaccaggggcgacgaggcccagag

SEQ ID NO: 42835 - RNA, 73 nt, Homo sapiens
ccgaaaaagcccaaacagacaggcacggaggaagcaggaaggaccacccaaggcagagaaagcaagagacgca

SEQ ID NO: 42836 - RNA, 72 nt, Homo sapiens
acagagagaccaaaacacggaaacaggagaagggcacccaagaagaccgaaggggagcaagcaggccagggg

SEQ ID NO: 42837 - RNA, 78 nt, Homo sapiens
cagaaaagccggcaaagggggcccacgagaagagcaggcgacgggggagagggagacagcggcgcaaagaagggacgg

SEQ ID NO: 42838 - RNA, 78 nt, Homo sapiens
cggcgccccggcccgcccccaaagcgaccgacccggacgagaaacgcaaggggcgcaggcgaagagcgacaaggccag

SEQ ID NO: 42839 - RNA, 41 nt, Homo sapiens
cgccggggcacgacacaaaaacaggcggaggcaggggcaac

SEQ ID NO: 42840 - RNA, 81 nt, Homo sapiens
gagacacaagcacacgaccgggagcgaggagccccgagaagcaagaggggcccccacccggagaggagaagaagccaacca

SEQ ID NO: 42841 - RNA, 52 nt, Homo sapiens
agaggcgaaggccagagcacgagcacgggaagggaacggaagcaaccagacc

SEQ ID NO: 42842 - RNA, 74 nt, Homo sapiens
aagaaaagagaaggaaaaacagaacggcaaaccggaaaaaaacggggagggaagagacgaagggaaaacgagag

SEQ ID NO: 42843 - RNA, 82 nt, Homo sapiens
gccgcccacccgcggcgcggggaaaggcgcgagacccagaggccgcggacccaaagacaggaccacgcaccagcagagaagg

SEQ ID NO: 42844 - RNA, 80 nt, Homo sapiens
agcggaccggggcagaccaaacggcaagggcccagcggggccccacagacgagcaggagccgccccagaggccaagaaca

SEQ ID NO: 42845 - RNA, 63 nt, Homo sapiens
cggcagcggcacgccacggaacccgggcggagcaggaccgggcagaggagccccggccaacca

SEQ ID NO: 42846 - RNA, 77 nt, Homo sapiens
ggggaagccgcagcggaaagcaggagcacaggaccccaaggagcgaagggcgacccccggagggaacaaccccaaac

SEQ ID NO: 42847 - RNA, 77 nt, Homo sapiens
gcgggagccggcagccgacggcaaagggcgggggcaaagcggagaccgcccccgccccgcaccgacgcgggaacgcc

SEQ ID NO: 42848 - RNA, 104 nt, Homo sapiens
ccaaagacaagaagaaaggggaaagcaagaaaaagagccaaacggagaaggaaacccccggaggacaggccaggcacgaacgagacccaccagaaccaaaagga

SEQ ID NO: 42849 - RNA, 62 nt, Homo sapiens
caagacgcggcccaagggcccggcggcgcgagcaggaagggggaacgccccccaaccgagag

SEQ ID NO: 42850 - RNA, 77 nt, Homo sapiens
caccccaccacgccgaccagacaccccccaaggcgccgccggacaccggcgcagggggcccccgcccgaccgacagg

SEQ ID NO: 42851 - RNA, 80 nt, Homo sapiens
aaacaacgaagcaaggaagccaagaacaagggaagaaccagaaaaacccaacggggagaaagaagaaaaaaaagcgagag

SEQ ID NO: 42852 - RNA, 59 nt, Homo sapiens
cacccccgagcccagcaccgcgggaagacagggaaagcggaaccaccaaaaggaggaga

SEQ ID NO: 42853 - RNA, 73 nt, Homo sapiens
cagagagaagggaaaaccaaacaggcccccagaagagcggagagacgaaagagggggcaccaaagcgggggga

SEQ ID NO: 42854 - RNA, 76 nt, Homo sapiens
agccgccacgaccggcacgcaggggaagggacgggaaggcagaagaaggcagaggggggaggagggaaggcagcag

SEQ ID NO: 42855 - RNA, 61 nt, Homo sapiens
ccacggcccggccccccgggccaagcggcaaaaaggaagacagaacgacacagcaaagaac

SEQ ID NO: 42856 - RNA, 69 nt, Homo sapiens
aaagcaaccgaagggacaaaagggaaccaaacggagagcgagcagagaggccgagcaacagagagaacc

SEQ ID NO: 42857 - RNA, 74 nt, Homo sapiens
gacgggcgggagcgcgcccgaacggcccgccgggagcgagaggacaagaggaaaaacagcgagggaaaagcagc

SEQ ID NO: 42858 - RNA, 39 nt, Homo sapiens
ggaaacgccgcaacgacaggcgaaccggaacaaacagga

SEQ ID NO: 42859 - RNA, 60 nt, Homo sapiens
cacgccagcccaagccgacaggcaccagacccggaggagcagcaccccggcaggcagacc

SEQ ID NO: 42860 - RNA, 72 nt, Homo sapiens
ggcacccaacaccagagaaagggaagaaacaggaacagaaaagaacgagccccacagagaaggaaagagcag

SEQ ID NO: 42861 - RNA, 77 nt, Homo sapiens
cggaacacgaagcacagcgcacccggacacaagacaccagaaagcaccaggagacccggacagacaccagggagaga

SEQ ID NO: 42862 - RNA, 80 nt, Homo sapiens
cgagacggcggcagcagcggcacaggaaagaccacagcaagaccacgcccccagccgggggaccaggccgaacgacccgg

SEQ ID NO: 42863 - RNA, 71 nt, Homo sapiens
caaagaaggcccgcagaccgaagcaccaagcaggagacccccaccaccgcgccccccaagaccgccacaca

SEQ ID NO: 42864 - RNA, 54 nt, Homo sapiens
accaagaacaaccgcggacacggagaggaaggggccagcgcgagaagccaaaag

SEQ ID NO: 42865 - RNA, 84 nt, Homo sapiens
ccgggagaagcccagaaaaaagcccagcgcggcgcggggcgcggagcgccggagccgcgcgcgggccacgagcacccccggagc

SEQ ID NO: 42866 - RNA, 64 nt, Homo sapiens
gagaaaaacaaggagcggacacgagccgagggaggggaaaggcgcagggggagcgcaccccacc

SEQ ID NO: 42867 - RNA, 54 nt, Homo sapiens
agagccaccaaacccaagcaggcagcagaccaaagggcggggagcggaccccgg

SEQ ID NO: 42868 - RNA, 48 nt, Homo sapiens
agaacagagagaagcccaaaggaccgcaaggaaggaccgacaagcgag

SEQ ID NO: 42869 - RNA, 77 nt, Homo sapiens
ggggaaacaacgcagcggagcgagggaccgacaagagaaaaccaggagaaagacagcaaagaaaaggagaagaaagg

SEQ ID NO: 42870 - RNA, 70 nt, Homo sapiens
agcccccgaaggcccacaggacaggagagaaagacggaggccaggacgagccaggacgcgagccagaccc

SEQ ID NO: 42871 - RNA, 74 nt, Homo sapiens
caccaagggcgcccccccggaacggcaccacaagaaaggagagcgaagaccaaagaacaaaggccgagggacca

SEQ ID NO: 42872 - RNA, 83 nt, Homo sapiens
aaaagagaaaagagaaaaggagaaggaaaagggaaggacaaggaaacaaacacaaacggggcacaaacagcagacaaaaggaa

SEQ ID NO: 42873 - RNA, 93 nt, Homo sapiens
ccggagccaccccccacgagcggaccaccagcggcgcggagcaacgcggaaaaaagccggggggacgcggacagcgcccaagggcgcgaacgg

SEQ ID NO: 42874 - RNA, 76 nt, Homo sapiens
ggaacgcgcagaagcaccgcagcccgcagcccagagaacaagcagaggaaagacacgccagagaagaacaggacac

SEQ ID NO: 42875 - RNA, 81 nt, Homo sapiens
ggaaaacaaaagaggagaaagggacacaggaagcgccagccccccagccaaggacagcgagcccagggcgagcgccacggc

SEQ ID NO: 42876 - RNA, 57 nt, Homo sapiens
gccccaccaagagccgcgcgcccagccgcgggaagaaccgaagacccagaacaggca

SEQ ID NO: 42877 - RNA, 52 nt, Homo sapiens
ccgagagcaaccacagcggagacagaagagcagaagggccggaccaccggcc

SEQ ID NO: 42878 - RNA, 85 nt, Homo sapiens
cggaaaccaagaagaccggaggaaaagggagcgggcgagccggggcgcccgcgccggcagaggaggcgagcacccgccagggaga

SEQ ID NO: 42879 - RNA, 60 nt, Homo sapiens
gcccggggggacgcccccaccacaccgggagcccgcccaaaagcgcaacaaggccaaaga

SEQ ID NO: 42880 - RNA, 38 nt, Homo sapiens
gcccagaggggcccaccgcgcccggggacggcgcgaag

SEQ ID NO: 42881 - RNA, 71 nt, Homo sapiens
cggggagccaccgaggacacaggggaagaaggaggacaacaggcacggggccaaaaaggcacgagggaacg

SEQ ID NO: 42882 - RNA, 70 nt, Homo sapiens
ccggcggggcagggaaggacagcgcaggcccccgcccccgagcagccgagggcaagcgcgcaggaagagg

SEQ ID NO: 42883 - RNA, 84 nt, Homo sapiens
ggcgcagggccgggccgccgcgcaccgcagcgccggggcacgacacaaaaacagggcagacaaccagcggaaaaccggccacag

SEQ ID NO: 42884 - RNA, 61 nt, Homo sapiens
cgcagccgggcccggccccagccgacgggcacaaaagaccaaagcagacgacccaagacac

SEQ ID NO: 42885 - RNA, 76 nt, Homo sapiens
gaaccccggggagcagaccgcccagaaaaccgcagaccgggccgggccgccacaggaagaagagagggcgaaggag

SEQ ID NO: 42886 - RNA, 99 nt, Homo sapiens
gggagcccccgccggcccggcggccgaggagaagaggggggcggaagggaggaagcagccaggggaagacgcccccaccacagaacggaggaggggcag

SEQ ID NO: 42887 - RNA, 88 nt, Homo sapiens
ccgcgccgagccacccgcccgcccaaggcccgcgggcgggagaacggaaaaccccaacccgaggggagcaacacgaagaaacgaagcc

SEQ ID NO: 42888 - RNA, 73 nt, Homo sapiens
gacaaggccaacacggagcacagaaaagaagaacagagcaaacagacggaagaggaacagaaaacgacgaagg

SEQ ID NO: 42889 - RNA, 73 nt, Homo sapiens
gggagcgacaagggaagagaaaggggcaacaagaaagggaccaagcagccacgggggccaacgggggaagaca

SEQ ID NO: 42890 - RNA, 95 nt, Homo sapiens
agcgcccccgcgccccgcaccagagcggggcaccgagccggggcggagaacggaaaagcaccaggaagcagagaggaccgcagaagggaaggaga

SEQ ID NO: 42891 - RNA, 35 nt, Homo sapiens
agccggaaaccgagaaaagcacgaaacaagaacag

SEQ ID NO: 42892 - RNA, 76 nt, Homo sapiens
cagaagaaggaagggccacccaggacaggggcacccagacgaggagcgccaggaaagaggcagagacgaagcagaa

SEQ ID NO: 42893 - RNA, 88 nt, Homo sapiens
gaggagccgcggggcgccgccacggccgcccggagaggcccgcgggcaccaggaccaacgggaacacaacgggccaccccgaacgaga

SEQ ID NO: 42894 - RNA, 74 nt, Homo sapiens
aagcacaaggagcaaaaggcagaagggacgaagaaagcggaccagacggccagcaccccgcgcgggcaccagag

SEQ ID NO: 42895 - RNA, 86 nt, Homo sapiens
cgacgccgaggaacgagagcgcgaagcaagagcaggcacccccagaccggagcccaagccgcagcggcaaaccagccagcaaggag

SEQ ID NO: 42896 - RNA, 57 nt, Homo sapiens
cggagagggccgagggccgagaagaaacacggccaggagagaaagccaaaggaagaa

SEQ ID NO: 42897 - RNA, 72 nt, Homo sapiens
agggaaacagaggaaaaagcacaagcgaagaccgaagcccaaagcaggcacgggacgacgaaagaaaagcca

SEQ ID NO: 42898 - RNA, 77 nt, Homo sapiens
gagaagaaaaagaagagagagacacggacaaggaggagcaacgggggaagccccgaggaagcaggagccacagcacc

SEQ ID NO: 42899 - RNA, 73 nt, Homo sapiens
ggggccccgggaccggcgcccccccggaagaaggggaaaagcacagaaaccaggacggggcgggaaccaggag

SEQ ID NO: 42900 - RNA, 79 nt, Homo sapiens
gcggagccgaggcacaaaacgagaacagacccaggaggagaaagaacagacaccaagaaacagaaagccacgaagagag

SEQ ID NO: 42901 - RNA, 74 nt, Homo sapiens
cgcgagggggacgccacgcacagggccggcgccaggcagagaccaccggggccaagagcggccggaagagcgcg

SEQ ID NO: 42902 - RNA, 79 nt, Homo sapiens
cccacacccagggcccccaaacaaaggcgcagccggggccccggagcagacacagcccaccggccgagccccaccggcc

SEQ ID NO: 42903 - RNA, 76 nt, Homo sapiens
ggccagaagagaccacgcacaggaggcccgaggagcggccacgcaaccggaggcacagaagacccggcgcgggagc

SEQ ID NO: 42904 - RNA, 84 nt, Homo sapiens
ccggagaccccgaaaacggaagcgcagggagaaggaagaggggaaaagggggccaacgaaaagaggaggagaaacggcaaggaa

SEQ ID NO: 42905 - RNA, 69 nt, Homo sapiens
accgaggacacaggggaagaaggaggacaacaggacggcgaagcgccggcccagccgaagacgcaaagg

SEQ ID NO: 42906 - RNA, 62 nt, Homo sapiens
cagccagagcagcagacagcagaaaagcccggaagaacaaaggacaccacggccgggagacg

SEQ ID NO: 42907 - RNA, 68 nt, Homo sapiens
ccggcagcacggccggcagagggggccccggggcagccagcagaaggaagcccaggcccggcacaaga

SEQ ID NO: 42908 - RNA, 53 nt, Homo sapiens
gccgccgaccccccggcgccgcgccggcggcgaaacgaaggaggcccaaccac

SEQ ID NO: 42909 - RNA, 101 nt, Homo sapiens
agaaacaaaagacagcacaaagaagccgagacaaacggcaccaagaggggcaacgaggaacaggccaagaaacaacacagccaaggccagcgccacggcgg

SEQ ID NO: 42910 - RNA, 81 nt, Homo sapiens
agcgcgcacgccgcaaggaccggaaggcccagcccccggacacgggcggccggaaggcgaggccccgccagcccgccggcc

SEQ ID NO: 42911 - RNA, 81 nt, Homo sapiens
caggggcaacagaagaagcccgaggagcacggaggaagcacacccgccagggacgggcacgggaagaaccccccaggcgca

SEQ ID NO: 42912 - RNA, 76 nt, Homo sapiens
agcggaaggaagccagaagaaggggggaagccagccaggacaaagagcaaccgaaggaaggaaaagaaggagcaac

SEQ ID NO: 42913 - RNA, 70 nt, Homo sapiens
agagaaccccaaccggggaggaaaaccgacgaaggagccaaggggaggaaaaaaaagaaaaaaagcgcac

SEQ ID NO: 42914 - RNA, 86 nt, Homo sapiens
ccgaacaaacaaacacccagaaacaagagacgcggggaggaggaggaggaagggagcggcagcaggaaggagaccccccgccacga

SEQ ID NO: 42915 - RNA, 73 nt, Homo sapiens
gggcgccacgggggccagaagcaggccagagagaccggaaggccagacacaacgggagcaagccaacgcaggc

SEQ ID NO: 42916 - RNA, 77 nt, Homo sapiens
gcgggaaggagcagcacgcagcccgacaaaggcagcagccccgaggacacagcggcccagggccaaggcagcagaac

SEQ ID NO: 42917 - RNA, 76 nt, Homo sapiens
gaaggagcaaaaggcggacaggcaggaaggagggccccggagcagccacaccaccgaggccccacccagcacgagc

SEQ ID NO: 42918 - RNA, 81 nt, Homo sapiens
ggcagcggagacgcgagcgcccagcacggagcggaggaaaaccccgagagccccgcccacaaaagccgaggacggggcgcc

SEQ ID NO: 42919 - RNA, 69 nt, Homo sapiens
ggccaccagccccaggccacccaacgcgaaccaagccgggggacaagagcaaagagacgaccagagagg

SEQ ID NO: 42920 - RNA, 71 nt, Homo sapiens
ggcggcggcgccgcgccccgcccgcgggagagggcgaggccaaggggaaagaaggaccacgcggaaaaaaa

SEQ ID NO: 42921 - RNA, 59 nt, Homo sapiens
ggaacccggcaccgccccaggagacaggcaaccaagaagaaagcacacaaaagaacaac

SEQ ID NO: 42922 - RNA, 76 nt, Homo sapiens
gacgagaaggggccaaaccgagagcggcccaggaggaacaaccagcccacccggagagggcacgcgcggggagacg

SEQ ID NO: 42923 - RNA, 75 nt, Homo sapiens
gcgccgcgaccccagcgggcccggggaggcaccgacgaggaggaagaagagcaccggcgacaaaggacagccacc

SEQ ID NO: 42924 - RNA, 41 nt, Homo sapiens
ccgcagccacccccggaacacgcccaccgcccccaccggcc

SEQ ID NO: 42925 - RNA, 56 nt, Homo sapiens
acaaggaagaaaagaccagagagaagcaaaggcagaggacagaaggaacagagacc

SEQ ID NO: 42926 - RNA, 74 nt, Homo sapiens
ggcagggcggggcaggggaagggacccgcggaagagagaagacagcagcgaacaagaaggggcagcccaccggg

SEQ ID NO: 42927 - RNA, 71 nt, Homo sapiens
ggacaacaggaaaaacccagccagggcgagagaaacgacgaagagagaagacaaggcgaagaccgcacagc

SEQ ID NO: 42928 - RNA, 75 nt, Homo sapiens
cccagagaagaggccccgaagacagcaaagaagcccacccagagagagaagaacaaggcggccaaaccaagacca

SEQ ID NO: 42929 - RNA, 72 nt, Homo sapiens
gagaagaccaaccacccaaccagcacgcccaccccagagacccaggcccgccagaccgacggaaaaagcaac

SEQ ID NO: 42930 - RNA, 71 nt, Homo sapiens
cccagcagcccaggggaaaggaacacccccagcggccagaggacagacccagaaagacaaaaacaagaagc

SEQ ID NO: 42931 - RNA, 67 nt, Homo sapiens
ccaggacaaccaaggaccaagcggggcacgcgagcagacgagggaacagcaggacaagaagagggag

SEQ ID NO: 42932 - RNA, 84 nt, Homo sapiens
ccagcccccgaagcgggaacagccaccaccaagaagggccagcagcgggcgaccccaagcaggaggggccagaggacagaagaa

SEQ ID NO: 42933 - RNA, 76 nt, Homo sapiens
cagaccgccaaaccagagaaagaaacacccgaacagcgagagcagaaggcaagaaagggagaagccagaaaagcag

SEQ ID NO: 42934 - RNA, 49 nt, Homo sapiens
agaggaggcgggccgaagcaacaagggacaacgccacagcagcggaaag

SEQ ID NO: 42935 - RNA, 72 nt, Homo sapiens
gaaagcaaaggaacaacacaccaccaccaagaaggaggacccacacagcgacaggaagaacagaccaaggag

SEQ ID NO: 42936 - RNA, 33 nt, Homo sapiens
cccagaaaacaaagcaaaacgggaacagcggag

SEQ ID NO: 42937 - RNA, 56 nt, Homo sapiens
gccgccccgagcccgccgccacacccgaggcacccacgaggcggcgacggaaagcc

SEQ ID NO: 42938 - RNA, 81 nt, Homo sapiens
agcaaacagccccagcggagcgccgaggccggacacccaacagcacgcagacaaggcaccaacagaacggccccaaaggag

SEQ ID NO: 42939 - RNA, 78 nt, Homo sapiens
cgcggccaggaccggcggaccggccgcccggcccagccaacaccgacgcaaagagacacaggacggacaaggacaaac

SEQ ID NO: 42940 - RNA, 40 nt, Homo sapiens
aaacccggcgccaggcacagacacggggaccggagaagag

SEQ ID NO: 42941 - RNA, 88 nt, Homo sapiens
cgagccccccagcgccacagcaaggacacgaggcaccacccagcacacggaggaggagggacaagggccagggcgggaccggaggaga

SEQ ID NO: 42942 - RNA, 70 nt, Homo sapiens
cgcaaccacgggcggcgaaaggggcgggccggaggaacgaaacagcaaggagaaccaacaaccgccgacg

SEQ ID NO: 42943 - RNA, 71 nt, Homo sapiens
cccgcagagccacagggcagagagccgccggcgggaccacccaacaagggaaaccccccccaaacgaagac

SEQ ID NO: 42944 - RNA, 68 nt, Homo sapiens
aacagaacggaaggcacagggagccaaaccaaacgcagcggaaacccagacagcgcacacaccaagaa

SEQ ID NO: 42945 - RNA, 70 nt, Homo sapiens
agaagcaaagaggcacgaaaacacaagcgaaaaccagaaaccggcccacaacacagccacggaccaggag

SEQ ID NO: 42946 - RNA, 68 nt, Homo sapiens
acgacgcaccgcaggcagacaaaagggccaaagaagggagagaggcagccaaacgggccggcaggaca

SEQ ID NO: 42947 - RNA, 74 nt, Homo sapiens
aaggagcgggccgcccgcgcgaggagccccgcgagacaggccgaccgggaaagcccaggaggaccccccaagga

SEQ ID NO: 42948 - RNA, 72 nt, Homo sapiens
gccggcggccaagacggagccgaacaaggccgacgcgcacgaacacgggggcaaagacagggagagaggagc

SEQ ID NO: 42949 - RNA, 53 nt, Homo sapiens
gcagcaagacgcacaaccgagagagaagggaggaaacacaaccgacaaagccc

SEQ ID NO: 42950 - RNA, 67 nt, Homo sapiens
cgccccagagcccagggcaggacaccgacaggaacagggaccacggggggaccaggaggagaagcaa

SEQ ID NO: 42951 - RNA, 102 nt, Homo sapiens
ggaccaaggccgagagccggaacaaacgagggcccgggaggaccgacgcagccagaagggacacagcaggacaggaacggccagcccgggggcccacagagg

SEQ ID NO: 42952 - RNA, 73 nt, Homo sapiens
agcggaaagacaacaaaagaagaagaggggagaagacgaggagccagaggggaaaacgagaaaaaggagcgag

SEQ ID NO: 42953 - RNA, 41 nt, Homo sapiens
ccccagagagcgggaccacagggagcgacgaggaagagaag

SEQ ID NO: 42954 - RNA, 81 nt, Homo sapiens
aaaagaagggagcggccgaaggagccaccaggccgggaagcccacgggcagaacgcgcgccgggcggacgcgcagggcaag

SEQ ID NO: 42955 - RNA, 73 nt, Homo sapiens
cgcagggaggagcgggacaccccggaagcgggaaagggacgcaacccaccacgaagcggagagcaggaagggg

SEQ ID NO: 42956 - RNA, 68 nt, Homo sapiens
gcggcgcaggggaacccggcggcggagagagggcaggagacaaacaaccagcggcccccccagcaggg

SEQ ID NO: 42957 - RNA, 81 nt, Homo sapiens
ggcccaggcacacacagagacaccgaaaccgggagagggccagcgaggaggagggccagggggagaaccagagcggcagac

SEQ ID NO: 42958 - RNA, 86 nt, Homo sapiens
gagccgagcaaggagcgggccgcgcggagccggagggcgggaggaacagacacgcggaggccccgagccccggccccaaagaccca

SEQ ID NO: 42959 - RNA, 52 nt, Homo sapiens
aaacacaaaagcagcgcagggggggagagacaagcaggagagccgacgcaaa

SEQ ID NO: 42960 - RNA, 75 nt, Homo sapiens
aggaagcagcgaacgagaaccaaggcggacgcggcgagaagcgacaaacacaagcccaagagggagccccgcaga

SEQ ID NO: 42961 - RNA, 57 nt, Homo sapiens
cagcccccaagaccgggacacaggacgaaccacagaggagcagaaagccaccaagcc

SEQ ID NO: 42962 - RNA, 75 nt, Homo sapiens
cggcgccccccccggcggagagagaaagggcgcaaaaagaaagaaaacaaaagccagccaaaaacagaccgaaaa

SEQ ID NO: 42963 - RNA, 71 nt, Homo sapiens
aaggccagcgcgcccaaagggccaggacacacggacgaaaagagcaagaacaaacaaacgcaagccaacac

SEQ ID NO: 42964 - RNA, 75 nt, Homo sapiens
ggcagagaagacagacagagacagaccaagggcaaagggaggaagagagaccagaacgcgacagaaccagccaga

SEQ ID NO: 42965 - RNA, 77 nt, Homo sapiens
acaccccgaagggggaaaggagaccggaaaccgagagaaacgaagacgaagaaacagccgcacacagaagaaaacga

SEQ ID NO: 42966 - RNA, 63 nt, Homo sapiens
cagaccaagaacaaccgcggacacggagaggaaggacaccgccagaagcaccaggacagccac

SEQ ID NO: 42967 - RNA, 50 nt, Homo sapiens
ggggaccaccccaggaagaagacaacagcacccgaggaggccgcgaggca

SEQ ID NO: 42968 - RNA, 81 nt, Homo sapiens
ccccagaagcgccggacggaacgaggaaggcccgaggaaacggagggagcggccggaacccaagccaggcgccaagacggg

SEQ ID NO: 42969 - RNA, 78 nt, Homo sapiens
cacgcaggcacgggcaagaaccgcacacgcaccaccccgcgccgcgccaacaaccaggagcgcggagaaagagagaaa

SEQ ID NO: 42970 - RNA, 66 nt, Homo sapiens
gacacacaaacggcgcggcagaaaaaccagcccggcgcagagaaaagagcagaacacaaaaaaaca

SEQ ID NO: 42971 - RNA, 35 nt, Homo sapiens
aaggcgcaacacgggaagagggcagaaggcgaagg

SEQ ID NO: 42972 - RNA, 80 nt, Homo sapiens
cggagcgggcgcggagcccccacaggcagaccgcccaaaacgaggagaaaagaagacagaggcgagccgcgggagaagac

SEQ ID NO: 42973 - RNA, 78 nt, Homo sapiens
gcagcgcggggccgcgagcggacgaagacaccaagggaacccaaggggaagcgagcgggcccacccggcccgcccggc

SEQ ID NO: 42974 - RNA, 52 nt, Homo sapiens
aggagaaaaccgggcgcagccaagccggcccacagcgccgccaagagaagaa

SEQ ID NO: 42975 - RNA, 82 nt, Homo sapiens
cgcagcagcaagcccacggaggacccccgcccgaaccgagggaacaggaaggaacgagcaggagagaaagaaagagaaacga

SEQ ID NO: 42976 - RNA, 87 nt, Homo sapiens
gccggagaaaaggccccgaggcccccagaagaccccagacagcaggcgggaagcggggacagcagaggacaccaggccaccagcccc

SEQ ID NO: 42977 - RNA, 80 nt, Homo sapiens
ccgagaaaggaagggcgggaccaacagggagccagacaccgggaggacgaggagcagccaaggaagccgggcaggagccc

SEQ ID NO: 42978 - RNA, 65 nt, Homo sapiens
caacggaaacgacacaaccaggcaaagcacaagcccaagagggcccaaaagagagaaacagagga

SEQ ID NO: 42979 - RNA, 74 nt, Homo sapiens
ccagggaccacaagcaagcgaaggaggccagaagaccagaagcgacaggaagaaaacgccagagaagcagagca

SEQ ID NO: 42980 - RNA, 58 nt, Homo sapiens
gcaggagagaagggagcgaacacagccgccgccaagaagacgagagaggcagagcaag

SEQ ID NO: 42981 - RNA, 72 nt, Homo sapiens
ggacacccagaagcggcgccgccggcaggcgcaaaaaccagacaccccacaccaccacccagacgaccaaaa

SEQ ID NO: 42982 - RNA, 80 nt, Homo sapiens
gaagaacaagaaaaagcacaagagcaccaacgagggcggaccggaagcgagcaggagcagagcggaagacccaccagaaa

SEQ ID NO: 42983 - RNA, 86 nt, Homo sapiens
aaaaaacccagcgagaccgggccggaacgaaagcaggacggaggagcgaccaccgaacgccagaacaaacagcgagaaaaccgacc

SEQ ID NO: 42984 - RNA, 57 nt, Homo sapiens
gagccaccccgccagcaaggcgcagcaagccacagggcagccgaggaagaagaaggc

SEQ ID NO: 42985 - RNA, 73 nt, Homo sapiens
cgccggcagaacacgcgcgggaccccgggcacggcgcgcgggagcagaggggaagacacacgaagccggcagg

SEQ ID NO: 42986 - RNA, 62 nt, Homo sapiens
gagaccaaccggcggaccgagccacacccaggcgggaaagcaggcaggagggagagcgccga

SEQ ID NO: 42987 - RNA, 81 nt, Homo sapiens
ggggccgccgcggcagcaagaacagagagagaggggacagacgagagaacgaggaggaccgcgccaacaggacgaggagac

SEQ ID NO: 42988 - RNA, 70 nt, Homo sapiens
gaccaacgcgcgggccggggcgaggccccggcggcgcccagcggccacacgccccaagcgccacgcccgg

SEQ ID NO: 42989 - RNA, 72 nt, Homo sapiens
ccaagagcgcagacggccagccgaaaccacggaacaggcccaaagacgcacccacagagaaacccgacccgc

SEQ ID NO: 42990 - RNA, 41 nt, Homo sapiens
acggaacagcagcaaccccagaaaaagagaagcgcagcgaa

SEQ ID NO: 42991 - RNA, 68 nt, Homo sapiens
ggaccacacgcgccgaagcggagggaaaaagcgcggcaaagcgcggcccacacaggagccaaggaaag

SEQ ID NO: 42992 - RNA, 68 nt, Homo sapiens
aacaaggaggacaagaccccgggaacgccggacacaagagggcaagaaaggcgcgacgggccgaaaag

SEQ ID NO: 42993 - RNA, 83 nt, Homo sapiens
aaggccgccgccgccgccgccgcgccgagcggaggaggaggaggaggcgaggaggagagacgcggaaccagggggccggagag

SEQ ID NO: 42994 - RNA, 75 nt, Homo sapiens
acaagaaagcccaaacaccgacggcagcagcggggggccgcccgcccaaggcaggaagaggggccgcaaagaaga

SEQ ID NO: 42995 - RNA, 61 nt, Homo sapiens
caaaggcagacgagccaccgccgaacacgcgccaacgaacccgggaacgcgagcaagcagc

SEQ ID NO: 42996 - RNA, 66 nt, Homo sapiens
cagaaccccgaggaggagagcaccagaggcaaggacggaggaagcagagaccgaccgccccaggcg

SEQ ID NO: 42997 - RNA, 77 nt, Homo sapiens
cccgaggcggcgagagaggcaggcggagccgaccgggccagaggcgcccccgggccaggcggagcagggcagcaagc

SEQ ID NO: 42998 - RNA, 64 nt, Homo sapiens
acgagaaccaccccgacacaacaccaccagcaggccagaaagcagacccagggaggaagcacag

SEQ ID NO: 42999 - RNA, 65 nt, Homo sapiens
agcaagggaccgggacacggccggagaccccaggcacacaaggaagaccccgaccccaagacgaa

SEQ ID NO: 43000 - RNA, 51 nt, Homo sapiens
aggggggaaaagaacagaagaaggagcgaaaaggaccagccaaggaagcaa

SEQ ID NO: 43001 - RNA, 68 nt, Homo sapiens
aagcaacggaaacgaagaaggcccagcccaccagaccaaaccgaggcgcggagcacacagaaacgcac

SEQ ID NO: 43002 - RNA, 69 nt, Homo sapiens
aagccaccgagacgcccccccggaagaggcaagaacggaagcacgggcggaggaaagcacaagcagagc

SEQ ID NO: 43003 - RNA, 74 nt, Homo sapiens
gaaggaaaccgagaggaaccggggcaggaaggaggaagccagcccgagcaggcccaggggaggaggggcaacca

SEQ ID NO: 43004 - RNA, 79 nt, Homo sapiens
aaggggagggccagcccgcgaaccggccggagagcgccgcgcccaggcggagacaggaggacccgacgcaaggaccacg

SEQ ID NO: 43005 - RNA, 77 nt, Homo sapiens
ggagaagcgaagaaccaaacgaagcaaaagcccgggcccccgcagaccgggcgggcggaagaagccaggagcccgcc

SEQ ID NO: 43006 - RNA, 71 nt, Homo sapiens
gacagacccgagaaggcgacaacagagagcccaaagcgacgacaacaggcgggcggcgggaaccaaagggc

SEQ ID NO: 43007 - RNA, 69 nt, Homo sapiens
gcagcgcccagcagcgcagacggcgaagacaaacacccacagagggccacacaggaccaggcggacaag

SEQ ID NO: 43008 - RNA, 75 nt, Homo sapiens
aagaaaccggcggccaaaaaaaaaaaaggaagcacaccaagaaaggacgagaccgaagagaaggaaggacagcga

SEQ ID NO: 43009 - RNA, 97 nt, Homo sapiens
aacaaggagcaggccgccaccacaccgcaccggcacaagacaccaagacacgacgacagacaggaagggaaggggcggagacgggcggaacgcagga

SEQ ID NO: 43010 - RNA, 79 nt, Homo sapiens
ccacagcaagacgccaggacccacggaagccagaaagggacacccggacgcaggcccggccaggagagcgcgcacgagg

SEQ ID NO: 43011 - RNA, 67 nt, Homo sapiens
gggaccacgaggcaacgccccagaaagggacacagcgagagaggcagggacgagcagaaccagacaa

SEQ ID NO: 43012 - RNA, 83 nt, Homo sapiens
agggcagcgcccagcagagaccagagccggccgagcgggacccgccccccgagacgccagcaacacccaacacaaagcggaag

SEQ ID NO: 43013 - RNA, 93 nt, Homo sapiens
ggcgggaccgggcggcacgcacgcgggcagggaacaggcggagcggaaggggaagaaacgagcgagcccgggacagcaagagccaagcgccgg

SEQ ID NO: 43014 - RNA, 72 nt, Homo sapiens
ggcaacgaaaaaggacggaaaagcggagggaaaacgacaaccagccgcaggcgaaagcacgaaggacagcag

SEQ ID NO: 43015 - RNA, 85 nt, Homo sapiens
gacaaacacgggcgacggggcccagcagacagccgaggggagcgcggggcccggcagaaagacaggccggacacaaccacaaacg

SEQ ID NO: 43016 - RNA, 93 nt, Homo sapiens
gccgcccggagaaacagacggagcggaggacaccccggagaggacgggaggacggcagcacagggaaccacagaacaggaacacaggagagca

SEQ ID NO: 43017 - RNA, 71 nt, Homo sapiens
aaacggcgaagcccaccagacggagcgaaccaccgaagggaagaaaaagaacacgagcccagcagcaagac

SEQ ID NO: 43018 - RNA, 85 nt, Homo sapiens
agcggaagaggcggggcggcgggcggggcgaggcgcaaggaagaagagacgccgcgcggcagacaaggcccggcaggcaaagcgg

SEQ ID NO: 43019 - RNA, 75 nt, Homo sapiens
gcacaagaaagacaccccgagagcggccgagggaagaaaccagcgcaagcgggggagagcagcggcgccagcccg

SEQ ID NO: 43020 - RNA, 55 nt, Homo sapiens
gaccaaagccaccccaggaagcgaagaggagcgagggggcgcggggaacgcgacc

SEQ ID NO: 43021 - RNA, 78 nt, Homo sapiens
cggcggcgcgccgccccgggcggccgcgggcgggcgccggcgaaagcaacgaagggacgccagaacaagagaaggaga

SEQ ID NO: 43022 - RNA, 78 nt, Homo sapiens
gagccaccagggaagcgcggagaccaggagcacaagaccaggagaaggagagggaagggcaaggagaccaagaacccc

SEQ ID NO: 43023 - RNA, 68 nt, Homo sapiens
gccagcccccagcaccggcacggaccaccccaacaccgggggagaaccgggcccaccagggacacggg

SEQ ID NO: 43024 - RNA, 63 nt, Homo sapiens
caaggaccgaagagggaaagcacaaaggacaggcacagacgggagagcaacgggcgaaggcac

SEQ ID NO: 43025 - RNA, 79 nt, Homo sapiens
accccacgacccgaagaaccccaagccacgagcacacccgcagacagggcagcaggagcagagagaccaagggaaaccg

SEQ ID NO: 43026 - RNA, 81 nt, Homo sapiens
gcgaccagagagcggcggaaaggaaagcccgacagaagcaccgagacccaagaaagagagaacccaccgaacagcaagaca

SEQ ID NO: 43027 - RNA, 78 nt, Homo sapiens
accgcccgaaccggaacaggacacgagcgggccacgaggacccaaagccagcaagacaagccggagaacgcccagacc

SEQ ID NO: 43028 - RNA, 51 nt, Homo sapiens
ggcccagcccccaacacgaacacgaaagaacccgaacacccggaggcggcc

SEQ ID NO: 43029 - RNA, 74 nt, Homo sapiens
aagaaagcacagggacgagacagaacaacgagagagagcaaaaacaccagacaagaggaaggagaccagggccc

SEQ ID NO: 43030 - RNA, 81 nt, Homo sapiens
agacccccgccaaaaggaaagcacagcagaaacacaaagcagcccaaccaaaggcacgccgaaaggggacgagacaccaaa

SEQ ID NO: 43031 - RNA, 70 nt, Homo sapiens
caggggagcacaggaagccgcaaggcaccaagaggacaacaagcccccaagacgaagcccagaagaaaaa

SEQ ID NO: 43032 - RNA, 43 nt, Homo sapiens
gggggaagaagccgggcagcccaggggggcagcacgagaccgc

SEQ ID NO: 43033 - RNA, 78 nt, Homo sapiens
cgaagcgacgcaaggaaagagaaagacagcaaagaaaaggagaagaaaggaaaaaaacaaccccgggcaccccgccag

SEQ ID NO: 43034 - RNA, 61 nt, Homo sapiens
agggccaaagaagggagagaggggagagcggaagagacagcccaaagccaagaacacaggg

SEQ ID NO: 43035 - RNA, 79 nt, Homo sapiens
gaagaccagagaacagccgggaagccaaaccagcaagcaggaagaggcgagaaggagcacgccaagccaagaagaccgc

SEQ ID NO: 43036 - RNA, 83 nt, Homo sapiens
ccagcacgagggcaccggccccacaagcgcacccagagagggcagggaccaggcccaggaaagcggagggaaaggccacccac

SEQ ID NO: 43037 - RNA, 73 nt, Homo sapiens
gggagcgccaagggcacgggaagaccggaggggacgaagaacgggggaggccacccgaagaaaggcgcagcgg

SEQ ID NO: 43038 - RNA, 64 nt, Homo sapiens
cggcgcaggcgaagcgaaacagcaacacgggaggaaacgaaccacacaccagccaccaagcgag

SEQ ID NO: 43039 - RNA, 77 nt, Homo sapiens
agggcagaccgagacgcgaagacccggggcacgagaccaagccccagacgagaggagcggaagcacaaagccgagca

SEQ ID NO: 43040 - RNA, 80 nt, Homo sapiens
ccaagacccggccggcgccgcggccgcgggccggggaccgccaccacccccggcaggacgaagccccagcagacagggcc

SEQ ID NO: 43041 - RNA, 74 nt, Homo sapiens
caaacagagcaggagcgaggagaagaaaggacgaaagccgggcccacaacaggaagaaaagggggaaaagaaga

SEQ ID NO: 43042 - RNA, 89 nt, Homo sapiens
cacgacacagaaggggaggggagggaaaggcccaggaaaaaggcaacaccgggcgcgcacagaagggacaacggaggaaaccaagccca

SEQ ID NO: 43043 - RNA, 81 nt, Homo sapiens
caagccccaaaagcagccgggaaaggagccggccggcggcaaaggcaagccacagccaggaaacaccagccccccggcacg

SEQ ID NO: 43044 - RNA, 68 nt, Homo sapiens
gaagcacagaccgacggccaagaaaggccagccccgaggcccagccgcccgccggggcacaggacagc

SEQ ID NO: 43045 - RNA, 85 nt, Homo sapiens
caccgagaagccccgaccgacgggacaacccgccacaacgacaaaggaccccaaagaccccggaaggcggaccaggcacaagaac

SEQ ID NO: 43046 - RNA, 53 nt, Homo sapiens
ccaaaggcgggaacagcaccgggcaggaacagcagccgccagccgggcccggc

SEQ ID NO: 43047 - RNA, 63 nt, Homo sapiens
gaggggggggcgccccccaccgaagacaagcgagagcggcaccaaaggcgacacaagcccggg

SEQ ID NO: 43048 - RNA, 57 nt, Homo sapiens
cgaggaggcagccaagccgagccgccacccggcagcacgaccgcacaggcaaaggaa

SEQ ID NO: 43049 - RNA, 69 nt, Homo sapiens
aagcgcccacgcacgaaagcccaggccaaaaagaggcaaccaacccaagaaagaggggccaggacgaac

SEQ ID NO: 43050 - RNA, 75 nt, Homo sapiens
ggacgcagccgccaccgagacgagggcggagaacggaaaagcaccaggaagcagagaggaccgcagaagggaagg

SEQ ID NO: 43051 - RNA, 79 nt, Homo sapiens
cggcccacgacgggacacgccccggaggggcggagaacggaaaagcaccaggaagcagagaggaccgcagaagggaagg

SEQ ID NO: 43052 - RNA, 70 nt, Homo sapiens
gaagcaacggggcagagaccccccagcaagcaagagcagcgcccccaggcggcgccgacaccccccaaag

SEQ ID NO: 43053 - RNA, 59 nt, Homo sapiens
gggacaccaagaaagaacgaagaagacggcacgggacccccagcacaggcagcaggccg

SEQ ID NO: 43054 - RNA, 121 nt, Homo sapiens
gagcacacgcccgacgaggagagcacgacggaccaagacgagcccagcgcaaccccaagcgcccaaaggcaggcacaagaacggagaagcgcagggagcccagccgcccgacagcgccagc

SEQ ID NO: 43055 - RNA, 97 nt, Homo sapiens
gacccggcgcggcgaggagcacaagcagaaacccaagcgggaagccaagaaccgagggaggccaccgaggcgaaggggccaaccagggaaaggagag

SEQ ID NO: 43056 - RNA, 64 nt, Homo sapiens
cccaaccacaaacaacacgaccaaggagggaacagggacagcacgacgacaaaccacgaaccca

SEQ ID NO: 43057 - RNA, 76 nt, Homo sapiens
ggcgacgccagaggaggaaaggaagacaagggggaaaaagcgaaccaacacagacccaaagaacgggccagagagg

SEQ ID NO: 43058 - RNA, 56 nt, Homo sapiens
aagaccaacgaaagaaaacacacacacacaagccaaaaagagagaaaaaccagaaa

SEQ ID NO: 43059 - RNA, 50 nt, Homo sapiens
gcgacagcgaacagcgcggccgcaggacgaggaggggcagcaagccgcca

SEQ ID NO: 43060 - RNA, 73 nt, Homo sapiens
gcccagccagcacgccacccccgggaccggaggggcgcaagcagaaagcgagaaagcacagggcgcggggcgc

SEQ ID NO: 43061 - RNA, 70 nt, Homo sapiens
caggacgccaaaaacagagggaagaccgcgcgaagccacagaggacgagaaccagcggcagccaaagccc

SEQ ID NO: 43062 - RNA, 71 nt, Homo sapiens
ggccccgccagggcgcgcagcccgccccccgccgcgcaggcagcgcgcggaagggccggcccaacccgacc

SEQ ID NO: 43063 - RNA, 68 nt, Homo sapiens
caccccggggggggcacacagaacaacaaggggagccgccggacggaacgaggcccagcaaaaagcag

SEQ ID NO: 43064 - RNA, 54 nt, Homo sapiens
caacccccggaaaccgggcagcgaaagaaaagggggcccaggcaacaggggacg

SEQ ID NO: 43065 - RNA, 82 nt, Homo sapiens
gaggaaagcgaaagggaggacagaagcgcgcccaacaccccaacggggcagagagagaccccaagaagaagcggaagaggag

SEQ ID NO: 43066 - RNA, 68 nt, Homo sapiens
gcgcgagggcggacagcggggcccgcggaaaacagagcccgaacccaaacgagcacacgaggcccccg

SEQ ID NO: 43067 - RNA, 38 nt, Homo sapiens
gcccccagccagggaacaccaagagaggacgaacacac

SEQ ID NO: 43068 - RNA, 82 nt, Homo sapiens
aaaaggggaagagggcgcagcggggacgaggggacgaggggcgggccgaggagcccggcaaggaacagagaccggcccaccg

SEQ ID NO: 43069 - RNA, 57 nt, Homo sapiens
ggacggacaagcacagccggaaggagcagaaagcccagggccccggccgggcgcccc

SEQ ID NO: 43070 - RNA, 76 nt, Homo sapiens
ggaggcccgcgcgagcccgcgggggccggccgcccacgccagccacaggaccaagaacgcccagcccgcgggcacc

SEQ ID NO: 43071 - RNA, 57 nt, Homo sapiens
agaaggagccggggcagcccccgcaaccacgggaaccgagagcgaggcgcacgccaa

SEQ ID NO: 43072 - RNA, 77 nt, Homo sapiens
agcggcggagcggaggcgaacagggggacgggggcaggggccagcgaggggcccacggacaagggcacccacaaagg

SEQ ID NO: 43073 - RNA, 79 nt, Homo sapiens
ggacgcgccgagagcaaaaccgccggccggaccagaccggggggaaaggcggggaagccggggaacaccagagcggcgc

SEQ ID NO: 43074 - RNA, 57 nt, Homo sapiens
acaggcccgggcgaaggggccacgcgagacggccagcagaagcaggcgagccccccg

SEQ ID NO: 43075 - RNA, 82 nt, Homo sapiens
gccccacgcgggccgcggcccggcaggccgggacaaagaagcagaccgaaacaccgcccggaaaggaagccagaaccgaaaa

SEQ ID NO: 43076 - RNA, 68 nt, Homo sapiens
cgacggccagaagcgacccagacaacggcaagcggagaagagcaaggccgaaccgagaggaagggcaa

SEQ ID NO: 43077 - RNA, 73 nt, Homo sapiens
aaccaaaccacccagacaagccacccaccgagcagagccgcgaagcagccacggaccccagcacgaaaagacg

SEQ ID NO: 43078 - RNA, 88 nt, Homo sapiens
gaggaccggggaagcgaggagagcagggggagacagcagagcaagaccaaaccagcaaggcgccaccggaagaaacgggaggggagga

SEQ ID NO: 43079 - RNA, 74 nt, Homo sapiens
gacgcaggcgcacggagacccgccggcaggaggagcgcacgacgggaacccacgagggggaggaggaagagaag

SEQ ID NO: 43080 - RNA, 74 nt, Homo sapiens
aagacgaaaagcagaaggaagcagaaagaccaagcagggggcccccaaagggaagccaaacacaaaggaagaag

SEQ ID NO: 43081 - RNA, 68 nt, Homo sapiens
agagcaggcacgaggaggaacccagcagaagccagccgccacgccgagccagccagcaccaaccaacg

SEQ ID NO: 43082 - RNA, 55 nt, Homo sapiens
gcgcccgcgcgcaggggaagcgggcagcccggcggcgcggccgcccacgccgagg

SEQ ID NO: 43083 - RNA, 96 nt, Homo sapiens
gcgagccggagcgacggggaggcggggagaccagggagccgggaccacggagacgaggagaacgcgcccccccgccaggaacgcccggcagccccc

SEQ ID NO: 43084 - RNA, 66 nt, Homo sapiens
cacccacgaacgcccaccccccgaacccagccgcaccgacgaaaaagagccacgcccccacgagcg

SEQ ID NO: 43085 - RNA, 68 nt, Homo sapiens
gggacaccaggacagccccagggaaccgggccgcaccacgcggcgacccaggcgagagagcgaaaaag

SEQ ID NO: 43086 - RNA, 67 nt, Homo sapiens
ggggcaaaaacccggccaggaggacccccaaaaaggggcgacgccgcgccccggagccccggagcgg

SEQ ID NO: 43087 - RNA, 93 nt, Homo sapiens
agcgccacaaagcccagcggccaaacaaccacaagcggaggcggacgaaagaaagaaggagcaccaacgcaaagaaaaagaccaagaagacca

SEQ ID NO: 43088 - RNA, 94 nt, Homo sapiens
cccagggaagaaggcgaggcaccggaacagacgcaggaagcgaacagagcagagcacgcccagaaggccggaaaggagcacacccagcaaagaa

SEQ ID NO: 43089 - RNA, 80 nt, Homo sapiens
aacaccaggcgcggcggcccagccccgacacaggaaggggaaccacaaagaagagaaggcgggccaagaccgacaacgcc

SEQ ID NO: 43090 - RNA, 56 nt, Homo sapiens
ccaacaacggccccaaacggcgcggacggacagaaggaacccccaccccgcgaccg

SEQ ID NO: 43091 - RNA, 76 nt, Homo sapiens
ccacagagaacacgaacagaagggccaaaggcaaagcgggacaagccaaaacagcggacaaagcaccagaaaaccg

SEQ ID NO: 43092 - RNA, 80 nt, Homo sapiens
ccgccccaccaccccaccagacggcgccccaagaccacgccacgcagagccccgccaggaagacacgccggggaacgaag

SEQ ID NO: 43093 - RNA, 75 nt, Homo sapiens
caaccgaacccagacgcagaacggagcaacagcgagcaacaggcaacgaaaacagacaaaacaacggaaaagcag

SEQ ID NO: 43094 - RNA, 59 nt, Homo sapiens
ggcgcagcccacgccagacgaccccacccgcgccgcgacccgcggagccggagcgaggc

SEQ ID NO: 43095 - RNA, 80 nt, Homo sapiens
cgacagacagcaaagaaaggaccccagacccgcagagaccgcgcgcaaacgaaggaccgcgcccccaagggggaacccac

SEQ ID NO: 43096 - RNA, 68 nt, Homo sapiens
cggaagggcagcgccaacagcgccgggagcgccgccaggacaggcccgacgacccagaccaagagcac

SEQ ID NO: 43097 - RNA, 53 nt, Homo sapiens
gacagagagagccaacgacagaaaagagggacacggagcgccgagcaaacacc

SEQ ID NO: 43098 - RNA, 58 nt, Homo sapiens
gaggcaaggggccaccaggaggccagggggcgccagaggcggaaaggcgcggaagcca

SEQ ID NO: 43099 - RNA, 74 nt, Homo sapiens
aggccacaaccgcagggaccacagcaccgaaaacaccaggaaagacaggagaccaaaaaggcaacaccgggcgc

SEQ ID NO: 43100 - RNA, 84 nt, Homo sapiens
aagcaccgcagacccaaccccagggggcagacccaaaggaaacgcacgaaagaaacaggagagcgcagcgaagcccggggaagc

SEQ ID NO: 43101 - RNA, 71 nt, Homo sapiens
gcgagaccaacaccaacacgagggcggcggaaaaagccgccacacgccaaaggcgggcaacacaacaaggc

SEQ ID NO: 43102 - RNA, 70 nt, Homo sapiens
ggagaacacgcgcagcggaggagaaagcaccaacagcagcggcagccaaggccagccagacggggcagaa

SEQ ID NO: 43103 - RNA, 72 nt, Homo sapiens
caggcggggccaaacaggaggaaggccagcaaaaaaacaagaagagcacaagaccaaccaaccaaagaaaca

SEQ ID NO: 43104 - RNA, 65 nt, Homo sapiens
aaggaccaagaaccagggaccccgacggagagacaaagaagacggagggggggccagccaccgcg

SEQ ID NO: 43105 - RNA, 79 nt, Homo sapiens
gagccccccagccaccacaagcccgagcccgaagagagaaggcaaagaacccggggaaaggagaagacaagcgaggccc

SEQ ID NO: 43106 - RNA, 79 nt, Homo sapiens
cggcaacgcccccgggacagcacgccccggaccccaaagcaaacaggaggaagaaaaaaacagggcacggcccccgcag

SEQ ID NO: 43107 - RNA, 64 nt, Homo sapiens
acgaggcaaggagcaaagcagcggcgcagcccggggcgaggaaaaccaccacacaggggaaaca

SEQ ID NO: 43108 - RNA, 81 nt, Homo sapiens
gaccggccacccgggcagaaggggcaaggggcagagaaggaaggaggcccggacaccgagggccgaagccacaaccgaacg

SEQ ID NO: 43109 - RNA, 78 nt, Homo sapiens
agccgccgccgacacgggccggagcccgcggccccaaaaagcggcgcaagacggagggcgggagaaggagcggccacg

SEQ ID NO: 43110 - RNA, 77 nt, Homo sapiens
gcagccagaccaagaacaaccgcggacacggagaggaagggagagaacaaggagcaggccaacggccagaagaacga

SEQ ID NO: 43111 - RNA, 61 nt, Homo sapiens
gaaccgagaggggcgcaggagacaccagcaccaggaaccgcggcaaagaaaccccaaagcc

SEQ ID NO: 43112 - RNA, 75 nt, Homo sapiens
aagagaccagcgccaccgacccggggggcaggccccccaggaggacggagcacagaggcccgggacacaggacag

SEQ ID NO: 43113 - RNA, 83 nt, Homo sapiens
gggggggaaggacgggcgggccggcgccggagacgagccgccagcaacacccaacacaaagcggaagaacacagaaacagcca

SEQ ID NO: 43114 - RNA, 78 nt, Homo sapiens
aggaaaaagacagcccgcagcacgaccagcaggaacggagcacagcaagcgggagcaggcagaccaaaggaacagaag

SEQ ID NO: 43115 - RNA, 80 nt, Homo sapiens
gagccacaggagaggcccaggccgaccggcgcgcggaggcaccaaacaagaaggcacgcaagcaaaccgacccgaccgac

SEQ ID NO: 43116 - RNA, 65 nt, Homo sapiens
gaaccacggaaaggaggaagaagacaccggggacagacaggcccagaaaaggccagaagaaaacc

SEQ ID NO: 43117 - RNA, 83 nt, Homo sapiens
gggggaaaggcaccaggacaagcaaagggagcgccgccgccagccgccagggcaaacagaacagcaagcgcggcccgagggcg

SEQ ID NO: 43118 - RNA, 78 nt, Homo sapiens
ccaacgacaccggggccaaggcgaaccccacacacccaacccgcccagcggagcaggacagcacgcacaacagaaggc

SEQ ID NO: 43119 - RNA, 62 nt, Homo sapiens
agaccgaaggcgccggccaaaagagggcacccgccccggaaaggagaaacacagacaagcca

SEQ ID NO: 43120 - RNA, 71 nt, Homo sapiens
ggagagacgaaccgaagcgggcgggcccccccacccagagaaaggcaccacaaagggcagcgcagcccgga

SEQ ID NO: 43121 - RNA, 75 nt, Homo sapiens
caccccgaggcccgacccagaacaaggccacacagccgcacgagaggaacgcgacaagaagacggagagaagaga

SEQ ID NO: 43122 - RNA, 81 nt, Homo sapiens
gggcacccgcgccgggcaccgaggaccagccaagacaggccgcaggagggaagcgcacggaaaccgccccgggaggcacag

SEQ ID NO: 43123 - RNA, 77 nt, Homo sapiens
aacgaccaagagggagaagcacgcagaggaagagaagcggagagccaggagaagaaagacaagaccgaagcagcagg

SEQ ID NO: 43124 - RNA, 78 nt, Homo sapiens
cgaacgaacacacgggacaaccagcgacgccggagcagcccaacccagaagggagaaccacaagggcgagccaagaag

SEQ ID NO: 43125 - RNA, 71 nt, Homo sapiens
gcggagccaccgcgaagggcccccaacggaccccacaggagcagaggaccacgagcgaccggaagccgcgg

SEQ ID NO: 43126 - RNA, 69 nt, Homo sapiens
acccgggcggggcagagcagcccccagccagccgcgaggggcaaggaacaagaagccaggaccagggga

SEQ ID NO: 43127 - RNA, 74 nt, Homo sapiens
ggagaacgaccagggacccgaggagcaagaggaaaaccagacacagagagagggaagaggccaccccaaagagc

SEQ ID NO: 43128 - RNA, 72 nt, Homo sapiens
gcagagggaaaaaagagaggagcgaacgagacagaacaggaaaaagggccccgggaccaaggacacgcagac

SEQ ID NO: 43129 - RNA, 73 nt, Homo sapiens
aacaggacgaaaaaagggcaagaagccagaagcagacgacccagacaccaaggcaacacggacagggagaaga

SEQ ID NO: 43130 - RNA, 71 nt, Homo sapiens
agcagcaagggacccagcaggaaacagggggcacccgaggaggaagagggcagggcccacggaaagaaggg

SEQ ID NO: 43131 - RNA, 71 nt, Homo sapiens
aaggcggggggcgggggaggcgagcgcgccgcccggagccgcgcacacgcgacaggcgccacccgacaaaa

SEQ ID NO: 43132 - RNA, 77 nt, Homo sapiens
gagacagccacagccaaaacccgaaccagaggcagaggggggagcaggggggaggaacaaggcgacgcgccaggacc

SEQ ID NO: 43133 - RNA, 73 nt, Homo sapiens
gaggaaaacaggaaagaccgaccaggacacgagcgggaacgcaaacgaagcccgaacgagaacggaagcagaa

SEQ ID NO: 43134 - RNA, 77 nt, Homo sapiens
ggccaggcgacgccacccaagacacaaacggcgacacagggcccccagaaccacagcaacaccggaccgcccaacag

SEQ ID NO: 43135 - RNA, 81 nt, Homo sapiens
gaacagcaagagccaacacagcacaagggcagcaccagaaaggggacaaagcgaggccggcgaccaagaaaggacccgcga

SEQ ID NO: 43136 - RNA, 72 nt, Homo sapiens
cagcagcgaccagaaagaggagcaacaggcggacagcaaaaggagaaaaaccgcacaaaggcccaacagaaa

SEQ ID NO: 43137 - RNA, 75 nt, Homo sapiens
gacagacgccacgaacaaacaagcggggcaaaggcccaccggcagcaaaaggaaaagaccagggggaggaagcgg

SEQ ID NO: 43138 - RNA, 73 nt, Homo sapiens
gacacacgacagcaaggacacagcaaccaagaggagaagaaccagaggcaaagcacacaggggcaccagaaga

SEQ ID NO: 43139 - RNA, 75 nt, Homo sapiens
caaggccaagacaaccagaaggccggcagcaggagaaacgagaagaaacagacgcgcgaggggaaacgagcagaa

SEQ ID NO: 43140 - RNA, 74 nt, Homo sapiens
gccgccacggggagcaaaaccaacgccggccggagcagcagcccgagcccaaaaggaacagcaaccgccccgaa

SEQ ID NO: 43141 - RNA, 70 nt, Homo sapiens
gcgccccagggcgccaccaccgcgcggggagggacccgggggaagacgaaaccgggagcacgcggaaccg

SEQ ID NO: 43142 - RNA, 72 nt, Homo sapiens
caggagaagaaaggaaggaaccgggaggggagggaagggacaagaagaacgcccggaacaggagccgcgccg

SEQ ID NO: 43143 - RNA, 76 nt, Homo sapiens
acccaaaaagcaaaaaacgcccacaccagagaaacccgagaggagcaggagcaaccgacaggcgggccggacagcg

SEQ ID NO: 43144 - RNA, 77 nt, Homo sapiens
ccggccgccccggcaagcgccagaaaccccgggaaggcccccagacccaaaggacaggcaagagcccaaacaggagc

SEQ ID NO: 43145 - RNA, 77 nt, Homo sapiens
gacacagcgccagcgcggccggaggaaagacaagcggagcacagccggagaaagcgggaacagcacaaggagggaca

SEQ ID NO: 43146 - RNA, 77 nt, Homo sapiens
ccaaaacgcccccaacccagcgcaaaggaagaggaagcccccagaaacccacaaagccccgaggggcagggagccca

SEQ ID NO: 43147 - RNA, 66 nt, Homo sapiens
gagacgaagaaggaacccccacggcgaagccagcggacgggcagggcccaggagcaggaacacaaa

SEQ ID NO: 43148 - RNA, 73 nt, Homo sapiens
caacaacgcccagcgaggaaaaggaagggaaaacaagaggaaaaaaccagcaacccaacacggccaagaagag

SEQ ID NO: 43149 - RNA, 58 nt, Homo sapiens
gaaccacaccaccccgcgcaggcggccccccgcagccacagcagccacccaggagaag

SEQ ID NO: 43150 - RNA, 79 nt, Homo sapiens
ggaggaaggccgggcagcagaaacccgcgaggagccagggcggaacaggggaagcgagagaagcagcaacgcggagcaa

SEQ ID NO: 43151 - RNA, 66 nt, Homo sapiens
aaacccgggccagcgggaaaaggaagccaagcacagacgaaacagcagcaaagaacgcaacacaga

SEQ ID NO: 43152 - RNA, 80 nt, Homo sapiens
ccggacccggagacaccccgcagcacagccgcgaccaagaagaacggaccgaagccaaagaacaagagcgcagggacaga

SEQ ID NO: 43153 - RNA, 76 nt, Homo sapiens
acgcgccgggacacagacggggggagcccaggaacggccggaggacaggcggcgcaaccgaccccagaaggacagc

SEQ ID NO: 43154 - RNA, 80 nt, Homo sapiens
ccccaacaccgccacacggcccgacaagaaggcagcaaaaccccagaagaggcgaaccgcaggaaaccagagcaagaaac

SEQ ID NO: 43155 - RNA, 103 nt, Homo sapiens
caaccagaaccaaacggcacaccagcaggggaagaacaaaacaggggaacaaaggaccacaaaccagcgccgacggaggaggagaaggaaaaggagcacagcc

SEQ ID NO: 43156 - RNA, 71 nt, Homo sapiens
accgccgaaaccagccgcccgggaaccagggccgagacaccccggaccccggggcggggagagacggaggc

SEQ ID NO: 43157 - RNA, 70 nt, Homo sapiens
gaccgaccaccaaaaacgaagcacagccaacacagcgagaaaaagcacccccagaaacaaaggcagccgc

SEQ ID NO: 43158 - RNA, 84 nt, Homo sapiens
cggcagcgacgagaaccggacaggcacgcgagaaggggagggggagaaagaagaggaagaagccacaggcaaggagagcaaagg

SEQ ID NO: 43159 - RNA, 68 nt, Homo sapiens
acaaccgcccagccggcgagggacgccgcagggcccgagggcaggacagcaggcaccggcgaagcaca

SEQ ID NO: 43160 - RNA, 82 nt, Homo sapiens
cgcggaggcgggccaccgacccaccccagcgagagaagaaccgagccccggcacaaaggaagaagaaagaagggagcaagag

SEQ ID NO: 43161 - RNA, 81 nt, Homo sapiens
acccagccccgcgaagcgccgggcagccgggaacaggcccggagcggccgccggcccaaagggcccacggaaaagacggag

SEQ ID NO: 43162 - RNA, 72 nt, Homo sapiens
cgcccgcgaccggaccgccccggggaaacccgggcgccgccaagagccggacaccagaccaacaggagcaga

SEQ ID NO: 43163 - RNA, 74 nt, Homo sapiens
ccccagcacccgccccggggcaccacccccaagggagcccacaagcccggagggcacgagccacacgccacgcc

SEQ ID NO: 43164 - RNA, 65 nt, Homo sapiens
ccgaacagaagggggcaaaggcacaaacaaggacccagaggagaacaagcggagaaaacgaagac

SEQ ID NO: 43165 - RNA, 85 nt, Homo sapiens
gccgcaagccgcgaggccacgccccgcccagcaggccgagagaagaaaaagacccaagaaagcaacgaaaggaacgcaagaacag

SEQ ID NO: 43166 - RNA, 76 nt, Homo sapiens
gccccgccagcaaggggaggccccgaaggagcaaggaaacgcgaaccaagggccacggggagacaaggcaaaaaag

SEQ ID NO: 43167 - RNA, 75 nt, Homo sapiens
gcgacccgccccacccgcagcagaacaaggggaggcaggaaaaagacacaagacagcaggaccgggaccagcccg

SEQ ID NO: 43168 - RNA, 85 nt, Homo sapiens
gccaagaaaggagacaccagaaggcagaggaggcgcaagacgcgaccaaagccgacggggcaagggggagagccacccagcaggg

SEQ ID NO: 43169 - RNA, 84 nt, Homo sapiens
aacggggcaccggggagcggcagcggagggccaccagcaagagagccacaggccgcacaccccagagcccgaagggggccccga

SEQ ID NO: 43170 - RNA, 65 nt, Homo sapiens
ggcgcagcgcccgccgcggcccgggcccccccgccggaaacaggagggaaggccaggacagggga

SEQ ID NO: 43171 - RNA, 76 nt, Homo sapiens
aaaacaaggaagaaagggaacaacacaaagcacaccgccaaacccaggccagagcacaggaggggagagcaaacac

SEQ ID NO: 43172 - RNA, 79 nt, Homo sapiens
gcacgccggcacgggaggcagaaggaggaagaagaagcacagaaaaccgcagaacggccccaaggacgccccccaagga

SEQ ID NO: 43173 - RNA, 78 nt, Homo sapiens
gcaccacgaaaacaacacagcagggaagcagaaggcgagccacccaggacgaggccaggccgaaacgcaccgcaccag

SEQ ID NO: 43174 - RNA, 72 nt, Homo sapiens
gccccgagcaagaaaaaaacacggaagaagagaagaggaacaaaagaaaagaaggaggccagcgggacacac

SEQ ID NO: 43175 - RNA, 82 nt, Homo sapiens
cacgagaagaaggaagaaggagggcccagcacggaaaggagcggcagccacggaggccgcccagggaggccacgaggaggac

SEQ ID NO: 43176 - RNA, 111 nt, Homo sapiens
gccaaaggagcaggagggcagcagaaaaaacgaaggccgcagacgccacaccccacaggccaagaagcgagagaagaaaaacagaaaaagccaagacagaaacaagaacca

SEQ ID NO: 43177 - RNA, 74 nt, Homo sapiens
gacgcaccaacgagagcgagcccagccccgcggaaccaaggccccccaagagggagaaagaacaacagagcaac

SEQ ID NO: 43178 - RNA, 84 nt, Homo sapiens
ccaggcgaagcggccgagcaggcgagcgaacgacggggaagcagggaaaggccggagagaggaagcggcccggggcggccagcg

SEQ ID NO: 43179 - RNA, 81 nt, Homo sapiens
gaagaagacgggcccaagagggcgcgcaccgggggaagaaggaggccgaccaggccgacaaagcagacgcccgcaaacgac

SEQ ID NO: 43180 - RNA, 83 nt, Homo sapiens
cggcacagcaccccagcgcccgcgcccggccgaccagagacgccaaggccccaaaggacaaagcacagacagcagaagcaaga

SEQ ID NO: 43181 - RNA, 75 nt, Homo sapiens
gacgaacacggggacaccaacaggacccggaccaaagggaggggaaacaagaaccagacaggcacaggcgagggg

SEQ ID NO: 43182 - RNA, 66 nt, Homo sapiens
gcaacgaccgcaaccgcacggcgcccagcgccggccggagggccgggcacgcccccgagggaaaca

SEQ ID NO: 43183 - RNA, 72 nt, Homo sapiens
gcagcgcccagcagcgcagggaggagcgccggaaacgaagagccaagacggagagaggggaacaccagcaca

SEQ ID NO: 43184 - RNA, 73 nt, Homo sapiens
acgggacaaaccaggggaaggccccaagcaagaagaaccaagacccaagcaagagagaccaccggggccaaag

SEQ ID NO: 43185 - RNA, 75 nt, Homo sapiens
cacacaagaaggaacaagccagagaaggcccgaggagagaacaggagcgccaaaaaagagggggcgaagggaaaa

SEQ ID NO: 43186 - RNA, 82 nt, Homo sapiens
cggaagcaaggaacaaaccgaagaacagcgggaaagaaggcaaaacacgggagacgggcagacaacgaacaagcgaagaacc

SEQ ID NO: 43187 - RNA, 74 nt, Homo sapiens
aaaggaaacaacaggacacacaaaaagggccaaaacccagacaaggaaaaaccaaggaagaaaaagagcgccca

SEQ ID NO: 43188 - RNA, 56 nt, Homo sapiens
agcgcgggagcgagaccgggccccgacggccggcgaccgaggagccgcgcgcccag

SEQ ID NO: 43189 - RNA, 49 nt, Homo sapiens
gccggccacagacaagaagaaaggccagcagaaaaagggggaagagcgg

SEQ ID NO: 43190 - RNA, 44 nt, Homo sapiens
ccaccaccccgcagccccgaagacaaaaaggaccaagagccgag

SEQ ID NO: 43191 - RNA, 68 nt, Homo sapiens
cgaggaacaggagagcggccgcagacaagacaggagagacaacggaggcaagaaagacggagaagcga

SEQ ID NO: 43192 - RNA, 79 nt, Homo sapiens
ggaggggccgcggcccgcgcagcgccccaggccagaaggagcgcccccaggaaagaccacagcaagaccacgcccccag

SEQ ID NO: 43193 - RNA, 82 nt, Homo sapiens
cagcggggcccagcacgagaggagacagcggccaggagcccaggcccccccgaggcagaggacgacccaggagaggcggagg

SEQ ID NO: 43194 - RNA, 71 nt, Homo sapiens
ccgcagacgcgaaggaacggcaaaggcagagcagggggcagagccgcagcagacaagcaagagaagaagcc

SEQ ID NO: 43195 - RNA, 76 nt, Homo sapiens
cggcaagagaggcaccccgaagaggcgaggagcaacccaaacggggcagccgaagaggaagcagacccggacaaaa

SEQ ID NO: 43196 - RNA, 81 nt, Homo sapiens
gcaaacaagccaacccaggaggaaaaacggaaggggaaaaccgccgccacccaagacagcggggcagggcagaagaggaag

SEQ ID NO: 43197 - RNA, 88 nt, Homo sapiens
cgccggcaccagccgcccaggcgcagagcgggcccgcggaccagccagggcacggccgggacgcccgggcgcgccaggcacagccaag

SEQ ID NO: 43198 - RNA, 72 nt, Homo sapiens
cgcaaacaagaccccccacggcaaagagcaccaaagaggcggcacccagccccagccgaggagaaaacgaag

SEQ ID NO: 43199 - RNA, 73 nt, Homo sapiens
aaagggggcgaccacagagccaccaagcccgaaacaaccaccgagccccggaagcgcgcacaaccacaacaaa

SEQ ID NO: 43200 - RNA, 87 nt, Homo sapiens
gccggccgcggcggagggaaaaaggaagaggagaaggaaagcccgaacccgcaggaggcgagagagaagaggcgagacggggcacag

SEQ ID NO: 43201 - RNA, 75 nt, Homo sapiens
cgcacccagcaaccccgcagacagccccacaggagcagcccaggggaaggacacccaccggaaagccgaaaacaa

SEQ ID NO: 43202 - RNA, 72 nt, Homo sapiens
cgagcccaggccgcgcgccaaaacgaggcaaggcaggaccagcccaggagaggaaccgagaacacgacaccc

SEQ ID NO: 43203 - RNA, 71 nt, Homo sapiens
accgccgcgcgaggggcccccgggaccagacgaggcacaccgacaaacgaagcggggccaggggaggaccc

SEQ ID NO: 43204 - RNA, 71 nt, Homo sapiens
gagcgcaccggagggacggcacagggaggccagccggagaagcgagcagcggcgaaccagacccgagaaca

SEQ ID NO: 43205 - RNA, 83 nt, Homo sapiens
cagaacagaacccaaaagccgacaaccccagaaacagcaagccaaaaaggggccccaccccaccggagaacccgccgacggcg

SEQ ID NO: 43206 - RNA, 68 nt, Homo sapiens
cgccacagaacaccgccccagcagcccacggccaggaagcagagccccgggccgggaaggggaaacgg

SEQ ID NO: 43207 - RNA, 74 nt, Homo sapiens
ccggcccccaacagcgccgcgaagagagagaaacgaaaaagaggaaggagcgagggagcacaagcagcggaacg

SEQ ID NO: 43208 - RNA, 81 nt, Homo sapiens
gcgccgcgaccaggagcgccccgaagcgggccggggggggcacagagccccggaagacagcccccagcgaccagacccagg

SEQ ID NO: 43209 - RNA, 87 nt, Homo sapiens
ggagcgcgagggaggcacgagaagcccggcgacggaggaacgcaggcgcgccaggaccacgcggagagccaggaccaaggggcgcgc

SEQ ID NO: 43210 - RNA, 65 nt, Homo sapiens
aagccgcagaagggagaggaccagcgggccgccagggagaaaagacgaggaagcccaaaaaccgc

SEQ ID NO: 43211 - RNA, 71 nt, Homo sapiens
ggagcccgaccgaagccggaaacgaggcaccagggaagagccagcaaggcccgccaaagaggcacaccgaa

SEQ ID NO: 43212 - RNA, 75 nt, Homo sapiens
cgggcccaggccaaaccaaacggagcgggcagcaggaagggacggcgcgcgggccacggccacgaggccagagca

SEQ ID NO: 43213 - RNA, 64 nt, Homo sapiens
gcgaggaccccggcggcagacgcaggcgggaccagagcgaaagcaccgggaggaaagagagcca

SEQ ID NO: 43214 - RNA, 74 nt, Homo sapiens
aagcccccgcaggaaccacaacccaaccaggagccgcaaacacaccaaccgcaaacaagacacccaccagaaaa

SEQ ID NO: 43215 - RNA, 39 nt, Homo sapiens
gaaaagacacgggcaggaagcgaaagcccagcacgcaga

SEQ ID NO: 43216 - RNA, 53 nt, Homo sapiens
ccggaggaggcaaacgagaccgggcgggaacaagggccgaggcagcacgcaag

SEQ ID NO: 43217 - RNA, 67 nt, Homo sapiens
aaaagaaggacgagccacaagaaaacaagccgacagaagaaagcagacagagagagggcaccaccca

SEQ ID NO: 43218 - RNA, 52 nt, Homo sapiens
ccaaaaaggacacggagccaggcgaacaagaggcgccagcgggcgcgccgga

SEQ ID NO: 43219 - RNA, 73 nt, Homo sapiens
cagaaagagaccgcagagacagccaacacggcacccacagggaaacaggagaaccgacagaaaccccaagcgg

SEQ ID NO: 43220 - RNA, 77 nt, Homo sapiens
gagccaggacaccccgaaagccggaaaacgagaaaaagggcgcacaacgcaggagaagcgcgcggaacccacaaggg

SEQ ID NO: 43221 - RNA, 101 nt, Homo sapiens
gaagaacggccagaagcccaaagggaccaagaaaggcacgcaccaccccaccgggaggggcagcagcaggacagggaacccgggagacagcaacagacgga

SEQ ID NO: 43222 - RNA, 81 nt, Homo sapiens
ccaagggcgaaggagccggcccaaggacccaaggccagccagccccaggcaccagcggacaggacagggaggacgaaggcc

SEQ ID NO: 43223 - RNA, 67 nt, Homo sapiens
cacaagacacagcagggacacgagacggcagacccagcgccgggggagccgccaccaaaagcagacg

SEQ ID NO: 43224 - RNA, 44 nt, Homo sapiens
gggcaccaaccagaccaccggacagccacgcgccccaaggacca

SEQ ID NO: 43225 - RNA, 70 nt, Homo sapiens
ccagacccgagccagacacagagcaggaacgcagccggggacaccaaacagggcagccccgggcaaccag

SEQ ID NO: 43226 - RNA, 58 nt, Homo sapiens
ccggaggagaagggccaccagcagccaggccaggccggcacagggagggacggaagcc

SEQ ID NO: 43227 - RNA, 71 nt, Homo sapiens
gacaaaccggagaaggagccaagaaagagaagaaggaagacaacagaagccggccaaagacgagccaacga

SEQ ID NO: 43228 - RNA, 53 nt, Homo sapiens
gagaaccgaaccgacacagacaaagagagaaccacaaacagaccgcagcacgg

SEQ ID NO: 43229 - RNA, 89 nt, Homo sapiens
ccagggagcccccgcgcgcccggccggcccggagcaccgagccgcggcacggaggaggccaggcagagcagcccaccagggaggggagg

SEQ ID NO: 43230 - RNA, 79 nt, Homo sapiens
aggaagaagagagcggaacagcagagcgcacaacccagaaccgggacaacccagcaaacaggccagacccgacaggagc

SEQ ID NO: 43231 - RNA, 56 nt, Homo sapiens
aacgaagcaggcccaggagaaagcacaggacagaccgggagaagagccagagcccg

SEQ ID NO: 43232 - RNA, 60 nt, Homo sapiens
cccccggccgaaaaggcgaccgccccaaggaaccacggcaaacgacgcaagaacagccaa

SEQ ID NO: 43233 - RNA, 78 nt, Homo sapiens
agagcaccggcaccccaggacgcgcagcgggaacaacccaaaccaaaccagccagcacgggggcccagccagccagca

SEQ ID NO: 43234 - RNA, 38 nt, Homo sapiens
cgagcagccagcccaagaaggacagaaaacgggcccca

SEQ ID NO: 43235 - RNA, 68 nt, Homo sapiens
ccacccgacccggcaccacacgcagaacgggcggacgggcgcccagccagggggcgaggaagagacag

SEQ ID NO: 43236 - RNA, 76 nt, Homo sapiens
caggaagagcccgagaaaagggaccccgaaaggggggacacaggcaaaacggacaaagaccgcaaaaagacccgaa

SEQ ID NO: 43237 - RNA, 69 nt, Homo sapiens
aaacaaagacgcaagcggggcagaaaaacaaggagcaaaaaccgaaaccgaaaaggccaacggaacaaa

SEQ ID NO: 43238 - RNA, 59 nt, Homo sapiens
cagagaacgccggaccccgccacaccggccagacaaggccagccgcaacgggccaaagc

SEQ ID NO: 43239 - RNA, 70 nt, Homo sapiens
acgccccaggcgcaggagcacggagccgccgccgaacgacccaacccaacacgaggcaccggggacgccc

SEQ ID NO: 43240 - RNA, 70 nt, Homo sapiens
gcagggcgcccccggaaagcaacccaccacaagacaaagaccaccaggacacgaaagcaagaccaagaaa

SEQ ID NO: 43241 - RNA, 66 nt, Homo sapiens
aacgaaacaagaacaccaggaggaagacaaaagaggaaacccgaagcagcaaaaaccaggacccac

SEQ ID NO: 43242 - RNA, 81 nt, Homo sapiens
aaaagaggaagaagcgggacccgcagggcaaaggggggaagaacaaggacagaccaggagaagagggaaagacaagcagga

SEQ ID NO: 43243 - RNA, 71 nt, Homo sapiens
aaaaacaagacggggcgccccacagaggggcgacggaagaaggccccagacgaaggagcggacggaaaggc

SEQ ID NO: 43244 - RNA, 61 nt, Homo sapiens
aaagagaggagcgaacgagacagaacaggaaaaaggggccgcaggaaggaaagccccaaag

SEQ ID NO: 43245 - RNA, 71 nt, Homo sapiens
gagccccgcgccgagcccggggcgaggaggccccaagggcgagcgggaccgagaaggacgagaagggcggc

SEQ ID NO: 43246 - RNA, 80 nt, Homo sapiens
cggagcggcgagagcccccacggaagacgaccccgacgcaggccaggagccgcggacagaagccgagcacggccgagaca

SEQ ID NO: 43247 - RNA, 106 nt, Homo sapiens
acagcaaccacaaggaccaaaaaggggcggggaggagaagagagacaaacagggaccgccaagcagacgaaggagaacagacacgggcgagccaccgcaggaggag

SEQ ID NO: 43248 - RNA, 77 nt, Homo sapiens
cggcagcggcggcggcggacaaacaggcaccgcagaacaccggaaacgccaggccacaagggagcaaacgaaaagcc

SEQ ID NO: 43249 - RNA, 46 nt, Homo sapiens
ccgcaggggcgcccgagagggagaggcacacccccccacgccgccg

SEQ ID NO: 43250 - RNA, 61 nt, Homo sapiens
caaacaggaaaggccccacccccacaccggggaagcgaagggaagcacgaaccccagggac

SEQ ID NO: 43251 - RNA, 50 nt, Homo sapiens
gcgaaccaccccaaacagacagaagacaggagccagagggacgggcagca

SEQ ID NO: 43252 - RNA, 76 nt, Homo sapiens
gacaaaacccagagaagccagcgagaaacagaagcacagaacgaagaaccccgagcggacaaccagggaagcagaa

SEQ ID NO: 43253 - RNA, 80 nt, Homo sapiens
ggacacagaccgcggggccgcgccccagagagacaaggggccccgggaacacagcccggggggccggggagagaaggcgc

SEQ ID NO: 43254 - RNA, 64 nt, Homo sapiens
cgaacccacgacacggccgcgcccgagaccgccagcgaacgacgagaacgaggacgcggacggg

SEQ ID NO: 43255 - RNA, 79 nt, Homo sapiens
aaaaagcagcaaaccggaccaccccgaagaaagcacagacgcccaacccccaaggacagggaacagcgggaaaaccggc

SEQ ID NO: 43256 - RNA, 78 nt, Homo sapiens
acaccagaggcgaagcaaagccagggaaggaaccagcaagagaaccacccaaaagaccgaagcagaagacaccacgga

SEQ ID NO: 43257 - RNA, 74 nt, Homo sapiens
cagcggcccacggacgcggcgaggaagagggcagacgcccacgcaaagggagggacagagaacaggcaaagagc

SEQ ID NO: 43258 - RNA, 81 nt, Homo sapiens
gagcggaaacagaaggggagaggcagcgaaaagcccccagcacaacgaaccgcccagaggaaaaccgagagaaggaagagg

SEQ ID NO: 43259 - RNA, 87 nt, Homo sapiens
ggagccagcggcgaggaggggccccagcagcccccgaaggcccacaggacaggagagaaagacgggcagcagcccagccaaagccgg

SEQ ID NO: 43260 - RNA, 76 nt, Homo sapiens
cccggcgggcgcggagcacgcaggccgagaaccccagcacccagccaaggggcagagcagacccacgggggacggc

SEQ ID NO: 43261 - RNA, 77 nt, Homo sapiens
cgccagcggagaacagcccgaccacgaacggccgagcgaccaggagaggagcccccgcccgaagaccggggagggcc

SEQ ID NO: 43262 - RNA, 37 nt, Homo sapiens
caacgcagaaagaacacacacagcggagcaggagcaa

SEQ ID NO: 43263 - RNA, 82 nt, Homo sapiens
gccgccgcccgacccagggcccgcgggccaggagagcgccggcggcggagcggaggcagacacacacggggggagagggagg

SEQ ID NO: 43264 - RNA, 80 nt, Homo sapiens
cagcccccgggagcgggacacaggagaccaaggaccggacagaggaagaaacccggaaggggaagaggaaagcaaaggcg

SEQ ID NO: 43265 - RNA, 74 nt, Homo sapiens
aaggacgaaggggaccggagaagggacaacaccgggaacgcgagcccagaaccgaaccacgcccgggaacacca

SEQ ID NO: 43266 - RNA, 80 nt, Homo sapiens
agccgcccacacgccaaccggccagaggacgagggggagagagacagcggacgggagaccgagccacaccacgcgcaggc

SEQ ID NO: 43267 - RNA, 67 nt, Homo sapiens
cgggcagaagcgaagcgggacagaacagccaccaaaacagaagagcagacgcagaaacaggaggaga

SEQ ID NO: 43268 - RNA, 95 nt, Homo sapiens
ccgggacccgggcgcccgcgcccgccccaacccagccacagccggcacagccacaccgagaagaccggcccaagaaccccaccgcccgaagacag

SEQ ID NO: 43269 - RNA, 43 nt, Homo sapiens
aaccagaggcagccagcagggggagagcggcacaccacacaca

SEQ ID NO: 43270 - RNA, 79 nt, Homo sapiens
gggggcacaacaccaccacccacacccacgcccacgccgggcgacacagccaggcagagagaggcaaacggagaggcaa

SEQ ID NO: 43271 - RNA, 85 nt, Homo sapiens
gggcccgaggacgcgcacacacagcgaggagaggagggaagcgccccagggaacagcaaaccaagccagagaaagcaaaagaaaa

SEQ ID NO: 43272 - RNA, 70 nt, Homo sapiens
cgaccggacaggagcaggcagagggccgcaaggccaggcgcgcagaggcacccaacggcacagaccccac

SEQ ID NO: 43273 - RNA, 81 nt, Homo sapiens
ccaccgcagcggaggaagggccacgccggcgaggaggcggcggcggcggacggcggagcggagaaagagggagacgcaccc

SEQ ID NO: 43274 - RNA, 79 nt, Homo sapiens
ccgggcccggccccaagggccgccggaggacccccgcggaaaggcaaagggccaccgagagcagaccggggaccagaca

SEQ ID NO: 43275 - RNA, 62 nt, Homo sapiens
cggcgagccgaaaagcgagcgcgaggaaaaggcggcgggagggcggagaacggaaaagcacc

SEQ ID NO: 43276 - RNA, 67 nt, Homo sapiens
cggagaagcggaggcacccaaccgcgggacaccggccccccaaacacccgagcccagccccgccccg

SEQ ID NO: 43277 - RNA, 80 nt, Homo sapiens
gcaagaccagagagccgcggggaaaggaggcaaaagagagcaagagaagccgcaaaagaagcaccaaagaacagaagcac

SEQ ID NO: 43278 - RNA, 73 nt, Homo sapiens
aaaagaacccaaacgaacccaaaggccccaacaagaagagacaggggaaacaaaacaaaccaggggagggaaa

SEQ ID NO: 43279 - RNA, 81 nt, Homo sapiens
cgagggagaggaaacgacccgggccaaccggaaacgaaacaacagggacaacgaggcagacccgggacacaaagaaaaagc

SEQ ID NO: 43280 - RNA, 72 nt, Homo sapiens
cgaaaagcgagcgcgaggaaaaggcggcgggaggggcagcgagaacagcagagaaggagggccgagggggac

SEQ ID NO: 43281 - RNA, 63 nt, Homo sapiens
caaccacacaagaggagacgccgacaccccaggccacgagccccaggccacggcagcaggccc

SEQ ID NO: 43282 - RNA, 73 nt, Homo sapiens
aggccaccaaggacagggcagcaagggggaccagccgagcaacgcccgcaggggccagcgggaagaccacacc

SEQ ID NO: 43283 - RNA, 35 nt, Homo sapiens
ccaggaagagcgaaaaaacaagcagaagcacccaa

SEQ ID NO: 43284 - RNA, 83 nt, Homo sapiens
gagacgaaggggcaaaggggacgcggcaccacggcacgcacaaggcgaggcggaaagaggggaacggcacaaaggaaccaaga

SEQ ID NO: 43285 - RNA, 72 nt, Homo sapiens
aagcaaaaccacgccagaaccgcaaagaagaacaccaagaaccaggcaagaacggaagcacgggcggaggaa

SEQ ID NO: 43286 - RNA, 70 nt, Homo sapiens
caaagcaagaaagacacaccgagcccaaaacaaaaagcacccgacaagagcaaaaacagccagcaagagg

SEQ ID NO: 43287 - RNA, 77 nt, Homo sapiens
aggcggcggcaagcggagggacccggcaccggaagccaaggaggcgcggaggcaaaggaacgcaaggaggagaggcg

SEQ ID NO: 43288 - RNA, 70 nt, Homo sapiens
aaccaacagccccccagaaagccccacgaagagagaagcgcggaccaaagcagaaagggagaacagaaga

SEQ ID NO: 43289 - RNA, 50 nt, Homo sapiens
ggcaggaaccaccaggacagaggcagcaggagcgacgcccccaggaacga

SEQ ID NO: 43290 - RNA, 89 nt, Homo sapiens
cgagcacaaggcaagagaccaaccccagccccgaaaggggggaggaaacggagagcgcaggcggccggaaaggcaacagcaggaaacca

SEQ ID NO: 43291 - RNA, 84 nt, Homo sapiens
cagcacaagcaaacgggaaccgcaaacagaaacgcagccagaccacgcacgcacccggaagagcccgccaacgggaccgcgaag

SEQ ID NO: 43292 - RNA, 77 nt, Homo sapiens
gcaccacgaggacgggaggcccaacagcggaacacgagcaggggcccaaaagacgggcggagaacggaaaagcacca

SEQ ID NO: 43293 - RNA, 72 nt, Homo sapiens
ggccgaaaaggcgaccgccccaaggaaccacgcgggcaccggggcccacagaacaagcagccacgggacagg

SEQ ID NO: 43294 - RNA, 67 nt, Homo sapiens
aagggacaagggaaacacgaagggaaaggccgaagccagacccagaagacggccccaccaggggcca

SEQ ID NO: 43295 - RNA, 47 nt, Homo sapiens
gcgggggccgacaacccaaggacaaagcgaccagcggccagaggacc

SEQ ID NO: 43296 - RNA, 76 nt, Homo sapiens
ggcgagcaccgccccagacgaccgggacaagacggaaccgccgagacgaacccgcgcccagaagggaaggccacgg

SEQ ID NO: 43297 - RNA, 69 nt, Homo sapiens
caggaccacacaggacaacaaaggacaggaaacagaacgacagcccgcaccgacgccggcggccagcca

SEQ ID NO: 43298 - RNA, 72 nt, Homo sapiens
gggaaaacgcggaaccgaggaaggccccgagacccaggcacgaggacgcaacggcaacaaggacccagacaa

SEQ ID NO: 43299 - RNA, 86 nt, Homo sapiens
caggcggaggcccccgggcaagaggcgcaaacaagccaacccaggaggaaaaacggcacacaacaaagaagaaaagggggaaaaga

SEQ ID NO: 43300 - RNA, 57 nt, Homo sapiens
ggggggggccaagagacagggcacaccaaacccacggcgggacaagggcgcaccggg

SEQ ID NO: 43301 - RNA, 81 nt, Homo sapiens
ggaacgaaaaaccacaaagaggacaggagaagggcgaagcgagcccaagagaggagcgagaggaagcggaagaaaaccaac

SEQ ID NO: 43302 - RNA, 83 nt, Homo sapiens
cgaggggccaaccagcgaagagcgacaagccgcggcagccgcggaccaccgccgccagggcacacacccacgcggggcgcgca

SEQ ID NO: 43303 - RNA, 93 nt, Homo sapiens
gggacggcccggaaagacgccaaaaacagggaaagggccagcacaggagagaggaccacagaacgggcagcaaacaaagcagcacccacaaac

SEQ ID NO: 43304 - RNA, 47 nt, Homo sapiens
gagccgcgacacgcggagaaagcacaccaaggaaaccgggaacggag

SEQ ID NO: 43305 - RNA, 59 nt, Homo sapiens
cgagagccgcggcccggcggaaaggacagcagggccacccagcccccagcccaccaccc

SEQ ID NO: 43306 - RNA, 73 nt, Homo sapiens
gcggggcggcccaccaacaggaacagggcagacgagcggaggacacccaacccggcggaacacgggcaacggg

SEQ ID NO: 43307 - RNA, 88 nt, Homo sapiens
gaaaaggacaaggggaaaggaaggggccccagggcgcagacaaggcaggcggagaggagaaaaagaaacccaaaggggcacaagagga

SEQ ID NO: 43308 - RNA, 77 nt, Homo sapiens
gccaacaggcggcgcccagggcgccaccgccgccgcagagaccacaccgcaggaaggacacccacgacacacaggcc

SEQ ID NO: 43309 - RNA, 69 nt, Homo sapiens
gcaccaccaaagaacccggaccaacgaccgcacggaaacgaagcgacacgcacccagagccacaagcac

SEQ ID NO: 43310 - RNA, 77 nt, Homo sapiens
ggaggagagcccacgaagggagagcagggcaggaccgagggagcagcgcggagggagagccagggggagaaggacgg

SEQ ID NO: 43311 - RNA, 78 nt, Homo sapiens
aacggcaaggagcgaaggaacgccccaaacacagccaggagagagagacaacgacagaacaacagaagagaaagcaac

SEQ ID NO: 43312 - RNA, 72 nt, Homo sapiens
ggcaggacggcaagggcgacaaaggacacacggaacacgcaggacaaaccggcgaccacacacggggacgac

SEQ ID NO: 43313 - RNA, 78 nt, Homo sapiens
cagcagagagccgggccagagccaggggccgggagggcgccaggagcaagagaacgccaaaaaggagagaggacgcac

SEQ ID NO: 43314 - RNA, 54 nt, Homo sapiens
aggaccgcacgcggaggcggcgcccgcccaagccagcagacggggccagcaagc

SEQ ID NO: 43315 - RNA, 74 nt, Homo sapiens
accgggaccagggaaggaagggacggggcagaaacagaagaaggccgaggaggaggagacaaagagggcagaag

SEQ ID NO: 43316 - RNA, 70 nt, Homo sapiens
ccaggccacagaagccgcaccgcgcagcgccgaggccgcgacagccaccaaagcagcgcggacaagaaaa

SEQ ID NO: 43317 - RNA, 37 nt, Homo sapiens
aaggcagcacagagcacacgagacgagccagagaggc

SEQ ID NO: 43318 - RNA, 67 nt, Homo sapiens
aaagaaaacacggaaagaagggccacggaagaagcccgggcccaaaaagaacaccaaagaagccgcc

SEQ ID NO: 43319 - RNA, 84 nt, Homo sapiens
agccccgccgccccgcaaccggcagccgccgccgggaaggacggacagcgcaggagaagagggccacaagcgaaggcaaaacca

SEQ ID NO: 43320 - RNA, 74 nt, Homo sapiens
agccccagacccagaccaccccaagcccgcaaggagcacggaagcccgcacgcaggcccgccaaacccagccgc

SEQ ID NO: 43321 - RNA, 72 nt, Homo sapiens
aaaaagaaaaggccccaacagagccccagcaagaagacgccaaaagaccagacccagacaggaggacgcgaa

SEQ ID NO: 43322 - RNA, 74 nt, Homo sapiens
ccagaaggagaaggaacgggagagagacccccggcccagaaaaggcagcacccaccccacgaccggacggagaa

SEQ ID NO: 43323 - RNA, 74 nt, Homo sapiens
gcggggggcgagccgccgcgccccaggccgcagccccgcgcggcgccccgcgcagccacacaggcaaggaagag

SEQ ID NO: 43324 - RNA, 80 nt, Homo sapiens
cccagcaggccacaaggcgggggcggcgacggggggaagaagagcgcaccgaaggcacaagggaaaccagaacaaaaggc

SEQ ID NO: 43325 - RNA, 77 nt, Homo sapiens
cccgacacccggcagaccagggaacgggaggagaaccacaaccaggacacgggaccgggccagcaagagcccgcggg

SEQ ID NO: 43326 - RNA, 61 nt, Homo sapiens
cagagcgagggaggagagagggagagccaaagaaggcgaagaggagaggaaggcaccaaag

SEQ ID NO: 43327 - RNA, 66 nt, Homo sapiens
gggcaagcgggcggcacccggccaggaagcggagggcgcgcgaggccccggagcccgccgcccgcc

SEQ ID NO: 43328 - RNA, 76 nt, Homo sapiens
ccgggcggcgcacgacgccgcccggcccggacccgagcgcggggaggcagaccggcacaggcgaccgaagccaccg

SEQ ID NO: 43329 - RNA, 59 nt, Homo sapiens
caggaggaaccaaggaggcacgacacgaaaaggacaaggccacagggaaaagaacagcc

SEQ ID NO: 43330 - RNA, 55 nt, Homo sapiens
ggaggagggcagccaaccaccagcccgggggcagcagaaacggcagacccaccga

SEQ ID NO: 43331 - RNA, 74 nt, Homo sapiens
ggaacagaaggcacagaagaggaaggaagagggaaagagagggacgaaaccccagacacaagaaaaccagcaaa

SEQ ID NO: 43332 - RNA, 67 nt, Homo sapiens
gccggccacagcgcagaaggagaaaaggaagcaggaaaaaagaacaagaacgcaaggacaacaaggc

SEQ ID NO: 43333 - RNA, 84 nt, Homo sapiens
gggccaccaaccgggacacccggcgcaccgccacccgcgagcccaccgccaagacggaaaccaggcacagagaaccaggaggag

SEQ ID NO: 43334 - RNA, 68 nt, Homo sapiens
gagaagccggaaaaccccccgggaaagcggaacagacagaagcagccggggggggcacagagccccgg

SEQ ID NO: 43335 - RNA, 69 nt, Homo sapiens
agcgaccgggagcacaccacaggcaaggagagagacccccggaagaagacccagcccgcaggcagaacc

SEQ ID NO: 43336 - RNA, 81 nt, Homo sapiens
cccaggaccacagccccgaccgagagaaccagcgccaggccacccaccccaccagagccggacaccagagccggacaccag

SEQ ID NO: 43337 - RNA, 78 nt, Homo sapiens
gaacggaaaaaacaaagcgaaacagcggggccacccagaacaaaaagggccagggcacagccggggaggagaggggaa

SEQ ID NO: 43338 - RNA, 74 nt, Homo sapiens
cgaagaagcccacgcagaaacccaccagacggcacagagaaccaggaggagcggcagaccgccagcaggaagag

SEQ ID NO: 43339 - RNA, 53 nt, Homo sapiens
gcaaggcaagggaaaaccccacaaaaccagagagccggaggagccaccaacag

SEQ ID NO: 43340 - RNA, 68 nt, Homo sapiens
gcacccaaggcagccggaaacgaggggcacgccgcgaaagaccgaggccccacgagcggacccccccc

SEQ ID NO: 43341 - RNA, 79 nt, Homo sapiens
ggaggagccaggaagcaccagcacagccggaacaaggaaagagcagaacgcccaagggagcaggagggaacccgacagg

SEQ ID NO: 43342 - RNA, 84 nt, Homo sapiens
gagcaccgccagccccggcagccgggcggcaggaccgggggccgaggcgccggggaccccagaagcaaacaacacccaacagcc

SEQ ID NO: 43343 - RNA, 74 nt, Homo sapiens
gcgcgggcggggaggcgaggccggacgcacccggggggcccagacacacgcgcgcaacggggacggaggagacg

SEQ ID NO: 43344 - RNA, 81 nt, Homo sapiens
cgcggcgccgccgcaccaccgcagcaccccaacggccgcacggggaggcgagcagcccagaccggaaggagggcagagaca

SEQ ID NO: 43345 - RNA, 37 nt, Homo sapiens
ccgacagcacgccgagaaggaagaaagagggccacgg

SEQ ID NO: 43346 - RNA, 79 nt, Homo sapiens
cgcgagcacccgagcggcggcggcggcagcagcggcagcggcaagcaccgccaagaagaaaaacacccgggacggccac

SEQ ID NO: 43347 - RNA, 74 nt, Homo sapiens
ccaggacaccgaaaccaggaagaccgcaggaaagcaggaaggcaagaaagccaaggacgaaacccacacggagg

SEQ ID NO: 43348 - RNA, 66 nt, Homo sapiens
cagggccgagcacgggaagccggcaccgcgacccagcaaacgggaaagaagagccggccgggaccg

SEQ ID NO: 43349 - RNA, 68 nt, Homo sapiens
gagcgaggacgaggaacggcggggaagagaccaggaaccgaaaccgcagcgagaaccaagaggcaacg

SEQ ID NO: 43350 - RNA, 56 nt, Homo sapiens
gggacccccagcgggcacggccaggggacagcccaccacaagcaggccccaagccc

SEQ ID NO: 43351 - RNA, 50 nt, Homo sapiens
acggaacgaacagaaggcaggccaaaccagccgaaggggcagacaggaga

SEQ ID NO: 43352 - RNA, 77 nt, Homo sapiens
cggaccgcaggagggagaccacagcaagacccaggaccccggaagccagaaagcaaaagcagccaacacaacgaaga

SEQ ID NO: 43353 - RNA, 60 nt, Homo sapiens
ccgaggggcggaagccagagaccaacgagaccgcacagcacgcaaaaggcacgacaggcc

SEQ ID NO: 43354 - RNA, 70 nt, Homo sapiens
acgcagggcgcccccgggagaaaccgaaacgaacccagccagaaacacaaaacgaagaggccagcaccca

SEQ ID NO: 43355 - RNA, 67 nt, Homo sapiens
gacgggacacagaagcaccaagacccgcgaccaaccccacacgcgacaagaaaaccaaaacccaaca

SEQ ID NO: 43356 - RNA, 58 nt, Homo sapiens
cgaacaggaagcggacgcgcagcggaacagcggccaagagcccaaaaggcagagcgag

SEQ ID NO: 43357 - RNA, 78 nt, Homo sapiens
cgcgcgccgcccccacgacgagcacggaaggcacaccgggcagcgggaacaagcgagaggagagcgcagagacaggac

SEQ ID NO: 43358 - RNA, 66 nt, Homo sapiens
gcacaaaggaaggggggagagaagccgaccaggagcggcagagcacacgaccgaaaggaaagccag

SEQ ID NO: 43359 - RNA, 80 nt, Homo sapiens
acagcacagaccgagcggagcggccccaccccagaaagacaccccgcggccgagaaagcaccgcccaagcccgcaacaag

SEQ ID NO: 43360 - RNA, 80 nt, Homo sapiens
gagaccgaccccccaagaaaccccgccaggaggccacggacgaggcggaacccagccggggcacccaaggaggaccgcgc

SEQ ID NO: 43361 - RNA, 64 nt, Homo sapiens
cgggcgcggaagaagccaagaaggagagaaccaggagaccgaagcaaccaacaagcgaggagga

SEQ ID NO: 43362 - RNA, 79 nt, Homo sapiens
gaccccggccgccgaccgcggccccgccggccgccggccgcgcgggggaccccaagaagaagcggaagaggagccgcgg

SEQ ID NO: 43363 - RNA, 76 nt, Homo sapiens
agaagaggaagaggccggccaacacaaagccccagcccaacaggaccgccgggggaccggaacgggaaagcagcag

SEQ ID NO: 43364 - RNA, 63 nt, Homo sapiens
cgccgccagcagggccgaccagcggaggagcaccggaacacagaagcagagaagcccacagaa

SEQ ID NO: 43365 - RNA, 75 nt, Homo sapiens
acaaccgagcggcggaagcagacagcaacaagcagaaggcccaacaggaaggccaaagcagcaagcgcccaacaa

SEQ ID NO: 43366 - RNA, 56 nt, Homo sapiens
caacgaagaaaaggaagcaacaagagcgcaacaagagccccgccaaggaacccgcg

SEQ ID NO: 43367 - RNA, 75 nt, Homo sapiens
cggcgggccacacgccggcggcggccaggccccaggacagggaggacgaaaccccaccacgcggcaggggccgcc

SEQ ID NO: 43368 - RNA, 77 nt, Homo sapiens
aggaaggaagccgcggcaacaaccaggagagcgccgaggcggggccagggagcgcaaggccgggccgggccgggagg

SEQ ID NO: 43369 - RNA, 70 nt, Homo sapiens
caaacagggacagaaagacaggaaaagggaaaagccgggcagagcagccccgagggaaccagggaaacgg

SEQ ID NO: 43370 - RNA, 93 nt, Homo sapiens
aaccagcgggaccagaggagaccggagccaccaaaaacgaagaggaaaccggaacggaaaacagccccaaagcagcagaccgaagaaagaaga

SEQ ID NO: 43371 - RNA, 55 nt, Homo sapiens
cgaggcaggcggcaagacacgaaggcggagcaagccaccccccggacagaaccgg

SEQ ID NO: 43372 - RNA, 83 nt, Homo sapiens
acacagacaccgccacaggagagagcaagggggaagcagccacagaagcacagccgcacgcaaccgcagccaccgcgcgcagc

SEQ ID NO: 43373 - RNA, 80 nt, Homo sapiens
ggagccaagagcagagcgccagcagaacgggggcagcagcgaggacccccccggaggcggcggccccaagcacggccccg

SEQ ID NO: 43374 - RNA, 74 nt, Homo sapiens
cggacagcgacacaaaggagccaagaggccacgacagaagaacagcaacagaacacaccaagagacccggaaaa

SEQ ID NO: 43375 - RNA, 76 nt, Homo sapiens
acaccccagcagaaagacaaagcaccaggaaggaccgagggacccgacacacagaaacagagcggaccaaaccgaa

SEQ ID NO: 43376 - RNA, 70 nt, Homo sapiens
accagcgaggcagcgcggcacagcacaccccagcggcacacacaagcagaaaaaccccccaccgacccac

SEQ ID NO: 43377 - RNA, 78 nt, Homo sapiens
gcgaaggacccggccgaggcgggcgcaagagaaggcaccaagaggcacaccggcagcaccacaaaccgacacgcgggc

SEQ ID NO: 43378 - RNA, 81 nt, Homo sapiens
caaagagccagaggggagacacgccaaagccccaaggacacaaagcgagaagacccagcaaccagcagcaagaccaagaga

SEQ ID NO: 43379 - RNA, 78 nt, Homo sapiens
gccggcacagagcgacaggacccagggcaagaccagacggaggagagacacacaccggaggagccgccacacccaggc

SEQ ID NO: 43380 - RNA, 84 nt, Homo sapiens
cgcgaacagaacgggggcaggcgacaggaaaacgggagcgcgcggcgaaagcgacgggaccgggcgggagcagcggaagacacc

SEQ ID NO: 43381 - RNA, 118 nt, Homo sapiens
ggagcggcgcggcgcgcggaccccgccgagccagcgccggccgcgcgccgcgcccgcgccacagagacgaggaacagaaaagagaaaccagggagcgcccaagaaaccaagaagaaca

SEQ ID NO: 43382 - RNA, 48 nt, Homo sapiens
gcagcaaaccacaggagaggaggcagagaggcggaccccgcgggcgcg

SEQ ID NO: 43383 - RNA, 60 nt, Homo sapiens
aggggaagcgaaccaggcccaaacaccagggacacccacaagaagagcagcgggaaaggc

SEQ ID NO: 43384 - RNA, 39 nt, Homo sapiens
gacagccagcagaacccgaaagaaagacaaggccccagc

SEQ ID NO: 43385 - RNA, 75 nt, Homo sapiens
gagaaggaaggaggaggagaacacaggggacggggggcccgggcgaaaccggaccgggcccggaggagcgaacaa

SEQ ID NO: 43386 - RNA, 71 nt, Homo sapiens
agaaagaggccaaaaaaaaacgaacagacgagcgaagagacccagaacagaaacacaggggaaacacgaga

SEQ ID NO: 43387 - RNA, 83 nt, Homo sapiens
aaacaagagaccacagaaggaaaggaagcagagaggaaaacgccaacagaccacaagacagaaagaaaagaaagaagagggga

SEQ ID NO: 43388 - RNA, 75 nt, Homo sapiens
aacagagcgcacggagagcaaggaaggagggcagcccaagggacaaaacagaggagaccagaccagaagccccga

SEQ ID NO: 43389 - RNA, 80 nt, Homo sapiens
cgccgggccggggccccgcagcgacaacaggaggccggaagacccaaagcgagggaggacagagagaaccggagaacgag

SEQ ID NO: 43390 - RNA, 74 nt, Homo sapiens
agaagaaagcagaaaaacaaaaggagcagcagaagccgaccaggcccgggcgggaaggacaccccaaaaccagc

SEQ ID NO: 43391 - RNA, 61 nt, Homo sapiens
cggacgggacagggcaccggcaagccagccacccccgggcgagaggagacagagcgaacgc

SEQ ID NO: 43392 - RNA, 83 nt, Homo sapiens
gacaccgaggaacccagaggaaacgacggagacgcagagggacgaaagaagcgcagcggaggaaggcgaggggccaagcagcc

SEQ ID NO: 43393 - RNA, 70 nt, Homo sapiens
gcaaagggcgggggcaaagcggagaccggcgcaagagagcaaagcgggaggggcgaggggggaacggaga

SEQ ID NO: 43394 - RNA, 68 nt, Homo sapiens
cacggagagagacggcccaaagagggaagacaagcaccaggagccagaggccccacagaaagccaaac

SEQ ID NO: 43395 - RNA, 60 nt, Homo sapiens
gcgcgacggagacccacgcagaggggagcgaagaagggagccacccaaaacacgcggaaa

SEQ ID NO: 43396 - RNA, 71 nt, Homo sapiens
ggagcgcggggcgcccacacggccgccgacccagcggaacaagaggaaaccacccgccgccccaaaacaac

SEQ ID NO: 43397 - RNA, 56 nt, Homo sapiens
acagaccaaaaacaggcccggcgagccccgcagggagaaacgccacaccgggaaag

SEQ ID NO: 43398 - RNA, 75 nt, Homo sapiens
cgcggcccggccccgggcccggccggcgggcagcgcaagccacaggaacgagccacgagaagccccaacaaaaca

SEQ ID NO: 43399 - RNA, 81 nt, Homo sapiens
gcccaaaccacacccccgggaggagcggcggcgccgggcccgcggggaaaacggcccgccacgggccccgcagccgcgccc

SEQ ID NO: 43400 - RNA, 70 nt, Homo sapiens
ggccggccggcagccagggcagcaggcgggcagaaaggccggggcccccagcccgccccagacccgagca

SEQ ID NO: 43401 - RNA, 72 nt, Homo sapiens
acccaccgcgacccgggacccgcccgcccgcgggagacacggacccggagaaaacccacaagaacccaaacc

SEQ ID NO: 43402 - RNA, 73 nt, Homo sapiens
gacggagaacaaagaacaaaggggccaaaccaagagcaagcccccaacaccagcaaccccgggggagacaagc

SEQ ID NO: 43403 - RNA, 62 nt, Homo sapiens
aaggaccaagaaccagcgcggcccggaaaaagaaaggccagagcagaaacgaggcgacccca

SEQ ID NO: 43404 - RNA, 70 nt, Homo sapiens
gcccaccccgcgcccgacaggcaaggggaggcaggcccaaacaccaccagcagcccaggcaggaagaggc

SEQ ID NO: 43405 - RNA, 70 nt, Homo sapiens
gcccacggggacggagggccgagaagcggggcaccacgaaggaccgaagagggacaagacaagacggaga

SEQ ID NO: 43406 - RNA, 53 nt, Homo sapiens
aaaagcgcagcaagacggccgcgcggcccgcaggggaaaaagaacgaagacga

SEQ ID NO: 43407 - RNA, 91 nt, Homo sapiens
gcaagaccaccaaaaagccaccgcgcgcgcccgaccgcgcggagaccggaccgcgccacaaggagagcagccccgcaaagggaacaggaag

SEQ ID NO: 43408 - RNA, 74 nt, Homo sapiens
ccgacagcccgccgggacgccggccgacgggacaccaagagcaaacgagacggaagaaaaaaccgacggcccga

SEQ ID NO: 43409 - RNA, 76 nt, Homo sapiens
ccccccggagacgcaaccaagagagggaaagggcgggggcaagacccagagaagacaaaacaacaggcgaaaaaga

SEQ ID NO: 43410 - RNA, 84 nt, Homo sapiens
ggaaagcaaagcgaccaaggagccaaaccaaaacaaaaggacccaaggagagcaaggacaagagccaggaggggagggagcgaa

SEQ ID NO: 43411 - RNA, 69 nt, Homo sapiens
gaaagacgccaaaaacagggaaagggccagcacaggagagcaacgaggcccagacccacacacaaagag

SEQ ID NO: 43412 - RNA, 79 nt, Homo sapiens
gcaacaacaggcaaaggcaggaacaagaaacgaaggaggcccaaccacaaaaggagccgacggaacccagacggagaac

SEQ ID NO: 43413 - RNA, 77 nt, Homo sapiens
aggagaccccaagccgggggcacggcggacaccaggaggcacacccagacagcaaggagccagcacgcggccaagac

SEQ ID NO: 43414 - RNA, 63 nt, Homo sapiens
gcgacgcccacgcaacggaggggacgaccacgaaaaaagagggaccaaaacgcacgaggaagg

SEQ ID NO: 43415 - RNA, 52 nt, Homo sapiens
gagaaacagagggagaacaagagggaaacggacaggcacggccacagcagga

SEQ ID NO: 43416 - RNA, 56 nt, Homo sapiens
gcgagcggaggccagcccccgccccacccagccgcccaggacagagccgcggcgcc

SEQ ID NO: 43417 - RNA, 91 nt, Homo sapiens
caaaggcaaggggggaccgcggccacggacgccgacacacagccgcgccagaggcgggaggcggcagaagcagccagaggagggcacaggc

SEQ ID NO: 43418 - RNA, 58 nt, Homo sapiens
caaggcggagacaaacccaagcagacagaaggaccaaaagagcgacaaggcggaacag

SEQ ID NO: 43419 - RNA, 65 nt, Homo sapiens
caccgggcccagcacgaaagaacaagacaacccaggagaaaaacaccaaaaaaacgcacgaaaga

SEQ ID NO: 43420 - RNA, 77 nt, Homo sapiens
cagggaggaagcacagcccaagaagaagagggaagagccacgcagaacgggcaggaggaaaacccagaaaacagcca

SEQ ID NO: 43421 - RNA, 56 nt, Homo sapiens
gaaaaacccccaaccagcaggagcccaaaagaaacagggcgcaggaaaagacgagc

SEQ ID NO: 43422 - RNA, 57 nt, Homo sapiens
gaagcgaagagacgaaccacaagagaaaggagggaacgaggaacgcgaaagaccagg

SEQ ID NO: 43423 - RNA, 76 nt, Homo sapiens
aagcacccgaagaggggagaaaagcacgaaagagagcgagcgagcaggaaacccaccagagaaggcgcggccaccc

SEQ ID NO: 43424 - RNA, 72 nt, Homo sapiens
aaaagcaagaggaagaaaacagccaccaaggacaggcaaaggaacagagcacacagaccacaaggcagcagg

SEQ ID NO: 43425 - RNA, 78 nt, Homo sapiens
cccaagacagccccaaggaagacgcaggcaccggcccgaccagccacgacacccacgaaaggacaggcagggacgggg

SEQ ID NO: 43426 - RNA, 54 nt, Homo sapiens
gagcgccaccaaaaagggaaaagcaccgggaaccccaagaggaacagcagggaa

SEQ ID NO: 43427 - RNA, 75 nt, Homo sapiens
ccaggggcggccacgaccaccaggcgccaggagggagcgggaccgagaaggcgaagcgcagagcggcaaaagcgg

SEQ ID NO: 43428 - RNA, 76 nt, Homo sapiens
aaggcgcaggaacagcgacggggcccaggaacgacccgcaccgccgacccaggagcagggacagccggggcgaaca

SEQ ID NO: 43429 - RNA, 81 nt, Homo sapiens
agacggagggcggcacagagacgagcggcgcagaggagagaaggaggacgacgcccaggaaggaaagaaccggagaccggc

SEQ ID NO: 43430 - RNA, 79 nt, Homo sapiens
cgggaggcccaggcccccggacggcgcggaccccgacggcgccgggaacacaagggcaagacagccgggaaccccaccc

SEQ ID NO: 43431 - RNA, 45 nt, Homo sapiens
ccacagagagagagagggagggaagcaaagccagggagggaaccg

SEQ ID NO: 43432 - RNA, 76 nt, Homo sapiens
cggacgaccaaaggcagcggacgcgcaaccgcacacgggggaggagcaggaaagggagcggccccaccaaacgaca

SEQ ID NO: 43433 - RNA, 60 nt, Homo sapiens
cggacccggagccgcacaaaccagggccgccagaagccaggaacccaaccgaagaagaac

SEQ ID NO: 43434 - RNA, 35 nt, Homo sapiens
cgagaggccagaacgaggaaagaagcagagcgagg

SEQ ID NO: 43435 - RNA, 77 nt, Homo sapiens
aaaggaggaaaagaagccagaccgagcagacgcgacgagaccggccacacggcccagacccaacagaggacaaaaga

SEQ ID NO: 43436 - RNA, 70 nt, Homo sapiens
aaaaccacggacaagaaagcgccaaaaacaacaccaaaaagccgcagggggccaaccgggggcacagagc

SEQ ID NO: 43437 - RNA, 85 nt, Homo sapiens
aaggggaagccgcagaaaagcagggcaaaggcgaaagaaaggccaggaagaggccaaagaagcagaaagagcagaaaggaggggg

SEQ ID NO: 43438 - RNA, 77 nt, Homo sapiens
gcgccggaaaccaacaaaccaaggcagaaaaaacaacgaaagaaccgaaaggaccaagcccgaaaaccgaccagcag

SEQ ID NO: 43439 - RNA, 105 nt, Homo sapiens
gggggaggaggcgggccggcgcggcgcgacaccgggcccggaaccacgcacgacggggcggacaaagccccaagaggccaagacaaaaagccaagaacagacccc

SEQ ID NO: 43440 - RNA, 67 nt, Homo sapiens
agacccggaacaagcaaaggcagaaaagagacacacaaaggaagcaaagccggaaccaagaccaaaa

SEQ ID NO: 43441 - RNA, 76 nt, Homo sapiens
gccagcaggaaggacgggggagccgaaaggcaaggaggaagcacagaaaaagcaaagcacacacaaggaaaaggca

SEQ ID NO: 43442 - RNA, 75 nt, Homo sapiens
gagagcgcggccccaggagcaaggcgcccacaagagagggaaggagaaaggcagacgagggacagccacggccac

SEQ ID NO: 43443 - RNA, 82 nt, Homo sapiens
gacccgcgacccagccccccacccaacgcgggcccaggcaccacaaccaggggccagaggcgaggcgccccagagacccgaa

SEQ ID NO: 43444 - RNA, 76 nt, Homo sapiens
agcaggccgaggccccgggaagacaaggggggaaggacaaagcacagaaggaaacccagcggcggcagaaccagcc

SEQ ID NO: 43445 - RNA, 72 nt, Homo sapiens
aaagaaagcagggaaaaaagcagcaaacacgggacaaaaaccagaccagcagccgcgaacgcggccgggagg

SEQ ID NO: 43446 - RNA, 73 nt, Homo sapiens
gacacgcaaagccgaggaaccaacgaggcgccggaagcagaacgcaaggccagcagagcccaagggcgccagc

SEQ ID NO: 43447 - RNA, 70 nt, Homo sapiens
cagaacaaaaagggccagggcaaggccagagaaggcgggagaaagacacgaaccacagaacgcaacagga

SEQ ID NO: 43448 - RNA, 64 nt, Homo sapiens
cgacacggggccagggaacccggcaccgccccagcgcagaaccggccgaaaagcacaaacagca

SEQ ID NO: 43449 - RNA, 75 nt, Homo sapiens
gggagcaaagcacagccgggccaaaggcagaaccggccacacccaggaccggaacacccccacagacccgagcca

SEQ ID NO: 43450 - RNA, 106 nt, Homo sapiens
cacaccgagcgcgaggcgcggagagcaacgccgggacagcgcaaggagccaaaaaccgaacacccggaaggggacaagggacggcgaacagaccccgcgcgggggg

SEQ ID NO: 43451 - RNA, 110 nt, Homo sapiens
ggccccggcgcccgccgccccggccccgcgccggacgccgcgacggccccgagcacggccgcccggccacgacaggaagggaaggggcggagacgggcggaacgcaggag

SEQ ID NO: 43452 - RNA, 79 nt, Homo sapiens
cacggccggaaggcagcaagccaggcggaacccggagggaagaccagggcggggggcggaggacaccggaacaagaacg

SEQ ID NO: 43453 - RNA, 82 nt, Homo sapiens
ccgcccagcagcccaggccgagacgaaaggcagggaccgagggagccagggagggagagaagccagaagaccaggcagagac

SEQ ID NO: 43454 - RNA, 81 nt, Homo sapiens
agagcgggagcccgaagaagggagcagacccccaggcccggccgggccaagcgacacagccacgggaaccacaaggaagaa

SEQ ID NO: 43455 - RNA, 79 nt, Homo sapiens
ccacgacaccgaaaacccaccgagcccgccaaagagaaggagaggacagagccaggcaagcagcaaacagacggcagca

SEQ ID NO: 43456 - RNA, 58 nt, Homo sapiens
ccccgacagcgggaacagggcgccaggccacgacgagacaccgagcgaggaggccggc

SEQ ID NO: 43457 - RNA, 100 nt, Homo sapiens
cgacgcaccggagccggaagagaccagaagaacaaagacacaggcaccaaaaggcaggcagcaggcaccagaacggaaaaaggggccggcacaagcgagg

SEQ ID NO: 43458 - RNA, 76 nt, Homo sapiens
cagccaccacacagcaccggaaggagcagggaagcaggggcgaaagaagaggagcacccgacagggcaaggaaggc

SEQ ID NO: 43459 - RNA, 56 nt, Homo sapiens
gagcaggagggcagcagagaacacgggcacacaggcgacccaaaggcagaggagag

SEQ ID NO: 43460 - RNA, 73 nt, Homo sapiens
gaaacaaaaaaagcacaaaacagagcaaggcaagaagggaagcccagcagcgagaagaagcccaaggagaggc

SEQ ID NO: 43461 - RNA, 53 nt, Homo sapiens
gacccacagcaaagccagcgacagaagccaggaggcgaggcaagcagacccac

SEQ ID NO: 43462 - RNA, 78 nt, Homo sapiens
gcgacaggggaacagacagaaggagcaggaaccaaaggggcggacggaggcacccgagacgcggagcaggccgaggac

SEQ ID NO: 43463 - RNA, 47 nt, Homo sapiens
gggagaaagaaaaaagggacgaaaacacacaggaacgggacccgaac

SEQ ID NO: 43464 - RNA, 77 nt, Homo sapiens
gaaacgcgaaaaaagaccccccggggaagagcaggaccggagcccccaaaccggaggaaaggccacccagacaccgg

SEQ ID NO: 43465 - RNA, 75 nt, Homo sapiens
gacaccaccagggagccaggagaggccaagaagcgagagaagaaaaacagaaaaagccaagacagaaacaagaac

SEQ ID NO: 43466 - RNA, 75 nt, Homo sapiens
gaagcgcacgagaacaggaccaccaggaaacgcgcaagacgcccaagagaagaggggcgacaccacggcaaaaga

SEQ ID NO: 43467 - RNA, 79 nt, Homo sapiens
cgccagccaggaggacccccggggaaaggaggaccagcagaaaggcccccgagacggagaccagggaccagacacagag

SEQ ID NO: 43468 - RNA, 77 nt, Homo sapiens
ggcgagccaagcgaagaggagcgccagaggggaggaaacacaagaacggcccccagaggggaagcccaagggagccg

SEQ ID NO: 43469 - RNA, 78 nt, Homo sapiens
aaaacccagaacacgggagaaaaaggaaaacgcggaaaaccgacacaacaggcaaaggcaggacaaagcggaggcgcc

SEQ ID NO: 43470 - RNA, 83 nt, Homo sapiens
cgggagaaggggggggcgggcaagccggacaaggaccggggaccgagaggagccgaggagggcgcgcggcccggcggacggac

SEQ ID NO: 43471 - RNA, 78 nt, Homo sapiens
gcaccagagccgagaaacgcgaaaaggaagcggaaggaggaggaggggaggaggaggaggaggagagcgcccaagaca

SEQ ID NO: 43472 - RNA, 55 nt, Homo sapiens
gaagggaaccaggaccgggggacgggacaccgagggagccagagacaaccaggcg

SEQ ID NO: 43473 - RNA, 81 nt, Homo sapiens
gggaccacagaaagaaccggagcagacaacaacaggaccgaaccaccaaaagacaagaccacaccggagcagcgcggaaga

SEQ ID NO: 43474 - RNA, 58 nt, Homo sapiens
gccagaagagaccacgcacaggaggcccgaggagcggccacgcagacgaggacgcgca

SEQ ID NO: 43475 - RNA, 58 nt, Homo sapiens
ccaccaacaagacaaaagaacggaagaaaaaaccagggaccaagaaaggcccagggac

SEQ ID NO: 43476 - RNA, 53 nt, Homo sapiens
agcaagaagcgacacaaggagaaaaggacaggcaggagacagcaacaaggacc

SEQ ID NO: 43477 - RNA, 95 nt, Homo sapiens
cgggcggaagaggcgcggcgcagcggccagaggagcacgcgggcagggagagggccaaaggaacgggacagcacggcacacaccccgcaccagcg

SEQ ID NO: 43478 - RNA, 80 nt, Homo sapiens
gagggggacgaccccgaacccaggacagcaccaggcccaggacagcacgagggagccggcccaggaggacagaccggaac

SEQ ID NO: 43479 - RNA, 77 nt, Homo sapiens
cggggacggcgggggccgagcccagagagggaggagaaacagaagcggccaaaagcaggccggcaccggaggcagaa

SEQ ID NO: 43480 - RNA, 61 nt, Homo sapiens
ggcgagccccgcgcagccgccggcgcgccgccaggaccagccacgccggaaccggaaacac

SEQ ID NO: 43481 - RNA, 70 nt, Homo sapiens
gcagaagaccagggacacagcagacaccgaaaacgagaaacgaaagagacacgggggcacaaccgagccc

SEQ ID NO: 43482 - RNA, 84 nt, Homo sapiens
cggagagggaggcgggaggagcggcagccgcgaggaggcgcgggagggcgagaacgaccccgagacgagacgcggggacggcca

SEQ ID NO: 43483 - RNA, 71 nt, Homo sapiens
caaaagaaaacccaaaaaggagcagccggccgcagaacaagacaggccgacaagaagcagccaccaccaca

SEQ ID NO: 43484 - RNA, 56 nt, Homo sapiens
ggcccgacaccgccacccccagcaggaaagccagaccaggcccggaagaaccagcc

SEQ ID NO: 43485 - RNA, 78 nt, Homo sapiens
cagcccaccgaaaggagagaagcagagcgaaggcagagcggagagcggcgaaagccaggaccaggagacacaggaacc

SEQ ID NO: 43486 - RNA, 81 nt, Homo sapiens
caacagagcccaaggaggcgaaaggaggagcggagcagacaccagccaaagaaccgaggaggcgcaaaggggaagaaagac

SEQ ID NO: 43487 - RNA, 48 nt, Homo sapiens
aaggaccaagaaccagccggccacaccaagagggacaacccacccgca

SEQ ID NO: 43488 - RNA, 71 nt, Homo sapiens
ccaaaagcaccgaacaccacaccccaaaagagaacagacagccacgcagacggaaacaaggcaacagaaag

SEQ ID NO: 43489 - RNA, 45 nt, Homo sapiens
acacacaggcacaccgcacaagacaacggcaagcggagaagagca

SEQ ID NO: 43490 - RNA, 35 nt, Homo sapiens
gaagaaaagaacggaggcggaggacccacaggaga

SEQ ID NO: 43491 - RNA, 72 nt, Homo sapiens
accgaagaagaaagagaagaaacgccaggggcgagaggcaagacaaaagaaaaccccagacggaaagaggaa

SEQ ID NO: 43492 - RNA, 73 nt, Homo sapiens
ccgggccagccccgcgacggcccacgagccaagcccagccccaggagaaagccagcagcgagcgccaagacgg

SEQ ID NO: 43493 - RNA, 76 nt, Homo sapiens
gaaaaggaagcccagggcccaagccacacaaagaggggcaaaacggaggaggcagggagagagcaccggacacagc

SEQ ID NO: 43494 - RNA, 72 nt, Homo sapiens
cggcacccgacaccaggggcccagccggcagcggcccagagagggccacgaccggcgcgcgcgaaccgaccc

SEQ ID NO: 43495 - RNA, 62 nt, Homo sapiens
gaaaacacgggccaacacggcgcgaaagccagggaagaggaccacagaggggaggaggacag

SEQ ID NO: 43496 - RNA, 60 nt, Homo sapiens
aaaaacccagcgaagaccacagaaaccaaaacccggcgaaaaacagccaagagaaaggag

SEQ ID NO: 43497 - RNA, 73 nt, Homo sapiens
cagcagaaacgcaccaggccaaagaaagagaaggaggacaccaggagaacgaagcaaaagcgggccgggaccg

SEQ ID NO: 43498 - RNA, 76 nt, Homo sapiens
cgggccccaaggacaacccgacacaccgacggcaccgggccaccgccgccaggcggacaaaagaacagaacagcac

SEQ ID NO: 43499 - RNA, 74 nt, Homo sapiens
ccaaggcacgaacgagcgaccgccccagaggaccacccgcacccaggggacgcacggcccaaccccgagcaagg

SEQ ID NO: 43500 - RNA, 74 nt, Homo sapiens
caaggacgccggcccgggaagagaagccagaacggcggaaaagggcgagacagaacgaaaagaaccgcaagcgg

SEQ ID NO: 43501 - RNA, 59 nt, Homo sapiens
ggcacaccagaacaacacacacccaccaaggcccggaggccccacaacaggggcagaca

SEQ ID NO: 43502 - RNA, 85 nt, Homo sapiens
ggagagagacagacccagcaaacaggacgggaagaacagaagccgagacccacagccacacaggacaggccccccagccaccagc

SEQ ID NO: 43503 - RNA, 75 nt, Homo sapiens
agaagaagaagaccacaaaaaagagacccacagccagcaacaccgacagagaacacaacagacagaaagcaaaga

SEQ ID NO: 43504 - RNA, 53 nt, Homo sapiens
gacacaacaaggcacacgaagagagaaagaacgagcggccggagagaaaaagg

SEQ ID NO: 43505 - RNA, 87 nt, Homo sapiens
ggggaacagccggaagggcggggggcgggccggaggggagacgggaggcaggcgggagaccagggccagcccggccacaccccaggc

SEQ ID NO: 43506 - RNA, 72 nt, Homo sapiens
aaaaaagggaaaaacacaaacgaccaacagggaaacacaaaaggcaaacagaagcaccgaacagggaaagaa

SEQ ID NO: 43507 - RNA, 73 nt, Homo sapiens
gggaggccggacccagcgagcgggcggcacgcacgcaggcggcggccggggcagcgccgcgagccagcaacgg

SEQ ID NO: 43508 - RNA, 88 nt, Homo sapiens
acagcccaccaagggaccacgaagcaggggacggggcaggagggccgccgccgacagcggcacagccccgggccggggcagccgcaaa

SEQ ID NO: 43509 - RNA, 83 nt, Homo sapiens
cagcggggagccccgagaacgccccagcggggagacacagaaggggccagcgccaccggaccgcacgcgcacggacagcgccg

SEQ ID NO: 43510 - RNA, 58 nt, Homo sapiens
aagagacaccaggacccaggcacacacagaacaaaagcagagagaagagacgagagac

SEQ ID NO: 43511 - RNA, 73 nt, Homo sapiens
caagaacagggagaagaaccccaaacaagcgaaaagaagaagacgagaagccccggaacacagaggcgagaga

SEQ ID NO: 43512 - RNA, 73 nt, Homo sapiens
agccgaaagacaccgggcccccgagagaaaggagaggaccgcccacaagggaggcagaacgcaagagacagcc

SEQ ID NO: 43513 - RNA, 79 nt, Homo sapiens
ggagccgccggccgcagcgcagcgccagccagcagcaggcgagaggcagaacccggaaagaaggaagggaccaccacaa

SEQ ID NO: 43514 - RNA, 97 nt, Homo sapiens
cggacccacagcagcccaagaacaacacacaacccgcaccaaagggacggggcacgccgcaaggcaaggaagaagaccggaggccaggaacaccccg

SEQ ID NO: 43515 - RNA, 74 nt, Homo sapiens
caggaacaggacgaagaccagcgccagggaaagaagccccggcacaaagcagaccgccccacgggcgcgcccgc

SEQ ID NO: 43516 - RNA, 77 nt, Homo sapiens
aaaagacagcccgcagcacgaccagcaggaacggggaccacgcagcagcggaaagagacagcggcccggcggacagg

SEQ ID NO: 43517 - RNA, 34 nt, Homo sapiens
aacgggaagcaaaacaaccagcgagagggaagca

SEQ ID NO: 43518 - RNA, 66 nt, Homo sapiens
gccccagcgcacgggcaaggcgcccaaaacaagcgaagcccagagaggaccaggaaaaaccccaga

SEQ ID NO: 43519 - RNA, 59 nt, Homo sapiens
gacccagcccaggccgcacggacggggggggggggcagcacgccgaaggagagaccaga

SEQ ID NO: 43520 - RNA, 99 nt, Homo sapiens
cagaaacaaccgcaaccacccaacaagaacgccaccagaggaagacgagagaagaggaggcagcccgggaacggcgccgccgagcccgacaggaacggc

SEQ ID NO: 43521 - RNA, 81 nt, Homo sapiens
gacggcgaggccccagaccacacggagaagacagaggagccagaccaagagacagcacaggcgagcgagcagagacaccag

SEQ ID NO: 43522 - RNA, 78 nt, Homo sapiens
gaagccacccacgccccggcccgcgggaagaaaacgccagagaagcagagcagcccggagcgaggggagaccggggaa

SEQ ID NO: 43523 - RNA, 86 nt, Homo sapiens
gaaaccacaccaagaagggacacacccgacagggaggaaaaagcagcgaaacagacaaccccccacacaaccggaaaaagacgaga

SEQ ID NO: 43524 - RNA, 55 nt, Homo sapiens
cgcaccagcagccaccaggagcccgagagagaaggcaccaaaaagcccgggcacc

SEQ ID NO: 43525 - RNA, 56 nt, Homo sapiens
cgcgcccgcgcggcgcggggaccgcggcccggaccaggccaaccggagcgcaccca

SEQ ID NO: 43526 - RNA, 89 nt, Homo sapiens
gaaagaagaaacgacaccgaaagggcgcacgggaagagcaggaccagagccacgcacacagaaacagcgagacggaggggacacccaag

SEQ ID NO: 43527 - RNA, 85 nt, Homo sapiens
cgccggagccaggaggacgaagggccgcgccaagaagaggacaagagggcagaagaagaacgcgggaaaccggcaagcagcccag

SEQ ID NO: 43528 - RNA, 107 nt, Homo sapiens
ccggcgcccgcggccagccgcaagacccgccacaagcaacgcgggaagagaaggagaagacagaggagccagaccaagagacagcacaggcgagcgagcagagacac

SEQ ID NO: 43529 - RNA, 80 nt, Homo sapiens
agaagaacgcagcccaggcaggagacaagcaggaacacagaaccgccaccacagaaaagggaaagaaacgccgaagaaca

SEQ ID NO: 43530 - RNA, 75 nt, Homo sapiens
ggaacaaaggaaccgcccgccacgccgcaacccgcggcagagagaaaagagaaaagagccggaagcaaaccccag

SEQ ID NO: 43531 - RNA, 73 nt, Homo sapiens
gggccacagaaggcggaccccagccgagaggaccgggcagccagcacaagaagcaggaaccggaggagaaaca

SEQ ID NO: 43532 - RNA, 75 nt, Homo sapiens
ggcacacgggacaaccaagagcaacagaccacggccagagggcccaaagcggagaggcacgagcacagggaccca

SEQ ID NO: 43533 - RNA, 37 nt, Homo sapiens
gcccacccacccacagggacagaccacacgcggacac

SEQ ID NO: 43534 - RNA, 82 nt, Homo sapiens
ccaaagaacaccacagaaagaccgaagacaaaaaccagaagacaagcagcgcgcagaaccggccgaaaagcacaaacagcaa

SEQ ID NO: 43535 - RNA, 81 nt, Homo sapiens
gcgcgcggcgagccacccagcaggcgcgcagcggaccgaagacccgggagaaggaagaagcaaagcacacagagaggaaac

SEQ ID NO: 43536 - RNA, 89 nt, Homo sapiens
ccgcagcaccccaccaggggcgaagcccaagccccgccccacgccacagagaggccacaagaggaagcgaagaagaggacgccgccagc

SEQ ID NO: 43537 - RNA, 53 nt, Homo sapiens
accggagagcacccaacagaacaagaggacgaaaacacccgaggcccaacccc

SEQ ID NO: 43538 - RNA, 74 nt, Homo sapiens
aaggagccgccccgacaggggggccaggagaggacgcccagcgagaaaggcaaagccccggaacaagacaacag

SEQ ID NO: 43539 - RNA, 29 nt, Homo sapiens
gcaccacacggaacgagcaacaccaagag

SEQ ID NO: 43540 - RNA, 84 nt, Homo sapiens
ggaggaggcgccccgcgcagcggcggcggagcagagcgccccagggcgacacccggaccgacgagcgcccccgagcccccccgg

SEQ ID NO: 43541 - RNA, 76 nt, Homo sapiens
ggccgcacccccgccccaggaagcacacacacccgcacgagaccccggcccgcaccgagcgagggcggcaggcaga

SEQ ID NO: 43542 - RNA, 59 nt, Homo sapiens
cggcgaccaccccggcgcccccggaggggaagaggacgaaggaggaagcggcaagaaca

SEQ ID NO: 43543 - RNA, 79 nt, Homo sapiens
gccgaaaaggcacagaaccggaggccagaaaaggaaacgaccccggccgagcgaggaggacggaggggagagcaggagg

SEQ ID NO: 43544 - RNA, 71 nt, Homo sapiens
gcggcccggagcgcggcccgaggcccgcccagaggcgacagggggaccgcggcgcgagggacgcaccgccc

SEQ ID NO: 43545 - RNA, 76 nt, Homo sapiens
agccgccgagccggacggccgcgaagaggcgggccggggcagaagacccgagcggcccgagacaaggggacccaga

SEQ ID NO: 43546 - RNA, 76 nt, Homo sapiens
ccaagcaacaaaggaaaaagcggggaacgaaggggcgcacgacggaagcaacaaaggaacagcaccaaagaccaac

SEQ ID NO: 43547 - RNA, 79 nt, Homo sapiens
gaggaccagggcccggacacccaaagacccacccgaccaaccccaggggacccccaaaagacaagggcaaaacggacca

SEQ ID NO: 43548 - RNA, 87 nt, Homo sapiens
agaagccagggggaggaaagcagacagacccaccaagagggcgggagaaccacgaggagagggacaacccgccacaacgacaaagga

SEQ ID NO: 43549 - RNA, 79 nt, Homo sapiens
accggggggccccagccccgagccggcgaacaagacacaggcagccagccgcgcagcccaacaccagcgaggacgagag

SEQ ID NO: 43550 - RNA, 75 nt, Homo sapiens
agaccgccgacagacagcagccggggcagcccagcggccgcgggcaacacaggcaccagccaaaccaaccaccac

SEQ ID NO: 43551 - RNA, 57 nt, Homo sapiens
ggggcacccacaagcgcacgaccaccaaggaagcccaaaagggaagaaggacaccag

SEQ ID NO: 43552 - RNA, 60 nt, Homo sapiens
gaccggccggcagaggcccagggcccgcgagccccagcccgggagaccgccgaaggcggg

SEQ ID NO: 43553 - RNA, 82 nt, Homo sapiens
gcgaaagcaggcgaaagggaaaaccagaagcgcagaaaaagggacccaggacagagcgggagccaccagcgccaaagggaag

SEQ ID NO: 43554 - RNA, 54 nt, Homo sapiens
gacgggacaggcccaccggaccgcagaaacgaggccagcgaagacggaggacca

SEQ ID NO: 43555 - RNA, 65 nt, Homo sapiens
gaaacagcagaaaccggaaccacacacaccacaggaagccagaaaagagggccggacagaggcag

SEQ ID NO: 43556 - RNA, 73 nt, Homo sapiens
cgcccggagaaccacacgggcaagaccccacagggcagcagcaaaggcagcggcagaagccaacacaggaaca

SEQ ID NO: 43557 - RNA, 65 nt, Homo sapiens
cacgggaaggcgccgcgcacgaagccggaggcgcagaccggggacagcaggcaagcgccggggaa

SEQ ID NO: 43558 - RNA, 86 nt, Homo sapiens
cggcggaggcgacggggcggcccggagccggcgcgaaccggcccccgcagcgggacccggggaccggccgggccgacccaggcaga

SEQ ID NO: 43559 - RNA, 79 nt, Homo sapiens
cccaagcggcggaacaccagagcacaacacagacaagaaaaaccaaaggacgcaaaaaagcacagaaccacgaccacaa

SEQ ID NO: 43560 - RNA, 59 nt, Homo sapiens
caaaaggcccaaggcccgaccgggagcaccaacacaggaagaaccaacccagcccccca

SEQ ID NO: 43561 - RNA, 61 nt, Homo sapiens
ccggccacgcaacgcgcccccagggccagcagaacagagaagaccccggaaagaagaacga

SEQ ID NO: 43562 - RNA, 39 nt, Homo sapiens
caagagggcccaagccaaaaccgagccgaagaggagcga

SEQ ID NO: 43563 - RNA, 81 nt, Homo sapiens
cgagccaaacgcaaggagaagcaggaggaggaggggcgggaaggccgcccacaaggaccacggcagggggcgccagagcgg

SEQ ID NO: 43564 - RNA, 112 nt, Homo sapiens
cgaacgcagcgcccacagccgcgaccccccgcacgcccccgggaagcccaggcccgccgcaggcagcaggaaggagggccacacaccaaagagacggcagccccacagccgc

SEQ ID NO: 43565 - RNA, 66 nt, Homo sapiens
cccaccccagagcaccggcaggagaaaaggaacaaagaagaacgagggaaaaaaggaaggacggcg

SEQ ID NO: 43566 - RNA, 103 nt, Homo sapiens
ccgggaaacccccagcagcccccccagcccagagcccagaaacccaccgcgcacagaaccgaagaacacaaggaaggccggaagccaagcaaaagccagaagg

SEQ ID NO: 43567 - RNA, 58 nt, Homo sapiens
agaagaggaacgcaggagagcagcgaaggaggagagagcgccacagaacaaggggagc

SEQ ID NO: 43568 - RNA, 63 nt, Homo sapiens
ccacccccgagacccggaagcagaacccaagaaccgggaaacgaccaccgcccacgaagcccg

SEQ ID NO: 43569 - RNA, 59 nt, Homo sapiens
gagggaggaggccacaccaagccagccagcagggagaagcgcggaagccaccaaaacca

SEQ ID NO: 43570 - RNA, 30 nt, Homo sapiens
aaccgcgggagccgaagaggcaccagaaaa

SEQ ID NO: 43571 - RNA, 77 nt, Homo sapiens
agcagagggaagcgcgccggcaggaccagggggcgaaggcaggaaccaccaggagggacgaaggagacccaacaccc

SEQ ID NO: 43572 - RNA, 68 nt, Homo sapiens
agggcgccaccgggcccggacaaacaggcacgaggacccgccaggcaagagcaaacaacagacaaggg

SEQ ID NO: 43573 - RNA, 70 nt, Homo sapiens
ccggcggaggcgcaccgcaagagaaggccgagcaaccgggacaggcccagaagagcggaggaccacaggg

SEQ ID NO: 43574 - RNA, 79 nt, Homo sapiens
ccagacgaaaagagagaagagaaagaaacaagagcagaaggagcaaaggagaaagagaacccaacaacagacgccaaaa

SEQ ID NO: 43575 - RNA, 79 nt, Homo sapiens
cagaccgggacagaaggcaagggaaagggagcagcaccggccacacccacagcacgaccggaacccagcgaccgacgcc

SEQ ID NO: 43576 - RNA, 69 nt, Homo sapiens
gcaacaaggcggaaaaagacaccaccaacggaaaacaacacagagaagcccgaaacgcaggcaaaacga

SEQ ID NO: 43577 - RNA, 55 nt, Homo sapiens
cgcggagcccgggacgcgcgacgcccgcgccccgaaacaagcccacaagagggag

SEQ ID NO: 43578 - RNA, 104 nt, Homo sapiens
ggacgccgccgaagaagcacgaaagccccacccgccgcagcaagcagagagacaggaccacggggcaggcggccaaacccggcccgagcagcccacacccagcc

SEQ ID NO: 43579 - RNA, 70 nt, Homo sapiens
cgggaagcgagaaaacagacagagcagaagaaaccaagacggcagagaaaaaccagaaggcaccgacagg

SEQ ID NO: 43580 - RNA, 89 nt, Homo sapiens
cacagggagccaccccgggcgcagaggccacacccacagagaacccagacaacaggacgccgccaagggcccgaagccagcagagagcg

SEQ ID NO: 43581 - RNA, 81 nt, Homo sapiens
gcgagaggacaggcggaggccccagggaagcgcagaaagcaggcgaacccgcggcgcaaaacgcgaaccagacccaggggg

SEQ ID NO: 43582 - RNA, 78 nt, Homo sapiens
acgcggagaagccccgacccgaaggcgggggccggccacacacgggcacgaagcaggccggaagagaagggacagcag

SEQ ID NO: 43583 - RNA, 79 nt, Homo sapiens
ccgcaacgacaaaaccaggggggacaagaacggcggacccgggggaaaccgcaaaagggaaccaccaggaagaaaacgc

SEQ ID NO: 43584 - RNA, 77 nt, Homo sapiens
accgacgagccccaccccccaacggacgcccgcccaccgcccgaaccgcacccggaagcaaggcggccagcaaagag

SEQ ID NO: 43585 - RNA, 78 nt, Homo sapiens
cagagcgacgcgcgccgcacggaggcaagaagaaacccaccgcaaagagcagggccacaccagagcgccaggcgagcg

SEQ ID NO: 43586 - RNA, 70 nt, Homo sapiens
gaaggaacaaaccaccaggagacaaaaccgaagaccgcaggaaagcaggaaggcaagaaagccaaggacg

SEQ ID NO: 43587 - RNA, 82 nt, Homo sapiens
cccccagcagaagccacagggagggagcagaggcaggcaacgggggaccccgaaagccagccagagcaggcgccagcccgaa

SEQ ID NO: 43588 - RNA, 60 nt, Homo sapiens
gacaaaggccaacccaccagccacagaaagaagacacccgccacacaggacagagaagcc

SEQ ID NO: 43589 - RNA, 71 nt, Homo sapiens
ccgggccaaaggacgaagaacccacagaggaaagcgaacgcgaaaagaaaagccgagagcagccagaccgg

SEQ ID NO: 43590 - RNA, 56 nt, Homo sapiens
cggaaccgcccagccccgcagccagagcggagccacacaccgagggagagaagaac

SEQ ID NO: 43591 - RNA, 83 nt, Homo sapiens
ggaggaggggcaggcccggcggaaaaagacaagggcagagcagccggggaaaagggccaagaagcagaaaagagcacccgaga

SEQ ID NO: 43592 - RNA, 83 nt, Homo sapiens
aagacggggcggaagaccaagacacgagagaaacgcggagcgaacccggccaggcgagagaaccagagaaaaaggcgagaggc

SEQ ID NO: 43593 - RNA, 51 nt, Homo sapiens
gacgaggcgcgggcgcgcacccgagccgcaagcacgaaccaccagagaggg

SEQ ID NO: 43594 - RNA, 77 nt, Homo sapiens
cccccacgggccgcgaagaccggcccacagcgcggcaccgaccccggggggcgcggggggcccagaccaagacaggg

SEQ ID NO: 43595 - RNA, 77 nt, Homo sapiens
ccgcgcggcggcgacccaagccccgcaccgacgggacacaaagcgagaagacccagcaaccagcagcaagaccaaga

SEQ ID NO: 43596 - RNA, 80 nt, Homo sapiens
aagaaaagcacaagagaaagaaggaagcggcgccgaaaaaaaggagacaagggcgggcccccggcagggacaaaggcgag

SEQ ID NO: 43597 - RNA, 85 nt, Homo sapiens
agaagggagacgacgcgcgggccgcgagcggggcgacccgagacggacaacaggaagccaagccacaagaccgccaagaacccca

SEQ ID NO: 43598 - RNA, 69 nt, Homo sapiens
ggagaaggaccaagaaccagcgacagagccaacgcaaaaccagaccaacagccacaggaccagaacagg

SEQ ID NO: 43599 - RNA, 70 nt, Homo sapiens
ggagccggcgggcggggaacccaggccccgccgaggcggccaggcacagcggcacagagacgaggagaag

SEQ ID NO: 43600 - RNA, 80 nt, Homo sapiens
caacggggaaaccacgaagacaaacagacccccagggcagccagagagacacagcccacgaggacggacagacggggcag

SEQ ID NO: 43601 - RNA, 68 nt, Homo sapiens
ggaaaagagaaaagaccccggagagcgacagggggcgaggaagagacaggcgggggagaagaagcagg

SEQ ID NO: 43602 - RNA, 53 nt, Homo sapiens
cggcccgaggcaacggccacagagccacaaacagggaggaccaaagggccagc

SEQ ID NO: 43603 - RNA, 78 nt, Homo sapiens
accacaccaagaagggacacacccgacaggaccagagggggcaagaaggcccaaccagccagggggcaggcccccgac

SEQ ID NO: 43604 - RNA, 52 nt, Homo sapiens
ggacagacagccccaggagagcccaaaaggcagagcgaggagagaagaagga

SEQ ID NO: 43605 - RNA, 78 nt, Homo sapiens
gacggagagggcagaagaggaggagaacagccagcaaagacaagagcagaccagcagccgcagcgcgacagccaaaaa

SEQ ID NO: 43606 - RNA, 76 nt, Homo sapiens
ggggccaaaagaaagggcaaggcagccccggcagaaccagagggacaggcccagcccccacagccagcccagaaca

SEQ ID NO: 43607 - RNA, 74 nt, Homo sapiens
ccgcgcccgcggagggaaaagccagaacaccaacgccacacacgggaccaccacacgcgaccagggcccaccga

SEQ ID NO: 43608 - RNA, 84 nt, Homo sapiens
ggcaccgagagccaaaggaggagagaacaagaaagcccagaagccccaggaagcaccaagggcgggccccagggccagcgacca

SEQ ID NO: 43609 - RNA, 52 nt, Homo sapiens
ccgcccagcccgggcacgccccgccgacaggggacacgcgcccaccaggggg

SEQ ID NO: 43610 - RNA, 83 nt, Homo sapiens
ggaccccaaggcacaggcgaccaccccaaaagcaccggccccgcacagcaaaccaggacagaagaggacgcaccaagagaaag

SEQ ID NO: 43611 - RNA, 73 nt, Homo sapiens
aaagcgagagagggaagcgcccggccggaggcaggggaaagaaggcgaacaacaccccagcgcacacagggag

SEQ ID NO: 43612 - RNA, 77 nt, Homo sapiens
caaaaaggcgaaagccgagggaagggggacgagccaagaagggcacaacccagagccgagccagggaggaacgccca

SEQ ID NO: 43613 - RNA, 87 nt, Homo sapiens
cgacggggcggccgggggccagagaccaaggcgcgcccggcgggccggaccaagagccccggagcagggagcgggcacggacagcgg

SEQ ID NO: 43614 - RNA, 73 nt, Homo sapiens
agggacggacccggagccgggccagcaacagagcgggccggggacggagaaccacgaagacacacacagacag

SEQ ID NO: 43615 - RNA, 74 nt, Homo sapiens
ggaacgggcggaccagggcgagcacgagcacccgccccaacgagagacagggcagggcagcagcacgaccgacc

SEQ ID NO: 43616 - RNA, 116 nt, Homo sapiens
ggcagggcccccggagggaacccgcccccagggagggaacaaagcccacagcaccgaaacgaaggaggcccaaccacaaaaggagccgacggaacccagacggagaacaaaaggaa

SEQ ID NO: 43617 - RNA, 70 nt, Homo sapiens
caaacgcagaccagcccaggaagaccaccagaagagaagagaagcagaaacagcaaacggaccagaggac

SEQ ID NO: 43618 - RNA, 82 nt, Homo sapiens
acccgccgcccagccacgccgcgcccgcgccccaggcccgggacgcccgaggccggaagagccagcgaggggacggcgggag

SEQ ID NO: 43619 - RNA, 79 nt, Homo sapiens
aaccgccagcaaaccacacaggagggggagcccaggcgggacggggcggaaaggcagaagcaagcagaaggcacccacc

SEQ ID NO: 43620 - RNA, 83 nt, Homo sapiens
cggccaagaccagcgcgagggcccgggcaaggcccgacagggggagcaggaaagagagaagcggcccgccggcaggcccaccc

SEQ ID NO: 43621 - RNA, 73 nt, Homo sapiens
cgacgcgcgccgcacggaggcaagaagaaacccaccgcaaagagggagcaacacaccccacacgagacccaag

SEQ ID NO: 43622 - RNA, 76 nt, Homo sapiens
caagacagaggaccagagcggacccgccagcgaaggggaaagagcacagagcgccaagaacaggagcaacacccag

SEQ ID NO: 43623 - RNA, 41 nt, Homo sapiens
gagaacacggaccagaaagaccggaagcccacggccacacc

SEQ ID NO: 43624 - RNA, 56 nt, Homo sapiens
gaaaacccgcgagcaggaaccccaggaaacggccagggcgacccgcacaaaaccca

SEQ ID NO: 43625 - RNA, 75 nt, Homo sapiens
acgagccagggaggaaggcgcaggagcccggccaccacacccagcggcaaggcgccaccggaagaaacgggaggg

SEQ ID NO: 43626 - RNA, 82 nt, Homo sapiens
gcgggaggcagcgcaccaagaagaacagcagagaacacaacacaggacaagcaagcccagagcgccggacgaagccagagcg

SEQ ID NO: 43627 - RNA, 88 nt, Homo sapiens
ccaagaccgacccaggcccagccccagaccgaccagggacagagaagacagcgcagacaacgaggaaccgcaaagggaaaagcacagg

SEQ ID NO: 43628 - RNA, 81 nt, Homo sapiens
gacaaacaaagccgggcaaagaggaacagaccacaaccccacaccaggagaagcacagcaccggaacgcgagaaagcaggg

SEQ ID NO: 43629 - RNA, 72 nt, Homo sapiens
gccccgcagccccccgcagcacccagccggccacggacaggaggccagggcacgggaaggcagcacgaggca

SEQ ID NO: 43630 - RNA, 76 nt, Homo sapiens
cagccagcacaccccgcgagcaaggacccaaagacaggaccacgcaccagcagagaaggaaagcaaaccgaagcag

SEQ ID NO: 43631 - RNA, 74 nt, Homo sapiens
gagcccgaggaagggcggaccaaccacggcaaaccaacaaggagaaacaaaggcgcgggggcaagagaccaaga

SEQ ID NO: 43632 - RNA, 62 nt, Homo sapiens
accccagcaaaggggccacagagacgagaaaccaaaccacaggggagggcaccagaagagcc

SEQ ID NO: 43633 - RNA, 72 nt, Homo sapiens
aagaaagaaagaaggccgggagaagcaagaaccggagcaggagcaggaggccgagaccccaggaggagggga

SEQ ID NO: 43634 - RNA, 80 nt, Homo sapiens
gaccaggggacaaaagaggggaaacgagagcccaaaaaagaagcaggcaccaccccaggcaaaagaacaacgccagcagc

SEQ ID NO: 43635 - RNA, 65 nt, Homo sapiens
ggggagccacacagaacccaccagggaggagcggcaaagcaacaaggacacccaccacacaccag

SEQ ID NO: 43636 - RNA, 67 nt, Homo sapiens
gaggcggcgggacgagaaggcgggaaaacggcacaaggcgacgagggagggcagaccgccaggccag

SEQ ID NO: 43637 - RNA, 57 nt, Homo sapiens
cagagcggagacacccaggaggcagaagccaggaaagggagcagcaccggccacacc

SEQ ID NO: 43638 - RNA, 51 nt, Homo sapiens
ccgaagggagcaggggcccaaaaaaccaggaacaggagaacgagggacggc

SEQ ID NO: 43639 - RNA, 72 nt, Homo sapiens
cacacaaccgcggcggcacagcggggagaaacaagagcggggacgggaaagagggcagaagcagcaagaaaa

SEQ ID NO: 43640 - RNA, 82 nt, Homo sapiens
acagaggcagaaggacgcaccccaacgcaggggcaaaggagcagagaacgacaagccacacgaggacagcccgcaacaccac

SEQ ID NO: 43641 - RNA, 76 nt, Homo sapiens
gaccaccagaaagcaccccacagagcagacagacagcgaacacggaagccacgaaaagcaaaagcacaggaagccg

SEQ ID NO: 43642 - RNA, 75 nt, Homo sapiens
ccccccgacagagacggcggagaccccgaaggcgcaaacgacaccacccgaccggagacagacccagcacggacc

SEQ ID NO: 43643 - RNA, 74 nt, Homo sapiens
cggaagggcagagcgggaacggaccgcgaagaagaagcccagagaaccgggcaaaaaacagagccaaacagccc

SEQ ID NO: 43644 - RNA, 73 nt, Homo sapiens
cggagaggaccggacgggagggagaagaacccagaaaaaaaaaagagaagcacccagagggaagggggcccga

SEQ ID NO: 43645 - RNA, 69 nt, Homo sapiens
aagcacagggcagaagcccaagggcaacgacaagaggagaccgagagggcgggaagcgagcagcgcagg

SEQ ID NO: 43646 - RNA, 74 nt, Homo sapiens
cggccggcggggagcgccaaggccgcaggggaagggggccagacaaccagggaagcacagacacgcgcaccggg

SEQ ID NO: 43647 - RNA, 86 nt, Homo sapiens
cgccgcggacgaccgcacgggcaggcaaaagcagaccggaaaacccaccggcaagaccacacccgaggggagcccaggacaccacg

SEQ ID NO: 43648 - RNA, 64 nt, Homo sapiens
gagaaccccacaccagaacccaggaccccggaggaaaagcggaagcggcagcggcgaacgccgg

SEQ ID NO: 43649 - RNA, 67 nt, Homo sapiens
caacagccaaaaaacaggcccggagagcaaagaccgcccgcccgggcgggaccccgcggaccgcgcg

SEQ ID NO: 43650 - RNA, 58 nt, Homo sapiens
ccgagagccgcggcccggcggaaaggacagcaggggcaaagaaaaaggagagaaaaag

SEQ ID NO: 43651 - RNA, 77 nt, Homo sapiens
agccgcgagggcgcgggggagagggggaggccgagcccagggcgaccgcacgccaggagggaggacaggcggcacag

SEQ ID NO: 43652 - RNA, 76 nt, Homo sapiens
cgagacccggaggaggcgaagcgagaggacaggaaaagccaggacgagcgaggaagcagcaacaggaacaaccgca

SEQ ID NO: 43653 - RNA, 47 nt, Homo sapiens
agcaagcacagccaacagcccacaagcgcaaccccaccggaaccacc

SEQ ID NO: 43654 - RNA, 68 nt, Homo sapiens
ggcgagcccaccccccagcccaagacccaggacaaaggagagaggcaccaccagaccaaagagagcga

SEQ ID NO: 43655 - RNA, 89 nt, Homo sapiens
agcagcggacccccaagagcaccgaaccagggcaggccccaccgcgcccaggccacccccaacagagcagcccgacggccaggaggcga

SEQ ID NO: 43656 - RNA, 81 nt, Homo sapiens
gcagacccaagaagacagaccccgaggagacgaagccagaggacaacagagcaaccagccgggcaccaggaaccccaggca

SEQ ID NO: 43657 - RNA, 73 nt, Homo sapiens
ggccccacccgggaggggggagcggcgggaggccaccgccagaggggcaaggcgaaaagacacgagacaccca

SEQ ID NO: 43658 - RNA, 61 nt, Homo sapiens
gaggccaggcgaggagagcgaacaaccccagaagaggcagaagcccccggggagagacaga

SEQ ID NO: 43659 - RNA, 56 nt, Homo sapiens
cgccgaggcggccccagagggaaagacaaggagccgggccgagaaaccgaaccaga

SEQ ID NO: 43660 - RNA, 82 nt, Homo sapiens
accccggaggaaacagaagaaaagaagcgcagaagaaagacgcaaggcacagaaagcgaagggcggagagccaaggaagggg

SEQ ID NO: 43661 - RNA, 88 nt, Homo sapiens
gacagcgcgcggcaggcggcgagccgggggccgcaggacagagcgggagccaccagcgccaaagggaagccaggagcccgggggcacg

SEQ ID NO: 43662 - RNA, 60 nt, Homo sapiens
cgaggcgaaggggccaaccagggaaaggagagggagggaccagagccaccaaaaccggca

SEQ ID NO: 43663 - RNA, 79 nt, Homo sapiens
ccggaaccagcgccagcccaccggaagcccaggcccagagccagcacgagacaccgcgcgagcggggagccgagaaccg

SEQ ID NO: 43664 - RNA, 57 nt, Homo sapiens
aacaagccgaccagacgagaccgggcagacacggcccagaaccgaccggaccccaga

SEQ ID NO: 43665 - RNA, 74 nt, Homo sapiens
agaccggcccggaccgcccccagcagcggcggccagaggaaacagagacccagacagaaacggacacgaccacc

SEQ ID NO: 43666 - RNA, 77 nt, Homo sapiens
gaagaagcccccaccccacccacgcacggggccacccccagaagcccaagagagagcaaaggcggaggcagggggac

SEQ ID NO: 43667 - RNA, 79 nt, Homo sapiens
agaaaaggaagagggaaacaacaagaagaggaacacgaacaaccacgccacggggacaaggaaaacgaaaaacgggcag

SEQ ID NO: 43668 - RNA, 59 nt, Homo sapiens
ggcccccaagcggggggcgcacaaaagagcacaaaagcaccaaggcgcacaacagcgac

SEQ ID NO: 43669 - RNA, 76 nt, Homo sapiens
gacgcgggaggacggcccacggcagcgcgacggcagaagaaaacccagggaggaagggaaagagcccggacggaag

SEQ ID NO: 43670 - RNA, 68 nt, Homo sapiens
cccacgaacccgaagcccccaaagagagaaccggagagcacccaacaaagccagcccagaaagggaaa

SEQ ID NO: 43671 - RNA, 83 nt, Homo sapiens
acacgaggcgcaccagagaccggacccgccagggacggaacggagagggggaccaacacagcgagggaggcagccggggagcg

SEQ ID NO: 43672 - RNA, 76 nt, Homo sapiens
gcgcagacacagaacaggaaccaagcgaggcgcacaagagcagagagcccaggaccacaaggagagcggcggggac

SEQ ID NO: 43673 - RNA, 82 nt, Homo sapiens
gagcgggagaggcccggggcacggcagaaaggagccccgcgagggcgcgccggggacgcagggaagcaacaggaaaccaaac

SEQ ID NO: 43674 - RNA, 56 nt, Homo sapiens
agaccaaacggaagagccacgcccccgagagccgccaacacccggccgagggcaca

SEQ ID NO: 43675 - RNA, 81 nt, Homo sapiens
gccgcgggcggaagacaggccacccagcggggagcacggcgagcagccaggccaggagagggaagaggacccagagaggcc

SEQ ID NO: 43676 - RNA, 82 nt, Homo sapiens
ccgcgggaagcgcggacaacggaggcccccacaccaagacccccaggaccaccaccgagcggggccaggcacgcggagggcg

SEQ ID NO: 43677 - RNA, 45 nt, Homo sapiens
gccaccaggagcccgagagagaaggaaaacacagacgcagcccgg

SEQ ID NO: 43678 - RNA, 72 nt, Homo sapiens
aacgcgccgcaaaacagaacgcgaagcaaaccagccccagaaaagaaaagaagcaggcccgcgagagacgca

SEQ ID NO: 43679 - RNA, 74 nt, Homo sapiens
cgacagccgacaggcgcggcacgggaggcggaggcgccccgccagaggaggcaacggcccagcggaacagcaag

SEQ ID NO: 43680 - RNA, 73 nt, Homo sapiens
ccggagaagccccgagcaccccacagaaaagacacgcaaagccgaggaaccaacgaggcgccggaagcagaac

SEQ ID NO: 43681 - RNA, 81 nt, Homo sapiens
cagacggcgacggccacacgacaggagaagaggggaagaagaaagccagaagagcagagaaggccggaggaagaaccccac

SEQ ID NO: 43682 - RNA, 74 nt, Homo sapiens
agcgggagaacaacacccgggcagcgcaagacagcggagagaacccccgccacacaccacggcaccaggccaca

SEQ ID NO: 43683 - RNA, 75 nt, Homo sapiens
ccgagcgggacccccgccgccccgggggccggacgaggcgggagccagagaacccacagggacaccagcagaaaa

SEQ ID NO: 43684 - RNA, 66 nt, Homo sapiens
cccccagaagcggaaacaggagggaaggccaggacaggggaacaggcacacgagccacgaaacagg

SEQ ID NO: 43685 - RNA, 85 nt, Homo sapiens
cgaagacgggaacgccagcaagggggaacccaagagaggcagagccagaaggagagccaagcgccagagaacaggaggaggcagg

SEQ ID NO: 43686 - RNA, 66 nt, Homo sapiens
cgcaccacacacagagggaaacggaaagcacccagccaaacccaggcccgagaagaagaggaaaac

SEQ ID NO: 43687 - RNA, 80 nt, Homo sapiens
ccgccaggacccacgcaggaaaaggggaacccgaagcccgggaaggcccagaccagacggggcccggagcagagacgagc

SEQ ID NO: 43688 - RNA, 70 nt, Homo sapiens
gacgaaccaggaagccccacccccaccgccaggcaaagagaaccccagagggcgcggaagccccagcaaa

SEQ ID NO: 43689 - RNA, 79 nt, Homo sapiens
caagggccaggggagcccagcggcgcgccggcagcaggcagcgggccggcaacagcggagaagaccaggcagggacagc

SEQ ID NO: 43690 - RNA, 55 nt, Homo sapiens
aaaacgcaccaagacagaaaagggcgagacagccccagccggagggaaaaggcaa

SEQ ID NO: 43691 - RNA, 76 nt, Homo sapiens
gccgccgccgcgccggcagccgcggcaggggcagggaggaggaagaacacacacagggaggaggagcaggacgagc

SEQ ID NO: 43692 - RNA, 74 nt, Homo sapiens
accacaacagaaagcgacaacagccaagagggcgcccagagacaacgagagaacgaagaagagagggcgaagga

SEQ ID NO: 43693 - RNA, 86 nt, Homo sapiens
cgacggaccggcccgccgcccggccaaggcccgcggaacagcggaggacgaagagcgggacccgagcccgcgcggcacgaagaccc

SEQ ID NO: 43694 - RNA, 54 nt, Homo sapiens
accgcgaagccgaagcagacgaagaacgccaacaaggcaaaagcagaccggaaa

SEQ ID NO: 43695 - RNA, 95 nt, Homo sapiens
ccacgacggcaaccaaggagaacggcaccaggacacacacaaccgggccccccagcgacagacacaccggacaaaaggcaagaggaaacagaaag

SEQ ID NO: 43696 - RNA, 73 nt, Homo sapiens
ggacgcacacaccggcacaccgcaaggccaagagaggacgcccaaccacagcccaggacaacgggacggaaaa

SEQ ID NO: 43697 - RNA, 77 nt, Homo sapiens
gcgagcggccgccccacgcgcgccgacagaaggggaggcaagcaggggggcaaaggaaagaaggcagaaagggaggc

SEQ ID NO: 43698 - RNA, 73 nt, Homo sapiens
caaaagggaagcgaagccgaaaaaggcagcagcgaagaacccacggcaaccaacgccgaagcccgacacacag

SEQ ID NO: 43699 - RNA, 82 nt, Homo sapiens
cccagacgggggaaccccaagcgccgaaaagacgaggcgaggaggcgagacacccaacccaccccaccccggagggccagac

SEQ ID NO: 43700 - RNA, 74 nt, Homo sapiens
gggagcgggccaaaccagaaccccccaggccggagcaccagaccgcaacaggagcagacggagaaagagaccac

SEQ ID NO: 43701 - RNA, 77 nt, Homo sapiens
gagccgggcccgccgaggcccggagggagagaaggacccaaagacaggaccacgcaccagcagagaaggaaagcaaa

SEQ ID NO: 43702 - RNA, 74 nt, Homo sapiens
cagccaccacccagaggcacggcgccgccacaaccggaaacaaaaggacaaaagagccgcaagaccggggccaa

SEQ ID NO: 43703 - RNA, 81 nt, Homo sapiens
ccgccgcggcccccgcaaaacaaggggcgggcacaagggaagacagcgcccgggacccaacggaagaggcccaagaagccc

SEQ ID NO: 43704 - RNA, 82 nt, Homo sapiens
cggcgggcccagcgggggaagagagcgcgcagggcgcaccgggaagcaggccagcaacagaagaaagcaagcaccggggaaa

SEQ ID NO: 43705 - RNA, 77 nt, Homo sapiens
ggagacccgcgcgccaggcgcgcccgggcccccggaggcaaccccggaacagggacggccggacccacaagacagga

SEQ ID NO: 43706 - RNA, 71 nt, Homo sapiens
gaccgcgacgcaccgaaacaagaaacgaggcagaagcccccggggagagacagacagagggacacagagag

SEQ ID NO: 43707 - RNA, 56 nt, Homo sapiens
agaaaagaagaggagaagcaagcagaccggacacaagagggcaagaaaggcgcgac

SEQ ID NO: 43708 - RNA, 61 nt, Homo sapiens
ggccacgagggagacccacccccaccagggaaaacgacccccaggaaaaagaaaaggacca

SEQ ID NO: 43709 - RNA, 58 nt, Homo sapiens
ggaccaagacgagcccagcgcaaccccaagcgcccaaagccaccggggaccgcaaggc

SEQ ID NO: 43710 - RNA, 51 nt, Homo sapiens
gagaaaaaccccccaagccgggagacgagagcaaggccgcaacggggagcc

SEQ ID NO: 43711 - RNA, 129 nt, Homo sapiens
ggggagggggggaccacgaaaggagcaagagcaagacaccggacaccgagggcccccaaaagcccgagaccgaggacgagaagaagcgcgaggaaggcaaagggcggaccgcagagaaggcgaagcgac

SEQ ID NO: 43712 - RNA, 90 nt, Homo sapiens
ggagggccgcaagacccaagaagaagaaggcgaaggaccccaacggggaggccaacggaagaagaaggcccaccgcggccccgaggagag

SEQ ID NO: 43713 - RNA, 87 nt, Homo sapiens
gacgcccggcgccagcacacgcaggacggccggagcagcagaacaagagcggagaccaagggagccccgcagcagcagaagacggcc

SEQ ID NO: 43714 - RNA, 70 nt, Homo sapiens
gcacaagggagggaaaggagaagcgagggaaacccagacgacaaggaaggccaagggacccacgaccaac

SEQ ID NO: 43715 - RNA, 58 nt, Homo sapiens
caggaaccaggggcaccaccaacaggcaccagggcagggagccaccgccaagcccgcc

SEQ ID NO: 43716 - RNA, 57 nt, Homo sapiens
cagacacaacccaaacaaaggaggccaaacggcacggaaaaacacaaggaagggaaa

SEQ ID NO: 43717 - RNA, 72 nt, Homo sapiens
gcggcgggcgcgcgcgcggcgcgcgcgcacgggcggcgcggcgcgagacgacgggaccgaaggaccccgcca

SEQ ID NO: 43718 - RNA, 82 nt, Homo sapiens
gacggggggagagaaaaaacccagcgagaccgggccggaacgaaagcaggacggaggagcgaccaccgacaacggcaagcgg

SEQ ID NO: 43719 - RNA, 75 nt, Homo sapiens
ggaggagaccgccgggcagagacacaagcggaaaacaccagagggcaggagggaacccggcgcaaccgcacccac

SEQ ID NO: 43720 - RNA, 51 nt, Homo sapiens
ccaaaggagaggaccgagaccaagaagagaccggaaacgagagaaacgaag

SEQ ID NO: 43721 - RNA, 68 nt, Homo sapiens
cacgaagcaaacgagggaaaaaaacaaaagcagcccaagcaccaggaggggcacagcagaaaagcacg

SEQ ID NO: 43722 - RNA, 70 nt, Homo sapiens
ggaggacccagggccagaccccgggcgcgacacccagccgcgccccagcacaccggagcacccgagccca

SEQ ID NO: 43723 - RNA, 78 nt, Homo sapiens
ggacgaagcaggagcgcagaacggcgccacccaggacaggagaaggcggggaaaaaaccagagaccacagaaggacgg

SEQ ID NO: 43724 - RNA, 81 nt, Homo sapiens
agccagaaaccggggaccaacaaccaccaagaaacagagacaagagaagcggaagcaaaaacagggaagagaacccacccc

SEQ ID NO: 43725 - RNA, 75 nt, Homo sapiens
cgccggcccacagccccagagccagcccgagaagcaggagagaaagaagccaagcgaaaaaccaaaccagcacag

SEQ ID NO: 43726 - RNA, 81 nt, Homo sapiens
ccgccccaggacagcaccagcgggccggaggagccagagcgcagaaagcgcagacagcaaggcgacagaaggagaacagcg

SEQ ID NO: 43727 - RNA, 75 nt, Homo sapiens
gccgagcgcaccgcaggaggccgggcggagaacggaaaagcaccaggaagcagagaggaccgcagaagggaagga

SEQ ID NO: 43728 - RNA, 73 nt, Homo sapiens
ggcggcgggcgagccgagccccagcgagccagagggacagcacagcccgcccgcgcaagcccaaagaacgcca

SEQ ID NO: 43729 - RNA, 79 nt, Homo sapiens
agccaaacaggaagagggagcccgccgacagcccacacgggacacggaacccaaggagacgaagcgaagcaggagaagg

SEQ ID NO: 43730 - RNA, 77 nt, Homo sapiens
agaaccgcgcgccacccacaaccagggaaagggagcagcaccggccacacccacagcacgaccggaacccagcgacc

SEQ ID NO: 43731 - RNA, 76 nt, Homo sapiens
acgggagaagagacaaaggcccagggcgaagaagagcagagcagccgaagcggggacgacacgaggccacgagccc

SEQ ID NO: 43732 - RNA, 73 nt, Homo sapiens
caggaaggaaaggacggaagcaccaaaagaaaagcggccaggaccaccaggcggccacgggcccccagcacca

SEQ ID NO: 43733 - RNA, 101 nt, Homo sapiens
ccgagcaggccggcgagcggcgggacgagcggagagagccaacagaggaggggcaaggcaggcagcgcccggagccggaacggcagggagccacagaaaca

SEQ ID NO: 43734 - RNA, 56 nt, Homo sapiens
agcgagcggaccccgaccccgaggcgagacggaaagagggggcccggaggggcgcc

SEQ ID NO: 43735 - RNA, 71 nt, Homo sapiens
cgccggccccccgaaagcgcacccccaaccccccaagaccggagggccagggagggcgaacgaggaaccga

SEQ ID NO: 43736 - RNA, 106 nt, Homo sapiens
aaaaggcggacgggaaggcgggagacgagaagccgaaaagcgcagcgagcggagccgccggagcaacccacagagagagaggaaacgaagggagcgacacacaccc

SEQ ID NO: 43737 - RNA, 109 nt, Homo sapiens
gcgaaggaagaggcggacggcgggaccacaagacaacgcggagcggcgaagagcaaccagggcggaaaacaccccaaaagccaaaagggaaaggaaaagaccaacaaca

SEQ ID NO: 43738 - RNA, 50 nt, Homo sapiens
acgacggagaaggcacaagaacaaggcgaaaaaggacacccccggcaccg

SEQ ID NO: 43739 - RNA, 78 nt, Homo sapiens
gggagccagcggcacgaccgaaaccacgaggaaaccagacagcccgcccgcccccgaagcaccaaaaccagccaggag

SEQ ID NO: 43740 - RNA, 74 nt, Homo sapiens
gagcgagccaacccagcccagcggacacccgcggaaccggaggaggggagcggggaagagcaacgaggcgacca

SEQ ID NO: 43741 - RNA, 84 nt, Homo sapiens
cggaccacacagcgcgggagccacgcagaggacgccggaacacccggaagccgagaaaggcggagcacagggcggaccagccac

SEQ ID NO: 43742 - RNA, 79 nt, Homo sapiens
gcgccccaggggcgcagcaccggccacgacgggggacaagacaggcgcgaagaggagcggggaggaggaggccacaacg

SEQ ID NO: 43743 - RNA, 34 nt, Homo sapiens
ggcaggcacaagggcaccggcacacaaagacagc

SEQ ID NO: 43744 - RNA, 77 nt, Homo sapiens
gaacaggagcaaaggacaggcgggcgcagcagcaaagggcggcgcagccgaaggaaagcacgaaggaacgaccgcca

SEQ ID NO: 43745 - RNA, 55 nt, Homo sapiens
acaaaagaggagaaaaccgggcgcagccgagccccggcacaaaggaagaagaaag

SEQ ID NO: 43746 - RNA, 68 nt, Homo sapiens
aaagaacagacaagccgcaagaaccggggaagggagaggaagcggcgcgggcccccccacccccaaga

SEQ ID NO: 43747 - RNA, 81 nt, Homo sapiens
cagagcaacgcaccccacagcaagggaccaagaaaggcccagggaccaaagcccggacaaggcccgagcaccaggaccgca

SEQ ID NO: 43748 - RNA, 80 nt, Homo sapiens
gggaggagcaaaagcgggcggaaacaccgacccgagagaggaccagaaccagaccggaaagcaccaggcaaagaaaaaaa

SEQ ID NO: 43749 - RNA, 59 nt, Homo sapiens
aaaaaggacaacggacagaccaggaacacaagggcaagacagccgggaaccccacccca

SEQ ID NO: 43750 - RNA, 84 nt, Homo sapiens
acaaacagaaacaaagcaggcaccaaggacagagcaggaccaaaagaagcaaaacaggacgacccggacaaccacccacaagcg

SEQ ID NO: 43751 - RNA, 69 nt, Homo sapiens
cagaaaaaacagcacaccaggaagcaagggccgccaacaggacacggaccaaaaaacggccagccagac

SEQ ID NO: 43752 - RNA, 58 nt, Homo sapiens
gcgggccagcgacccgcgccagcgcccagggggggaaaccaccggacccaaagacagg

SEQ ID NO: 43753 - RNA, 77 nt, Homo sapiens
cgcgacccgggacccgcccgcccgcgggaggggaggccgaagacagcaccacaccagcggcgaaagacgaggacaca

SEQ ID NO: 43754 - RNA, 65 nt, Homo sapiens
gaagaccgagccggcccagagccaaaagccacgggccccgccagcagagcgcacccaacgcaccc

SEQ ID NO: 43755 - RNA, 74 nt, Homo sapiens
gaagaccagaggaagcgacagagagaggcagaaagcgaggaacaggaacgcaacgaagaggaagagcgaaaagc

SEQ ID NO: 43756 - RNA, 61 nt, Homo sapiens
caagaggaggcgggccgaagcaacaaggggccagcggagagacacccacaccccacgagaa

SEQ ID NO: 43757 - RNA, 75 nt, Homo sapiens
cccagagaccaacgcaagcagggagaagacggacgaaccacccacaaccaagaggacaaagcagccagaccaaag

SEQ ID NO: 43758 - RNA, 57 nt, Homo sapiens
gaagcgacgagccgcgaggagggcacagaccgacgcaggagagccaaccacacaacg

SEQ ID NO: 43759 - RNA, 79 nt, Homo sapiens
gaaagcggaaagagcgacaaacaaagaaagacggacacggaaaccaaaaggaggaaagagaaagacaagaagcgagagg

SEQ ID NO: 43760 - RNA, 70 nt, Homo sapiens
gggccccacgccaggacacgagaggagaggcacaccgagggcccacacacccaggcagcaccaagagcac

SEQ ID NO: 43761 - RNA, 42 nt, Homo sapiens
cccgccgcaccacgcggagagagaaagcggaggcacagcggg

SEQ ID NO: 43762 - RNA, 83 nt, Homo sapiens
aaaggggcaaggacccaacccaggagaaaaagccggacgcgggcccgcccggacgagccacgggccaggcacgcccgccacgc

SEQ ID NO: 43763 - RNA, 64 nt, Homo sapiens
acaaacgcgggggacaggcgcggcaaggaggaaaacaagacggaaggagcgccaaaaggaaaag

SEQ ID NO: 43764 - RNA, 70 nt, Homo sapiens
gaggaggaaaggaggacgaggcacacagagaaaaaaagggaacaaaacacagcaagcagacaaaaggggg

SEQ ID NO: 43765 - RNA, 80 nt, Homo sapiens
ggagacggcgggcaagcgccacggcgcccggcgccgcacacaggaacacagcgccaagggggccaaagggcgagggcaca

SEQ ID NO: 43766 - RNA, 70 nt, Homo sapiens
gaacgaccgaaacaccagaagcagagccccggaaaaccacaaggcaacaaagccgagccccgaacaaaac

SEQ ID NO: 43767 - RNA, 86 nt, Homo sapiens
gcgggggagcgcgacgcgcaagggcgcggagccgcgggccggcgagcgcgcgccaccagggagacaaggggcccagcccaaagaag

SEQ ID NO: 43768 - RNA, 78 nt, Homo sapiens
agccagcggcgaggaggggccccagcagcccccgaaggcccacaggacaggagagaaagacgagcaaagaggcccagg

SEQ ID NO: 43769 - RNA, 71 nt, Homo sapiens
ggcgccagggccaggcggcacaccccccaagaccggcggcccaacccaccggaggaagacgagaaaacacg

SEQ ID NO: 43770 - RNA, 73 nt, Homo sapiens
cgagagccgcgccgcagggcgcccggccgccaggccagcggggcggggggcaaggcacgcagccgggcccgac

SEQ ID NO: 43771 - RNA, 77 nt, Homo sapiens
cacgaggcaacacgcaaggccgccaccagaaaagaaacgaagccgggcacggacaggacagagaaagcaggcgccag

SEQ ID NO: 43772 - RNA, 49 nt, Homo sapiens
gggaaacacccgaaacagcgcggaaaggaaacccgggaccccaccacgc

SEQ ID NO: 43773 - RNA, 56 nt, Homo sapiens
cccgcagaaaaagaggcccccccccccgcgacgaccagggagagaagaagagccag

SEQ ID NO: 43774 - RNA, 83 nt, Homo sapiens
ccgccagaggaggccccccagccacggaaacgcacgcagccagaggggccagaagagagaggaggcacgccccacacagcaac

SEQ ID NO: 43775 - RNA, 80 nt, Homo sapiens
cccgcgcccacgcccgccccacacgcacggcgaccggacgccgagccaagagagaaaaagcagagagacgcaagagagaa

SEQ ID NO: 43776 - RNA, 51 nt, Homo sapiens
caaggcggagcaggccaaaggaagaagaaggccggcgccacagagcgaaaa

SEQ ID NO: 43777 - RNA, 44 nt, Homo sapiens
ggccaggacgcgggcacaccaggccggcgcggaagaggccggcg

SEQ ID NO: 43778 - RNA, 82 nt, Homo sapiens
ggaccgacagagaagccaagggccacaagcacacccccccagcccaaccagagaccagggcagcagcggcacaacccggccc

SEQ ID NO: 43779 - RNA, 83 nt, Homo sapiens
agaacggcacggccacgggcgggcaggcaaggaggcaacaagcagccaggggcaccaagaagcagccaggaaaggcaagaaag

SEQ ID NO: 43780 - RNA, 77 nt, Homo sapiens
cagaccagagccccgaggccaggaaccagacccggcaccgggaaaacgcagaggaacgagggggagccacgaggaga

SEQ ID NO: 43781 - RNA, 57 nt, Homo sapiens
agaagagcccacagcgcagacaacgcaaccaagcacagggccaggaaagcacaagag

SEQ ID NO: 43782 - RNA, 80 nt, Homo sapiens
gggcgaaggaggaggacaaagagcccccacgagcccgcaagccacccaggcccaggaccgagcccgacgcccacagacag

SEQ ID NO: 43783 - RNA, 55 nt, Homo sapiens
aaacccccacacagagcccagaggcaggcgaaccgcagaagcgcccagagaagga

SEQ ID NO: 43784 - RNA, 69 nt, Homo sapiens
acaccccacagggaagagggaaagcacagagagcaggaacaaggcagccaagcacaaggacgagaccca

SEQ ID NO: 43785 - RNA, 79 nt, Homo sapiens
agaccgaccaccaaaaccgacccgggagccgacaacaaaaccgcccgccaaggacacgcaccaccccgggcagcaggac

SEQ ID NO: 43786 - RNA, 34 nt, Homo sapiens
ccacgaagagcacagggacacgccggcccacggc

SEQ ID NO: 43787 - RNA, 37 nt, Homo sapiens
gcaccaccgcccaaccccaggccgacacgaacggaca

SEQ ID NO: 43788 - RNA, 79 nt, Homo sapiens
cgaggcacccccggaccagaacggcacggccacgggcgggcaggcaaggcggagccccccccaagggcgagcagcggcc

SEQ ID NO: 43789 - RNA, 45 nt, Homo sapiens
gccaggagcgcacggccgccggccgaaaacacgggccgcggagaa

SEQ ID NO: 43790 - RNA, 74 nt, Homo sapiens
ccagaacaccagccccagcaccaccggggaagaaccagcgccaggacggcaagacgaggcaaaaagacacagaa

SEQ ID NO: 43791 - RNA, 55 nt, Homo sapiens
cacaaagaaggcaaggcggacaggggcaagcagcggcccggagcggagagaaccg

SEQ ID NO: 43792 - RNA, 72 nt, Homo sapiens
ggaacacaggaaccaaaggcacgcgaaaccaagagaaagaagacgacacacagcaagagaagggcaccggag

SEQ ID NO: 43793 - RNA, 79 nt, Homo sapiens
ggaccccggagcccagaagacagagggcgaggacccggcagcccaaggagcaggggccagcagccgcggaggcacggaa

SEQ ID NO: 43794 - RNA, 95 nt, Homo sapiens
cacgggccgagagccgcccgggccagcggccgcgcacccccggccggaggcaccagcccgaccgccgaagagggccacggggcgggacagggccc

SEQ ID NO: 43795 - RNA, 53 nt, Homo sapiens
ccaccgggccaacgaaaagggagcccaaggacgcgaccgaaaacggagccccc

SEQ ID NO: 43796 - RNA, 66 nt, Homo sapiens
ccccggcccgggagcccccgcccggagcacgcagccagaggggccagaagagagaggaggcacgcc

SEQ ID NO: 43797 - RNA, 71 nt, Homo sapiens
aagaaccagaccccgaaccgcacaacaaaagcaaaaagaccaagggagggcaacacggacaccccagcagc

SEQ ID NO: 43798 - RNA, 111 nt, Homo sapiens
gcacggaccgggacgcggagccgaagccggcggacggcgacgggcggccggcgcgaggcgagggacaaggagggacgaagaggcggacccccggaggacaagccccgcaca

SEQ ID NO: 43799 - RNA, 83 nt, Homo sapiens
agccagagcgcagaggcggcggggcgagagggcggcgaaggaggcagaggcacagcgcaggacaacccccaagaaagggagcc

SEQ ID NO: 43800 - RNA, 79 nt, Homo sapiens
gaagaagggggcagaccccacccgggaaaagacaaaaccgccccacgggcagccaggaaggaagacccacaagagacca

SEQ ID NO: 43801 - RNA, 69 nt, Homo sapiens
gccgagcagccgccagccccacggacggacgccagccccacaacaccaagagaaaccaccaagagccag

SEQ ID NO: 43802 - RNA, 68 nt, Homo sapiens
agcgggagaacaacacccgggcagcgcaagacagcggagagaacccccaaaaccagacgagagacaga

SEQ ID NO: 43803 - RNA, 75 nt, Homo sapiens
aaacaacgccaagaacagccacacaaacaggaaagaggggccccagaaccagcgccggggacaccgccccacgaa

SEQ ID NO: 43804 - RNA, 61 nt, Homo sapiens
aggacgagaagaagagaagagaggagaggagaagagagggaagacggccgaggagcgggaa

SEQ ID NO: 43805 - RNA, 75 nt, Homo sapiens
gcaggcgaagcgagcccggggaggaggagaaagaagacagcgcacgaaacacacaaagaaccaccaccgggagga

SEQ ID NO: 43806 - RNA, 79 nt, Homo sapiens
gggaggggcaggaggaaggcaggaccggagaggcgcccaccgccagcagacagagagaagggggaggacgcagccagaa

SEQ ID NO: 43807 - RNA, 83 nt, Homo sapiens
cgacccggaccaccgggcgcggcgccccagccgggagagccagggagagcaccagacgaagagggcaggaagacaccaggaag

SEQ ID NO: 43808 - RNA, 75 nt, Homo sapiens
gcaaaacagaaggacagcaaaacgcagaggggagcaggcaacacagcgagcaccgcgggagaaggcacagggcag

SEQ ID NO: 43809 - RNA, 77 nt, Homo sapiens
cgggaagcgccggggaagcagaagcacagggcacgccaacccaggaaggagagaaaaggcgaaccgaaagagaaaac

SEQ ID NO: 43810 - RNA, 81 nt, Homo sapiens
ccagcgccgcagcacgcggaccagggcagcagaagaagccgaaagacagacgagcgccccaggcacgaggggaacgggggc

SEQ ID NO: 43811 - RNA, 88 nt, Homo sapiens
ggagccgccacccagagcgcacggcgacgccccaggggaaaacccccgggaccagggggcgaggaagagacaggcgggggagaagaag

SEQ ID NO: 43812 - RNA, 81 nt, Homo sapiens
gcggccacgaccaccaggcgccagaggaagaagccccccagagggcggccgaaacagaagagaaaagcaaaagagaagcga

SEQ ID NO: 43813 - RNA, 87 nt, Homo sapiens
gcgcacggagggccgccgccagggaaggagccaccgcccccgcccgaccaggccgagggaccgaggaaggccccacgcagcgagcag

SEQ ID NO: 43814 - RNA, 72 nt, Homo sapiens
ccagaaacaaagacaggcaaaaagccacaaggcaaacaagacgaagccaggaagaagcagcggagaccgggg

SEQ ID NO: 43815 - RNA, 58 nt, Homo sapiens
gaacaagaaacgcacagagaccaaacaggccaccagagcagagaacgcaaggagacag

SEQ ID NO: 43816 - RNA, 76 nt, Homo sapiens
ggccaccaagcaaagaagcgcaggcaggagacaagaggaaaagggagaaccaacaaagagggcaccacgaaacaaa

SEQ ID NO: 43817 - RNA, 88 nt, Homo sapiens
gccgggcagaggaccggaggccgggaagccaacgaccacacgcacccgggcgcgccaggcacagccaagagcggaccggcagcggcca

SEQ ID NO: 43818 - RNA, 48 nt, Homo sapiens
cggccaggccaaccgaagcccagaaccgggacaacccagcaaacaggc

SEQ ID NO: 43819 - RNA, 76 nt, Homo sapiens
agaaccaaagaaacaaggaacagagaaagcaagcgaacaaaagagacagggaaacaagagaaaaacaggacaagaa

SEQ ID NO: 43820 - RNA, 37 nt, Homo sapiens
agagcaacgccaagcaccagggagaagaaccaacaac

SEQ ID NO: 43821 - RNA, 80 nt, Homo sapiens
ccacccccaagagagccgcagccgccagggacgggggccaccggacaggaccgaaggagaagaaggagaaggggaggaga

SEQ ID NO: 43822 - RNA, 78 nt, Homo sapiens
ggcaagaaaggggaaccccggagaaaaggccaagaaggcagaaaaagcggggaaggggggcaaaaaaaagaagcaagc

SEQ ID NO: 43823 - RNA, 73 nt, Homo sapiens
cgacgcgccccacggagccaggccccgaaaccgcggcggggcagagcaacaccgacgggaccagcaccgccga

SEQ ID NO: 43824 - RNA, 75 nt, Homo sapiens
cggaccaaccaggggaggccggggaagggccgggcaggcacaagggaaaagcacagggccaggaagcagagggac

SEQ ID NO: 43825 - RNA, 72 nt, Homo sapiens
gaaggcccagcaaagagaagaagaaaacagggccagacgggaagaaacgagaagggaccaggggcggaagcg

SEQ ID NO: 43826 - RNA, 81 nt, Homo sapiens
cccaggccgcccaccccccaagagccagccgccccagccccccagccccccccggccaagcgccccaccccgggaacacca

SEQ ID NO: 43827 - RNA, 82 nt, Homo sapiens
gacacaaaaggaaaaaaaaaaagaagaagaagaaaagcaagaacgaaaggagaacagacacaggaacgccacaagaaacaac

SEQ ID NO: 43828 - RNA, 54 nt, Homo sapiens
ccgagcggacccggaccggggggggaagagcaggaggacaccggggacggggca

SEQ ID NO: 43829 - RNA, 59 nt, Homo sapiens
ggccaagagggacccacccggcgaagacgaccccgacgcaggccaggagccgcggacag

SEQ ID NO: 43830 - RNA, 78 nt, Homo sapiens
cgccaggagaaaaagcacacaaccccgggccgccccccaccagaagagccagacagacccacgcccgcccaaccaaac

SEQ ID NO: 43831 - RNA, 80 nt, Homo sapiens
agaaccaccccaccccaccaagcaggagcaggagagcaaaaccgaacccaccgacaggaaacgaaaagagacagcagggc

SEQ ID NO: 43832 - RNA, 67 nt, Homo sapiens
ggggcgcccggcgccggccgagaaggcagaggcgggaagaaaaggagacaacacaaaacgccacagg

SEQ ID NO: 43833 - RNA, 71 nt, Homo sapiens
cccacggacagaaggggacggagagaagccaagcaaaccggagagaacaccagcaggaggagagaagaccc

SEQ ID NO: 43834 - RNA, 71 nt, Homo sapiens
agccgacggagcaggcagcagcccaggaggcgcaaacggaccaggggccccccgacagcagggccgacgcc

SEQ ID NO: 43835 - RNA, 68 nt, Homo sapiens
cgggagagaggacccccccccccccccaaggacaccgcaccagccagacagcccagaggcgaaaaaac

SEQ ID NO: 43836 - RNA, 69 nt, Homo sapiens
ccacacaccccacaggaaggcacacagcagcaagagcccaaacgcgcgcagcgcgcggaaggggagacc

SEQ ID NO: 43837 - RNA, 67 nt, Homo sapiens
gcgcaggaaaaagccccgcagggaccccgacggagagacaaagaagacggagggggggccagccacc

SEQ ID NO: 43838 - RNA, 78 nt, Homo sapiens
agaggagcagcaggcacagcacgggcagagccagaaggggcagaccaacaccacccagcaaaaaccccgacgaacgcg

SEQ ID NO: 43839 - RNA, 78 nt, Homo sapiens
gcgccagcgcggggggccgcccgcggcccgagggacggccagccgcgcggggaccaaaagccagccccacggaggaac

SEQ ID NO: 43840 - RNA, 68 nt, Homo sapiens
acaccgggcaaccacggggcggcgccggccccaagagccacgacacgaccggaaaagaaaaaacacac

SEQ ID NO: 43841 - RNA, 76 nt, Homo sapiens
gaaaacggggcccgggccgggcggcgcccacagcgagacgaaacgggcgccccgggcaaggggaaagggaaggacc

SEQ ID NO: 43842 - RNA, 31 nt, Homo sapiens
cccagggcggggcccgaggagcagcaccaac

SEQ ID NO: 43843 - RNA, 71 nt, Homo sapiens
gggagcgagaccggagcgccgcggccacggccccccgccagaagccagagaggagccgcgcacccaggcgg

SEQ ID NO: 43844 - RNA, 62 nt, Homo sapiens
gaggagacagagcaaaccgcagcccggcaacgcaaaccaaagccgcaaccaggaggaaggaa

SEQ ID NO: 43845 - RNA, 70 nt, Homo sapiens
gcaacaacacaaccggacacagccgaccgccgaagagggccacggggcgggacagggccccggcccagcc

SEQ ID NO: 43846 - RNA, 77 nt, Homo sapiens
ccaaccaaaaccggaagggcggaggaggagagccggcagaaaagggagaagagagggacagaacgaaaggaagaaac

SEQ ID NO: 43847 - RNA, 77 nt, Homo sapiens
cccacagagagcccggcagcgacaagcccagaacccacaggagggccagaggacaaagcacggcggaagagaagcca

SEQ ID NO: 43848 - RNA, 81 nt, Homo sapiens
acgggcgagagcccacagcagaggacgcgccccaccgccggagagaccagcgcaaagagagagcacaaggagagaacaggg

SEQ ID NO: 43849 - RNA, 73 nt, Homo sapiens
ggggcgggcgaaagcagagaccaaggggaacgcccccaagcccaaggaaacacggaggccccgcagaagaaga

SEQ ID NO: 43850 - RNA, 69 nt, Homo sapiens
gggcgcgagcagcacaaacgaagagggcaaagagaaacgcaaaacgcgagagccgcgaccaggcaaaaa

SEQ ID NO: 43851 - RNA, 79 nt, Homo sapiens
agcgcaggaggacgaccggggggcaggaggcacccggggcaggggaggggcgaccccggggcccggccagcacgaccga

SEQ ID NO: 43852 - RNA, 77 nt, Homo sapiens
ccggacggacaacaccggggagcgcggggcagaagcaggcacggcagacccacaacagcacggagacgcaaagagag

SEQ ID NO: 43853 - RNA, 60 nt, Homo sapiens
agagaggagggagaacacagaaaccggccccagaaagggcaagcagaaaccgggaagggg

SEQ ID NO: 43854 - RNA, 65 nt, Homo sapiens
aaaccaacgagagggaggaacagcaccccccaaggacggcgaagacccaacagccgggaaaaaac

SEQ ID NO: 43855 - RNA, 70 nt, Homo sapiens
aaaacaaaagaaaagaagaaaggcagaacaggaaaggccacagacaacagcagcgccgagaaaccggcag

SEQ ID NO: 43856 - RNA, 43 nt, Homo sapiens
acccaagcccgcgagcaggagaggaaacgaggaaagaaccaag

SEQ ID NO: 43857 - RNA, 89 nt, Homo sapiens
cagacaggacccaaagcggaaaagggcggaaagaacgcaggcggggaaccagcacccccacccccggccacaggcagagccgcccgcag

SEQ ID NO: 43858 - RNA, 63 nt, Homo sapiens
gcccgccgaacccgaaaggagaaagggaaccaacaaggacaccaaggcggccaacagcccaga

SEQ ID NO: 43859 - RNA, 81 nt, Homo sapiens
ggagcagggccggcggggcacgcaggccgcccacccgcccaagaccaccccccccccgcaggccgacggcaggaggacagc

SEQ ID NO: 43860 - RNA, 64 nt, Homo sapiens
caagaccacacccgacaccgcaaaccgcgggaacacaaaagcagggaaccaagccccaggcaga

SEQ ID NO: 43861 - RNA, 83 nt, Homo sapiens
gcagagagcccccagggagggccaccaagggacaaaaagaaccaagagggagacaagggaaaaggaagacaaaaaacacaagg

SEQ ID NO: 43862 - RNA, 37 nt, Homo sapiens
ggacggaccccaacacgagacaaccccccaggcgccc

SEQ ID NO: 43863 - RNA, 79 nt, Homo sapiens
ccgccgccgccggcccggacaggccgccaacagacagggcggaggagggagcccagccggagacggggccggggacccg

SEQ ID NO: 43864 - RNA, 75 nt, Homo sapiens
gcaacaagacaaagaaaccagccgagcaaccaaaccaaaggacccgagccccaaagacagaaaagccccgagacg

SEQ ID NO: 43865 - RNA, 83 nt, Homo sapiens
gagaagcagcggcaggaggagagagaagaagaaggaggccgcggccagaaacccaagaaaaagcgaaggaacgcagagcgaag

SEQ ID NO: 43866 - RNA, 66 nt, Homo sapiens
gcgccggcggagaaaaaggacacagcaggggccagacaaccagacccgggaggcaagagacgagga

SEQ ID NO: 43867 - RNA, 81 nt, Homo sapiens
gcggcccccggcccgaaggaggaaaggggcccggagcgggcccggccccgggcccgaggcccccggaccccagggccccgg

SEQ ID NO: 43868 - RNA, 104 nt, Homo sapiens
ggacaccaagcccaagagaaccgcaaggagagaagcagacccccagcccaggcacaagaaaagggcagggacacagcgaagaagaagcgccagcaaaggacccc

SEQ ID NO: 43869 - RNA, 80 nt, Homo sapiens
ggccagaagcggagagagcggagcagaagagcgcccccgggacgcaaggggggccaccacagcaacaggcacagaaaggc

SEQ ID NO: 43870 - RNA, 74 nt, Homo sapiens
ccccagaccgaccgcagacgagaacgggagaagacccgggccaaacccaagcgaaaccacggcaggccacccgg

SEQ ID NO: 43871 - RNA, 78 nt, Homo sapiens
gggaccacaagacaacgcggagcggcgaagagcaaccagacaaggccagacccaccgcgagacgcaacggaaggggga

SEQ ID NO: 43872 - RNA, 86 nt, Homo sapiens
aaggccaacagagagaagagaccaggggcgaggaagcgccccgaaacccccagaagacacgccgcagaggcccaccacgcgaggcc

SEQ ID NO: 43873 - RNA, 62 nt, Homo sapiens
ggccgagcacgggaagacgggggcaaccggacagagaagcccaagagaagcaggaggagcag

SEQ ID NO: 43874 - RNA, 63 nt, Homo sapiens
gaagcaagaaaaaacaggaccaaggagggacacaaacgagccagcgccaacgaaaaaaaaaac

SEQ ID NO: 43875 - RNA, 75 nt, Homo sapiens
cagcgcccagcagcaggcacaagacacgggagaggaagagcaagcggacaggggaacccaccagccggacccagg

SEQ ID NO: 43876 - RNA, 74 nt, Homo sapiens
gggcgccagaaggaagaggcggacggaggagcaggcgagaagagaaggacgacacgggcagaaacgaaaccagg

SEQ ID NO: 43877 - RNA, 81 nt, Homo sapiens
agagggagagacgccgaacgacgccccgcacaccggagcgcccagcgcgaggaggaagggagagaccagcagccgcgaaac

SEQ ID NO: 43878 - RNA, 69 nt, Homo sapiens
gcgaacggggccagaccagacaccgaaaacgagaaacgaaagagacacgggggcacaaccgagcccggg

SEQ ID NO: 43879 - RNA, 61 nt, Homo sapiens
gcaagaccagacgggaacgggagacaagcgcagcgaggaagcagaacggaaaaagcaaaag

SEQ ID NO: 43880 - RNA, 67 nt, Homo sapiens
aacccggccccagagcggcggaggacggaccaggagaagacagaggagccagaccaagagacagcac

SEQ ID NO: 43881 - RNA, 78 nt, Homo sapiens
caaagacaaggcaaggaccagcccgccagcaaaggggggggcggaggacgccaccccgggcacccggccacacccccc

SEQ ID NO: 43882 - RNA, 78 nt, Homo sapiens
ggagacggggcagacaacggagcccggggaagaacaggagccaggagacagccagagccaaggaagcgagggaaaaag

SEQ ID NO: 43883 - RNA, 77 nt, Homo sapiens
gggaaggccggaggcgaagaagacgaacaacagacagcaacagcaggggcacccagcagggccagcagcagcacaga

SEQ ID NO: 43884 - RNA, 76 nt, Homo sapiens
accacaggcgggccgcaaggagcggacccaccggccaccggcggagcgagggcccggcaggaaccggaacaaccca

SEQ ID NO: 43885 - RNA, 52 nt, Homo sapiens
aggcagcgcggggcagcgcgagccgggaaggacagaaagcgggacacaagca

SEQ ID NO: 43886 - RNA, 63 nt, Homo sapiens
agaaggaccaagaaccagaggaaacgagcccaggcgaacgacacacccaaagaaaaggagaca

SEQ ID NO: 43887 - RNA, 71 nt, Homo sapiens
acaaacagagccaaaaacgagaaggggaaaaaacacaggacacgcggcagagagccggcagaacacagagg

SEQ ID NO: 43888 - RNA, 53 nt, Homo sapiens
agaaggaccaagaaccaggcccagggggcaaagaggggggaacccaaaagaca

SEQ ID NO: 43889 - RNA, 50 nt, Homo sapiens
acgcagagggcggagcggcaggcacaaccaaggccggcccccgcgcccag

SEQ ID NO: 43890 - RNA, 72 nt, Homo sapiens
gccccaccgcccccacaggcagcgcgaaggaaggagaagggaacacgggcgaggaacgcacgaggagcagca

SEQ ID NO: 43891 - RNA, 66 nt, Homo sapiens
caaaagccggggcaacacaagaacagaagaccagcacagccagaggaagagccgaagcacaaaggc

SEQ ID NO: 43892 - RNA, 57 nt, Homo sapiens
gaccaggcaggaccaggcgcacgaagggacagaggcaccagaagcccccagcgggaa

SEQ ID NO: 43893 - RNA, 57 nt, Homo sapiens
cggcggcggcgagcggccggggcaggcacaccggaaaaagacgagaaggaaaacgcc

SEQ ID NO: 43894 - RNA, 67 nt, Homo sapiens
agggccaaagaagggagagagccagaagaaccgaaaccgcagaggggggccccgccggaggaagcgg

SEQ ID NO: 43895 - RNA, 72 nt, Homo sapiens
caaagaaagagacaaaaccaagacccccagacccagcggaaacagcaagagagaccaaagagcaagcacagg

SEQ ID NO: 43896 - RNA, 80 nt, Homo sapiens
caccccaacaacaccgcgagacgaggcccgcagagggcagaggacgaaagcacgccccgcaggcaaaaaaaaagccggag

SEQ ID NO: 43897 - RNA, 75 nt, Homo sapiens
ggccgaaggcaaacgaagacccgcgggcgccccaggaaagcccccagcagggcgcagggggagagaagacaggag

SEQ ID NO: 43898 - RNA, 70 nt, Homo sapiens
gcgccccccgagcggggggacgcgccaggcacagcagcaggaaccaggaaaaaggcgcaaagcgcagaga

SEQ ID NO: 43899 - RNA, 82 nt, Homo sapiens
agaaaaaagccaggcccaccagcagaaaggaccagcccaaaaccaggcccaaggaacgagagaggaagcaaagaagagccag

SEQ ID NO: 43900 - RNA, 50 nt, Homo sapiens
caaccagcacagaaagcaagcccaagccacagaccaaaaagagaaaggga

SEQ ID NO: 43901 - RNA, 73 nt, Homo sapiens
gagacagccagcgcacgaggacaggagggaagcagggcagggcgcagaggaggccccagaaggcccgcgcagg

SEQ ID NO: 43902 - RNA, 74 nt, Homo sapiens
acacgcaaaacccaaggaaggaggaggggaaaccccacacaaggcagccgccgggagccagaagcacaggcccg

SEQ ID NO: 43903 - RNA, 76 nt, Homo sapiens
gaaaagcgcagcgagcggagccgccggagccaagcgaaagacagaggcccagccgaaagaggggaggcacgacgac

SEQ ID NO: 43904 - RNA, 79 nt, Homo sapiens
gcacagcacaggaccagagcagacaagaaggaagaggaaggccgaagagaggcgacgaacggaaaaaaacaagggaaaa

SEQ ID NO: 43905 - RNA, 74 nt, Homo sapiens
ggaaagaaaaggagagcaccacgaggccggcccagggagaacgcaaaaccaccacccccacaaaaaacgcaggg

SEQ ID NO: 43906 - RNA, 31 nt, Homo sapiens
cagcaggaagagggagcccagaggcccggaa

SEQ ID NO: 43907 - RNA, 76 nt, Homo sapiens
gaacccaaggggaaaaagacaccaagccaggcgcaaggggcgacagcaagaaggagccagcacagaggcaaaagaa

SEQ ID NO: 43908 - RNA, 73 nt, Homo sapiens
aacccaaaaaccagaggaggacagccacccccggaacaaccacggagccgaagaggaagagcgaagacaagag

SEQ ID NO: 43909 - RNA, 79 nt, Homo sapiens
aaagacacaagcaaaaacaaagagaagaaacaaccccaggaaccaggagccgacaacaacccgacgcaaggcagccaca

SEQ ID NO: 43910 - RNA, 100 nt, Homo sapiens
gacaaaccagcgaaggagcacccacccaggaacccgccaccagaagaccgaaggagaagaaggagaaggggaggagaaggcaagccggaaagagcgaaag

SEQ ID NO: 43911 - RNA, 80 nt, Homo sapiens
ccgcccaacacaaagcagggaggcagcgccgacaacaccgacacagaccaacaaggggccgcagccggccaggggacccg

SEQ ID NO: 43912 - RNA, 53 nt, Homo sapiens
ccaacagagaaaggaaagccaaaaaggagaaccccagaacagagagaagggcg

SEQ ID NO: 43913 - RNA, 63 nt, Homo sapiens
cagcaaagagggccacggaaccaccagggcaccaccaccagaagacggagcagcgggaaagaa

SEQ ID NO: 43914 - RNA, 73 nt, Homo sapiens
ggacaagccaacaggccacggcgcaagagaaacagccaacccgcaacaacggcagaagaaaagcccggaaaac

SEQ ID NO: 43915 - RNA, 81 nt, Homo sapiens
gcagacccaagagcagcggaaaagaccagcacagagagggacggcaacgcaaagagacccgggaagacggaccacaccagg

SEQ ID NO: 43916 - RNA, 72 nt, Homo sapiens
aaccaaaacgcaacagaaacaacagggcacagaacgaacagagcagcgaagaacaccggacagaggaagacg

SEQ ID NO: 43917 - RNA, 63 nt, Homo sapiens
caccaggaagcccagaaggaggaggagcgcgaagaagaccacagcccaggagcggagaccacg

SEQ ID NO: 43918 - RNA, 63 nt, Homo sapiens
gaagacagggaggagggagaacacagaaacgcccggggcccgagggcaggacagcaggcaccg

SEQ ID NO: 43919 - RNA, 83 nt, Homo sapiens
ggcgcccagcacgaccccgggcagcccaacgagaaccggagggcaccggaggaccacagagcagccaagagcaaacgaaggca

SEQ ID NO: 43920 - RNA, 82 nt, Homo sapiens
agagaagaaggccaacagggcaaccaggccggaggacaagaggaaacgccagcggaggaaaaagaccacacccggaaaaggc

SEQ ID NO: 43921 - RNA, 56 nt, Homo sapiens
cgaaacgcacgagaaggggcacagaacgaagaggagcaggaaacagagaagagaca

SEQ ID NO: 43922 - RNA, 39 nt, Homo sapiens
accaccccacccgccggcaccacacccccaaggcaaggg

SEQ ID NO: 43923 - RNA, 80 nt, Homo sapiens
gcaccccaagacagaaacgggggccaccagccagaagaaggggcagaccaacaccacccagcaaaaaccccgacgaacgc

SEQ ID NO: 43924 - RNA, 74 nt, Homo sapiens
aaccggcgagacaacagaggacagagcgggagccaccagcgccaaagggaagccaggagcccgggggcacgggg

SEQ ID NO: 43925 - RNA, 74 nt, Homo sapiens
agccacggcagcaggcagccccaaagaccccccaagccacgcgagaggggcaaggaggagccccggaggaggag

SEQ ID NO: 43926 - RNA, 81 nt, Homo sapiens
ggaagcggaagagcaacagcgccggcaccgcgagcacccaaagcaacggccgacaggcgccccgcgggaagcggcagagcc

SEQ ID NO: 43927 - RNA, 79 nt, Homo sapiens
acaggccagagcagagacggcggaaacccgcgccgagcccagcgagcgacaacccccagacaggaacggccgaacacag

SEQ ID NO: 43928 - RNA, 78 nt, Homo sapiens
ggaaaacaccacagacaaccaaggaaccagaaaaccaggagaacggaacaaaaaccaagggaagccggagggagggag

SEQ ID NO: 43929 - RNA, 79 nt, Homo sapiens
gaggaccggagcagacgcccgggacccggaagcgccgaacaaaaccggaggcccgggccacacgaaggaaacaggaacc

SEQ ID NO: 43930 - RNA, 70 nt, Homo sapiens
aagaaagagagaccccacaaaacaagaaagcaacccgaagaagggcaacagggcgcggagggccaacaga

SEQ ID NO: 43931 - RNA, 84 nt, Homo sapiens
cgaaaggaagcaagcagcagaagagccaaggaaaaacagcaagaacccaaaagggaaagacgccacggagaccaaaaagaagag

SEQ ID NO: 43932 - RNA, 82 nt, Homo sapiens
gcagcagcgccaacacaccacgccagcgcaagcggcggaagccgggcagaaaacaaggaagaccccaagcagcagcaaaaag

SEQ ID NO: 43933 - RNA, 38 nt, Homo sapiens
cccaaagagcaacaacagcggaccgcgaagagagacac

SEQ ID NO: 43934 - RNA, 83 nt, Homo sapiens
ggagaagcaacaggcaggaggaggggagacacaaggagcccccgcaagggagagcgcacccaggaacgagcgcgagaagaacc

SEQ ID NO: 43935 - RNA, 49 nt, Homo sapiens
accacaacacccaggcgaaggcggacagcccgacacgggaagagaagag

SEQ ID NO: 43936 - RNA, 75 nt, Homo sapiens
gcgcacccgagccgcaaggcagacgagaccggagaaggaaagacaagccgagagagggaggcccgaggaagagcg

SEQ ID NO: 43937 - RNA, 99 nt, Homo sapiens
gcggcggcggcggccgaacaagaagcccgaagccgaccgggcaaccacaagccgcagaaagcaacaaagcgagagcacaagaaaacagccccgagcacc

SEQ ID NO: 43938 - RNA, 78 nt, Homo sapiens
cacggaccgaggaagccccgcagcagcagcccaaaggaagacgaggagcgccaggaaagaggcagagacgaagcagaa

SEQ ID NO: 43939 - RNA, 61 nt, Homo sapiens
ccggcggccccagaacaaaggacagagggggaacaggcagcacacccagaggaacacagag

SEQ ID NO: 43940 - RNA, 80 nt, Homo sapiens
cggcaaaccccaaaaacagaaggggaaaagcaccaagcgccacgcagagccccgccaggaagacacgccggggaacgaag

SEQ ID NO: 43941 - RNA, 79 nt, Homo sapiens
cgcgcgggacggagccagcgggaaggagagcccccgggaggagaagcgcagaagcgcacaggagacaaggcccaaaggc

SEQ ID NO: 43942 - RNA, 78 nt, Homo sapiens
gaggcgcccccagcacaaacgaccgccagagccacacgcggcagccgaccagccccaccccccaacaacaagggcacg

SEQ ID NO: 43943 - RNA, 72 nt, Homo sapiens
aaaagggcaagaagccagaaggggagaaaacgcaggccacaaagacaggaccaagaggaaaaaacaaccgcc

SEQ ID NO: 43944 - RNA, 77 nt, Homo sapiens
gagaaaagagagcaggagcgaaccagaaaccagcacagacggacgaaggggggcagaaagaagaggaggacaacaag

SEQ ID NO: 43945 - RNA, 79 nt, Homo sapiens
aggcgggcagaacacggagccagacagacacagcacagcagccacgaagagcaaagcaagccgaaaaaccgaaacaaaa

SEQ ID NO: 43946 - RNA, 65 nt, Homo sapiens
gacgcggcaagcagcggaagaggacgacgcgacacaaacaaaagaaacaaccacagggaggaacc

SEQ ID NO: 43947 - RNA, 79 nt, Homo sapiens
cacgagacacccccgaccgcagcgcgcgcggcccacggcgggcgcgcccagagggcggaggaaggcaaacagggggcac

SEQ ID NO: 43948 - RNA, 75 nt, Homo sapiens
caacccccagacgcaagccaaggacgaaccaagagcgggcacccacacccaaagccaggagaagcccagcaccgg

SEQ ID NO: 43949 - RNA, 84 nt, Homo sapiens
cgggacaagcgcgacgcccggcgcgagccaagcgcgcgccggggagaaccgccagcgacgggaaggcaggacccacgcacgagc

SEQ ID NO: 43950 - RNA, 77 nt, Homo sapiens
gaaaaaaaggcaaacaagcggaaagcacgaacgcacaggaccggaacggaaagagggccacggaagaagcagacgca

SEQ ID NO: 43951 - RNA, 73 nt, Homo sapiens
cgccgaccacagcacacgaaacggaggcaccaacccccacacgcccggggaaccagcgggaacaagccaagac

SEQ ID NO: 43952 - RNA, 78 nt, Homo sapiens
gacagccacccgagaacacagcgagggcagggcgggccccggaggcgcagccagagaaacagcaaaaaaccaacaaaa

SEQ ID NO: 43953 - RNA, 50 nt, Homo sapiens
ggaccaccccgaagaaagcacagaaggaggaagcaccggagcaaaacggg

SEQ ID NO: 43954 - RNA, 68 nt, Homo sapiens
gcagcagaagcccggacccaccaccacggaggccaccagacgagggggagccagaggacccaaaccaa

SEQ ID NO: 43955 - RNA, 77 nt, Homo sapiens
cacagagggagagcagggggagaaaggggggcaaaccgagggacacccagcgagcacaagcacaaggcggacagcaa

SEQ ID NO: 43956 - RNA, 85 nt, Homo sapiens
aaagagggaggccagccccggcacagaggcaccgaccgcaccggaggagacgggcccagaaaacacacaggaggaccagaaaagg

SEQ ID NO: 43957 - RNA, 118 nt, Homo sapiens
accgcgagccgcccccaggccgcgccgagcccgccgcgcgggcccgcccgacgcggaagaaccaacgccagagagaacaggacaggggacggaaccccaccccagaccgggaaacgcc

SEQ ID NO: 43958 - RNA, 74 nt, Homo sapiens
gccgggcacaaacacccgcagacagaacccacgaggcaccagcaacgagccgccagggagaaaagacgaggaag

SEQ ID NO: 43959 - RNA, 77 nt, Homo sapiens
gcaacccaccagacaccagccggccaggcacacagaaggccaaaacccgcaaacacgagagaaaagaaagagagacg

SEQ ID NO: 43960 - RNA, 87 nt, Homo sapiens
aggggacaggaaagcccacaaacaggaccggaacaccagggagcgcgggcgcagcggcgcgagggcggcccgcagaagagcacagaa

SEQ ID NO: 43961 - RNA, 82 nt, Homo sapiens
gacaacagcaaaagaccacacagaccagagggagaggcgcaggccagagccaggacgccccaaggcccgcagggaggggagc

SEQ ID NO: 43962 - RNA, 80 nt, Homo sapiens
gacacgaaaacgcaaagccaggaacccaggacaaggccccgggaggagccgggacacagccagcgcccaacaggacccac

SEQ ID NO: 43963 - RNA, 70 nt, Homo sapiens
gccagagaagaacacagagagagaagccaggagccaccaacaccaaaaagaggaaacggaacgaaacggc

SEQ ID NO: 43964 - RNA, 74 nt, Homo sapiens
acgaaaacggaaacagagcccagcccagaaaagcacgaaggaaagccaaagaaggagccagaaaggaggacaca

SEQ ID NO: 43965 - RNA, 71 nt, Homo sapiens
cggcagacgggaccacgaggcaacgccccagggaccagaccccacaagaaaacacacaaccacaggcccaa

SEQ ID NO: 43966 - RNA, 70 nt, Homo sapiens
acccgaccgggccgaccacggcgaaggcgccaccggcgagaagacgcggggacacaccggagggaaccac

SEQ ID NO: 43967 - RNA, 36 nt, Homo sapiens
gcacagcaacaaaaaaggacaacagaacagcgggga

SEQ ID NO: 43968 - RNA, 77 nt, Homo sapiens
gaaaacggcaaggaagcaccaaggagaacagaagcgcgccaggcgccagcaagaaggcagggaggaacgccacaaag

SEQ ID NO: 43969 - RNA, 111 nt, Homo sapiens
ccggccaccagcccgccggaccccacccggccgcacccaaagagaacgcaggggccagaccaccgccccaaggagacccgcggaacagcgccccgcacacacaaccccacc

SEQ ID NO: 43970 - RNA, 82 nt, Homo sapiens
gagagaaagggaaggaaaagaccaagacccaccccaaagacggagcacaggcacggaagcagccgaccagaaaggccaaagc

SEQ ID NO: 43971 - RNA, 76 nt, Homo sapiens
aagaggagacagagggccgagaaggacaggacaggacacaggaagcgccagaccaggccacgcagaaaaggaacca

SEQ ID NO: 43972 - RNA, 84 nt, Homo sapiens
aagaagggcgcaaacgaaccgaaaaggccaagacccagcgacagagcagcgacacaagggaacaagaccgaaaagaggacagga

SEQ ID NO: 43973 - RNA, 75 nt, Homo sapiens
gggccagagggagcaacaagggagagaaggaaccggacgacgaacacaggcccgccgccgggccccaaaagagca

SEQ ID NO: 43974 - RNA, 75 nt, Homo sapiens
aacgaaggaacggacgagcaccaaggaaagagagagaacaggggacagaaaaacccagagcccggaacaaacggg

SEQ ID NO: 43975 - RNA, 73 nt, Homo sapiens
cggacacccggagacgcaccaacccgaggcgcccacgcacagcacggaagaagaccgaggaaagcccgcagag

SEQ ID NO: 43976 - RNA, 77 nt, Homo sapiens
ggaaacccggagggaaccaagaagaagcagggggaaggagcaggagagagcacacaaccaagccagccccggaccag

SEQ ID NO: 43977 - RNA, 78 nt, Homo sapiens
gcagagaaggggacccaaacacaagggacacacgagagggcaaggccacccccggggaagccaggcagcagcgcagcc

SEQ ID NO: 43978 - RNA, 78 nt, Homo sapiens
gggagaaacaaagaccacaccaggagaaggccggaacaacgaaggggaggcaccaaggagaaccgcggacacaaacac

SEQ ID NO: 43979 - RNA, 54 nt, Homo sapiens
gacgcagggcgcccccggagaagagggcccgcaggccaggaagcgacagcgcca

SEQ ID NO: 43980 - RNA, 90 nt, Homo sapiens
ggcggcagcccagcgggacccagggagaaacaggggggcgagaagagaaacagcgcaagagaagccaggcaacagaaaaccagcaggaca

SEQ ID NO: 43981 - RNA, 61 nt, Homo sapiens
cccggccgccggagccaccgggcgcccagacaccgaacgacaaaacagcaccaacggagaa

SEQ ID NO: 43982 - RNA, 85 nt, Homo sapiens
gacgaaccagcacagagaggagccgaggccaggaggagaccagccgaacaacaaggacacagagccacaaaagaggaaacaaaca

SEQ ID NO: 43983 - RNA, 57 nt, Homo sapiens
gacccgacaacccaaccccaaggcaccagcaaggggccgggagaggaaggccccaag

SEQ ID NO: 43984 - RNA, 68 nt, Homo sapiens
cggaagcccgcggccggaggagccgcaggggcccggacaaggaggcgcaaggaagaagagacgccgcg

SEQ ID NO: 43985 - RNA, 63 nt, Homo sapiens
agccgccggacaaaagggaccccaccgaccccgaccgcaaccggggacggaaagagagccgca

SEQ ID NO: 43986 - RNA, 73 nt, Homo sapiens
cagaagaacggaaacagcaacacaaaggaaaccggaagagaagggaccgggaaaggggaaaggacgcgcagcg

SEQ ID NO: 43987 - RNA, 58 nt, Homo sapiens
agaccaacccggaaagagagggacgaacgggaacaggcggggcaggggcacccgcgcg

SEQ ID NO: 43988 - RNA, 73 nt, Homo sapiens
cgggcggaccaacaccaaacggaccggacgggagggcggaaggaaccagccagggccgaccaccaagagaagg

SEQ ID NO: 43989 - RNA, 83 nt, Homo sapiens
caggccgccacccagaccagaccaccaccagaaccacacccggagacccagacaacacagacacaggaaaaggggccccccca

SEQ ID NO: 43990 - RNA, 87 nt, Homo sapiens
aggaagcagcgaggagggcagcccccaccacccgcccaggccagccccagcagcaacagcagcacagaaacggaggccacagggagc

SEQ ID NO: 43991 - RNA, 82 nt, Homo sapiens
caagaagccacacgccaccagaaagcaacagcagagcaccccagagagaccggaccaaacaaccaggaagcgccaaagggca

SEQ ID NO: 43992 - RNA, 73 nt, Homo sapiens
ccggagcagcggcacagggccaggcccggggccggacccaagcccacgggacgaagccaaaggaccccaggca

SEQ ID NO: 43993 - RNA, 54 nt, Homo sapiens
ggacggcaaacggagccaggcacaagaaaaaacaacgcaaacgcccacacagca

SEQ ID NO: 43994 - RNA, 74 nt, Homo sapiens
cacagcaagaaaggaccagacaacgccaccgagccccgaccccacaaggaagggaagaagccacaacccaaaga

SEQ ID NO: 43995 - RNA, 62 nt, Homo sapiens
gcaacaacagaaccggacagaagcgcaaaaaacgcaggaaggaaggacaagaggagcagccc

SEQ ID NO: 43996 - RNA, 73 nt, Homo sapiens
agagaacgaagcgaccaaagcgcacggcagcgagagggcagccacacaaaagggaagcgggcagaaccgagaa

SEQ ID NO: 43997 - RNA, 56 nt, Homo sapiens
cccgcagaccgcagaaggccggagacaccagcaggcgccccgccagaggaacacca

SEQ ID NO: 43998 - RNA, 82 nt, Homo sapiens
gaaaagccacagggcagcagccaggaagacggcagccaacaaagacgcagaaccgcaacgggagaaggaaacacccaaacag

SEQ ID NO: 43999 - RNA, 74 nt, Homo sapiens
aggaagccgcgcaggagaccgggagcggcagaagacggcgacagccccgcgcagcagaccgggagaagacagga

SEQ ID NO: 44000 - RNA, 71 nt, Homo sapiens
cccacgaaccaaaagggacggacaaaggaacaggaccagggacagaagacgccccagggcaccgcgcccaa

SEQ ID NO: 44001 - RNA, 49 nt, Homo sapiens
cgggggggaaaaggcagccaggacagcgccaacgaacccgggaacgcga

SEQ ID NO: 44002 - RNA, 89 nt, Homo sapiens
cgcgcgacccggcggcgggacaggcgcgccccccccggcccaccaccagcggacccaaaaacaaggaacacccggcagcgaggcggcgg

SEQ ID NO: 44003 - RNA, 72 nt, Homo sapiens
cgagcagccagagcggaccggggcagaccaaacggcaagaccgggagcacccagacaaaccgaagggcagac

SEQ ID NO: 44004 - RNA, 72 nt, Homo sapiens
cgagcacgccacccccacccgcacaggaccaagggaagcgagaaacagagagacaggccaaagccccaaggc

SEQ ID NO: 44005 - RNA, 65 nt, Homo sapiens
aaaggcaaaggacacacagacagccagggagaggacccaaagggacgccgccggcaaaaaggcaa

SEQ ID NO: 44006 - RNA, 72 nt, Homo sapiens
ccccaccacggggcccggagcgcgacgccacgcaaccggaaagagcgccgcgaacgagcgaaaagccaggag

SEQ ID NO: 44007 - RNA, 79 nt, Homo sapiens
cccagccaaaccacgaggccacagcacaggcaaccaggaggcggcaggagacagacacagggcaagccgggcaggcaaa

SEQ ID NO: 44008 - RNA, 75 nt, Homo sapiens
caggaaaaggcccggccggagaccacccgcggccccacgcggggcggccaaaccgaaaagggagaacagaagaac

SEQ ID NO: 44009 - RNA, 81 nt, Homo sapiens
cagacccaaggaacacagcaagccggcaaaagcagaccggaaaacccaccggcaagaccacacccgaggggagcccaggac

SEQ ID NO: 44010 - RNA, 82 nt, Homo sapiens
caaccacgaagaaagaggagacacgagagaaaaggggaaaaaaccaagggagaagggaagaggccgagcaagacacaacgcg

SEQ ID NO: 44011 - RNA, 55 nt, Homo sapiens
ggaaaccaagacagcccaaacgccccacgaccaggacccaaagacaggaccacgc

SEQ ID NO: 44012 - RNA, 79 nt, Homo sapiens
agcccgcagaggaggcggcaggacagcccccaggaaacaggaacacgaaagaggaaaaacgcacaagaaaccgaagcca

SEQ ID NO: 44013 - RNA, 74 nt, Homo sapiens
cgcaaggaccacaggaagaaaccaggcacccagggcggacaaagaagggccaggacagaagcacggaaggaggg

SEQ ID NO: 44014 - RNA, 64 nt, Homo sapiens
cagcccgccgccgcacagggggccccacaccgaccggacgccccgggcacgaggggcggaagcc

SEQ ID NO: 44015 - RNA, 78 nt, Homo sapiens
agggcgcccaccgagggccaccacaagccagccagagcagaggaagaagaccaacccaacgcacagcacgagacccgc

SEQ ID NO: 44016 - RNA, 76 nt, Homo sapiens
acaagagaagcacaaaacagcagacccaagagcagcggaaaagaccagcacagaagagagaagaagcaaaccggga

SEQ ID NO: 44017 - RNA, 70 nt, Homo sapiens
aaggaaaggacagccgaacagaacaaaaagaagacgagaagccccggaacacagaggcgagagaccgaca

SEQ ID NO: 44018 - RNA, 70 nt, Homo sapiens
acacgaaggaggccacgcagcaaaccacaggagaggagacgccaaggggggcacgaacaccccacggaca

SEQ ID NO: 44019 - RNA, 72 nt, Homo sapiens
gggggccccccgccccgccccccggagccgcgagcacccaaggagggaagcccagaaaaagcgaacacagaa

SEQ ID NO: 44020 - RNA, 77 nt, Homo sapiens
cccagcgaggaagaggacaggagcggagagcaaccccgggggccaaggaaacggaagaccaacccagcaacacacgc

SEQ ID NO: 44021 - RNA, 86 nt, Homo sapiens
caaacgccacccagcagcgccccccaccgcaggagcggcacgggcgaggcgaggggaccaggaccccagggacagaagggcacgga

SEQ ID NO: 44022 - RNA, 69 nt, Homo sapiens
gcaacccagggacagccgcggacccagaaggccccaaccacggagccaggggaaccgcccaccaccacc

SEQ ID NO: 44023 - RNA, 76 nt, Homo sapiens
aacccgacaggaaggaaggaaccaagcacccaggaagacggaaagggccaggacccaccggccagcaccacgccac

SEQ ID NO: 44024 - RNA, 58 nt, Homo sapiens
ggcaaagaaaccgaagaaaacccggcaacaggcacagacaggcgagcggggacggcag

SEQ ID NO: 44025 - RNA, 77 nt, Homo sapiens
cgcccggaagcccgcggccggaggagccgcaggggcccggacaaggagggaggcaccgccccaacccccccccgccc

SEQ ID NO: 44026 - RNA, 50 nt, Homo sapiens
cggagcgacggggaggcgcggccaacggggccacaaggaacaagcgggaa

SEQ ID NO: 44027 - RNA, 62 nt, Homo sapiens
gaggccccggaccccagccaaagcggaggcaaagcggaaaggacaggggaaggccaaggcaa

SEQ ID NO: 44028 - RNA, 82 nt, Homo sapiens
gagaggaagacgagccgggaggaacggcccggaaacaggaggacgccgggagaagcacggaaagcaggggaggcaacggcag

SEQ ID NO: 44029 - RNA, 40 nt, Homo sapiens
aggccgaggcgggggacacgagaggacccgccgcgcccag

SEQ ID NO: 44030 - RNA, 82 nt, Homo sapiens
cccgggcagaagaacaccggcggcggccagcccgacacaggcgcaccagggcagcagccggcgcacacaacggcgaagacgg

SEQ ID NO: 44031 - RNA, 83 nt, Homo sapiens
ccgaagacacaccgccccggccgccccccagaccgggacagaaggcaagggacaaaggcacaggagacccgaggaacacggac

SEQ ID NO: 44032 - RNA, 70 nt, Homo sapiens
aacagcgaagcgaaggagccaccggagcaacacagggcgggggcagaaccgaagagccaagccgcaggaa

SEQ ID NO: 44033 - RNA, 81 nt, Homo sapiens
cgccgccgcgccgagcgaccgcgccgccaggcgcgggacaggccccaagcgcacccaagcggccacaccaaggcgggcagg

SEQ ID NO: 44034 - RNA, 73 nt, Homo sapiens
cccaaccacaaacaacacgaccaaggagggaacagggaaaagaccacagcgccaaagagaagagaaggagcca

SEQ ID NO: 44035 - RNA, 74 nt, Homo sapiens
cccggaccccaagaccaagcgcgccacgcgcggcgcgccggagcggaaagaagcggagcgggccgcggagacgc

SEQ ID NO: 44036 - RNA, 88 nt, Homo sapiens
gccccaccgaccgagcgggaggccacagcagccagccggcccgaggacaccgacaccagcagggcaccgcgccggcgcagcgccggcc

SEQ ID NO: 44037 - RNA, 52 nt, Homo sapiens
ccggcgcgagaacaacggaggaacaaaacacgaggggccgacgaaccggcgc

SEQ ID NO: 44038 - RNA, 70 nt, Homo sapiens
cagaagccggcgccagggcaaccgaacaaaggaccccccacccaaacaagcaacaagaacgagaaggcaa

SEQ ID NO: 44039 - RNA, 75 nt, Homo sapiens
ccacagggggcggcgggacaggagcagccaggagcgccaccgaacagaaggacaacacggccccagggccaccca

SEQ ID NO: 44040 - RNA, 69 nt, Homo sapiens
cagcggaggagaccgggaaaccgccgaagacgaaggagccagaaggcccggagaccgaaggccccgccg

SEQ ID NO: 44041 - RNA, 80 nt, Homo sapiens
caagaagaagacaaagaaagaaacaacgggccaacagcaggccaggaagaggacagaaggaagcaaggcaccaagaccgg

SEQ ID NO: 44042 - RNA, 57 nt, Homo sapiens
cacaccaaagacggagagaaacagaaagccacacacgaggaggggcacggaagcaaa

SEQ ID NO: 44043 - RNA, 63 nt, Homo sapiens
aagaacccgcggccaccacccaagcggagcccagggagaaagcggacggccacaccgagccac

SEQ ID NO: 44044 - RNA, 66 nt, Homo sapiens
caccgagcccaagcggaaagcacgcgcacagagagaaagggcgcaaaaagaaagaaaacaaaagcc

SEQ ID NO: 44045 - RNA, 63 nt, Homo sapiens
ggaaaggagcccgggcgcgggggcggcggcagggggcggagcgagggccaccgcgacgcagcc

SEQ ID NO: 44046 - RNA, 80 nt, Homo sapiens
gccagccgggagaagacaaaagccaacaggcagaccagagacagcgccacgcacccggggagcagaccacgccgggggac

SEQ ID NO: 44047 - RNA, 60 nt, Homo sapiens
cagaagagagacacaacaaggagcaacacaagcggaaagaaggaaccgccccgggcagag

SEQ ID NO: 44048 - RNA, 100 nt, Homo sapiens
gccgagcccggccgccagaccacagcacagccgggaaggggagccaccagccccccggaaggaaggacccgcgcgaaggaagaccgaagcaaacagcgag

SEQ ID NO: 44049 - RNA, 79 nt, Homo sapiens
gaggggagccgacggaggagcagaggcaaggggcaaaagcagggcaacggcccggccaaaggaagaggcggccccagca

SEQ ID NO: 44050 - RNA, 84 nt, Homo sapiens
cagaccgcggagaagggagacacaaggacagcagcgacggggcccgcaccccaggccgggaggagcccggagacccggacggaa

SEQ ID NO: 44051 - RNA, 56 nt, Homo sapiens
cggcaaaccaaaagagcaacgggaagagaaaaggccccaaagccggaaggagaccg

SEQ ID NO: 44052 - RNA, 51 nt, Homo sapiens
caaacagagaaacaagaggaacagaaaagaaccagaagaggggaagaaaag

SEQ ID NO: 44053 - RNA, 80 nt, Homo sapiens
ggggagccaaggaaacaggagcgaagcccagcgggccggacggggcggggggaacgaaaaccagacgagagacagaagac

SEQ ID NO: 44054 - RNA, 77 nt, Homo sapiens
gcgccgcggagaccccaccgccggcgcgggaaacgggcgaagcgacgagccgcgaggagcggaagccgcagaaggac

SEQ ID NO: 44055 - RNA, 73 nt, Homo sapiens
accaagccaggggccccaccaggagccagggaggacgaagaaagagggggacagacaacagagcaacgcaaca

SEQ ID NO: 44056 - RNA, 78 nt, Homo sapiens
gcgagccccacgccggggaggaggagccacggccggggacaggagaaaagagccggaagcaaaccccaggaccaaagc

SEQ ID NO: 44057 - RNA, 75 nt, Homo sapiens
ccggacgcaggaagacgcagccggccgcgcccccaagggaaaagaggacgaggcgcgaaaaggcaaaggcaagaa

SEQ ID NO: 44058 - RNA, 75 nt, Homo sapiens
cagacaagagaaacaggccgaaaagaaacccagagcaagagggcacagggagacagcgcaagagccgaacgacag

SEQ ID NO: 44059 - RNA, 64 nt, Homo sapiens
agggaaaggacagacccggccaggaacaccacgggaggccaaccgaagccggcacagaaaggga

SEQ ID NO: 44060 - RNA, 67 nt, Homo sapiens
acgcacacgacagcaacaagacacggagcaaggaggaaaacacacgggggcgaggaagagacaggcg

SEQ ID NO: 44061 - RNA, 69 nt, Homo sapiens
cggcaagacaacagggcagaacaagggcccgaccccccggaccagcccagcgaacggaaacgcccggag

SEQ ID NO: 44062 - RNA, 76 nt, Homo sapiens
gggaccccgcccagggcccagaggacccaacaccagaagacacacagggcgaaccacaacaagggggcccagaaaa

SEQ ID NO: 44063 - RNA, 75 nt, Homo sapiens
cccggggacccccgacgccaggcagcgcccccaaacgggcagcagagaagaaaggggaaaaacacgaaaaccaca

SEQ ID NO: 44064 - RNA, 76 nt, Homo sapiens
agccagcgcgacgcacaggagcacagaaacaagagcagaagccagcccaacaagacgcggagagcggccgggagga

SEQ ID NO: 44065 - RNA, 69 nt, Homo sapiens
gcgcaaaagccaggaaccagacagaaccaaggagagacacacggaacaagagacaaaaaaagaagcaca

SEQ ID NO: 44066 - RNA, 53 nt, Homo sapiens
ggaaaacgccggccgaacagcccacgccaagcgcagcaggggccacaaagaca

SEQ ID NO: 44067 - RNA, 63 nt, Homo sapiens
agagcaacgccgggacagcgcaagggacggcgagggggcggacggcacgaacaacgcgggccc

SEQ ID NO: 44068 - RNA, 39 nt, Homo sapiens
gacgaagcggaaggcagaaggaacgaagcaggaagggaa

SEQ ID NO: 44069 - RNA, 67 nt, Homo sapiens
agaagagcgcaggagcaaccaccagggacacaggagcagacaagggcccacaccaaagccaccagag

SEQ ID NO: 44070 - RNA, 72 nt, Homo sapiens
caccaacacgcacaagacggacgaaagccagagaaaaagcggagaaaaggcacggagaaccccagaggcgaa

SEQ ID NO: 44071 - RNA, 73 nt, Homo sapiens
gcaccaaagcacacagaggcgccacgccggccgacacgccagcggaaccagaccaacaggaacggccgaacac

SEQ ID NO: 44072 - RNA, 72 nt, Homo sapiens
cgcagaccggagacgcgacaggacgagagccaagaaaaccaggcccgacagcaagaaaaaaggagacggcgg

SEQ ID NO: 44073 - RNA, 82 nt, Homo sapiens
ccagcgccaacacccgcaggagcccaggggaccccccaccaccagcccgcccaggaggcccggaccccaacggagagcaccg

SEQ ID NO: 44074 - RNA, 82 nt, Homo sapiens
gaacaacacaaagcacaccgccaaacccaggccagagcacaggcaagacaaaccaagaaccagacggggccagagaagaagg

SEQ ID NO: 44075 - RNA, 38 nt, Homo sapiens
aagcgggcccccgaaaccagaagggccggagaagccac

SEQ ID NO: 44076 - RNA, 61 nt, Homo sapiens
agccagggcagccgaccggaccacagccagcagaacggagagaggagagccgagcaaagag

SEQ ID NO: 44077 - RNA, 82 nt, Homo sapiens
aggagcagagagagagagagagagagagagagagagaagacggagaccggagcagacccaaggcaccaagccacaaaacagg

SEQ ID NO: 44078 - RNA, 80 nt, Homo sapiens
gcagaagcacaagcagacggcagcggggccagggacaaacccagagacgagggcccgcccccgacgaccaggccacggca

SEQ ID NO: 44079 - RNA, 68 nt, Homo sapiens
caaccgcccaggaaggacaaagaaagccggacccacagccgccagagagaccgggccagggacggccc

SEQ ID NO: 44080 - RNA, 87 nt, Homo sapiens
gcgcccaaggaaaaaccaggcaaggcaaaaacaggacccagaaacgaaagaggaacaaccaggaagggaaaaggccgaggcacagcg

SEQ ID NO: 44081 - RNA, 82 nt, Homo sapiens
cgccgcggcagcaagaacagagagagaggggacagacgagagaacgagaagaaggaaccagcaaagcgccacgaagcacaag

SEQ ID NO: 44082 - RNA, 62 nt, Homo sapiens
caaacagaaccagaggagcacaggaaaagaggcagaggggcagcagaagaagccgaaagaca

SEQ ID NO: 44083 - RNA, 77 nt, Homo sapiens
caagcaggacgacgacgggaggaacgcagggagcccgggcaagaccagcccggcagcagggcgcagccccgcaccaa

SEQ ID NO: 44084 - RNA, 79 nt, Homo sapiens
cccggaggagcgaggcggccccggccccagaggaccccggggggaagcgaggcaggaagcccagcacgccgaaggccac

SEQ ID NO: 44085 - RNA, 78 nt, Homo sapiens
cacggaacagcgaggccagcaggagacggagccacggagcagcacacaaacagcgaacgcagacgaaacggagccaaa

SEQ ID NO: 44086 - RNA, 74 nt, Homo sapiens
ccaacccaagggccccagcccgggcccccaacgagggagaagaacccaacagaaaaaaaaaagcacaagaccag

SEQ ID NO: 44087 - RNA, 54 nt, Homo sapiens
aacccaaaagccgacaaccccagaaacaggcccgccgccccggggcacgccagg

SEQ ID NO: 44088 - RNA, 78 nt, Homo sapiens
ggggagcagacccccaaggcggacccagacccggagggcgggaggaagcgagccgcgcaccgcacacggacccgaggc

SEQ ID NO: 44089 - RNA, 72 nt, Homo sapiens
cacgagcagcaccgcaagccacgcagcgaggggacccagagaaaggaccagggccgcccagacacccccaag

SEQ ID NO: 44090 - RNA, 78 nt, Homo sapiens
gacaagacgagcccaccacggacagcaaacaggccacggcgagccccgaggacggggccgaccgaggccagaggacac

SEQ ID NO: 44091 - RNA, 78 nt, Homo sapiens
gagaacacagacaaaaacagggacaagcgagcccagaccggaaaccagagcagggaacacaagggcaagacagccggg

SEQ ID NO: 44092 - RNA, 54 nt, Homo sapiens
cggccacggcccccacaaccagggaaaaaagccagaaaaaacgaaaaagagaag

SEQ ID NO: 44093 - RNA, 78 nt, Homo sapiens
ggagaccccacggagcgggcgacgagcgacccgggagacacgacggcccagcggcacccgcgagaaaaaggaagagcc

SEQ ID NO: 44094 - RNA, 77 nt, Homo sapiens
gcacgggaacaaggccacaggcccaccacaaagagacagagaccagggcccgggcccgcggaggagcgccgcgccca

SEQ ID NO: 44095 - RNA, 74 nt, Homo sapiens
gacaaaggcgaagcacgaagccacaggcaaaggcaagagcaaacccacccgccggcgacacaccaaacgcagga

SEQ ID NO: 44096 - RNA, 79 nt, Homo sapiens
aaacaagaaaaagcaccagcaaaaacacaagggccagcgagacagaccgaaacccaaagaaaaggagcgcgcccaacga

SEQ ID NO: 44097 - RNA, 69 nt, Homo sapiens
ggcaacggaacagcagcgacaaagaggaggcgacaaagcgaaaggaaaggagggcaaagggccgcaaag

SEQ ID NO: 44098 - RNA, 83 nt, Homo sapiens
gggcagaagagcaagaccaaaagaacaggaacgggacaagcagcacacacacagacagagcaacgaacaccacagacgaaagc

SEQ ID NO: 44099 - RNA, 88 nt, Homo sapiens
gagccagagagggcccacacgacagaaggacgacgccggcgcgaacaaaaaggaaggcgaggagcggaaggcgagcggagcggcggag

SEQ ID NO: 44100 - RNA, 74 nt, Homo sapiens
cagggcgccaaagcgagagagggaagcgcccggccggaggcaggggaaagacaagccgagaccaccaggagcag

SEQ ID NO: 44101 - RNA, 59 nt, Homo sapiens
cagccgcacgccaaggaaacagacaccaaaagagccccgcccagaggccaccaacccca

SEQ ID NO: 44102 - RNA, 82 nt, Homo sapiens
agcgggagccgagagcgggcccgagcagggcgggcagaaaccaggagcagcagccgaagcacacgacgccaagacgaaccca

SEQ ID NO: 44103 - RNA, 35 nt, Homo sapiens
cgaaaccgacaacagagagccagcccggacaccag

SEQ ID NO: 44104 - RNA, 82 nt, Homo sapiens
gcagcgaagggcgcgcgagcgcccaagccggcccaggaaccagacgggcggcggccggggcagcgccgcgagccagcaacgg

SEQ ID NO: 44105 - RNA, 38 nt, Homo sapiens
ccgaggcggaggagacagagaaaaagcgagcccacccc

SEQ ID NO: 44106 - RNA, 66 nt, Homo sapiens
gcggaagcgcaacaagcacacaaaagagggacaacacaagccacagcgcccaggcccagagacacc

SEQ ID NO: 44107 - RNA, 83 nt, Homo sapiens
cacaaaaaacccacacaggacgcggacaagggcggcaggagcagacgccccgccagaccgaagccaccccaccccaccagacg

SEQ ID NO: 44108 - RNA, 75 nt, Homo sapiens
ccgaacccgaaaggagaagaaaagaagagccccaggccaagggcgggagcaccccggcgaaagcagaaggacaac

SEQ ID NO: 44109 - RNA, 76 nt, Homo sapiens
caggcgacaggagccagaagggaacaacacccgagcacccgagggagagcgcaccaccccacgcgccaggcgagac

SEQ ID NO: 44110 - RNA, 74 nt, Homo sapiens
ggcccacacaggacagcgccggccacccaaagcacgggggcaacagagccggaacgcgcgccacccggcagaaa

SEQ ID NO: 44111 - RNA, 69 nt, Homo sapiens
ccgcggagagcgcaagccgggcagcagcccagcggcagcagaaagagcagcgagcagaacaaggagaaa

SEQ ID NO: 44112 - RNA, 67 nt, Homo sapiens
cgacgggagacagaggaagccccagaggccacaaggcaggagcgaggggcagcagaaacgggggggg

SEQ ID NO: 44113 - RNA, 88 nt, Homo sapiens
gccgggaccgaaaccagccccggacgagaagcgcagcaacggcgggggaccacgagagcgagaggaagacagacaaggcagaagaacg

SEQ ID NO: 44114 - RNA, 69 nt, Homo sapiens
cggagcaaggaaaaaaggcaaccacaaggggccaggcacccggaggcgggaaaaggcgacggccagcaa

SEQ ID NO: 44115 - RNA, 44 nt, Homo sapiens
gacgcagggcgcccccgggcagggcggggacaagggaaggcaag

SEQ ID NO: 44116 - RNA, 79 nt, Homo sapiens
gagggcgggcggcagcgcgacggggagcggcggagaccgcccgccccgccgggagcggccacggagacggcggccccag

SEQ ID NO: 44117 - RNA, 69 nt, Homo sapiens
agggaaaaaaccaagccgggaaaaacgcagccaaagcgaaagacggacgaagcagaaaaaacgagacaa

SEQ ID NO: 44118 - RNA, 94 nt, Homo sapiens
cggaaccagcacacccccaaacgcggcccgcgggcccacgccagcaccagcgcaggcggaggcacacccagaagccacaggagaagcaagaggc

SEQ ID NO: 44119 - RNA, 71 nt, Homo sapiens
gaaggaaaaaacagcagccagcacaggaacgagggacaggaccaggagggaaagaaccaccagccgccccc

SEQ ID NO: 44120 - RNA, 58 nt, Homo sapiens
gccaagcaaagggaccggagcccccacggagaaccacggggaccaagaagcgagcagc

SEQ ID NO: 44121 - RNA, 75 nt, Homo sapiens
acccagagcccccgcccgacgggaacgccaggaaccagcaagagcaggagagagaggaaccaggaccgagcgagc

SEQ ID NO: 44122 - RNA, 48 nt, Homo sapiens
ggcccggcaccaagggacccgagagagcgaaaggccggcaagggacac

SEQ ID NO: 44123 - RNA, 80 nt, Homo sapiens
gggagcagaggggagagcggccgccgccgcgccgcccaccacagggggaacacaccgaaacagaggaacagcagggcaga

SEQ ID NO: 44124 - RNA, 82 nt, Homo sapiens
ggaaaggcccaggaaaaagccgaacagcaacagggggcaaagccgccaacagggcagcagagcgcggcggaaggggggacga

SEQ ID NO: 44125 - RNA, 34 nt, Homo sapiens
ccccacagaaagggcggcaaggggcgcaccggga

SEQ ID NO: 44126 - RNA, 80 nt, Homo sapiens
aggcgcagccgcgaagccgaggcaacaccaagaggaggaaaagaagaaaacagaagcagaaagagcagcgcaggaacaaa

SEQ ID NO: 44127 - RNA, 79 nt, Homo sapiens
ccggggaggcagcgcgggacccagcccaggcggcgcggacggggcggggcacggagcgagcagaggaggaggaaacccg

SEQ ID NO: 44128 - RNA, 87 nt, Homo sapiens
gggaggcgacaggaaacccgccacgacaaccgcaccaacaaagacaggggaggcaagcaggggggcaaaggaaagaaggcagaaagg

SEQ ID NO: 44129 - RNA, 71 nt, Homo sapiens
aaaaaaggaagcgaaagacaggaggccagggcacgggaaggcagcacgaggcaaaacaaggagcaaaccgg

SEQ ID NO: 44130 - RNA, 69 nt, Homo sapiens
gggccaggaaacaaggaggcaaagagacacaaaaaccaggagcagcggcaaaggagaacgggaacgccg

SEQ ID NO: 44131 - RNA, 73 nt, Homo sapiens
caaaaggacagcagaaaacaaggagaagcacggaccaaagcagcgcaacccagccacaggaggcgccagcagg

SEQ ID NO: 44132 - RNA, 65 nt, Homo sapiens
cggcagcggcccaacgccaagaacaacgcaaaagcagaccggaaaacccaccggcaagaccacac

SEQ ID NO: 44133 - RNA, 79 nt, Homo sapiens
ccgggcaagcgcggcaagcgagagaaaccgggcaaccggggcccccggagggccacaagccagagcgccccggccaagg

SEQ ID NO: 44134 - RNA, 82 nt, Homo sapiens
ccaggccagaaggagcgcccccaggccccgagccccggccccaaagacccaaaacagagacaccccccagcccccgcgcccc

SEQ ID NO: 44135 - RNA, 77 nt, Homo sapiens
gggagaggagcgaaagaacgagaggagccaggggggggcgcagccacaaagaagcccgccagccagaaccggagaag

SEQ ID NO: 44136 - RNA, 37 nt, Homo sapiens
aacaggacacacaaggggcggaacaccaaccaggacc

SEQ ID NO: 44137 - RNA, 79 nt, Homo sapiens
cccgcaagaaaacaagcagccgcacgacgcacggcccaggaccgcacaagggggagagccacccagcagggaggggaag

SEQ ID NO: 44138 - RNA, 57 nt, Homo sapiens
aaaaaaaacaagaaccacggcacgaaaggaaaggagaagagagagccaacggagcca

SEQ ID NO: 44139 - RNA, 74 nt, Homo sapiens
gacccacacaggacagagagcgccccagcgaacggcggaccgccgggggccgaagggcaacacagcagaccggc

SEQ ID NO: 44140 - RNA, 79 nt, Homo sapiens
gggggcagaacccagaggcgggaggggccgggaggcagaggggcaggggacacgaggaggggacggcccgccacaggca

SEQ ID NO: 44141 - RNA, 60 nt, Homo sapiens
cacgcaagagacacgcaaagcaaaaacgaggagcacccacgggaacagcccagaaacgag

SEQ ID NO: 44142 - RNA, 78 nt, Homo sapiens
aaaaaccaagcagcgagcaccaggcgcccggcgcaggccaaagggcccccgaaccagcgaaaacaaacccggccgaag

SEQ ID NO: 44143 - RNA, 66 nt, Homo sapiens
agggaaacggaaagagcacacagaaaacaaaaacaacacccagaagcacgccaaccggaacacaag

SEQ ID NO: 44144 - RNA, 75 nt, Homo sapiens
aagagcaggaagcaacaggcgagcacgacaccaccgccggcacccccgaggcggacagcccgggacccaaacgaa

SEQ ID NO: 44145 - RNA, 53 nt, Homo sapiens
cgaagccacagcccaacccccggcacccgagcccaccaagagcccaggaggcc

SEQ ID NO: 44146 - RNA, 82 nt, Homo sapiens
cagggcaccacggcgcgagagccaccacgacgcacccggccaggccagcggaggcacggagcagcacgccggaccaccagca

SEQ ID NO: 44147 - RNA, 64 nt, Homo sapiens
agacaggccaggggaacgagcccaaaggggacacccagagcgcaccagggaccagggacacaac

SEQ ID NO: 44148 - RNA, 84 nt, Homo sapiens
caaccacacaagagcagcggggggcaggagcggaagcgaggacacggcccagggagagcgaagagagaggacccgcccaccaac

SEQ ID NO: 44149 - RNA, 72 nt, Homo sapiens
cagccgccagggacgggggccaccggacagaggcccacgcggaccggcagcgccaccggaccaccagacaag

SEQ ID NO: 44150 - RNA, 83 nt, Homo sapiens
accgccggggagccagaagaggaggaagcgaccggccaacggccacccccaagccaagcgcaacaggcaaaccaaagcgcaag

SEQ ID NO: 44151 - RNA, 77 nt, Homo sapiens
aaaggacaaaagccaagaggaggacagcgcacacagcaagcacgagaagacaaacagaccccagaaagaagaagagg

SEQ ID NO: 44152 - RNA, 68 nt, Homo sapiens
cggagaccccgcgccgacggcgccaaacacaggaggcgggccaggccagcgggccggggagcgccagc

SEQ ID NO: 44153 - RNA, 80 nt, Homo sapiens
ccccggaggaggacgaaagggacggcccaagacacagccccagcagcccccagacccacagacacacccagggaaaacaa

SEQ ID NO: 44154 - RNA, 79 nt, Homo sapiens
ccgagcagccggcaacggcggggcgcccggagcccgagaaagaaagccaagcacacacgaagacgcccgccacagcaag

SEQ ID NO: 44155 - RNA, 66 nt, Homo sapiens
cggaacagcagagacacagagggcagcagagggcaggaagcccgaggaacccagaagaggaggaag

SEQ ID NO: 44156 - RNA, 78 nt, Homo sapiens
ccggccggccgcccccaggaccccagggagagcgggcagccccaggggacagacaaagagagaagcggggaagaaagc

SEQ ID NO: 44157 - RNA, 79 nt, Homo sapiens
aagcccaccgccaaccaacccccccggagagaagaacccaagcagaagagcacgacgacggccaccagagaggacgccc

SEQ ID NO: 44158 - RNA, 54 nt, Homo sapiens
gcacaagcgcacccgcacagacagaggcacaaaaggagaaagcagaagaaacag

SEQ ID NO: 44159 - RNA, 58 nt, Homo sapiens
cggagagacgcgcaggccacgaaaaacagacccagagcaggacggacaccgaaccggc

SEQ ID NO: 44160 - RNA, 81 nt, Homo sapiens
ggcccaacgaagagacgacacaaggagacgaggggaagagggggacccaaaaggaaaaggacaggcagcagagagacaagg

SEQ ID NO: 44161 - RNA, 71 nt, Homo sapiens
accggaacggcggcgacaaggggcccgaacagagggcacagcgacgaacacacacaccagaccggagaagc

SEQ ID NO: 44162 - RNA, 66 nt, Homo sapiens
ggggagacccggggacccccgacgccaggcagcgcccccaaacggggaaaggccagacagcgcagc

SEQ ID NO: 44163 - RNA, 55 nt, Homo sapiens
caagcggggagaaaccgccagaagacgaaacaggaacacgaagcgcaaacgccga

SEQ ID NO: 44164 - RNA, 78 nt, Homo sapiens
ccagccccggcccagccacgacaggcacgcaggaaccacaccacacggaggccagcgcggcccagagcaccacgcgcc

SEQ ID NO: 44165 - RNA, 78 nt, Homo sapiens
gcagccgcggagcacacggagccaagagcaaggaagcagacaccccaccccgacaggacagcggagcggcccggccac

SEQ ID NO: 44166 - RNA, 81 nt, Homo sapiens
gccagaccgaagcagccacccacacagcgcacccacgccccagagaacaggcaggaaagggagaagagaggaagagaacaa

SEQ ID NO: 44167 - RNA, 74 nt, Homo sapiens
ggccccacccgggaggggggagcggcgggaggccaccgccagaaaagaaacaggcaaggaacagaaggcgaccc

SEQ ID NO: 44168 - RNA, 80 nt, Homo sapiens
aaggccacgccggcaggaggcagaaagcaccaccggggagggacgcagcggagccggcgagccagaagcgccggcagagg

SEQ ID NO: 44169 - RNA, 80 nt, Homo sapiens
gggacaaaggagccaggacaaggcgcacccggggaaagggggggccggcgcgcagcccggagaaccgccacccagagacc

SEQ ID NO: 44170 - RNA, 87 nt, Homo sapiens
cgggccagacagggcaagaaaaccccgaggagcccgccaaagccccggaccgccaagaacccagaaaccccgaaggccaccgccacc

SEQ ID NO: 44171 - RNA, 81 nt, Homo sapiens
ccgcgggccagcccgccgccagcgggccgcagggaccaccacacgaaaccaaggaaaaaccgggaacagcagaggccagag

SEQ ID NO: 44172 - RNA, 82 nt, Homo sapiens
cgcccacgccggaccgggcagaggacggcacaccccggcagcagccccagacaacacgcgagcagagaccagaccgcgagga

SEQ ID NO: 44173 - RNA, 71 nt, Homo sapiens
acaaaccagagacgaagaagagcgaagaaggagacacgccagaggggaagcgcggcagaagcgaaccggac

SEQ ID NO: 44174 - RNA, 100 nt, Homo sapiens
ccccgcccagcccccaacgccagcccgcaggcccagagccggcagaacccccaacgagcggacaggcaacagcaacgacaaaagggagccacgggagggg

SEQ ID NO: 44175 - RNA, 58 nt, Homo sapiens
aaaaagccgagaaagccagcgcggaaacgcccgaacgagcaaaggcagacaagaccag

SEQ ID NO: 44176 - RNA, 66 nt, Homo sapiens
gcaaagaaggacccacaggggaggaacccgcaccaggcccagacgaggacaaacggaaagccaaca

SEQ ID NO: 44177 - RNA, 53 nt, Homo sapiens
cccccccgagacaggcgggaaaaccgccacaaagcccccaagccacaagcaac

SEQ ID NO: 44178 - RNA, 73 nt, Homo sapiens
aagggagcagcaggagccccgcgggagaaagggcgcaaaaagaaagaaaacaaaagccagccaaaaacagacc

SEQ ID NO: 44179 - RNA, 73 nt, Homo sapiens
ggccgaggaacgggccgcgaaggcgccgacagccccagaccagcggcgccggagcaccggagcagaagaccga

SEQ ID NO: 44180 - RNA, 66 nt, Homo sapiens
aaccccgcaagggcagaagggaagaacaggagaaacggcgaggaaagagaggagccccggaaagaa

SEQ ID NO: 44181 - RNA, 72 nt, Homo sapiens
agccacccccagacaaaaccaccaaagacaacagccaccggaggacagggaacagacaagagggacacaggc

SEQ ID NO: 44182 - RNA, 76 nt, Homo sapiens
cagcacgggaccccccaagagaagcgcaagagcaacaccccaccccaagcaccaaggagcagaacggcgagccccg

SEQ ID NO: 44183 - RNA, 38 nt, Homo sapiens
cccgagagcggggcacaggcacagaagcaaagagaaag

SEQ ID NO: 44184 - RNA, 79 nt, Homo sapiens
gccacaacacaaccagcggaaggcagacaagcagcgcaaggcgccggcggcgccggagcaggggaccaagcacgggcgc

SEQ ID NO: 44185 - RNA, 81 nt, Homo sapiens
gaaacaaagaagcagcgcgaaaggggaagagccaagaaaaaaaagagcaagggccggacaaaaggagacaaagggaacgga

SEQ ID NO: 44186 - RNA, 58 nt, Homo sapiens
accccgaagagccaggccacagaggggagagcccagagaaacagagggcaaagaggac

SEQ ID NO: 44187 - RNA, 67 nt, Homo sapiens
gggcgggaaggcagggccgcagaccaagaagaaaaacacacgaggaacgccgaagacagcgcaagac

SEQ ID NO: 44188 - RNA, 80 nt, Homo sapiens
agccccagacagccggcgcggcgggcgggcggcggcggcgcgggccccggaggccggcccgaccgccgcccggacggcga

SEQ ID NO: 44189 - RNA, 78 nt, Homo sapiens
agaagccccgcgacagccccgagaggagccagcagaaaggacgacgaaaggacccacacccggcagcgccacacgggc

SEQ ID NO: 44190 - RNA, 46 nt, Homo sapiens
ccccgagcccgagcgccccagcccggccggaaccaaaaagaagccc

SEQ ID NO: 44191 - RNA, 73 nt, Homo sapiens
gacgccagccaggcagcgcggaagcgcagcgacagagagagaaacacgaaacagaccaccgccagcccagagg

SEQ ID NO: 44192 - RNA, 85 nt, Homo sapiens
accggcggccccaccagcagacgcagccgagacaccagcccgaaacaccaccaagagaggggagaagagcgagacgagaaagaag

SEQ ID NO: 44193 - RNA, 82 nt, Homo sapiens
ggcccccaggcgggccagcacccaaccagggccaaccccagaaccccaaacccaggagagacggagaggagagcaacggcag

SEQ ID NO: 44194 - RNA, 71 nt, Homo sapiens
aaccagcaccacccaacacagaccgaacaacggccacaagacagggcagccggaaacaggaagcaaggaga

SEQ ID NO: 44195 - RNA, 76 nt, Homo sapiens
ggcaaagccaccgacccaccgcgcccgggccgccggcaggcggccgcagcaacccgccgggcgccaacggccgaca

SEQ ID NO: 44196 - RNA, 66 nt, Homo sapiens
ccgcgcgacaaaaggaccagacaaacaaaaggggaacgaggggcaaaaagcagccgccggagcaga

SEQ ID NO: 44197 - RNA, 78 nt, Homo sapiens
cagcggcccccacaccgggccccacgcccagcccccccccacagccaggacagcccagagcaagcacacggaggcccg

SEQ ID NO: 44198 - RNA, 38 nt, Homo sapiens
ccaaagaggacccgcacgacgcccccagcggcagcagc

SEQ ID NO: 44199 - RNA, 72 nt, Homo sapiens
cccaggacacaggggcccagggaaaagggaaccagcaaacggaagcaaccccgcaaggggccgccaaagggg

SEQ ID NO: 44200 - RNA, 74 nt, Homo sapiens
cacgcgagaacagagaagggagccaagcggagggagaacgcaagggcacgcagaacacaaaaaggagagaagaa

SEQ ID NO: 44201 - RNA, 59 nt, Homo sapiens
cccaaagaagagacagaaaggacgcagcacaagccagaaaggacacaaacccccaggaa

SEQ ID NO: 44202 - RNA, 66 nt, Homo sapiens
cgccgaggccgcgggcggcgggcccggcaagaggagccaggagcacggggggaacaagaccgccgg

SEQ ID NO: 44203 - RNA, 62 nt, Homo sapiens
agaggggaggcggagaagacccacaagggcacagggcccgaccaacacgggaaaggggcgag

SEQ ID NO: 44204 - RNA, 55 nt, Homo sapiens
agacgcggagaagaagcagagacgagccagagaggcaccaacacaagagaccacc

SEQ ID NO: 44205 - RNA, 83 nt, Homo sapiens
gcgaccaaggagggcaaagcgccgcgagcccagccaaaggcacgcaccaaacgcgccgccagggcaccccaggcgaacccgac

SEQ ID NO: 44206 - RNA, 35 nt, Homo sapiens
aagacaagaagaggagacagaaaggccagccacgg

SEQ ID NO: 44207 - RNA, 87 nt, Homo sapiens
caggcgaggagaaagcggcgcgcggaggcaccgccagggaggagagcggggcacgcgcccaacgcgcaagaagcccaccacggaggg

SEQ ID NO: 44208 - RNA, 88 nt, Homo sapiens
gcccagagacaacgagagaacgaaagccaggccagaagaaggaaggccggggaggggacaggaaagacacaccaccccaccgaacaag

SEQ ID NO: 44209 - RNA, 84 nt, Homo sapiens
gcggcccacaagaccagccccacaggaggggaggcgaccaggccgacggccaacccagacaaccaaggggagcaccaaaccagc

SEQ ID NO: 44210 - RNA, 35 nt, Homo sapiens
gaagaacccacagagacacgagaggcgagggacga

SEQ ID NO: 44211 - RNA, 116 nt, Homo sapiens
gccgacgacaccacacaccccgcagcagccccgagcgggcgcgcaggcacccgcacggcacagagagcagaaaaacgcacggcagagccacagaaaggacgcagaaacggccagca

SEQ ID NO: 44212 - RNA, 40 nt, Homo sapiens
acaagaccgccccgaccgcgcagaccacaaggccgcgacc

SEQ ID NO: 44213 - RNA, 84 nt, Homo sapiens
ccaacggaggaggagaagaagcacggagagaacagcaaaaaaaagagacgacaccccaccgaaaggaaggcaaagccagccccg

SEQ ID NO: 44214 - RNA, 82 nt, Homo sapiens
accaggcagcagcagcagaagaaaacacaaggccagagaaagaccagacagggagcagagaaacagaaggcacaggcagccc

SEQ ID NO: 44215 - RNA, 76 nt, Homo sapiens
ggggcggcccaccaacaggaacagggcagacgagcggaggacacccaacccgggaacccccgaacgcaaagccacc

SEQ ID NO: 44216 - RNA, 64 nt, Homo sapiens
ccgagggaccgccgggcggcggaaagcagggagagaacagcacacagaggcgcaaggggaagag

SEQ ID NO: 44217 - RNA, 74 nt, Homo sapiens
cgcccagcccaccaaggaagcacagaccacccagaccaccaaacccagaacagcacacaaaaaacaaggcacag

SEQ ID NO: 44218 - RNA, 74 nt, Homo sapiens
ccacggccccgccaggccccggggcaccaggacacacgaccgaaagccgcggaggcaagaaccacccagcccgg

SEQ ID NO: 44219 - RNA, 81 nt, Homo sapiens
gggcccagccaggggcaaagcacagaggccaaggcccgcgccccagcagagccagaccgacaggaaagacccacaaacaca

SEQ ID NO: 44220 - RNA, 81 nt, Homo sapiens
gaagccgacgcccaccagcgaacccggcccccgacggccgcagaacgggaccagccgcggagcacgggaccccaaccagga

SEQ ID NO: 44221 - RNA, 64 nt, Homo sapiens
cagaacagagagacagccagcccagaccagaaaggccgagggggacggcaagagcacacacccc

SEQ ID NO: 44222 - RNA, 76 nt, Homo sapiens
cgacacccaacgccacggcccccgcggaggagccgccccggccgcacgccgagaaaccgcgccccccgaacaaagg

SEQ ID NO: 44223 - RNA, 64 nt, Homo sapiens
gaaagaccaggcccgccacggaggcgcgcgcaaagcccgcagacaagagcaaaagaaaaggcca

SEQ ID NO: 44224 - RNA, 77 nt, Homo sapiens
ggagaggagaaaccaagcagacccagggacaggagccagcggcccaggggcgggggaggaaacagagacacagcagg

SEQ ID NO: 44225 - RNA, 78 nt, Homo sapiens
gaagaagacaggaccgcggcacgaaagagcccagggccagccggcccgaaagagcccagcaggagcgggccaccccag

SEQ ID NO: 44226 - RNA, 83 nt, Homo sapiens
cgcccagcccccgagggcgggaacagaaacagccaacccgcaacaacggcagaagaaaagcccggaaaacggaaaaaaaacag

SEQ ID NO: 44227 - RNA, 74 nt, Homo sapiens
agcaccagaggaccggcagaccaaagacgggaagaggggcaggacacaccgggagaagggaagcaaaggacacg

SEQ ID NO: 44228 - RNA, 85 nt, Homo sapiens
cggccgccccgcccccaccgccgcagacccccaagcagcaggggagcccccgagcgcccgcgacgcagcacggacccacaacgag

SEQ ID NO: 44229 - RNA, 76 nt, Homo sapiens
gcccagccagggaccaggacccaacagcaggaaggggaccgggacaaggcgcccgggaacagggaccacagggcac

SEQ ID NO: 44230 - RNA, 87 nt, Homo sapiens
ggcgaacgccccgcggcgcgacaggccagcgcaggggaggcggggcagcgaggcacgaggagcgagcgaagaacagcaccacaagga

SEQ ID NO: 44231 - RNA, 74 nt, Homo sapiens
caccaggcacaaaaggaggggcggcagcacagagggggacccagcaggggcgagaggacgggacagaagggccc

SEQ ID NO: 44232 - RNA, 85 nt, Homo sapiens
ggacaacaaaagccccacaagagccaccaaaagcagagagacgaagagagaagcagggcagaaagagcggaaacgagaagagcaa

SEQ ID NO: 44233 - RNA, 76 nt, Homo sapiens
aggagccccaaaggagacccagcccaaggacaaacagaggagcccaaaaagcgcccgaacgggccaaaggcagggc

SEQ ID NO: 44234 - RNA, 70 nt, Homo sapiens
cccccgccacacagcgggccggggacaagaaaccacagagccgagaacagaaagggagccagacagacca

SEQ ID NO: 44235 - RNA, 52 nt, Homo sapiens
gcagggaaagccccgcagcaacagaacgaaaacaaacggaagagagggcagc

SEQ ID NO: 44236 - RNA, 87 nt, Homo sapiens
cgcaggcaccccccgggcaggggcgccaacccaaccggcccagggcacgaaagccaacggaagagcaacaaggacaagccaagagac

SEQ ID NO: 44237 - RNA, 71 nt, Homo sapiens
caagaccccgcggcgaggaaagacgcccgggcagcacgcgacacaccggccccggcccccggagaagcagg

SEQ ID NO: 44238 - RNA, 82 nt, Homo sapiens
accagcaggccacgccacccagcgcagaaccagcgcagaagaaacaggaagaaacagcccaagaccgaggaggagaagagcg

SEQ ID NO: 44239 - RNA, 79 nt, Homo sapiens
cggcggcaacggggcacgaccgggggaaaagcagcagcaacgggaacgaagagagaaagcaaacacgggaccaagacaa

SEQ ID NO: 44240 - RNA, 70 nt, Homo sapiens
cacgccaaagcgggccaaccacacagcacgacacaggccccaaaagaccgggaagagccaaacagacacg

SEQ ID NO: 44241 - RNA, 75 nt, Homo sapiens
gggcacgcggccaggcggcgacacgccaaccccggcgacacggcgaccgccggggccgcccccgaggccggcacg

SEQ ID NO: 44242 - RNA, 71 nt, Homo sapiens
gccagaagacagcaaccaggacagggacaagcgcacagcggagaaagcagcgcggccaggaggcgggaaag

SEQ ID NO: 44243 - RNA, 64 nt, Homo sapiens
gaccaacacagaagaagcgcagccagacgaaaaagagccacgcccccacgagcgccccccggac

SEQ ID NO: 44244 - RNA, 77 nt, Homo sapiens
gaaaaccggccacaaaaccagagcggagacacccaggaggcagaagccaccaaagcggacgccggccaccacgaagg

SEQ ID NO: 44245 - RNA, 76 nt, Homo sapiens
cgggaccggccggagaggagcgacgcgagggccgagacggcgcggcaagacagaagagacggagaagaacacccag

SEQ ID NO: 44246 - RNA, 77 nt, Homo sapiens
gaccacccccggcaggcccaccaccgcggcaacggaccgcggcagaagagggcaacccccagccacaacgcgaaccg

SEQ ID NO: 44247 - RNA, 76 nt, Homo sapiens
aggcgcggccccggagaggccccgagccccggccccaaagacccaaaacagagacaccccccagcccccgcgcccc

SEQ ID NO: 44248 - RNA, 77 nt, Homo sapiens
gccaacgcggcaccgcagaacgccacaaccagcacacagaccagcgcgagagaacaccaaggagccccaaaccaaag

SEQ ID NO: 44249 - RNA, 75 nt, Homo sapiens
cccgccgaggacgaaagaaaggacagcccagagcaagcacacggaggcccgggagccagaccgggagcccgcccc

SEQ ID NO: 44250 - RNA, 71 nt, Homo sapiens
cccccgacggcccacgccagggagggggagacccaaaacagaaaccgacagacgcaacacggcgaaagcga

SEQ ID NO: 44251 - RNA, 69 nt, Homo sapiens
gacgcaacagaaaacaagaaaggaacccaacagagacccgcccacgcagggaagaaaacgccagagaag

SEQ ID NO: 44252 - RNA, 66 nt, Homo sapiens
cagggaggggaggcacagaaacgacgggcacacggagggagaacgagcccggacaaaaaaaaccaa

SEQ ID NO: 44253 - RNA, 79 nt, Homo sapiens
accagagcagcccacacagccagcagggggaggacacaggaacgccacaagaaacaacagcaaggcgagggccacgaaa

SEQ ID NO: 44254 - RNA, 69 nt, Homo sapiens
cagccaacaccccaacaccacaccagcgggcagaaaaaccgaaacacgccaaacacacggaaggagccg

SEQ ID NO: 44255 - RNA, 38 nt, Homo sapiens
ccaagggggccacacagccaaaaaaagacacaggccaa

SEQ ID NO: 44256 - RNA, 71 nt, Homo sapiens
gacccgaggagcccagcacgaacaccaaagcgaggaggaaggaagaaggaaaagcggaagcgcagacaaga

SEQ ID NO: 44257 - RNA, 67 nt, Homo sapiens
gacaaagcacaacgccaggcggagggggcgcggccggacaccagagagaaaacagaaacgccggaga

SEQ ID NO: 44258 - RNA, 82 nt, Homo sapiens
gcacggcgcaacaggaccacagcaagacgacaagcacggacagggcagaccgccagcagcacagcaagccacagagagggcc

SEQ ID NO: 44259 - RNA, 82 nt, Homo sapiens
acaggagagaacaacccccaggaacaggcggaggagagcaggaggcagaagcaaagaagaccgcagaagaagcaagcccaga

SEQ ID NO: 44260 - RNA, 54 nt, Homo sapiens
gaaggccgacaggcagacaaggggcacacaaggacaaaccggcgaccacacacg

SEQ ID NO: 44261 - RNA, 57 nt, Homo sapiens
ggcagccgaacggagggcgacggagggaggcacacagagaaaaaaagggaacaaaac

SEQ ID NO: 44262 - RNA, 75 nt, Homo sapiens
gccaggcgaggcggacgcgcccaggcgaggacaagcagagccacggagccggaaacggcagagcgcccccccagc

SEQ ID NO: 44263 - RNA, 84 nt, Homo sapiens
ggcggcccgaggaggcagaaggaccgagccgacgcgggccgcgcggcacgagagacaaggaggggcgcgccgcccacccccaaa

SEQ ID NO: 44264 - RNA, 112 nt, Homo sapiens
agcgggagcgccagaggaggagcgcggcggcacgggccaccccgcacagggcgccacggagaggcagcaagcagaaagccggaggcaacagccaaagcccaccaagaacgag

SEQ ID NO: 44265 - RNA, 79 nt, Homo sapiens
gcaggcccgagggccccccggggccccccgggcaagcgcaagcccgcccccgagcaaccacgcacagcaagaaaaaaag

SEQ ID NO: 44266 - RNA, 69 nt, Homo sapiens
ccagaaggaccaagaggcagcaggaccgcggcggcgaacacagagcgcacaaaaggagcggagccgcca

SEQ ID NO: 44267 - RNA, 77 nt, Homo sapiens
cagaccacagcacagccgggaaggggagccaccagccccccggcgcggaacagcacaggaagggaagggcaggccag

SEQ ID NO: 44268 - RNA, 100 nt, Homo sapiens
cgggggcccgggccgggccggggcgcggaccgggccaggcgcgaaggggaacggcgagggaacccaggaaggagggcgacaaacaccagccggcacacac

SEQ ID NO: 44269 - RNA, 55 nt, Homo sapiens
agcagaaacgcaccaggccaaagaaagagaagagggcgcgcgcccagaagaggcc

SEQ ID NO: 44270 - RNA, 87 nt, Homo sapiens
ccaaagaagcagaaagagcagaaaggagggggcgagaaggcgggaagccgaaggcagccacagggggcagacccaaaggaaacgcac

SEQ ID NO: 44271 - RNA, 82 nt, Homo sapiens
cgcacacgggagccccagccggcaggccggacccaggccagagggcggggagaaccaggcagaaccaccacgaggaccaccg

SEQ ID NO: 44272 - RNA, 81 nt, Homo sapiens
ggaggaggccgagaccggagcgccgccgccgcagacacccccggccagcagggaaaggaaagaggagccgaacaaccaaaa

SEQ ID NO: 44273 - RNA, 78 nt, Homo sapiens
acaagcaaacgaggcaccgggagacaaaaagcaagggggacaaggggaggggggcgaaaccgagcgcggggcagagaa

SEQ ID NO: 44274 - RNA, 71 nt, Homo sapiens
gcgaggaccagaccagccgcaagaagaaaaagggaacccggaaccaccacacgcacacaacgaccggacca

SEQ ID NO: 44275 - RNA, 90 nt, Homo sapiens
cggcgcggggaccgcgcgacaggccggggaagcagagaaacagcagaacaaacggaaggggaaggagccggcacaaacgagaaaggagag

SEQ ID NO: 44276 - RNA, 83 nt, Homo sapiens
ccagaagaacaccgaggccgaggggccgcccaaccagggccacgccgccggcagcgcaacagcagagcaaggccagcaagacc

SEQ ID NO: 44277 - RNA, 60 nt, Homo sapiens
cacagcacaacacaacacgccccgaagggaacgaggggccagccccggggagcccacgcg

SEQ ID NO: 44278 - RNA, 57 nt, Homo sapiens
agacgcagggcgcccccgacaaagaccgcggaccaagggccagccagagcggccgca

SEQ ID NO: 44279 - RNA, 98 nt, Homo sapiens
gcgggcaggagcggcggccaggccagacccgaaggccaggagacccgaccccaagggcagcggggaagaagaaaaggaaccgaggccccccggcgaca

SEQ ID NO: 44280 - RNA, 55 nt, Homo sapiens
agaagaaacaaccgccaccggggagcgaacacagcgagccagcagcaccggaaca

SEQ ID NO: 44281 - RNA, 76 nt, Homo sapiens
gaccgcgcacacgcagacacccacaagcacaagggcccagaagggaaacagagcggaggcggcagaagccacgccc

SEQ ID NO: 44282 - RNA, 72 nt, Homo sapiens
cgaacgcccaccccccgaacccagccgcaccgggacaagaccaccccaggacacggcgggcacaggaagagg

SEQ ID NO: 44283 - RNA, 37 nt, Homo sapiens
acaccacgagacgagagcaccggaccgcccaagacga

SEQ ID NO: 44284 - RNA, 72 nt, Homo sapiens
ggaagcccaggcacgaccacccgccaccagacaccaggacaaagagggaaaaaccaggcgacacaaagcagc

SEQ ID NO: 44285 - RNA, 77 nt, Homo sapiens
gaaggcagagaggggccccagaggagaaacgaagcgcagaaaggaagagaagaagaagcagaaagggcaggacgaag

SEQ ID NO: 44286 - RNA, 68 nt, Homo sapiens
cacaaaaaaaagaagccacgccaaaagacgaaagggggcgaccacaggcaagcggcagccacacccgg

SEQ ID NO: 44287 - RNA, 69 nt, Homo sapiens
acaaaaaaacacacacagggccaacagaggaaaaaggaaacaggcagagggcagaggaagaacaaccaa

SEQ ID NO: 44288 - RNA, 62 nt, Homo sapiens
aggaacaaagagagagaagagaagaggcgaaagaagagggaaaagacgagcaggagaagaaa

SEQ ID NO: 44289 - RNA, 79 nt, Homo sapiens
accaggggaagggccaggccaggggacagggaaggcaagagccgggaagaacaaccagccaaggcacagacaaagaaaa

SEQ ID NO: 44290 - RNA, 82 nt, Homo sapiens
caacacccagagacgaaaggccaaaacagaagaggcaaagcccagccacagcagcagcccagcagcaaacaaccaaagagaa

SEQ ID NO: 44291 - RNA, 51 nt, Homo sapiens
ggcggggccggaggccgcgcgcgcaggagacagaaaagcaccaaagcagca

SEQ ID NO: 44292 - RNA, 82 nt, Homo sapiens
gcgccgggccccggacgccgcgcggaaaagaacagacaacccagcaacagacggaacagcgcgaggcaagaacagcaagcaa

SEQ ID NO: 44293 - RNA, 57 nt, Homo sapiens
cccacccccaggagcacgagggccagcagaagaggaccagacgcccgggggggcggc

SEQ ID NO: 44294 - RNA, 82 nt, Homo sapiens
caagaccgcaaggccgcccgggaacgcgacgcgagagaaggacccacggcgcgcgaagggcgaagggccgaccacaccaaag

SEQ ID NO: 44295 - RNA, 51 nt, Homo sapiens
accagaccgcaagccgacacacagcagcgcagaaaacgccagggaggccac

SEQ ID NO: 44296 - RNA, 73 nt, Homo sapiens
gaaccaggcagcccaaaacagggaggccgcacagaggaggagcaccaaaccgagggagggcagccacaccaca

SEQ ID NO: 44297 - RNA, 90 nt, Homo sapiens
gcaggaaccaccaggacagagaggcggcagacggcaccagcgcgagaggcgcagacaaccggcacgacagccccgaagaggaagcgacga

SEQ ID NO: 44298 - RNA, 82 nt, Homo sapiens
gccagccgagcaccagcagaagccggagcaccaagcgcaaacacacgccggcgcggaaagcgcggagacagacaagaaagac

SEQ ID NO: 44299 - RNA, 70 nt, Homo sapiens
cagccaggagcgggaccaagcagaggcgcaacacaagaaagacaccgggaaacccagacgacaaggaagg

SEQ ID NO: 44300 - RNA, 74 nt, Homo sapiens
cgcagcaggcgcaaacaagaccaccggagagaaaaccgcacacacaaaggggggaccgcggggccaaaaagggg

SEQ ID NO: 44301 - RNA, 58 nt, Homo sapiens
agccaccaggcaccaggaggagcaagcgggacgcgggcaaaggaggggaaaaaagcac

SEQ ID NO: 44302 - RNA, 70 nt, Homo sapiens
caggacggagggggcacagacaggcaggcaacagagggaaaagacaaacggagcaggaaaaagaacagga

SEQ ID NO: 44303 - RNA, 74 nt, Homo sapiens
ggagccaccagagggagaagaaacagaacgccccacgaggcggcgccgcgaaagacaggaaacagagccaggca

SEQ ID NO: 44304 - RNA, 64 nt, Homo sapiens
cggagccggggacggagcagcgcgcgggggcgagcggcaggaaaaagaacgcacgggaaaccca

SEQ ID NO: 44305 - RNA, 87 nt, Homo sapiens
cgcggccggcgccgggaccggaggggacgcggggccgaagcagcaggacaccgaccaggggaaaaagagccagaacacgagaaaaga

SEQ ID NO: 44306 - RNA, 79 nt, Homo sapiens
aaagacgacacgccccacaggcgggaggaaaggaggggacagagaggcaaccagaacaagagcgggacgaggaagcaac

SEQ ID NO: 44307 - RNA, 69 nt, Homo sapiens
aggcgcccgcggagcacggaaaaggggcgacgcaacaccagacgcaagaggcgccccaaggaaaggggc

SEQ ID NO: 44308 - RNA, 72 nt, Homo sapiens
ggggcaggaccacgcagagcacgcggcacacgggcggggcgcaaggacccaagcggccaccagccagaaacc

SEQ ID NO: 44309 - RNA, 90 nt, Homo sapiens
aacggggggacccagaccacacagcaagaggaaaaaaggaaccacaagcagagaaacgcccaggccaaagaagagaacggggcacacaga

SEQ ID NO: 44310 - RNA, 75 nt, Homo sapiens
cgagacaacgccaaggagcggcgaacccaaagggccacgcccaggcaccggaggaggacagcacgcccacccacc

SEQ ID NO: 44311 - RNA, 45 nt, Homo sapiens
gaggagcgagcggacccgcgaggcggaggagcaccggaacacaga

SEQ ID NO: 44312 - RNA, 60 nt, Homo sapiens
accccacaggaagcccgggagccacacacgacgggaagcgggcaccgggaaccccaagag

SEQ ID NO: 44313 - RNA, 70 nt, Homo sapiens
gggacggcagcggcaccaccgcgcagaggggcagggggagccaagcacaaaccggaaaacgaacgccggg

SEQ ID NO: 44314 - RNA, 82 nt, Homo sapiens
cgccgccgccaccacccacccggacacaggaccgccagggggggcacacggacggcacgcgcgggcggagggcccgcgaaga

SEQ ID NO: 44315 - RNA, 71 nt, Homo sapiens
cgaaaaagcacagaagcaagaaaaaacaggaccaaggaggggaagaagggacaagcaaccaccaaaaaggg

SEQ ID NO: 44316 - RNA, 75 nt, Homo sapiens
ccgagaccgcagccccgccccacgccggcagccccacgagggagaagaaccaacaacggaaaaccagcgggacaa

SEQ ID NO: 44317 - RNA, 82 nt, Homo sapiens
cagcacaaccgccagaaggaagacaagaggccccaaaagccacgccgaagaaagacaaaaacacaggagagaacaaacacgg

SEQ ID NO: 44318 - RNA, 74 nt, Homo sapiens
accaacaaagcccggaaggcaaggcagggagaccagacggggaggggcccagcagggaaagcgacaacccacac

SEQ ID NO: 44319 - RNA, 71 nt, Homo sapiens
ccgccgaaagcccgaaaaagcaaagagagagagagaaagagaaaaacaccagcaaccgacggcagcaacaa

SEQ ID NO: 44320 - RNA, 77 nt, Homo sapiens
aaacaagaccaccggagagaaaaccgcacacacaaaggcagaagaaacacacaggagaacccccgagaacagagaga

SEQ ID NO: 44321 - RNA, 72 nt, Homo sapiens
agcgagaaaccagaaaacacggaacaaaggacaggacaacgcacaacagggcaggagaaggcccaacaggag

SEQ ID NO: 44322 - RNA, 36 nt, Homo sapiens
cagcagcggcagccaagagggccagggacggcagac

SEQ ID NO: 44323 - RNA, 70 nt, Homo sapiens
ggcacccgcacggcacagagacccaggccggcgcgccggacacacggcaggagcacacgacaagacaacc

SEQ ID NO: 44324 - RNA, 82 nt, Homo sapiens
cagaaggaaagaaaaggaagcaacaacaaagcccagagggagccaaaaaccagccagaaaaaagcacggccgaaggcaaaag

SEQ ID NO: 44325 - RNA, 61 nt, Homo sapiens
ggcccaggcccggaggaccccccaggaagagacagcgaagaagaaacccacaccaccacac

SEQ ID NO: 44326 - RNA, 85 nt, Homo sapiens
gaagaacagcgggaaagaaggcaaaacacggaacgaccagaaaagcggaagaagaaagagaaagcgaaaagaaagagagaaaaag

SEQ ID NO: 44327 - RNA, 75 nt, Homo sapiens
gaggccggcccggaagacacagccaggggaagaagggacggcgcaaaccagcaacagcaggaggaagaaacaaga

SEQ ID NO: 44328 - RNA, 77 nt, Homo sapiens
cacacacccaggagagaaccgagccacacaaggcgaacacccaaacccaggagcggaccggcaccacacgggggcca

SEQ ID NO: 44329 - RNA, 61 nt, Homo sapiens
gcgcgggcccagcccacagcaggggcgacaagagaaaaagaaagaaaccccaaaaacaaac

SEQ ID NO: 44330 - RNA, 78 nt, Homo sapiens
ccaacgcgcagggcagcggcccccgcccgcagggccgagaagaagcggggacggcaaaacagccaacggaacaccaag

SEQ ID NO: 44331 - RNA, 64 nt, Homo sapiens
gccaaagccgcccagacggccaccggcgggaggaacaaaagcaaagaaggccaagaagacgaca

SEQ ID NO: 44332 - RNA, 97 nt, Homo sapiens
gacagccgaaggacagagagaagcagggagagacccagagcagcgaaagaccagaaagaagaccgggcaacggacagaagaagcggacaggagccag

SEQ ID NO: 44333 - RNA, 81 nt, Homo sapiens
gagggcccgggagggaggccggccaggccggccgcgccgcgaggagacagaaggcagggggagccaaggaagcagacacga

SEQ ID NO: 44334 - RNA, 78 nt, Homo sapiens
gaaaaggacagaaggcaagagaaagaagacacagaaaaagagagacgcggcgcagaagaggggcaaacaaagggcaac

SEQ ID NO: 44335 - RNA, 81 nt, Homo sapiens
agaagcagccgccggcgcgcgagccacacaacccgcgccggccgcgggaaggagagaacaggcggccagcccggaaaaaca

SEQ ID NO: 44336 - RNA, 75 nt, Homo sapiens
aagccaaaacagaccaacaacaccagcggacgcgccgaggagagcccagagaacgccgaagcccggcagaaggag

SEQ ID NO: 44337 - RNA, 71 nt, Homo sapiens
agggcgcgcgcccagaagaggccagagcggaagccaaaggcaacgacgagaaccggggcaagagacggcag

SEQ ID NO: 44338 - RNA, 53 nt, Homo sapiens
acgccagccagcagcaaggaaggcaggccagaggcagaggcagcaggcagcac

SEQ ID NO: 44339 - RNA, 69 nt, Homo sapiens
ccccccccccccaagggacgaaacgcccaccccgggaagcaggacgcgcacagagcgacagaaaggaca

SEQ ID NO: 44340 - RNA, 77 nt, Homo sapiens
gcggggcgacagacgacaagaggcgacgcgaaccgcaagcacaaccaagcagaagagagaggagggcacaaaggagg

SEQ ID NO: 44341 - RNA, 80 nt, Homo sapiens
gccccggcccacaggggggggcaaacccgagagaacggagcggggaggagacaaaggagacgaaaaaaaggccaacaccc

SEQ ID NO: 44342 - RNA, 61 nt, Homo sapiens
caaacgagaggcgggcaggaggacccaaacgaaggcccgagagagaaagggaaagaaggag

SEQ ID NO: 44343 - RNA, 74 nt, Homo sapiens
gggcaagacagagaccggcgcaagagcacccggacgcgcccccagacaccggcgggacgggcgaccaggagaga

SEQ ID NO: 44344 - RNA, 54 nt, Homo sapiens
gccaggcaagcgcagccgagaaggccaagagccccagcccccagcagccgacag

SEQ ID NO: 44345 - RNA, 77 nt, Homo sapiens
gaaaagcgaagcaacaaaaccagacggagacgggagagcgggcgaagcaaggagggcaacaggaaaaaaaggaacag

SEQ ID NO: 44346 - RNA, 90 nt, Homo sapiens
gacccggcaccacacgcagaacgggcggacgggcgcccagccaggaacaagcgggaaacggagccaccaacaagcgggagaaagacagca

SEQ ID NO: 44347 - RNA, 58 nt, Homo sapiens
gagagcgaaaaggccaagagaacgcaagcacaggaccagaaacgaaaggcagcagaag

SEQ ID NO: 44348 - RNA, 85 nt, Homo sapiens
gcgggcgccgggccaggacggggcgcccgcgccggcagaggaggcgagcacccgccagggagaggaacccccgcgcacccagcgc

SEQ ID NO: 44349 - RNA, 80 nt, Homo sapiens
agccagggccggcggggggcccgggagcaccagcaagcaccccaaggacgcaggcccgcagcccccggaagccaaagacc

SEQ ID NO: 44350 - RNA, 75 nt, Homo sapiens
gaaccagggcgccgagggaaacccaggcgccgcggcccgggcgaagcagacaggcagcaaagaaaggaggagaag

SEQ ID NO: 44351 - RNA, 81 nt, Homo sapiens
ggagaggacgcgaggagccagaggcgccagccgcgaaggggcggcgcgcgccgggcgccggagagaaggaacagaacagac

SEQ ID NO: 44352 - RNA, 64 nt, Homo sapiens
gcaagaggccacaacgcaggcagagcagccaagggcagccccccagcccacaaaagccacgaac

SEQ ID NO: 44353 - RNA, 60 nt, Homo sapiens
cacacagccacacagacaccgccacaggagagagcaagagcccaccgaagacacacccca

SEQ ID NO: 44354 - RNA, 69 nt, Homo sapiens
gaaaggcggaccacaaggaaaagaaaaacagaagcacagaaaacaggaggagcacggcgaaccgcaaac

SEQ ID NO: 44355 - RNA, 59 nt, Homo sapiens
agccgcgccggagcggagcgcgggcgccggggagccagcaacggagcaaggaaagagca

SEQ ID NO: 44356 - RNA, 79 nt, Homo sapiens
cagagcccaagaaggcagcaggcaacagcagcagagaaaacagcagcagaggggccaaggaagagagcgagcggaaaac

SEQ ID NO: 44357 - RNA, 81 nt, Homo sapiens
cggggagggggcgaacgcaggggagaggagaagagagcggcggaagggaagcaaagccagggagggaaccgaagccacggg

SEQ ID NO: 44358 - RNA, 74 nt, Homo sapiens
cgacaagaccgggacacccgaagcgggaaaggaggagaacagccgcacgggcggcgcccggcgcgggacaagcc

SEQ ID NO: 44359 - RNA, 64 nt, Homo sapiens
acaggcgagccacccacaagaagcagaggacaggaggccccgagagcccaaaaggcagagcgag

SEQ ID NO: 44360 - RNA, 79 nt, Homo sapiens
gaaccgagcccacacacgccacaaaccgcaagggccgaccccgggacacacccagcccgggacccagacaccgggaggg

SEQ ID NO: 44361 - RNA, 80 nt, Homo sapiens
gccggggaccccggcagccacccaccgccgccgcccccagcccccgggcgcgccggacaggccgccgcggcgggacagcg

SEQ ID NO: 44362 - RNA, 77 nt, Homo sapiens
gggccgcgcgggccgcgcgaggagccggggcagggcacgaggcggacgggccggggacaggacagccaggagggggc

SEQ ID NO: 44363 - RNA, 86 nt, Homo sapiens
ggcagcgcagcggaacagcccagggggccagcagcaccagccaaagacccaccaggaggagaaggaggaaggaccaggacacaagg

SEQ ID NO: 44364 - RNA, 53 nt, Homo sapiens
gccccccggagcggcacagcaagcgcagagccgggacaaggagggacaccacg

SEQ ID NO: 44365 - RNA, 86 nt, Homo sapiens
cagcaccggcgcgggggcaggcgcgcgccgcaacgccgagcgcaccgacacgccgccaaagaggcgaggggacggcggggagcgca

SEQ ID NO: 44366 - RNA, 78 nt, Homo sapiens
ccaggacgggcggaggcggggggaccggcgggcggacgggagagaagcgccggccggaaagaagacggggaggagcag

SEQ ID NO: 44367 - RNA, 74 nt, Homo sapiens
aaagcacgggaggagagacaaaccagggccggaggaacgaaagagagagaaaacagagagaaaaacgcgacacc

SEQ ID NO: 44368 - RNA, 65 nt, Homo sapiens
gaggagagcgacgagaagggccgggagacgcaaaaagaggcaccacacggggaggaagacggcaa

SEQ ID NO: 44369 - RNA, 78 nt, Homo sapiens
gcggagcggacccagcaagacgcgcaagccccggggcagagacacaggacacccacccgccggggacagacgcggaca

SEQ ID NO: 44370 - RNA, 80 nt, Homo sapiens
agacagcggaccagggcgcccgcggcggacaagcgaggaagcaaggaaccaagaagaagcaggggagaagaagaggagca

SEQ ID NO: 44371 - RNA, 49 nt, Homo sapiens
acacggacaacaaacggaaacaaagccagaccgccgaggggggacgaac

SEQ ID NO: 44372 - RNA, 67 nt, Homo sapiens
ccagggccacagcacgcagccccaggcagacacagagagacccagagaccaacggagaggccgaggg

SEQ ID NO: 44373 - RNA, 75 nt, Homo sapiens
accacaaccgccgacaaccccgagaggggagaagagccaaggagaccaaacccagcagcaccgcagcagcagaag

SEQ ID NO: 44374 - RNA, 60 nt, Homo sapiens
aacgcgggaccacccaaaagacagagccaccagcaggccgaaaagcccgggccagccaga

SEQ ID NO: 44375 - RNA, 79 nt, Homo sapiens
ggccgcgcgaagcccgagaggagccacaaggagacgccgccgcgcccccgccaagagaaccacccaaaagaccgaagca

SEQ ID NO: 44376 - RNA, 71 nt, Homo sapiens
gaggcgggcgggccggcgagcgcagcgcgaccgggaggcccagaacggaagccgaagcagcgcggaagcag

SEQ ID NO: 44377 - RNA, 50 nt, Homo sapiens
ccagaaagaccaacagccgacagcacgaaacaaagcaggacaaggcggac

SEQ ID NO: 44378 - RNA, 57 nt, Homo sapiens
caggcgaaacgggggggcaggggaaaacgacccccaggaaaaagaaaaggaccagaa

SEQ ID NO: 44379 - RNA, 77 nt, Homo sapiens
aagaagaaaaggcagaagaagaggaagaccggggcagaacagaacacgaaaagccaggaagacaggaaccaaaacag

SEQ ID NO: 44380 - RNA, 43 nt, Homo sapiens
gcgcggggagcccgcacgagcagcgaacaggcccgcgacaggg

SEQ ID NO: 44381 - RNA, 60 nt, Homo sapiens
ccgaccccccggcgccgcgccggcggcggaagaaacccgcgccgagcgccaacggggcgg

SEQ ID NO: 44382 - RNA, 62 nt, Homo sapiens
gcccacgaacccgaagcccccaaagagagaaccggagagcacccaacacgaaacaacggacc

SEQ ID NO: 44383 - RNA, 69 nt, Homo sapiens
aagccgggcacccagggggcccaaccaagacaagagaaaccagaagaaaccaggaaagaacagccaccg

SEQ ID NO: 44384 - RNA, 38 nt, Homo sapiens
gggaaacgggaccagaggaaagccggacccacagccgc

SEQ ID NO: 44385 - RNA, 82 nt, Homo sapiens
gaaacgacagacgaacacgaaccccggacgggagagcgccggcggagaaaaaggcccagccaaggcccggcaccggccacga

SEQ ID NO: 44386 - RNA, 76 nt, Homo sapiens
gcccccggccgggccgcccggcggcaggcagggaaacccaccagagaaggcgcggccacccaggacccgggggagg

SEQ ID NO: 44387 - RNA, 55 nt, Homo sapiens
acacgcccaccgcgcccgcagagcccagcagcggggagccgccaccaaaagcaga

SEQ ID NO: 44388 - RNA, 72 nt, Homo sapiens
aagcaaaagcaagaccaaagaagcgccagcagcaagcacagaagggccgggcccagaagaacggggcgacag

SEQ ID NO: 44389 - RNA, 88 nt, Homo sapiens
gggaggaacagacaccgagccagcaagcccccaacggggccccagacacgacgcccccggccggcccgggccgcgccagagcgcggcc

SEQ ID NO: 44390 - RNA, 79 nt, Homo sapiens
gcccggcgcggaggcgagggacccgccgcggcgcgcgccggagagggagggcaccgcgcgcggcagacgagaccggaga

SEQ ID NO: 44391 - RNA, 76 nt, Homo sapiens
ggaggcgcggccaacggggccacaaggccggaaaaagggaaagaacaaaacacacagcgaagcccagaagaaggac

SEQ ID NO: 44392 - RNA, 76 nt, Homo sapiens
ggagaagccgcccaaagaacggaacaggaaaaagggcaagaagcaccaaaaggaagagaaaggagcgggcaaaaag

SEQ ID NO: 44393 - RNA, 82 nt, Homo sapiens
gcagaggcacaaaacgcccagcaaaccaagagggagaagacggaagaaagcagccaagggcggcgacggcggcgcgaggacc

SEQ ID NO: 44394 - RNA, 68 nt, Homo sapiens
cacaagaggacagacaagcccaccaaacaccagaaggaagcggagcaacaccgccggaaccggacggg

SEQ ID NO: 44395 - RNA, 127 nt, Homo sapiens
cccggaccgcagaggaagagaaaaagcaaacgaccagacggcagggaggcacaaaggggaacacagggacacggcacagggacgggccaagaaccccaggaggagggaaagcggacccgccagagga

SEQ ID NO: 44396 - RNA, 74 nt, Homo sapiens
acagcacaggagaggcaccagagggcacagaggcacagccccgggaaggcacagcacaccgagggaggccccgg

SEQ ID NO: 44397 - RNA, 81 nt, Homo sapiens
gcgcgcacggacgcggagaggggagccgcaaaggaaagaggcagaaggccagaagggcgaagaagaaggaaaaaaggccac

SEQ ID NO: 44398 - RNA, 47 nt, Homo sapiens
gaggcaaaggaggaagagaaacagccacccagcgacgggccacgaag

SEQ ID NO: 44399 - RNA, 74 nt, Homo sapiens
ccaagaagggccaccccacagacgagacccaagggccggaccacggagcggccgagaaacgagccacagaagac

SEQ ID NO: 44400 - RNA, 71 nt, Homo sapiens
agcagaggcagccaaaccggagagccccggaagacccagggaagagaaggcggagaacggaaaagcaccag

SEQ ID NO: 44401 - RNA, 74 nt, Homo sapiens
agaagaccaccgggccacaggcccggaggcggagccgcacgagccccgaaagacccgagaccccagcgccaagg

SEQ ID NO: 44402 - RNA, 69 nt, Homo sapiens
gggggccaggaggggagaggaggcaggcccgcgggccggagacaccagaaaccgggggcgcccccaaga

SEQ ID NO: 44403 - RNA, 72 nt, Homo sapiens
cgccggcggagcagaaacgccggcgaacagaaaaaacccgcggaaaggaggagaagaaccaacaacggaaaa

SEQ ID NO: 44404 - RNA, 104 nt, Homo sapiens
ccgaagacccgcaccccaccccgcccccaacgcccaaagagaaacagaaaagagagcccagagggggaccccgacaagacccaccacccaacaacgacagccaa

SEQ ID NO: 44405 - RNA, 63 nt, Homo sapiens
cgagccgcgggaagaggcggcgccgccacccccccccagcagggacggcgcacacgggccgcc

SEQ ID NO: 44406 - RNA, 52 nt, Homo sapiens
agacgagggaaaccaaagcacaaggaaccgggcagacacaagaaaaggagga

SEQ ID NO: 44407 - RNA, 57 nt, Homo sapiens
gcaaagaccgcaaaaaaagaggccgggaagaaggagggacacagcagcgcggagagc

SEQ ID NO: 44408 - RNA, 72 nt, Homo sapiens
aggcggcaggggcaggaaaggacagcagaggcacacaaacggaaccgcacaaagcagacaacaaaaagcagc

SEQ ID NO: 44409 - RNA, 82 nt, Homo sapiens
ccacaggagaacgaggcacagggacccaccgagacaccaagggcggggcgaggaagagcccaacagcgaccacccacccagg

SEQ ID NO: 44410 - RNA, 82 nt, Homo sapiens
gaggagaagccgcagcgggcccggaaagcccggcagaaaccaaaccccaggccaaggccgggcgggggcccgagcaacacgc

SEQ ID NO: 44411 - RNA, 71 nt, Homo sapiens
gacggccaccacgagcacggcccgcgcacgcccggagagaggaaagaccccgaaaagaaagaaagcgagcc

SEQ ID NO: 44412 - RNA, 88 nt, Homo sapiens
agcgcagaaagcaggcgaacccgcggcgcaaaacggagaccaaggaccggacagaggaagaaacccggaaggggaagaggaaagcaaa

SEQ ID NO: 44413 - RNA, 58 nt, Homo sapiens
ggagcgaggaaccagaacgaaaagcgccagaaaggggaggggggagacacgaaccgcg

SEQ ID NO: 44414 - RNA, 83 nt, Homo sapiens
agaaaagagaagcccaaaacaccaggaaggaacagacagaggacaggaggaaaaccaggccacaaagagcggccagaacggac

SEQ ID NO: 44415 - RNA, 89 nt, Homo sapiens
ggacgcaggccggacgccgcaaggaagcggggcggcgcagcgagaggcggcggcggaggggaagcagagagcaaccaagcaccaccaag

SEQ ID NO: 44416 - RNA, 72 nt, Homo sapiens
ggagggcccaccaagaggccacgaaagcaggccgaccacaccgagacgcaaaaaggagcacaccagcgaaaa

SEQ ID NO: 44417 - RNA, 76 nt, Homo sapiens
ccgccaccggaaaccaggaaaagccgcccggggagaggaaccaaccaccaaaccccaggaaccacccaacggcacg

SEQ ID NO: 44418 - RNA, 72 nt, Homo sapiens
aaaaacaggccaccaacccggggagcgacacgagccacccagaaaagacgaagggaaaaaagcagagcccag

SEQ ID NO: 44419 - RNA, 84 nt, Homo sapiens
gagacccgcgggacccgccgcggcgagcgccaccgcaggcaggacagcggccgaagccagagccggggcggcgccaggccccac

SEQ ID NO: 44420 - RNA, 73 nt, Homo sapiens
cgagacaaggcgcagccccagagcaagaacgaggccaaggaggagggacacagagacagcgaagaaagaacgc

SEQ ID NO: 44421 - RNA, 87 nt, Homo sapiens
ggaggaacagaagcggaacagccacagcagcccccaaggagcgcaaggaggcaccccacagcaacagcccccaggcacaacacagca

SEQ ID NO: 44422 - RNA, 78 nt, Homo sapiens
ggcgcgagggcagaaccggaaccaccaggccccgaaagagccagagaaggaaggagggaaacacggcaagcaagcaga

SEQ ID NO: 44423 - RNA, 52 nt, Homo sapiens
ggaggagcagaggacacgaaaagaagcaagaagggccagcagaagggaagca

SEQ ID NO: 44424 - RNA, 60 nt, Homo sapiens
cagaacagggaagaacggacacacaggaggcgcagaagacgcagcgcgacacaaaaacgg

SEQ ID NO: 44425 - RNA, 63 nt, Homo sapiens
ccccccagcggcacgcagccccgcggcacaaccaggacaaagcggcgcacgcacggagacgac

SEQ ID NO: 44426 - RNA, 75 nt, Homo sapiens
agaaggaccaagaaccagacagcgcgggagccaggaaacgcagaccccccacgagaagcaggcagagcaggcacc

SEQ ID NO: 44427 - RNA, 73 nt, Homo sapiens
gggccgagagccgcccgggccagcggccgcgcacccccggccggaggcaccagcgcggccacagcaggcggag

SEQ ID NO: 44428 - RNA, 66 nt, Homo sapiens
gaggacagagagccagaggccagcagcaaagaagggcagagacacggagcaacaagccccgacacg

SEQ ID NO: 44429 - RNA, 71 nt, Homo sapiens
gacaaaagggccaaagaagggagagaggcaccgggcgagccccgcggccagcgccccaccgggagccagcc

SEQ ID NO: 44430 - RNA, 74 nt, Homo sapiens
gcagcgcccccaaacgcccgacgccgccgcaggaagagggaagcggaggcggagcgcgcggggcaggagcgcgg

SEQ ID NO: 44431 - RNA, 84 nt, Homo sapiens
gacggagagaaggcggcgcgggagggaaggcgcgggacgagagcaagagcgaggaggagagcgaggaagaggaagaggacagga

SEQ ID NO: 44432 - RNA, 87 nt, Homo sapiens
ggcaaagcaggcacggcaaagaaggagaccccagaccccgcacaagagagaaaagcccgaagaaagcggaccccaaagacaggcaga

SEQ ID NO: 44433 - RNA, 78 nt, Homo sapiens
cagggacacccaggaagagcggccccgcggggggcgagaccggcgcgacccgaccacccaggcccagcacgacagaga

SEQ ID NO: 44434 - RNA, 82 nt, Homo sapiens
ccgggggccggccgcgccggccggccgggaccagggacccagggccggcacgggcagcgagcagccacccggaggagggcgc

SEQ ID NO: 44435 - RNA, 66 nt, Homo sapiens
gcggggcaccccggagcagcccgcaccacaaaccgggcggacgcagcccccaacccgaccggcaac

SEQ ID NO: 44436 - RNA, 76 nt, Homo sapiens
cccgcaccagcggggcgagagggggcaggggcagccgccagcccaaacaggcggcacaggcagacgagaaggacga

SEQ ID NO: 44437 - RNA, 72 nt, Homo sapiens
gaacaccagaacagcggccacccgacagcaagcaccggagggagaagacaggccaggaggggaggagggagg

SEQ ID NO: 44438 - RNA, 49 nt, Homo sapiens
aagggggcacaacagaaaagcagagaccggacggacacaagcccacacg

SEQ ID NO: 44439 - RNA, 67 nt, Homo sapiens
ggaggcaggccagcgcagcaccaccggcagccggggagccacgacaacagcaaaccgacaccagcga

SEQ ID NO: 44440 - RNA, 52 nt, Homo sapiens
gaagagcgcgaaaagagacacaagagcaggcaagggccgcaaggccaggcgc

SEQ ID NO: 44441 - RNA, 62 nt, Homo sapiens
caaccagaggcagccagcagggggagagcggaagcgcagcacccacccgggggccacggcgg

SEQ ID NO: 44442 - RNA, 73 nt, Homo sapiens
ccaccaggacagacacccgcaacccagccagccaccaggggagagccccacgacggcaggcgcacggaacagc

SEQ ID NO: 44443 - RNA, 61 nt, Homo sapiens
gccgaagcagccaccaggaggcgcaggcacaagaagaaaggaagaaccacacgacaaagag

SEQ ID NO: 44444 - RNA, 86 nt, Homo sapiens
cgagggccagccgggcggggcccggcggagcccggacgggcgccacaccaacaccacggaaccagcgacagcgaccgaagaacaga

SEQ ID NO: 44445 - RNA, 85 nt, Homo sapiens
gggagagagacgcgggaaccgccagcaaaccacacaggcgggagcagcggaagacaccaaggccagggagggccaccgcacggaa

SEQ ID NO: 44446 - RNA, 37 nt, Homo sapiens
accaacgaaacgcaggagggagggagcagaggcgagc

SEQ ID NO: 44447 - RNA, 61 nt, Homo sapiens
gcacccggcaaaggaaggcacaaacggcagaacgaagcccccggcaccaagaggaagcaag

SEQ ID NO: 44448 - RNA, 69 nt, Homo sapiens
ccccccccacacacgacgcggggcacggccgaccgcgccgagcaggggcaagacgccaagagaaaaggc

SEQ ID NO: 44449 - RNA, 75 nt, Homo sapiens
cgagcacccgcaagaagagaacccagggaagccgaagagccaggaaaggaggcccaagaggcgaaacgcaacacg

SEQ ID NO: 44450 - RNA, 54 nt, Homo sapiens
cagcgggaggccagaggaagggacccggcagcccaaggagcaggggccagcagc

SEQ ID NO: 44451 - RNA, 71 nt, Homo sapiens
acaaagccagcacaacggcaggccagaagagccaagcaagcacggccaagccagggcaggggcccggagga

SEQ ID NO: 44452 - RNA, 79 nt, Homo sapiens
agaaggcaggcaccacaaaaaggacagagcgcagcaaaaccaacccaccaaaaagccaggaacaaacaaaagaacccga

SEQ ID NO: 44453 - RNA, 71 nt, Homo sapiens
acaagggcgccagggagcggaccaagcccagagggaacccaccagaaaacgacacacaaacgcagccaacc

SEQ ID NO: 44454 - RNA, 79 nt, Homo sapiens
ggacaggaaaaaaagagaaagccaaaaaggcccagacacagaaagacgaggaaaacagaccacagagaagggaggagga

SEQ ID NO: 44455 - RNA, 59 nt, Homo sapiens
gacagagaagggaggacggggcccacagcagccccaacgcaggacaagcccagcaagca

SEQ ID NO: 44456 - RNA, 71 nt, Homo sapiens
caccgcaacaaaacacgaaagacacggaagcacacgcgaggcaaacacacagccaaggggaaaaagaaaag

SEQ ID NO: 44457 - RNA, 78 nt, Homo sapiens
cacagacacgagggaggacagcaaaaaccagggcccacagaggagggcagagcaacaggcggaaaaagggcaagaagc

SEQ ID NO: 44458 - RNA, 75 nt, Homo sapiens
aaacacaaaacaccgaggggcagaaaaacaggaggccgccaaccgagcacaaaacggcaaaaccggaagccaacg

SEQ ID NO: 44459 - RNA, 79 nt, Homo sapiens
ggagggaggggaaagacccacaccaagaggagacacaccccaccgcgagcgggcggacgggcccaacaccggggcgagg

SEQ ID NO: 44460 - RNA, 70 nt, Homo sapiens
ccaagaccgcggcacgcccgagccccgcggagccccgacaccaaagggaaagaccaaaccccaaagcagg

SEQ ID NO: 44461 - RNA, 84 nt, Homo sapiens
agaagacaagccgcccagcccaccgcaaggacgacgaggccaggaccggcccagaggagggagccacggaaagacaacgcaggg

SEQ ID NO: 44462 - RNA, 91 nt, Homo sapiens
gccagccgaagaaggcgagcaggggcgggagagccccgcagaagacgccgacgaggggagcgcgacaaccggccgaggacacagcgccccg

SEQ ID NO: 44463 - RNA, 75 nt, Homo sapiens
gcccaccagcggcgccaccacgagcagagccgcccggccacggggaccccggaggccacccaccccaccagagcc

SEQ ID NO: 44464 - RNA, 79 nt, Homo sapiens
gcgaccacaaggaacgaggggccccaagagcacagaccagcagccgccaaaggggcaacgaggaacaggccaagaaaca

SEQ ID NO: 44465 - RNA, 81 nt, Homo sapiens
aacacaaggccacgaaagccccacaccagaccacggagggagcggaaaccgacgcagacggcccgagacgggagaaaggag

SEQ ID NO: 44466 - RNA, 65 nt, Homo sapiens
cagaaggaaggaaaccgagaggaaccggggcaggaagacgcaggagagaccagcagacagaacga

SEQ ID NO: 44467 - RNA, 78 nt, Homo sapiens
aaaacgaaggcggcggggcaagaaggaacagacaaaaacggccggaaggaaacacaggacaccagggacagcgaagaa

SEQ ID NO: 44468 - RNA, 41 nt, Homo sapiens
cccaacagcaagagagcagagaaaggacagggacaggaaag

SEQ ID NO: 44469 - RNA, 88 nt, Homo sapiens
gccacgggggccgccgcagcaccaggcgaccaccgcagcaccagcgcgggccggacccagcagccagcgaagccccaaggaagccggg

SEQ ID NO: 44470 - RNA, 71 nt, Homo sapiens
gaaagaaccgagagaacgagcacccccgaagcacccagggggagagagacgcgggaaccgccagcaaacca

SEQ ID NO: 44471 - RNA, 61 nt, Homo sapiens
cacagccacaagacaagcaacagcccaagaaaagaggaggaggagagggaaccagagcgcc

SEQ ID NO: 44472 - RNA, 116 nt, Homo sapiens
accaaaaagagagccaggcagaaaaccccccaggggaaaaagcagcaagggcaacaaaggggacaccaagaacgaagcacccagaccagcaaaagagacaagaagcaacagaacac

SEQ ID NO: 44473 - RNA, 65 nt, Homo sapiens
aagcgacagagcgcccgagggacccacaaaagcgccagcagaagccgaagggcgaagagagaaca

SEQ ID NO: 44474 - RNA, 77 nt, Homo sapiens
cacgaagagaaggaaaacacaaggggaagcgaggaggaaggaccgagcgcaggaaccaggccagcgcccagcaagcg

SEQ ID NO: 44475 - RNA, 84 nt, Homo sapiens
ggaacgcgcaaggaggaggagacgcgcgcgggaaggcagcccgcacgaccagcgaaccgcccaaggaaaaaaggccgacaacga

SEQ ID NO: 44476 - RNA, 72 nt, Homo sapiens
agaccccagcccagcccccggcagcaggagccacgacccgacacgcgcagccacgcgagggcagacaccgca

SEQ ID NO: 44477 - RNA, 74 nt, Homo sapiens
ccgcggaggaggcgcaagagcgcaggacgaggcagcgcacagcccagcggaggacacgccggggcagggcagcc

SEQ ID NO: 44478 - RNA, 117 nt, Homo sapiens
ccaccccacgcgcgccgcgcgagccaccgcacgcggccagcgcgagggacccggccagcccaggcacgcgagaaggggagggggagaaagaagaggaagaagccacaggcaaggaga

SEQ ID NO: 44479 - RNA, 87 nt, Homo sapiens
ggcagcagcgcaccccaccgaccagcggacacggagagcgggacgggcagaagaaaacccaccaaggggcaacaagcacccacaagg

SEQ ID NO: 44480 - RNA, 75 nt, Homo sapiens
ggacgggcgcaacacggaggaagcggcgcacagccggaggagccaccaacagaagcaggagccaggaaaccaaaa

SEQ ID NO: 44481 - RNA, 81 nt, Homo sapiens
ccagacaggcggcgccaccgaacagacccggaaggacggcgaggcgcgagcccagcagaccgcgcaggcccgggagcacgg

SEQ ID NO: 44482 - RNA, 78 nt, Homo sapiens
gcagagcagagcgcgacccgagggccaaaaacagacagaagcacccgcggaccgcaccaggcgcagaacccacgcgcc

SEQ ID NO: 44483 - RNA, 77 nt, Homo sapiens
ccacggccacagccgccgcagacccagcagccaagagggaagcagacgagagcaaggaacggggcgcgaaagacacg

SEQ ID NO: 44484 - RNA, 69 nt, Homo sapiens
ccaaaaggacaaaccagacgaagaaagccaacgaaccacaacaggcagccccgggccggggacgacaac

SEQ ID NO: 44485 - RNA, 54 nt, Homo sapiens
cgggagcaagaagaacacccagagaccccaaacgacacaagaccacagagaaaa

SEQ ID NO: 44486 - RNA, 66 nt, Homo sapiens
ggaagccggcgaccccagcaaggagaaaaaaaagggggacgggcgcggacccccggcccgcaggga

SEQ ID NO: 44487 - RNA, 35 nt, Homo sapiens
agaacacacccaggcagagacagccgcgacggaag

SEQ ID NO: 44488 - RNA, 90 nt, Homo sapiens
ggggcaccgccagagccaaggccagggggcaaggcggcaaaccagccagcacgggggcccagccagccagcagcgaggggggacggaggc

SEQ ID NO: 44489 - RNA, 70 nt, Homo sapiens
ggcagcgcggggcagcgcgagccgggaaggggaagagcgagcaaaggaaaacacagaacagagacaaaga

SEQ ID NO: 44490 - RNA, 78 nt, Homo sapiens
cacccgcacacagccaaagcgcaaaggaaggaggcagaaagggagccccaagagagagggccaagccaaccggccaaa

SEQ ID NO: 44491 - RNA, 76 nt, Homo sapiens
ggcggggagcgcggcggccgccgggcgcgcaggcgaacagccagcaaagacaagagcagaccagcagccgcagcgc

SEQ ID NO: 44492 - RNA, 77 nt, Homo sapiens
caagacacaagcagaagacaagaagaacaagagacaagaggcccaggaaagcagcaggggggcgcacacgcagaaag

SEQ ID NO: 44493 - RNA, 105 nt, Homo sapiens
aggggggcggcagcggaagacaaaccacaacaacacagcagagaaagaccccacccaacccccgagaagaaacgccaagcaagaagggcaaaacaggccccgcga

SEQ ID NO: 44494 - RNA, 59 nt, Homo sapiens
gccccccggaaccagcagcgcagccgggggccagaggagcgcacgcaaagcagggagaa

SEQ ID NO: 44495 - RNA, 87 nt, Homo sapiens
cagggcaaaggagagcacaaccacgcagggaagcccaggggcaggaggagagaccgccgggcgcaggcacaggaacaagccaccacc

SEQ ID NO: 44496 - RNA, 55 nt, Homo sapiens
cgagagacgcaagacgaacaggaacagagaagcggcagaacagagcagcccaagg

SEQ ID NO: 44497 - RNA, 89 nt, Homo sapiens
agagcccaccggaaggagaaggaagaggagcgggaccaagaaaggcccagggaccaaagcccggacaaggcccgagcaccaggaccgca

SEQ ID NO: 44498 - RNA, 68 nt, Homo sapiens
gagggcgagggagcgaaaggggaaggcccccacgcggaaacgccagaggaccccgcccccaacacccc

SEQ ID NO: 44499 - RNA, 62 nt, Homo sapiens
caaaacacacaccagcccgcgagcgcacggacagagcgggagccaccagcgccaaagggaag

SEQ ID NO: 44500 - RNA, 74 nt, Homo sapiens
cgcgggccaggcccccgcccgcgcgcgcgcgcgccgaggcggagcgccgagcgaacggccgagcgaccaggaga

SEQ ID NO: 44501 - RNA, 73 nt, Homo sapiens
cccgggccccggcgcggccgcggcgggcggcccagcgcggaaaccgcggccggcacaaaaccggcacacaaaa

SEQ ID NO: 44502 - RNA, 78 nt, Homo sapiens
gagaaaaaaagaagaccaaccaaggcggcaaagaagagggaccagacaccgcagcagaagcaaggaaaaaggaaagaa

SEQ ID NO: 44503 - RNA, 83 nt, Homo sapiens
gaagggggcccaggggggccaggcgacgaaaaggccaagagaggccaacagaggaacaaggcccgcagaacccaagagcaaaa

SEQ ID NO: 44504 - RNA, 64 nt, Homo sapiens
ggaggccaaagagacaacaagaaggaccgaggcaggagcgggcgcagagacagcaaagagggag

SEQ ID NO: 44505 - RNA, 89 nt, Homo sapiens
ccgggccgaggcggcgagaccgcggccgacagggccaccagcgcccgcggaccggggcggccgcaggcacgagaagagaagcccagagc

SEQ ID NO: 44506 - RNA, 76 nt, Homo sapiens
caggacagaagggcgagaaaagaaacagccaagggacaaggagacaaaggggaacacccaaccggagaaagacacg

SEQ ID NO: 44507 - RNA, 81 nt, Homo sapiens
cagggagaacacccaacgggagcggcggagaaaccaccacaaacacgaggccagcaacgaccaacaagacagacccgccca

SEQ ID NO: 44508 - RNA, 82 nt, Homo sapiens
aagacaaagaccgacgggagaggggaggggacacaggcaaaacggacaaagaccgcaaaaagacccgaacggaaagccaaac

SEQ ID NO: 44509 - RNA, 60 nt, Homo sapiens
acccaccggcaccagaagacaacccgaggcagaagggaagaaagcggaggcggcggcgcg

SEQ ID NO: 44510 - RNA, 96 nt, Homo sapiens
caccaagcccacccgccacccgcccgaccacgggggcggccggcccggcgacgggcacggaagaagcaaacaggagcacaagcaccgaaaaggccc

SEQ ID NO: 44511 - RNA, 75 nt, Homo sapiens
cgcgcggcaccccggccaccggcaggggggcccacgcggaggacgcagaacacggcgggcggcccgccaacgacg

SEQ ID NO: 44512 - RNA, 75 nt, Homo sapiens
ccggccccgccagcagcacgggaggccgcccggaacccggcaccagccgggcaaaaacccaaaccaacagaaccg

SEQ ID NO: 44513 - RNA, 73 nt, Homo sapiens
gcgggaaacaaccaaaggggagccagaaggaccagcagggccggcaacaccccaacacgggcagaggacggag

SEQ ID NO: 44514 - RNA, 78 nt, Homo sapiens
gaaccaccagaagccagcccccaggcggaacgcccgccccgcagagaggcagacagccacacacacccccgccggcgc

SEQ ID NO: 44515 - RNA, 68 nt, Homo sapiens
gcaaaccaggacaggggaaggcagcagaaacaccacgacagacacaagaagaagaaaaagaaaaaaga

SEQ ID NO: 44516 - RNA, 58 nt, Homo sapiens
gccgaccgagacgggcggagaggagaagcacaccaggcccaggaaagccggaccaaac

SEQ ID NO: 44517 - RNA, 70 nt, Homo sapiens
gagcccgcaccgggccggcagcggagcggaggcagacacacacggggggagagggagggggggacacggc

SEQ ID NO: 44518 - RNA, 77 nt, Homo sapiens
gcaagcggagccccccaagagccggaaaggcacacagagaaaaaaagggaacaaaacacagcaagcagacaaaaggg

SEQ ID NO: 44519 - RNA, 54 nt, Homo sapiens
agcccaaggacaggacggacccccgaaagagggggacacagccagggcgcaggc

SEQ ID NO: 44520 - RNA, 84 nt, Homo sapiens
cgccaaggcggcgcagcggagaacaccaacaccagcagcagaggcccccagacccgagccagcagaaccaccccaccagaaccc

SEQ ID NO: 44521 - RNA, 73 nt, Homo sapiens
aacgaagacgcaggggagacagggaaagagaaggcacagggcagagcaacagagacacaggagaggaaaccca

SEQ ID NO: 44522 - RNA, 77 nt, Homo sapiens
gacggaagcaaggaacaaaccgaagaacagcgggaaagaaggcaaaacacggagccaggacaaaaccaggcagaacc

SEQ ID NO: 44523 - RNA, 71 nt, Homo sapiens
ggaacagaagagcggagagaaaagaacaggggggcgacagacacagaaagaccacaacgccgacccgcgca

SEQ ID NO: 44524 - RNA, 84 nt, Homo sapiens
caacgccgccagcgccggcccagagcaccccaccagccaaaagaaacccccaaaaccggaagaaagagaaggaacagaggacac

SEQ ID NO: 44525 - RNA, 81 nt, Homo sapiens
gcccaaccccgagccgcgggcacagaaagaaccaagagggagacaagggaaaaggaagacaaaaaacacaaggaaagaacc

SEQ ID NO: 44526 - RNA, 86 nt, Homo sapiens
cgcgaccgcgccccggcccgacaggcgccggagcgaccccggaggaggagcagaaggcgaccgagaacacagagaacgggaaacaa

SEQ ID NO: 44527 - RNA, 58 nt, Homo sapiens
gcagcggaaaaaagccaccgaaggggaaagccggggccccggggacccgcggcacgga

SEQ ID NO: 44528 - RNA, 58 nt, Homo sapiens
gcgacaggccccggccaccagccaccgcagaggacagacagcccacacccaggccgaa

SEQ ID NO: 44529 - RNA, 76 nt, Homo sapiens
acacgcgcgggaccccgggcacggcgcgcgggaggggaagggcaaaccggcggccagaaccgaagccaagaggaga

SEQ ID NO: 44530 - RNA, 55 nt, Homo sapiens
gccccgggcaccggcagcccgccccgccccaaccaccgggcccccgccgggcacg

SEQ ID NO: 44531 - RNA, 75 nt, Homo sapiens
aaggaaacaacacaaccccacgccacaggcgcacagcgcaagcagacgccacaagaacaaccgagcagagacaaa

SEQ ID NO: 44532 - RNA, 83 nt, Homo sapiens
ggcgggcgccggagggaagagaggagggaccaacacgaccaggagagacggaaggagaacaagccgcgcacccggagacccca

SEQ ID NO: 44533 - RNA, 77 nt, Homo sapiens
agacggagacggccccgccacccaacggcgacgaggcacaaagccaagaagccggcccaccaagagggcaaggcggc

SEQ ID NO: 44534 - RNA, 50 nt, Homo sapiens
cgcagggcgcccccgaacaccgaccgaggacaacaggagagaagcaaacc

SEQ ID NO: 44535 - RNA, 68 nt, Homo sapiens
cggccagccagcacaaacggcaccagcaaacacaaaagggccaaaccaccaacgagccaaagaggagc

SEQ ID NO: 44536 - RNA, 94 nt, Homo sapiens
ggggaggagcccgcgaccgcgccccggcccgacaggcgccggagcgaccccggaggaggagcaggcagggaccacagcccacacgggcacgagg

SEQ ID NO: 44537 - RNA, 71 nt, Homo sapiens
ccgagaccgcacaccaccaaagcaggcccagccccaacaacgaagaacccgagaaaggagaaacacagacc

SEQ ID NO: 44538 - RNA, 67 nt, Homo sapiens
accaccggacccgggcaaggacacaggagcgggaaacgcagcgacagcgaggaagagcccccacccg

SEQ ID NO: 44539 - RNA, 63 nt, Homo sapiens
ggcgcaaaccgcggaaggcacagcgcggaacggagcagacaagggagaaaacgaaaccgaggc

SEQ ID NO: 44540 - RNA, 55 nt, Homo sapiens
acagagcacacccgagaagcaaaaaaggccacgcacgggacccagacaaacgagg

SEQ ID NO: 44541 - RNA, 58 nt, Homo sapiens
ggccgcgccaggagccaccaagcgcgcaccccccggaggcggccgagcccacgcgacg

SEQ ID NO: 44542 - RNA, 60 nt, Homo sapiens
cggcgacccaccacgccagccaggagccaaaaaccgaacacccggaaggggacaagggac

SEQ ID NO: 44543 - RNA, 73 nt, Homo sapiens
aaaagggaaaggacgggaagggcgacagcgcaaggagacgaaggcggcaggagggaaagcaaggaaacgcccc

SEQ ID NO: 44544 - RNA, 82 nt, Homo sapiens
ggggaccgcacacccaagaaacacaggggaggagagggggacacccgcaccgggacacgagcccccccggaacagaggacga

SEQ ID NO: 44545 - RNA, 76 nt, Homo sapiens
ccacagccgcaggacccacggagccgccccccagcagggccaggaccgaagcggcgggcgacacggaaggagaaac

SEQ ID NO: 44546 - RNA, 72 nt, Homo sapiens
gcaaaaaaagagaaagaccagcaagacaaggcggagggccccccacgcgagaacccgggccggggcccgggg

SEQ ID NO: 44547 - RNA, 58 nt, Homo sapiens
gcagccaagcaggaccacccaccagccaccagaaggagcacaacaggcagacagacaa

SEQ ID NO: 44548 - RNA, 74 nt, Homo sapiens
gaaaaggagggagagagcaccgggacaccacagcaagaggaacgggcacgccagaaaagaccaggagaagcaga

SEQ ID NO: 44549 - RNA, 95 nt, Homo sapiens
ggccggggcgcaggggccggggggaagaagggaagccagcagagccacagcccacaccagccagcaaggagaccggcgggcacgcgcacccagga

SEQ ID NO: 44550 - RNA, 79 nt, Homo sapiens
aagaaggacaggggccgcagccaaggaaggaggccgcaaacagacaggaagagggaggagagagcgaggccacccagaa

SEQ ID NO: 44551 - RNA, 70 nt, Homo sapiens
gagaagccagaccgccccgaaaacagaaaagaaccacgcgaaccaccagaaaagcccgaggaacgagcga

SEQ ID NO: 44552 - RNA, 59 nt, Homo sapiens
ggcgcgccggagggaggaggaagagccagacccagggagcaaggccacgggggggaccg

SEQ ID NO: 44553 - RNA, 65 nt, Homo sapiens
acggacaaggaacagagaacgccaccaggaggaagagaaccgacaagggagaggcacaccagacc

SEQ ID NO: 44554 - RNA, 66 nt, Homo sapiens
aggaccccgccagcccaagaagcgaggacagccccaacgaggccccgagcgggaggcgcgaggcca

SEQ ID NO: 44555 - RNA, 74 nt, Homo sapiens
gaaagcaagggagcggcacagccagaagaccgaagcgcgacggaaggcgccaccagcaaaaccagagaaacagg

SEQ ID NO: 44556 - RNA, 40 nt, Homo sapiens
aggagaaggaggaggaacggcggcaggaccacaccccaag

SEQ ID NO: 44557 - RNA, 78 nt, Homo sapiens
ggcggaacccccggcacgagcgcgcccagcgcccgcagaaggcccaggacaaaccggcgaccacacacggggacgacg

SEQ ID NO: 44558 - RNA, 80 nt, Homo sapiens
ggccagaaccaaacagacgacaaagagcacggacacggacaggccaggcccacggcccggcgacgaaggcacaagaaacc

SEQ ID NO: 44559 - RNA, 77 nt, Homo sapiens
gagggcggcccggaccgggagacacggccagacgcccccaggcggagaacggaaaagcaccaggaagcagagaggac

SEQ ID NO: 44560 - RNA, 53 nt, Homo sapiens
agaaaacgcccaaaccagaggcagaagagacaacacagaaaccagggcggagg

SEQ ID NO: 44561 - RNA, 63 nt, Homo sapiens
cccgagaaaaggaagggacagaacgagagccagacaggccagccagggcgggccacccaccgg

SEQ ID NO: 44562 - RNA, 59 nt, Homo sapiens
gggggaacggggcgcccccaaagaagccggcggccccaaagagacggaggaaaggcccg

SEQ ID NO: 44563 - RNA, 55 nt, Homo sapiens
caggcacaaggcgcagggggaaagagccagcaccgccgaccgccagcgccagaag

SEQ ID NO: 44564 - RNA, 73 nt, Homo sapiens
acacaacccaggcaaccaacaggaccggaaggccaagagagccaagcgacaggcaccccaggaaaccggcaaa

SEQ ID NO: 44565 - RNA, 82 nt, Homo sapiens
gcagacagagcaccagcaccagcagaggcagagccagagcccaagcccccgcagggagcccaccgcgaccaggaccaccgcc

SEQ ID NO: 44566 - RNA, 57 nt, Homo sapiens
acgccgaagagccagcgcccggccgcacacgaaccccaaagaggcccggaggaaaca

SEQ ID NO: 44567 - RNA, 79 nt, Homo sapiens
ggcccgcgcacaagaacgagagggcgaagacaggacggcccaggcagacacggaggaggaggaagaggaggagggcgac

SEQ ID NO: 44568 - RNA, 57 nt, Homo sapiens
acccccacgcggccagcgaaaacgcccagaggagagaacacgcacaggaggaagaga

SEQ ID NO: 44569 - RNA, 87 nt, Homo sapiens
gcgggcaggccggacaggaggcagacacaacacgagcgggcgggcccagacccgcagcgccgagggacgacgcccacccacaccccg

SEQ ID NO: 44570 - RNA, 72 nt, Homo sapiens
caagcaaaaacggaaacacaacgaaaccccagaccagagaagcagaagaaggacaccccacaccgaaacaga

SEQ ID NO: 44571 - RNA, 109 nt, Homo sapiens
ccaggaacaacgcggaccacacccgggagagaggggggccaccagggcacacagggaccaagaagccccggggacacgcgagaaaagacgccgaagggaagaccagcgg

SEQ ID NO: 44572 - RNA, 64 nt, Homo sapiens
gaggaagaaaacgcacaggcacgagaagaagaacagagacacgcaaaaaacgaagaacagaggg

SEQ ID NO: 44573 - RNA, 84 nt, Homo sapiens
gccagcacgccaacccggacggacaacaccggggagcgcggaggcgcaggggaggagacccagccagagggaggaccgaagacg

SEQ ID NO: 44574 - RNA, 71 nt, Homo sapiens
cagaaaaaaaggagcgaacaggaggcaccggggggaccagggccaggggagagagaaagcccagaaagaaa

SEQ ID NO: 44575 - RNA, 90 nt, Homo sapiens
gaccgcacaggccggagagagccgaggcaggaccccgggacacccggaagccaggaaagcacccggaggagaagaggcgcggaacaagcg

SEQ ID NO: 44576 - RNA, 77 nt, Homo sapiens
gaacaaaaggaacaacagacaaaacagggaaaaggccacccaggaccagagacaagaagagaaaagaacagcaaagc

SEQ ID NO: 44577 - RNA, 82 nt, Homo sapiens
ccggagcccgggggccccccgccccggcgcggaccccccgagaaaagacggcacagccccaggggcgggccacgcgcggggc

SEQ ID NO: 44578 - RNA, 75 nt, Homo sapiens
gcggacccagcgccccggccggacgcaccccccaggggcgggccagagaacccaaaagcaaacccaagaccgaaa

SEQ ID NO: 44579 - RNA, 61 nt, Homo sapiens
aaggcgcaaacgacaccacccgaccgcgccagcagccgcccaccccacgccgagggcacga

SEQ ID NO: 44580 - RNA, 60 nt, Homo sapiens
caagccccaggccgaggagcccacaggcgggcaccccacgcgaccagcccccagagaaag

SEQ ID NO: 44581 - RNA, 71 nt, Homo sapiens
aggaccaagaaccagacgaccgcccggaccggggcgggcggccccacggggggcccacccgaagcaggccg

SEQ ID NO: 44582 - RNA, 76 nt, Homo sapiens
cagaagaagcgggaaggcgaaacaccagggcggggagaagagggggcggcgaggaaaaaggcggggagcgcagcag

SEQ ID NO: 44583 - RNA, 72 nt, Homo sapiens
ggagaagcaaccggcgccaccagcaaccagagggccagagggaaggacagaggggggccagcagcaagaaca

SEQ ID NO: 44584 - RNA, 78 nt, Homo sapiens
cggagccccaccagaaaccaaggacaccaccgagggcggaggggaaagcgcgaaaaagggcgcaaggccaagccagag

SEQ ID NO: 44585 - RNA, 79 nt, Homo sapiens
aaggggccagacccacccggaagaagcaggcacagccagaggacaacacacacacacaagaaacagggccaggaggggg

SEQ ID NO: 44586 - RNA, 75 nt, Homo sapiens
gagaaagaaggcaacaagaagaaggccagacaaagggaagggacaggagaaagcagaaagccgcaaggacgagag

SEQ ID NO: 44587 - RNA, 84 nt, Homo sapiens
cgaggggcgcaaagcccaacggaggccacccgggcagggggcagggcccagaggccggagcgagcccagaagagaggcgaggca

SEQ ID NO: 44588 - RNA, 71 nt, Homo sapiens
aacaaagaaggaacacggaacccaggagcgggaaaacaaagaaccgaacaacggaacacccaagacaccga

SEQ ID NO: 44589 - RNA, 72 nt, Homo sapiens
caagaacccagcccacaccacaacacagaacgaagagaagaagcgagaggacaagagcaagccaaaggagac

SEQ ID NO: 44590 - RNA, 75 nt, Homo sapiens
aggacccagaagcgggccgcagccaggcgggaaaagccagacagccagcaggggcagaagcagcagacggaacga

SEQ ID NO: 44591 - RNA, 81 nt, Homo sapiens
gcgccaccaaagaccgcgacgccagacaggacccagaccagccaaagagaagaagaaaggaagcaaaacaaagaaaaaaaa

SEQ ID NO: 44592 - RNA, 78 nt, Homo sapiens
ccgaccagaggagcggagaccgacacaacccccggggcccacgcggccaggaggagaaaggccccagcgggggcccgc

SEQ ID NO: 44593 - RNA, 82 nt, Homo sapiens
cgcgccagccggccgcgacaccagaacagaagaggaacgacagcgccaccccccagaaggcgacaacagaaggcacggggac

SEQ ID NO: 44594 - RNA, 79 nt, Homo sapiens
caaccagggccaccacgggacgaaacccgcccccccacccacgaaaggaccggccagccgcagcgagaccaggagccgc

SEQ ID NO: 44595 - RNA, 84 nt, Homo sapiens
aggaaccccgcgcgagccagcaacggcggcgagcaggccgacggcccccacggaacccccagaacgcagcagcgagagcaaggc

SEQ ID NO: 44596 - RNA, 74 nt, Homo sapiens
cgcggccgagacaaaggcaccaggccaccacagaaacaaaagcaacaaagagggcaaagagagggaagcagaga

SEQ ID NO: 44597 - RNA, 62 nt, Homo sapiens
aggagaacgaaaagagagcaaaacagaaggaaaaaaaccagacacaggaacggagagcaaca

SEQ ID NO: 44598 - RNA, 70 nt, Homo sapiens
aaaaccaaagaagcagcagcggaccgaggaagccaacgcccacaagggaacaaacaccccaccaacagcg

SEQ ID NO: 44599 - RNA, 74 nt, Homo sapiens
aacacaccaggcccgagggagccgagcgcccaaaaaaccgagggggacgcggaagagacagcagaacaagagcc

SEQ ID NO: 44600 - RNA, 72 nt, Homo sapiens
ggcaggccgcgaggccgcccggcggcaccgccaggaagagcacgggacaggaagaagcaaggccgacgcagc

SEQ ID NO: 44601 - RNA, 79 nt, Homo sapiens
aacaacagaaaaggcaggaacaggggaacagcaagcacagccggaggcaaaagaaagagacgcgggcaagacaagggca

SEQ ID NO: 44602 - RNA, 76 nt, Homo sapiens
cggcagagcggcgagggggcgcggcccggcccgaacaggcggaaaccgcgaggaaacaaaaacagcaacgggggca

SEQ ID NO: 44603 - RNA, 81 nt, Homo sapiens
cccaggccaagcagccaccagcagcccccagagcgggaccacaggccagccggaggccccgggccccaaccggccagccca

SEQ ID NO: 44604 - RNA, 75 nt, Homo sapiens
gacaccgcggaccaccgggcgcccgcgccggagagcccagaaggggaagacccccagcgaacagagacccaaaaa

SEQ ID NO: 44605 - RNA, 75 nt, Homo sapiens
ggaccccagccccagaacacggaagaaaccccacccagggagaagaaggaacggaaccgggaaggcgagacaacc

SEQ ID NO: 44606 - RNA, 81 nt, Homo sapiens
aggggccaaccggaccgcccccaacaaccaggccgagaaaaggggccagcgagccggacgccgggaaggaagaacagccag

SEQ ID NO: 44607 - RNA, 42 nt, Homo sapiens
caaggccaagggcaaggagacaggccaagggcacagagcgag

SEQ ID NO: 44608 - RNA, 57 nt, Homo sapiens
ggccccgaaccagaagcccccagggcccacaacggcaggccacagcgggaaagggga

SEQ ID NO: 44609 - RNA, 80 nt, Homo sapiens
aaaaccgaagggaaggccagcagcgcgcggagaagaacggggagccagacgccgcgagcggcacaaggacaagcggagcg

SEQ ID NO: 44610 - RNA, 74 nt, Homo sapiens
aaagcacacggcgcccgcgcacacacaggggaggcgcaggcgcgaaggaaggaaccaagaacagagaccagcac

SEQ ID NO: 44611 - RNA, 86 nt, Homo sapiens
gcgcggcgcgcgggaccgcacaggccggagagagccgaggcaggaccccgggacacccggaagccaggaaagggaaaaggaaacca

SEQ ID NO: 44612 - RNA, 79 nt, Homo sapiens
ccagaccaagaagaagcagggaaaacacgcaccccgacgaaccacgacacccagagcaccgaacaggggagagaccgca

SEQ ID NO: 44613 - RNA, 74 nt, Homo sapiens
aggaccacagccgagcgagagcaggaagacggacgaacgaagacaaagcaaaaccacaggagaaacagaaacag

SEQ ID NO: 44614 - RNA, 38 nt, Homo sapiens
gggccagggccagagcaaagcgagggccagcccccgac

SEQ ID NO: 44615 - RNA, 58 nt, Homo sapiens
cgggagaggaagagcgaggaggaacgcgcaaggcaaagcaccgcccggccccgggccc

SEQ ID NO: 44616 - RNA, 80 nt, Homo sapiens
gagaagggaagagggggccgccgaggagccccggccgcagccgggcccgagagagcagcggaaagagccaggcagaaagc

SEQ ID NO: 44617 - RNA, 80 nt, Homo sapiens
ggcggcccgcaagaagaccgagaagggaggagcgcacgacgggaacccacgagggggaggaggaagagaagcgcgcccaa

SEQ ID NO: 44618 - RNA, 74 nt, Homo sapiens
ggagcccacccagccgccagaacaaagcagccgacacaaccgaaaaagaagccgcaccaccacccaaacacgga

SEQ ID NO: 44619 - RNA, 93 nt, Homo sapiens
cgggcaggaaggagagccccagcgaggaagcacaccaccaaggaacgggcgcagcgagaggagccaaaaccgcaggcagaagagaaaagaagc

SEQ ID NO: 44620 - RNA, 74 nt, Homo sapiens
gaggcggcggcagacgggacagggacgagaggaccgccgaagagcaccagagcgcaccccccgagggaggcccc

SEQ ID NO: 44621 - RNA, 75 nt, Homo sapiens
cgggccagagaaaagaacagaagcgcacaaagcagccaacagaagagcgaagaaaagcagaaaaaagccacggag

SEQ ID NO: 44622 - RNA, 79 nt, Homo sapiens
ccccagcgcagaacggagaggagcgcgacgagcgaggcgcagccggcagacaacccggaggaccgcggaagagccgcac

SEQ ID NO: 44623 - RNA, 77 nt, Homo sapiens
ggggaacaaggaaaaggcacacggacagaccccaggaagggaagagacgccggaggagggaacccacacccgagcag

SEQ ID NO: 44624 - RNA, 65 nt, Homo sapiens
gagacacccagagacggaggaaacccgacagcaaagcgaagccaacagagaaaaaggaccaacaa

SEQ ID NO: 44625 - RNA, 61 nt, Homo sapiens
ccgcccccgggaccgcaggcccacacggcccgggcaaggagcagaagacagagggaggagg

SEQ ID NO: 44626 - RNA, 82 nt, Homo sapiens
gccaagaccaggcagcggccaaacaaagcagccaaccaacaacaaaaaccagacgagagacagaagacgaaagggcaagaaa

SEQ ID NO: 44627 - RNA, 84 nt, Homo sapiens
aagccgcacagccgcggcggcagcagcaggagagcgccgcgccaggacggcagccagacgagcagggccgcagcaggccgcagc

SEQ ID NO: 44628 - RNA, 77 nt, Homo sapiens
gaaaggacggcgccagagacaacagggccacagcgaggacagggagggcgaagaagaggagaagagccgggaaaaca

SEQ ID NO: 44629 - RNA, 78 nt, Homo sapiens
caagccacgcgccaggcagacgggccagggaagacaacaccagggggaggccaggggggagaggcagagcccacgaag

SEQ ID NO: 44630 - RNA, 61 nt, Homo sapiens
gccccagcccagccaccagagcaccaagcagacacgcaggcagaagccccagaggagcccg

SEQ ID NO: 44631 - RNA, 80 nt, Homo sapiens
gagggcacgggcggcagcccgagaccgcagcagacgacagagacgcaacaggcaacaccagcagggaaacgaagggcaga

SEQ ID NO: 44632 - RNA, 73 nt, Homo sapiens
acccccggccggaggcaccagcaaacccggcccaaccagaacggaacacgcacccagacaagcggaagagccc

SEQ ID NO: 44633 - RNA, 90 nt, Homo sapiens
acagcccgaaggcccagagcgcccgcacgaacagaagacgcccagggacagaggcaagacgagacgcaaaagcgcagcggaacgcaacaa

SEQ ID NO: 44634 - RNA, 50 nt, Homo sapiens
aaggcccagccgccgcaggaacagccggaaagcaggaaaaagggccaccc

SEQ ID NO: 44635 - RNA, 72 nt, Homo sapiens
ggcgcacaccagacccggacagcaggagccaaagccgcaggcccccccccacacgaaagaccacagcaagac

SEQ ID NO: 44636 - RNA, 59 nt, Homo sapiens
aaggagcaccggcccaaaaaggcaaaggaagagagaaggccacgcccgaccccaagcaa

SEQ ID NO: 44637 - RNA, 73 nt, Homo sapiens
gacaagcaggacacgcaaggagacaaggaaaggcccaccgaaccacacccagggaaacccaagcagccaaccc

SEQ ID NO: 44638 - RNA, 74 nt, Homo sapiens
ggaccagagaggacggcaccagccaggagacagagggagacaaagcgggcagaaaagaagacggacccgacaga

SEQ ID NO: 44639 - RNA, 83 nt, Homo sapiens
gagcggcggcagcggcggcgcggaggcggcgagggcgagccgagccacccagaggacagcaaggggagggacgccagcagggc

SEQ ID NO: 44640 - RNA, 70 nt, Homo sapiens
gacccgccaccaaggaggagaggagaaaaggcagcgcgagaagaggagcgcgcgaaggaaggaggaaaaa

SEQ ID NO: 44641 - RNA, 85 nt, Homo sapiens
aaaaaagaaaaggccccaacagagccccagcaaggacagagaggaaggcacgcagagaacagagagaccagaaacagcaagcacc

SEQ ID NO: 44642 - RNA, 72 nt, Homo sapiens
gagagggaagaccagagcgaaacgaagccaccaacaacaccagggacacaacagcaaggagcagaaaccgaa

SEQ ID NO: 44643 - RNA, 120 nt, Homo sapiens
acgccggacaaccgcaacgggccgggggcggcggcccaaggcgaagagaccccagcaagcagagggggcgacgaggcccgaggggcgggacaccagggacccggcaaacccaccagcaaa

SEQ ID NO: 44644 - RNA, 72 nt, Homo sapiens
cccggaaggggagggcgcggcacgccggcccgcagggagccgcaaagaaggagccaagggcccacgcaggaa

SEQ ID NO: 44645 - RNA, 39 nt, Homo sapiens
cgccggagaacgacaccaaggacccaaggccagccagcc

SEQ ID NO: 44646 - RNA, 63 nt, Homo sapiens
acagcccgccacaagacacggccagccagaccgaaacccaggcaggaaacaggcaggaaggag

SEQ ID NO: 44647 - RNA, 88 nt, Homo sapiens
ccccggcgggcgggcaggagggcggcggcggcggcgcggcgaagaaggggacgccgacaagaagacgaccccgacgcaggccaggagc

SEQ ID NO: 44648 - RNA, 87 nt, Homo sapiens
cggggagcgcccccggcgcgagccccaggaaagacgaaagcaagaagacacaccggaaagccaggcacccgcccaggcggggacagc

SEQ ID NO: 44649 - RNA, 56 nt, Homo sapiens
gcccagaaggccgcagcagacccccccccccacccccggacccaacagaggaagcc

SEQ ID NO: 44650 - RNA, 40 nt, Homo sapiens
ggccacgacgcccccccagggaaacaaagcagcaggagag

SEQ ID NO: 44651 - RNA, 37 nt, Homo sapiens
cggagacaggcacggcgggccagaggagcaccgcgcc

SEQ ID NO: 44652 - RNA, 89 nt, Homo sapiens
gaaagcgcagagcgaagcagaagacgaggacacgcagccggccgaggaccccccagcgaaggaagagccaggaaagcaaaagggcaccc

SEQ ID NO: 44653 - RNA, 86 nt, Homo sapiens
gggccccagccccacagaccagcccagcacagaggaagcgcagcgggaaagaaagcagccggcgcccgaaggaggagccgcaacaa

SEQ ID NO: 44654 - RNA, 60 nt, Homo sapiens
gagaccagagacacacacacgagaacgcgcgcagaggccagacggagaaaagaaacggga

SEQ ID NO: 44655 - RNA, 63 nt, Homo sapiens
gagggagagccaaagaaggaggcgaggcaagcagacccacacgccggcaaaaccgcaaagccg

SEQ ID NO: 44656 - RNA, 43 nt, Homo sapiens
cgacggcggcaaagcaccgacaacgacccccgccagaagaaac

SEQ ID NO: 44657 - RNA, 74 nt, Homo sapiens
ccccgccccggggaacccgcagaggacagaagaggccaccaaacccgagggaacacaccagcgggcacagcaca

SEQ ID NO: 44658 - RNA, 75 nt, Homo sapiens
agagggcggggggacagaagagagggggaagaagagcccccgaggaaagcacgcacaacgaggaaaagagaaaaa

SEQ ID NO: 44659 - RNA, 76 nt, Homo sapiens
ggcagggagcccgaggcccaacaacaacagaagaagagcagaacccagggaacggagggaaagcgacaaacaacca

SEQ ID NO: 44660 - RNA, 71 nt, Homo sapiens
gcgacaggaggagacaggcgagagaggaggacacgaccgagcagccggcagacaaggcgggaaggagggag

SEQ ID NO: 44661 - RNA, 76 nt, Homo sapiens
caagaggcgcccccaagaacgcccgagagagccggaaccaacgcagagccccagaacaaaagaacacagaggaacc

SEQ ID NO: 44662 - RNA, 41 nt, Homo sapiens
aagagagggcgaacaagcaaggggaccgagccagaggggaa

SEQ ID NO: 44663 - RNA, 59 nt, Homo sapiens
gcgccaagggcacgggaagaccggaggggacgaagaacgggaaagacgaagcggcggag

SEQ ID NO: 44664 - RNA, 64 nt, Homo sapiens
aacacccccagcggccgccggccccccacgagcacacccgccgggcaaacggacccccgcccga

SEQ ID NO: 44665 - RNA, 106 nt, Homo sapiens
caagaaaggcgccgcagagcagagacacaggacccccgccccaaaggccccggagcgagggcagaaagggcccagccggcagagggaccggagaacgccgcagggg

SEQ ID NO: 44666 - RNA, 48 nt, Homo sapiens
gacgacccaccgggagaagaagagaggagcccaggcaaacaaacagcg

SEQ ID NO: 44667 - RNA, 80 nt, Homo sapiens
ccgacagccgcagaacaagcggccagagcagcagggacccacgagccgccgcccgggcggagcccgaaggggggggccaa

SEQ ID NO: 44668 - RNA, 61 nt, Homo sapiens
ccacccagagagcaaaaggcagcgaaacaaccgaaggacacagcccgcagaaaggaagcgg

SEQ ID NO: 44669 - RNA, 88 nt, Homo sapiens
aggaaccacacgccagcaccgacgaacccagccccagaacgggcaaggacgggacggccccggaaagcagaccggcccccgggggacg

SEQ ID NO: 44670 - RNA, 78 nt, Homo sapiens
aacaaccagaaagcccagcgggaaaggcacagaccggggcgaccggagaaacgcagcagaggcagaacggaagggaca

SEQ ID NO: 44671 - RNA, 72 nt, Homo sapiens
gagacagagcccggaacccaccagcaccaacccgggaacaaccccaaggggccacagggggggaaggagacg

SEQ ID NO: 44672 - RNA, 76 nt, Homo sapiens
cacccgccaccccgcagccccgccaggcgaagcaaacaagcaacccacagaaaccgccagaaaccgagacaaaaac

SEQ ID NO: 44673 - RNA, 76 nt, Homo sapiens
ggaagaacaacgggagaagaacgaaagaacaggcgcaaaaagaaaccacgacgagcgaaaaacgcaggaaaaaccc

SEQ ID NO: 44674 - RNA, 70 nt, Homo sapiens
gggaagagaacaggacagagggcacaacggcaaaggacaaccaccaccagcgagcaaaagaacaaagacc

SEQ ID NO: 44675 - RNA, 84 nt, Homo sapiens
cgcccgcgaccggaccgccccggggaaacccgggcgccgccaagagccgggacacggccaacacgggaaggaaaagcgggagga

SEQ ID NO: 44676 - RNA, 54 nt, Homo sapiens
acccgccaggcccggagccaaccccccacagcaggaggcacaaaaagaacaacc

SEQ ID NO: 44677 - RNA, 101 nt, Homo sapiens
aggaaaagccggggaccagccggccagccaagagaggagggacccggaggacagcacaccacaagaaaccacaagccagaaccacaacgcacacggcccca

SEQ ID NO: 44678 - RNA, 73 nt, Homo sapiens
gaagaggagagaggaacccgaagaagaaaggacgacagccagagagcgacgcacaaggaaaaacagagagaaa

SEQ ID NO: 44679 - RNA, 68 nt, Homo sapiens
acgcagaacgcccaaccaggccaagcacgggacggaccagaaacagggaggaaaggaaccgcaaaagg

SEQ ID NO: 44680 - RNA, 71 nt, Homo sapiens
gcgggaaccgaccggcgccaccgcccagcacggagaaggaccacgggaggcagaccccgacgacacaggaa

SEQ ID NO: 44681 - RNA, 75 nt, Homo sapiens
ccaaagagaccaggcagccgcagcaggacaaacgggaacggagccccccgcacaggacaaccaccagccacggac

SEQ ID NO: 44682 - RNA, 78 nt, Homo sapiens
ggacggggcaaaccgccgccgcccccaccagacagacgcgcaaaacccaggagagacagcccagaagcccagccgcac

SEQ ID NO: 44683 - RNA, 76 nt, Homo sapiens
acggacacccagcggcgacacgcgacgcgccaaaacccgcccggaaaggggacaccgagagaaacagcggaaaaaa

SEQ ID NO: 44684 - RNA, 82 nt, Homo sapiens
ccggcgacagccccaaggcaacaagcccacccgaaaccacaaggccgaggcccagcgggaggcggccgaaccagggcagaca

SEQ ID NO: 44685 - RNA, 78 nt, Homo sapiens
caaaacagagaacagaaagaccggcacgcacaggccacagcccgacccaggggcgaaaagggaagaaagaaaaaccaa

SEQ ID NO: 44686 - RNA, 60 nt, Homo sapiens
ccaaaaaaccccaacaacagccccaggcgagaacgcggacaagcaaacaaagaggaaaaa

SEQ ID NO: 44687 - RNA, 72 nt, Homo sapiens
aaagcagcgccaacccgcccccgggaacacaacgggacaagacacgccaccgcagacccagccggcggaaga

SEQ ID NO: 44688 - RNA, 80 nt, Homo sapiens
gggaacagcagagcccagagaaccggcaccagccccccagcacaaacgcggggaagacccggcgggcaaggaacccacaa

SEQ ID NO: 44689 - RNA, 77 nt, Homo sapiens
gagagccggaacaaacgagggcccgggaggaccgacgcagccagcgggccaaggaaagcggagggagccccagagga

SEQ ID NO: 44690 - RNA, 106 nt, Homo sapiens
cgagagacacgccgcgagaagcacgcacagggccgcgggaagaccagccccaaaggagaggagcaggaagaagaccacgcccccagaaggcaaaaccaggaacaaa

SEQ ID NO: 44691 - RNA, 103 nt, Homo sapiens
agacggagcagagccgcgggcgccggagccgaggcgagcgccgcgcgcaccacgggcggagaacggaaaagcaccaggaagcagagaggaccgcagaagggaa

SEQ ID NO: 44692 - RNA, 64 nt, Homo sapiens
gaccgacgagccgcagggcggagagacaccacagcacccagaaccggagagcccagaacgcggg

SEQ ID NO: 44693 - RNA, 73 nt, Homo sapiens
aaggacagcaagacaagaaaacaacaggccagccgaggcaacaggaaagagcaccgccggccaggaggagagc

SEQ ID NO: 44694 - RNA, 73 nt, Homo sapiens
agcccgagcgaggacaagacaggaaaaaacgaagaagacaagacagcaggcaaagaggagccaccgcaagcgg

SEQ ID NO: 44695 - RNA, 66 nt, Homo sapiens
ccagagcgggaaaacacgcacagcggaaacaagaggcgagccagacccgggcagaccagccaagcg

SEQ ID NO: 44696 - RNA, 70 nt, Homo sapiens
aacagaccagacagaagcacagggagcaacacgcacacgaaacccacgacccaaacggagcgccgcaccc

SEQ ID NO: 44697 - RNA, 87 nt, Homo sapiens
gcgaccgcccagcccgagagcgggaacagaaggaccaacaagagccgaagaagaacaacccaggaagccacgcaacacagaccaaag

SEQ ID NO: 44698 - RNA, 84 nt, Homo sapiens
caaacaaaaagacacgaagaggaggaagcccagccgcgccaggcccagacacgcagaggagacccgaaccggcaacagcaccgg

SEQ ID NO: 44699 - RNA, 81 nt, Homo sapiens
cacgcacgaaggcgaaagggaccaagaaaggcccagggaccaaagcccggacaaggcccgagcaccaggaccgcagaaggc

SEQ ID NO: 44700 - RNA, 62 nt, Homo sapiens
gagggcccggggaacgccagaggagaggcccccagacgcagaacccggaggagcagcagccc

SEQ ID NO: 44701 - RNA, 75 nt, Homo sapiens
gaagaagaagagaagaaagagaaaccgagccccgcggcaagacccagcgggagcagcgagaccaacagccgcgcg

SEQ ID NO: 44702 - RNA, 72 nt, Homo sapiens
cccggacccgcggcaccgcgccccacgccgaaccagcggaacagccggcagcccggagggccgccggcgccc

SEQ ID NO: 44703 - RNA, 71 nt, Homo sapiens
aaaccgaccgaccaggagccacaggcgaacaagaggcgccagcgggcgcgccggaagaacagcgccacgcc

SEQ ID NO: 44704 - RNA, 85 nt, Homo sapiens
gccgagcgcggggaaccgacgaccggcgccaaacagaacacaggaggggcagcaaggcccagagggaggcacaacagcgaggaca

SEQ ID NO: 44705 - RNA, 81 nt, Homo sapiens
gagacccggaccgagcagcccgacccccaacggaccccgccccggaggagcgcgcaccaccggaccaaaccagagacaaaa

SEQ ID NO: 44706 - RNA, 56 nt, Homo sapiens
ggggccaggaccagggaacaggagcaggaacccacacacgcaccaggacggacaaa

SEQ ID NO: 44707 - RNA, 69 nt, Homo sapiens
cggccacgaaaaaccagaggaaaaaccacaggaggagacacgagagggaagaagacgagaagaaggaag

SEQ ID NO: 44708 - RNA, 80 nt, Homo sapiens
acccggcagccaggagccccaggccaccagggcaagcccacagaagggaccacgcacccagggccccgaggcagacggaa

SEQ ID NO: 44709 - RNA, 78 nt, Homo sapiens
cgaggcggcgagagaggcaggcggagccgaccgggccagggaacacaagaaacgaagggaaaacacagaacaaaagac

SEQ ID NO: 44710 - RNA, 75 nt, Homo sapiens
gcaaacccacccagcacaccccgcgaaaggaggaggcacagaggggaacggaacaacaacgagaaagacaggccc

SEQ ID NO: 44711 - RNA, 71 nt, Homo sapiens
gcggaaacgaacaaagagcggagcggaggcagacacacacggggggagagggagggggggacacggccgcg

SEQ ID NO: 44712 - RNA, 86 nt, Homo sapiens
accccccgcccccagccacccagcaccaccggcccgcacgccggcacagcgcccagaaggccgagcccggccacacagcaccgaca

SEQ ID NO: 44713 - RNA, 87 nt, Homo sapiens
gcccaagacccagggccacccgaaaggacaaggcgccagccggcacgaaggccacagcaaggaccccagaacacagggagagcggga

SEQ ID NO: 44714 - RNA, 77 nt, Homo sapiens
aacagcccaaccccgggcaaacgccaagaacccgggcggggccggacggggggagaaggaaaagggacaaagcagcc

SEQ ID NO: 44715 - RNA, 56 nt, Homo sapiens
aggcaagagggagacaaagagagagcaggaggccaggagcacagaaacacccacca

SEQ ID NO: 44716 - RNA, 75 nt, Homo sapiens
cacgccccgcaaaccgccggggaaggaccaagggaccgcgggcaacaggcacaggccccgggggcgccgagggca

SEQ ID NO: 44717 - RNA, 65 nt, Homo sapiens
ccggcggacagggggcccagggggccggagggccagggccccggagagcaagccccccaccagcc

SEQ ID NO: 44718 - RNA, 82 nt, Homo sapiens
cgggagagcgcgccagccggccgcgaccgaaaagacgaggcgaggaggcgagacacccaacccaccccaccccggagggcca

SEQ ID NO: 44719 - RNA, 82 nt, Homo sapiens
aaggcgcgggcaggagccggcgaggagcaccccccgccggaaagccccaaggcacaaaagaggaggaaagaagagcagcaga

SEQ ID NO: 44720 - RNA, 53 nt, Homo sapiens
ggccggcaccagaagacggaccggagcacgcgagagcaaagaagaacgaggca

SEQ ID NO: 44721 - RNA, 89 nt, Homo sapiens
ggagcgcgaacgagcgacggcggaacccggggccgggacgcagcccggcggcagcaggaaggaaccacgcacagggaccccagcgcacc

SEQ ID NO: 44722 - RNA, 66 nt, Homo sapiens
accgccgccacggggcgcgggaaaagccccgagaggaaccggagacgcgccccgcccacgcgggag

SEQ ID NO: 44723 - RNA, 76 nt, Homo sapiens
agggaggaaggagcaacccgaaaaccagccagacacaaacaaccaccggggaaccggcccggaagcagccacccca

SEQ ID NO: 44724 - RNA, 81 nt, Homo sapiens
gaagaagggcgagggagcaagcgcacacgaagagaagcaaggcccaagacccaggcggcaccggacaagagcagagaaaga

SEQ ID NO: 44725 - RNA, 87 nt, Homo sapiens
ccagcaaaagcgggaagaacaaaggaaggggagcccgggacccccgggggcgcagccccgggcaaggggagcagacaacaaaacgag

SEQ ID NO: 44726 - RNA, 51 nt, Homo sapiens
ggccggaccccccgcagccggggacgcagacgaagggaggcaggcagggga

SEQ ID NO: 44727 - RNA, 55 nt, Homo sapiens
ggacaggaggaacacagcaccagaaggaagaggagcggccgggcagaagagaggc

SEQ ID NO: 44728 - RNA, 73 nt, Homo sapiens
ggaaaaacacagagagccgacggcagcgagcggccggaagaagaagaacacaggccaccggagcagcaacaag

SEQ ID NO: 44729 - RNA, 90 nt, Homo sapiens
cagaaggaggaggaagggcaggacgagggcggcgcgggagcagcacccacagccaaggcgggagccacgggcccccacgaccacacaccc

SEQ ID NO: 44730 - RNA, 77 nt, Homo sapiens
agaagagaacaaagaagaggcgggcggagggcacaccagagggcgagggaaaaggccaaccaagcggagagcaaaag

SEQ ID NO: 44731 - RNA, 77 nt, Homo sapiens
gggaacgccaacccacccaaaaccgcggaggcaggagaggaagaccaggcaggaaacagaggcagcgacaaggagaa

SEQ ID NO: 44732 - RNA, 77 nt, Homo sapiens
aggaccagggagcccacagcgcccaaaaagggagcgcgacccagcgaccagccacacgcccaccggggcgcccagcc

SEQ ID NO: 44733 - RNA, 72 nt, Homo sapiens
agcggcggcccaggagaaccgcgagacaacaaaagggacacgaggccgcgggccaaacaacaaccaggcgcc

SEQ ID NO: 44734 - RNA, 66 nt, Homo sapiens
aacgggccccaaggcgaccgggacccaaagacaggaccacgcaccagcagagaaggaaagcaaacc

SEQ ID NO: 44735 - RNA, 66 nt, Homo sapiens
aacccagaagccaaaggaaacagcagcagaacaaagggcaaaggacacaccgcacaaacggccgcg

SEQ ID NO: 44736 - RNA, 59 nt, Homo sapiens
agcccgcaagcggaaaaccacaagcaggccaaagagagacgagacgacgggaccgaagg

SEQ ID NO: 44737 - RNA, 74 nt, Homo sapiens
ccgggccccagaaaccccccgaagaagaccccccacacgggcgcagagacaaggaagggaagcggagaaaagga

SEQ ID NO: 44738 - RNA, 85 nt, Homo sapiens
gaccacagccgcgcgcgcagggggcgcgcccgcaagcaggagaacaagccaagccggccccggagaaggagacaagggaagacaa

SEQ ID NO: 44739 - RNA, 90 nt, Homo sapiens
ccaacaagagaagagacacagaaacggaggacaagaagccggacacaaggcgccacggcagcgaagcccccgagcgcccacagcagaagg

SEQ ID NO: 44740 - RNA, 69 nt, Homo sapiens
caagaacaagaagaaacagaagaaaccagcaagcagaaagagaaagcgggccgacaagaaagccgaggc

SEQ ID NO: 44741 - RNA, 77 nt, Homo sapiens
aaacaaagccaaggaaaccccaacacagagccaagcgccaaaggggagcccaaaagcacgaagcgccagaggacacc

SEQ ID NO: 44742 - RNA, 75 nt, Homo sapiens
gcggagagcaggggcccggagaagccaagcacaaaggcacgaaccagccagcaaagcccgaaacggagagggcag

SEQ ID NO: 44743 - RNA, 69 nt, Homo sapiens
gcgcccagaggaaacagaaagagaccccccgacggacgacagagcagcgagaaaagccgacgcaagagg

SEQ ID NO: 44744 - RNA, 54 nt, Homo sapiens
ccagcaacaagccgaaaggcagcgggaagacacagaaccaaaccagaaaggaaa

SEQ ID NO: 44745 - RNA, 88 nt, Homo sapiens
ccgaaccagcaccccaccacaacaggagaacaagaccacgggggcgggaggccaggcagcacgcagacaagaagcgcaggacaggcgc

SEQ ID NO: 44746 - RNA, 68 nt, Homo sapiens
gaccaagccagggagagggaagcagaaagcggcgaggaagaacagaggccgagagacccgcgaacgag

SEQ ID NO: 44747 - RNA, 71 nt, Homo sapiens
acaggcgacaagcaaggggaggagcagcagcgcggcagagcagggggaacccaagccaacggaccgaagaa

SEQ ID NO: 44748 - RNA, 40 nt, Homo sapiens
cccgcaggaccggaccgggggaggaagagagaaggccacg

SEQ ID NO: 44749 - RNA, 85 nt, Homo sapiens
cggagcggacagccggagggcggaaggacccccagcgggcacgcgcggcagccagccgcccgcagagcgaggccgaagacccaga

SEQ ID NO: 44750 - RNA, 59 nt, Homo sapiens
aggcaacccgccaggaggacgaacacggaacaaagaaagaacacccccgaagacccacc

SEQ ID NO: 44751 - RNA, 78 nt, Homo sapiens
acgcgcgcgggcacccacggagccccggggcgggggagcaacggaagcgccgggccagccggggcggccccaaggacc

SEQ ID NO: 44752 - RNA, 59 nt, Homo sapiens
agagggaagaaaagcaaacgaaaccgggaaacaggcagagcagccgcaaccgacacaca

SEQ ID NO: 44753 - RNA, 68 nt, Homo sapiens
ggacagccccccaccacaacacgaagagaggggcccgggggaagccggaacccggaggaagccggaag

SEQ ID NO: 44754 - RNA, 67 nt, Homo sapiens
aaagcgcgggaacaggcgcaaggacaggcggaagaggcaaagacgaaggacagacaccgggcaagca

SEQ ID NO: 44755 - RNA, 69 nt, Homo sapiens
ccagcacacccagcggcggaccaggaagacagagaaagaggacacggccgacagacagcgggccggggc

SEQ ID NO: 44756 - RNA, 82 nt, Homo sapiens
cgcacgagcaacagacgagcgcgccaggccgacagccgcggccgggcccgaggcgccagggcagaaccgcggcagcgagagg

SEQ ID NO: 44757 - RNA, 78 nt, Homo sapiens
ccccaacgcccaccaaagaggaaagcgaggaggagcgagcgcgagagcgcgagagaagaaaggaagaaacacacagca

SEQ ID NO: 44758 - RNA, 43 nt, Homo sapiens
ggcaaacagacggcaggagggcacccggaagcaaggcggccag

SEQ ID NO: 44759 - RNA, 84 nt, Homo sapiens
agaggacgggaccaggcgaagcggccgagcaggcgagcgaacgacggacgagcagggggaggaacaaagcgaggaagggaaggg

SEQ ID NO: 44760 - RNA, 52 nt, Homo sapiens
aagaaacaggagaaacagggccaaaaaagaagggacaaacagagccaggggg

SEQ ID NO: 44761 - RNA, 68 nt, Homo sapiens
gaacaacaacaggacgccacagggcagagggaaccaaaaaaaacagacaagaaggaacacaagggaca

SEQ ID NO: 44762 - RNA, 85 nt, Homo sapiens
ggaaaaacacagagacagacggcggcagcccggcccccacgacacaccgaagaggcccacggagaggacaagagggcaagcagcg

SEQ ID NO: 44763 - RNA, 53 nt, Homo sapiens
aggacgaagaccagcgccagggaaagaagggcaagcagcccggccagggacag

SEQ ID NO: 44764 - RNA, 70 nt, Homo sapiens
ggccacggcaccggcacaccgcggggccgaaaacaacgacaacgagcacagaaacccaaaggacaccaga

SEQ ID NO: 44765 - RNA, 79 nt, Homo sapiens
gaaggcgcgacgccaaggcacgaggaaggaaaaggagcccggagcccgcggccggaagaaggagaaagggccaaccccg

SEQ ID NO: 44766 - RNA, 83 nt, Homo sapiens
cgggagcaacaaaaccgcaacaggagcaaaggagcccacggcgggcgcaaagaaaaagcggggaaggggggcaaaaaaaagaa

SEQ ID NO: 44767 - RNA, 59 nt, Homo sapiens
gaccgagagcgcgaaacgcacgagaagcaccccgcccagaaaaaaggcccagcgccgag

SEQ ID NO: 44768 - RNA, 94 nt, Homo sapiens
cagcacaggcggaagaaggccccaccagaacccaacccggaccagccccagaacaagcggaggacaggagcagcgggcccgacagccaaggaga

SEQ ID NO: 44769 - RNA, 42 nt, Homo sapiens
cacgcgaacgagagggacacggagcaggcggaacccacgagg

SEQ ID NO: 44770 - RNA, 101 nt, Homo sapiens
accacaccacccaccgcacggagggaagccggccagaagacggccacccaggggaagacccagacacacaccggagaaagccccccagcgagcgggcccac

SEQ ID NO: 44771 - RNA, 48 nt, Homo sapiens
ggaacacgcaggaggggagaagccccggggaaagaggaggaaaacaaa

SEQ ID NO: 44772 - RNA, 70 nt, Homo sapiens
ggaagaaaaccagggaaggcagagcaaacaaaaaccgaggcgagcccacacaaggggaaggacaagaaaa

SEQ ID NO: 44773 - RNA, 68 nt, Homo sapiens
gcacaacgagagaacagagcgggagccgcggaggcccacggcggcgaccaggcacaagaccggcaggg

SEQ ID NO: 44774 - RNA, 73 nt, Homo sapiens
aaaggccaaaaaacaacggaaaccagaaaccaagaaagcagaggagcagaaccagaagacaaaaacaaggccg

SEQ ID NO: 44775 - RNA, 71 nt, Homo sapiens
gggacccacccggcgaccagacaaagggagcaccagccagaccgggaagaaacgaaggggggaggcccagg

SEQ ID NO: 44776 - RNA, 79 nt, Homo sapiens
ggcccccaccccccacgccccaccacaacaaacgaggaaccagcacaagacaagaaaaccaacggcccggaggaccaca

SEQ ID NO: 44777 - RNA, 41 nt, Homo sapiens
ggaacggaggccagagcgcggcccgaaggagcccagcaagc

SEQ ID NO: 44778 - RNA, 75 nt, Homo sapiens
acgaaccacgagcggaagcacaacgggaagaaagaaggaaggcagagcccacaaacccaagcagcaaagaaagag

SEQ ID NO: 44779 - RNA, 94 nt, Homo sapiens
ggaggcccggccagcagaaagcgcagaggcagccccccaacccaggaggcacaaggggaaacaaagcagcaggagaggagagccagagaaggac

SEQ ID NO: 44780 - RNA, 57 nt, Homo sapiens
cggcggagcggcggcggaccaccccaggaccccagacaggagaccgcagaggcgccc

SEQ ID NO: 44781 - RNA, 75 nt, Homo sapiens
gaagggacacacccacaaacgaggagaggagacgccggagcgggacgaccagagaccgagagcggcgcgcaccgc

SEQ ID NO: 44782 - RNA, 86 nt, Homo sapiens
gcagaggacacgaggcggcgggcggagacaggaccgcggcgagcaagccaaacagaggaaagagcggagcccgccagaaacagaca

SEQ ID NO: 44783 - RNA, 57 nt, Homo sapiens
cagaaacaaaagcaacaaagaggcagcccgcacagcggacgcaaagaaaaagacggc

SEQ ID NO: 44784 - RNA, 35 nt, Homo sapiens
gaaacaaacacaaacgggacaagggaggcgaggac

SEQ ID NO: 44785 - RNA, 109 nt, Homo sapiens
acgccgccggggcggcgacacccgggagccgccggcaccgccggaaccggcgcagggcagagacaggcaacagacggcaacgaaaggcacaaaaacgcaacacaaagag

SEQ ID NO: 44786 - RNA, 79 nt, Homo sapiens
caagaagaagcgcggaccccggaaaggggagcaagaagaaagagcagggaggagggagcgacaggaagaaagaaacccc

SEQ ID NO: 44787 - RNA, 75 nt, Homo sapiens
gcacagagcgagaccaggaaagaagggggcagaagaggggccgagggagcaacaagagcagaaaggaagaaccac

SEQ ID NO: 44788 - RNA, 81 nt, Homo sapiens
cggcgggccgggccccggggggccagggcccaaaggagcgaggcggggaagggaggaagagcgggcaggggcggagaagaa

SEQ ID NO: 44789 - RNA, 78 nt, Homo sapiens
gcggcgcggcggccggggcggcgcgggaagggaccggccgccgcaggagcgcggcgagaaggaagaggggcgcgggga

SEQ ID NO: 44790 - RNA, 72 nt, Homo sapiens
gaagaggcggaccggacggccgaggggcaacgagggagaccaaagggaagggaggccaggaccaaagcccag

SEQ ID NO: 44791 - RNA, 62 nt, Homo sapiens
caagaggacaagaggagagaaaacgcaaggagccacagaaggcgagagggaagaacaggacg

SEQ ID NO: 44792 - RNA, 81 nt, Homo sapiens
gaacgggaggagcgcgagcaggaggaaaggccaaaccagagaccagacaaaggccaaaaggaccgaccggagccaggacgg

SEQ ID NO: 44793 - RNA, 85 nt, Homo sapiens
ccggcggccgagggggcacagaagcgggcggcggcgcgccgccccgggcggccgcgggcgggacaccaccggcccgccgcaggga

SEQ ID NO: 44794 - RNA, 91 nt, Homo sapiens
gcaagacccgccacaagcaacgcgggaagagaaggagaggcagcagaaaaggccaaagcagcagccggggaggccaaaggaaaaagcagcg

SEQ ID NO: 44795 - RNA, 75 nt, Homo sapiens
gggaaacaaggcccaggccaaggaacaagcgcgagaaggaacaaaccaggagaaaccgaacagaagaggcaccag

SEQ ID NO: 44796 - RNA, 79 nt, Homo sapiens
cgagagaccagcacaagaaaagaagggcaaaagagaggaagacgagagaacaaggagcaggccaacggccagaagaacg

SEQ ID NO: 44797 - RNA, 90 nt, Homo sapiens
acgagagaggcaccgggacggaccgagaccggaccgagagcggaccgagagcgcgaaacgcacgagaaggggacccaagaacagggagga

SEQ ID NO: 44798 - RNA, 97 nt, Homo sapiens
gcggggccaggcggggaccgcgccaagaggcgaggccgagacaaacgcgggcaacacaacaaggcgcggacacccagacaagcgcgccaccggcccc

SEQ ID NO: 44799 - RNA, 59 nt, Homo sapiens
gaacgcaaacaacaaaggcgcacagcgcaagcagacgccacaagaacaaccgagcagag

SEQ ID NO: 44800 - RNA, 76 nt, Homo sapiens
ggagagaccgcaccaacggcaaaccgccagagcggaacgaccccagagcgagcccgcagcagcccagaaacaaaga

SEQ ID NO: 44801 - RNA, 84 nt, Homo sapiens
accggaagccggagggaaacagcgcggagaaccaaagaacacagaccaccaggcaaaacaagaaaaagcaccaagaaaaagcca

SEQ ID NO: 44802 - RNA, 73 nt, Homo sapiens
ggccgcacccccgacaggaacacaagacacaaacaaaccacagggagggaccaaccagaaggccagacacgag

SEQ ID NO: 44803 - RNA, 81 nt, Homo sapiens
caccaccacccacacccaccaacaacaccacaaaaccacagccaagcaccaaggagaaacagagacgagcaaggcgagagg

SEQ ID NO: 44804 - RNA, 73 nt, Homo sapiens
ccagaacacgggagaaaaaggaaaacgcggaaaaccgacacaacagaaaaggacagaccagacggaggaggag

SEQ ID NO: 44805 - RNA, 63 nt, Homo sapiens
cgcgacccacacagacaacagccggggcagcgcgagcaccaagacgacacgcagaaggggccg

SEQ ID NO: 44806 - RNA, 77 nt, Homo sapiens
ggaccccagaagaggaaccggcggagacaaacacccaaacccaccccggaaggcgccgaaaaccgaccgacccggga

SEQ ID NO: 44807 - RNA, 66 nt, Homo sapiens
gaaaaagggcccccgacagcccgcgaaagggaagaaaccccggagccagcaaaaacacaaacgagg

SEQ ID NO: 44808 - RNA, 83 nt, Homo sapiens
cgcaaccagccaagaagacacaagcgcaagcacacccaccgaaacaagacagcaccaaagccacccagaaggcgcaccacagc

SEQ ID NO: 44809 - RNA, 84 nt, Homo sapiens
cggagcggcgcgccgaacaccggcaggacagcgggggccccaccaccccgcgggccaacaagacgggagcggacggcaggacga

SEQ ID NO: 44810 - RNA, 56 nt, Homo sapiens
gagccaagaccgggcgcaaaggacaggaggagagaaagaacccacgcaggacgaca

SEQ ID NO: 44811 - RNA, 58 nt, Homo sapiens
ccgacgaacccagccccagaacgcgccgaaaagcgaaaagaaacaagccgcggcaaca

SEQ ID NO: 44812 - RNA, 58 nt, Homo sapiens
gggccacccagaacaaaaagggccaggcagcccagcacccgagacgggacaaaggaca

SEQ ID NO: 44813 - RNA, 77 nt, Homo sapiens
cgagagaggaggagccagacgacaagcacacacaggcgcgaaacggaaaaagggagcaaaaggacggaagcaaggca

SEQ ID NO: 44814 - RNA, 77 nt, Homo sapiens
ggaccgagagcggaccgagagcgcgaaacgcacgagaaggcaggaaacgcaaccggacagaagaggaggcaaggaaa

SEQ ID NO: 44815 - RNA, 76 nt, Homo sapiens
cgggagagaaagcacaagcagaaaccagaagcggacagaagaggaggaaacaaacaaagcagggcacagaacacca

SEQ ID NO: 44816 - RNA, 74 nt, Homo sapiens
gacaccagagccaacgggagcagagggggaccaacaggaaaggaacgaagcgaccggaccggggacgagcaaaa

SEQ ID NO: 44817 - RNA, 67 nt, Homo sapiens
ggggggccacgcgacaaggaagacgagggagaccggaagcagaagaccccccggagcgagggaaaac

SEQ ID NO: 44818 - RNA, 64 nt, Homo sapiens
ccggcccacaggggggggcaaacccgagagaacgggaagaagcgggcggagaaccggaggaccc

SEQ ID NO: 44819 - RNA, 85 nt, Homo sapiens
accagcccaggaaccccggagggcacccacagccagcaggcaggaaaggcaccaaaccgggaggaaccacccagggaaaggaggc

SEQ ID NO: 44820 - RNA, 54 nt, Homo sapiens
aacaggaaagcagcccgaaaaagacgcgagaagccacacgaacgaggggcaaaa

SEQ ID NO: 44821 - RNA, 68 nt, Homo sapiens
cccgccaggggcgaagggaggaccaggcacagacaccacgaacagggaggaaagccaggaggagagca

SEQ ID NO: 44822 - RNA, 80 nt, Homo sapiens
ccacaggcaggacagaagaccagcgcccgccacaggggccgccacagcaggaagcggagacagagacagcgcacgaaaca

SEQ ID NO: 44823 - RNA, 81 nt, Homo sapiens
ggccccaccacccgggcccccagccgcaccggcggaccggcgaggaccccgggagcggccgaggaggcaaggcgggaagcc

SEQ ID NO: 44824 - RNA, 78 nt, Homo sapiens
cggagaccaccacccccaaagagcgggacggaaaaaacccaggaccaaaacagagaaaggagaccaagcgaagaacac

SEQ ID NO: 44825 - RNA, 73 nt, Homo sapiens
ccccgcggccgcacccccgccccaggcgggcaacacaacaaggcgcggacacccagacaagcgcgccaccggc

SEQ ID NO: 44826 - RNA, 80 nt, Homo sapiens
cgcgggaagaggagacggaaggacggccggagcagcagaacaagagcggagaccaagggagccccgcagcagcagaagac

SEQ ID NO: 44827 - RNA, 71 nt, Homo sapiens
gggccaaccggaccgcccccaacaaccagacaggagagacaacggaggcaagaaagacggagaagcgagaa

SEQ ID NO: 44828 - RNA, 69 nt, Homo sapiens
gaaagcacagggagcgagcacacgggggagcccagaggagacaggaaaaagaagaccaccggacagcac

SEQ ID NO: 44829 - RNA, 78 nt, Homo sapiens
gcggaggcgaaagcggaacgagaacgacaccgaacaccgcacagaaagcagaccaaccgacaccagaggaaacaaagg

SEQ ID NO: 44830 - RNA, 83 nt, Homo sapiens
gcgaacacagaggaaaccgcaccgcccggagggcccaagggggcaaacgaccccaagaccacagagaggagaccacacgaccg

SEQ ID NO: 44831 - RNA, 79 nt, Homo sapiens
ggagccccacgaggaggagcgcaccgcgcaagccaacacgggcaacccccagccacaacgcgaaccgggcggacgaagg

SEQ ID NO: 44832 - RNA, 98 nt, Homo sapiens
gcaaggagcaggaacccagaacccgagccaagaggacacgaaacaagccaggaggagggagacaggggcaaaaaacggcagggaagaggcgagacaga

SEQ ID NO: 44833 - RNA, 63 nt, Homo sapiens
gacgaggaaagaggaggaaaacaaaagcgcacaggaagaacaaagggcaacgcggaaaaaagc

SEQ ID NO: 44834 - RNA, 63 nt, Homo sapiens
cgggggggggggggaagccgcccccggcagcaggacccgggaaggccacgacaagaacagaga

SEQ ID NO: 44835 - RNA, 75 nt, Homo sapiens
caccggcaccaccaaagaacccgcccacgccagcgaagccgacaggaccaacgacaggcgcccccccccagcgag

SEQ ID NO: 44836 - RNA, 96 nt, Homo sapiens
caggaagcggagcacaggacccccgagacacaaaccccagggccaggaagccagacgcgaccggaaaggagagagagacagaaccacagacaaggg

SEQ ID NO: 44837 - RNA, 38 nt, Homo sapiens
gagacgaaaaagacggacagcgacagcagacaagcaac

SEQ ID NO: 44838 - RNA, 75 nt, Homo sapiens
gacacggggaagcgcaaaaacaagacggggcgccccacagaggggcgacggcacccggaaacaagccacgaagga

SEQ ID NO: 44839 - RNA, 70 nt, Homo sapiens
caaacagaaaacagggaagaggagagaagaagaacagagagaacaaaagagcagacccagagcaggacgg

SEQ ID NO: 44840 - RNA, 85 nt, Homo sapiens
ggacacccagcaccccacgcccggccgacaagcacgcaagagggacaggcaagaaggaagaaggcagaggcgcagccagggggac

SEQ ID NO: 44841 - RNA, 83 nt, Homo sapiens
gaccaccccaacaacacagcacccaaaccaaacaggcgcagccaagccagcaagaggaaacacccagcagcgaagagcaaagg

SEQ ID NO: 44842 - RNA, 85 nt, Homo sapiens
aaggagacacgcccggcacccagcacaagaagacaagagagcccacgaacggcgggaacagaaagccagaggccggagagcgcag

SEQ ID NO: 44843 - RNA, 86 nt, Homo sapiens
acggcgcgccgcgaccccagccggcgccgagggcggaaccgagcgggaaaaggagcaccaggccaagaaccccaaaaacagcagca

SEQ ID NO: 44844 - RNA, 78 nt, Homo sapiens
caccgaacaccgagccacaagcggaccgggaggggaaacgccgacacgggagggaaacagagaaagggagcgggaaac

SEQ ID NO: 44845 - RNA, 78 nt, Homo sapiens
gaggaccaggccggcgcagccagggacagaaaccaggccacaagaagacaccccacccaacgggaaaggaaacaaaac

SEQ ID NO: 44846 - RNA, 59 nt, Homo sapiens
cagggaccacaccggacccaacgggaaaggaaggcacaacggggccacagagagcagcc

SEQ ID NO: 44847 - RNA, 63 nt, Homo sapiens
cagaaagccacgccggcagagcgaagaaagcgaacggcggccaacgcccaacccaagccccca

SEQ ID NO: 44848 - RNA, 52 nt, Homo sapiens
ggcaccaaacacccagaacaacaaagagggcagacagagcgaccgcccaaca

SEQ ID NO: 44849 - RNA, 78 nt, Homo sapiens
acagaaaaacgaggccaggaagagagcaaaaaaagcaacggccacgaagaaggccgccccccccacacaccagcccgc

SEQ ID NO: 44850 - RNA, 72 nt, Homo sapiens
gccagaccggagcagcggggacaggaagaaaacaggcgaaacaaggcacccccagcgccgaacacaggacgc

SEQ ID NO: 44851 - RNA, 51 nt, Homo sapiens
gccccgagcccacagccccagccgacagaaacacaggagggagcaggaaaa

SEQ ID NO: 44852 - RNA, 57 nt, Homo sapiens
gggacccggacaaccagaggcagccagcagggggagagccgggagaaacccagcccg

SEQ ID NO: 44853 - RNA, 71 nt, Homo sapiens
gcggaagggaggcgcgcgaccagagagcaaagccgaggcagcgggcggaggacggggcaccagagaaccca

SEQ ID NO: 44854 - RNA, 83 nt, Homo sapiens
ggacgccaagacacgacaagacgaccgggaaagccagggaggccgcgaaggcccggccaacgcaacagggagcccacgcaaga

SEQ ID NO: 44855 - RNA, 74 nt, Homo sapiens
ccacaacagagggcaagaacgaaccaaccccacaacaccgccggagacagccaaggccgaacaaggcggagccg

SEQ ID NO: 44856 - RNA, 36 nt, Homo sapiens
ggggcaaacccgagccagggacgggagcagcggaag

SEQ ID NO: 44857 - RNA, 69 nt, Homo sapiens
gaaagaaacaagacaacaccgacagcaaggagagcggaccaaagaaaccaaagcagaagcggcaacaca

SEQ ID NO: 44858 - RNA, 71 nt, Homo sapiens
ggccggcggcaaagagaccagggacagaaggggggcaaggcccacagggacaccacgagccgccacacgac

SEQ ID NO: 44859 - RNA, 69 nt, Homo sapiens
agacagcacagcacccacaaagcaacggaccccgcgggcacggcgggacgggacaagacaccaagggcc

SEQ ID NO: 44860 - RNA, 73 nt, Homo sapiens
cgacaggaaccagacacgcaaacaggccaaacacacaggaacgccagaccccagccgagggaggcaacagcaa

SEQ ID NO: 44861 - RNA, 76 nt, Homo sapiens
gcgaggaggaaaggaggacgagcaaagcagcccgaggaggcacgcaaaacaacagggggcaaacaagaccagggga

SEQ ID NO: 44862 - RNA, 113 nt, Homo sapiens
cgaccgccggaaacccgcagccgccccgcagccaccggccagggccgggacacccacgggaggaaaccacaggcaagcagcccagaggaaccccgggcacaccaaccggaccg

SEQ ID NO: 44863 - RNA, 75 nt, Homo sapiens
accagcaaaacagaaccccaaaccccaacaagagaaagcgcgcaaagcggaccaaaaccagggggcaagaaaccc

SEQ ID NO: 44864 - RNA, 70 nt, Homo sapiens
cccggcgccgcgagccaccaggcggccggcaccgcgacccagcaaacgggaaagaagagccggccgggac

SEQ ID NO: 44865 - RNA, 58 nt, Homo sapiens
gaaccggcccgcgcccgcccccgggagcccgcacggcaagcaaaacagcgccggccgg

SEQ ID NO: 44866 - RNA, 85 nt, Homo sapiens
ccggccgacggccacacggcggccgcagggcgccggagccccccagggcggaaaacaccccaaaagccaaaagggaaaggaaaag

SEQ ID NO: 44867 - RNA, 71 nt, Homo sapiens
acccggagggacacaccccaccaaaaacaaagagacacaacgggaaggagaggaagaagccaagaaggaag

SEQ ID NO: 44868 - RNA, 72 nt, Homo sapiens
gaaggcagcggggggagaaggcagcgacaggcaccgaccgcacgagcaacccggaagagcccgcacaaacac

SEQ ID NO: 44869 - RNA, 78 nt, Homo sapiens
acgcaggaggggacacgccccaagggccaccccacccgaggccggggaccgaagccaagagaaacgaggaaacccaaa

SEQ ID NO: 44870 - RNA, 82 nt, Homo sapiens
aggcgcgcgcgcgcggccccgacgccggcaggcggggccgcgccacccgcaaacagggcaggccggcaagaagccaacggag

SEQ ID NO: 44871 - RNA, 76 nt, Homo sapiens
gaggcccaagacccacaacaaaagagccaaagccggcggacagcagacgaacgaaaggccccagggcggcccgcac

SEQ ID NO: 44872 - RNA, 73 nt, Homo sapiens
caagaccccaacaacaaggcccccaagacaagcggaggcacccaccacgggccaggcgggccagaggcaagcc

SEQ ID NO: 44873 - RNA, 83 nt, Homo sapiens
cccgggcccgcgcaccccccagcgccggccggccaagacaaggggcgcagagcggggggacaggcgcaagaccggagaagcag

SEQ ID NO: 44874 - RNA, 68 nt, Homo sapiens
gggcgagaacgccacgcgggccggcgaaagcgagccgaggaaacccagacccaagaccaaccgaggag

SEQ ID NO: 44875 - RNA, 74 nt, Homo sapiens
cgggaggagacgggcccccccaggcccccgacgggagggggaaccaggcagggccaaggcgacacaggccgcca

SEQ ID NO: 44876 - RNA, 30 nt, Homo sapiens
caaacacccggaccaggcaggggaaggcgg

SEQ ID NO: 44877 - RNA, 99 nt, Homo sapiens
cccccacccgccagaggaagccgaggccccccacccaggagaacccagcaccagagccggagagacggagcacaaaggacccgagacccacggagcccg

SEQ ID NO: 44878 - RNA, 75 nt, Homo sapiens
cgggcaccagaggggaaggggcccgggccaggacaggacaggaccggacagcccccagccagaggacagacccca

SEQ ID NO: 44879 - RNA, 55 nt, Homo sapiens
gccccaaagacagggaggaccacgccggagcaagccacagaaagcccgccccaga

SEQ ID NO: 44880 - RNA, 60 nt, Homo sapiens
acagcgaaccggcggggcggccgggacccccccgcggcaggaacgcacccggcggcccca

SEQ ID NO: 44881 - RNA, 66 nt, Homo sapiens
aacgggccccacccgggcccgccgcccccacacggagcccaaaaggcagagcgaggagagaagaag

SEQ ID NO: 44882 - RNA, 83 nt, Homo sapiens
gccggcggacaccccaccaggagacgcaggccgggggagcacccagaacagcagcaaggcaagaaaggcaagggaaaaagggg

SEQ ID NO: 44883 - RNA, 79 nt, Homo sapiens
ggcagaaaagggcacaaggacacagaaaagcgaaagccagaaggaaacggaacgccaagcgaagaagaacgaaacggaa

SEQ ID NO: 44884 - RNA, 86 nt, Homo sapiens
caaggccgcagaaggagaacagacgcacacggccgagcccacggggccacaccacgcagaccaaaaagagccaagcgagaagagag

SEQ ID NO: 44885 - RNA, 78 nt, Homo sapiens
ggcggacaggcgacagcgaccgcggcagcgaccggacagaagacagaccgacagacgccaaaccacccgagagaagcg

SEQ ID NO: 44886 - RNA, 71 nt, Homo sapiens
agagccacagagcacgggaggccacccaggcaagacccaacgacccggcgggcaccggcacggaccacccc

SEQ ID NO: 44887 - RNA, 79 nt, Homo sapiens
ggacggaaccgggagacaccgagaaaccagaggaaggaccccagagaagacagcacccggcaccacagccgccgcccaa

SEQ ID NO: 44888 - RNA, 75 nt, Homo sapiens
gaagagcagcagagagaccgaaagaaagacaacccgaaagaacaccgaaccagagaacacccgcagggggaccag

SEQ ID NO: 44889 - RNA, 82 nt, Homo sapiens
gccacccaaaaaggccccggaggcccaaaaccaagacaacccaacaaacaaccggagggaggggagcgggagccaaaaagcc

SEQ ID NO: 44890 - RNA, 52 nt, Homo sapiens
cccccccccccccagacccacgcggcggagaaaccaccacaaacacgaggcc

SEQ ID NO: 44891 - RNA, 58 nt, Homo sapiens
ccacccaaacaagggaaggacagcggggccacaacgggaagaaggaaacggaggcaag

SEQ ID NO: 44892 - RNA, 73 nt, Homo sapiens
agggcaggcccaccggcgaagccgcagcggggcggggagccacggggaaaaggaaggccggaggaggcaacag

SEQ ID NO: 44893 - RNA, 75 nt, Homo sapiens
ccggaaaaaggcgacgggcagaggaaggcggcagcaagaaggagcaacaggcgggagggacagagaccgacggga

SEQ ID NO: 44894 - RNA, 58 nt, Homo sapiens
cgcaacgggacgcagaaccgaaccggcaggcagaagccgaaggcgacagacaggaggc

SEQ ID NO: 44895 - RNA, 58 nt, Homo sapiens
ccggaaagaagagaagaccagcaaaaggagaccccccggcagccgccagaacgggggg

SEQ ID NO: 44896 - RNA, 86 nt, Homo sapiens
agagcccgccgccgaccgccgcccgccacacccgccgccaggccagaccagaaggagcacaggcggaggccggcagacccaaaaag

SEQ ID NO: 44897 - RNA, 67 nt, Homo sapiens
gacacagagccgggaagacgccgaagggcgggaggacgaaaaaagccggggacagccccagaaccca

SEQ ID NO: 44898 - RNA, 77 nt, Homo sapiens
gccggggcggcggggacgagcgggcaaaggcgacgcccacccagcagaagacaagaagaccgacgccacacgcccac

SEQ ID NO: 44899 - RNA, 74 nt, Homo sapiens
caaggcgcggccacacgacaaaccgaccagcagcggaccagagccccaggggccccccccccgggggcgaccac

SEQ ID NO: 44900 - RNA, 59 nt, Homo sapiens
cgaccggacaacaaccggccgcggaggcgccaggagggcggcgacacgcacgagaaccc

SEQ ID NO: 44901 - RNA, 69 nt, Homo sapiens
cgccgaagaagcacgaaagccccacccgccgcagcaagcagaggaagcggagcacaccagaaaagacac

SEQ ID NO: 44902 - RNA, 77 nt, Homo sapiens
ggcgggggaccgggcaggaaaaagcacgcaggccccacaccggaggaccaccagagacaggacaggaccagcaagcc

SEQ ID NO: 44903 - RNA, 71 nt, Homo sapiens
aaacgaaggccgcagacgccacaccccacaggaaaccggagaagacacaccacagagcacccagagcgacg

SEQ ID NO: 44904 - RNA, 71 nt, Homo sapiens
cgcggcccggagcgcggcccgaggcccgcccagaggcagccagcacgagcccccccaccaccacagccccc

SEQ ID NO: 44905 - RNA, 76 nt, Homo sapiens
gcgcgcccgcaagaacgagagagaagcagccggaaagcccagaacagcacgagccccgagaagaggcgaaagaaga

SEQ ID NO: 44906 - RNA, 74 nt, Homo sapiens
aggaacgaacgggaccagagggggacagcgaaagaagaaggagagacgaccacgcaacagaaaaagagcgcacc

SEQ ID NO: 44907 - RNA, 74 nt, Homo sapiens
gagcaaaggacaggacaaccccgcccaacacccaccgagaagcagagcaggcccagaaagaacagacaaagacc

SEQ ID NO: 44908 - RNA, 83 nt, Homo sapiens
ggcgacgccgagcacgccggacaaggagaggagccggaaccaaaaagaagccccagagccggggccaggagccccaagcgccc

SEQ ID NO: 44909 - RNA, 61 nt, Homo sapiens
cgcccgggacaacagcgcggggcacagacaacgacaaagccacgcagcaccaaagagaccg

SEQ ID NO: 44910 - RNA, 71 nt, Homo sapiens
ggcccccagccgcagccacaacaccggcaggaaccaccaggacagacaaaccgcaggaaaaacagccggcg

SEQ ID NO: 44911 - RNA, 83 nt, Homo sapiens
agaaggaccaagaaccaggcaaaagcagaccggaaaacccaccggcaagaccacacccgaggggagcccaggacaccacgaaa

SEQ ID NO: 44912 - RNA, 74 nt, Homo sapiens
gcggacaacagacagggaggcgcgggcagccacaaggggacccacccaccacacccaggcggcaccggcccggc

SEQ ID NO: 44913 - RNA, 77 nt, Homo sapiens
gggaccgaggagcccggcccccgcaggcccgccacacgacccggacaaggcaggcagaaggcggcagggagcacgca

SEQ ID NO: 44914 - RNA, 56 nt, Homo sapiens
ggaaaccaccacagccaccaacaacggagcagcaacgaagcaacaagcgccaacac

SEQ ID NO: 44915 - RNA, 78 nt, Homo sapiens
gaagagcggccggagcgaggggcggaccgcgggcgcccacgaccaggagaccccccggcgaagggccgccccggcccg

SEQ ID NO: 44916 - RNA, 75 nt, Homo sapiens
gaaacccaaccaagaaggcccagacacaaaagccaggaagacaagagcagaagaaacagaccgaaagacaacaag

SEQ ID NO: 44917 - RNA, 77 nt, Homo sapiens
agccaccacgcggcgcacaacgcaggaacaccgcacgcgcggaggagacgccaggaagccggacgcgcagggaaaac

SEQ ID NO: 44918 - RNA, 81 nt, Homo sapiens
aagcaccgcggcgcgccggaaaggccaggagccgaggagggcgcgcggcccggcggacggaccacggaggaccgcggacac

SEQ ID NO: 44919 - RNA, 82 nt, Homo sapiens
cggaagagaggccacaggaagcaacaaggggggggaaaggcagaaggagacccggaagccaaaggagagaccaaaaaccaag

SEQ ID NO: 44920 - RNA, 70 nt, Homo sapiens
caaccacacccgagggcggccaccaagagggggaggcacaggggcacacgccacagaagcaaagacacgg

SEQ ID NO: 44921 - RNA, 72 nt, Homo sapiens
gccaggggacggcggaagggcgggcggacagaagccagccaggcgcaagagagcacaagaagaggaacaaga

SEQ ID NO: 44922 - RNA, 74 nt, Homo sapiens
cggaacagaggcaagcacggacagaaaaggcaacgcgccaagaccccccgcccgaaagccagacacagaagacc

SEQ ID NO: 44923 - RNA, 50 nt, Homo sapiens
agccggccaggacacacagccaagagagagggacccaacaggaagagagg

SEQ ID NO: 44924 - RNA, 75 nt, Homo sapiens
aaaaagccagaggccgaagacaaagcagagggaaaggaccaccacaggaaagaagaccaagcaagggaacacaaa

SEQ ID NO: 44925 - RNA, 83 nt, Homo sapiens
ccgcgcgacggcgacgcgggaggccagccaggacccccagcacagccagcagcggaacagcgaaccagcagcggcagcggggc

SEQ ID NO: 44926 - RNA, 78 nt, Homo sapiens
cccagccacccgacaggagccccgccgccgcgcaccgcccgccccgcaccgaaaacacgaaccccggaaggaagagca

SEQ ID NO: 44927 - RNA, 74 nt, Homo sapiens
gcaggcgaacggaaaaaaacgcggaaaccccgcgaaacggaagggagaccgcagacagaacgcacgcgccccag

SEQ ID NO: 44928 - RNA, 75 nt, Homo sapiens
ccgcagcagcaaaaaaggagggagaagcagcaagagcacagaaaacgaaggaaggaggacccgaggagagagaag

SEQ ID NO: 44929 - RNA, 82 nt, Homo sapiens
caaagccgacggccgccggcacgcgaagcgggacagcaagggaggcagcagacgggaagaagagagaaaacaaaagcgagac

SEQ ID NO: 44930 - RNA, 74 nt, Homo sapiens
gggggggacggaggacgagaggcgcagcgccgaccggcgggaaaacaccccgccacccgcagcgcggcaccgcc

SEQ ID NO: 44931 - RNA, 74 nt, Homo sapiens
caagagcgcgacacccaaggccggacgaaagagggccccacgcccaaaccaaacgaacaaagagacacggaaag

SEQ ID NO: 44932 - RNA, 79 nt, Homo sapiens
ccagagccagcgagccagcaggagcggcgcggagcggcgagggacccgcagggagccaccgacgagacgacgggaccga

SEQ ID NO: 44933 - RNA, 80 nt, Homo sapiens
gcgggcaggagcggcggagacgaggccaccaggaaagccgcagccccggcaccgggcgagccccgcggccagcgccccac

SEQ ID NO: 44934 - RNA, 77 nt, Homo sapiens
ccaccacgggcacccgcgccgggcaccgaggaccagccaagacaggcccagaaggggaagacccccagcgaacagag

SEQ ID NO: 44935 - RNA, 83 nt, Homo sapiens
gcaccccggggggggcacacagaacaacaaggggagccgccggacggaggggcacgcccggaagaccagacccgcagcccagc

SEQ ID NO: 44936 - RNA, 47 nt, Homo sapiens
cccggcgccggccgagaaggcagaggcggcgcgcgacgggaccacag

SEQ ID NO: 44937 - RNA, 69 nt, Homo sapiens
cagaaccagggcggcggccagcgccacgcggacgccagaggggaagccgcacgagggagagacggacca

SEQ ID NO: 44938 - RNA, 68 nt, Homo sapiens
accagacgaacaggagggaggcgacacaggcaggaggagaacacaagcacaggggaccaccaggacag

SEQ ID NO: 44939 - RNA, 85 nt, Homo sapiens
gggcggcccgcagcgaaggaccgacagagcgccgccaccgccgccaccacggagcgagaagcccagaagacgccccggcggcccc

SEQ ID NO: 44940 - RNA, 82 nt, Homo sapiens
acgcagaaaggagacacgagcagagaacgggccgggcagggcccccgccagggaaacggccagcaggcgacccggcgcccca

SEQ ID NO: 44941 - RNA, 70 nt, Homo sapiens
gcggacggacacagacaccaagggaggccacagagacaagagagagacaagcaagcccggaaggcccagc

SEQ ID NO: 44942 - RNA, 72 nt, Homo sapiens
gaacaggaacagaggcccaagaacacggccaccacagaagcaagaggcgaaccaaaccaggaagcaaggaaa

SEQ ID NO: 44943 - RNA, 82 nt, Homo sapiens
agggagagaagccaagaaagacagcacggaggggagaagggggagaaagccaccacacaacccaaacaagagggaagccgag

SEQ ID NO: 44944 - RNA, 72 nt, Homo sapiens
ccgcggagccaaaaccagcccccgcgcgaggccgacaggacggggacaccaggccaccaggccaccacacca

SEQ ID NO: 44945 - RNA, 56 nt, Homo sapiens
ccgaccgagacgggcggagaggagaagggcacggagaaagccacgaacaggagaga

SEQ ID NO: 44946 - RNA, 78 nt, Homo sapiens
gccagaaagaaaaaggccccaagaggagccccaggcgggaagcaagggcgaccgaccacgcaaccacccccgggcgag

SEQ ID NO: 44947 - RNA, 78 nt, Homo sapiens
caccgacagcaacccccccacgccacacagggaaggcacacagcagcccaggcacaggaaaacaagcccgggaccaga

SEQ ID NO: 44948 - RNA, 61 nt, Homo sapiens
aagagacagccagcacaccccgcgagcaagggagacccgaccaccggaagccacggcccgg

SEQ ID NO: 44949 - RNA, 75 nt, Homo sapiens
gcgcgaggcgagcgccccggcgagcgccggcggccggcccgaagaggaacagagacaaaagcaaagaagaggccc

SEQ ID NO: 44950 - RNA, 61 nt, Homo sapiens
gaaggggcacgggcacccccgcggccccgggaggcagagacagaagaggaagggagagcac

SEQ ID NO: 44951 - RNA, 72 nt, Homo sapiens
aggagaaggagggacgcaggcgcaggccaggacgcagacgaggcacggagcaccaagagaagcgccagcaac

SEQ ID NO: 44952 - RNA, 79 nt, Homo sapiens
cggccaccggcgggaggaacaaaaggcgcgggggcaggcagggcgcgcgggccaaggcccggccaacggcccacgaccc

SEQ ID NO: 44953 - RNA, 73 nt, Homo sapiens
caagcgggagcggggaaggcacggcggaaagcgccggcccgaagaagccgaagcccaagagcaccccccagac

SEQ ID NO: 44954 - RNA, 88 nt, Homo sapiens
gccgcggggcggcgcgccgccgaaggcgggcgcagcggcggagcggagcggagcccggagggccacggcgagccccgaggacggggcc

SEQ ID NO: 44955 - RNA, 88 nt, Homo sapiens
aagcacaacggcggcacccacgcagacaccagccgcgccaggccacccagaggagaaggccaccccgccggaggcacaggccagaggg

SEQ ID NO: 44956 - RNA, 89 nt, Homo sapiens
cgagcaaaaaagcggcacccaagagaaaaggagaacggagacagagaggaagacccaggccccagcacaagacaacaaacacacaggga

SEQ ID NO: 44957 - RNA, 77 nt, Homo sapiens
caagcggcaagagaggcaccccgaagaggcgaggagcaacccacgcaggggagcggagcaagaaaccaagacaaaca

SEQ ID NO: 44958 - RNA, 97 nt, Homo sapiens
accaccacccgggacccgccggagccagggcggggagcacagcacaggaacccagaaccgcgggcagcaagaaccaccaaacaaggacaggagggaa

SEQ ID NO: 44959 - RNA, 76 nt, Homo sapiens
gagcccccaaccacggggcaagacggcggagagcacagaagcccaggaccgggccggccagaggacgaccagcaca

SEQ ID NO: 44960 - RNA, 68 nt, Homo sapiens
gcggcgggaggagccgccccgaggaaagaccacaggggaaacaagagacagaacggccaaagccaaga

SEQ ID NO: 44961 - RNA, 100 nt, Homo sapiens
agggaggccaacgggggcacacaacacgccaggggcgcccgagggcagggggggcaggggaagcaaaccaggagccacagcggcagggaaaaaaccagca

SEQ ID NO: 44962 - RNA, 59 nt, Homo sapiens
ggacaccggaagcgggaaagcgggagagagggaggaacacgggacgacggcgggagcga

SEQ ID NO: 44963 - RNA, 67 nt, Homo sapiens
agccgagggaggggaaaggcgcaggaccgacgcagaaccaggcaccagagcaagacagcggaagaag

SEQ ID NO: 44964 - RNA, 106 nt, Homo sapiens
caacaccgcagcggcggccccggcgacgacccaccagcgcaccaaccaggcaccgcggcagggggacagcgcccaagcgggacagacccaccgaaccagcagacag

SEQ ID NO: 44965 - RNA, 71 nt, Homo sapiens
agcaaacccggcgcccagagacccccggacagcaagggaggggcagcagagcgagcgagacaggggcagga

SEQ ID NO: 44966 - RNA, 85 nt, Homo sapiens
cagcggagccgagcaaggagcgggccgcgcggagccggagggcgggaggaacagacacgcggagaacgcggcagaacggaggcag

SEQ ID NO: 44967 - RNA, 77 nt, Homo sapiens
gacggcccgacaccacaaccccgccggccaacgcaaaggacacaggaacgccacaagaaacaacagcaaggcgaggg

SEQ ID NO: 44968 - RNA, 65 nt, Homo sapiens
ccgccaaggggacggcacccaccgcccacgacaagaagccacccgcaaggccacgggcaggcacg

SEQ ID NO: 44969 - RNA, 72 nt, Homo sapiens
cgcaagcgaaagacaccaagaaaggcaacagcacaaggcacagcagagaggccgggaccgacaacgaccgac

SEQ ID NO: 44970 - RNA, 80 nt, Homo sapiens
ccagaagggcaacaagggacgggaaagaccgacccaacaagacagaaaaaacaaccaccagcgagcaaaaaggcaaagac

SEQ ID NO: 44971 - RNA, 48 nt, Homo sapiens
cggcggcggccagcgccagaacaggccgcgagcaagccgagcgagacg

SEQ ID NO: 44972 - RNA, 80 nt, Homo sapiens
caggggcaagagccgccgaaagcccgagcgggaagaagccgcagcaagccgcagcggcgcgcaccgggcggcccaggacc

SEQ ID NO: 44973 - RNA, 69 nt, Homo sapiens
gcaggcacaaggcgcagggggaaacgaagcaaaccaacaccccccgggaacaagaaggcagcacacccc

SEQ ID NO: 44974 - RNA, 86 nt, Homo sapiens
gcggcaccgcccgaccggccgcggcgggcgaggccccagcagcggcaggaccagggcagcagcggcggggcggcagcaagaggaca

SEQ ID NO: 44975 - RNA, 74 nt, Homo sapiens
cagacggacaagagcgcggaacaggacgccccgaggggagaggcaccagcaacagaccaaccgcagcaagcaca

SEQ ID NO: 44976 - RNA, 64 nt, Homo sapiens
cccacagcaccgaacccaccgcaggcaaacacccacggaaacaggcgggcagaaacacagcggg

SEQ ID NO: 44977 - RNA, 76 nt, Homo sapiens
gcggacaggcgggcacagcgaaggaggagcccggagacacacaggcagacccaacgagccaggacaggggcgcaaa

SEQ ID NO: 44978 - RNA, 73 nt, Homo sapiens
ccgccaaccccggccggcggggcggcccgaggagcgggccgccgcagagagaaggcaagcggaagaaagacca

SEQ ID NO: 44979 - RNA, 83 nt, Homo sapiens
caaccacggggaaaaggcaaaaacccacaccgcaacccagcgagagaaaggacaggaagggagcccaaaacagcagaggggag

SEQ ID NO: 44980 - RNA, 76 nt, Homo sapiens
gccgcgggggaccgccccgcccggagcgaggacccgcgggaggagcgcacagcacagccaaaaacagaaaccacgc

SEQ ID NO: 44981 - RNA, 59 nt, Homo sapiens
gggaaccaaacagcagagcagggcagcccaaggaccaagggagaagagacccaggaggc

SEQ ID NO: 44982 - RNA, 82 nt, Homo sapiens
ccgcaaacagacaacacaaaacccgcaaacacaagaacccaaggccaggaagaggccaaagaagcagaaagagcagaaagga

SEQ ID NO: 44983 - RNA, 73 nt, Homo sapiens
agagaagaagcaagaccaacacgcgcaaggacaggagagacaacggaggcaagaaagacggagaagcgagaag

SEQ ID NO: 44984 - RNA, 54 nt, Homo sapiens
cacagcagccagcggcggaaaagggcgagaaaacaaaaaagcagaaaagggcca

SEQ ID NO: 44985 - RNA, 72 nt, Homo sapiens
gcggaacaccaaacggaggagccagacccggggaggcgcacacacaccaaaggcacagagcacaggaaggag

SEQ ID NO: 44986 - RNA, 75 nt, Homo sapiens
ccgaggacaggaccgacagcacaacaccgcacggggagccaagccggggaagcgacgaggaagccaagcaggccg

SEQ ID NO: 44987 - RNA, 78 nt, Homo sapiens
agcaaagccggaagcgacgcgcaccggcaagcacacgggggagggaggcaccgccccaacccccccccgcccggagaa

SEQ ID NO: 44988 - RNA, 90 nt, Homo sapiens
acgagacgccaccacaggaagcggggagggcgaggagggcagggccgaggacaccggagccagccaggccggccgcgggccgaccggccc

SEQ ID NO: 44989 - RNA, 71 nt, Homo sapiens
gcgaggaaagcgcacggacgcaccccacgggaacccacgaccaaagcggaaggccagacggggcgacgggg

SEQ ID NO: 44990 - RNA, 40 nt, Homo sapiens
cccgcacgagcagcggagaaggggaggacgcgagcggaag

SEQ ID NO: 44991 - RNA, 77 nt, Homo sapiens
ccaagggcacgggaagaccggaggggacgaagaacggaacaggcaagggccaagacaagcccagagggccgaggaac

SEQ ID NO: 44992 - RNA, 84 nt, Homo sapiens
gacgaagaaggggagaggagaagggaagaagagaagagagagaaggggaggaaggagagagagagcaggagacggagggcagag

SEQ ID NO: 44993 - RNA, 66 nt, Homo sapiens
gaaaaggcagccaggcggggaggcccgcacccccagagacgcagagaccaaaagagacgcgaggac

SEQ ID NO: 44994 - RNA, 87 nt, Homo sapiens
cccggcggccccggcgccggcaaggggacccaggcgcccgcacgcgaggagccgcccaggaggccccaggccgaccccagacccggc

SEQ ID NO: 44995 - RNA, 79 nt, Homo sapiens
gcgggagaggcgagccgcgagagggccggcaggcccgggaaggggcgaaagaacaggaccgaaccggacacaccccaga

SEQ ID NO: 44996 - RNA, 76 nt, Homo sapiens
ggaccaccacggccacagccgccgcagacccagcagccaagagggaagcagacgagagcaagaggagaacagaagc

SEQ ID NO: 44997 - RNA, 73 nt, Homo sapiens
gcacagaggaagacagaaaacccgaaagaagcaccggggccagcagcgccgcccaccgagcgggggccggaac

SEQ ID NO: 44998 - RNA, 88 nt, Homo sapiens
gagcgcgggaggagccgggcgcagaaccagaccgggagcacgcacgccacgaaggggacgaggcacccacagcccccccaaagccgcc

SEQ ID NO: 44999 - RNA, 103 nt, Homo sapiens
gaagaccaacaaggagacgaagaaagaaggaacccagccccgaaaaagcggacaaaggccaaaggaccccccgacacaaccgcagaccgcaaaacaacaaaaa

SEQ ID NO: 45000 - RNA, 85 nt, Homo sapiens
cggagggaagagcgagggagagacagcaccaggcccgaagcagaaaacagagggaaagaaacagccccagagcccagagccagcc

SEQ ID NO: 45001 - RNA, 82 nt, Homo sapiens
cgccagcaacacgggcgaccagcgagagcaggacggcgaccagagggccgccccacaggcagcgccgcggaaccaacagccc

SEQ ID NO: 45002 - RNA, 124 nt, Homo sapiens
ggcggcagcggcccgccggcgggcgcggccacacaccggcaacgcggcacggcccagcgcgcgacaagcagaccggaagaccgacggaagaccacaccccgagggagcccaggacaccacgaga

SEQ ID NO: 45003 - RNA, 62 nt, Homo sapiens
gaacaacagcacacgaaggaggccagcaaagaccgcaaaaaaaggacaaagcagccaaccag

SEQ ID NO: 45004 - RNA, 79 nt, Homo sapiens
caaccgccacgagacaccaaggggacgcgaagaagcccccaccaccacgagaccgacccaggacgacaccacagcacag

SEQ ID NO: 45005 - RNA, 77 nt, Homo sapiens
gccgccgagagcgagagagccaagacaccacggcgcccagaacccagcccgccggcccgcggggcagaacggcagcc

SEQ ID NO: 45006 - RNA, 76 nt, Homo sapiens
ggagccacgacgagcaaggcgggagggggcccgaccgagaagacagaggaagaaacagagcccagcgcgcacaaag

SEQ ID NO: 45007 - RNA, 74 nt, Homo sapiens
acccagccagcacacggcaagcaaacagaagaagccagcagccacaccaggcagccggcacccgcacaacccag

SEQ ID NO: 45008 - RNA, 78 nt, Homo sapiens
acgaagagggagaacggcaacccaccagacaccagccgggcgcacacggcaaccagaaaccgcagaccgccggcaccg

SEQ ID NO: 45009 - RNA, 117 nt, Homo sapiens
ccaggccaaaccaggaggcggcgcaagaagacgggagccggcacgccggagagcgagggacccagagaagacggcagccccgcgcgaggacgagagacggccgagggggagcaacgg

SEQ ID NO: 45010 - RNA, 64 nt, Homo sapiens
gaccggagcagcaacgcaagacaccggcacgcaacagggacaagagaaaaaaagggcgggcgaa

SEQ ID NO: 45011 - RNA, 74 nt, Homo sapiens
aggaacgggagaggaaacaagacagcgcgcagaagcccaaggcgaacggagagacacagaccagcggagaaaaa

SEQ ID NO: 45012 - RNA, 57 nt, Homo sapiens
ggcaacaaagaacacacggaaggaggcacagcgcacggccgcaggggggcagaacgg

SEQ ID NO: 45013 - RNA, 86 nt, Homo sapiens
cccagaacagagccaaggcggaagagaaagggacgcggcacagaacgaagaagaaagcagaagcaagagaaaaaagaaacaccgag

SEQ ID NO: 45014 - RNA, 55 nt, Homo sapiens
gaaaagaaaaacccccaacccaggaagccggagccagaggacggggcgaggccag

SEQ ID NO: 45015 - RNA, 74 nt, Homo sapiens
accagcccggcagaaggccaccaggcacgacccaccgcaacaccaccaacccaccggaaggccgagaagagaca

SEQ ID NO: 45016 - RNA, 55 nt, Homo sapiens
ggagcgggccggggccaggaacaaaccaaggcaacaggaaccaaggaaaaggacc

SEQ ID NO: 45017 - RNA, 57 nt, Homo sapiens
ccaggacagaagggcgagaaaaggcacagcgacccgaagaaaccgcagcaaaagaaa

SEQ ID NO: 45018 - RNA, 77 nt, Homo sapiens
ccaacaccggcagaccgcccagagagggacaagcaaggggccaaggagccaaggaggaaacccacaacagaggacag

SEQ ID NO: 45019 - RNA, 61 nt, Homo sapiens
aggacaacagcagagccagcagccggcgaggggggagcccagcaggagcgggaaaaccgag

SEQ ID NO: 45020 - RNA, 79 nt, Homo sapiens
cggccgcggcccccgccgcggcacgaccccacaggcacaacagggcacaaggaggaaaggacgggcaacgcagccggcg

SEQ ID NO: 45021 - RNA, 80 nt, Homo sapiens
gcggacaccggcagcgcgcggcgacgcgggccgagccccccaggagagagagagaggccagggagagagaagaggagaca

SEQ ID NO: 45022 - RNA, 66 nt, Homo sapiens
gagacagagagagccaaacccccagaccggagaagagcagaaccaacacaggaagaagaaaaccgg

SEQ ID NO: 45023 - RNA, 83 nt, Homo sapiens
cagccacccacaaacagagagaaggaaccacccacgcaggcagcaacagcaaccaagacccagggaaggggaacaggaaacgc

SEQ ID NO: 45024 - RNA, 50 nt, Homo sapiens
ccggccacagccccaaccggcccagccccccccggaggccggccacacca

SEQ ID NO: 45025 - RNA, 81 nt, Homo sapiens
ggacccccgaggcccccacccccaccagggccccggagcgcagcacaccagcgccgcgcggggccagccgcccggcccggg

SEQ ID NO: 45026 - RNA, 71 nt, Homo sapiens
agagcggcaaaaggggagcggcacccgccgccacccacaaggcacaacaggaagaggaggggagggaaagg

SEQ ID NO: 45027 - RNA, 81 nt, Homo sapiens
agccgcccaagccgcacagccgcggcggcagcagcaggagaggcgcgagaaaggaccaacgaccccgagcgcaaccaccag

SEQ ID NO: 45028 - RNA, 75 nt, Homo sapiens
aaggcaggcacgaagaccaccacaaaaacgaggggaaaaccaaaagaggccgaacaacgggcaaccgaagagagg

SEQ ID NO: 45029 - RNA, 82 nt, Homo sapiens
caggcggaggccccagggaagcgcagaaagcaggcgaacccgcggcgcaaaacgggcagccgacccacaccagccgcccacc

SEQ ID NO: 45030 - RNA, 77 nt, Homo sapiens
cagcagcaaccggaaagcaagggagcggcacagccagaagaccgaagcgcgacggaaggaagaggcagagcacaggg

SEQ ID NO: 45031 - RNA, 73 nt, Homo sapiens
cgaccgccaccgggagggggaagagccggacaacacacacgcacaagcgaaaccaagagagagagagaaacag

SEQ ID NO: 45032 - RNA, 100 nt, Homo sapiens
cccccaccaccaccacccacacccaccaacaacaccacaaaaccacagccaaggggaccaaaagaacccagccaacccgcagagggaggggaggggcgag

SEQ ID NO: 45033 - RNA, 69 nt, Homo sapiens
aggcaaggcaaaaccaaaaggaggaaagaagaaggacaaagagaggaaaaaaaccaccgaaaagcaaaa

SEQ ID NO: 45034 - RNA, 82 nt, Homo sapiens
gggccgcgaagcgcagcgccagacccaaggcccccgaggagcgcgggcgccgagcacccaccccgagggggaacgagccgag

SEQ ID NO: 45035 - RNA, 85 nt, Homo sapiens
cccaccgcccgggcccgaggaggcagccaagccgagccgccacccggccccaccccccaaggcagaggggcggcggaaccagcca

SEQ ID NO: 45036 - RNA, 83 nt, Homo sapiens
gggaggggagggcagaagccaacaccggccacgcacacagccgggcgacagggggggagaagagaaacaaagagagcagaagc

SEQ ID NO: 45037 - RNA, 77 nt, Homo sapiens
acccgaccccgcaacccagaacccggcgaccacgaaggaggagcccagcagagagagcaggagacggagggcagagg

SEQ ID NO: 45038 - RNA, 73 nt, Homo sapiens
aacacacacacagcgacagcacaagaagagcccaaaagcaaagcagggcagcaaagaacacaaaggcacggga

SEQ ID NO: 45039 - RNA, 74 nt, Homo sapiens
gaagacgaaggaggccggagaagaaagaggccacggaccgccgaagcgcccaacagccaaacggaacgcgacgc

SEQ ID NO: 45040 - RNA, 60 nt, Homo sapiens
agacggcaaggcgccacgaaagcacagggaccagaccagggaagacaacggaagcagcag

SEQ ID NO: 45041 - RNA, 79 nt, Homo sapiens
ccccaggcagacccgaccgaccagcggcgggagaggagagcaaaagagccaacacccaggccaggccgcccggaaggag

SEQ ID NO: 45042 - RNA, 80 nt, Homo sapiens
cgcaaacaagccaacccaggaggaaaaacgaggaaccagagaaggagaaacagcagggccaaaggcaagaacccgggaaa

SEQ ID NO: 45043 - RNA, 71 nt, Homo sapiens
cggacacgccagggacacccaaagcaagaccacacgaaggggaaccccagcggcgaccggaacaaccaggg

SEQ ID NO: 45044 - RNA, 79 nt, Homo sapiens
gagagagggacacgaaaaaggggaaggacaagaaagccacagcaagggaagggaagaggaggagaaaacgggaggaggg

SEQ ID NO: 45045 - RNA, 76 nt, Homo sapiens
acgcgggaccgacgagaacccaggcagaggagaaggagccccgcagacaaaccaaacaagcaaaaagaaagaagaa

SEQ ID NO: 45046 - RNA, 57 nt, Homo sapiens
gcgagccccacggcgagggcagagacccccggaaagaccacagcaagaccacgcccc

SEQ ID NO: 45047 - RNA, 76 nt, Homo sapiens
gaaccaggggccccacggggaaaaaggaagaccgcaggaaagcaggaaggcaagaaagccaaggacgaaacccaca

SEQ ID NO: 45048 - RNA, 102 nt, Homo sapiens
gcacggaacagcgaggccagcaggagacggagccacggagcaggcaacgagaaggaacagaaggcaaacaacagaaagccaacacagaagaaagaccaaaca

SEQ ID NO: 45049 - RNA, 76 nt, Homo sapiens
gggaaggagaagcaggcacagaaggcgccaggagaaacaaggcgaacgggcgaggaaaacgccacccgagccagca

SEQ ID NO: 45050 - RNA, 77 nt, Homo sapiens
gcaagccagccaccgggaccccaggcggcaggccgagggccggagcgcgaagacgcagggaaagcggcacacgaaag

SEQ ID NO: 45051 - RNA, 67 nt, Homo sapiens
aaacacccacggaaccagagacgcacgcaggaaagacagggaagacaaggaacggaggaaacagcca

SEQ ID NO: 45052 - RNA, 67 nt, Homo sapiens
gagaggaagcagccagcgccgcaacaagcggcagcaagacgccccagaaggagagcccgagaaggac

SEQ ID NO: 45053 - RNA, 72 nt, Homo sapiens
ggaagaaggccgcccccaccggacgaggccccccaaccaggcaagagcaggccgggcccgccagggcacgcg

SEQ ID NO: 45054 - RNA, 77 nt, Homo sapiens
gcggccgaccgccgggaccggagggaggaagcgggacacccgggagcaggaaagggaaaccgccggagaaggaccac

SEQ ID NO: 45055 - RNA, 66 nt, Homo sapiens
gggaccagaagcgggcaaagcacccgacaaacgaaagaacaacggcgcgaaggagacacaaacaac

SEQ ID NO: 45056 - RNA, 69 nt, Homo sapiens
gccaaccgaaacagcaagaacacacgaaccacagcgaaacaggcagcccccagggccggaaggagggga

SEQ ID NO: 45057 - RNA, 51 nt, Homo sapiens
accgcagagacacagcgcagagggacgaccggggcacagccgggaagcaag

SEQ ID NO: 45058 - RNA, 74 nt, Homo sapiens
cgacgccagaagaccaagaccgcagaccgaccccgagagaggacggggcccccggagggccacaagccagagcg

SEQ ID NO: 45059 - RNA, 55 nt, Homo sapiens
cgggagaacacccccccaggaggcgaggagagggggcgcagagcccaaaagcaaa

SEQ ID NO: 45060 - RNA, 79 nt, Homo sapiens
cacaccaggcagcccccaaacccggcccagaccacccaagaagaccaaggcccaaaaggacccaagagagaagcgacag

SEQ ID NO: 45061 - RNA, 68 nt, Homo sapiens
agggcccgcaccccccgcaggggccgagccagcaccaaccaagcaccacgccacacacgacagcagga

SEQ ID NO: 45062 - RNA, 56 nt, Homo sapiens
ccacgaacgaggggagacgaggacaacagaacagcggggacaaccgaaccgccaca

SEQ ID NO: 45063 - RNA, 38 nt, Homo sapiens
gccgggcgggcggagccccccaagagaacccaggggga

SEQ ID NO: 45064 - RNA, 76 nt, Homo sapiens
caagacagaaccgccaaagcgcgacgccggaggcgcgggcaagaccccgggacccaggccagaggggcgaagcggg

SEQ ID NO: 45065 - RNA, 75 nt, Homo sapiens
aaaaacacgggcggacggaacggagcagacagcagcgaagaagagaaaccaacaaaccagaagagaccagccaca

SEQ ID NO: 45066 - RNA, 49 nt, Homo sapiens
aaagccaggggaggccacagacagggcagcgcaaaaggaaacaaggccc

SEQ ID NO: 45067 - RNA, 76 nt, Homo sapiens
ggggagcaagaagcaggaaaggccggacaccaggcgaaccacgggaacaaaggcgaggacaaggagggcaggggac

SEQ ID NO: 45068 - RNA, 79 nt, Homo sapiens
gagggccaaacagggcagaacgcaaccagccggggagaaagacagcaaagaaaaggagaagaaaggaaaaaaacaaccc

SEQ ID NO: 45069 - RNA, 104 nt, Homo sapiens
gaacgaagagaacggagcaacagggaagaggagaaaagcaccggaagagaggaaaaaggccaagaaaacagaggaaaagccagggaaagacaacagcaacaagc

SEQ ID NO: 45070 - RNA, 75 nt, Homo sapiens
gacgcacccagaggagaagcaaggcgacgccagaggaggaaaggaagacaagagccagccaggagcccgcccaac

SEQ ID NO: 45071 - RNA, 73 nt, Homo sapiens
gcgaacccccgggaccccgccgccgcacaacccgagacggagcgcgccccaccgcggccgccggggacacaga

SEQ ID NO: 45072 - RNA, 87 nt, Homo sapiens
cggcccgcgcggagcggacgcgcgggcgcgcccgcccagaaccgggacaacccagcaaacaggccagacccgacaggagcgacaaac

SEQ ID NO: 45073 - RNA, 75 nt, Homo sapiens
ggccccaggagggaaccagaccaaccagaagccagcccgacagacagaggaggacagaaacccaaagaaccaaag

SEQ ID NO: 45074 - RNA, 73 nt, Homo sapiens
cagacggagcacggcgcaggggcaggaggagcgccaggcgagaagcaggcggagggagcgcaaccaggcaccg

SEQ ID NO: 45075 - RNA, 71 nt, Homo sapiens
caagccagcagcggaagcaaccagagcccaggaagaggcgcaacaaaaagcacccgaaaaggacaagcagc

SEQ ID NO: 45076 - RNA, 76 nt, Homo sapiens
caccccacccccgggggccacggacccggcgacaacacccggccccgagacagaagccggcccccacagagagcac

SEQ ID NO: 45077 - RNA, 73 nt, Homo sapiens
acccagacggcaacaaaggcgaggagacagacccagcacggaccccccccccagccgggcgaggccccgaaac

SEQ ID NO: 45078 - RNA, 78 nt, Homo sapiens
gccgggcgaagaagcagccacaaagccagccagaacacgaaccagggagggagcagcggacaagcagccggcgaccac

SEQ ID NO: 45079 - RNA, 35 nt, Homo sapiens
agcggacgggcaaagccagccacggggggaaccag

SEQ ID NO: 45080 - RNA, 71 nt, Homo sapiens
agggggccagggggggcggggaccagggcaccagcgacgcgcggccaagcaccagaaggccaacacaacca

SEQ ID NO: 45081 - RNA, 87 nt, Homo sapiens
cgcccagcgccacgaagacccggcacggccgagcagagaggacggggacgaccgggccagacaccgggaggaacggcgccggggcac

SEQ ID NO: 45082 - RNA, 80 nt, Homo sapiens
cgaaggcaccgacgcacagcgaccaccaacagaccgaaggagcaggccgggcccgccagggcacgcgcccgccacgggaa

SEQ ID NO: 45083 - RNA, 77 nt, Homo sapiens
acaccagcaccagcaaccgcgcaacccaccgcccccaaggcccccccgccggagccccggccccgcggggaccgacc

SEQ ID NO: 45084 - RNA, 56 nt, Homo sapiens
gacccgccggacccaaagcccagacccaggaacaagcgggcacagagagacccagc

SEQ ID NO: 45085 - RNA, 77 nt, Homo sapiens
ccggagcggaggagacgggccgcacccgccccccgcgcccgccaccggccgccgcccgagccgagaaaaagcggacc

SEQ ID NO: 45086 - RNA, 78 nt, Homo sapiens
ccgcagccgggggaggggcgccggaggacaccacagagagacggggcaccagagccaggaggccaacccgacccggac

SEQ ID NO: 45087 - RNA, 66 nt, Homo sapiens
caaaagggaagcgaagccgaaaaaggcagcagcgaagagccccaccaccaagagagagacgcgggc

SEQ ID NO: 45088 - RNA, 57 nt, Homo sapiens
ccaccagcaggagcacacaggaaagcacaccggcccccaaaaacaagaggcaagaac

SEQ ID NO: 45089 - RNA, 72 nt, Homo sapiens
cgccaccaggaccaccccccgccagcggcccgagaaaccccgcgggggcgagaggaccccgcccccaggccg

SEQ ID NO: 45090 - RNA, 84 nt, Homo sapiens
ccgcagagaagcagggcggcacgaacggccagcaggaccaggacaaaaccccagaggaacggacaaagaaaccagaagaaggca

SEQ ID NO: 45091 - RNA, 81 nt, Homo sapiens
cgcagcaagaggaggggcagcaaagaggccgaggagagcccgccggcaccaagcagccgaagagaaacaagggacagcaga

SEQ ID NO: 45092 - RNA, 118 nt, Homo sapiens
cgacaccccggccagggggacggcgccacgcaccggacgacgcccggcgccagcacacgcagacaagcagaccggaagaccgacggaagaccacaccccgagggagcccaggacacca

SEQ ID NO: 45093 - RNA, 55 nt, Homo sapiens
aaccagcacaacgcaagaaacggagaacccaggcgcaaggaagaagagacgccgc

SEQ ID NO: 45094 - RNA, 67 nt, Homo sapiens
gcaaacgagacccggcgaccaacccggcaccccccaaccaggcacaaggcccaacagcccagcgccc

SEQ ID NO: 45095 - RNA, 76 nt, Homo sapiens
ggcgcccgggccggccaggacgacccgaaaaagaacggggacacgcgagacaccaagagaagaacgaaaaaacagc

SEQ ID NO: 45096 - RNA, 87 nt, Homo sapiens
ggcacaccccgggaggcgccggccagagccggcgagccggaggaagccaccagggagcacgagacagcgccggccccaacgagggag

SEQ ID NO: 45097 - RNA, 67 nt, Homo sapiens
caaccagcccgcccgccgacgcccgcgccggcgccccgggagcgggacggagcgggccaccggggcc

SEQ ID NO: 45098 - RNA, 76 nt, Homo sapiens
caaggaaaaacagcaagaacccaaaagggagcagaccacgagcgacagccccagcgcggggcggccccggcaaaga

SEQ ID NO: 45099 - RNA, 77 nt, Homo sapiens
cagaccagccggaacaagagacccgaaagcgacagcaacaaaagaccaacaacagaagcagagccagagagaaaaca

SEQ ID NO: 45100 - RNA, 68 nt, Homo sapiens
caacgagaaagcagagcgacccaggacaacacggcaaagaggccccaagaggggaaaaaggaccaaac

SEQ ID NO: 45101 - RNA, 82 nt, Homo sapiens
agcaaaccgggccacaggcgagagcacggagcaccagaagcacaggggcccggggagagccagagcccgggggcgccccgag

SEQ ID NO: 45102 - RNA, 81 nt, Homo sapiens
gggaagccggccgggcccagccgggggagagaggaaggaagggacaaaggaccaggggaccagagaggagcagcaggagac

SEQ ID NO: 45103 - RNA, 82 nt, Homo sapiens
cgggggcggcggccgcgcgggcggcgggaccggggaagacgccggccgcagggcgaaaccaagaggagggaagcaggcagac

SEQ ID NO: 45104 - RNA, 75 nt, Homo sapiens
ggggccaacagcaccacagacgcaggcaccaacaaacgcacagaaagcaggcaaacaaccaggcccgcggcgacc

SEQ ID NO: 45105 - RNA, 74 nt, Homo sapiens
cccgaaggcgcaaacgacaccacccgaccggagccgcagaagccgccgcgggaagcaacgggaaacggagaacg

SEQ ID NO: 45106 - RNA, 82 nt, Homo sapiens
gacgagaggacgggaccaggcgaagcggccgagcaggcgagcgaacgacgccgaacacccaacaagaaggcaacgacaaaca

SEQ ID NO: 45107 - RNA, 73 nt, Homo sapiens
accggcccaaaccacaccaagaacaacaagaaccagccaccaggaccaccagggcgggccgaacagaagagca

SEQ ID NO: 45108 - RNA, 85 nt, Homo sapiens
ggcaaagagagcagacccgaggagcccgcaggccccggccccaacaggcccgcgcccagagccccgcagggggacaacccacggc

SEQ ID NO: 45109 - RNA, 80 nt, Homo sapiens
cacagcaacacagcgccaccgcggcacccagggcccaccgggacagaccggagcggggaggagcgccggccgaaacgagc

SEQ ID NO: 45110 - RNA, 85 nt, Homo sapiens
gccccaccgcggcacaagcaggccggacccacggcgcggagcgcaccaccaggagaccggacgcgggacacaagaaaaaacccgg

SEQ ID NO: 45111 - RNA, 73 nt, Homo sapiens
gagcggaacgggacgcagaaagggcagacacaggcacaccaagggaacagcgcgagccacaaggcaaggaagc

SEQ ID NO: 45112 - RNA, 63 nt, Homo sapiens
ggcgcgagcgcaagacacgaaacaccgagagaggacagcccagagcaagcacacggaggcccg

SEQ ID NO: 45113 - RNA, 58 nt, Homo sapiens
ccagaccgccaaaccagagaaagaaacacccgaacagcgaaggaagaagccaagccaa

SEQ ID NO: 45114 - RNA, 84 nt, Homo sapiens
ccccgggcaaggaggacccaagacccgaccagccaccccggacgagagcaaggagaggcagggcagaaagaaacgagccgacaa

SEQ ID NO: 45115 - RNA, 87 nt, Homo sapiens
agccaccagcgccaggcacaagcacgggcacggaaggaggaggacagaacaagcgagggaggcggcgggcgcaggaccgggggaagg

SEQ ID NO: 45116 - RNA, 60 nt, Homo sapiens
ccagaaacgaccgagaaggagggccccgcggggcaagaagaggccagccggacccccaaa

SEQ ID NO: 45117 - RNA, 83 nt, Homo sapiens
cgaaagacaaggcaaacggggaccccaggagagcgccggcagcaaaaagaaagagcgggaagaaggccgccgcacggccagcg

SEQ ID NO: 45118 - RNA, 78 nt, Homo sapiens
ccgacagaagagcgccagaccaacaggcaaaacgggcgggggcaaagaaccacaagaacaaaaggcaagaaacacagc

SEQ ID NO: 45119 - RNA, 74 nt, Homo sapiens
ggagcagggagaggagcgggaaacgggagggaaccagcaacaagccggcaaccagacacacaaccaccagaagg

SEQ ID NO: 45120 - RNA, 75 nt, Homo sapiens
gccccgacgcggccgcagcgccgcgcgcgcgggaggagacccggaagacacccgcggagaaaaggaagcagccag

SEQ ID NO: 45121 - RNA, 53 nt, Homo sapiens
ccggcaccagcacaacgccaccaggaggaccggacaggcagcggaagaacagg

SEQ ID NO: 45122 - RNA, 78 nt, Homo sapiens
ggaggaggacccaggaaccagcagaggcccggaggggggggggagcacaggcagagagcccaaaaggcagagcgagga

SEQ ID NO: 45123 - RNA, 75 nt, Homo sapiens
agcccccgagacgggaacagggaaccagggccaccagagaagcgacagaccaggaaccagggggaagggagggcg

SEQ ID NO: 45124 - RNA, 69 nt, Homo sapiens
gcccggccgcgccgcgccgcgacggccgacgagccaaagggaacagggaagcgagccacaccagcagca

SEQ ID NO: 45125 - RNA, 39 nt, Homo sapiens
aacgggccccaaggcgaccggaagacccacacgaaaagg

SEQ ID NO: 45126 - RNA, 65 nt, Homo sapiens
aagaaacgagacagagcagcacagaaagagaagggccagaagggcaagaaggaacagacaaaaac

SEQ ID NO: 45127 - RNA, 78 nt, Homo sapiens
ccccaggcccaaagcggcggagagaaggacagcgccaaacccaagaagaagagcccagggcacaaccaagggaccaag

SEQ ID NO: 45128 - RNA, 65 nt, Homo sapiens
ggcaaccaccaccaggagccagcacgagacaacggcaagcggagaagagcaaggccgaaccgaga

SEQ ID NO: 45129 - RNA, 78 nt, Homo sapiens
ggggggagggcccgaccaggaaagacggcgaaacacagccaagccagagaggaaccgagacagagcagcaagccacgg

SEQ ID NO: 45130 - RNA, 71 nt, Homo sapiens
gaaccccgcccgagcccgccggaccccccgacccaggcgcaaaaaccagacaccccacaccaccacccaga

SEQ ID NO: 45131 - RNA, 84 nt, Homo sapiens
gagggccagccgggcggggcccggcggagcccggacgggcgccacaccaacaccacggaaccagcggggaaggaaaacagcaac

SEQ ID NO: 45132 - RNA, 69 nt, Homo sapiens
ggaaacaagcggaaaggacacaggaaaagcgacagaaccaaggaagcccaacgaacgaggggagggaca

SEQ ID NO: 45133 - RNA, 84 nt, Homo sapiens
ggggagcagcgcgcaagacaagccgggaagacaagcagaccccccagaggggcgaggaagccgcagagccccggaggacacacc

SEQ ID NO: 45134 - RNA, 65 nt, Homo sapiens
aaacgggcaagaacagggaacgggccacaggcagcagcagcacacccccgagcaccgcggggggg

SEQ ID NO: 45135 - RNA, 80 nt, Homo sapiens
gcaaagaagacccagacgaagaagaaacacgaaagagagcggacagagggcaaaagagggaggggcacaaaaaacaagaa

SEQ ID NO: 45136 - RNA, 76 nt, Homo sapiens
gaaacaaaaagcaaggcggaccagaaaccccagagcgcgaccgcagagggaagcgacagggcacaaacaaggcagg

SEQ ID NO: 45137 - RNA, 40 nt, Homo sapiens
gacaggcgacgccacaacgaccgggaccccgggaaaggca

SEQ ID NO: 45138 - RNA, 79 nt, Homo sapiens
gacaagcccacaaggcaggcagaggggcagaacccgggcggggccggacggggggagaaggaaaagggacaaagcagcc

SEQ ID NO: 45139 - RNA, 72 nt, Homo sapiens
caagcccggagagacgcggccggcaagaacggacgggcgccacaagccacacggaggaaggagggccccgga

SEQ ID NO: 45140 - RNA, 57 nt, Homo sapiens
gccgaccgccgcccgccacacccgccgccaggcccggcgagcgaccgccgggggaac

SEQ ID NO: 45141 - RNA, 82 nt, Homo sapiens
caggaaaagcaggccgaagaaccgagcgacagagacaagcgagcgccgcacaaaaagcagagaggcagaagcccccggggag

SEQ ID NO: 45142 - RNA, 77 nt, Homo sapiens
accaagggacagggaaaaaggcgccaaagcacagagcaagcggacaaaagaagagaaagacaagagcaccacagcaa

SEQ ID NO: 45143 - RNA, 71 nt, Homo sapiens
cggggaacggaggagcgccgagccagcaggcagacagccagccgcaagcggcaaacgggcagaggcacccc

SEQ ID NO: 45144 - RNA, 74 nt, Homo sapiens
caacgggcccgccagccccagcggcgccgagaaaggccaagaagggacaggacgcccggcggccaagcccagcc

SEQ ID NO: 45145 - RNA, 76 nt, Homo sapiens
gcggacacggccagcgaggacaggcgccggggaaggaaccagaacggcaccccccccccggcccggacgcgcccca

SEQ ID NO: 45146 - RNA, 68 nt, Homo sapiens
ccccgggagcggagcaaggaacgggcgaaaaacgaagaaggaagacgcgaccgaacaaacagccaaaa

SEQ ID NO: 45147 - RNA, 98 nt, Homo sapiens
caggcagcgcggaggggcgagccagcggccaggcagaagcccccggggagagacagacagagggacacagagaggaagaaaggaggcccggaagagga

SEQ ID NO: 45148 - RNA, 89 nt, Homo sapiens
aaccacggccccagaaagaaaaaagaagaagccccgagcaccaaaacagacaacccagcagggcgggcggagagaacgagagcacgaag

SEQ ID NO: 45149 - RNA, 80 nt, Homo sapiens
aaaacaaagggaaacaggcacaagaaaacgggaagacgcaagaccaagacacccaggagaaagacagcggggaaaagaaa

SEQ ID NO: 45150 - RNA, 77 nt, Homo sapiens
aggagcgacggcccgccacgcaggggacacaggcggcccgccagcggcaggggggcacacgggccgggggcgcccgg

SEQ ID NO: 45151 - RNA, 73 nt, Homo sapiens
acccgaaggcccgggggacggaaagaggacgcaagccaagaggggacaagcaagagcgcaaagcacacggcac

SEQ ID NO: 45152 - RNA, 68 nt, Homo sapiens
cagaagcggggcagaccaagcaacacagaagaaacgacaccagagccggccagaaggaggacaggaaa

SEQ ID NO: 45153 - RNA, 80 nt, Homo sapiens
agcagcgaacccgagaccaacgggaggagcggggggaagaccaacgggagccgcaaggacaacagccgcggccagacagc

SEQ ID NO: 45154 - RNA, 75 nt, Homo sapiens
gcagcccgaaaaccgggaagcacgaaagggacaggagaccggaaggccaaaacaagggaagcaaaggaaacggag

SEQ ID NO: 45155 - RNA, 35 nt, Homo sapiens
ccacaaccaccccacaggagccgcagaagccgccg

SEQ ID NO: 45156 - RNA, 68 nt, Homo sapiens
ccggccagcgccgccgagaggggagaagcagaccgcaccaggcgggaccccgaaaaagcccaaacaga

SEQ ID NO: 45157 - RNA, 71 nt, Homo sapiens
cccaggagcacagagagccaaaagaccgaaacaagccaaggggaggggacaacacccgaaaaccacaaaga

SEQ ID NO: 45158 - RNA, 74 nt, Homo sapiens
cggcccaaggccagcccgcaggccaggaggggaggagggagggccacggcaagggaagcacaaaaagagccgca

SEQ ID NO: 45159 - RNA, 81 nt, Homo sapiens
ccaggcccgccgagcggcaggagggggcagaagccaagccccaggcggaggcaaacaccaaaaacgaaaccagcgccagcc

SEQ ID NO: 45160 - RNA, 80 nt, Homo sapiens
ccaggacgagaagaggaccaacagcaaaggcgcggcgcccacaagaaaggcagcccccagacaggaccggccacagcgcc

SEQ ID NO: 45161 - RNA, 82 nt, Homo sapiens
ggaagcacagagggaaaggaaggcggaaaagcccaaacagggaggagccgaagccgaagagagaaggaacaccaaccaccag

SEQ ID NO: 45162 - RNA, 80 nt, Homo sapiens
gagccgcaccgccgaccccaggcagccccgcacgagcggcaaccgaaagccagcagcggaacaaggcagaccaaccaccc

SEQ ID NO: 45163 - RNA, 69 nt, Homo sapiens
gcaggcgcgcccggaccgacgcgcaccccggacaccccgggaaacgaaaagagacagaaagaggccaag

SEQ ID NO: 45164 - RNA, 74 nt, Homo sapiens
gaggaggcggccggccgagcacaggagggccgaggaacgcagggggcgccacagggaaggaccaagacgcagcg

SEQ ID NO: 45165 - RNA, 75 nt, Homo sapiens
ggggacggcgggggccgagcccagagagggaggagaaacagaagcgggggaggagaaacaggaccacacacaagg

SEQ ID NO: 45166 - RNA, 77 nt, Homo sapiens
gcagaccaggacacaaaggcccaccggcgaaaccaaaagaagggacacagagaccccagccaaccgcagcccaaagc

SEQ ID NO: 45167 - RNA, 75 nt, Homo sapiens
gacaggccccggcaccagaaggcagcgggggcacagcgagggggcagaccccagcgccacgaacggcgccccagg

SEQ ID NO: 45168 - RNA, 56 nt, Homo sapiens
gccgaaccccaggaacaagaggagacgaagcccaccacaaaagaccaccgaggcac

SEQ ID NO: 45169 - RNA, 79 nt, Homo sapiens
gcgcaggccgcgacgagggcgcgaggaggcgaaccgcgagcccagaaggcgagggacgaggaagcccaaggcgcgcccg

SEQ ID NO: 45170 - RNA, 58 nt, Homo sapiens
gccccagcaaagaggacaaaagagcggaggagcggcgagggcgcacagaaaaaccaga

SEQ ID NO: 45171 - RNA, 67 nt, Homo sapiens
aaggaccaagaaccaggcgcgaggcaccaaagcgaacgaagagcaccgggagcggcgaagaggcacc

SEQ ID NO: 45172 - RNA, 79 nt, Homo sapiens
caagaacgcccagcccgcgggcaccggcagaaaggaggaggaaaacacccccagaacaccgcacaccagcagccaagcg

SEQ ID NO: 45173 - RNA, 78 nt, Homo sapiens
gccgcgggcgcccccacgcgggccgggggcgccggccacagcgaggcgaaggggggggccaggggagaaacaagaaag

SEQ ID NO: 45174 - RNA, 75 nt, Homo sapiens
ggaggggaaagagcaccgaagaagccgaggacggagccgcagcccaaagcaagaagagcgaggccccgaaagaga

SEQ ID NO: 45175 - RNA, 83 nt, Homo sapiens
cggagcagcggacccaggcaggaggagcaaccgaaagaacgacaagcagaaaagaagcacccagaagcagaaagaagggcacc

SEQ ID NO: 45176 - RNA, 77 nt, Homo sapiens
acaccgcagaacacagaccagaacacgacgcagaagaagaaaccagaggcacgcaaacagcagacggaagaccccac

SEQ ID NO: 45177 - RNA, 72 nt, Homo sapiens
gggacaaaacagcgcagacgcacaacccagcgggaaaaacagagcgccgaacaacggcaagcggagaagagc

SEQ ID NO: 45178 - RNA, 73 nt, Homo sapiens
cgcccagccccgcgagcgggaacagccagcccgagggagaggagggacaaacacacacaggaagagagccacg

SEQ ID NO: 45179 - RNA, 74 nt, Homo sapiens
aggaaacgcccccgagaagaaggaggcgcaagcccgggggcgcaccaggcacaggcccgagaggccacacacag

SEQ ID NO: 45180 - RNA, 86 nt, Homo sapiens
cagagagcggccaggcggaaggagcgagagcacccccgagagccggagaggaagagcagcgaggaggccagcgggagcgacagcag

SEQ ID NO: 45181 - RNA, 69 nt, Homo sapiens
acagagggaaccggcagggcaagcggcgacacacgacgggacccaagaagaacagaaggaagacaaaga

SEQ ID NO: 45182 - RNA, 69 nt, Homo sapiens
ggcagacaaaagggccaaagaagggagagaggcagccaacagccgaccgagcacgagccaccgagaacc

SEQ ID NO: 45183 - RNA, 70 nt, Homo sapiens
gaggacagcagggaggcgggacgcggacagcccaccggggagacccaggagcagagaaggacccaaagcc

SEQ ID NO: 45184 - RNA, 63 nt, Homo sapiens
gcaacgaaggggcaacaccccggaaacacgacaagccaaagcaacacccgaaagagcgaaagc

SEQ ID NO: 45185 - RNA, 75 nt, Homo sapiens
gaaacaaaaacacaagaccgccacaaaaaaaaaaaaggcgaggcggagccaagaaggcgaagaaggccacggcag

SEQ ID NO: 45186 - RNA, 38 nt, Homo sapiens
gaagcagcagagggaagagagcccccgaggaaagcacg

SEQ ID NO: 45187 - RNA, 71 nt, Homo sapiens
ggacacacccaggaagcagccagaccaagaacaaccgcggacacggagaggaaggaagacacgcagaaggg

SEQ ID NO: 45188 - RNA, 85 nt, Homo sapiens
cgggacacgggccaagggagcgaaaagaacccccaaaagggcgaggcaacagcaccggaagcacaaagagagcggagcagagccc

SEQ ID NO: 45189 - RNA, 110 nt, Homo sapiens
gccccggagcgcggcgcccgcggccgggcggcgcggccgcccgggccgggccccaccggacgggcccggccaggccccaccgccacaagcaggggaacaccgccaacccc

SEQ ID NO: 45190 - RNA, 71 nt, Homo sapiens
caaggaggacagaagaaccgccagggcaccagacagccacgcagacacagccagggacgaggggcgggacc

SEQ ID NO: 45191 - RNA, 83 nt, Homo sapiens
cgcccccgcccgccccgcccaaccccgggacacgcccaagcaccaaccccggaacagaggggggagcaggggggaggaacaag

SEQ ID NO: 45192 - RNA, 87 nt, Homo sapiens
cgcgcgcaggggaagcgggcagacacaacagccaagcggagcgacaagagcgggaccgacaaagaaaggaggacggggaagagaagg

SEQ ID NO: 45193 - RNA, 73 nt, Homo sapiens
ggaaaggcgccgaagagggccacccccaaccaggaccaaagacgaccaccaaagccagcccccagaacacgcc

SEQ ID NO: 45194 - RNA, 73 nt, Homo sapiens
gcaacgggcggggcggagcgccgggccgcgcagcgccgaacgacgggccacagcacagcccgggagaggaaag

SEQ ID NO: 45195 - RNA, 74 nt, Homo sapiens
ccccgaaacaagaaagcagaaccagcagcaaaaggggcaaggggaaaagacagagacccaggccacagaagccg

SEQ ID NO: 45196 - RNA, 75 nt, Homo sapiens
ccggaagccagcccgcagccgaagggcggaaagaccacagcaagaccacgcccccagccgggggaccaggccgaa

SEQ ID NO: 45197 - RNA, 72 nt, Homo sapiens
ggaagaggcggacggaggagcaggcgagaagagaaggcccaagcaggaggaccccacccccacaaaaggcac

SEQ ID NO: 45198 - RNA, 77 nt, Homo sapiens
gcgagaacgaccccgagacggaacaagcagaaagcacgaacaacgagaacaagacacgagcaaaccccaccgagggg

SEQ ID NO: 45199 - RNA, 64 nt, Homo sapiens
gccggacccccggaccccccgaccaagacgaccccgacgcaggccaggagccgcggacagaagc

SEQ ID NO: 45200 - RNA, 82 nt, Homo sapiens
aggaagcggggacacgcggccccagcgcccggccccccaccggacacccgcggccaaaacagagggagacgagaaaagggcc

SEQ ID NO: 45201 - RNA, 62 nt, Homo sapiens
cgagaaccgcagcccacacggaaaccccacccaggaaagaaccacaggaaccagaggaacaa

SEQ ID NO: 45202 - RNA, 72 nt, Homo sapiens
ggagcgccacgcgcggaaggcagcgcccagcagcgcaggaaccgcgaaggaacgcgaagaaggcggcggcac

SEQ ID NO: 45203 - RNA, 63 nt, Homo sapiens
gccaggaacccgggacagcaggagggggccacggccaagacggagcgccgcacccaggcggag

SEQ ID NO: 45204 - RNA, 77 nt, Homo sapiens
gaaaggaaaaaaaagggaaaaacacaaacgaccaacaggacccagaacagaagaaggaggcagacaacagagagacc

SEQ ID NO: 45205 - RNA, 54 nt, Homo sapiens
agaaagacaccggaaacaagacacgggagaggaggcacccgggaagcggaaaag

SEQ ID NO: 45206 - RNA, 66 nt, Homo sapiens
ggggccagacggcaaacagcacaaggacccggccgggcccagcaaccggcgcagacaacacacccc

SEQ ID NO: 45207 - RNA, 80 nt, Homo sapiens
gaggagaaaaggcggacagcagcgcaggcaaaaaacaggaccaccacaaagaaaaagaaagaaaaggccggaggccgccc

SEQ ID NO: 45208 - RNA, 75 nt, Homo sapiens
gggacgggccgagagagcacgcagccccgaaggcggcccggccccccaaaaggcagcacacccaccgggaccgac

SEQ ID NO: 45209 - RNA, 79 nt, Homo sapiens
cgaggacccaccccaagcgcccggccgagggaccgcagcccccccacggccaggcccggagaccacgccccccggagaa

SEQ ID NO: 45210 - RNA, 84 nt, Homo sapiens
gaaagcgagagggagacggacggagagaacgaggaggaaggagagaaaaggcgccacggcccccgcaaccagcgacaaacccga

SEQ ID NO: 45211 - RNA, 65 nt, Homo sapiens
ccagccccgaaacacggggaaaaaagcagagagaacacaagccaagccgagacacagccaacaga

SEQ ID NO: 45212 - RNA, 72 nt, Homo sapiens
gcgagaaaagacaagaggcgacggcgccgaggcgcggggggaagaagcggacccaagaagggcagacccgag

SEQ ID NO: 45213 - RNA, 43 nt, Homo sapiens
ccgcccaaaaccccaccagcaccgaaagaggcagagcaacagg

SEQ ID NO: 45214 - RNA, 100 nt, Homo sapiens
gaggcgaccagagagcggcggaaaggaaagcccgacagaagcaccgagacccaagaaaggagaaaagagccggaagcaaaccccaggaccaaagcaaaca

SEQ ID NO: 45215 - RNA, 58 nt, Homo sapiens
aaggcacaggggcaggaggcaccagccggccccgaccagggaagcagcacgccggaca

SEQ ID NO: 45216 - RNA, 84 nt, Homo sapiens
ccaggcccgggggcggcggccacgccaaggacgggaacaagcagaaagcacgaacaacgagaacaagacacgagcaaaccccac

SEQ ID NO: 45217 - RNA, 69 nt, Homo sapiens
accgacccagaacagacgggagcaagaaccgcaaaggggacgaagggaacccgccgggcggcccggcac

SEQ ID NO: 45218 - RNA, 79 nt, Homo sapiens
ggccaaagccgcccagacggccaccggcgggaggaacaaaagagcggggacgggaaagagggcagaagcagcaagaaaa

SEQ ID NO: 45219 - RNA, 80 nt, Homo sapiens
cggggcaggagcagcccaggaagcgagagcgaagccgccacccaaaccagcaaaccagggaacaacagaaaaaacaagag

SEQ ID NO: 45220 - RNA, 83 nt, Homo sapiens
cgccacacagaccggggggcggccgcgcggccgggggcgcgggcggcggcgccggcaggaaggacaacggcaagagagcaccg

SEQ ID NO: 45221 - RNA, 86 nt, Homo sapiens
ggccggcaggccgccgccgagcggcggaagcccggccgcgcaaaacgggcggcccgcgcggaggccgcgagaccgcagaaggagcg

SEQ ID NO: 45222 - RNA, 85 nt, Homo sapiens
ggggaggccgcggacagggccaagccgaaccgagccggggcgccgggagcagggaccgcggccacagcagccgaagagagaggaa

SEQ ID NO: 45223 - RNA, 57 nt, Homo sapiens
gcgaccaaggaagcacacgagcaagaacccggcacacaaaccgcaagacgagcagcc

SEQ ID NO: 45224 - RNA, 77 nt, Homo sapiens
cgagcccgcggagcgcgcgaggcgcagagacagcaaggacaacccgcaaagaaaacgacgccccgcgcccgggcccc

SEQ ID NO: 45225 - RNA, 128 nt, Homo sapiens
aggaagaccaaagaaacaaagaacggacccacaccgaggcacccgaagaagagaccaccaaccagcccccgggcaacggacacaagccccggccaccgccggcacgcacagggagaaagggccgccaa

SEQ ID NO: 45226 - RNA, 84 nt, Homo sapiens
caaagcacaacgagagaacagagcgggagccgcggaggcccacggcggcgaccaggaagcaaggaggggggaagcacaagaggg

SEQ ID NO: 45227 - RNA, 73 nt, Homo sapiens
agggaagagaaaccgagcaacagacaaagcccggggcgaaaaacaggccaaaccagaaaacggcagaaggaag

SEQ ID NO: 45228 - RNA, 74 nt, Homo sapiens
gggcaggcggccagcagcagcagagcaggcagggcagaagaaaagcggcaaccagaaccacggagaagaaaagc

SEQ ID NO: 45229 - RNA, 88 nt, Homo sapiens
aacgcacaggccgcgcagagcgggaccacccgggcacagcaggcacggagaaccggggagaccacgacgcgccccgggcgccagagcc

SEQ ID NO: 45230 - RNA, 79 nt, Homo sapiens
gggaacaacccgcgcccaggccagcgccccaggccaagagggacccacccggcgggacgggagcagcggaaggcccaga

SEQ ID NO: 45231 - RNA, 80 nt, Homo sapiens
agggggcccagaagcggggacccgagacgcaagccccagcgaccccaagcaaaccggagccgcagcgggggcacacagag

SEQ ID NO: 45232 - RNA, 78 nt, Homo sapiens
ccccgccgaagccagccaccgcagaggaaagacagagcgaacccaaagaaaaggcaggaaaagagcagcacggacaaa

SEQ ID NO: 45233 - RNA, 59 nt, Homo sapiens
aaggagggggcgcacaaacgagccccccacgaccgaaagaggacagcgcccaagcccag

SEQ ID NO: 45234 - RNA, 79 nt, Homo sapiens
ggaccaagaaccagcagcaaagggggcaccaaggcccggcaagcaccaaacccggggggcaccccacaaacagcacccc

SEQ ID NO: 45235 - RNA, 86 nt, Homo sapiens
caaagccgaggaggagcggagccgaagccggagggccacccgacgcagagggcaggccccagccaggggaccgagccagaggggaa

SEQ ID NO: 45236 - RNA, 66 nt, Homo sapiens
gccggagaagcgaaggaagagaaagagaagaaagcagaacgcaaagcaacaccgggcgcgcacaga

SEQ ID NO: 45237 - RNA, 55 nt, Homo sapiens
gaccggagacggggccaacagaccgacagaacaagcgcaaaaaaagaagagcaga

SEQ ID NO: 45238 - RNA, 62 nt, Homo sapiens
aggacagagcacccaccacaggagggaccccaccacgccgggacaccaccccagccaccgcc

SEQ ID NO: 45239 - RNA, 70 nt, Homo sapiens
ggaagcagaaccaaccaccaaagaccaagaaaacggggacggacccaggccaggaaagaaagaaccgcca

SEQ ID NO: 45240 - RNA, 54 nt, Homo sapiens
acaaacacaccgaaccagagagaagaaagggggcccaggccaaaagaaagcaga

SEQ ID NO: 45241 - RNA, 109 nt, Homo sapiens
aacacccaaagagaaccagcaacaggcggaagacggaagcacagagagcaaaacccacaaaggacaggacaaagcgggagggggcaaccgcgcagaagcaacccggcgg

SEQ ID NO: 45242 - RNA, 76 nt, Homo sapiens
cacaaccggcgaaagcaccgagcagccagcaggaggaagccggcggcgcagaagaaagacagcaacggagccaaaa

SEQ ID NO: 45243 - RNA, 62 nt, Homo sapiens
cggccccgccacccacagacaaaggccacacaaaacaccaaagaccaagacacagaagagag

SEQ ID NO: 45244 - RNA, 84 nt, Homo sapiens
gggcaaggcggagaggacggagcggcgagcccccgcggcgacagccaacacacggagcacagagagacccaagagaagggccag

SEQ ID NO: 45245 - RNA, 79 nt, Homo sapiens
gccgaaaacagaaaagacaagccacaaaacgcccagaagcaaaagacaccagagaagccagagacaagcaggggcacag

SEQ ID NO: 45246 - RNA, 72 nt, Homo sapiens
ccaggcccccacaccggaaacccccccaccacccgagaagaggccaaagacaggaaggaagaaggaaaagcg

SEQ ID NO: 45247 - RNA, 67 nt, Homo sapiens
ggccgagaggcgcggggagaggaacaacggacagcagaaaacagaccgcaaaagccagggcccacac

SEQ ID NO: 45248 - RNA, 82 nt, Homo sapiens
cgcaccaggcaacgggaccgggcggcgcccggcacacccagccgcgacagcagccgacgacaagcagcccgagccaaaaagc

SEQ ID NO: 45249 - RNA, 72 nt, Homo sapiens
gcaggacagcggagcggcaacgcccacaaagagggaccgcagcccggggcaagacggcagcccggggcagaa

SEQ ID NO: 45250 - RNA, 70 nt, Homo sapiens
ccaaagacaaaggagcagaggggaggccgagccaaagcagcccacgcccgcgcgcacagcccggaacgca

SEQ ID NO: 45251 - RNA, 55 nt, Homo sapiens
aggggaagaggaagcaaagccaaggcagagaggagacaagagaagagcaaggcaa

SEQ ID NO: 45252 - RNA, 41 nt, Homo sapiens
cagcaccgaaagcagcggaacgaccacagagacaccgggcc

SEQ ID NO: 45253 - RNA, 81 nt, Homo sapiens
cggagagaagcagcggacagcagaggcagaaccggccacacccaggaccggaacacccccacagacccgagccaggagggg

SEQ ID NO: 45254 - RNA, 61 nt, Homo sapiens
agccaggcaacgagaaaacacccacggcgcagccccaggcgccccagcccgcggagaagcg

SEQ ID NO: 45255 - RNA, 75 nt, Homo sapiens
agagccccggaacagaggcaaagaaagcagcgcaggcccgacgccgcggccagagacgaaccccgccccaaacca

SEQ ID NO: 45256 - RNA, 77 nt, Homo sapiens
aacccccagcccgggcgcaaggccccccagaccccccagaaaacaccccgaggggcccacaggaagagagaaaacac

SEQ ID NO: 45257 - RNA, 104 nt, Homo sapiens
ggaaaacacaccggagacggggggaaacaggcgaggcggcggcgcccggagggcagcgagaggaagacggcaccggagcaccccagaccgacagggcccaggcg

SEQ ID NO: 45258 - RNA, 67 nt, Homo sapiens
ggcgacggcagaggaccccggagagcaaggaagaaagcagcccagagcaaccaaaacaggacaagaa

SEQ ID NO: 45259 - RNA, 61 nt, Homo sapiens
accgggaaaaagaagaaaagagcagcacccaagggaaaagaaaaggcaaaggcgaacaagc

SEQ ID NO: 45260 - RNA, 80 nt, Homo sapiens
caggggagaaggggagacaagcacaagcaaagggacaccaccagcaggaaggcggaccccggcagcaagcaacagagcgc

SEQ ID NO: 45261 - RNA, 74 nt, Homo sapiens
agagaacgcccgggaacaccgacaacaacccagcagcacaaaggacaggaacaaagaacaggaccaggggacag

SEQ ID NO: 45262 - RNA, 70 nt, Homo sapiens
ggaacgccccgagcgcgccccacccgcgccccgccgagcgcacaaaacaggagccaccggcgcccggccc

SEQ ID NO: 45263 - RNA, 72 nt, Homo sapiens
agcaaccaccagcagcccccagagcggaacacagagccccccgccccaaggagagcgaagcgcacagagaaa

SEQ ID NO: 45264 - RNA, 62 nt, Homo sapiens
gaaggaccaagaaccagaggcagagcaacagggacacaagcaagaagaaagggaccgacagc

SEQ ID NO: 45265 - RNA, 71 nt, Homo sapiens
ggcgacgcagcaacgggaaccgaagccacgcaacaggggcaaacgcccagcaggagcagaagagcgaagaa

SEQ ID NO: 45266 - RNA, 85 nt, Homo sapiens
ccaagacaccccgcgccgggccgaaacccacaacccagcggacaccggcaccccacaggaggcacggggcgggaggcggaccgcc

SEQ ID NO: 45267 - RNA, 75 nt, Homo sapiens
gagaaggaccaagaaccaggaagaggagacccagaacggagagacgggagagcccggacaggagaggacgagccc

SEQ ID NO: 45268 - RNA, 78 nt, Homo sapiens
agccacgggggcaccccagagcacgaccgcacaggcaaaggaaggcgaacacaaagagaaggaccggagcccgggagc

SEQ ID NO: 45269 - RNA, 44 nt, Homo sapiens
cgcgccacagcagccgcagcccgaggagcaccacgccgacgcca

SEQ ID NO: 45270 - RNA, 78 nt, Homo sapiens
cacccaacagagagcccagaagagagaaacagacacacgaaggaggaaccaaagaaaccagaggagaaaccagaaaca

SEQ ID NO: 45271 - RNA, 56 nt, Homo sapiens
ccggcgagcagcaccagggcccagacaggaagagggcccaaccaagacgcccaaag

SEQ ID NO: 45272 - RNA, 82 nt, Homo sapiens
cggagagaacgaagcccggcgggagcgacagaagaacacagcccggagccacagcaccccacaacacaagcaggagaacagg

SEQ ID NO: 45273 - RNA, 65 nt, Homo sapiens
gcagggcccaccggcccggccggagggcagcgccagaggaaacggaacgccaagcgaagaagaac

SEQ ID NO: 45274 - RNA, 78 nt, Homo sapiens
ggagaagaccaacacaggggcaagaaggaacagacaaaaacggccggaaggaaacacaggacaccagggacagcgaag

SEQ ID NO: 45275 - RNA, 78 nt, Homo sapiens
gcaccccggaccgcgcagccaccgcggcccccgcggcgaagcgagcaaaggcgaggagcagaaacagccgagaccgaa

SEQ ID NO: 45276 - RNA, 69 nt, Homo sapiens
gcagcggcgaacaagaaacccggaaaaagggcaacaggggacgcacagaaaagacaaaacaaagacgcg

SEQ ID NO: 45277 - RNA, 80 nt, Homo sapiens
ccacagggcaaagagagcagacccgaggagcccgcaggacccaaggccagccagccccaggcaccagcggacaggacagg

SEQ ID NO: 45278 - RNA, 73 nt, Homo sapiens
agaggacagaaaaggggccagagcacgccagacgggccaacaggcgaggagagcacagggcacgccagccaaa

SEQ ID NO: 45279 - RNA, 71 nt, Homo sapiens
acaggggcccagcaggagagaaacagcgaggccgcagcaaaggcagccacaggacagaaccggcaggagag

SEQ ID NO: 45280 - RNA, 71 nt, Homo sapiens
aggaaacgaaaagggacaccacaggggcgaggaagagacaggcgggggagaagaagcagggccaaacgcag

SEQ ID NO: 45281 - RNA, 74 nt, Homo sapiens
aaagcaaggaaacgagcagaagggccaaaaagcagaaaaacaaaccagcccaagaagcgacaaagcccgcgacc

SEQ ID NO: 45282 - RNA, 83 nt, Homo sapiens
ccccgggcaagaggcgcaaacaagccaacccaggaggaaaaacggcccaccacaggccccggcagaagaccgaacagaagaca

SEQ ID NO: 45283 - RNA, 61 nt, Homo sapiens
gacggccacagcccccaccaagagcccccggccagaagggacaacgagcaagggcgacgaa

SEQ ID NO: 45284 - RNA, 77 nt, Homo sapiens
gcaacacagggcaaaaaagaaacgcaagcacaaaaggaggaaggacgcgcgcaggcccgcccgggagaagcccgcca

SEQ ID NO: 45285 - RNA, 67 nt, Homo sapiens
accaaagaggacagaacggaccgaacccaggagacgcagccaagaaccagggcccaaacaaaaagag

SEQ ID NO: 45286 - RNA, 64 nt, Homo sapiens
cacgagagcaaccgacacagaagcacggagcccaaggggcccgggcagagggaaagcagaggac

SEQ ID NO: 45287 - RNA, 75 nt, Homo sapiens
caagaggaagcacacggaagagcgaaaaagagaaagccccggacgaggggcaggaccggggacacacgacgcggg

SEQ ID NO: 45288 - RNA, 75 nt, Homo sapiens
agaaaagagagccgggcgcggaaacgagaccccccccgagagaggggcgcccccgggagaccgcaggggagaccc

SEQ ID NO: 45289 - RNA, 72 nt, Homo sapiens
acggaaacacgcgcaagccacaagaaccgccacggacgaaagcggcaaggggacccccaaaagacaagggca

SEQ ID NO: 45290 - RNA, 51 nt, Homo sapiens
gggaacaaacacaagcgcagcccaaaaagggggggaggcgcggcggagagg

SEQ ID NO: 45291 - RNA, 78 nt, Homo sapiens
cggagagcgcaagccgggcagcagcccagcggcagcagaaagagcaaaaaagcggggaaaacaaaaaaaagaaggagg

SEQ ID NO: 45292 - RNA, 73 nt, Homo sapiens
gcggagagcaacagcgcgccggcaagggcagacaaacaaaagaggaaacacggcacgcccagggccgcgcccc

SEQ ID NO: 45293 - RNA, 84 nt, Homo sapiens
aggcacacacaagaccgcacgacaggcacagaccaaacacccaacaccagagaacacaaagacagggacaggaagacaggaccg

SEQ ID NO: 45294 - RNA, 81 nt, Homo sapiens
ccaagagcggagacacggggaaacgcaggagcgaaaacgccacaacagagggggccagggcggggaagacaaacagaacaa

SEQ ID NO: 45295 - RNA, 71 nt, Homo sapiens
cgacggaacagcgaaacccgacaaccccggaacgcgggcaaaaggccccaggggaccgggggaggccccag

SEQ ID NO: 45296 - RNA, 76 nt, Homo sapiens
accggaccgagagcggaccgagagcgcgaaacgcacgagaaggacacaacagcggaccaagcgccggggcaagcac

SEQ ID NO: 45297 - RNA, 35 nt, Homo sapiens
ggcggaacccacaacaggcccacccacccggaggg

SEQ ID NO: 45298 - RNA, 77 nt, Homo sapiens
gaaggagcaaaaagagggaacagcggcccagggcaggcaagcaaaaagggaggacgcccgaccccacccagcccgca

SEQ ID NO: 45299 - RNA, 74 nt, Homo sapiens
cgccagcggagaacgcggcaaagcgagcagaccagccagccccaagcagccgcacgacaaagaacgaagacaag

SEQ ID NO: 45300 - RNA, 75 nt, Homo sapiens
gaccggaggagccgccacgcccgaccggacaccaaacagggcggcgcggccgggaggaggccaggggagcagagg

SEQ ID NO: 45301 - RNA, 80 nt, Homo sapiens
acccacacggcaaacacccccaccgcccaggcaacaaaggaaagcgaacgcgaaaagaaaagccgagagcagccagaccg

SEQ ID NO: 45302 - RNA, 83 nt, Homo sapiens
accacggaccccaaggaagccacggcagacacacaacccgacccgacgaaaagaggagacagcacgagcaggacagaagcggg

SEQ ID NO: 45303 - RNA, 92 nt, Homo sapiens
ggaggacgacgggaccgggaccgcgcggacccggccgggagaagcagcagcgcaagcgcggccgcgcgccgaacccgagccggcggcaccga

SEQ ID NO: 45304 - RNA, 66 nt, Homo sapiens
gcagccggaggcagggcgcggcgagcagaccccccacgacgccagcccaacaagggggggcgcggc

SEQ ID NO: 45305 - RNA, 76 nt, Homo sapiens
agaaccaaaaaggagagcgggaggagaagacaccaacccaggcgcaggaccgacgggcacccagaggcgaaccgga

SEQ ID NO: 45306 - RNA, 78 nt, Homo sapiens
caaagggaaagggaccaagccagagccgagccgaggaacagacaaagaaccccaggcaagccaaacacaacccgaaga

SEQ ID NO: 45307 - RNA, 35 nt, Homo sapiens
ggaggaagaaggccaaggagaggagccgccgaccc

SEQ ID NO: 45308 - RNA, 64 nt, Homo sapiens
cccgcgacgccaaccacgacgaagcggaaggcagaagggggagagagacgcgggaaccgccagc

SEQ ID NO: 45309 - RNA, 59 nt, Homo sapiens
agcaaaagaaaaggcaagacaaccacaggcagagaggacaagaccaaacccaaaagaac

SEQ ID NO: 45310 - RNA, 70 nt, Homo sapiens
gccgcgcaccgacccgacgcgccggcccacgcgcggccaagggcagcagaccgcgcgccagacgccaagg

SEQ ID NO: 45311 - RNA, 83 nt, Homo sapiens
aacacccaagggaagcagaagaaaaggagaaggaaagcgaaggggaaggcgccgaagaggacgaagcaagcccgagaagcaag

SEQ ID NO: 45312 - RNA, 80 nt, Homo sapiens
gagacaccgccgggaggagggcacagagacgggcgggccccacacacgagcccccacagaaagggagcgaagcccagaca

SEQ ID NO: 45313 - RNA, 79 nt, Homo sapiens
cagcccaccgaggcaccacagagacgaggacgcgcacaggaaaggacgcggaacaagcaggcagccaggcagcagaagg

SEQ ID NO: 45314 - RNA, 78 nt, Homo sapiens
gcccggagaaccaagaacccaccacccagcagcagggcacaaggcgagagcagcaggaagaagaggaagaaaaaccaa

SEQ ID NO: 45315 - RNA, 78 nt, Homo sapiens
cacaagaagcggaagaagcgccccgaggaaggccaaggaaaacgcgacccggaggggagcaacagaaagaaagccaaa

SEQ ID NO: 45316 - RNA, 82 nt, Homo sapiens
cggccccggagacacaccgggcacacaggcccgagcacaaacacaagaaacgcacgcccgccagcgagaagagagagaagca

SEQ ID NO: 45317 - RNA, 62 nt, Homo sapiens
ggcagacaaaaaggaaaccaacaaggaggagcgaaagcaagaccgaacccagaggaccgcaa

SEQ ID NO: 45318 - RNA, 74 nt, Homo sapiens
cgagaccgcggccgggaccgagggacagggggacagcagcaccagaaccaaaaagccacaacagggaggggcga

SEQ ID NO: 45319 - RNA, 77 nt, Homo sapiens
accgcccgcaacacaacaggggcaagacgccaagagaaaaggcgagagcacaaagcaccaagagccgagaagcccga

SEQ ID NO: 45320 - RNA, 102 nt, Homo sapiens
ccgcacacacaacaacaggcaaccagaaggaccaccagagaggaaacccggaagcggacacaggaaaacgagaagaggcaggcaagcaaagagcagagcacc

SEQ ID NO: 45321 - RNA, 76 nt, Homo sapiens
cggggccaagccaccaacccgcaagaacccagaacgccccggcagggccagacagggaaaccaagagcagagagag

SEQ ID NO: 45322 - RNA, 78 nt, Homo sapiens
agagaacaagacgaagaacagaaggcgacaaggccaagaccgccagcaaaggaagacgagagcgaccaaagcagggca

SEQ ID NO: 45323 - RNA, 37 nt, Homo sapiens
aagaacccggaagcagggaaaccgagcaggacagagg

SEQ ID NO: 45324 - RNA, 62 nt, Homo sapiens
agaaaagaaaaggaagcgagaagggaagaagcggcagaagagcccagaagaaaagaaaccaa

SEQ ID NO: 45325 - RNA, 80 nt, Homo sapiens
aagaagaagaaaagcaagaacgaaaggagaacagcagagaggagggcaaaaagacaaacaccaccggagcacaaacacga

SEQ ID NO: 45326 - RNA, 70 nt, Homo sapiens
gagggcaaggcgccagaccaagaaccgcagaccggcaaccggaagcagaagaagagaaacaccccagcaa

SEQ ID NO: 45327 - RNA, 71 nt, Homo sapiens
cgagacagaagaagagaagaaccggagggaacaaaagagcagcccgacggccaggaggcgaagagacgagg

SEQ ID NO: 45328 - RNA, 70 nt, Homo sapiens
agccggcagcagccaggcggagaacaacaaacagcgccccagcaccgcgcaccaaggaagacacaagaac

SEQ ID NO: 45329 - RNA, 56 nt, Homo sapiens
ccaagaagaagccgcggaccccacggcacacgcagccagaagcaacaagagaagca

SEQ ID NO: 45330 - RNA, 87 nt, Homo sapiens
cccgcccgggggcgggcggagggggcggcggcagcgacggcagcggcggcggcggacaaacaggcaccgcagaggagccgccgcgcc

SEQ ID NO: 45331 - RNA, 63 nt, Homo sapiens
ggaaaaggagaaggccgagacaagagggccgggacagcgcgcccacacccaggccgaagaacg

SEQ ID NO: 45332 - RNA, 72 nt, Homo sapiens
gcccgggccggcccgccgcggcacagagcggcgaggccagggaaaggaaagcaagccaggaggaaacgacac

SEQ ID NO: 45333 - RNA, 75 nt, Homo sapiens
gggagaacacgacaccggcgaggaacggcaggaagaaaacaccggagcccaagacaccaaaacagacgcaggcaa

SEQ ID NO: 45334 - RNA, 74 nt, Homo sapiens
gggaggcgaacagggagaagacagggcagacagaaaaacagccaacccgcaacaacggcagaagaaaagcccgg

SEQ ID NO: 45335 - RNA, 75 nt, Homo sapiens
agggcaaaccagaaagacgcagaccggggaaccagcaccccagaaggaggagagccagagcccacaaccagaaag

SEQ ID NO: 45336 - RNA, 48 nt, Homo sapiens
cagacagaccagacaacgaggcacccgacccgcccgcagcagggacag

SEQ ID NO: 45337 - RNA, 79 nt, Homo sapiens
ccgaaaccaagcgccgacagaaaagaaaaccccggcgagcaagaggaggaagaacggcaaaacggaggagcagagcgaa

SEQ ID NO: 45338 - RNA, 83 nt, Homo sapiens
caagcggagagagcagcccggcagacgcagaaccaaaaagccaaaggaagaagagggaaagaagccaaaccagaaacaagaaa

SEQ ID NO: 45339 - RNA, 78 nt, Homo sapiens
caaccacgcccaagcaagcggcccgaacacagaacccaagaaggagcgacccacggaacccaccgacacaacaacaaa

SEQ ID NO: 45340 - RNA, 67 nt, Homo sapiens
cgaggccccacacccgaacaagaaaggaaacagaaagcacaagagcaggacccaggcccagcaagac

SEQ ID NO: 45341 - RNA, 53 nt, Homo sapiens
gccgcagcaaagccagccaaagaaacgggcgaaaagccaggagcaaaagacga

SEQ ID NO: 45342 - RNA, 72 nt, Homo sapiens
gcccagcccccgagggcgggaacaggggaaaggcagggccccgaagagacagaacagagcaacgaaaggagg

SEQ ID NO: 45343 - RNA, 74 nt, Homo sapiens
gcaagaaccggaagacaagagacccaccagcacaagaagaggacggagcaacgccagaaccagaccggcccgaa

SEQ ID NO: 45344 - RNA, 48 nt, Homo sapiens
gccagagcggaccggggcagaccaaacggcaagcgccaccccaagcac

SEQ ID NO: 45345 - RNA, 61 nt, Homo sapiens
ggcaaaggcacaacaggggcgagagcaaagacgccacgcccagcaggagcaaagacacagc

SEQ ID NO: 45346 - RNA, 60 nt, Homo sapiens
agacgaccaccacacacggagcggaaccaggaagccaggagggaagcccagaagacgcac

SEQ ID NO: 45347 - RNA, 84 nt, Homo sapiens
aaccgacaacccccagaaagccaagccggggggggaaaaggcgccgagcagcagaaagcagagagcccagaagaaaccaaagcc

SEQ ID NO: 45348 - RNA, 51 nt, Homo sapiens
cccaagcagcaagaaaagaaccgcggaaggaggaacaagcaacaggaaggc

SEQ ID NO: 45349 - RNA, 62 nt, Homo sapiens
ggccgaccgagacgggcggagaggagaagggccccagccccaccccagccccaaaggaggcg

SEQ ID NO: 45350 - RNA, 69 nt, Homo sapiens
cagaggacgaaggacaaagggaagccgagaacgagcaaaaagcagaccccaccccggacccaggaccaa

SEQ ID NO: 45351 - RNA, 70 nt, Homo sapiens
cacgaaagcccaggccaaaaagagggacaagggcccacgacgaaagggaaagaaaagccgaaccaaaaac

SEQ ID NO: 45352 - RNA, 69 nt, Homo sapiens
gaccgcggcgaagcaaaggaacgcgccggaagaaaaggccgaaggaagggaacacggacgacgagacac

SEQ ID NO: 45353 - RNA, 85 nt, Homo sapiens
gaagacacaccaagggaaccagcccacccacagcccgccccaagcggaagacccgaagacccgcgggaccaagggagaaagcacg

SEQ ID NO: 45354 - RNA, 73 nt, Homo sapiens
gcgggaaagaaggcaaaacacggcagaacaaaggacaggagagaggggaaccggaccagggaccggaacgaag

SEQ ID NO: 45355 - RNA, 80 nt, Homo sapiens
cgcgcgagcgggagcgggcccgcgcgccgagggcgaggcggacgcgcggcgcgcagcgcaagccccggggcagagacaca

SEQ ID NO: 45356 - RNA, 83 nt, Homo sapiens
cgcagagggcggagcggcagcaccagcccgaagaagccgggcagaccaggcagcagcggaaaggagcagggaaggaccaggaa

SEQ ID NO: 45357 - RNA, 73 nt, Homo sapiens
agagaggcccccgccgagcacgggaggaaaagcgggcgcagcgcgcggacagcgaccgcgaggaaccgcagag

SEQ ID NO: 45358 - RNA, 69 nt, Homo sapiens
ccgagcaaaaaagaaaaggccccaacagagccccagcaagacaacacagacaagaaaaaccaaaggacg

SEQ ID NO: 45359 - RNA, 73 nt, Homo sapiens
cagagaccaaggcgcgcccggcgggccggaccaaggcacacagagaaaaaaagggaacaaaacacagcaagca

SEQ ID NO: 45360 - RNA, 74 nt, Homo sapiens
agaaacagggacaaaccacacaaccaggcgccaaacgagggaccacggcggggcagaggaacacaagaggcgag

SEQ ID NO: 45361 - RNA, 74 nt, Homo sapiens
ggagaggacggggaccaaaggcacagacggggcggccgcacccaggcggaggcagggcacgaaggccagcagcc

SEQ ID NO: 45362 - RNA, 79 nt, Homo sapiens
caggaccccccagagaagccaggagcacccggcgcccagacaagggaagaacccaagacacacacagcggagcaacaag

SEQ ID NO: 45363 - RNA, 50 nt, Homo sapiens
gcgggcgacgcagggcccacaggaaacagaaccgaagccggaccggggcc

SEQ ID NO: 45364 - RNA, 83 nt, Homo sapiens
caccgagccccagcggggagccagacaggagaccaacaggagacagcacgcccgaagagaccggcacggcacgcaccggcgcc

SEQ ID NO: 45365 - RNA, 99 nt, Homo sapiens
gagagaaacccagacagaggggagcacagagaaagagaagagaagagaaaggcccggagacgacagaacggaagagccaggcacgggagaaacagaccc

SEQ ID NO: 45366 - RNA, 82 nt, Homo sapiens
gcgggccgggcgggcacgcgcacgggccggccgccgccccgccgcacccgcggcggcgagcagcagccgacccaggaagaag

SEQ ID NO: 45367 - RNA, 78 nt, Homo sapiens
gcggcccaagggaaaagcagcggccgcaaggggagacagggggacagagggcgggagcaggccgagcaggcgggggac

SEQ ID NO: 45368 - RNA, 84 nt, Homo sapiens
cgcggccaaagaagagaagcgcccgcacagccacggcaacggagacagggccaacacgcccgggaggaagcgccacaagcggag

SEQ ID NO: 45369 - RNA, 55 nt, Homo sapiens
aagcggcacggccaaagggcccaagaacgaagggaggggccgggagaggaaggcc

SEQ ID NO: 45370 - RNA, 66 nt, Homo sapiens
cgccaccaccgagaagacaaaacaagacgcagaaaacagacacacagcggagacaagcagggccgg

SEQ ID NO: 45371 - RNA, 68 nt, Homo sapiens
cagccaacccgccaaaaaagacaagaaaccgcacaagaccgggagggggggccgagacaacaagaagg

SEQ ID NO: 45372 - RNA, 75 nt, Homo sapiens
gcagacccagccaaacaggacaagcaggcgaagccaacccaccgccaccaccccaccagagacacccaggagacc

SEQ ID NO: 45373 - RNA, 71 nt, Homo sapiens
ccaaccaggagcggagcaaggagcacagaaacacgggaccgaccacccaggggaaaagcacagaaagagac

SEQ ID NO: 45374 - RNA, 62 nt, Homo sapiens
acacagaagcacggagcccaaggcagagcgcgaagccccgacaccgccaagacggccccacc

SEQ ID NO: 45375 - RNA, 79 nt, Homo sapiens
caaggggcaccagcaagcagaaggcaagcggacgaggaaaagcccggaaaagcagccaagcggaagacagagccgcaaa

SEQ ID NO: 45376 - RNA, 71 nt, Homo sapiens
aaacagaaccgacgacggcaggaaccaacccccaagaccaacaaaggacccagagagacagaaaagcggga

SEQ ID NO: 45377 - RNA, 77 nt, Homo sapiens
ccggagcacgagcagggaggccaccccggcccccccaccagaagcccaggggcgcgcccgggacacagaagccaggc

SEQ ID NO: 45378 - RNA, 71 nt, Homo sapiens
accacccgaggagagcaaggccaaaaagaagaaggcggaccccggcagcaagcaacagagcgccaagcccc

SEQ ID NO: 45379 - RNA, 67 nt, Homo sapiens
gacccgcccagcccccaggccgcaaccgggaaacgccacgccacggacaacccagcccaagcaccga

SEQ ID NO: 45380 - RNA, 40 nt, Homo sapiens
gcaggagccgggacagccagagaagaagaaggaggccgcg

SEQ ID NO: 45381 - RNA, 69 nt, Homo sapiens
caagaacaaagaaaggccaacacgcgcacaaagggacgaaaggcaaaacacagaaaaggaagcaggcga

SEQ ID NO: 45382 - RNA, 75 nt, Homo sapiens
agagcggcagagggaagaaaagacaaggccaaacacacaggaacgccagaccccagccgagggaggcaacagcaa

SEQ ID NO: 45383 - RNA, 77 nt, Homo sapiens
gaagccgaaagaaaagaaccaaacggcgagaagacaccggcaggcgcagcgcggggaggaggaaaccgcagaaccga

SEQ ID NO: 45384 - RNA, 68 nt, Homo sapiens
gaaggccagagcacgagcacgggaaggcgggcaacacaacaaggcgcggacacccagacaagcgcgcc

SEQ ID NO: 45385 - RNA, 74 nt, Homo sapiens
ggacacgggagggaaagagagcgaggagacggcgaccgacaacgaacaacggcaagcggagaagagcaaggccg

SEQ ID NO: 45386 - RNA, 68 nt, Homo sapiens
gaaccagaggggacagggaggagagcacaaggaaaggagacaggccaggccaggaacaagcgggaaac

SEQ ID NO: 45387 - RNA, 40 nt, Homo sapiens
aaaccccgcccacagcacgagacgggacgaagcagccccg

SEQ ID NO: 45388 - RNA, 89 nt, Homo sapiens
gggcaccgcggccggagcggggcgggccggaagcccacccaagaacgggccccccgccaccgcaaggacagaggccggagccaggccga

SEQ ID NO: 45389 - RNA, 73 nt, Homo sapiens
gggccaaacaaggcaaggcaccggagcggaaaaaccgaacaagacaacaggcacaaagagagaaggaacaccc

SEQ ID NO: 45390 - RNA, 81 nt, Homo sapiens
cgcggccggccagccgaagaggggcggcacccccggcggcggccggggcagcgccgcgagccagcaacgggggaaggccac

SEQ ID NO: 45391 - RNA, 73 nt, Homo sapiens
gacaaagcagacacaagaccgaaggaaaagaagccccaggcaggcggggaccaacgcgagagcagaacacggg

SEQ ID NO: 45392 - RNA, 80 nt, Homo sapiens
gcaagcagcagaacgcagggggcccgaaggcacaggagggagcaggggcaaagggagcccggggaaggaagagaggaaga

SEQ ID NO: 45393 - RNA, 76 nt, Homo sapiens
ccggaccaagcccagccccagccgccagcgcggccacgaaccaagcaccgcgggggaaagccccgagaagagaggg

SEQ ID NO: 45394 - RNA, 68 nt, Homo sapiens
agcaccaaggaccagcaacaagggcaggcccggacccaggggcgcaaacccggagccacccacccccc

SEQ ID NO: 45395 - RNA, 66 nt, Homo sapiens
ccaaaggaaaagcaccaagggcaccaaacacccagaacaacaaagagaggcccagccgcacaggaa

SEQ ID NO: 45396 - RNA, 72 nt, Homo sapiens
aagccagagcgaggacgccggcagcccgcagacacaaaacgcacacgacagcccacccacagggacccacgc

SEQ ID NO: 45397 - RNA, 80 nt, Homo sapiens
cccaggagaaagcacaggacaggagaggggaagagagaacgcgaccgaggaggcgccagccagggccaaggggagagccg

SEQ ID NO: 45398 - RNA, 68 nt, Homo sapiens
agacaaaacaagaggaaagaaacagaaacggggcgaaggacgaggggaccaggaacgagcacggaaag

SEQ ID NO: 45399 - RNA, 71 nt, Homo sapiens
agggcaccagcacacgccgccagacacagacgcggccaaccacccaaagaggagcaaccaaggggaaagcc

SEQ ID NO: 45400 - RNA, 71 nt, Homo sapiens
acgaccgcccaagcaccgcgcacgcacgaagaagaccaccagaaacaaagagaccaggcgccagcgagcac

SEQ ID NO: 45401 - RNA, 77 nt, Homo sapiens
ggaagaggagaaaggaaacggaagaaaaaagaaaagaaacgacaaaaacacgagcacaaggaaacgacgcggacagc

SEQ ID NO: 45402 - RNA, 87 nt, Homo sapiens
cagcaacacagaagccgacaaggcgcaagcgaaaacagaccgcgagcccagagcgaagacaacagagcgccaaggcgggaaccgagc

SEQ ID NO: 45403 - RNA, 56 nt, Homo sapiens
ccccagccgaagcagccaccaggaggcgcaggcacaaggccaagaagggacccaga

SEQ ID NO: 45404 - RNA, 85 nt, Homo sapiens
cggacaccccgagagggaagacaaagccacggccagacagaggaagcaagcaaccagaagaaggacagcggcagcgcagagaagg

SEQ ID NO: 45405 - RNA, 82 nt, Homo sapiens
aggaaaacaagcggaacgccgccacggaaggggcccccggggaggccgacccaccaggcgagcagacaccgcaggaaagggc

SEQ ID NO: 45406 - RNA, 79 nt, Homo sapiens
gcgccccagggcaagccccgcccggccaacaaacagaagcgaaggggacagggggagaaccgccagggaaacccggggg

SEQ ID NO: 45407 - RNA, 77 nt, Homo sapiens
accgcccagccacgcccaggagcccacaccgggagaccagggaagaggcggaaaacaaccccagacaaacacaagga

SEQ ID NO: 45408 - RNA, 66 nt, Homo sapiens
caagcaaggagagccccaggccaggaaccccggacgaggcagagaccaagaacggagcacccacgg

SEQ ID NO: 45409 - RNA, 42 nt, Homo sapiens
gcccagccgaagagagccaccagcaggggagcccccccacgc

SEQ ID NO: 45410 - RNA, 80 nt, Homo sapiens
cgccggggaggcagcgcgggacccagcccaggcggcgcggacggggcggggcaaagaccaccacaaagagaagaacggga

SEQ ID NO: 45411 - RNA, 68 nt, Homo sapiens
caggggacgaggaagggacagagagaaagcccacagaaacacaggggcagcacagcccagaagcagga

SEQ ID NO: 45412 - RNA, 61 nt, Homo sapiens
cggcgccaccagcaaccagagggccagagggaaggacagcagagagcgcagaagacaggac

SEQ ID NO: 45413 - RNA, 74 nt, Homo sapiens
gaaacagccacgacgacagggaacacgggccgaggagggacaggaaagaggccgcgacagccaccaaagcagcg

SEQ ID NO: 45414 - RNA, 63 nt, Homo sapiens
ggacacgacgaaccaggaagccccacccccaccgccaggcaagagcaccaggccaagaacccc

SEQ ID NO: 45415 - RNA, 71 nt, Homo sapiens
acggcgaagcaccaacgccaagaggcgcgaacagggcccacccgccacgacacaggggaagaagaccaccg

SEQ ID NO: 45416 - RNA, 78 nt, Homo sapiens
gacccggacaaccagaggcagccagcagggggagagccaggaccccaggagcgggccagcccgcccccaggagggcag

SEQ ID NO: 45417 - RNA, 81 nt, Homo sapiens
cggcccgcgccccgaaggccccagcccggccagcggccgagagcgagggaggagccccccgacccaggacccccagaggac

SEQ ID NO: 45418 - RNA, 63 nt, Homo sapiens
ccggggcgcccggcgccggccgagaaggcagaggcgccggacacaagagggcaagaaaggcgc

SEQ ID NO: 45419 - RNA, 83 nt, Homo sapiens
gcaggagccggagagcccaacgggacgggcaagacgagagggcccgacggaggggaggaagcggagagagcagggacgccaag

SEQ ID NO: 45420 - RNA, 84 nt, Homo sapiens
agacccgcaagcgacacacacgaccaggacaagcgccccaaaccagagacggaagagaaggaccggaacagacaacaccgaaac

SEQ ID NO: 45421 - RNA, 79 nt, Homo sapiens
aacaaaccggaggaggaagcgaaggagaacacccaaagacacgggccagggacccaaagcgcaagcccagcagcccagg

SEQ ID NO: 45422 - RNA, 79 nt, Homo sapiens
cagggccggcccccccaggacaacccagaggcaacaaaggcgaggcccgccccggcggcggccggcgggaccaaagggc

SEQ ID NO: 45423 - RNA, 74 nt, Homo sapiens
ccagaacgccgacccccggcccgaaacagcagacgacggggaagcacacaaacgccaggagccagaaccccgag

SEQ ID NO: 45424 - RNA, 84 nt, Homo sapiens
cggagcccggccccggggaacagggagcgcccggcgcacagcgccagcaccaggacaaaagaagggcagcacaaaggaaagccc

SEQ ID NO: 45425 - RNA, 40 nt, Homo sapiens
gcacaggacggccagagggcgggagggacaagaagaaagg

SEQ ID NO: 45426 - RNA, 80 nt, Homo sapiens
gaagaagggaaggcgcgaggaggaaaggaggacgaggcgaacccaggcacccagagacggagcggaaaccaaggaagaaa

SEQ ID NO: 45427 - RNA, 93 nt, Homo sapiens
caaaccgccaacccgcgccgccgccaccagcccaaaacggaaagaccacagcaagaccacgcccccagccgggggaccaggccgaacgacccg

SEQ ID NO: 45428 - RNA, 56 nt, Homo sapiens
ccgcaccgccgcggaaagggggggccccagcccggccgaacgggcgcacgacacaa

SEQ ID NO: 45429 - RNA, 69 nt, Homo sapiens
ggcggccgacccacccaggacaggggaagagggcggaggaacagcggggcagcaggcgcaaaaacgaac

SEQ ID NO: 45430 - RNA, 55 nt, Homo sapiens
ccgcagcgccagcagcggacaggcacagacaaccaggcaagacaacagagaacgc

SEQ ID NO: 45431 - RNA, 70 nt, Homo sapiens
caaaaaacaggcccagccccgggagggccgaacaggggggaacgacaaacaaggccccagaagcaggggc

SEQ ID NO: 45432 - RNA, 54 nt, Homo sapiens
ggaaagggacaagaagggcaaagccgaagcaagcaccggcagaccgagcaggag

SEQ ID NO: 45433 - RNA, 76 nt, Homo sapiens
gggcgggaagaggcggccccgcggcgagcagggcaaaaacgacaagacaggaagcggaggcggaaacgaggcaacc

SEQ ID NO: 45434 - RNA, 74 nt, Homo sapiens
ggggagggaaagaaaggaagagaaaaggccccaaagccggaaggagaccggacaaaaagaaaaccgggcccgac

SEQ ID NO: 45435 - RNA, 82 nt, Homo sapiens
gcgacggagaagcacggcagacagggcaaagaaaagggacgggaccaacggggaaccccggagaagagacgccaacagaccg

SEQ ID NO: 45436 - RNA, 80 nt, Homo sapiens
gcgggaccggggaagacgccggccgcagaggccacaggggagacaaccccaggacgggcgggacaaaggagacaggacca

SEQ ID NO: 45437 - RNA, 40 nt, Homo sapiens
cccccagagcgggaccacagaacaagaaaggggcacaaga

SEQ ID NO: 45438 - RNA, 73 nt, Homo sapiens
gaagaaaaaagaaacacgaaaaaagccgcaaaaagagccaaaagaagcaagggaaagaccaggagccagaaac

SEQ ID NO: 45439 - RNA, 41 nt, Homo sapiens
caaagggaaccaggaaaagggcgagaagcccacaacaaccc

SEQ ID NO: 45440 - RNA, 57 nt, Homo sapiens
cccgcgccgcgagggcccccccagaacagacgacgagggcacgggcaaacacccaac

SEQ ID NO: 45441 - RNA, 50 nt, Homo sapiens
ccccaccacgcagagaaccagccggagaacaagcagagaaagagagggaa

SEQ ID NO: 45442 - RNA, 70 nt, Homo sapiens
ggccaggagcgaccagcccccagaacagagccaaggcggaagaggacagcagaccacagcccggcaggcc

SEQ ID NO: 45443 - RNA, 71 nt, Homo sapiens
gaaacggggaggcccgcacagacaagccggcggcacgacagcaaaagccagggcacagggccgcaccccag

SEQ ID NO: 45444 - RNA, 63 nt, Homo sapiens
aagaaaaaagggacccacccagaagacaccagcacccggagacgccgcgagcgcccacgccaa

SEQ ID NO: 45445 - RNA, 75 nt, Homo sapiens
gcccgccacggcgccgagccgcggccgaacgcccagaagagcacaaagaaccaacgccaaggcagcgcggacaag

SEQ ID NO: 45446 - RNA, 88 nt, Homo sapiens
agaagagccaaggaaaaacagcaagaacccaaaaggccagaaaaaagcacggccgaaggcaaaagaccaagacgagagacaaggcaac

SEQ ID NO: 45447 - RNA, 77 nt, Homo sapiens
cagaggcagaaggcgccccacccagcacgagaaaaaaacaaggacgaggcccaaggaaacggcggcgccagcaggac

SEQ ID NO: 45448 - RNA, 101 nt, Homo sapiens
gacacaccggaacaaagaaaaccaaaacgcaacagaaacaacagggaggggggaagacagggcccagcaccacaggacgggccgggaagccgccagcaggg

SEQ ID NO: 45449 - RNA, 72 nt, Homo sapiens
aaggaccaagaaccagggcaaggagagccaagcggaccaagaaggcaagagaggaagcagaacggaggcaag

SEQ ID NO: 45450 - RNA, 64 nt, Homo sapiens
gccacggaaccacggcacccaacggcgagacgaaggagcgacagaaaagcagaaaggcagaaca

SEQ ID NO: 45451 - RNA, 74 nt, Homo sapiens
ggaaacgccccgcggaaaagacagagaggggaagaaaaacaaggcggaacaagggcaagacggagagaaacagc

SEQ ID NO: 45452 - RNA, 74 nt, Homo sapiens
aaaccacacggagaccaggaccaccccagaagcagaacgcgggaccgaaggacgaacagagaaacccccagaac

SEQ ID NO: 45453 - RNA, 64 nt, Homo sapiens
gggagcgcccagacggaagaaggagaagcagcgacaccagcccccccgaacacacacaacccgc

SEQ ID NO: 45454 - RNA, 51 nt, Homo sapiens
ccccgaacagcaggcgccaccagcccggaggacagcagaccacagcccggc

SEQ ID NO: 45455 - RNA, 74 nt, Homo sapiens
agacaggaaagagacccaagaaaaaccgaagacacaaaagcggacgaggccgggaagaccacgcagcggagcag

SEQ ID NO: 45456 - RNA, 75 nt, Homo sapiens
gaccaaacagaaccaccggaaagccccacagaaccaggacgcgagaaaggcgaggaaaagaagagccaggaccaa

SEQ ID NO: 45457 - RNA, 84 nt, Homo sapiens
gcgcgcccgcgccgaggccgcgggcggcgggcccgggccaccagcccccgggccaagagcagcacggagacagagccacacacc

SEQ ID NO: 45458 - RNA, 64 nt, Homo sapiens
gaagaacccacagagacaagcagggaccaacgggaagaacaaggaagaaagacccacacaaaac

SEQ ID NO: 45459 - RNA, 76 nt, Homo sapiens
cgagaggcaacggaaaaggagggccgggcggagaaaggaaggccacaccaggccccccacgcaacaagcccccacc

SEQ ID NO: 45460 - RNA, 76 nt, Homo sapiens
aagcaaggacagggcccgcgggagagaccagcgccacgaggcgcgcaagggaccacagaacaaagcggcacacgcc

SEQ ID NO: 45461 - RNA, 72 nt, Homo sapiens
caccaaacaaaaggaaaccacaccaaccaagaagagccagaaaacgaaggaaggaggacccgaggagagaga

SEQ ID NO: 45462 - RNA, 79 nt, Homo sapiens
ggaaaccaaggaaaaacgcgaccgcggagggagacgggcgaacacagggaagaaggacggagccagccgcaggggcgaa

SEQ ID NO: 45463 - RNA, 75 nt, Homo sapiens
ccaggcggccaccccccggagagcagaaagacgagccgccggggaaaaagcgcagcaaagagacaagccaaagcc

SEQ ID NO: 45464 - RNA, 63 nt, Homo sapiens
agcgggagcaaggagggcgaagagcgaggaggacggccccgcgccacagggccacacaccacg

SEQ ID NO: 45465 - RNA, 70 nt, Homo sapiens
gcaaggagccaccagcacggaccaggaggcgagcaacaggagaacccggaagccccgccccccagcccag

SEQ ID NO: 45466 - RNA, 81 nt, Homo sapiens
ccccccagccacggaaacgagcacagcaagcgggagcaggcagaccaaaggaacagaagccagggccggaaaaccagagag

SEQ ID NO: 45467 - RNA, 79 nt, Homo sapiens
cggcgaggacggggcgccggcgccgccgcccccgggccgcggccgcagggccgcgagggcccggaacaggggcacgcac

SEQ ID NO: 45468 - RNA, 82 nt, Homo sapiens
aaaggacaagagaagcgagaaaggccaaagaagccaaagacgcacagaagcacaaaacgggaggaggacgaggagaaggcag

SEQ ID NO: 45469 - RNA, 74 nt, Homo sapiens
ggagcagagggcccgcgcccaagacccaagaggaaagcacaccggcccccaaaaacaagaggcaagaacgccag

SEQ ID NO: 45470 - RNA, 74 nt, Homo sapiens
cggaaggcccccggcgcgagacccgccggaggaacgggggaccaaacccagggaccccaggccggagcagaggg

SEQ ID NO: 45471 - RNA, 75 nt, Homo sapiens
ggaggggacggcgccgcacgaggaccaccaggcacggcacggggcagagcagcgccagaacccagggccgccaga

SEQ ID NO: 45472 - RNA, 53 nt, Homo sapiens
aaggagccgccaaagccagacgggcccgaggccaggagccaaagagcccgaac

SEQ ID NO: 45473 - RNA, 97 nt, Homo sapiens
ccgccaaagcagcgagaacggcggggcgccgagccggaccgcgagagcacaaacgggccacggaaagaccacagcaagaccacgcccccagccgggg

SEQ ID NO: 45474 - RNA, 74 nt, Homo sapiens
gcgaagcgacgagccgcgaggagccacgaggcgacagggccaggccaccaagccagaagagaccccacggaaca

SEQ ID NO: 45475 - RNA, 62 nt, Homo sapiens
cgcccgcaccagccacgaaagcacaagaggaagagaacgcccaagaagagaagacccggacg

SEQ ID NO: 45476 - RNA, 78 nt, Homo sapiens
gagaagggggcacaggcggagacaaggcaaggcgcaggcgggaggcggaaagccccccaagaggagaagaggggcacc

SEQ ID NO: 45477 - RNA, 82 nt, Homo sapiens
gcacaccacacacaggcagcgccagggggcaagaacgggcaacaaacgggaggaagcacgaaacaacacaaaacccaccaag

SEQ ID NO: 45478 - RNA, 70 nt, Homo sapiens
acaacgcaccgagacccgcagcgagccaacggcgaccaagcggggacacacaggaagacgaacacggaac

SEQ ID NO: 45479 - RNA, 57 nt, Homo sapiens
caggaccagccccgcccgaggcagacgcgccacaacaggggaggcaagcaggggggc

SEQ ID NO: 45480 - RNA, 80 nt, Homo sapiens
gccgggggaggcggggagaccgccccggacgggaggaccgcggacgacggccgcagagcacaggagggcagaccaaaagc

SEQ ID NO: 45481 - RNA, 83 nt, Homo sapiens
cggcggccaggcccgcgaacacacgccgccaccgggaggcccagggaaggacaagaaaaccccaggacacagagcggggagcc

SEQ ID NO: 45482 - RNA, 35 nt, Homo sapiens
cccaggaccaccaccccgcccgagaaccgccggcg

SEQ ID NO: 45483 - RNA, 66 nt, Homo sapiens
cgggcacaggggccccgccagcaaggcagggaggcccccaggggagacgcgcccaaagcagcgcca

SEQ ID NO: 45484 - RNA, 72 nt, Homo sapiens
ccagccggagcggccagccgacaggggcggagaacggaaaagcaccaggaagcagagaggaccgcagaaggg

SEQ ID NO: 45485 - RNA, 58 nt, Homo sapiens
ggcccgggcaaaagaaagcgggacagcagacgcgagagcggaaagggcaccgacccac

SEQ ID NO: 45486 - RNA, 74 nt, Homo sapiens
ccgaccgcaacagaacggacccggggagccgccaccaaaagcagacggaaaacccacggggaagaccacacccc

SEQ ID NO: 45487 - RNA, 80 nt, Homo sapiens
aggaggaaaaagaagaccagcgacaaaagagaaacccggcagggggagagcacaaggcgaacaagcccccaggcgagagc

SEQ ID NO: 45488 - RNA, 72 nt, Homo sapiens
gcaaaacaaacagagaaaagcagcaacacagagggaagacagaaagagcaagaaaaggagcaggaaaggcgg

SEQ ID NO: 45489 - RNA, 77 nt, Homo sapiens
cacgcggcccgcgaaagggcgcaaagcccgggagaggcaaaccaccccggggcgggaacccaggggccggcacagca

SEQ ID NO: 45490 - RNA, 58 nt, Homo sapiens
gccgcggggaaagggggacccgagcccgacagcccagccagaccacaggcaaagacac

SEQ ID NO: 45491 - RNA, 64 nt, Homo sapiens
cagacgcccagccggcaacccacccaccacacaacaaagggggaccagggagggccagacccca

SEQ ID NO: 45492 - RNA, 67 nt, Homo sapiens
gcaagacacagaaaccccgcagaaccagaaccaggcggggaggaaacccaagaagaaacagacaagg

SEQ ID NO: 45493 - RNA, 86 nt, Homo sapiens
gcggcccaccaacaggaacagggcagacgagcggaggacacccaacccggggcggagaacggaaaagcaccaggaagcagagagga

SEQ ID NO: 45494 - RNA, 67 nt, Homo sapiens
aacaacgaagaaaaaagcgcgcaccaggaagaaacaaccaccaacccagcaagcgaggagaaaggac

SEQ ID NO: 45495 - RNA, 58 nt, Homo sapiens
accaggagcccagagaagccgggcaccagagcaagacgggccaccagagaacccagga

SEQ ID NO: 45496 - RNA, 78 nt, Homo sapiens
ccgacacgccggggcgcccgcgcgcggggaccccacggggccaggaaacgaacacacagggacgcaccccggacagcg

SEQ ID NO: 45497 - RNA, 79 nt, Homo sapiens
ggccccggccgcaggagggagaccacagcaagacaccgggaccccggaagccaaaaagaacacggggccagcagggaaa

SEQ ID NO: 45498 - RNA, 59 nt, Homo sapiens
aagagcagaaacccgccccgagaagcccacaaacaagcagagaagccgaacgggaacca

SEQ ID NO: 45499 - RNA, 55 nt, Homo sapiens
agaagccgcggacccgcgcacaaggccggagcgaacgaaaaacccccccccaaag

SEQ ID NO: 45500 - RNA, 39 nt, Homo sapiens
gcagagcgccaagacgggccaaagggaaggaccaccccc

SEQ ID NO: 45501 - RNA, 81 nt, Homo sapiens
aaacacacacacacaaggcccagccccggaaggcaggaaggggacggagacacgacgaggcgagggagcgcccaccagagg

SEQ ID NO: 45502 - RNA, 101 nt, Homo sapiens
cccggccccaggcaccgccagcacgcgccgccccgcgcgcgagccacgcagcccccaggacccacccaggaggcagaaacacgccgcgcgccacaccaggc

SEQ ID NO: 45503 - RNA, 75 nt, Homo sapiens
agaagggcgaaggggacaaggaacaaaccaaggaagagagaagggcacagaccaagacaacgaaccccggccagg

SEQ ID NO: 45504 - RNA, 69 nt, Homo sapiens
cgccgcggccaaggagccgccaaagccagacggccaaaagaagcgagggagaaccaccaacaaaggagc

SEQ ID NO: 45505 - RNA, 76 nt, Homo sapiens
gcgacacacgaacggacggagacaaggcagcggccacagaacaggcccaggaggaaagaggacagaacgaccgccc

SEQ ID NO: 45506 - RNA, 74 nt, Homo sapiens
ccgagagaagcagcaaacccagaagagcacgggaggacagagcccaggaccaagagcacaacaacacggaccag

SEQ ID NO: 45507 - RNA, 80 nt, Homo sapiens
ccagccgacgcagcggaagcggacgccccaagcccgggccgcaccacaacgggaggcacgcagacagccacggcaggacc

SEQ ID NO: 45508 - RNA, 76 nt, Homo sapiens
ccgccgggaggcacaaagggaacaagaacggcacacccaccagaagggagcgcgcgggacggcaccgacaggccga

SEQ ID NO: 45509 - RNA, 81 nt, Homo sapiens
ggaccagccgaaaagccccgcccgcccggaagacagggcgggaccaccaggagcagagcggaggccaccagcccaacacca

SEQ ID NO: 45510 - RNA, 71 nt, Homo sapiens
gaggcgggacgcgaacacagagggaagagaaagcaaacgagcagggcaagggggcacccgaggaggaagag

SEQ ID NO: 45511 - RNA, 74 nt, Homo sapiens
cacaacggaaaaagcaccagccggcaggaccacagagacgaaggcacgcaaaggcggaaaacaacaaaagaaaa

SEQ ID NO: 45512 - RNA, 70 nt, Homo sapiens
cggagccggggccacacccacggaaacaagagagcaaacggaagaacagaaggccccaacaagacagggc

SEQ ID NO: 45513 - RNA, 67 nt, Homo sapiens
gcacacaccggcacaccgcaaggccaagagaggacgcccaaccacagcccagagagcggaaccgcag

SEQ ID NO: 45514 - RNA, 89 nt, Homo sapiens
cccagggccaggcgccgccagaacggacccagcagccagcgaagccccaaggaagccgggacgcccacagacccagcagcgcacgcagc

SEQ ID NO: 45515 - RNA, 53 nt, Homo sapiens
ccaggagaacacgacggccaaggcgagccgaaacacacaagaccaggcagaca

SEQ ID NO: 45516 - RNA, 73 nt, Homo sapiens
ggcacacaggaaggaacaggaggaaaccacagagcacagccacaggagcagccagaccacgggcccaaggccg

SEQ ID NO: 45517 - RNA, 46 nt, Homo sapiens
ccccccggagcccggagcaagaggacccaagaagaccagccgaagc

SEQ ID NO: 45518 - RNA, 49 nt, Homo sapiens
ggagcccgccacaccgggaaaagccgcagaccgcaccacgacagcgacc

SEQ ID NO: 45519 - RNA, 64 nt, Homo sapiens
ccggccggcaacaaaggcgagcagaacaaggagaaagaccaagcacacgccaccagcgagaccc

SEQ ID NO: 45520 - RNA, 82 nt, Homo sapiens
caaggagacgccgccgcgcccccgcgaggagcgagcgacagaaaccaacccaagagcgcccagcggaaaggcaaagaaaagg

SEQ ID NO: 45521 - RNA, 59 nt, Homo sapiens
cggccggcccacgcccgcgggccaccgcagagccccaagacccaaacagaggagaggaa

SEQ ID NO: 45522 - RNA, 83 nt, Homo sapiens
gagacgggcggccggccgacccccgcgcgacggcgacgcgggaggccaggaagcccgggcccagcggggcacagccccagcga

SEQ ID NO: 45523 - RNA, 113 nt, Homo sapiens
agccccaccaggccccaggggccggcccccccggggcaacccagacggcaacaaaggcgaggacagagcgggagccaccagcgccaaagggaagccaggagcccgggggcacg

SEQ ID NO: 45524 - RNA, 72 nt, Homo sapiens
agaaagaagagcggaagcagaaacccaagcaggaggcccagcagaggggagaggacggggagagcaacgcca

SEQ ID NO: 45525 - RNA, 74 nt, Homo sapiens
caggacggaacaacagaagcaacacaacaagaccaccgacggaagagagagaaacaggcaaaccggaagaccag

SEQ ID NO: 45526 - RNA, 82 nt, Homo sapiens
acgacacaagaaacacaaccagacgcagaaaaccaggaagggagacaggggccaggccaggggcaggggaagcacccaacca

SEQ ID NO: 45527 - RNA, 74 nt, Homo sapiens
gcccagccccagagagcgggaacagaggggcagagaaaaagcagaccccgaagccaaaaggcaaaagaaaaagg

SEQ ID NO: 45528 - RNA, 73 nt, Homo sapiens
acaacgggagacgcagcaggcgagagacaagagacacccccgccgccagacccgagaaaggaggagaaacaag

SEQ ID NO: 45529 - RNA, 65 nt, Homo sapiens
gagagcaagacgacggaaccaacacacaaagccgcagaaagcagcacgggcggcaaagaaggggc

SEQ ID NO: 45530 - RNA, 77 nt, Homo sapiens
gggcacccggagggggcggggaccacccagcgccgggccgaccgccgcacaggggggacgacacccggaaggaaggc

SEQ ID NO: 45531 - RNA, 76 nt, Homo sapiens
ccaacgcgacggaaaggcacgaaagccagacagaaccaaggagagacacacggaacaagagacaaaaaaagaagca

SEQ ID NO: 45532 - RNA, 79 nt, Homo sapiens
ccagggcagaaaagcgaccaggcgagggaaagacaaggagccgggccgagaaaccgaaccagagaccagagaagaaacg

SEQ ID NO: 45533 - RNA, 78 nt, Homo sapiens
cggacgcgagcccgcccccgagaaagaaagagcccgccacccgaagccgaacgggaagcaggccagaaggccacccac

SEQ ID NO: 45534 - RNA, 81 nt, Homo sapiens
agccgcagcccggacagcgcagaaccgaaaaacagcacggaggcaagcaaaacaaagaagagacagggagaagcagcccca

SEQ ID NO: 45535 - RNA, 87 nt, Homo sapiens
ggagcggcggcgcggcggaaccagggccgacccgggccggaccgaccccaggcggcggccaccccagagaagaggacgagagacaag

SEQ ID NO: 45536 - RNA, 78 nt, Homo sapiens
cgacccacccaagcccacgaggcgccagagcaagacccacgaagggcacacaaaggacccaccgggaaaggacagagc

SEQ ID NO: 45537 - RNA, 71 nt, Homo sapiens
gaagggggaacaaagaagaaggcaagagaagaccgaggcacaagacaccacggcagccagccagacagggc

SEQ ID NO: 45538 - RNA, 79 nt, Homo sapiens
ggccagggggacggcgccacgcaccggacgacgcccggcgccagcacacgcagcggggacgagagccccggcacaaacg

SEQ ID NO: 45539 - RNA, 42 nt, Homo sapiens
gacgagaacggcagccaagggcacaaaaaaacaggaaaacgg

SEQ ID NO: 45540 - RNA, 66 nt, Homo sapiens
aaccaacaaaggagagacccagaaccccacaaaggaggcccagaggaaaaagacacgcgagaagac

SEQ ID NO: 45541 - RNA, 62 nt, Homo sapiens
gggcaccacccccccagggcggggcaggaacaaaaccagccaagcagaggagaaaaagacag

SEQ ID NO: 45542 - RNA, 77 nt, Homo sapiens
accccaggaagaagacaacagcggccgccaggagagccggggagcagcgggccggcgcgaggcgcccggcacaacga

SEQ ID NO: 45543 - RNA, 53 nt, Homo sapiens
gcgccacgagcaccaacaaggccccgacaacaccagagccgagacaacccaac

SEQ ID NO: 45544 - RNA, 74 nt, Homo sapiens
gcggccagaggcgaggcagggaggacccacccccgggggaaaagaacgaggacccgccacagagcccacgaccg

SEQ ID NO: 45545 - RNA, 81 nt, Homo sapiens
ggagcgcgaaggccgggacccggccccggcccacaggggggggcaaacccgagagaacgggcacacagagaaaaaaaggga

SEQ ID NO: 45546 - RNA, 59 nt, Homo sapiens
caacgaaccaaacaaaggaccgggagaggaaacgggacaagcacggcccagagacgggc

SEQ ID NO: 45547 - RNA, 80 nt, Homo sapiens
cccaaacgaacgaagaaaggagggaaggaaaccagcacaccacaaagaggagacaagagaagggaccacagaccagcacg

SEQ ID NO: 45548 - RNA, 72 nt, Homo sapiens
cccgagaccccgcggaacgcccaccgcggagagcagcacgaccccagcacaggcgggaaaaccgccacaaag

SEQ ID NO: 45549 - RNA, 83 nt, Homo sapiens
acggcccagcacaagaccgcgacagcccgaagcggaggacccggcccagccgggcaggccgacccccaccagccgagacacaa

SEQ ID NO: 45550 - RNA, 69 nt, Homo sapiens
ccgacccgagcccagcagccgcccacccagccagcacacacgaaagacagagccggcaagggaggaaag

SEQ ID NO: 45551 - RNA, 81 nt, Homo sapiens
aaaaaggccacagaagagcgaaggaggggaggccccgacccagagaagaaagagagagagacaacgacagaacaacagaag

SEQ ID NO: 45552 - RNA, 53 nt, Homo sapiens
cggccgagccacccaaaaacaggaagaagagagggcgaaggaggccacacaga

SEQ ID NO: 45553 - RNA, 87 nt, Homo sapiens
ccgaggcagcacccgggagccgcaaggcgagagcgcaaagaaagccaaacggcccgcggcaacaaagcacagccccgaagacaggaa

SEQ ID NO: 45554 - RNA, 76 nt, Homo sapiens
gccccgaggcagaacccaggaacaacccagggagcaggcgaagcgagccagggaagcgaaccaggcgaacaagacg

SEQ ID NO: 45555 - RNA, 78 nt, Homo sapiens
cacgcgaacgagagggacacggagcagagaagcgcgaaagaaaacccggagacaacgaagcgaacagccaaggaacgg

SEQ ID NO: 45556 - RNA, 73 nt, Homo sapiens
gacccggggaggcgcacacacaccaaagcccagccgcccacacaaggaaacaaccccgaaggcgcggcccgac

SEQ ID NO: 45557 - RNA, 87 nt, Homo sapiens
agcacggcgggaaccccagcacaggcccccgaggccacgaccggccagagccaggggaagaggagaggagacgccggagcgggacga

SEQ ID NO: 45558 - RNA, 86 nt, Homo sapiens
ggaaaggaaccccaaggcggaggcgaagggagggccgccccaaccgacgcaccagccggaggaggagggacagggccaggaacgac

SEQ ID NO: 45559 - RNA, 68 nt, Homo sapiens
agaccgcgagagaagggggcacaggcggagccacggaaccgcccagccccaagccccgccacggcgac

SEQ ID NO: 45560 - RNA, 73 nt, Homo sapiens
aggaaacaggcgacacaggggcgcgcgcaaagaaggaggaaacacggaacgacgacgaggacagcgaacggag

SEQ ID NO: 45561 - RNA, 72 nt, Homo sapiens
agaccaggaggaagaaaagcacccaaagaagcagcaagaagccaacaaggccagaacccgccacaaaaaccc

SEQ ID NO: 45562 - RNA, 70 nt, Homo sapiens
cgacaaacgccccgcccaagaccagacacgaagggacccgaggccacacccgcagcccccccccacaccc

SEQ ID NO: 45563 - RNA, 71 nt, Homo sapiens
aaggcaagagccaacccaaaaccaagggaaggaacaaagcagagaaaccaaaaggccagacgaacacgaga

SEQ ID NO: 45564 - RNA, 85 nt, Homo sapiens
aaaaggcagaccgagcagagggacccacagcacaaggaaccaaagagcccaaacgagaaggaagccgcggaggaccgagcgcaca

SEQ ID NO: 45565 - RNA, 39 nt, Homo sapiens
ggacgagcgaggacaaacaaggagccagcaccgccgacc

SEQ ID NO: 45566 - RNA, 77 nt, Homo sapiens
cggggaggagaggagaaaccaagcagacccagacaggaaagggggaggaaaaggggcagacagacagacaagacaaa

SEQ ID NO: 45567 - RNA, 83 nt, Homo sapiens
caacgccgggccgcgggcgcggacgccggcccgcgcgcgcaccccgcggacgccacagcgcgaagcccggggcggcgacggag

SEQ ID NO: 45568 - RNA, 80 nt, Homo sapiens
cagggacacccaggaagagcggccccgcggggggcgagaccggcgcgacccgaccacccagggaggagaggcgagaagag

SEQ ID NO: 45569 - RNA, 111 nt, Homo sapiens
gaacccaacagccggaggccagggggaggacacgaggccaggagcaagaccagcgggcagaagccagagggcgcgaacccgggaccggaacaagaagaagaccccacggaa

SEQ ID NO: 45570 - RNA, 69 nt, Homo sapiens
cgcagggcgcccccggccagcaaaaaacagaagagacgaaaggaaggaacaacaggaggaagaagacaa

SEQ ID NO: 45571 - RNA, 71 nt, Homo sapiens
gagagccaggggaaaggccagcgcagaaacgcagggcagcaccccagaacacgggcggccagaaccgggcg

SEQ ID NO: 45572 - RNA, 53 nt, Homo sapiens
gcccaccgcggagagcagcacgaccccagcacaggaagaccgcccccgacaaa

SEQ ID NO: 45573 - RNA, 82 nt, Homo sapiens
ccggagcaagcggagccccccaagagccggaaaggacccaaagacaggaccacgcaccagcagagaaggaaagcaaaccgaa

SEQ ID NO: 45574 - RNA, 93 nt, Homo sapiens
agagcccagggcaggacaccgacaggaacagggaccacgggggcaacggaagggggaccaaggcaaacaaaacaaccaccaaccagagaaaag

SEQ ID NO: 45575 - RNA, 88 nt, Homo sapiens
gccgaagcagccgggagccggagcgggcgcggacgccgaggcaccgaggcaccagaggagccaaaacagagggagacgagaaaagggc

SEQ ID NO: 45576 - RNA, 72 nt, Homo sapiens
gcgccaccaccaggacacgcagcaggcagcggcaccaacggacagggacaagaagaagcggacgcccccaac

SEQ ID NO: 45577 - RNA, 83 nt, Homo sapiens
cgcgaagccccgcgcccgcgccagcgcgcaccccgagccgagggccgcgcgcggccgacagagggagacgcgcacggaccgga

SEQ ID NO: 45578 - RNA, 65 nt, Homo sapiens
accacggacagggcaggaccagaaaaagcagccacggggaaaaggaaggccggaggaggcaacag

SEQ ID NO: 45579 - RNA, 62 nt, Homo sapiens
gggggaaagcacgcccaggcgaacaagaggcgccagcgggcgcgccggaagaacagcgccac

SEQ ID NO: 45580 - RNA, 75 nt, Homo sapiens
gcaaacggacacagcgccccaccgacaagagccaacaaagaggaacaagcagcagaaaaaagaggaggaagaagc

SEQ ID NO: 45581 - RNA, 86 nt, Homo sapiens
aagcaccaaagcgcgccaagagcacccgggcccaaaccagacaaagccacagaaaaccagaagcgaaggaaaaaccacacacacca

SEQ ID NO: 45582 - RNA, 71 nt, Homo sapiens
gccgcggaccaagaagacaaacccaagagagcaagagaggaccgcagacgagagcggcgaacaggcggcac

SEQ ID NO: 45583 - RNA, 83 nt, Homo sapiens
gcggagcagaggaaccacacgcgacagcgcaccccccggaggcggccgagcccacgcgacgaagaacaggagagggacgaacc

SEQ ID NO: 45584 - RNA, 81 nt, Homo sapiens
cgaggccaggaacccggggagaccccgacgggaggccgaggggaaagaaacagccagaccacccggagaagcagaagacga

SEQ ID NO: 45585 - RNA, 61 nt, Homo sapiens
cagcaggacaggaaaaaaagagaagccagcgagaagaccgagaggccgcgacccaacaccg

SEQ ID NO: 45586 - RNA, 71 nt, Homo sapiens
caccccaagaccgcacaaacacacacgaacgagaacacgcacaacggacagcacacgaggaacaaggacag

SEQ ID NO: 45587 - RNA, 79 nt, Homo sapiens
gagccccagccggccgggaggcaccacggccgagcccgagccgaccgagcaaggagaaccaccaggaaaccccaggggg

SEQ ID NO: 45588 - RNA, 77 nt, Homo sapiens
cgagcggagaccaccggggacgccggggagggccgacagcaaccccagcagacgaccccgaccccgaggccagaacc

SEQ ID NO: 45589 - RNA, 88 nt, Homo sapiens
cgaccgcgcggagaccggaccgcgccacaaggagagcccgggaccgggagcccgggaccgggagccggggggccaccccgaccggagg

SEQ ID NO: 45590 - RNA, 39 nt, Homo sapiens
gcagagcagcagaggagagcgcccaagaaaggccgggcc

SEQ ID NO: 45591 - RNA, 81 nt, Homo sapiens
gagggagcaccacggaccccaaggaagccacggcagacacacaacccgacccgacgaagcacgcagccccgaaggcggccc

SEQ ID NO: 45592 - RNA, 75 nt, Homo sapiens
acagggcccgcaccggggaacccccggagaacagaaaagaggacagccaacccccaacaagagaagagaagagag

SEQ ID NO: 45593 - RNA, 79 nt, Homo sapiens
gacgagacgccgggaccgagggccggggacaaggccgccgaggaacaggaacaggagccagggaacacacacccgagaa

SEQ ID NO: 45594 - RNA, 39 nt, Homo sapiens
gcccccgagggcgggaacaggcgaggcgaagagggagag

SEQ ID NO: 45595 - RNA, 69 nt, Homo sapiens
cccgcgacgccaaccacgacgaagcggaaggcagaaggaaagacaacccgggcaaggagagcggaacgg

SEQ ID NO: 45596 - RNA, 62 nt, Homo sapiens
cagcaggaggcgcgggcaggcagagcaccagggccagagcagaggcggagaggggcagaccc

SEQ ID NO: 45597 - RNA, 51 nt, Homo sapiens
gacgaacaaaacgaagagggggcagcaccagaaaaacaccgcccagacagg

SEQ ID NO: 45598 - RNA, 73 nt, Homo sapiens
gaggaacagaagaaaaggagaggaccgaaacagccaggcaagacccgcccgccaagcgagcaggaaaggccag

SEQ ID NO: 45599 - RNA, 50 nt, Homo sapiens
gcgagccagaccaccaacggacccacgacaacaaaagacccggaccccca

SEQ ID NO: 45600 - RNA, 73 nt, Homo sapiens
aagcaaacacaccaaccaagcaaaacccaagcaaaaccagagcaaccccgcgccggcagccccccgggcccgc

SEQ ID NO: 45601 - RNA, 41 nt, Homo sapiens
agagcacgccgaagccaccagacacagccgcggcgccaggc

SEQ ID NO: 45602 - RNA, 80 nt, Homo sapiens
cacaccaggaccacgggcccgggccaacgggccaacgccggcaggggacggcccacgcgaccggagcccggcaccggcgg

SEQ ID NO: 45603 - RNA, 60 nt, Homo sapiens
cagacaccgagccagcaagcccccaacgagcgacagagccagacacggggaagagaaggg

SEQ ID NO: 45604 - RNA, 82 nt, Homo sapiens
gagggagaagcacaagacagcacagagagggaaaagcaacccgccacaaccagacgacagcaaacaggaacaagaacaaaca

SEQ ID NO: 45605 - RNA, 61 nt, Homo sapiens
acaaaaccgggggggaacaaagcagccgaaagggagacaaaaccacacaggaaaggaccca

SEQ ID NO: 45606 - RNA, 82 nt, Homo sapiens
agaagacgacgcaccgcaggcagacaaaagggccaaagaagggagaggccggagcgagggagagcaggaacacagagaggag

SEQ ID NO: 45607 - RNA, 76 nt, Homo sapiens
ggggaacaggacaacggaggaccagcagccccccaaaaaaggcccgcaagggagcacagcgcggaagccccgaggc

SEQ ID NO: 45608 - RNA, 76 nt, Homo sapiens
agcacacggggccgggagacaacgccaacccaaggaaggaccaaacggagaaccaggacacagcacccaaagcacc

SEQ ID NO: 45609 - RNA, 67 nt, Homo sapiens
gcgggcggggcggcagcgaggaacaggagagcggccgcagacaaccggccgccgccgcgaccccggc

SEQ ID NO: 45610 - RNA, 83 nt, Homo sapiens
agacgcagggcgcccccgggacgaacagcggggacgccccagcagaccgcccaggagaggaaagcaggaggaaagaccaccca

SEQ ID NO: 45611 - RNA, 79 nt, Homo sapiens
cgcaggagggcggcccggacaagccagacaacgccgacagcaaggaaggcagagcccacaaacccaagcagcaaagaaa

SEQ ID NO: 45612 - RNA, 76 nt, Homo sapiens
gcggcgcggcccgcgcgcagccggccgggaaacccagacgacaaggaaggccaagggacccacgaccaaccaagaa

SEQ ID NO: 45613 - RNA, 73 nt, Homo sapiens
ccgaaaccgggcaagccgagaggagccagagcggaagcacgaccagcagagaaaagaaaaccgagaaagagaa

SEQ ID NO: 45614 - RNA, 53 nt, Homo sapiens
ccaaacagcggcgcacggggcacaacagagcccaaaaggcagagcgaggagag

SEQ ID NO: 45615 - RNA, 85 nt, Homo sapiens
ccgacgccgcaaaggaacgagacggccgaagcccgcagcccacgcacagccggagagcagccgagcacggggccaccagacagga

SEQ ID NO: 45616 - RNA, 72 nt, Homo sapiens
cgcgccgcacgggagccagcgggggaacaagcgggaaacggagccaccaacaagcgggagaaagacagcaag

SEQ ID NO: 45617 - RNA, 87 nt, Homo sapiens
aaagcacccaccaccggcacagcaggaaaggaagaaagcagagaacgggaagggccacaccaccgccagcacaggaagacagaaccc

SEQ ID NO: 45618 - RNA, 51 nt, Homo sapiens
gagaaaaggcacggaacaagccggcgaggagccaggccaccaaaagacccg

SEQ ID NO: 45619 - RNA, 87 nt, Homo sapiens
acaggagccagggcggagagaaaacccgcgaggaaagggaaggagcaagccgggaggagacacacagccccagacgggaggaaaaaa

SEQ ID NO: 45620 - RNA, 83 nt, Homo sapiens
accagggaagcagcaccacggggagacaagcaaagacgaggacgcgcacaggaaaggacgcggaacaagcaggcagccaggca

SEQ ID NO: 45621 - RNA, 33 nt, Homo sapiens
cccggcaagaaaggggccgaggaagggacgcag

SEQ ID NO: 45622 - RNA, 82 nt, Homo sapiens
gcgccggccagagccggcgagccggaggaagccaccagagagcgaaagcacaggcagcacaacaggagcaggcccagcagac

SEQ ID NO: 45623 - RNA, 72 nt, Homo sapiens
cagacagcagagagagagcggaacgggagaaagcacgggaggagaggcaaagaacagagcagcaccagcaaa

SEQ ID NO: 45624 - RNA, 79 nt, Homo sapiens
gggggccgccgccacccgcccccaccaggccgaagagaaccacaagaccgaggccaaaagaaaggaagaaaacccccaa

SEQ ID NO: 45625 - RNA, 54 nt, Homo sapiens
aaggagcgcgcccggcggggagcgcagcgcgaacaccaggagaaacacgcaaag

SEQ ID NO: 45626 - RNA, 78 nt, Homo sapiens
gcgagcgggcggcaccgaacaccgggggcgggcagccgaggccgggaaccagcgagggggacaggggaggagacccgg

SEQ ID NO: 45627 - RNA, 72 nt, Homo sapiens
cgcacagacggaagcaaggaacaaaccgaagaacagcgggaaagaaggcaaaacacggaaagagcccagcaa

SEQ ID NO: 45628 - RNA, 83 nt, Homo sapiens
gggaggcccgccagaccagcaagaggaggggcccggagagggggaagggcccaaagccagaaggcaggaaacgcaaccggaca

SEQ ID NO: 45629 - RNA, 86 nt, Homo sapiens
agggaggcgaggcccgcaccggaagcggccggagcgggacggaaggggacacaggcaagaccacacggacgcacaacaggcaggcg

SEQ ID NO: 45630 - RNA, 68 nt, Homo sapiens
ggaagcacaaagagcgcaaggagaggagcaccgccccaggcggagacaaggcagaccagcacgcaacc

SEQ ID NO: 45631 - RNA, 67 nt, Homo sapiens
acacaagagaccagaggaaagccacgcaggggccaagaagcccagggccgaagaggacggcagaggc

SEQ ID NO: 45632 - RNA, 72 nt, Homo sapiens
ccaaggacgcggcggaaacaacggcaagggacgaccgaggccaaaaagaaaacgaaccagggggaaggcccc

SEQ ID NO: 45633 - RNA, 71 nt, Homo sapiens
gagcgggcccgcggaccagccagggcacggccgggacgacaccgaaaacgagaaacgaaagagacacgggg

SEQ ID NO: 45634 - RNA, 70 nt, Homo sapiens
acccaaaccaaccccagaccggagccagacagcagccaagaaacggcgaggaaagagaggagccccggaa

SEQ ID NO: 45635 - RNA, 75 nt, Homo sapiens
cccagcaagaggaccgggcgggcgcgcccggccgcgacgcccgggacccagagcgggcagcggccgcgagaaccg

SEQ ID NO: 45636 - RNA, 70 nt, Homo sapiens
cacccggcagggacaccacaagacaacagcaggccacagggccgggggaggcagagagcgccagccccac

SEQ ID NO: 45637 - RNA, 66 nt, Homo sapiens
aaacacagcgaaaagaaacggaaagcaagcacagagcacaccaacgaacacagaagacggaccgca

SEQ ID NO: 45638 - RNA, 73 nt, Homo sapiens
gagacccgcgaaaccgacccaagaaaaagaagaacagagagcccaggagccaaaggacagggcccaaaaaggc

SEQ ID NO: 45639 - RNA, 78 nt, Homo sapiens
ccagaacggacaggggccgcgccgcgccgcgcgcgggagcgccagcaagacacgaaaacacaaagagaagaccgaagg

SEQ ID NO: 45640 - RNA, 81 nt, Homo sapiens
gggcaagccacagagccagagcgaccgaaaaccacaacagcggcgcggagggacgggcccgccccacgccccaggagcagc

SEQ ID NO: 45641 - RNA, 85 nt, Homo sapiens
cccagcggagaaccaccgcacaagagccaagaacaagggccgcgagggaacagaagaggcggccacccacgagccgacggcaaac

SEQ ID NO: 45642 - RNA, 80 nt, Homo sapiens
cgggggggggccgaccggagcgggccaggccgggaggaccagcccaaaaccaggcccaaggaacgagagaggaagcaaag

SEQ ID NO: 45643 - RNA, 85 nt, Homo sapiens
ggccaccccgggagccgccaggcgccggcgaggaccagggggacgcagacggcgcacgcgggagacgaaaccagacagagggcaa

SEQ ID NO: 45644 - RNA, 85 nt, Homo sapiens
cccggccgcagcggcaacagaacgaaaaacagggcagagcagcaccagcagaagagggcccgaccacggcaacccagaggcgaag

SEQ ID NO: 45645 - RNA, 92 nt, Homo sapiens
gggaaagggaagcagcccgccgcgccgccccgagcagcccgccaggaggcccgccggggggcagagaagccaaccccccaagcgacaccggg

SEQ ID NO: 45646 - RNA, 94 nt, Homo sapiens
aagggcaccgggggcgaaccgagcgccagagcgcccggccgcggcccgggagcggaggaaccgcgacgagaagaggcgaacggaagcaacaccc

SEQ ID NO: 45647 - RNA, 82 nt, Homo sapiens
aaggcagcgaggagaagcgcagcgacggcgcgggagagcgcgccagccggccgcgagcgccacaggagccgcagaagcaaag

SEQ ID NO: 45648 - RNA, 78 nt, Homo sapiens
ccacccggccgcccgcccagcgccgcccccggagggcccacgcagcgccggacaagaccacaaccagaacggaaggcg

SEQ ID NO: 45649 - RNA, 41 nt, Homo sapiens
caccaggacgggagagaaagagggagcgccgggcggaaacg

SEQ ID NO: 45650 - RNA, 72 nt, Homo sapiens
ggagcagacgaaccggaacccgcggggacgaaccacgaagaccaagagccaaaacacacccccccaaagaaa

SEQ ID NO: 45651 - RNA, 80 nt, Homo sapiens
ggcggcccaggagcggcggcgaagaaggaggcaggcacgggagccgaagagacagaaggaagcagaagggaccgagcgcg

SEQ ID NO: 45652 - RNA, 78 nt, Homo sapiens
gagaagcggcacccccaggaagcgcggaccgaaaagacgcggccccaaaggaaacacccgaagaacacagcgccagcc

SEQ ID NO: 45653 - RNA, 76 nt, Homo sapiens
gcgcaacccaggaacccgggggggggaagagaaggcagaacgaaaggaggcagagccaacagaaggagggacacga

SEQ ID NO: 45654 - RNA, 77 nt, Homo sapiens
ccgcccagaccaggaggagacgggaacggcgggccaggaccgcaaggccacggcgcggcacaggcgccggaggcgcc

SEQ ID NO: 45655 - RNA, 75 nt, Homo sapiens
ccgccggcgcgcgagccacacaacccgcgccggccgcgggaaggagaggcagacgagaccggagaaggaaagaca

SEQ ID NO: 45656 - RNA, 74 nt, Homo sapiens
cggggacaaggaggggaacggcaaagcagggagcagagccagacagccaccacccgcgcaagagaaaaccacga

SEQ ID NO: 45657 - RNA, 84 nt, Homo sapiens
aagcaacacaaggaacaccacaccacgggcccacaggagcaaaacacggacagaaggcacgggggcccgcacgagaaagacacg

SEQ ID NO: 45658 - RNA, 68 nt, Homo sapiens
cagccaggccgagccaacaaaagagaacagaacccccacagcagcacgcaggcgccccgcagacagac

SEQ ID NO: 45659 - RNA, 67 nt, Homo sapiens
gagacgaagaagagcgaagaaggagacacgccagaggggaagggcccaaggagggagcgacggcgga

SEQ ID NO: 45660 - RNA, 74 nt, Homo sapiens
acgaaccggcagggaaaaagcaggaacaaccaccgagcgggcccgacaagagaggcggagccacccccacaacg

SEQ ID NO: 45661 - RNA, 80 nt, Homo sapiens
gacaaggcacagaagcaggaacagcagaccaaccacacaaagcaggaggaaggcgaggcggcgcacaaggggacacccag

SEQ ID NO: 45662 - RNA, 78 nt, Homo sapiens
agaagcaacagacaaaagggccacagcgaacacagaagaccggccgcccccacgagccgccaccaagcaggcagggga

SEQ ID NO: 45663 - RNA, 65 nt, Homo sapiens
ggagcccagggaagcagccgaccagccgcggagccgggggcaggaggaccacgaaggcagggaag

SEQ ID NO: 45664 - RNA, 73 nt, Homo sapiens
caggcagggcagccaggaacgaacacagagaggagcccagaagaaaccaagcgcgaaaaaccggagcaaaacc

SEQ ID NO: 45665 - RNA, 57 nt, Homo sapiens
gggcacggacagggcgaaagccgaccacccggcgaagcgagacgacgggaccgaagg

SEQ ID NO: 45666 - RNA, 78 nt, Homo sapiens
gacccaacaggacacgaaaggcgaacccaggcacccagagacggagcggaaaccaaggaagaaaagccacccaggccc

SEQ ID NO: 45667 - RNA, 85 nt, Homo sapiens
cgaagacacaccagaggcccaaccagggccagaacccgggagcacagaacgggaagagagcgagccccagagccccggaagagaa

SEQ ID NO: 45668 - RNA, 84 nt, Homo sapiens
cgcggagcaaaaaaagagcccgcaagaagaacagagacagcagccaaacccccaggaaggaagagggaaggaaaaagaagacgc

SEQ ID NO: 45669 - RNA, 80 nt, Homo sapiens
ccacagcagcccccaaggagcgcaaggagaagagcagagggggggacccccgaacccccccacgagcccccaccaccagc

SEQ ID NO: 45670 - RNA, 70 nt, Homo sapiens
ggagccagccacaggcggcggaacggaacagaagcaaggaaacagccagagaccagcagggacaagacag

SEQ ID NO: 45671 - RNA, 56 nt, Homo sapiens
gcggccgcgcagccacccaagaccggccagagaaggagaacaagaggaagcacacg

SEQ ID NO: 45672 - RNA, 61 nt, Homo sapiens
gcaccaccagagaacgggccgagacgaggcgaggaaccaaaggccaccccgccgagcccac

SEQ ID NO: 45673 - RNA, 54 nt, Homo sapiens
cgcccccagccgacaggagacagacccagcacggaccccccccccagccgggcg

SEQ ID NO: 45674 - RNA, 77 nt, Homo sapiens
caccaccacaccacggggcaggcgggccaccaccggaccgggccgagccgcacagaagaccgaccaagagaagcagc

SEQ ID NO: 45675 - RNA, 83 nt, Homo sapiens
ggcaagcacaaaaggggccaaacagcggagagcaccaggagggcaagacgagccccgacaaggacgggcccacacccgcgcgc

SEQ ID NO: 45676 - RNA, 74 nt, Homo sapiens
cccccccccgccggcccccccagaacacgggaacagagcagcggacacagacaggcaggagaagaaggagcggc

SEQ ID NO: 45677 - RNA, 79 nt, Homo sapiens
gaaccagcaaccagagaacaacagaaaaccaaaaaccacgggcgggagcaaccgaacaagagggaaagaagggaaaggc

SEQ ID NO: 45678 - RNA, 85 nt, Homo sapiens
ggaggcggccccggagaaccgcggggacagcagccggccagccggggggcacgcccgcccgggccggagaagaccagagaaagca

SEQ ID NO: 45679 - RNA, 58 nt, Homo sapiens
ccaggcccgggggcggcggccacgccaaggacggaaccgcggaaggaggaacaagcaa

SEQ ID NO: 45680 - RNA, 74 nt, Homo sapiens
ggagggaagaaagaagcaagaaggggaaaagacagcccagaaggaaggcagagcccacaaacccaagcagcaaa

SEQ ID NO: 45681 - RNA, 65 nt, Homo sapiens
cgagcagaacacacagagccaccaggacagaagcagacaacaccacggggaacgcggacaaagga

SEQ ID NO: 45682 - RNA, 75 nt, Homo sapiens
caggccggcgaagagaccgaagacagaaagacaaagcaaaacggaccaaggggccaggcgaagagaaccgcacgc

SEQ ID NO: 45683 - RNA, 76 nt, Homo sapiens
ggacaaaaacaaagcgcgcagaaagggcgaccaccaaaaaaacgccagacaacacagggacacaacaaacacaacc

SEQ ID NO: 45684 - RNA, 55 nt, Homo sapiens
agagcaggcaggcaaacaacaccgagagagaagaaggcacagaaaaccagaaaca

SEQ ID NO: 45685 - RNA, 66 nt, Homo sapiens
cagccaggcggagagaggcgccccgcagcccccaagcagggcggcgcggcgggaggacacccggag

SEQ ID NO: 45686 - RNA, 59 nt, Homo sapiens
agaggaagcgacagagagaggcagcaggcgaccgacccacagcgaagcacgccaggcgg

SEQ ID NO: 45687 - RNA, 80 nt, Homo sapiens
aacccccaggacccgccaaagacgccgcggccgcgacccagccagccagcaaccggaccgcacccacaaaagcgaaaagc

SEQ ID NO: 45688 - RNA, 75 nt, Homo sapiens
gaacggggcgggccaagcagagaacaacaagaaccagccaccaggaccaccagggcgggccgaacagaagagcag

SEQ ID NO: 45689 - RNA, 74 nt, Homo sapiens
aagaaaggcacagaaaagacagcaagacaacgaagagaggaaagaagcggaaaggagggagcacacaacaagga

SEQ ID NO: 45690 - RNA, 63 nt, Homo sapiens
aacaccccgcagaaaggccggcacaggcagacgggaaaaaccgcacccagaagcaaggcaacg

SEQ ID NO: 45691 - RNA, 77 nt, Homo sapiens
ggcaccagggcggaccccggggccaggccggaagcagaccccagcagcagacgccacacacagaacgacaccacagc

SEQ ID NO: 45692 - RNA, 80 nt, Homo sapiens
ggcgaccgcggcgcagcgacccccgccaggcaaaaggaagcagcaagaaggaacgacaaggcgcccagacaagccgagaa

SEQ ID NO: 45693 - RNA, 63 nt, Homo sapiens
cccgacagcccccacccgcaagagcagccgcggcgccacaccccaagacgccgagacagaaac

SEQ ID NO: 45694 - RNA, 37 nt, Homo sapiens
aacccgaagaaagcaaaggcaggaaggaaaggggagg

SEQ ID NO: 45695 - RNA, 83 nt, Homo sapiens
cggcgcggcgccccgggcccagcacgcggggcaggcggagagacagcgcggagaccacccagccggcgaaacacaaagccgac

SEQ ID NO: 45696 - RNA, 77 nt, Homo sapiens
gacacccccaaaaggcgcgcagaaaccaagcagccggacggaaaacaggcacgccccaccggaggaagcaaaaaaag

SEQ ID NO: 45697 - RNA, 50 nt, Homo sapiens
gaggaaagcccacaccagagcgaggaagcggaagaaagaagagccaagaa

SEQ ID NO: 45698 - RNA, 55 nt, Homo sapiens
gacaagcgaacccaagaacaggagggcaggaaggaacggcaccgaggcacggggg

SEQ ID NO: 45699 - RNA, 72 nt, Homo sapiens
ccccagcaccagcccagagggaaagcacaccaccccagccagccccgggggcgccgagggcacaagggcaac

SEQ ID NO: 45700 - RNA, 73 nt, Homo sapiens
acggggcgagaccccgcccggaccgcagagggaacggaaaaagcaacaaaacacaccaagaaaagggaaccga

SEQ ID NO: 45701 - RNA, 74 nt, Homo sapiens
aaaggaccaacaggcgccacaacgaccagacagcaacccaacaaccagacagggccagcacagcaaggggaaca

SEQ ID NO: 45702 - RNA, 46 nt, Homo sapiens
gagagaggcagacaaacccacagccagcccgccgcacccagggaaa

SEQ ID NO: 45703 - RNA, 52 nt, Homo sapiens
acacacgacagcggcgcagcacgacagcacagggaaagagagggacgaaacc

SEQ ID NO: 45704 - RNA, 66 nt, Homo sapiens
gcgccccacagaggggcgacggacaaaccggcgaccacacacggggacgacggggaagccggacag

SEQ ID NO: 45705 - RNA, 70 nt, Homo sapiens
cccgagagcgggagcaggaccgaagcagaggaaccggcgagaagcaacggcaacagaacagaagggccag

SEQ ID NO: 45706 - RNA, 75 nt, Homo sapiens
cggccggcggcacccgcacccggggacaagcgcgggaacggcgcggaaggaagaccgaggagcagggagcaacca

SEQ ID NO: 45707 - RNA, 82 nt, Homo sapiens
gagccgcggcagcgccgagggcccccccccaggcccgggccgaggcccagagccaccagaggcccggcgcccaggccccgca

SEQ ID NO: 45708 - RNA, 54 nt, Homo sapiens
cagcagacccggggccaggacagggcagggccgggagcacgcacccggcgcagg

SEQ ID NO: 45709 - RNA, 49 nt, Homo sapiens
ccaaaaacagaaggggaaaagcaccaaggccccggggcacgcgggaagg

SEQ ID NO: 45710 - RNA, 52 nt, Homo sapiens
ccaggaggggagaggaggcaggcccgcggaaaggcagaagaaagaagaaaaa

SEQ ID NO: 45711 - RNA, 62 nt, Homo sapiens
aggccaggagggagagaccggccacaggcagacggcagggccggcgccaccagcaaaaccag

SEQ ID NO: 45712 - RNA, 77 nt, Homo sapiens
ggggcccgcccagcgggaaacgaacagccaagacccaaacaaaccaacaacaacccggcaaccccggccccccccca

SEQ ID NO: 45713 - RNA, 85 nt, Homo sapiens
caaaggcgaccgacaccgcccagcgaagagaggcacggccggaaggacaggcaagacccaggacggcggcgcaccgcagcccgag

SEQ ID NO: 45714 - RNA, 84 nt, Homo sapiens
accaccagaagacaccaccggggccagaaacaggcgagaccccgcgaagcagcagcgaaagagccaggcagagcgggcagaagg

SEQ ID NO: 45715 - RNA, 62 nt, Homo sapiens
cggacgcacccggacgcaaagcgcacggaaggaacacgcagcagcacccggacccccgacgg

SEQ ID NO: 45716 - RNA, 71 nt, Homo sapiens
aaggaagagagagcacaagccagcgcaagaaaggggacgccaggcagggcggcgccagcgacgggcggcag

SEQ ID NO: 45717 - RNA, 75 nt, Homo sapiens
agagcagaaggaccagaccagaagcaaggagcaacaaaccaaagggcaaggcggaccgcgaaacagaacggagaa

SEQ ID NO: 45718 - RNA, 78 nt, Homo sapiens
ggcgcgccgggcccggggcccgggcgcgggcagccccgccccggccgccccaaaaagccgcggcgagagggcacaccg

SEQ ID NO: 45719 - RNA, 87 nt, Homo sapiens
cggagcagcggaggagggccgggagggcccccaccgcaggcgcagagagggagcgcaggcacaggcccaggaggcaagagcgagaag

SEQ ID NO: 45720 - RNA, 81 nt, Homo sapiens
aaagaaccgaccggcgccccagggaaacgcggaggccggagcgacgcgcggagcgagagggccgacccgggacggagggga

SEQ ID NO: 45721 - RNA, 69 nt, Homo sapiens
agaagacacaccaaggaaaaggaaaacacagcaaaggcagaaacaagagagggaaaagcacagggccag

SEQ ID NO: 45722 - RNA, 78 nt, Homo sapiens
agaaagcacccgaaagaaccagaacgcaagccacagcagcagccaaagagggcgaaaaaaaggagccaaggaggaggg

SEQ ID NO: 45723 - RNA, 53 nt, Homo sapiens
cagaccaagaacaaccgcggacacggagaggaagggagaagcagagaacccca

SEQ ID NO: 45724 - RNA, 78 nt, Homo sapiens
agaggcaagcggcaagaaagggaaccacggagaccagaccgcgccacaggacaagaaggccaacaccgcaacagcgca

SEQ ID NO: 45725 - RNA, 63 nt, Homo sapiens
ccccacgcagcgggccaggacacgggcacacgagacaaagggacaagaaaaaccaagcgaaga

SEQ ID NO: 45726 - RNA, 61 nt, Homo sapiens
gcggaccggcgccccggcgcgaagaggcggaccggacggccgagagcggcgcagccaggac

SEQ ID NO: 45727 - RNA, 51 nt, Homo sapiens
acggcaacgggacagcacgagcaccggccacgaaacagagacacaccgacg

SEQ ID NO: 45728 - RNA, 81 nt, Homo sapiens
ggagcgcaggcccggccgacggccacacggcggccgcagggcgccggagccccccagcccacaagagagggaaggagaaag

SEQ ID NO: 45729 - RNA, 49 nt, Homo sapiens
ccgacgccaggcagcgcccccaaacgggagcaacagcgagcaacaggca

SEQ ID NO: 45730 - RNA, 83 nt, Homo sapiens
gccggaagaagcagagacgaacaggaagagaaaaagaaacagcggaaagaggcccaaaggcaagcagagaaggaacgaagcca

SEQ ID NO: 45731 - RNA, 77 nt, Homo sapiens
ggcacagcaccgccaaaagccagcccagggggaaaggaagaaaaggccacaagagaaccaaggaaaagaagacgacg

SEQ ID NO: 45732 - RNA, 52 nt, Homo sapiens
caacgacggacaaccgggacaccgacacaccgagaccgacccgcccgcccgc

SEQ ID NO: 45733 - RNA, 53 nt, Homo sapiens
gcaaagcgacagaccccaagagaacaggaggcaggaagaagacagaaaacaaa

SEQ ID NO: 45734 - RNA, 104 nt, Homo sapiens
acgccccgaggcggcagaccgcccccccagccgcgcggcccccagaccccggcgcggggccagaggacaccagagacccagcccacccccgcgcacgaggagac

SEQ ID NO: 45735 - RNA, 67 nt, Homo sapiens
gccccaacaaggacccaccggaccgggacaacggagaagagcaggaagaacgaagcgcgcagaaaac

SEQ ID NO: 45736 - RNA, 108 nt, Homo sapiens
ggagaagcaggccgggcacggggcggaagccaccaccagaagaagggccggaaggcccagggagcggcagggggccaccccccaaccgcaacgcccaccgcggagacc

SEQ ID NO: 45737 - RNA, 81 nt, Homo sapiens
caaacgacgccacgaacaaaagagagccacgaggcggccccagcgcgggcgacaggccgacacccccagagagccgggcca

SEQ ID NO: 45738 - RNA, 74 nt, Homo sapiens
accaggcgggcaagagcaccgggacccacgcgaccccggggccacccaagacaacggcaagcggagaagagcaa

SEQ ID NO: 45739 - RNA, 99 nt, Homo sapiens
acgacacacccccagcacagacccccccacccccgccggccgcgggcggcgcaggacaccagaaggagacccaacaccccggccagacgggccaccagg

SEQ ID NO: 45740 - RNA, 38 nt, Homo sapiens
gagaaccccacggagaaccagagggacaagacggacag

SEQ ID NO: 45741 - RNA, 60 nt, Homo sapiens
cagcagcggagaaacagccagcgggagcccccgaccccaggagggcaagaccaagccaca

SEQ ID NO: 45742 - RNA, 73 nt, Homo sapiens
cggaaccgggaggcgacgcacacgagcggaggcgaagggacaagagaaaaaaagggcgggcgaacaaaaagag

SEQ ID NO: 45743 - RNA, 82 nt, Homo sapiens
cccagccaaagaaacaagccgggaaagggacaagaagggcaaagccgaagacaaccagggaagcagaaggcaaggaccccgg

SEQ ID NO: 45744 - RNA, 38 nt, Homo sapiens
aaggacaggagccccacaccgaccggagagcgagacga

SEQ ID NO: 45745 - RNA, 56 nt, Homo sapiens
ccgcgcacggggcccaccagccgcaccagccgggcagacgcccgaaccggcagaaa

SEQ ID NO: 45746 - RNA, 70 nt, Homo sapiens
acgcggcccaaacccgggccaaggaccccgcccagcccccgagaccgagaagcccagggcggaccgagag

SEQ ID NO: 45747 - RNA, 63 nt, Homo sapiens
cggcggcccacgcaacacgcaccgaggcagagaagaggcgaggcggcgaggcacccggcgccc

SEQ ID NO: 45748 - RNA, 81 nt, Homo sapiens
aaccaccgcgaccgagcggcagaccagcgccagcccacaggagagggcgcaggacaaaggagagcagcccagcggagcgag

SEQ ID NO: 45749 - RNA, 68 nt, Homo sapiens
agcggaggcgcgccgaagcggggcacgcccacgcaggggcaccccggcacggaccgccggcaccgggg

SEQ ID NO: 45750 - RNA, 73 nt, Homo sapiens
gcaggacccggcccagggaaaagggcggcaagcccgccgggccagagcaaacagaacaaaaacaagaaaagcg

SEQ ID NO: 45751 - RNA, 78 nt, Homo sapiens
ggccgaaagaaacacaagacgaacgggagaacagcagcagcccacgaacagaaaggggaccagaccccacaagaaaac

SEQ ID NO: 45752 - RNA, 98 nt, Homo sapiens
agggggcccgcggcccagcccgggcgcggggcccgcccccccgggagccgggcgcagaaagccacagagagggcggcggcgaggggagccgagcagac

SEQ ID NO: 45753 - RNA, 74 nt, Homo sapiens
aaaaaacggcagggaagaggcgagacagaagagagaggaagaggagggggaagcacagagagaccaaccacccc

SEQ ID NO: 45754 - RNA, 92 nt, Homo sapiens
aggccgccgggcgccccgggcgggcgagcacaggcacacacaccggggacgagagccccggcacaaacggaccaccagaaagcaccccacag

SEQ ID NO: 45755 - RNA, 79 nt, Homo sapiens
agacaaaggcaccaggccaccacagaaacaaaagcaacaaagagggcggaggcagaacaccacgaagccacgaacgaac

SEQ ID NO: 45756 - RNA, 70 nt, Homo sapiens
caaagaagaaacacaaaaagagaagaacaggcccagaagaacagacgaccggaaccaggcgcccagccaa

SEQ ID NO: 45757 - RNA, 71 nt, Homo sapiens
ccacccagagcgcacggcgacgccccaggggaaaacccccgggaccagaaccaaaaccagaccaggagacc

SEQ ID NO: 45758 - RNA, 74 nt, Homo sapiens
aacccacccaccacacaacaaaggcaagaacggaagcacgggcggaggaaagcacaagcagagcccccgcagag

SEQ ID NO: 45759 - RNA, 67 nt, Homo sapiens
gaagagggggagggacaagaggaccaaaccggccaggcgagagcaaaagggccaccacaggaagccc

SEQ ID NO: 45760 - RNA, 101 nt, Homo sapiens
accagacgccagcgggacgaggaccgagaccgcggccgggaccgaggacaagcagaccggaagaccgacggaagaccacaccccgagggagcccaggacac

SEQ ID NO: 45761 - RNA, 78 nt, Homo sapiens
aggcggccgcacaaagcggaaacagagagcaaggagaagcgagaggcgcagaaagaggaccggccagagcgacgacac

SEQ ID NO: 45762 - RNA, 76 nt, Homo sapiens
cggcgccccagagcggacgagacccgccccaggcaaggaacagagccagagccgcagggggaggaccgcagcacaa

SEQ ID NO: 45763 - RNA, 89 nt, Homo sapiens
acgggcggcccgcgcggaggccgcgagaccgcagaaggagcggagcggcagcagaaggaggcgaggaaaaccaccacacaggggaaaca

SEQ ID NO: 45764 - RNA, 69 nt, Homo sapiens
gaccccggagcccagaagacagagggcgagccccagagaaagaaagcccaagaggagaaggagaggaga

SEQ ID NO: 45765 - RNA, 80 nt, Homo sapiens
gggaaaggagaggacccggagccgaacggccgcaacaagagagaccgcggaagagcggaccggcgacaccacagcggccc

SEQ ID NO: 45766 - RNA, 66 nt, Homo sapiens
gacgcagggcgcccccggcagagaggcggaccccgcgggcgcgcggcccgaacccagcgagagggg

SEQ ID NO: 45767 - RNA, 83 nt, Homo sapiens
cagggaacgacaccgacccgaagagccggacccggaacagcaagaacgcaccgaaccaggagggagagcacggcgcaccaacg

SEQ ID NO: 45768 - RNA, 67 nt, Homo sapiens
cccacagacagaccgaagccaaagaaacgccaaccgcccaaaaacccagagcagcagcaagaagaga

SEQ ID NO: 45769 - RNA, 78 nt, Homo sapiens
ggaacacacccaagagggaaacccccccacgagggaggaccacaggccacccagaagggccccaccccaaggggaggg

SEQ ID NO: 45770 - RNA, 76 nt, Homo sapiens
gagagagcaggccggaccccaggaagccaagggaaagggaagcgagagccaccccccgcccagcggaaaccgaaga

SEQ ID NO: 45771 - RNA, 72 nt, Homo sapiens
gcagccgccacgaaaaagggcagaaagccgaagggaagacggaccaggcaaaagggccagaggggcacgccc

SEQ ID NO: 45772 - RNA, 92 nt, Homo sapiens
ggaagggggcggccacgaccaagaagaagccgcggacccgcggccagaaagacacgagcgcggggcagggaacagaagacccgggaaccagc

SEQ ID NO: 45773 - RNA, 71 nt, Homo sapiens
aggacaaaggaagccaagcaggaggcgaaggaccacgagaccgcgaaacacgacggcggggagagaaaacc

SEQ ID NO: 45774 - RNA, 40 nt, Homo sapiens
aagggccgaagccaaacacagaacggcacaaaaccacaac

SEQ ID NO: 45775 - RNA, 77 nt, Homo sapiens
caggccaagggaacacggaaaacagccaacagcgaggaagaacagaaaaagaacaagacgagcaaaaccaccaggcg

SEQ ID NO: 45776 - RNA, 75 nt, Homo sapiens
gaggaagaggggccaaccggaccgcccccaacaaccagaggggacaacaccacagaagaagaaaagaacgcaggg

SEQ ID NO: 45777 - RNA, 45 nt, Homo sapiens
gagcggaaaagaccggggagggccacgaccggcgcgcgcgaaccg

SEQ ID NO: 45778 - RNA, 74 nt, Homo sapiens
accgccccaaggagcagccgcagccgccacgggacagccaacaccagaccgagcccacgcgcgccacagggagg

SEQ ID NO: 45779 - RNA, 69 nt, Homo sapiens
cggggccaaaacagacccacaacaggaaagaccacagcaagaccacgcccccagccgggggaccaggcc

SEQ ID NO: 45780 - RNA, 72 nt, Homo sapiens
gccgcgaaaggcaacaagacaaagaaaccagccgagcaaccaaaccaaaggcggcacccaccagcagcgcgg

SEQ ID NO: 45781 - RNA, 67 nt, Homo sapiens
gagcgcacgggggaaacaagcgaaaaacaggcaaggggaaggagcaacaaccacaacgcccgggggg

SEQ ID NO: 45782 - RNA, 73 nt, Homo sapiens
cagagcacgggcccccggacgcgagcccgcccccgaaaccaaaggcaagaaccggagcaggagaaaagccgga

SEQ ID NO: 45783 - RNA, 41 nt, Homo sapiens
accggacacgccgagcggcggcgacggcggcgcgaggaccg

SEQ ID NO: 45784 - RNA, 69 nt, Homo sapiens
agaaggaccaagaaccaggagaccagaaagcgggcaacaccaaccgagacgcgagagcacaaaacacaa

SEQ ID NO: 45785 - RNA, 69 nt, Homo sapiens
acgaggggaaggggaaacccaaacaacacccgcaccgggcgccccgcagccgcagaacaagaacggcag

SEQ ID NO: 45786 - RNA, 57 nt, Homo sapiens
gcaccgcacaacaagaggccggcggggcgacagcccggggacccagggaaagggacc

SEQ ID NO: 45787 - RNA, 81 nt, Homo sapiens
gagccagaggcgccagccgcgaaggggcggcgcgcgccgggcgccggaggaaaggaagccgaagacagaagaggagaacac

SEQ ID NO: 45788 - RNA, 73 nt, Homo sapiens
ggcagccagccacagcccggcagcagcagaggccagccaggaaagcgggagcgcgggagcaaaggaaagaaga

SEQ ID NO: 45789 - RNA, 74 nt, Homo sapiens
accagaagccccccaagccaggccaccccccccacgcaacgccgaacggaagaaacaagccagacggagcaacg

SEQ ID NO: 45790 - RNA, 72 nt, Homo sapiens
gacgggaggggagggaccagaagaagaccgacagccaacagcgggcgccaacacaggagcggccacgagaag

SEQ ID NO: 45791 - RNA, 76 nt, Homo sapiens
cgacccaccggagcagcgcagaagcgagcggccagagaaaccccaccacgcggcaggggccgccgaggaaaaagca

SEQ ID NO: 45792 - RNA, 78 nt, Homo sapiens
cccccgcggcggcagccacagagcgcacagcgaggaggggggcgcgcagcccggggaccccccgccccagcaggcacc

SEQ ID NO: 45793 - RNA, 43 nt, Homo sapiens
acacgacccccggcgggcacgcggagacccccccagagcggaa

SEQ ID NO: 45794 - RNA, 98 nt, Homo sapiens
gaagacaggccacccagcggggagcacggcgagcagccaggccaggagaggggcgacagcaagaaggagccagcacagaggcaaaagaaccaacaaag

SEQ ID NO: 45795 - RNA, 75 nt, Homo sapiens
gagacggaggcgaggcaaacggggggcgcggagggaccagcgagcgggaagacagaccgcgaggccacacccaag

SEQ ID NO: 45796 - RNA, 63 nt, Homo sapiens
ccagcggacgacccgcgggacagaaaggaagggaaacaggaggaggccgcggaagaccgacaa

SEQ ID NO: 45797 - RNA, 76 nt, Homo sapiens
ccggcccgaaaggagagccaccacaggaaaccacgcgagcagggaaagcaacccagaccagagaaaccacggccag

SEQ ID NO: 45798 - RNA, 81 nt, Homo sapiens
caaggagccgcgaggcaccgccccagccgcacccaagccccagcggggcccgcccgaagaaacagagaggccaaaacaacc

SEQ ID NO: 45799 - RNA, 81 nt, Homo sapiens
cgaggggacgccgcccgccgcccgccgcaggccacccgggaacggaggagggccaaaagaagcaagggaaagaccaggagc

SEQ ID NO: 45800 - RNA, 77 nt, Homo sapiens
agcagaaggacaaccagggaaacacggaaaaaacaagcccaaacgggcagccagagacgcgcacgaaacgacgaaga

SEQ ID NO: 45801 - RNA, 68 nt, Homo sapiens
gacagaaaagccggcagcaaggaccaggacaacaccacacagcacggaagccaaagggcaaaacggag

SEQ ID NO: 45802 - RNA, 69 nt, Homo sapiens
aagcacccagaggagaaaagcccaaagcgagccaaagggccggagggagagaaagaacaaagacccgac

SEQ ID NO: 45803 - RNA, 63 nt, Homo sapiens
gacaagacaaaaacaccccagaaacagaggaagaaaaaagcgggcacgggcagcacaaagccg

SEQ ID NO: 45804 - RNA, 71 nt, Homo sapiens
aggggagggagcagagccgcaagggccaaagcccaagaacgagaggagacgcgccggcaacacggggaagc

SEQ ID NO: 45805 - RNA, 73 nt, Homo sapiens
cgagaaagggcggggaggggacgaaccaggcagcccaaagggagcccggagcaaccaggagcaaaaggcaaaa

SEQ ID NO: 45806 - RNA, 55 nt, Homo sapiens
gccaagaccgccagcaaaggaagacgaggcaaggccccagcccaagcgggccgac

SEQ ID NO: 45807 - RNA, 60 nt, Homo sapiens
cagaggacccgaaaagcgaaaagaaacagagaagaggcggccacccacgagccgacggca

SEQ ID NO: 45808 - RNA, 72 nt, Homo sapiens
gaccggccgcgacagcgaacagcgcggccgcaggcacgagaagaagaacagagacacgcaaaaaacgaagaa

SEQ ID NO: 45809 - RNA, 73 nt, Homo sapiens
cccaaaaggaaacagagaaagacagcaaagaaaaggagaagaaaggaaaaaaacaaccccgggcaccccgcca

SEQ ID NO: 45810 - RNA, 83 nt, Homo sapiens
gaacaaggaacaggaaagagggaacgccaaccaagggcagagaaagcaagagacgcaaccgaacgcagagcggagaacggcgg

SEQ ID NO: 45811 - RNA, 80 nt, Homo sapiens
agcgggcaaagagaccccagaaccgcggcagaaggcggagagaaaaaacagagggaggcaaggaaaaggaacacaagaac

SEQ ID NO: 45812 - RNA, 85 nt, Homo sapiens
acaccggagcgcccagcgcgaggaggcaaaagcagaccggaaaacccaccggcaagaccacacccgaggggagcccaggacacca

SEQ ID NO: 45813 - RNA, 71 nt, Homo sapiens
ggagaggaacgaacccagaccggccgacaccccaccagcccagacaaaggaaaaccagagacccagacacg

SEQ ID NO: 45814 - RNA, 74 nt, Homo sapiens
gaggacagcggaagaaaagaccagacccagcagagggagagggggagaaagccggggagcgcaccggcgaagag

SEQ ID NO: 45815 - RNA, 77 nt, Homo sapiens
aggccgcggccagggcggcgccgcgccccccacggagggccaggggaagaaggaagaagaacaggaagaaggaaaga

SEQ ID NO: 45816 - RNA, 70 nt, Homo sapiens
aagcaggcgggcaagccgggcgacagacccggcgaagaaagcaggacccaggcagggggagccaaggaag

SEQ ID NO: 45817 - RNA, 82 nt, Homo sapiens
aaacaacgacaacgagcacagcagccggcccagcccaccccaggcccccccagcccagcaccaccagcagaaaacaacagag

SEQ ID NO: 45818 - RNA, 69 nt, Homo sapiens
gaccgcgcgcccacgccgcgccagacagaaacgaaggaggcccaaccacaaaaggagccgacggaaccc

SEQ ID NO: 45819 - RNA, 76 nt, Homo sapiens
gggcgcggccggaccgcagccgcaagcagaccagccagccccaagcagccgcacgacaaagaacgaagacaagagc

SEQ ID NO: 45820 - RNA, 78 nt, Homo sapiens
ggagccccgcgagggcgcgccggggagcggccccagccccgcagccccgcccgccgggcccgcgggaggcgccaggcc

SEQ ID NO: 45821 - RNA, 76 nt, Homo sapiens
gaggggaagggcaggaggaggaggaggggcccggcggcggggagaaggacagaaaccgaagggagaagagccacaa

SEQ ID NO: 45822 - RNA, 74 nt, Homo sapiens
aaaggagagaagccaagcaaggcgcaggaggaggcaacaagggcacgcgaaaaaagcccaggacccacccggca

SEQ ID NO: 45823 - RNA, 113 nt, Homo sapiens
gcccggcacaagcagacggcaaaggcaagagaacagcagcgccgcccgccgacagccaggcccgggagaagggagaagggccggagagcagagaccaaaacgggacaccaagc

SEQ ID NO: 45824 - RNA, 88 nt, Homo sapiens
gccaaaaacagggaaagggccagcacaggagagacagggaagcgaccaaggccaaacacaacacccggagccacggggaagaagagca

SEQ ID NO: 45825 - RNA, 82 nt, Homo sapiens
cgagggagggccgagccagccgcggccggaggagcccccaggccacagccgcgacggaaggaaacaagaaggggaagcaccg

SEQ ID NO: 45826 - RNA, 85 nt, Homo sapiens
accccgccgggcacaggaaagggggccacggacggggccgagcacaaccacccaccggacgggaccggaccccagggagaaccag

SEQ ID NO: 45827 - RNA, 74 nt, Homo sapiens
gacacaacaacagaggcagcaacgaagcccccggggagagacagacagagggacacagagaggaagaaaggagg

SEQ ID NO: 45828 - RNA, 37 nt, Homo sapiens
ccccgagagcggaaacagccaagaacccggccaaagc

SEQ ID NO: 45829 - RNA, 71 nt, Homo sapiens
agacaccaaaaagcaaacggaccagaccgaccaccaaaagcagccagaacggggcaacaggacacgccggc

SEQ ID NO: 45830 - RNA, 56 nt, Homo sapiens
gcaaacacaggcacgaaaaagccaggagggcccaggcgggcaggggccacgccgaa

SEQ ID NO: 45831 - RNA, 76 nt, Homo sapiens
agaaagacaccccgagagcggccgagggaagaaaccagcgcaaggcaagagggagaagacagcgaccagggaggca

SEQ ID NO: 45832 - RNA, 57 nt, Homo sapiens
ccgcgggaacgggaccaaaaggaacagcggaaggcgggagggacaagaagaaagggg

SEQ ID NO: 45833 - RNA, 74 nt, Homo sapiens
ccaggagggccacagaccaagcccgcccaggcaagagagagcacaaggagagaacaggggggcccacacgcccc

SEQ ID NO: 45834 - RNA, 83 nt, Homo sapiens
agaacaaaggaaggggagcccgggacccccgggggcgcagggacaaacagcaggggccaagaaagaaggagagggggcgacag

SEQ ID NO: 45835 - RNA, 80 nt, Homo sapiens
ccccggggaacgcccagcacaaggaacaagcacaaggaagagcccacagaaaagacccccacacgagaaggaacgggagc

SEQ ID NO: 45836 - RNA, 74 nt, Homo sapiens
cgagacccgccacacgagacccaaagacaggaccacgcaccagcagagaaggaaagcaaaccgaagcaggcggg

SEQ ID NO: 45837 - RNA, 76 nt, Homo sapiens
cgcccacgcagccggaccacagcccggagccacacaaccacaaccccaaaagagccacgcgcggaacacaacccaa

SEQ ID NO: 45838 - RNA, 78 nt, Homo sapiens
cgcggaggggcgagccagcggccaggcaaaaaccggcgccacaggcacaccgacagaacaacgagaaccagcgcggaa

SEQ ID NO: 45839 - RNA, 59 nt, Homo sapiens
caagaacaacccacccaccacggcagacaaaggccaacccaccaggacgccaccagcac

SEQ ID NO: 45840 - RNA, 52 nt, Homo sapiens
gaaagagaagcggagaagggcagaagggagcgaggcggccagggccccagaa

SEQ ID NO: 45841 - RNA, 60 nt, Homo sapiens
aagaagccgcccaggaacagacccgagcaaaggggagcccaggacaccacgaaaaggaag

SEQ ID NO: 45842 - RNA, 79 nt, Homo sapiens
gacaagacagcgcaaggcaggaggggcagcagcaggacagggaacccgggagacagcaacagacggaggaacgggggaa

SEQ ID NO: 45843 - RNA, 57 nt, Homo sapiens
cgccgcacccgcacacccgcccccccggccaggaccagcaccagggaccaccaccca

SEQ ID NO: 45844 - RNA, 55 nt, Homo sapiens
aagcagcaaacacgggacaaaaaccagaccaggggaagcgacgaggaagccaagc

SEQ ID NO: 45845 - RNA, 77 nt, Homo sapiens
gggaagaccgaggggcacaccgaccagccgcacgccgaccggcgccgggagaccggcggggacgagagccccggcac

SEQ ID NO: 45846 - RNA, 79 nt, Homo sapiens
caggcgccaccagcccggagcaccggccacacacaggacaagagcgaagccacacgcgggacgacgccaccggaagcgg

SEQ ID NO: 45847 - RNA, 75 nt, Homo sapiens
gcggcacggagacggcggcagcgcggacaggggcagaaaggggccgccccccaacgagcagcgcgcgcacaaaag

SEQ ID NO: 45848 - RNA, 70 nt, Homo sapiens
cacggaaaggaggaagaagacaccggggacagacagggcagcagcaagaagaagcagaaagacaccagcc

SEQ ID NO: 45849 - RNA, 38 nt, Homo sapiens
aaggagcagggcaaccggcggacaaggcaaaaccagca

SEQ ID NO: 45850 - RNA, 81 nt, Homo sapiens
cacaaacgggcagaaagaaacacggagacgaaaccagacagagggcaagacagagaccggcgcaagagcacccggacgcgc

SEQ ID NO: 45851 - RNA, 55 nt, Homo sapiens
ccccagccgggaggggagcgggaggaggccgccacaggggggcgacgcccccagg

SEQ ID NO: 45852 - RNA, 73 nt, Homo sapiens
accagaagaggcacacgccagacagacaggaacgagggccgacacgaggaagggcgcgcaggaacaagaagaa

SEQ ID NO: 45853 - RNA, 70 nt, Homo sapiens
ccagcgccacacgaaaccagagccgaaaaggccggccaagcaaaaaacacggccacaggaaaggaacccc

SEQ ID NO: 45854 - RNA, 86 nt, Homo sapiens
ccccgccgcccaacccccaggaagaaggagaaagggccaaccccgaagaagcaaacagaaacgaaggagacagagaagaacgacaa

SEQ ID NO: 45855 - RNA, 71 nt, Homo sapiens
ccacagaggcagacccgcagccagggagaagaccgacagaagcaccagaccaagaaggaaaacaagggagc

SEQ ID NO: 45856 - RNA, 74 nt, Homo sapiens
cgcgggccaggcccagcagggccacggccaacccgaaaaaaaagggagaggggcggaagcagaaacacaacccc

SEQ ID NO: 45857 - RNA, 93 nt, Homo sapiens
gaaccgccggaagaggcacaggaggaagcaggcggagcacccgggacacccaaccagcagccgcgcagaaccagaaacacgcgcgaaagaaac

SEQ ID NO: 45858 - RNA, 70 nt, Homo sapiens
agggagcagcaggaaggccggcggaacaagccgacggccaaggaaaggacgcagacccgaaagcaaacgg

SEQ ID NO: 45859 - RNA, 76 nt, Homo sapiens
cgggagagaggacccccccccccccccaagaaacgaaggaggcccaaccacaaaaggagccgacggaacccagacg

SEQ ID NO: 45860 - RNA, 65 nt, Homo sapiens
cgcaagcaggcaaccgaaacagcgccacgcagagccccgccaggaagacacgccggggaacgaag

SEQ ID NO: 45861 - RNA, 78 nt, Homo sapiens
gcgacagaggagggaggaaaacaaccgagggcagagacccagcagccagcgaagccccaaggaagccgggacgcccac

SEQ ID NO: 45862 - RNA, 74 nt, Homo sapiens
gagggaaaggcccaggaaaaaggagaaagcccgaacgcgggaagaacgaagaaggacaaaaaggagaggcgacg

SEQ ID NO: 45863 - RNA, 104 nt, Homo sapiens
cggcgcgggcggaggcggcggagcgcgagagccgagcggaccagaacccagcggggccgccccacccgaggcccaccccaacgagccagccaggcgcaggagcc

SEQ ID NO: 45864 - RNA, 77 nt, Homo sapiens
gcagccccagagcgccagcagccacggcccggggcaaggcaacgaagagagaacaacaagaaggagaaagacacaac

SEQ ID NO: 45865 - RNA, 68 nt, Homo sapiens
gccgaagagaggagcggagaacacagcaaccgccaggggaaggaagcgaacgaacaggccaaaggacc

SEQ ID NO: 45866 - RNA, 74 nt, Homo sapiens
ccgcgggggaccgcgccaggcaccacagccaggcagcgcgaccaaacgaaaaaggcacagaagcgcgcagaacg

SEQ ID NO: 45867 - RNA, 75 nt, Homo sapiens
gaagggccacccaggacaggggcacccagcaggcaacaggaagaagaacccacaggggccaacagaggaaggaac

SEQ ID NO: 45868 - RNA, 74 nt, Homo sapiens
cggagcagaggacgggggggcagccaccggaagagaaaaccaagaacgacagaggggcaaaaaaaaaagccaac

SEQ ID NO: 45869 - RNA, 76 nt, Homo sapiens
cgaaccaaaggggagcggcaggacaaggaaggcaagccgggcaccagaagcgggacaaagaacgaggggcaaaaag

SEQ ID NO: 45870 - RNA, 90 nt, Homo sapiens
agcccagagcagaaagaaaccagcgacagccagcccagacgcaaaagcacgaagcaaaaccagccaaacgggggagagacaaccagagcg

SEQ ID NO: 45871 - RNA, 82 nt, Homo sapiens
gaggaggagaagggaagagcacaggagcccagaggcacaaggagagcaggagcagaagcaggagaaagacagcaaagaaaag

SEQ ID NO: 45872 - RNA, 77 nt, Homo sapiens
caccccggggggagcgagaagccaagaccagacacaccacaggagaacaagccagggaggaccaaccaggacacggc

SEQ ID NO: 45873 - RNA, 82 nt, Homo sapiens
cggcgagggacccccggacaagagggacgaaagggcacacagcgacgccagcacccaccagcccgagcagagcgccacgaga

SEQ ID NO: 45874 - RNA, 57 nt, Homo sapiens
gcggagggagagcacccaaccaagaggggcaacagacaagcacccagccagaaggaa

SEQ ID NO: 45875 - RNA, 77 nt, Homo sapiens
ggcagaaggcccgaccgccggcgccacagccacagcccggaagacagagaagacggaagaggcaaaccaccagagag

SEQ ID NO: 45876 - RNA, 76 nt, Homo sapiens
ccagaagcaccacgagcccacaacagcaggaaaccgcgacccccgcacccacgccagcagggcagccccacgcggg

SEQ ID NO: 45877 - RNA, 55 nt, Homo sapiens
cccgcaagacgggcccaccgagcaggaaccacaagcagcaaggcgccaagacgag

SEQ ID NO: 45878 - RNA, 38 nt, Homo sapiens
gccacagaggaagccaaaaggcgaagaggagaggaagg

SEQ ID NO: 45879 - RNA, 79 nt, Homo sapiens
caaaagaagagagacacaaagagcacaaaaaagcggaaaaacgagcggacaaggagggaaacggacgcagccaaaggcg

SEQ ID NO: 45880 - RNA, 64 nt, Homo sapiens
gcagcgaagaggaacagccagagaaacacccaagagacaccagaacaagcgaggagcacaaaaa

SEQ ID NO: 45881 - RNA, 78 nt, Homo sapiens
ccggaggagcggagagcgagcggcaacccggagaagaggaccaagccaaagaacaaaccagcagcaaccacaacgggg

SEQ ID NO: 45882 - RNA, 80 nt, Homo sapiens
ggcccccgacgcagcccagcggcacggagaaaggagaagacagaggagccagaccaagagacagcacaggcgagcgagca

SEQ ID NO: 45883 - RNA, 76 nt, Homo sapiens
cccaggccgcgcagaagcccagcagcaacaccccaaacagcggcgcacggggcacaacagcacagagacagccccc

SEQ ID NO: 45884 - RNA, 81 nt, Homo sapiens
ggcccacagggagaacagggcagaacgaggggaggaaagcaggcggcgaggacagcccacaagaaaaaggagagcgagcgc

SEQ ID NO: 45885 - RNA, 70 nt, Homo sapiens
acacccagccagaaccccggaacaagaaccacgcccgcaccagccacagcgcagcaaaaccaacccacca

SEQ ID NO: 45886 - RNA, 70 nt, Homo sapiens
gcccacgaggagcacagccgggccgcgcgaaggagccagcagcccaagcaagcagcgaaacaagcaaagg

SEQ ID NO: 45887 - RNA, 67 nt, Homo sapiens
ggacagaggaagaagagcggccagcaccaagacacgagggcggcgcagcaaacgagaacacaaaaga

SEQ ID NO: 45888 - RNA, 36 nt, Homo sapiens
ccccaaggcgaccgggcaaggaaccggagcaaacga

SEQ ID NO: 45889 - RNA, 117 nt, Homo sapiens
cgcccgcccgcagagaggccggccgcgcggagcacgcggagccgcccaggcaggcggagacgaggcgcaacccgccacgcaacccacgacacaaccccgcccccgggcaaggaaccg

SEQ ID NO: 45890 - RNA, 71 nt, Homo sapiens
agagggagccaacccccccacgcgcacgccgggggcgaggagacaaaaaagcccaagaggcggcaaggggc

SEQ ID NO: 45891 - RNA, 83 nt, Homo sapiens
cacagggcgcggaccgcacgagcgcgccgcggcgagccgcacagggcaacacacgcaccgcacggcccccgcccacaaagcgc

SEQ ID NO: 45892 - RNA, 58 nt, Homo sapiens
gcgaggaaaaggcggcgggaggcagagacgcccccaaagggacacgcccagcacaaca

SEQ ID NO: 45893 - RNA, 75 nt, Homo sapiens
caccgagaggcagacaagacacccgcaggccggccagccgacccagccaggcccagcaccagcacggccaagcag

SEQ ID NO: 45894 - RNA, 71 nt, Homo sapiens
ggccaccccaccggacgcaccacggcaggggcaagccgccagaaggcggacggcgccccccacagaacacc

SEQ ID NO: 45895 - RNA, 43 nt, Homo sapiens
cggggcggcgaagcggaggccggagggcagagcggcgggaaac

SEQ ID NO: 45896 - RNA, 79 nt, Homo sapiens
ggccgggcggggccggggggaagaagccagagcggaaagcccacaggaagcaggagcacaagcagcaacaggaaacaac

SEQ ID NO: 45897 - RNA, 78 nt, Homo sapiens
ggcgagagccggggggaggaggccagccacccgcgggaacggcagggaccggaggcaaagaaacgggcaaccacacca

SEQ ID NO: 45898 - RNA, 76 nt, Homo sapiens
acagaggaggcgagaagccaaggccaggggcaaacagacagacaccccaaacaaagcaggcccagcggggcgaggg

SEQ ID NO: 45899 - RNA, 93 nt, Homo sapiens
gagaacgaacaggacagagagcccacaagcgcggccagaacagagacaagggcagagccaagcgccgcccgggcccaagcacccgcccagccc

SEQ ID NO: 45900 - RNA, 75 nt, Homo sapiens
aaagagaccgcagagacagccaacacggcacccacagcgcagaaaggccagacagggaccgaacgacacaacaca

SEQ ID NO: 45901 - RNA, 52 nt, Homo sapiens
gaagcggaaagcagaagcgcgcagcaacggcggagaccggaagggagagacg

SEQ ID NO: 45902 - RNA, 80 nt, Homo sapiens
acaaaagagaagaaccaaaacggccccgccgccccagcggccagcccccaacacgagagccaaggaggagcaggaagggc

SEQ ID NO: 45903 - RNA, 87 nt, Homo sapiens
gagacccgagcagaggccgagaggcgggcaaagggagaaaaccacgagaccagaagccaccacaaagcgacccaggccgccgccccg

SEQ ID NO: 45904 - RNA, 85 nt, Homo sapiens
cccccccccgggaccgcgcagggcccgaggagcggggcgggcaggaggagggggaagaaccccaccagggccccgcggggcacag

SEQ ID NO: 45905 - RNA, 81 nt, Homo sapiens
gcggcccccggaccgcaaggccgcccccccggagggcgcggaggcggggccaggagcaggacacgagacacaggccgcacg

SEQ ID NO: 45906 - RNA, 71 nt, Homo sapiens
ccagagccaacagacccacaaccgagcaaagaagagacgaaaaacccggagaagaaccaacaacggaaaac

SEQ ID NO: 45907 - RNA, 96 nt, Homo sapiens
agagaggcgagcgcccggaggggagagagcggaggacagccgagaggaggaaggagggccccggagcagccacaccaccgaggccccacccagcac

SEQ ID NO: 45908 - RNA, 58 nt, Homo sapiens
gcagaggggggaccccggacggaccggcaggaccgacaagacggaaaccgggaggggg

SEQ ID NO: 45909 - RNA, 71 nt, Homo sapiens
cagccgagaagaggcacacagacaccgaagcggcaccagccggaaccaccggccggagagcgcgccacaac

SEQ ID NO: 45910 - RNA, 79 nt, Homo sapiens
gaaagcccggagggcgagggaaaaagggcgacaagagacacgagaaccccagaacagagaacagaggaagaagcaagag

SEQ ID NO: 45911 - RNA, 74 nt, Homo sapiens
ggaggccgggaggaagaaaaaggaagaacagcccgcccgcagaaccaaagaacacgaaaagcagagaaacccga

SEQ ID NO: 45912 - RNA, 47 nt, Homo sapiens
ccgacgcccgcgccccccagcaagaacggccgagcgaccaggagagg

SEQ ID NO: 45913 - RNA, 66 nt, Homo sapiens
ggcgcgcgcggcaccaggccggagccccggcaagcagcagcaaaccggacccaggagccccaaggc

SEQ ID NO: 45914 - RNA, 62 nt, Homo sapiens
gcgagcccacaacacccccagcggccgccggccccccacgaggccgcaggagggaagcgcac

SEQ ID NO: 45915 - RNA, 90 nt, Homo sapiens
cggcgaacgcggagagcacgccagaaggcccgggcacgagcggaccgcgaagagagacacgcaggaaagccccagccacccacaaacaga

SEQ ID NO: 45916 - RNA, 68 nt, Homo sapiens
accggcagggagggaaggcaagagccaacccaaaaccaaaagacgaccccgacgcaggccaggagccg

SEQ ID NO: 45917 - RNA, 64 nt, Homo sapiens
ccagccccgagcgggacagcgcggcggggagcgacgaggcaccggagcagagcgccaccagaca

SEQ ID NO: 45918 - RNA, 75 nt, Homo sapiens
ggaaaaggaaaggacgcgacacgccagcgccccaaaacgaggacgcaaaacgggagagcagagagagagcacgag

SEQ ID NO: 45919 - RNA, 61 nt, Homo sapiens
gcggcgggcggagacaggaccgcggcgagcaagagacgccggggcccggcgccaccaccgg

SEQ ID NO: 45920 - RNA, 96 nt, Homo sapiens
gccagaagagaccacgcacaggaggcccgaggagcggccacgccccaccgggacaccgacccaagcccagcagaagccaacagacggggccgcaac

SEQ ID NO: 45921 - RNA, 81 nt, Homo sapiens
caacaacccgaggacgaaccaccccgcgccagcagcacagcacgcagcgaggagggggggaagccccgcggagggcgccag

SEQ ID NO: 45922 - RNA, 78 nt, Homo sapiens
aggagggaacggagcgcccccacgcggggggacgcccacccgggccacgcagccgccgcaaagggacgacgaagggac

SEQ ID NO: 45923 - RNA, 81 nt, Homo sapiens
gagggagaggaggcagggcccggggaagacgcagaaagaaccggaagacagaggcggaggcgccgggcgggcagagaggca

SEQ ID NO: 45924 - RNA, 39 nt, Homo sapiens
gcagcacacaccgaaacaggcacgggaggggagagagaa

SEQ ID NO: 45925 - RNA, 78 nt, Homo sapiens
cccgggggccggcaagagcaggccagaaagggggaaaaaggcaacacgaaagcgagcgaacaaggggaaagagggaag

SEQ ID NO: 45926 - RNA, 53 nt, Homo sapiens
gggaaaccaagggagcaggggagacccaaagaggcaggaggggcggcaaaggg

SEQ ID NO: 45927 - RNA, 79 nt, Homo sapiens
gagaccgggcgagcgacccaggaaggagagagagccggggccggacgagaaagccgaaggagacgacggaggagaccgg

SEQ ID NO: 45928 - RNA, 71 nt, Homo sapiens
cgcacgacgcacggcccaggaccgcacaaggcgcgcgacgggaccacaggcgaccgggaccacgcggcgac

SEQ ID NO: 45929 - RNA, 77 nt, Homo sapiens
gcagcgaccggagagcgccggggggacagacagagaggagagaagaggagacccacagacacggcagggccccgccc

SEQ ID NO: 45930 - RNA, 70 nt, Homo sapiens
agagccacccaagagacaagcaggccacgccgggccagaaaaggggaagaaagacaacacaccccgcaaa

SEQ ID NO: 45931 - RNA, 78 nt, Homo sapiens
aggagaccgggaaaccgccgaagacgaaggggggacacagcgagccacgcgccaggaagcccggccaaggagccaacc

SEQ ID NO: 45932 - RNA, 85 nt, Homo sapiens
gcggagccaccggccggcgaagacccagcaggcgaagaagcagcagcccaagagcagacaggcaggggaggaggcccaaggcaac

SEQ ID NO: 45933 - RNA, 79 nt, Homo sapiens
cgacaccgcgggccgccagacgggaagggcagaggggcgggaacaacgggccaaggggcacacacagaaggcgcggagc

SEQ ID NO: 45934 - RNA, 84 nt, Homo sapiens
gcggagcgcaacagcacgccacacaaggggagccgaaggccccaaagcgggaaagcgcaaagggaaaggggcgacgcgaggaaa

SEQ ID NO: 45935 - RNA, 75 nt, Homo sapiens
aggggaccagagaggacggcaccagccaggagagcccagccacagagcgagaaggaaaaaacagggaagagaaaa

SEQ ID NO: 45936 - RNA, 79 nt, Homo sapiens
acccacacgaggccacccagcccaccaaacacgccggaaaccccgcccacagcacgagaacaaggaccagacccaacac

SEQ ID NO: 45937 - RNA, 97 nt, Homo sapiens
gcaagagagaacaacaaaggcacaaaccgcaccacaagaagggcgggggcagggaggacccgagcagccagcaaagaaccacagggacccccgaaga

SEQ ID NO: 45938 - RNA, 77 nt, Homo sapiens
ggggggaggaggggcaggcccggcgagcaacggacccaaaaggcagcaagcagaaccaaccaaagcccggagagagg

SEQ ID NO: 45939 - RNA, 75 nt, Homo sapiens
gcccagagggcaagcgaccgaagcaaccaaaagcagcccacccaaaaggaaaggaaagcgagagcccacggccca

SEQ ID NO: 45940 - RNA, 33 nt, Homo sapiens
agagaaaaaccacaagaggcacgggaggagccc

SEQ ID NO: 45941 - RNA, 78 nt, Homo sapiens
ggcaagcgggccacgcacccgcaccaaggccaaggaggcacaaaaagaacaaccagaaggaacgcagagaccgacgga

SEQ ID NO: 45942 - RNA, 36 nt, Homo sapiens
aggcccaagaccggggggcaagagagaggggcccag

SEQ ID NO: 45943 - RNA, 90 nt, Homo sapiens
ccgggcaagcagcaggcgccgacacaggagagggccccagcagggccaccgggcggcaagaccagaaccacagcgacgcccccgcgaaga

SEQ ID NO: 45944 - RNA, 78 nt, Homo sapiens
gaccagagaaaaggcggaagaccgccaaaaaggacacggagccagaggccacaagaggaagcgaagaagaggacgccg

SEQ ID NO: 45945 - RNA, 74 nt, Homo sapiens
accgacaagcagcccgcaggcaggaggacgaaccagaaccaaccaggaccaacaaaaccagacggcaagcagca

SEQ ID NO: 45946 - RNA, 45 nt, Homo sapiens
ggagcaccggggccaccaggagggagcccagaaggaccgggacga

SEQ ID NO: 45947 - RNA, 77 nt, Homo sapiens
gaggcacggagcgcccccacaggagagacagaaacagcccgccagcaagaaaccccaaaagagccaggaaagaagag

SEQ ID NO: 45948 - RNA, 92 nt, Homo sapiens
cgaacagcacacggccggagcgagcaggcagaacacggcaggggagccaacgcaagcaagggcacccagagacagaaagggcacagaagaag

SEQ ID NO: 45949 - RNA, 72 nt, Homo sapiens
gcccagccagcccgagcaagaaagagacaacacagacaagaaaaaccaaaggacgcaaaaaagcacagaacc

SEQ ID NO: 45950 - RNA, 79 nt, Homo sapiens
gccccgcccggacggggcggacgcagcaagcggggcgcggccccaagcccccgcccgggcggacgaaagaaagaaggag

SEQ ID NO: 45951 - RNA, 38 nt, Homo sapiens
gaaccagcaccgagacaaccagcagcggggccccgggg

SEQ ID NO: 45952 - RNA, 73 nt, Homo sapiens
ccgccagacgagaaggaagagagcccacgaacccggggcaagcgcgacccaagggaggggaagcacaacagca

SEQ ID NO: 45953 - RNA, 77 nt, Homo sapiens
gaaaaggggacggagcacaaacggaggaaacgacaaaacgggaaacaaagagccccgggaaaagaaaaaaaacgccc

SEQ ID NO: 45954 - RNA, 61 nt, Homo sapiens
ccacaacggaccagcagagagacaagagagacaccccaaccgacaaagagcaccagacagc

SEQ ID NO: 45955 - RNA, 77 nt, Homo sapiens
aaacaccaagaaaaagccaaagcaagagcaggcgacacgcaggaggagagccgacaaggagcgaaccaagaagaaga

SEQ ID NO: 45956 - RNA, 52 nt, Homo sapiens
cgcagggcgcccccggccggcgcggcacccacaaagcacgggagaccgcggc

SEQ ID NO: 45957 - RNA, 49 nt, Homo sapiens
gagcgggagcgagcggcgcggcccggaccgaaggagaagaaggagaagg

SEQ ID NO: 45958 - RNA, 67 nt, Homo sapiens
acgggcagaggaaggcgggcccgaaccgaacgacgagcggagccgaaaccgggacaaagaagaaaga

SEQ ID NO: 45959 - RNA, 55 nt, Homo sapiens
ccccaccagaggaagcccccagacaggacacaagcccaaaaggcagagcgaggag

SEQ ID NO: 45960 - RNA, 74 nt, Homo sapiens
gacagaggagggaggaaaacaaccgagggcagagcagcccaacacaccggcacccgggagaaagcccgaaagca

SEQ ID NO: 45961 - RNA, 80 nt, Homo sapiens
cggcacaggaggaggggagaaaccccacccacacaggaccaaagggagacacacacgggaacgagcccgacccaggacag

SEQ ID NO: 45962 - RNA, 73 nt, Homo sapiens
aaggacgccaaggggaggcaaaccgaggaacagcagccaggaagcgccagcaggaagggaccaaagcacagaa

SEQ ID NO: 45963 - RNA, 75 nt, Homo sapiens
acagaccccacaaggagagcggcgaaagcgccccgcacccaccaagagacggaacagacaacacaaagagaaagg

SEQ ID NO: 45964 - RNA, 57 nt, Homo sapiens
ccagcccaccaaacacgccggaaaccccgcccacagcacgagacccccggggccagg

SEQ ID NO: 45965 - RNA, 77 nt, Homo sapiens
ccagcccagccacggcgacacccgagcccccgagacagccacacccggcccggcacggcgggagaggaccccagaag

SEQ ID NO: 45966 - RNA, 79 nt, Homo sapiens
cgggaccgcaggcccggaaggccagggaggaccccagacaccggagacgggaaagggagcccaagacgaaggggccacg

SEQ ID NO: 45967 - RNA, 73 nt, Homo sapiens
cccgcgcagccgcccacgggccacggccaggcccaggaggagaaagacagcaaagaaaaggagaagaaaggaa

SEQ ID NO: 45968 - RNA, 77 nt, Homo sapiens
aagagcacagaacgaacacgcacagaaaggcagggagcacgcgggcaggcagcccagcaaacccaggcaagaacgga

SEQ ID NO: 45969 - RNA, 67 nt, Homo sapiens
caacaaggagcaaaaggaggagaggaggacagacaaaaggaggcaagcacaagaagccccgaaacac

SEQ ID NO: 45970 - RNA, 53 nt, Homo sapiens
gagaagagccacgcaacaggacagcgccgcccgggcgcaggcagggcaccacc

SEQ ID NO: 45971 - RNA, 75 nt, Homo sapiens
ggaaccacaaccccaccaggccaaagagaaagagaaaggagagcaagagaaccgggcagaagcacacaccagcac

SEQ ID NO: 45972 - RNA, 86 nt, Homo sapiens
gcacaaggacaccggagccggagccgcggaaccagagccaggccccggggccccagcggcaccagcggagaccacgggagccgcgc

SEQ ID NO: 45973 - RNA, 80 nt, Homo sapiens
gcgccgcgcgggagagggccaccgcccgccacccgcgcgccgccgccgaggagaaaggggccagagaacaagcccagaca

SEQ ID NO: 45974 - RNA, 92 nt, Homo sapiens
cacccaacagagagggcaaaaagcgaccacagaaaagcccaccaggagcagaaccgaacggaagggaggaaaaaaaggccaacaagcacaaa

SEQ ID NO: 45975 - RNA, 83 nt, Homo sapiens
aaaaagaggaaagggacgccggggccgggccaggagcagagaggaccacccgcacccaggggacgcacggcccaaccccgagc

SEQ ID NO: 45976 - RNA, 64 nt, Homo sapiens
agccagaaggaagaggaggacacgacccagggcgcggggaaggcacgcggccaaagggacgcaa

SEQ ID NO: 45977 - RNA, 85 nt, Homo sapiens
gaccaagagagaggagcaaagagaagcagcgcgcagaaacagccagcaaagggggagagcaaaacggcggaggccgacgagcggg

SEQ ID NO: 45978 - RNA, 73 nt, Homo sapiens
gcggcgcagggacccgggacagcggagaggaaccaccgcggccaaagagaaacggagaaagcaccgaaagaaa

SEQ ID NO: 45979 - RNA, 111 nt, Homo sapiens
agcacccgccaccaagagaaagcgggacagaggagcgggcagcaagcggaaacaggagcccaagggggcacaagaccacaagggacgccagcgcagcaggaggagaacaca

SEQ ID NO: 45980 - RNA, 90 nt, Homo sapiens
caaagcccccacgcccagccaggagcaccgccgaggacccagcacaccgagggcacgaacgagacacgccgggcgcgacccaccggccgg

SEQ ID NO: 45981 - RNA, 86 nt, Homo sapiens
ccacaaccaagagaaacaaccgggcggccgccgagcccgagccaggagcacagagagggagggggaagagcagaagagagaaaaaa

SEQ ID NO: 45982 - RNA, 72 nt, Homo sapiens
gcggagccacccagcaacgccaccagcagccacaacagacagaacacccccgcggggaccggaacggggagc

SEQ ID NO: 45983 - RNA, 88 nt, Homo sapiens
cgacgcggcccgccggccccagggcccccggccgcgccccaccacacgccgaaagcccaagcgcaaaaaaaaggccccaacaaaacac

SEQ ID NO: 45984 - RNA, 80 nt, Homo sapiens
accgaaaaagcgcgaagcgccgaaagcaagaccaaaagagaggcaccgcggaacacaagagggaagcccagaggcacggg

SEQ ID NO: 45985 - RNA, 82 nt, Homo sapiens
agcgccggaagcagcgagggaccagacgcgaaggacgccggccaaacccaggacaagggaggaggacaggagaacgggcggg

SEQ ID NO: 45986 - RNA, 33 nt, Homo sapiens
gacgaggacacagcgccaaaaggcagcaaaggc

SEQ ID NO: 45987 - RNA, 77 nt, Homo sapiens
gacccgacaggaagcgaagcaagacaggacaagaagaccccaaaaggacaagaagggcagagaagccagaacggaga

SEQ ID NO: 45988 - RNA, 78 nt, Homo sapiens
ccgagcacacaagaccgggaaggggaacggggccccaggaccccacaacaccagaacaaaaggcagagccgccgacaa

SEQ ID NO: 45989 - RNA, 56 nt, Homo sapiens
aagccaggagagaggagccaagccagacagacacagcacagcagccacgaagagca

SEQ ID NO: 45990 - RNA, 56 nt, Homo sapiens
gaggccccccagccacgccgacagccgcagaacggaaacagcagccagaacggggc

SEQ ID NO: 45991 - RNA, 98 nt, Homo sapiens
gagaagcccgaggcgcaggggcggggaggagacggcggaaaacggagagacggggagaaagcgccggagaaggacaggccgcaaccggaggaagcacc

SEQ ID NO: 45992 - RNA, 70 nt, Homo sapiens
gggaccagagcaaggagaggaacggccaaaacgggcaaaagagacacagcagaccccaggagaaaagagg

SEQ ID NO: 45993 - RNA, 81 nt, Homo sapiens
ccggcgccccgccggagaccaccgaggggacgccaggggcaggggcgggcgcgaggcgaaaacaggagacaaagaacagaa

SEQ ID NO: 45994 - RNA, 35 nt, Homo sapiens
caaggcaacgaagagaggaaaacagcaagagagca

SEQ ID NO: 45995 - RNA, 79 nt, Homo sapiens
ggggagagaggggcgggcgagcagaggggaagcggcggagcaggaggagggcgaacccggcgggcccagagcaagcccc

SEQ ID NO: 45996 - RNA, 67 nt, Homo sapiens
aacagaaaaaaaagcgccacagcgaccagccggcgaccccacaacacacaaggaagagagaagaagc

SEQ ID NO: 45997 - RNA, 70 nt, Homo sapiens
acgcgcaacaaaacccacccaacaagggacacaccggaagacgcaacacaggccgcgagggggcaccgaa

SEQ ID NO: 45998 - RNA, 73 nt, Homo sapiens
cggcagccccgccccggaggcccacccaagccggcggcaaggaggaggcacccccaggagggacagcagaaag

SEQ ID NO: 45999 - RNA, 66 nt, Homo sapiens
aagcagccccagacaagccaaaaacagcaaaaacccgcggccaggccaccgggagggcagaggcca

SEQ ID NO: 46000 - RNA, 68 nt, Homo sapiens
aaacacagggacgagccaccagaggggcccgggcagagggaaagcagaggacggaacaacccggggga

SEQ ID NO: 46001 - RNA, 78 nt, Homo sapiens
acccccagcccaaacccggaaacccagcggcccagccgggccccggagcagacacagcccaccggccgagccccaccg

SEQ ID NO: 46002 - RNA, 82 nt, Homo sapiens
cgacgccccggcgcccccccaggccccgcgccgcgcgcccaagccggcggacggcaggccccaggaggcgaaaggaagaaag

SEQ ID NO: 46003 - RNA, 69 nt, Homo sapiens
agaaggaccaagaaccaggacaccaacaggaaaaggaagccagagacacgaggagaaagccccaaacca

SEQ ID NO: 46004 - RNA, 76 nt, Homo sapiens
gaaaccgggaaagccaccgaaaagacaacaggcacaaagagagaaggaacacccacagggcagacagagaaagaac

SEQ ID NO: 46005 - RNA, 82 nt, Homo sapiens
gagaaaaccagaccccacccaaggaaagagcaggaggaggcggaggacagcaccaggggcaccgccaagcaagaccacaagc

SEQ ID NO: 46006 - RNA, 79 nt, Homo sapiens
cggacacgccgacgagcgaagaagcggaggcgcgacccaacagcacgcccccaagaaggcggaggcagcggcggaccgg

SEQ ID NO: 46007 - RNA, 64 nt, Homo sapiens
gggacaccaagaaagaacggcggcgacggcggcgcgaggaccgaccgggcccgcggacgaagaa

SEQ ID NO: 46008 - RNA, 80 nt, Homo sapiens
aagcccacacaacccgaccaccggagaaccggggcgcaccgccaagagcggggcagcaaaaccccagaagaggcgaaccg

SEQ ID NO: 46009 - RNA, 61 nt, Homo sapiens
aagccgacaaccccagaaacagagccaccaaggagccaagaacccaaaacaaagaaaggag

SEQ ID NO: 46010 - RNA, 70 nt, Homo sapiens
gacgcagggcgcccccggcaagagagagaagaagccggcagcccggcccaggccgagaaaaaagagacag

SEQ ID NO: 46011 - RNA, 69 nt, Homo sapiens
gcccccaagagcgggaacagaagggaccagcgcaaacggagaacagagcgacaaaggaaaacagaccag

SEQ ID NO: 46012 - RNA, 73 nt, Homo sapiens
gaagacacaaacagcagggagaagagacaacaagacaggcaaacgccggaagaacacagagggccaagagcga

SEQ ID NO: 46013 - RNA, 75 nt, Homo sapiens
ggacagagcagaacaaaacccgggggacgaggagcgccaggaaagaggcagagacgaagcagaagcgaggcagac

SEQ ID NO: 46014 - RNA, 69 nt, Homo sapiens
gcccccagccgcagccacaacaccggcaggaaccaccaggacagaggaagggaagagaagaagaccagg

SEQ ID NO: 46015 - RNA, 63 nt, Homo sapiens
cgcaccccggaccaccccaccagagccagacaacaggcacaaagagagaaggaacacccacag

SEQ ID NO: 46016 - RNA, 80 nt, Homo sapiens
gaacggcacgcggcggcgggcagacagagaaccgccagcagagaggaccaggaaaacagaaggccagagcgccaggggca

SEQ ID NO: 46017 - RNA, 63 nt, Homo sapiens
gggcaaaccggcaggcgcccggacacagaagaggacagacccgaagaagcgcagcacggaagc

SEQ ID NO: 46018 - RNA, 94 nt, Homo sapiens
cgcaccaaccgcccgggacccagagcaccccggagcccacagggggcacaagcccaggaaaaacagaacgagggcagcgcaacccacgaaggaa

SEQ ID NO: 46019 - RNA, 74 nt, Homo sapiens
ggcaaaacgacgaccaggaagaacggagcacgacagaaacacagccgcaggccagcaacagaagaaagcaagca

SEQ ID NO: 46020 - RNA, 61 nt, Homo sapiens
ccaaggcacggggcccacggaagacaaaacgccccccacaaaggcaccagccaggccagca

SEQ ID NO: 46021 - RNA, 54 nt, Homo sapiens
gcgggagagggaggagcccagaccgggcgacccgccgaaaaagaccagaaggcc

SEQ ID NO: 46022 - RNA, 105 nt, Homo sapiens
gacgccgcacggcgagccgggcgacagcaacgcggccgcggcaccgcccaagggagacagcaagagaccagaagccaaaagacagagccagggaacgcagaggaa

SEQ ID NO: 46023 - RNA, 52 nt, Homo sapiens
gcgccggcgcgcacacaccacgggcgaggcaacgacaccacgccacccaaga

SEQ ID NO: 46024 - RNA, 79 nt, Homo sapiens
cccagcgaccccaagcaaaccggggagcccggggagcaagaagggaccacaggaccacaccagaaaccgcaaagagaca

SEQ ID NO: 46025 - RNA, 77 nt, Homo sapiens
ggcacgaagaggcggcgcgaggacgggcccgagcgcgcagcccagacccacgagaaacgcaccgcccagccgaaaac

SEQ ID NO: 46026 - RNA, 78 nt, Homo sapiens
gcagaggagacaaaccggagaaggagccaagaaagagaagcgacccacagggcagaaagacccgcccgcagaggaaac

SEQ ID NO: 46027 - RNA, 52 nt, Homo sapiens
gcggaccgagagcgcgaaacgcacgagaagaaaagaggaggcgagcgggaac

SEQ ID NO: 46028 - RNA, 57 nt, Homo sapiens
ggccaagcaacaacaggcccacacaggaaccacccgaggcggaaaccacagccacga

SEQ ID NO: 46029 - RNA, 71 nt, Homo sapiens
gagaaaaaagagcagcgaggcgaaagcaaccacaggacaaacagaagacgaaaagaaacccagacggcaaa

SEQ ID NO: 46030 - RNA, 58 nt, Homo sapiens
ccggcggcgcccggaaggcgcgcccaaaagcacggcagacacaccgaccagaggaagg

SEQ ID NO: 46031 - RNA, 52 nt, Homo sapiens
gagccaggcgaacagaaagcacaagcaggcgggcgccacggaaaggagggcg

SEQ ID NO: 46032 - RNA, 73 nt, Homo sapiens
aaaaggacgcagcgacaagggaaacacaaagaagacaccagaagggccagcaccacgacaacacggcgacaga

SEQ ID NO: 46033 - RNA, 54 nt, Homo sapiens
ccgcggccaaggagccgccaaagccagacgagaaaaaccggaagggaaacccgc

SEQ ID NO: 46034 - RNA, 78 nt, Homo sapiens
cgaaaaaagaaacaacacagagagagccaaaggagcgcagcaggccgaaaagaggaagaccaggcgggaggagggaaa

SEQ ID NO: 46035 - RNA, 78 nt, Homo sapiens
agcccggcacagcccggaccgaaagccgcgccagagcgagacagggcacagcaacacaccggggccaggacaaagagc

SEQ ID NO: 46036 - RNA, 72 nt, Homo sapiens
caggacacacaagcacaacaacaaagcaaaagccaacaccaggagcaacagagaaagaaccagcaagaagcg

SEQ ID NO: 46037 - RNA, 54 nt, Homo sapiens
aaacagggccaaacaagcaaccacacgcacagacgccgggaccggaaagcagca

SEQ ID NO: 46038 - RNA, 68 nt, Homo sapiens
aaggccggagacaccagcaggggggggcggaggacgccaccccgggcacccggccacacccccccggg

SEQ ID NO: 46039 - RNA, 84 nt, Homo sapiens
aggaagcaacccaagacgcaccggaggacgcaccaggacgccgagaggagcaagcgagagaccgagaggcccaaggggaccgga

SEQ ID NO: 46040 - RNA, 71 nt, Homo sapiens
acagaaggaacgcagaaacacaggaccccccccaacgagaaaagccagaccgggacaaggccgccccaagg

SEQ ID NO: 46041 - RNA, 80 nt, Homo sapiens
gccgaccccccggcgccgcgccggcggcgggagcccacaggaccacccccaccaggacagaggccccaaccaccacaacc

SEQ ID NO: 46042 - RNA, 59 nt, Homo sapiens
accccccggcgccgcgccggcggcggcacggaaagcaggggaagacaaccggacccaga

SEQ ID NO: 46043 - RNA, 72 nt, Homo sapiens
acgcagggcgcccccggagaacacaaagaacccaaacgaaaggaaaaggggacccaaacaaaagaagaaaaa

SEQ ID NO: 46044 - RNA, 76 nt, Homo sapiens
cccggaggaaacagaagaaaagaagcgcagaagaaagacgcaagcagcaggcgcaaaaacgaacccacaaccgaac

SEQ ID NO: 46045 - RNA, 76 nt, Homo sapiens
ggacccagccccagaaggacacagggcccgggagcgcacggggccgggccgccgcgggcaaggaggcacgggcccg

SEQ ID NO: 46046 - RNA, 70 nt, Homo sapiens
acgacagcgccacccacagacggcaaagaaagggacacagagcagaccagcggagcagccaggagagcaa

SEQ ID NO: 46047 - RNA, 67 nt, Homo sapiens
ccgccccacgccacagaggcacacagagaaaaaaagggaacaaaacacagcaagcagacaaaagggg

SEQ ID NO: 46048 - RNA, 71 nt, Homo sapiens
gcagggcaaaggggggaagaacaagggacaccaagggacccaggagcgaaaacgagcaaaagaaacagaca

SEQ ID NO: 46049 - RNA, 67 nt, Homo sapiens
gcgccgcgccaggccccagggcgagcacagcacacaaggaccaccaagcaggacaggagagacaacg

SEQ ID NO: 46050 - RNA, 75 nt, Homo sapiens
agaggcggccgcggcgggggcccgcagagggaaaagaacgggagaaacagggagaggcgaaaaccgcaggaggca

SEQ ID NO: 46051 - RNA, 85 nt, Homo sapiens
agagcagcgcaccaccgcagcggcgccgcgggcacggcgaggggggcggccgcccaccggcagccgccgcaaagggacgacgaag

SEQ ID NO: 46052 - RNA, 82 nt, Homo sapiens
gcccgcccgccagccggcccgccggccgccgcaggaagggaccacagaccagcacgccggcgccacgaaccgagcgacagga

SEQ ID NO: 46053 - RNA, 66 nt, Homo sapiens
cgggcggagcggcgagagcccccacggaagagccacgaacccccgaacaaggagccgacgggccag

SEQ ID NO: 46054 - RNA, 75 nt, Homo sapiens
agggacgcccccgaacagacaacccaaagggagggaccaccaggagcagcggaacagcccccgacagcgcccggg

SEQ ID NO: 46055 - RNA, 74 nt, Homo sapiens
gaggccagacaggacaaccagcgggccagacgcagccggaggcgaagccaaaagaagcagcaccggagagaagg

SEQ ID NO: 46056 - RNA, 67 nt, Homo sapiens
ccccgaaggcgggaacagaacgacacaggacaacagaaagaaaacagacgagcaaggaagcacgaag

SEQ ID NO: 46057 - RNA, 76 nt, Homo sapiens
cgaggggccggagccggaacccccaacccaaacggaggagaggaacccggagcgcacaacggagaaaccggcaccg

SEQ ID NO: 46058 - RNA, 75 nt, Homo sapiens
aaacaacccagaacgggacaaaagagagcagggacgagggcccaggaacagcagcgggccaaggaaacagggcac

SEQ ID NO: 46059 - RNA, 66 nt, Homo sapiens
ccaaaccagggacagggggccgacgcaggaaaggcaaacagcaccaagggaaaggaaagccagagg

SEQ ID NO: 46060 - RNA, 80 nt, Homo sapiens
ggcccggaacccccggcagcgggggcacccgaggaggaagagggcagggcccacggaaagaagggaaacccggggagaaa

SEQ ID NO: 46061 - RNA, 86 nt, Homo sapiens
caggagggaaagcagcgacggcggcagcggccggagccgggccgggcagcagcagggcgccgggaccgccagcagcagccgaaaac

SEQ ID NO: 46062 - RNA, 74 nt, Homo sapiens
agaacaaacgaggcccagggcggaggagcaagggaacaagagacaaggcagagcagccgacccagggggagccg

SEQ ID NO: 46063 - RNA, 75 nt, Homo sapiens
cccacaacccgaccggagacagaagaaagggagcccccaagaacagcgagcacaggaaggaaaccggaccggggg

SEQ ID NO: 46064 - RNA, 78 nt, Homo sapiens
ccgcgcacccgcagggcgggcgcgcgcgggagcgggccccgacagacgccgggcagccagaggagcagccaagaagcc

SEQ ID NO: 46065 - RNA, 72 nt, Homo sapiens
accccggagaaaaggccaagaaggcagcggcggagaaaccaccacaaacacgaggccagcaacgaccaacaa

SEQ ID NO: 46066 - RNA, 53 nt, Homo sapiens
cagccaccgagcccgaccccacaccacacaaaacccgccgcagaaagccgcaa

SEQ ID NO: 46067 - RNA, 118 nt, Homo sapiens
cagcccagcaagcagcaagcaacccgaccccacgaaccgggggcagaacagaaaggggaccgcaaaaaagaagaggcacagcgaagagggaggggaaggccaaccacacaaaacccgg

SEQ ID NO: 46068 - RNA, 86 nt, Homo sapiens
acacccccaccccaccagcccccggacacggaagagcgacaagggcccagagcagcccgacgacgcagggaagaacgaggacaacg

SEQ ID NO: 46069 - RNA, 73 nt, Homo sapiens
gagaacacagaaaccgacccgaaaagcgagaaagaccccggacaggacaggcagaaagccgaacgccggcgcc

SEQ ID NO: 46070 - RNA, 67 nt, Homo sapiens
gagaccaggaaccagcagagaaacgggacagaaagcgggacacaagcaggagcacagaccccgaaaa

SEQ ID NO: 46071 - RNA, 79 nt, Homo sapiens
aggacagcgcacacagcaagcacgagggggcacccgaggaggaagagggcagggcccacggaaagaagggaaacccggg

SEQ ID NO: 46072 - RNA, 60 nt, Homo sapiens
ggacaaagacgcaacggcgaggaagagacgacagcaaggcgggagacagacccagcacgg

SEQ ID NO: 46073 - RNA, 74 nt, Homo sapiens
acagaagaggagggaccccgaaaaccaagaaagcggagaagggaaagaccccgacaaaagacaacaccgggaca

SEQ ID NO: 46074 - RNA, 57 nt, Homo sapiens
agagcggcagcagcaccagcccaagagaaggcgccaagcccacgggcgcaccaacgg

SEQ ID NO: 46075 - RNA, 84 nt, Homo sapiens
ggccggccacagggcgccgccaccggggggagacgccgagggacccacacaaccaccagcgagagacggggcgccagggccagg

SEQ ID NO: 46076 - RNA, 76 nt, Homo sapiens
agccaggccccggcacagcgcgccccccaacccaagcccgggcgaagagagagaaacgaaaaagaggaaggagcga

SEQ ID NO: 46077 - RNA, 82 nt, Homo sapiens
ccacgcagcaacaagggcccccgacgggcgcggccgaggcaagaaccggacaagcagaccggaagaccgacggaagaccaca

SEQ ID NO: 46078 - RNA, 75 nt, Homo sapiens
agagaaacaagaggaggagggcccggaccgacaggaaagaaggagcccacaaagaaaagaacaccgccagcagcc

SEQ ID NO: 46079 - RNA, 84 nt, Homo sapiens
gccaggagagcgcgccggcgagaagcggccgagccagcagcagacgcagcggggaaaggacacagcgccacccgcaacccgccc

SEQ ID NO: 46080 - RNA, 69 nt, Homo sapiens
aagacgggccccaacacccagagacgaaaggcaccacccgggaaccacccgcggcgggggccagaaggc

SEQ ID NO: 46081 - RNA, 77 nt, Homo sapiens
cacagcagcacccccagcagcacacaggagcagcaccgcaaggggacccgccccccagccccccgcgccgcgccaca

SEQ ID NO: 46082 - RNA, 72 nt, Homo sapiens
aaccaccccgcgccagcagcacagcacgcacaccgacagagaacccaggccaacacacagacagaggcagcc

SEQ ID NO: 46083 - RNA, 72 nt, Homo sapiens
ggccggcgccgcggccgcgggcaaaagcagaccggaaaacccaccggcaagaccacacccgaggggagccca

SEQ ID NO: 46084 - RNA, 80 nt, Homo sapiens
gggagcaccgcgcggcggcacacaacacggcgcaagcggcgcgccagagcggcacgagaacaccccaccagaccacccag

SEQ ID NO: 46085 - RNA, 75 nt, Homo sapiens
ccgggacggacacgccggggggcaaacaacccccaaagcacacagaacaggacaagaacaaggaaaacaagagaa

SEQ ID NO: 46086 - RNA, 79 nt, Homo sapiens
acgagcaccgcgccaccacccaggagaccccacgccgccaagcaggcagaaccaggacagccagacccaggagccagag

SEQ ID NO: 46087 - RNA, 50 nt, Homo sapiens
gcaacaccaaaaacaaaacgaaccaggacggcaaagccgcgcaagaccgc

SEQ ID NO: 46088 - RNA, 75 nt, Homo sapiens
cggccgcggagcgacgccgacgggagaagcaagggccaggcaggaaggagcaaagaaggcaccgacagcacaagg

SEQ ID NO: 46089 - RNA, 70 nt, Homo sapiens
ccaggggcaccgcagcgaccacccacacaaacccgggacgggccgagagcccggccccgggcccgcacgg

SEQ ID NO: 46090 - RNA, 84 nt, Homo sapiens
gcccgcgcccgccccaacccagccacagaccaggggcgcaagggacccacgaaggagaagcgggggccaggccgaaaggcccgg

SEQ ID NO: 46091 - RNA, 101 nt, Homo sapiens
gccggacggaaagcgacaagggaggcgccgccagcggccgggaccgaacaggcggaggacagcacaaaaacacaccaagagagcgcgacagacgcaacaga

SEQ ID NO: 46092 - RNA, 77 nt, Homo sapiens
gagagaggaccccgggacacgaaagccaggaaagaacgcaaggagggacaggacggaaggagcggaggaagacacaa

SEQ ID NO: 46093 - RNA, 96 nt, Homo sapiens
ccacgcgaagagaaagggagagcacaggagcgagacgcagcaggcaggggcagaaggcgacccagcgcagagcaaacagaaccacccagacagagg

SEQ ID NO: 46094 - RNA, 70 nt, Homo sapiens
aacgcgaagacggaacccgggacgacggagagaaggaccaaaacaacaagacagaagaacacgaggccag

SEQ ID NO: 46095 - RNA, 76 nt, Homo sapiens
caagcagacaccacgcaaaacaaaagacccaaaagcagaaagaggaccagccccacagggcggaggagaagaagac

SEQ ID NO: 46096 - RNA, 73 nt, Homo sapiens
gaagagaagaaaagagcagacagacccaagagaaaaacggacagccccaggaggaaggcgggcggaacgacaa

SEQ ID NO: 46097 - RNA, 69 nt, Homo sapiens
cccggacgacacaggacgaggggccaggcaagagaggaccccaccacaggggaaagacacgggaccgcc

SEQ ID NO: 46098 - RNA, 82 nt, Homo sapiens
accgaaacgccagcgcccagcagcaggcacaagacacgggagaggaagagcaagcgcagcaggaaaaaaccaggaacgcccc

SEQ ID NO: 46099 - RNA, 69 nt, Homo sapiens
ggcacgggcacacgcggagaagagcaacgacgagcaagaagacaaacaagggaaggccgcacaggccaa

SEQ ID NO: 46100 - RNA, 85 nt, Homo sapiens
aggcggagcagggccggaccccgcggcgcccccggcccggagcaacgagcgcagcgccgcgagcgacgcgcccacggaggaggcg

SEQ ID NO: 46101 - RNA, 80 nt, Homo sapiens
ggcagcagagcacgggagcaacgcacgccacacccgaaccggaagggaggccaacagacccaacccagaaggcaccaaac

SEQ ID NO: 46102 - RNA, 68 nt, Homo sapiens
ggaaaaccagcgccaaaggacaagcgaacggcagaaagccggacacaagagggcaagaaaggcgcgac

SEQ ID NO: 46103 - RNA, 89 nt, Homo sapiens
gcggacgcaggggacgaggacgaggagcggaggagccgcgggcggcgcggcccagccgccagaagccgggcggaagcccacgcacaggc

SEQ ID NO: 46104 - RNA, 77 nt, Homo sapiens
ggggcccgcgccccacgaccccgacaccaggggcacgcgcggcaaggggacggggaaaaggccccgggccccggcgc

SEQ ID NO: 46105 - RNA, 75 nt, Homo sapiens
ccaagacccacaacaaaagagaccggccagccacagagcagagaaagccggaccagcagggagccggggcaacgg

SEQ ID NO: 46106 - RNA, 68 nt, Homo sapiens
ggaaggagccaagcacagcaggcagcagagccaagcccagcgacgagaagcaagaaggagaggaaaac

SEQ ID NO: 46107 - RNA, 79 nt, Homo sapiens
gcggcagacacgagaagcaaagacagggacaggacagcgagcgaggacgaggaacggcggagcccggaggccaggcccg

SEQ ID NO: 46108 - RNA, 88 nt, Homo sapiens
gccgccgaggaggcgagcagccgggagacaccgccaccgccaggccagagagcacaagaagaaggacacacccaggggacacaacaac

SEQ ID NO: 46109 - RNA, 55 nt, Homo sapiens
ggcgacacacaggcgcacccggggccaaagcagcgagaggacggcagaccgagag

SEQ ID NO: 46110 - RNA, 36 nt, Homo sapiens
cggcagggggcggagcggggccaaggagaccgcacg

SEQ ID NO: 46111 - RNA, 71 nt, Homo sapiens
agcccgcagaaccccacagcaagaggacgaaggaccagaagagaggaagcaaacaaaaagaaacggaaaga

SEQ ID NO: 46112 - RNA, 70 nt, Homo sapiens
aagcgggaaaggcacgacgaacagccagaagcggcaagcaaaaaagcagccaccaccagggcgcggacag

SEQ ID NO: 46113 - RNA, 74 nt, Homo sapiens
accggaagaacccggcccagagccaaaggagccccacaaaagaaaacgggcaagcggagagccaggaagacgcc

SEQ ID NO: 46114 - RNA, 74 nt, Homo sapiens
ggacaaaggcgaccaggaaaagaccaagaaggggaacggaaagaccaaaaagagccaagcgagaagagagaacc

SEQ ID NO: 46115 - RNA, 80 nt, Homo sapiens
cggaaccaggaaagaagaccgaggaaacggcagcccaaacccgcccccaggaccgaagaacgccggcacacaaaaagcga

SEQ ID NO: 46116 - RNA, 76 nt, Homo sapiens
aagggaacccccacaaagaacagaagcaaggaagcgggcaagaaaagacacggcaaaacaagcagacgcccggcag

SEQ ID NO: 46117 - RNA, 80 nt, Homo sapiens
caaggacagacagccaacagcaggggacacaccacacagacaacccaccaagacagggcaacacacgaaggaccagaaac

SEQ ID NO: 46118 - RNA, 77 nt, Homo sapiens
gagaagaagacccaaaaaaaagaggagcagcaggcacagcacgggcagagccagccagcggcggagccacagcagac

SEQ ID NO: 46119 - RNA, 73 nt, Homo sapiens
agaggaagcaaagccaaggaacgaggcgcgacacaccagcggagcgggggaacccccccgggcagccacgcgc

SEQ ID NO: 46120 - RNA, 78 nt, Homo sapiens
gccgcgaaggcggaggcccaggcccccagcgagggcagcagcgcccaagaggagcagcgaaccaaaacgccacggagg

SEQ ID NO: 46121 - RNA, 66 nt, Homo sapiens
aggggccccgaagaaccccacaagccacaggaggaggcagcaggaaacgagaagaacgaaagagaa

SEQ ID NO: 46122 - RNA, 76 nt, Homo sapiens
gaggagcggggagggggacacacaaccgcccagccggcgagggacgccgcagaccgagggaagggccgacggccgc

SEQ ID NO: 46123 - RNA, 81 nt, Homo sapiens
ccgccgacgccgcgcgggccgcgcgcgcgcgcccggaaaccgcaagcgacaaacaacaagcccggaggcaaaaacccacgg

SEQ ID NO: 46124 - RNA, 74 nt, Homo sapiens
agagacaaggaaccaggccaccccggggaaagagcagcagagcagggagaccaaggaccaggagcaaccagccg

SEQ ID NO: 46125 - RNA, 59 nt, Homo sapiens
aacgggcaaaacggaaaagacaagagaccggaagaccccgccccccgaggcgcagcccg

SEQ ID NO: 46126 - RNA, 72 nt, Homo sapiens
gcaaggacggacccagccgaaggacggaagcggacacgagcaacagcagaggacaggaagaaccaacggcac

SEQ ID NO: 46127 - RNA, 39 nt, Homo sapiens
aaaagagcgcaccaacccccaccacaaaaggagaagcac

SEQ ID NO: 46128 - RNA, 91 nt, Homo sapiens
gcaagaggcggacaccccggacgaaccacaggaagcgcggggcggcggcgaaaggacgcagaaaaaaggccaggagacaaccagaccccgg

SEQ ID NO: 46129 - RNA, 42 nt, Homo sapiens
cccacggacgcgcgagacaagaggagaacgagaaggggaacg

SEQ ID NO: 46130 - RNA, 82 nt, Homo sapiens
ccgagacgggcccaggaggcccgggcgggcgcaaggcacgacgaggggcaggggcaccccaccacagagggcggggcagagg

SEQ ID NO: 46131 - RNA, 99 nt, Homo sapiens
cgccccaaacggaccaccacgagcacacgcagaagggggaaagagaccgggacagaacagcagcgagagcaaaccggcgagaagaacacaggcaagcca

SEQ ID NO: 46132 - RNA, 53 nt, Homo sapiens
gaagcaaacacgcacagcaacagaaaccagcgcagggccaccgcacccaggcg

SEQ ID NO: 46133 - RNA, 89 nt, Homo sapiens
gcgggaccccgagcaccgggccccgcgaccggggcccggggaaggcccgccgcccgccccaggaaggagccaacgcgcccagaacacga

SEQ ID NO: 46134 - RNA, 79 nt, Homo sapiens
ggagcggcccggaaggggagggcgaagaaaacaccagagcaggagcagcgaccaccccccgcagggcgacccaggcgga

SEQ ID NO: 46135 - RNA, 74 nt, Homo sapiens
cgacgggacagcagaggaaagacggaagcccaggggaccaaaacaaaacgagagcaagaggaaagaaaaagaac

SEQ ID NO: 46136 - RNA, 72 nt, Homo sapiens
aaaacagcggaggagaccgggaaaccgccgaagacgaagcccagagcaggggaccccaccggcgccggcagg

SEQ ID NO: 46137 - RNA, 77 nt, Homo sapiens
ccaacgcccggaccccgccgggaccgcccgcccccgccagcacgcgacaccaccgggcgcaagccccggggcagaga

SEQ ID NO: 46138 - RNA, 74 nt, Homo sapiens
gccacgagcgcgagccgcgaggaaacgagaccccgcccagaaggcggaggacgagagagaaaagcagaggcgag

SEQ ID NO: 46139 - RNA, 77 nt, Homo sapiens
cagaaggagccgaagagaagacaaggcgcagggggacgagcagggaggaacaaccaaggggaggaaaggacaggccc

SEQ ID NO: 46140 - RNA, 86 nt, Homo sapiens
aaaaaacccagcgaagaccacagaaaccaaaagacgcacaagaccagccacgcaccgcacacgaccgccacaggaacggaccgccc

SEQ ID NO: 46141 - RNA, 79 nt, Homo sapiens
gagagcccggaacaggacagggggaggagaagccacgagcccggaaggccacacacgcgagcacccagagggccggccc

SEQ ID NO: 46142 - RNA, 68 nt, Homo sapiens
agggcgggcgcaggggaccgcaacaggaacggaggcgggcggccagcaacggggcggcacacaaggag

SEQ ID NO: 46143 - RNA, 83 nt, Homo sapiens
gcgacccaggcacggggagccacagaagcgaccccaaaccaaacagaggccacccaggaaggggcagccggaggaggagggcg

SEQ ID NO: 46144 - RNA, 90 nt, Homo sapiens
gcaagaggcccgcaggcccaagggagagcgagggcccgggagcgggagcccggaaacacaggggcagcagaagaagcacgacgaagacgg

SEQ ID NO: 46145 - RNA, 78 nt, Homo sapiens
ggggcgcacccccccacgagcgaggcaacgggccacccacgcagaccaagcacaccaaggaaaaacagccacaagcgc

SEQ ID NO: 46146 - RNA, 79 nt, Homo sapiens
caaccaaagcaagccaagaggaggaggaggcggaggccaagcggaaaggacagcaaaggaaaccggaagaggaagcaca

SEQ ID NO: 46147 - RNA, 75 nt, Homo sapiens
aaagacggccacaaaagcgcccagaagcacagggggggcaagcacagcgaccaaggacccggcgggggcaaggaa

SEQ ID NO: 46148 - RNA, 78 nt, Homo sapiens
caaagaaggcacggaaagagaggcggacagcaaaaggagaaaaaccgcacaaaggcccaacagaaagacaagaaggag

SEQ ID NO: 46149 - RNA, 63 nt, Homo sapiens
aggccgggagcaggcaaagccacacacagacacgagagagaaggagcgcgagcagaaccgaac

SEQ ID NO: 46150 - RNA, 73 nt, Homo sapiens
gcagcagcacaagcgaagagagaggacggggacgggccccaggacgaggaagacaaggccagccacggaagga

SEQ ID NO: 46151 - RNA, 75 nt, Homo sapiens
gggggagagaacccaaccagggggaaacacagaacgcagggcacggcagacacaccgaccagaggaaggcgaacc

SEQ ID NO: 46152 - RNA, 73 nt, Homo sapiens
ggaggaagggacgcggggacggaggcagacccaggaacacaaggcccgaggagaggagcaccaacgggggaag

SEQ ID NO: 46153 - RNA, 66 nt, Homo sapiens
accacaccgcccggggccgggcagcgagcccacacagacgccgacaagcaggagccgacccaccag

SEQ ID NO: 46154 - RNA, 73 nt, Homo sapiens
gagcggcgggaggccaccgccaggaagacgggaagccaagcaggacaaccacaaaagcagcaaacagaagcca

SEQ ID NO: 46155 - RNA, 62 nt, Homo sapiens
gggcaggcggcggggacacccggacacggcaagagcagacccccgaggcgccacccacagcg

SEQ ID NO: 46156 - RNA, 78 nt, Homo sapiens
gcacccagcccagagccagcaagggcacagcccgccagccaggcacccgccagcgaccgcggacaaagagcagcggcc

SEQ ID NO: 46157 - RNA, 82 nt, Homo sapiens
gcaggccggcggacggcggcgaagggcggaaaacaccccaaaagccaaaagggaaaggaaaagaccaacaacagcgcaggac

SEQ ID NO: 46158 - RNA, 76 nt, Homo sapiens
cgagaacagcaggcagaacacggaggcacagcagcccacgcgggaaagagcacacaggagccaaggagagacagag

SEQ ID NO: 46159 - RNA, 76 nt, Homo sapiens
gcgggccgaaggcccggcccacacgggaagcgcgggaagggaaaacgaagcaaagcgagaggagaaggagcgagcg

SEQ ID NO: 46160 - RNA, 59 nt, Homo sapiens
ccccggggaacccgcagcacaccagggggcaggcccggagcaggccaagagggcgaccc

SEQ ID NO: 46161 - RNA, 78 nt, Homo sapiens
aacacaaaacggcaagacaacaggaaaacagcaaagaaaacagaccccacagaaaaccgagccccgccacgaggaccg

SEQ ID NO: 46162 - RNA, 57 nt, Homo sapiens
cggaggagacgggagcccgccgcgagagcgcaggggacccgacgaaggcaggcacag

SEQ ID NO: 46163 - RNA, 82 nt, Homo sapiens
cgcacgagcaacagacgagcgcgccaggccgacagccgcggccgggcccgagagcgacacgcgcgacggaggccgcagggcc

SEQ ID NO: 46164 - RNA, 80 nt, Homo sapiens
gggacggcacggacgacagaagcgacgggagaccgcacagggccaggaaagcacaagagcgaaaccaccaagagaccaaa

SEQ ID NO: 46165 - RNA, 110 nt, Homo sapiens
gaagcaccggccagggcaccggggcccggcgcccgggcccgccccggagggccacgggaccaggccgacccaggagcagagcaaccagagggcacacgcagcggagaagc

SEQ ID NO: 46166 - RNA, 74 nt, Homo sapiens
caacagcgacaaaacaaacccaaaagaaggggaaagaacaaggacgaggaaaccggagaagccgcgaggcagaa

SEQ ID NO: 46167 - RNA, 44 nt, Homo sapiens
cccggacagcaaggagcccaaagagagaagccaaaagcaccggg

SEQ ID NO: 46168 - RNA, 55 nt, Homo sapiens
agaaggaccaagaaccaggacccagcagccagcgaagccccaaggaagccgggac

SEQ ID NO: 46169 - RNA, 54 nt, Homo sapiens
gaggcgccaaacggagccagagccagggaggaggagacacacagaagacgaaag

SEQ ID NO: 46170 - RNA, 74 nt, Homo sapiens
cacaacgggcaggcgaacgagggaccaagcacgccagaaagggaggagcgcggcaagacaaccacgaaaacgaa

SEQ ID NO: 46171 - RNA, 46 nt, Homo sapiens
cacggcagcgacaccaaggaagggcccaaaaggcgcccaaccgaga

SEQ ID NO: 46172 - RNA, 72 nt, Homo sapiens
cgggcgggaaaacaggcagacagcgcccaccagcgaacgaaggcgagaaccacgccgacaacggcggaagag

SEQ ID NO: 46173 - RNA, 71 nt, Homo sapiens
aaagacaaggagacaggacccaaccgaggacacagcagcggaagaggcaaagccgaagccacacaaccaag

SEQ ID NO: 46174 - RNA, 79 nt, Homo sapiens
agccccgaaacggacacgagcaagaccggaccggcaccaccaggaaccacaggccacccaggaggagacaagaacgccg

SEQ ID NO: 46175 - RNA, 66 nt, Homo sapiens
gaggcggaaccagggcagaggaggaagaggcagagcaacagggacacaagcaagaagaaagggacc

SEQ ID NO: 46176 - RNA, 72 nt, Homo sapiens
ccgacaaggggcggaggaagggaggagacccgaccccagaaggacccaggaagcacggaccaaccacgagga

SEQ ID NO: 46177 - RNA, 83 nt, Homo sapiens
agcaggagcggcggcgacggccacaggggcggcgacggcgcaggcgaagcgaaacagggagaccagcacgagccgggcgggac

SEQ ID NO: 46178 - RNA, 86 nt, Homo sapiens
aaaggaccggggaccccaaagacaaacgacaagcccaaggagcccagggggccaaacgcggaaaacaggaagggaagcagggggaa

SEQ ID NO: 46179 - RNA, 73 nt, Homo sapiens
aagagaaacaacgggcggaacccacaggagagaaccacccagagccgccaccagggggagaccgaagagcgca

SEQ ID NO: 46180 - RNA, 80 nt, Homo sapiens
gcgaaacaggaagaggcaccgcacacgcccccggcaccgagacaggggacacgaacccgaaacaggaacaccggacccca

SEQ ID NO: 46181 - RNA, 76 nt, Homo sapiens
ccgggggcccccacccccgagggcgcaaggaaaaccagagacccagacacgcgaaggaacgaaaggccaaaaggca

SEQ ID NO: 46182 - RNA, 81 nt, Homo sapiens
gcaccgcggccagaagccagacccgcggcccggccggacccgcagcaggcacaagccccccaggcccaaaccaaagcacca

SEQ ID NO: 46183 - RNA, 80 nt, Homo sapiens
cgcagggcgggaaagccggaggaacccgaacccaaaccgagccaaacaccaagaggccccgacggcagcccaccccgagc

SEQ ID NO: 46184 - RNA, 68 nt, Homo sapiens
caaaccgggaaaggagaggacccggagccggggacccaagaacagggaggaaagcagagaaaggcagc

SEQ ID NO: 46185 - RNA, 75 nt, Homo sapiens
gaccccagcgggcccggggaggcaccgacgaggaggacagggcaggacgacacacagacccacaccacacacaga

SEQ ID NO: 46186 - RNA, 77 nt, Homo sapiens
ggccaggaagccgaggcccggacccccagggccgaggaaacaagagcaaccaaaacaggacaagaaacaccaaacaa

SEQ ID NO: 46187 - RNA, 50 nt, Homo sapiens
acaggcaggagggagccgaaaagcacagacagacagcaagagcagccccg

SEQ ID NO: 46188 - RNA, 39 nt, Homo sapiens
gcagcgggcagcaaccagcgggaggagccccaccacaca

SEQ ID NO: 46189 - RNA, 79 nt, Homo sapiens
acgggcggcggcccagcaagagaaaagagcagacgccacggggccgcgccaagccagaggaaagcacagagagcaggaa

SEQ ID NO: 46190 - RNA, 73 nt, Homo sapiens
agacagggagcgggcaacacaaaggaagccaagaagaaggagcacaaggcccacgcggaccggcagcgccacc

SEQ ID NO: 46191 - RNA, 73 nt, Homo sapiens
cggagcgcgggacagccgcgacacacaggcaaagacaaacgccgcaaaaggaccggaaaaacaccacccacaa

SEQ ID NO: 46192 - RNA, 56 nt, Homo sapiens
ccgcaccccgagagcggagaagcccaacccaggagcccccgcagggccccggagcc

SEQ ID NO: 46193 - RNA, 72 nt, Homo sapiens
aggcccaaccacaccaggcaaggacggcccgccacgggccccgcagccgcgcccgagcgcccgagcagggac

SEQ ID NO: 46194 - RNA, 57 nt, Homo sapiens
cggccggacccaccgaccagacaagccgagaccaccaggagcagagcggaggcaacc

SEQ ID NO: 46195 - RNA, 81 nt, Homo sapiens
acacccggagcccgaggcgcggcgaccacgaggagcagaaggcacaacaggcgagcaggccgaaaccggcgggagagccgc

SEQ ID NO: 46196 - RNA, 80 nt, Homo sapiens
ggcgaccgaggcagccccccaaagcccggccccacagcccgaaagcacccagaggacagaaacgggaacacaggcgaagg

SEQ ID NO: 46197 - RNA, 69 nt, Homo sapiens
ggccagcacgggaccccccaagagaagcgcaagagcaacaccccaccccaagggcgcacccccgagaga

SEQ ID NO: 46198 - RNA, 31 nt, Homo sapiens
ggaccaagaaccagccaagacaggaacacag

SEQ ID NO: 46199 - RNA, 58 nt, Homo sapiens
caaagcagagggaaaggaccaccacaggaaagaagccggcaaggaaaacgcaaaagag

SEQ ID NO: 46200 - RNA, 67 nt, Homo sapiens
ggcgcaccgacggaccgggaaggagcacccaggaccaccagaacggaggaggaagccaagaacggga

SEQ ID NO: 46201 - RNA, 77 nt, Homo sapiens
cgccgccgaagaagcacgaaagccccacccgccgcagcaagcagaggccccaccagaacagagccagagagcggccg

SEQ ID NO: 46202 - RNA, 79 nt, Homo sapiens
ggaaacaaggcaacagaaagagcaacagcagggcaacagacccacaggaccgcgaacaaggaggccacaaaacacccgg

SEQ ID NO: 46203 - RNA, 78 nt, Homo sapiens
accaggaaaaaagccaaaaccaggcagagcgccagccacagaccggcccacaaaaagccgccaggagaaagaaaggag

SEQ ID NO: 46204 - RNA, 77 nt, Homo sapiens
gccacaccaagaaggggaagggccagccaccggaccggggccaagcaggacaagcagcgcccggaggacccccccgc

SEQ ID NO: 46205 - RNA, 83 nt, Homo sapiens
ggccagcccaggcagccggccaggagaaagcagaaggaccacgaggcccgaggcgcgcggaccggagcggcaacaagcgggcc

SEQ ID NO: 46206 - RNA, 78 nt, Homo sapiens
cggacaacaccaaccaagaagacaggcagggagaccccaaggcaaaaccaccacacgacaaaaaccggaacgcggaaa

SEQ ID NO: 46207 - RNA, 86 nt, Homo sapiens
cacccgcgcgcgcccgggaggaaggaacgaggcaaggagcaaagcagcggcgcagcccgggcggcagacaaggcccaaagacagca

SEQ ID NO: 46208 - RNA, 85 nt, Homo sapiens
cgccgcgccccgcccgggcgcccagcagacccccgacgcccacccagaacgaagcgcgcggcaggcgcgcgccgccccaggccgc

SEQ ID NO: 46209 - RNA, 75 nt, Homo sapiens
aggaggaggacagggaaaggagcggggagccccgcgccacagccacacgggcaagcaaaacggagaccgagaagc

SEQ ID NO: 46210 - RNA, 76 nt, Homo sapiens
cgcgggagcacgaccggccaaggcccaccggccggcggacacccaggaccgggcgggccacaggaagggaagggaa

SEQ ID NO: 46211 - RNA, 76 nt, Homo sapiens
cgcggaagaggggggccgcccggccgggcgcgccgcaccccagcagcacccaagcaggcgggaggacaagccccgg

SEQ ID NO: 46212 - RNA, 78 nt, Homo sapiens
gacggcacaaggaagggagcacacacacaccacagccagagaaggcagccaagcccggggccagggcggaagaggaga

SEQ ID NO: 46213 - RNA, 80 nt, Homo sapiens
gaaccaagcagacagccaacaaaaggggaagaggaccacacgcccagaggaccgagaagaacgagaggcacaagaccaga

SEQ ID NO: 46214 - RNA, 70 nt, Homo sapiens
caccccgccccccgaccacccagcgggagaccaacaaaacaagaacaggccacaagaagggagaaaaaaa

SEQ ID NO: 46215 - RNA, 57 nt, Homo sapiens
aaaaaccaaagcacccgaaagaaaggaggggcagcagcaggacagggaacccgggag

SEQ ID NO: 46216 - RNA, 88 nt, Homo sapiens
ggggccgaggaggcccgagcggcggcggggcggcgaaggccgaggcgagccccccaagagaacccagggggagccacgccggagcggg

SEQ ID NO: 46217 - RNA, 74 nt, Homo sapiens
caagaagaagccgcggaccccgcggacaacaacaagcaccgacggcgcgggacaggacaacacacacaaggcag

SEQ ID NO: 46218 - RNA, 80 nt, Homo sapiens
gaggcagcgaacccacacgggaagcgaaccgcgcagaagggaagaaagagccccaggacccgagaaaagacgaggaaaag

SEQ ID NO: 46219 - RNA, 67 nt, Homo sapiens
gcggcgggcacgcgcgaccgcggccgcggcacgaagaccaaggggcaaggagccgaaacagacagag

SEQ ID NO: 46220 - RNA, 85 nt, Homo sapiens
gacccggaggagagacgcggagacaggggaaacgagacaggccaaacccaaaggaaagaaaaccaaagaagaaaaaaccgcagag

SEQ ID NO: 46221 - RNA, 65 nt, Homo sapiens
gaaacgccacacccgcgcaggacccagaccagaaaaagagcagcccagcgggggcaggggacaag

SEQ ID NO: 46222 - RNA, 73 nt, Homo sapiens
agaacacaggaaccgccccgagaggaaacacccccagaagaggaaagacaacgcggcagaccagaagcaccca

SEQ ID NO: 46223 - RNA, 76 nt, Homo sapiens
cggccgaaccaaagagcccaaaagagccgagggaggagaagaagaaacccaagcaagagagacagagagggaaaaa

SEQ ID NO: 46224 - RNA, 78 nt, Homo sapiens
ggggcaggaaacagaagagaaccaccaggccccgaaagagccagagaaggaaggagggaaacacggcaagcaagcaga

SEQ ID NO: 46225 - RNA, 87 nt, Homo sapiens
cccgccagggccagggccaggccagcgcccggcggcccaggagaaggaagcgccggccaaacgagcacagcaaacgcgaaagagcgg

SEQ ID NO: 46226 - RNA, 77 nt, Homo sapiens
gacgagcccggcccaagggagccgccaagccgggccacaccggaggccccagccggggccccccaagccgaccgccg

SEQ ID NO: 46227 - RNA, 58 nt, Homo sapiens
cccccaagagcggaacagcccaaccgcccagacagcccagcccgggccagcagcccgg

SEQ ID NO: 46228 - RNA, 60 nt, Homo sapiens
gggaccgcagcccgcaggagagggcacccccggcccagaccggggcggagcgccgagagc

SEQ ID NO: 46229 - RNA, 84 nt, Homo sapiens
aaccaaaccgcgcgcgggccgggccggggacaacgaggccgcggagacaccgcagccggaaccgcaagaccagggcccgagaga

SEQ ID NO: 46230 - RNA, 78 nt, Homo sapiens
ggagaaggcgcaacgcggcgcgaagcacacacacccgcacgagaccccggcccgcaccgagcgagggcggcaggcaga

SEQ ID NO: 46231 - RNA, 91 nt, Homo sapiens
gggcgcgagccgggaagacgcggggaagaggaggcggaaaaggacgcaaagcccggcgagggcggaaaacaccccaaaagccaaaagggaa

SEQ ID NO: 46232 - RNA, 91 nt, Homo sapiens
cccaagggagggccccccagggggcccccaacccgacagggcacacagggaccaagaagccccggggacacgcgagaaaagacgccgaagg

SEQ ID NO: 46233 - RNA, 74 nt, Homo sapiens
ccgacgggggagaggggcacccaaccgagccacaccagcgccagaccaaaacgaagaagacgagccaaacccaa

SEQ ID NO: 46234 - RNA, 79 nt, Homo sapiens
ggccggcggggcccggggcgaggcgacccaaccaggagccgacaaacaaagggaaaaaccgggcagccaagcaccaacc

SEQ ID NO: 46235 - RNA, 71 nt, Homo sapiens
gggacgagaaacgaaacaaggcaccgagcacaaaggagaaaaccagacaaaagagaacgaacgcagaccgg

SEQ ID NO: 46236 - RNA, 77 nt, Homo sapiens
caccagaccccggccgccgaccgcggccccgccggccgccggccgcgcgggggcccggagaagcaaggcccacgcgg

SEQ ID NO: 46237 - RNA, 57 nt, Homo sapiens
agacgaaacaaagaagcaaggaccgggaaacaaaggaaaaaaaagggcaggaggaac

SEQ ID NO: 46238 - RNA, 31 nt, Homo sapiens
ccgacagccgcagaacgaggggaagcaaggc

SEQ ID NO: 46239 - RNA, 84 nt, Homo sapiens
cccagcagggccagacccgggccacgcgccccgcagcccggcagcgcacgggcccagacgcagacaaacgagaagagagaagag

SEQ ID NO: 46240 - RNA, 82 nt, Homo sapiens
cagggagaaaccacgcaggacaggaccccgccgggacaggaggggcgagagaaggagaacgcagcgcccaacaccagccggg

SEQ ID NO: 46241 - RNA, 79 nt, Homo sapiens
agccaaaaccaaaaccaccccaaacagccaacgagggacaagcaagcgaggcagaaaaagcccaagaaaagcacaagaa

SEQ ID NO: 46242 - RNA, 80 nt, Homo sapiens
cccgccgccggcgcgcgcccgcgccgccgcacgagggcgaccagacgaggggagacggacgggggagagaggccaaacgg

SEQ ID NO: 46243 - RNA, 56 nt, Homo sapiens
aggagcgacgccagaaacagccaccagaaccaggaacaggagaacgagggacggcg

SEQ ID NO: 46244 - RNA, 72 nt, Homo sapiens
gaccagggacaacagagccagacaacagccaaccagaaaaccagaaacaccggcagggagcaaaccccccaa

SEQ ID NO: 46245 - RNA, 81 nt, Homo sapiens
acagacaagccaaacgagcccgcgagccgcggagcagacgcgcggagcaaaaggccaaccagccagcacccggcggagccc

SEQ ID NO: 46246 - RNA, 74 nt, Homo sapiens
agccgccacccagagcgcacggcgacgccccaggggaaaacccccgggaccaggcaccgcggaaccgagcagca

SEQ ID NO: 46247 - RNA, 86 nt, Homo sapiens
gccaaaaggcgaccggcaacacggacacccacagcggggcggcggcggcggcggcgcggcccaaaagaagggccccgcccagagca

SEQ ID NO: 46248 - RNA, 66 nt, Homo sapiens
cagaaccaagggaagagaacacacggaccgagagaggaaaaaaggggcagacagccaaggaaagcg

SEQ ID NO: 46249 - RNA, 86 nt, Homo sapiens
caaaagcaaccgcgaagagcaggcaacggcagagacaccagagcaaccagaccaggcgggaagccaagacagccaaggagcccaag

SEQ ID NO: 46250 - RNA, 76 nt, Homo sapiens
gccgaggccccccagccacgccgacagccgcagaacaaagcacacaggcagacagagaacaccacgggacaaagcc

SEQ ID NO: 46251 - RNA, 74 nt, Homo sapiens
gagccacgacaagcacgccccaccagcagcgccagaggcaccggccgaggcaaaagcaagccaacgcacacccg

SEQ ID NO: 46252 - RNA, 80 nt, Homo sapiens
caaagcgccaaggaaaaggggagcggaagggagagcccgcccggcccggagaagaaagcaaggcccagcagcacacaagg

SEQ ID NO: 46253 - RNA, 101 nt, Homo sapiens
gaaaaaggaagaaaacaaccaggcaaagacacagcgcacgaaggcaggaagaggcagaggaagaggaagaggaagaggacgggccgggcagaggaagaggg

SEQ ID NO: 46254 - RNA, 76 nt, Homo sapiens
gaacgaaaggagaaacggaaaagacccccagacgaacaaggcagcaacagcgcaagagcaccagccgcaaggagca

SEQ ID NO: 46255 - RNA, 67 nt, Homo sapiens
ggagggaaccagcaacaagccagcacagcgacgaacacacacaccagaccggagaagcacagacgca

SEQ ID NO: 46256 - RNA, 69 nt, Homo sapiens
aggacacgcagagcgcggagaggagccaagcccaacgggacgggaaaacggccacagccaacgacgcag

SEQ ID NO: 46257 - RNA, 78 nt, Homo sapiens
agcgacacaagcggacagaacagacgggacccccagccaaaggcaaaggcaagcagaagaggaacagaagaagcagag

SEQ ID NO: 46258 - RNA, 74 nt, Homo sapiens
gagccacggagccgcaccagacaacgccccgggaccggagcagaacccccgcagagaaaggcgggagcgacccc

SEQ ID NO: 46259 - RNA, 71 nt, Homo sapiens
aagcagcaaagcccgaacaaaaaggagaaaggccagcacgaagaagagccgccccacacgcagaaaaggga

SEQ ID NO: 46260 - RNA, 83 nt, Homo sapiens
ggcaagacagcaaaagcaccaagagacagccaagacgcagaccggaaaacgccaaaagacgaacacaaagggaaagaggagag

SEQ ID NO: 46261 - RNA, 53 nt, Homo sapiens
cgagaacgggcacggagcgcccgccggaggagcagccaggagcgaggagcaag

SEQ ID NO: 46262 - RNA, 76 nt, Homo sapiens
cagcccaagcgccccccacagccagccagcagggcagcccccgcccgcccccaccccccacaggcagagcgggcac

SEQ ID NO: 46263 - RNA, 76 nt, Homo sapiens
ccggaggggcgcggacccagcacccccgcacccacgcggcccgcgaaagggcgcaaaggaaaggcaacgcaccgga

SEQ ID NO: 46264 - RNA, 55 nt, Homo sapiens
cgcccacgaccccagcaggggaaggccaaggccaggccaggacaagaggaacccg

SEQ ID NO: 46265 - RNA, 73 nt, Homo sapiens
cgccaacaagcaaggaggagacaccacagcacagcacaccaggccgcagaaggaacggcagccacacagcccg

SEQ ID NO: 46266 - RNA, 84 nt, Homo sapiens
gcaggcaggcaaaaccgggaaagccagcaaccaacccaggccgccagacccacccggacccccagaaaaggaaacaaggaacaa

SEQ ID NO: 46267 - RNA, 81 nt, Homo sapiens
aaccaaaccgacaaaggcaacaaaagaaacggaagcaaacgcagacaaagaacaaggccgagacgcaccagagccggaccg

SEQ ID NO: 46268 - RNA, 78 nt, Homo sapiens
agaacgcaagggccgcccccgcacagccgcggccaacgggggaaggagaagagccaggcggcggagggaacggggcca

SEQ ID NO: 46269 - RNA, 66 nt, Homo sapiens
gacaaaaccgacgaaggaacgggaaaaagaagcaagaaaggacagcaaagcgaagaagcaaagaaa

SEQ ID NO: 46270 - RNA, 59 nt, Homo sapiens
caagaaaacgcccaaacgaagccgcaagggaaaggccccccgggcaagccagcaccgag

SEQ ID NO: 46271 - RNA, 56 nt, Homo sapiens
cgggcagaagaggaggaccccaccccaagcaaggccaggagccgacgagggcccgg

SEQ ID NO: 46272 - RNA, 75 nt, Homo sapiens
cagacgcagggcgcccccgagagaccgacagagccacaagaaacaaaggcacggcacggccggcacacccggggc

SEQ ID NO: 46273 - RNA, 91 nt, Homo sapiens
gacacaagcggcaagacggcccgggagccgccaaccagcgaggccacggcgcaccgcagcagcccacccaggcgaacagacaagcagaggg

SEQ ID NO: 46274 - RNA, 59 nt, Homo sapiens
ggagagcaagcgagcccggcaacagcgaccaagcgaaggagaaaccaagcaaagaaaaa

SEQ ID NO: 46275 - RNA, 80 nt, Homo sapiens
gcccaggccagccccagcagcaacagcagcacagggcaacggagacagaaaccaggaggccaagcaagggaaaaagacag

SEQ ID NO: 46276 - RNA, 118 nt, Homo sapiens
cccgcaaagcccgccccgcggacggacacaggcaaaaccgcacggcacccccgcaggaacgcagcgagcaagaacaagccaggaggcggagaaaacggcacaggcacaaaacgccagc

SEQ ID NO: 46277 - RNA, 79 nt, Homo sapiens
gaaaacgccacaacaccggggaagacagggcggcggagaaaccaccacaaacacgaggccagcaacgaccaacaagaca

SEQ ID NO: 46278 - RNA, 82 nt, Homo sapiens
agggacccgccgcggcgcgcgccggagagggagggcaccgcgcgcgacagccgaaggaacgcaccacagacggagccccgga

SEQ ID NO: 46279 - RNA, 85 nt, Homo sapiens
cagccaggccagcagacggcaaacggagaaagcagccagagacgggcgcccgggagagacgaaagaggcggacgaacccaaggag

SEQ ID NO: 46280 - RNA, 72 nt, Homo sapiens
aagcgcccgcgccggggacgggagcccccccccccgcaggagaggagccaagcccaacgggacgggaaaacg

SEQ ID NO: 46281 - RNA, 80 nt, Homo sapiens
ccccccacgcaacgacaacaggccaacgcccggccagcgccacgcgagcgcgcaagggcggcgcgcccgcgagaagacgg

SEQ ID NO: 46282 - RNA, 49 nt, Homo sapiens
ccgagaaggcagaggcgaaggacgagaagggcggcgcgaaaggacaaag

SEQ ID NO: 46283 - RNA, 78 nt, Homo sapiens
cggccccggcagcgaggcacgaaggacacgcgcagagaaggggaaacgagcacggagcgcccacggagccacggaagg

SEQ ID NO: 46284 - RNA, 67 nt, Homo sapiens
ggacgcccacgagcaaccaagaaaacggcgaggaaagagaggagccccggaaagaaaaggacagacc

SEQ ID NO: 46285 - RNA, 70 nt, Homo sapiens
gaagaagagcggcggaccaccggagaagcacaagcagcacacaagggcccacacacacgcagggcgccca

SEQ ID NO: 46286 - RNA, 55 nt, Homo sapiens
ggaaagcagcccgaaaaagacgcgagaagccacacgggggggaggacgcaccgcg

SEQ ID NO: 46287 - RNA, 71 nt, Homo sapiens
aggaggcaagaaaggggaaccccggagaaaaggccaagaaggcagagcacagcagacaagacgggagagaa

SEQ ID NO: 46288 - RNA, 78 nt, Homo sapiens
ccaccaacgccgcacacagaccacccggcaaggcagacgaccaggcacagaccacaagccagccacagccagaagggc

SEQ ID NO: 46289 - RNA, 79 nt, Homo sapiens
gaagcggccaaagccgcccagacggccaccggcgggaggaacaaaagacaaaacagaggagaccagaccagaagccccg

SEQ ID NO: 46290 - RNA, 75 nt, Homo sapiens
cgcgagcgggcgaccgaaggccgcgcggacgggagacagccgccaccgaaacagaagacagccgaaccaagggcg

SEQ ID NO: 46291 - RNA, 52 nt, Homo sapiens
ggaggaccgacgcagccaggggaacacccagaggaacgcgagaaagaagcga

SEQ ID NO: 46292 - RNA, 75 nt, Homo sapiens
aaagaagggaaggaacaagcacgaagagggccagaaggcaaacggacagacccagagcaggacggacaccgaacc

SEQ ID NO: 46293 - RNA, 77 nt, Homo sapiens
cagccagaagaaggaccggaagcacacaacaggaaaacaaaagaggagaaaggagcagagcagaggacaacgagaag

SEQ ID NO: 46294 - RNA, 50 nt, Homo sapiens
ggaccgcacccgcccaagccggaaccccggagcccgagggagccggagcg

SEQ ID NO: 46295 - RNA, 69 nt, Homo sapiens
gaggcccgcggggccaggaggaaagcggggcagcaaggcaaggaaaaaacgaagagcaggggaaaacaa

SEQ ID NO: 46296 - RNA, 82 nt, Homo sapiens
ggacgccgccggggcggcgacacccgggagccgccggcaccgccggaaccggcgcagaaacacccgccgggcagcagaggcg

SEQ ID NO: 46297 - RNA, 95 nt, Homo sapiens
cgccgcacaccagcgaggcccaccagccggggagccagcgcaggggacggacagaacgagcgcaggagcccgccccaccgccccggggagcaggg

SEQ ID NO: 46298 - RNA, 73 nt, Homo sapiens
gggccaaaccgagggcgggaacacagcaaagcccaaaaacggacccgacaccaccagggcaacaccaccgggc

SEQ ID NO: 46299 - RNA, 79 nt, Homo sapiens
gcccgggcccagaaggcgagaccagagacgagaagaagcccacccagagagagaagaacaaggcggccaaaccaagacc

SEQ ID NO: 46300 - RNA, 85 nt, Homo sapiens
ggccgggccacccccgcagacccggccggcgcggggccggggaggagagccagggagagaaggcgcgcaggagagcgcagagacc

SEQ ID NO: 46301 - RNA, 80 nt, Homo sapiens
cggaagagggaagaaagaagcagcgccagacgaacgaagacaaagcaaaaccacaggagaaacagaaacagaaggcagca

SEQ ID NO: 46302 - RNA, 75 nt, Homo sapiens
aaccgcgggaccaaccacccgagcggcgcggacgaagaggcacgggaacacaccgccacagaaacccacaaacaa

SEQ ID NO: 46303 - RNA, 53 nt, Homo sapiens
caaggacccccccaaccccaaggagcgagacacagggaaagcacgaagggagc

SEQ ID NO: 46304 - RNA, 79 nt, Homo sapiens
gccagaggaaagaacccgagaagaaacaggacgagaagaggccccccaaaggacacaggacagaccgagaacgagagcc

SEQ ID NO: 46305 - RNA, 82 nt, Homo sapiens
caaaacgcagacgaccaccacacacggagcggaaccagaacccaaacagcagcaccacagccccagagcaaggaaacaccag

SEQ ID NO: 46306 - RNA, 77 nt, Homo sapiens
caacaaaggagcacgacggcaggaaggaggagacgaagaaaggagacacaagcagcaagccaacacaacacagcaac

SEQ ID NO: 46307 - RNA, 113 nt, Homo sapiens
gcggaaagcgcggagcgcggagccaccgggcaccaaagggaccgcagcgccccgccccagacgcagaaaacagacacacagcggagacaagcagggccggcaggaggcgggga

SEQ ID NO: 46308 - RNA, 77 nt, Homo sapiens
ccggccagcaccaacacaagcacaagccccaaggaacccacgcgagccagcaaccagggacaccacagcaagagccc

SEQ ID NO: 46309 - RNA, 114 nt, Homo sapiens
gacagcgaaagcacgaacaggaaacaggaagccgggagagaaacacagagccagggagccaaacacacccccaccgagagcggccacaaaagacgaggccgcgcacacgaagca

SEQ ID NO: 46310 - RNA, 59 nt, Homo sapiens
ccagcgggccggacggggcggggggaacgagcgagggggaaaagcaaaagcagaggggc

SEQ ID NO: 46311 - RNA, 77 nt, Homo sapiens
gcaagagcgagccgccgccccgggcgcagacagagcaccagcaccagcagagcagaaacggggggggagggggaccc

SEQ ID NO: 46312 - RNA, 66 nt, Homo sapiens
gaccagggcagacaggcaagagggagaagacagcgaccagggaggcaacaacaaggagcgaagaga

SEQ ID NO: 46313 - RNA, 57 nt, Homo sapiens
gaacacagaggaaaccgcaccgcccggaggcgggaagaaaccggaaggggccgccag

SEQ ID NO: 46314 - RNA, 80 nt, Homo sapiens
caagaacgccaagcgccaaaggcaaaaagggacacgaggaggggacggcccgccacaggcacagacgaggagggaagcga

SEQ ID NO: 46315 - RNA, 75 nt, Homo sapiens
cgcaagcagggaccacggcaggaccccccgcgccccccccaacccaacggcaccaaggaagagagaagggaaacc

SEQ ID NO: 46316 - RNA, 80 nt, Homo sapiens
ggacccggccccggcccacaggggggggcaaacccgagagaacggagaaggcacaaagcggagcagagaggcgaaacacg

SEQ ID NO: 46317 - RNA, 67 nt, Homo sapiens
cgaaagccccacccgccgcagcaagcagaggcgaccacagcacacaagccgcgaccacgagcgccag

SEQ ID NO: 46318 - RNA, 73 nt, Homo sapiens
acccaagcccgcgagcaggagagggcgacagggaaccacggggaacagagaagcaaaaggagggaaggcggca

SEQ ID NO: 46319 - RNA, 52 nt, Homo sapiens
caagagaggcccaaaaaacaggagccaaaccccgaaccccaaaaagaaacga

SEQ ID NO: 46320 - RNA, 87 nt, Homo sapiens
gggcaagggcgagaccggagagccgcaggacggcgcggcagagccccgacgccacagaacggacgccccccaacgcgccccaaccac

SEQ ID NO: 46321 - RNA, 73 nt, Homo sapiens
gcggcggccagcgccacgcgcaaaacgggcgggggcaaagaaccacaagaacaaaaggcaagaaacacagcgc

SEQ ID NO: 46322 - RNA, 75 nt, Homo sapiens
cagaacagggccgggcggcccaagggaaaagcagcggccgcaaggcagagaagagaccgcacaacaaaaaggaaa

SEQ ID NO: 46323 - RNA, 69 nt, Homo sapiens
cccagccggccccaagagagggacaccagcaccaggcgcgaacccgggccaagcgacgccgcccagccc

SEQ ID NO: 46324 - RNA, 72 nt, Homo sapiens
gaggcagaaaaggggacacggcgggcagcaagccccagccaagacccaccaggcaggggaagaagacaccac

SEQ ID NO: 46325 - RNA, 79 nt, Homo sapiens
gggcccacccccaagagagccgcagccgccagggacgggggccaccggacaggaaccaccgcacggacaagcgacacaa

SEQ ID NO: 46326 - RNA, 80 nt, Homo sapiens
gggcagccgagagcccgcagggaaggggagaaggacggcagaaaacgagacgccggcggcgaaaaaaggggacaagaccg

SEQ ID NO: 46327 - RNA, 73 nt, Homo sapiens
aaacaaagaagcaaggaccgggaaacaaacggccaaaggagggaaaaaggaaggaggccgcccgggccaaaga

SEQ ID NO: 46328 - RNA, 86 nt, Homo sapiens
gagacccaaagaaacaaaagaaaccgaaaaacaccgcccggacacagaaagaggaagagaacaggaaagaaacacacaaagaacag

SEQ ID NO: 46329 - RNA, 77 nt, Homo sapiens
ccagacccagaaaaaggcccagcaggaggaaagggcagaaaaggcgcgacagccgcaacccaccagcgagaacgcag

SEQ ID NO: 46330 - RNA, 54 nt, Homo sapiens
cgcaggccccacgaggggagggcgagccgccaggggaggcaagcaggggggcaa

SEQ ID NO: 46331 - RNA, 88 nt, Homo sapiens
cgggaccccggcgcccccaccccaccccgggagcagcaagagaagagcgacgcggcagcgagagagagagccgcagcaaagcagaagc

SEQ ID NO: 46332 - RNA, 77 nt, Homo sapiens
gagacgaaaaacaagcaccaggaaggagcaagaccggcacaccacgccggcaaaacaggggacagcgccagcccgac

SEQ ID NO: 46333 - RNA, 81 nt, Homo sapiens
aagcggggcggcccccaaaggagagaaggcccggccaacgcaacagggagcccacgcaagaggggccggggaccgcccagc

SEQ ID NO: 46334 - RNA, 58 nt, Homo sapiens
cgaaaagcacagaccccggaaacacccaccaccgaaccaggaccagaacagagaagaa

SEQ ID NO: 46335 - RNA, 65 nt, Homo sapiens
caaaaagaagcgcggacacgcgaagcgcagaagaaggcgcgcaaagacgggcggaccccggcaaa

SEQ ID NO: 46336 - RNA, 76 nt, Homo sapiens
gggagcaaaaggagaacaacaacccaagccccgggagagggaacacagcaagcacaaccaagcagaagagagagga

SEQ ID NO: 46337 - RNA, 73 nt, Homo sapiens
accgaaggaacggacaacaagaaaccaggcccaagaaggaaaaaagaaaacaaaaacgggagggcccccgccc

SEQ ID NO: 46338 - RNA, 79 nt, Homo sapiens
ggaacgaggcaaggagcaaagcagcggcgcagcccggggaacaggaggcccggacccccagcacaagcgcaggccaggg

SEQ ID NO: 46339 - RNA, 76 nt, Homo sapiens
acagggcccggaggcgaggcgacggacccggcgcagggacagcacaaaaccgagaccgagagccacccccacggcc

SEQ ID NO: 46340 - RNA, 72 nt, Homo sapiens
caacaccggaaaaaacgccagccagaccagaggaacgaacaggcgcagaaacaagagaagcagggagagcac

SEQ ID NO: 46341 - RNA, 73 nt, Homo sapiens
gcgaagcacgcagaggaggcagggccccagggaaggccaggcccaaggaaccagagacgcgaacaccgacaga

SEQ ID NO: 46342 - RNA, 69 nt, Homo sapiens
ccgcccgcacccgaccgcccaccccgccggacacgaacgaaagacggcaagcaggaaacggaggacggg

SEQ ID NO: 46343 - RNA, 67 nt, Homo sapiens
acccaacaaaaagagcgcgcaaaggaccaggaaagcgaccgaaaggaaagcaccggggaagaaaaca

SEQ ID NO: 46344 - RNA, 87 nt, Homo sapiens
gcgggcgggagagaagagccgcagcccgagcccagaaggcggcgaccgggcgcgggcaaggcgacgacgcagccagagcagcaagag

SEQ ID NO: 46345 - RNA, 77 nt, Homo sapiens
aggaagagaggagggcagcaaaggaggccaacaacagcccacgagcacgccaagcgagaggacgaggcggcaaagaa
